United States Patent Application Publication US 2005/0228172 A9 - sequence listing, part 189

SEQ ID NO: 853007 - DNA, 532 bp, Homo sapiens
ggccacaattaattccatcaagaagtaactatcattttactgcaaatatttcacaactttttaaactttacgcttttaactcctactgaccagcctcccttctttctacctctaactaaagtgaataatttaagatttacattccatcggccaggcgcggtggctcaagcctgtaatcccagaactttgggaggccaaggcggatggatcacgaggtcaggagatcgagaccatcctggctaacacggtgagaccctgtctctactaaaaatacaaaaaaattatctggacgtggtggcacgtgcctatagtcccagctacttgggaggctgaggcaggagaatggcttgaacctgggaggcggaggttgcagtgagccgagatcgcgccactgcactccagcctgggcatcagaccragactccatctcaaaaaaaaagacttatattccatcattccacagtagcttagtgtaactggaccacaatgtaagggttggggtgggatgagaaatcggacaagtcagcagagg

SEQ ID NO: 853008 - DNA, 560 bp, Homo sapiens
agtacaattccttgtactcatgtctagcgaataataacagtacctacttcctattgttgcagatatgtgtttcccctcaaatagtgcctggcacatagtaaaaacccagtaagtattagttattattatattaactatcacccaacccctaagtccttacctacatttaattgaaattctatcataccccaacttaattgataaccccagcaactctcaatttaccccttcaggtaaatgtgcctgaaagaaaacgtaagtttaacctacaattctttttcttattggcacagtgctcttaggtcagtccattatcacaaatgcaattttatccttctcataatgcaatatgtcctcgtcagttttcaaacgttcttgccctgctgagactttgcaacatgggcgctggttctcagttcagctccttaaatgaagagcaggaagctattttctccctcaggcctttggcagtgctagccctgactagacagccatcagcccatcctayccactggagcagcatgctttatcaaagtgcacccctaccctccctgccacaa

SEQ ID NO: 853009 - DNA, 583 bp, Homo sapiens
ctcccggagcctggtttttctcatttgtaaaatgagatgatagaacctaccttgcactgctatgaggatttgaaatgcttgtttcaatacatgrcactaaggagacatgttattattattattatattcataatacatcaaatgccaagtaatattttaatgaaaaccttgataggtgtctgatttttttttctcaacattgtctcatcaaggcaccaccacttccataagaacaatgaatctgagagattttcacccattcaccacaattgttcttttttctctctgaaatactttgtcttttgaaacactatcatgtctctgttctataatgaattcagagaaaagttatgaggataaaggagttaacatccataacgcacgctgagctggcagataagagcatcaaaatgagttccagaaagaattctaattaactaaatttattatcaccttatctctcaaagccccttcttgcccccaacctcaagttgaaagttttgtggtcattccccaaaggacacatactccttcgaaccaggaatcagctggcactggttattgtcggtaccacaaaagtact

SEQ ID NO: 853010 - DNA, 644 bp, Homo sapiens
taaaaatattggggctaggtgcagtggaacacccccagcactttgggaggctgaggcaggaggatcgctggagcccaggtgtttgagaccagactgggcaacatagtgagacccgatcttcaaaaaattagcygggggtggtggtgcacactgtggtcccagctgctcaggaggttttattttaatgtttgcagctaattgcagagacgacatgacctgtgtgaaggaagagatctttgggcctgttatgtccattttatcatttgacactgaagctgaggttctagaaagagccaatgataccacttttggactagcagctggcgtctttaccaggtatgtggagtgggacactgagagcagttttgaaggagcggggctgcagtatctgcttagatatttaattgatcctattctctcactttagtttgccctcataggagccatcagcactttctgtttgcttcaggttaagtcagaagacaccaaagcagcattttgcagtttgctgtaaatggccagagaaccctgctattgagttttaaattgagctcgtttaataaacacttaagattctgatctatgtaaagcattgggttagatgtcttttgaaaacacacatgtcaaggaatttagaaacctgt

SEQ ID NO: 853011 - DNA, 585 bp, Homo sapiens
ttttttattttttatttttttattttttggagacaggatcttactctgttgctcaggctggagtacagtgacatcatcccagctcactgcagcctcaacctcccaagctcaagtgatattcccacttcagcctcctgggtagctgggactataggcatgtggcaccatgcctggctaatttttgtattttttgtagagatgagatttcgccatgttgcccatgctggtcttgaactcctgagctcaagcaattctcctgcttcagcctcccaaggtgctggaactacaggcgtgagccaccacacctggcctttttgaaccatttttaagtgtagagttcagtgacatttaatacattcacgttgtgtacaactatcatcattattcatctctagaactttttcatcaccccacattgaaaactgtgtaccccattaaataataactctgtttctctctcccctcagcctctggtaaccactagtctaattcccgtctctatgaatttgactrttctacgtaccttttataaatgcaatcatacaatatttattattttatgtctggctcgtttcacttagtata

SEQ ID NO: 853012 - DNA, 653 bp, Homo sapiens
acccacccccagaaagagagaatgaatagtagtttgagtgatttcctcaagtcattggaaccaactgacagaagccttgattattttggcttttcccaatcctgcaatctgagaataagcaaaacaccaagaaaraaataaaggcaaaaagaaggaagggagaaagagaggaaaggaggaagggaaggagggagagaatggaaggcaggagagaagaaagggagggagggagggagagacaaccaaattcatataagaaattcattaagagcgatgttaagtgtgaaccatgtaccatctgcatcagagtcaccctaggtgcgtcataacaagacagaccctctgaagcagggtttgggaatctgaactgtgagcagtccctcagaggatgcttaggcactctgaagtcagaggcccactagtctggacactgcctaaggccagtccatgtgctcagacctctgcatctgctgctacatctccagctaccaaactacctaataatctcacatacagaagactggtcctaaggtgagacaaagtcccaagtcatcagataaagaggaacttatgttcacaatttgtcgtgggctttggagtgaggcagactccaatggaaagcccagttctccttcttcctagcagagacttta

SEQ ID NO: 853013 - DNA, 615 bp, Homo sapiens
gatttctcttgttcttatgttttaataattaaagcagttgagcacagttacatgctaagaggaacataagagatgtggaagcaatagaagtggtggactgctttgagagggtggaaggtaatggcttggtagtgactaatgaattggtgtgtacttgactgttatgtgtaggagtggcaattacttcagagaagcatccgactctatgcccagttttactcctcggatatcctcattgcttcccccctgggcttgaggaccatcattggtggagaaggagagaagaagagagattttgactttctgtcttctatcgagcttctcatcattgatcaagctgacatttacctgatgcagaactgggagcatgtcctggtaatgctggccattcacattcagtgggacagtattcatatttagagggataagacacccagtggtttaagtcctaaagaattatttaagtccagattagaactcttgtttggaagcaaggacacacactccacattttytaatttgaaaaagtcttttgtccccttttctacccagagattgtccataattaaactgtctagagattaaaattcctgtcagtcattttcaaatctccag

SEQ ID NO: 853014 - DNA, 615 bp, Homo sapiens
gatttctcttgttcttatgttttaataattaaagcagttgagcacagttacatgctaagaggaacataagagatgtggaagcaatagaagtggtggactgctttgagagggtggaaggtaatggcttggtagtgactaatgaattggtgtgtacttgactgttatgtgtaggagtggcaattacttcagagaagcatccgactctatgcccagttttactcctcggatatcctcattgcttcccccctgggcttgaggaccatcattggtggagaaggagagaagaagagagattttgactttctgtcttctatcgagcttctcatcattgatcaagctgacatttacctgatgcagaactgggagcatgtcctggtaatgctggccattcacattcagtgggacagtattcatatttagagggataagacacccagtggtttaagtcctaaagaattatttaagtccagattagaactcttgtttggaagcaaggacacacactccacattttctaatttgaaaaagtcttttgtccccttttytacccagagattgtccataattaaactgtctagagattaaaattcctgtcagtcattttcaaatctccag

SEQ ID NO: 853015 - DNA, 623 bp, Homo sapiens
tgacacatgctcagcctgagaccagcatccccccacctgagtaaatgtgtccttgcagattccttagcatccagcattgttcagttcagcattcagcacagcgtattgtaattgtctgtgtacttacctacacccagacaagactgtgaacgccctgaggagactagcatgatcttattctttctcctagctttggctgccagcacctaagtgttaggtaaatatttttttaaacaagtaagctaattccataattttataaggtagtgagagagtgatttctgccagcagtctcgggaagaggctggattgctttgggtctgtacacagacatgcgtgtatacatgttgtagaagagctggtcttgtatgtaggaaactgtctactttaaggctactaggaaagcacacacacacacacacacacacacacacacacacacaaaatccttccctagaatcttcccaaatcagaagctgaggtgtctgactttcaccattagagagtcatacctttggatatacatggcttcctctcaacatatcttgaaactatrtgaccttgttatcaaaaaaaaaataaatctcaaacatccccagcatctgagatgtatcctcaagcag

SEQ ID NO: 853016 - DNA, 635 bp, Homo sapiens
tagcaccattatcatgctacctgatgttactacagtaatatcatctgatatctagtctatattcagattttgctagttgtcaccaaaatgaccattatagctctttcccctcyggccaaaaaggattcagtaaggatcatatatagcatttggttaacttactgcttttgtttctttaatctagtttagttctcaattggggaacaattttgctccctcagggacatttggcaatatctggagacatttttggttatcacaactggaggattattctggtggttccagtgggttgagaccagtgatgctgtgaaacaccttcgttcacaggacagcccccaaccacaaagaattatctgtctcaaaatgtcagcagtgttaacactgagaaaccctcatccagaataactctcttgcttttttactttttcatgacatcgacatctttttgaagagtccaatctggtttcctgcagtatgtctcacagtctggatttatctaattgttcccttgttatttagatcagtggttctcaaactttgccgtacgttagaatagaagcttttaaaaatccaaatgcccaggtcacatcccagtaccaattaaatcgcagtgtctgggatggggaccaaac

SEQ ID NO: 853017 - DNA, 612 bp, Homo sapiens
aagaaaaaagttaaaattaagaatttttaaaatatttatttaaaaataaaaagactcattaaattaatgttaacataaataaaacattgttaaatttaaaaaaamccctacatttccaaacaaaataattagtgagaaaaatggcattgttttacatttttacaaatctttttaattctgggttaatgaaatgcagctaaatttccatatctacttcttcatttgatctgttgaaatatggtgttttggttgaagcgtatgaagaaattcagtctcacacagataactagaaaaggtgggcgtataggcacatgccctcttattgcactccactttatttttttattcacggatattgcatttcttacaaactgaaggtttgtggcaacttcatcaagcaaatctatcggagccatgtttccaacagcacatgctcacttcatgtctctgtgtcacattttggtaattcttacaatatttcaaattttttcattatgattgtatctgttatggtgatctgtgatcggtgagctttgatgtcactatcatgcagttatgtgttgcttcacaatgggcatgtattctgagaaatgcatcattaggcaactttgt

SEQ ID NO: 853018 - DNA, 628 bp, Homo sapiens
agaaaagaaaagataacacgctagcaagagaagagagaaaaaccttaactgatgcaaccacatgcttttacccattagggtctgccgcctgtgtgtgttatatcaatcatggggcccacaagtctgagattcccaccctcaccctattctcgcattttctgaaagtattggaagagtccccgcaaacaaatctgttccagcattccccatttaacaacagcagaaacacatctagagaggtaaagtgactttactgaaatcaccccagtcaatgctagaaaaggctgtgaaacccagtccagtgtctcataactgaactcggacaaaaggggatggaaaagcttttgaaggtaaaggaaccatcttacattttgatcatgctagtagttacaccttgtatacaataagaaaagttagtctgtacagttaaagtgggtgaattttaatgtatttaaataacacctaaataaacaggaaaaagcaaaaatataaaagtagactcagtattctagggatttgcaaagtgtgcagggctgcttgagaccacaggataaagatggtgagayccttttcctaatagtaacttatgctaccatgttctatagaaacagagtgcttaaatcataag

SEQ ID NO: 853019 - DNA, 625 bp, Homo sapiens
gagctccatgtttgcccctttcagccatgactggagtgactgggatgcagggcaccaagtccctagtctgcacacagcatgaagaccctgggcccggcccatgaaaccactttttcctcctaggcctccaggcctgtgatgggagggtctgctgtgaagacctctgacataccctggagatattttccccattgtcttggggattaatattcagctcctcattacttatgcaaatttctgcagctggtttgaatttcccctcagaaaatgaattttgttttctatagtattgccaggctgcaaattttccaaacttttattctctactttccttataaaactgaagacctgtcacagcacccaattcatcttttgaatgctttgctgcttagtaatttattctgccagatacagaagaatctgtattatctgtatcatccatatcactatcagcattttaagcaaagccattcaacaagtctctaggaagttccaaycatttccacatttccctgtcttcttctgagccctccaaattgttacaacccctgcctgttacccagttccaaagttgtttccacattttccagtacctacagcagcaccccactctactggtaccaat

SEQ ID NO: 853020 - DNA, 590 bp, Homo sapiens
aaaaccgtcaagaacacacacataaaaataaaactacaaaccaatatttctgataaacacagacacaaaaatcctyaaaaaatattagcaagccaaatccagtagtgcaataaatagctaattgatatggtttgaatctgtatccccatccaaatctcacattgaattgtaatctacaaagttgaaagtggggcttggtgggagcagcttagatcatgggggcagattttcataaatggtttctcatcatcactttgttgctgtcctcgcattagtgagtaaattctcactagatctgattgttaaaaagtatgtggcactctctctgtgtcttactcctatttttgccatgtgatgtgcctgctcccacttcactttccaacataagtaaaagctccctgaggcatccccagaaaccaagtgatgttggtgccatgcttgtacgtcatgaagaaccatcagccaattaaacttcttttaattataaattacccagtctcaggtatttctttataacaacgaaagaatggcctattacagaaaattggtaccaggaatgaaatattgctgtattgctgtaaatatatctg

SEQ ID NO: 853021 - DNA, 539 bp, Homo sapiens
cagatatgcatttgtctcaggtgagtgaagggatgacttttaggtctcttcatggtcccttaccygtaaaagtaagtggttaatttgcattgtcagggtgaaattcaacagaactgctttagggtaaaagtctcggggcctacaaggagtttcctcctgagcaaaaggtgagggaggtaagtagctatctattcaggaagaaaatgggaagttggtgtgtgtgacccagttcccagcttgcccttcatcctttgtgtgacccagttcccactgagcccttcagcttagtgagtttctgggcctgagattttattttccttttacagcactcaaaatttttaaaaagttattgtgcaataaattacatgcaagaaaagggttaacatgtcctggtgttagcagttagggaacgtatccaagtcaggcggcaccaaagtatgggtctgcagcaacctcaattcttgcctcttcagaagaaataattcaaccaaggggcataaggcagaaggagatactgaggcaggcttcagagcaggaga

SEQ ID NO: 853022 - DNA, 533 bp, Homo sapiens
acccactatagctcccatgaagttctagtaacagcctcctccccttaccccttcacacccaggggtggtaacagcttcatgggttgctagatcctggtgccacatcatccctgttggtttyttaaccctatacctcctctgtaaatagtcccttcattaaactttcctcaattaccccctttgcatgtgcgatctgttttctaatgggaccctaaaagatacacgagccaaagagagacctgaaggttaggtcaagttgcatttcctaaatactctggatatattccagcatgtaaagggacggccgatcaaagttttcaacattctacaccatagggattggaattagtttggcctagaaaagtttcaaagcaggtactacttgttactagttattaagcagaggtattttttattaaaaatcttggtaatgctcctgtagactatctggctttgggcaatacagcttcttaatgaattctccagagtgaattatttgcaaagtgtgtccctaagtaactaaaggaagtgac

SEQ ID NO: 853023 - DNA, 588 bp, Homo sapiens
ttcccacggttacggtcattatcagaatcattcctctgagagtctgtggcccgtttattacgcatgaaaagtgagagggtgacgttgaaacctagaaagaagcaaaatgtttattccttaagggacaaacttaggcctggcacggtggctcatgtctgtcgtaccagcactttgggaggctgaggcgggaggattgcttgaggccaggagttcaggaagagcctgggtaacacagagagacccccatatctacaaaatataaaataaaattagttgggcatggtggcatgtgcctgtagcctcagctactccataggctgagcaggaggattgcttgagcccaggagttcgaggctgcattgagctatggttgcactactggactctagcctaggtgacagagtgagactctgactcaaaaagagagagagagagagacggagagggacaagaccagaggaggaaggtagggtgggaggtgtgctgtgatgccacagagacagctgggctcatcagaacagacacctatgggaragaaacgtgcaggatccaggtacgagctccactgtggccagtccctgccctcag

SEQ ID NO: 853024 - DNA, 630 bp, Homo sapiens
atacctaagagtggagttgctggatcctaggttaggtgtatcatctacctcttgcagatgagataarttagataaactaacttagatgttaatttagatgttcagctttagtagattctaccaatctgttaagtgcctacaccattttacttccaccaacaatgtatgagagcttcagttgctctacatccggccaacacttggaaggaaattggaagggtagcagatccaggatttagggggagaaagactcaaatagaatgcaaatagctgggcctggtggggtggctcacgcctgtaatcccagtactttgggaggccgaggcgggtggatcaccaggtcaggagtttgagaccagcctgaccaacatggtgaaactctgactctactaaaaatacaaaaattagccgggcgtggtgtcgggcgcctgtaatgccagctacttcggaggctgaggcaggagaatctcttgaaactggaaggcggaggttgcagtgagccgagatcgtgccactgcactccaacctgcgtgatgggagcaaaactccatctcaaaaaaaaaaaaaaaaaaaaagaattcaaagagcctttcaggaaagctgaaggttgttggtcttaatttcagtttt

SEQ ID NO: 853025 - DNA, 545 bp, Homo sapiens
gtctgcagcccgtttattacgcatgaaaggtgagagggtgacgttgaaacctagaaagaaagaaaatgtttattccttaagaggcaagcttaggcctggcacattggctcatttctgtagtaccagcactttggcacgctgaggatggaggaaaacttgaggccaggagctcaagaggagcctgtgcaacatagagagacccccgtatttacaaaatataaaataacattagttgggcatggtggcacctgcctgtagcctcagctactccagaggctgggcaggaggattgcttgaacccaggacttcgaggctgcagtgaggtatgattgcactactgcactctagcctaggtgacagagtgagactcagacacacacacaaaaaaaaaagaaagaaagaaagaaagaaagaaagaaagaaagaaagaaagaaagaaagaaagaaagacaagccaagagaaggaaggtagggttggtgggggtgtgctggsatgccacagagagagctggactcgtcagaacagacatctaagggagggaaac

SEQ ID NO: 853026 - DNA, 506 bp, Homo sapiens
ctctctatatttctctagcatcacacggtcctctgaggaggatccagtcaattccaccactcctgggtgaaatccgcaagacacatcrtcaaatgacacgatccctgtaacggaatgcttctattcaattggttggataaaaattaaaatgataatactttttaaaataaagaaaatattcttcagagagaagctactctttaaccatttcaaaaagggcttttctgagatattcgcaatacctatatatagcaaaggacttttatactacagaaactataaagaactcctacaaacaataagataaatatagatagataatccagtagaaaaaacagaaaaaaagatttgaacaggtaattcacaaaagaggatatccaaatggccaataaatgtatgaaaaggtgctcaccatcattagtcatcagagaaaggcaaacttaaaccacagtgagataccactatatgccaacagaaaactgaaattaagaccaacaaccttcagc

SEQ ID NO: 853027 - DNA, 530 bp, Homo sapiens
catacactaatttgggattcttcatagcatggcagactcagggctgtttgactgcttacatagtagctggctttcctgtaagtgagtgtcccaagagagtcaggcagaagacayattatcttttattatctgacctcacagagtatcactcctaccatttctactgattgatgggaagagtgtcaaaacctttatgaacatgattttaaaacacaacattcagccacttacaaaatatcttctgtttatgagctattctgagtgtccatagcaggaaagggaaaggacaaaaatacacggcatgtgatgtacaaggtggcttatatgtacacagtgtctataatgacatatctcagggattatatggatataaatatttaaatccagaaagtcatatagagttgttacttccaaagtgtttgagggtctcttagggtaagcgtacatgtattatgactcatactacaagacatgcataagtgtcctgcttgagtgatgaaaccactctatatttctatttatttaaatgg

SEQ ID NO: 853028 - DNA, 391 bp, Homo sapiens
cttgggtggcattcagttagggccttacctatccacgacttcacgtttttcctgacatgtgaatgaattctggttgtgtaaaggattcttgggctktgggtcttttctctcaatggtctgtcttctagtttccaactgaaaatgagaggtcttctttaccttcatttggctaagggactgtgggatgacagagaacagggaagcttcttcctgcaacctaaggagggttgacatcctgcccacagcccacaacctataataaaaggaccaggcaaacaatgtggatacatgcactgctgtatcagacagatgatcatctgaaaaaaattaataatgaatgctgaaggagatccaaatgtaatataaaacaaaacaaaatatcctctggaga

SEQ ID NO: 853029 - DNA, 538 bp, Homo sapiens
cccatttgagaatagatacatttccttctgtattatttctcattttatttcagcaattctgaaagtgttttcaatgtacaacaaaaataccagaaggctttaaaataacaaactgctcagattgatattatatgaaattactagccttaatggaaacttttgggtgggtttagctaaaataaaatgatccaaaagatagggcttctttgccatcacatacagtgacttagaaaaggtaccctctctacactgataagttggaaaaaagattctgcctctggcttcacagagtgcgagtgaaacagcaacgcttggtaggtgaaacaagaaagattttgatcatcactcaagcttcttggctggctataaattgcatgatcatagcaagaagtcctacataaaagcacatagatgtctaataaaatcagcagtgtttactttctttttttctttttctttctctctttctttttttttttttttttgagacgagtctcgctctgttgccckggctggagtgcagtggtgcgatcttggc

SEQ ID NO: 853030 - DNA, 541 bp, Homo sapiens
tataagggaaaaaatagctacttaatgaaaaagaagtcagtaatagaggaaatggggaactaaatgacatasgcacatggaaaacaaatagcaaaatgacagacaagtcttttcttatcagttaatgaatcaaatttattaaattctttgatgaaaaggcagagattgacagacttggaaaaaagtacacatgatccaattatatgctttatataagagccaacattttagatccaaagaccaaataggccaaaaaaaagaaaaaagaatctatatgccatgaaattggtaagccaaagagaattgaattggctattttaatatcagacaaagtagtaatacaaaaatggttactagaaacaacaacaaaaaaaacactgtgtaatcataaaaggccattccaccaagaagatataacaattataaacctacatgcacctcacattagggccccaaaatacatgataaaaagctgaaagaattgaaataaacacatcaatagtaatagttgattactattatgccccattgtaaatgaata

SEQ ID NO: 853031 - DNA, 633 bp, Homo sapiens
tggggaaggagaacaatcatatattcatttgcgtctggtgggctgggggtgactgcatctataaagataagctatcaatttacattgtcatggtgaaattttaatagaaacamcttagagtaaagatcttgcagctcactaggtattctcttatggaccaatatggggcaggcatacagattttcatcttgtagccatttcatttaggaaccaaaaagggggaggcagtttgcatgtccccagttctcaccttgacttttccctttggcttaatgagtttgaggtccaaagatttaatttcctttcacatttctaaactgataaagttagagatcatttgttacacagcaatagataacaaatataactatctccagctctagagtttcatgaatactaatgattaaggacaatccttttgacttttatattttctaaattatatgtatttgagtgtctggataagaacctctttattatatatttaaaaaagtatttttggtcaagatggctgactagaagcaggtagtgtgcaccattctcatggaaaagaagcaaactggcacataaatactgactcttcaagtggagcatctaagaaaccatgtcaggagccatgaaggaagaaaggag

SEQ ID NO: 853032 - DNA, 560 bp, Homo sapiens
tttcacccattcaacaggccccagtgtgtgttgttcccctctctgtgactatatgctctcattgttcagcctcaacttatgagtgagaacatgtggtttytcattttctgttcttgcactagtttgctaaggataatgggttccagctccattcatgtccctgaaaagaacatgatctcattcgtttttttatggctgcatagtattccatggtgtatatataccacattttctttttccactctatcattgatgggcatttaggttgattccatgtttttgctattgtgtctttataatagaatgatttatattcctttgagtatatacccagtaaagggattgctgggtcaaatggtgtttctgcctctaggtctttgaggaatcacacactgtcttccacaatggttaaactgatttacattctcaccagcaatgtagaaacattcctatttctctgccaccttgccagcatctgttgtttcttaactttttaataattaccattctgactggcataagatggtatctcattgtagttttgatttgcatttctctaa

SEQ ID NO: 853033 - DNA, 619 bp, Homo sapiens
cattcaagttgcaaaattctccccctttttttttatttctacgactaataggcaaactattgatcactgtaatttcccatgtaatttgccaacaggtkaaataataaacttagatattacctaatccacctgatggttataactttcattgtacattaacaaatggatttttctttttaaaatatgtcatgcacattgttgataaaaacctgcagtcccaagtaagtgaaagactggcccttgagcactgatgagtctgagtttctgaacctgtaaatctctggtcttgaacagtatggtctttaggttactatggtaaagatctatttatgtagtcagcagttcacccagagacatctgtgtgtattacagtgtagaggatatcatttaatttttcgaatttctatatacaaatatcgttttggaaaaaaggaataaaatttgaaaccaaactctaaaatgatcttttctggaattctccattatgtatcacagatgaacttgctgtttaaagcaaaaaatatttaaaacatttatgatcagtttggagagtactttgacataggtcctaggtccttttgtattatgaaaaatcaactatatctacatacatttttaa

SEQ ID NO: 853034 - DNA, 577 bp, Homo sapiens
tcctggatatatgtatccatttacctgagggcagaactatgaccctttgtattatttccagatcctaaaataygctatgtattcaaatctattggttgttagtgaaggaaaaaaaagaaagtaaagctaattcacaactcatcataatcactaaaagcccatatgtaataattaattaaatcaattcatactcatttcagtgtctgccaactgcaagggtttttgaagatataaacagagatacatgataatccctgtcttcaaatgaagtacagtccacttaccaaaaagaatacccatataaagataaaatcactttttgccagacactgctttgaaaacaatatgagctcttcaatcctcacaatgatgctattattgtactattagtatccctacttcatatatgagaaaatgcacaccaagtttaagaaactttcccaaggcctctctactggtaaatgaaacagccaggcttgtgtcccaggctagctggctcctgagcctacatgtttaattactgcaagatttaactacaagaatactctatttaaagtattaaatagagtatttaaag

SEQ ID NO: 853035 - DNA, 548 bp, Homo sapiens
caccacacctggctaatgaaaaacaattttttttttggagagatgagctcttaccatgttgcccaaggctggtctcsaactcctaggctcaagcaatcctcccaccttggccttccaaagtgttgggattacagacatgagccactgtggcaggccttgaaattcttaataagttttttttttttttttttttttgagacagagtctcgctctgtcacccaggctggagtgcaatggtgcaattttggctcactgcaacctccgcctaccgggttcaagcaattcgcctgccttagtctcccaagtagctgggactacaggcatgcaccaccacacccagctaagtttttgtatttagtagagaccgggtttcaccatgttggtctggctggtcttaaactcctgacctcaggtgatccatttgcctgggcctcccaaagtgctgggaatacaggcctgagccaccatgcctggcacctgtaacacttttctcttgaaaactgcattctctacattccctttcctcaccaactaacagaggaagaggc

SEQ ID NO: 853036 - DNA, 484 bp, Homo sapiens
atttatttatttatttttttgagacagtctcrctgtgtcacccaggctggagtgcagtggtgtgatctcagctcactgcaacctctgactcccaggttcaagcgaatctcctgcctcagcctcccaagtagccgggactacaggtgcccgccaccatgcctggctaattttgtatttttagtagacacggggtttcaccgtgttggtcaggctggtcttgaactcccgacctcaggtgatctgcccgcctctacctcccaaagtgctgggattacaggcatgagccaccgtgcctggccttccccaccattttctaagagggtcacgaggcattccagctcattcttgtggttcctggagttctggtccatatgccttccataccacctacttcttcccaccagtcctagcctagcctgtcctgtgttcttggcagtgggcagtactcctcccacaggatcctggagcaagcactgcctttgca

SEQ ID NO: 853037 - DNA, 519 bp, Homo sapiens
catttcccttcttcctctccctacctgcaaatcagaggatccaatctgtgggttgaytcctggaaattctagtttgaggggaatttccctgaggaattatatgagacactggcagggctatcttcagaggcatgcaaactgtgtagttatgcatagcccatgctcagaaaggctctgtgcttggttgaatgttttgctgttgcctctttttttttttgagacagaatcttgctctgtcgcccaggctggagtgcagtggcacagtctcggctcactgcaacctccacctcccgggttcaagcaattctctgccttagcctcccaggtagatgggattacaggcacccgccactatgcccggctaatttttgtatttttttttttttttgggatggagtttcgctcttgttgcccaggctggagggcaatggcacgatctaggctcactgcaacctctacctcccaggttcaagcgattctcctgctcagcctccagagtagctgggactacaggcatgc

SEQ ID NO: 853038 - DNA, 640 bp, Homo sapiens
gcttcacctccctgacaatggtttctaggcacacacctccattctgttcttgcttctattggtttctccttcatcactcgtcaataagaaacaacaacaaaacccaggcrtttggccaaatgacctttccacctgtcttatctttctgtctgatttcattctatgatgacagaatggaaaatccttgaaggcaggtgctatacttattcataatttatattcaagaccaggcatcttttagatgtttattaaattttatataaaagcattaaaaaactttgatggaatgaccctggaaatactttatcttctctttttattttcttcttctcttttagtggctggtagaaaaaggaaaaggttggggggtaagtcatttagatggggaaagacatttctctaaatgtcaatacttatgaaacaccattttaaacctttataaatgattatcttcctcagtactgatgaggcagtttcacattgctgctcaatttatttactcaggagaccaatttatttcactacctctgtactaactgtttgcattgacatctaggtctgctttgagcaagcaactgtgacaagttgtttattgaactgtaaacaggtattgtctgaagctaaacaatggctttatcta

SEQ ID NO: 853039 - DNA, 607 bp, Homo sapiens
tcatgcttggatgtcctcctccatactgaaggctaaataatatacacctgtatttagttcttttgaagttttaaacatttattctctcagtttcatgttgagtgagactattttcccaatagttgtcccatttggaaactgatttcccagcaccactgactaaatagtacttgcccccgaccaatttgaaatgttggcttccgcaatattatatttgtatttatgtctgggattacttgtttccattctcttccactgatctgttatttttgttccagttttagatatgtggcattaccatgtttttctaaatagaaaatacttgccgggcgtggtggctcatgcctataatcccaccactttgggaggccaaggcgggtggatcatctgaggtcaagagaagagtttgagaacagcctggccaacatggcaaaaccgcgtctctactaaaaatacaaaaaaattagccaggcgtggtggcaggcgcctgtaatcccagcttggggaggatgaggcaggagaatcgcttgaacccgggaagtggarattgcaatgaggcgagaacacactactgcactccagcctgggtgacagagcaagacagact

SEQ ID NO: 853040 - DNA, 626 bp, Homo sapiens
agatggcagtgctgggggctcaggcarggtacagtaagtccacagctgagaagggctgggcactgacaccccctaagtagctgaggctgccactttactttcctggggtcagggagggtaacaagactgtccgccctaatagaaggcaaaaatgcacccgttatgtgatagacaggacgtgggaggagccccagggaggagcagggctgggctgtcccgcccagtcccggcagggacttctctgcttggcctggggcctctgcctggccgggtcacctttgtaatctgccaagcctgctgtgaaagccagggctgctgggactggagtggcttggcctgcactcctgaggctctgcacccaggcacatcaagcctgtataggcggccaggggagaaatagacccatccagccgggccacacattctgatggcagagcagctggggacgtagggatcgcagtttccggcctgtgcccgtaggacaccctggccacctgactcccctccctgccccatgcctgtgtctgctggtcttgctcttgtctccgtgaggtgccacgctcccctcaccttatggctcctcccaagccctgcccatcttgcccattcctagtgtgagctgcctg

SEQ ID NO: 853041 - DNA, 514 bp, Homo sapiens
tggacaaaccagttccccctctctgagaagccacacagcaggcggcattctgagaccagcattgccagggaccacttcttctggccaatgacattcacacctggcttcaaaccctctggaggagctctccttgcacatccctgtaggcatttgcctttcagaggcaactgtggatgtggcagccctgaagttgggaccagataagcaggaagggagaggaaatgcatattaatgcagagatttgaacccccataaagaacccagttcgtaagaatctaccagaaaaacaaatggctatctgcccaacctcccaggatcccttgtagggggaagccagctgccctgttgtgaagacactcaagcaatcctatagagaggttcacatggtaaagaaaagaggcctctagcarttgccaacaaatttcagtaacttgccaggtatgtgagtgagctactttggaagtaggtcctttagcctgagttaagacttcacttgaacgtagcctcagatgac

SEQ ID NO: 853042 - DNA, 574 bp, Homo sapiens
atcattatgattgtacatgtacaagtgcaacaaccgcagctggagagcatgtgactagggagcgcagactctttggggatgagggtctagttccaccaccaggaaagccaccaagaccagtagcgagggtaagtgaaggtgaggggattctagattgtacagtggagaagggaagctgcatatcgtttgtggcctggagcccaactgctgaggctggggctgtatcttatcctgctcacgtgcctcttctaggtttctgagcaagagaggccaccagaatcctggacaagccacttcctcagtgagtacggagcaggggtcctgagaagcacaagaagtaggctggtggacatgggggtgcactgcccagaccctcttcaaaaaaaggctgcctgccaatcatagggagaatggcaggcagacagcctgctgcccccagcatcttcagggttttccccagctgtggaaggtgwcttgtctttcccagaacaatccacatctggggaccaggtgtgatgagagtcaacaggcctggccatttctgcccagcagggcacaactctgatggaccctc

SEQ ID NO: 853043 - DNA, 630 bp, Homo sapiens
aatcccagcatattgggaggattgcttgagcctaggagttcgagatcagcctgggcaacatagtgaaacctcatctctatttaaaaaaaaaaaaaaaaaaaaaaatatatatatatatatatatatatmtatgtcttaatgttaataacaattccctaggtcactagtaataagaagctatgggctttaaacttaaaaggtgctaaaccagtttaaatgtaaaacattctcataatagaattgcactgtatttcttttctactttgatgcttttccaaagtgctatagttcctgtgagatttgtgtcctgcacagaatcaaatgctaggtctttcacttttggatggctgagtaccataaaacatgatttatttggtaacaaaaatgtttccaggagtttaaaaagggaccactactcagagctaaaaaagttctaacagtcactttttaaaaaagctagtttatcatttgtttataaagaaaaacacaactctgtcctacttcctctaataaaaatggaaaatattaagatgagctgtgtgcttataaagaggtgctacacaagtcatcttacgtttctagtcaacacaaacattgcttcagtgacacttaatattcaatacatgatgc

SEQ ID NO: 853044 - DNA, 594 bp, Homo sapiens
gacttatgcatatcatacctgtcaagctacctagcaccacgaatagaactaatattaatggatggactaatacaaggatctaatatatgacagtgatagtcttaaaaacaccgatttgttattttccttatatataatccaaattcctttctatccttctggcaatgtttctactgcctgactaccttaaataactatatagtgtcaatttcttgcttgggccaggtggtggctcatgcctgtaatcccagcatattgggaggattgcttgagcctaggagttcgagatcagcctgggcaacatagtgaaacctcatctctatttaaaaaaaaaaaaaaaaaaaaaaatatatatatatatatatatatatatatgtcttaatgttaataacaattccctaggtcactagtaataagaagctatgggctttaaacttaaaaggtgctaaaccagtttaaatgtaaaacattctcataataraattgcactgtatttcttttctactttgatgcttttccaaagtgctatagttcctgtgagatttgtgtcctgcacagaatcaaatgctaggtctttcacttttggatggctga

SEQ ID NO: 853045 - DNA, 574 bp, Homo sapiens
atttctccctctttttaggacaccagtcatattggattggaaccccactcttctgaccttatttaaccttcattagctccttgaattccctgtctccaagtatagtcacaytgggcattagggattcaacatatgaatttaggggggcacagttcatttcataacagggatccaaatccagctgacaattcaagtgtttctttgtgaggagagatgcttgatggaataggaatctggtattccattatccttactcaatataccatgtaaaacatcctaatgttccttcttacagcaaccattcttcgacaactgcctatcatttttagtcaacacacacccaaacccacgcacatcttcttgttatcgcttatgtttttttctctctccttgtccaaagctgctgaaggagaggaaactaaggattaaacaatatactcaagacatctttgagatataggaacccaatggctgtgtattgttgttttattggaattaaaaattccagttaaagttctgattagaactttggccctgcctacacgtctttttcttgcttcttcagatggaagtg

SEQ ID NO: 853046 - DNA, 636 bp, Homo sapiens
gactttagattacttgttccttgcctctcccagtagaatgtaggcttcaygagaacatatactgtgctttgtttaccactgcactccctaccttcaaaagtgcctgataagtagtaggcactcaatggctgtaaatcagatgaataaatgacccacacggtgggttaatctgccaaacgtagagtgcctacaatatataaacaatccaaggaatgaatggatgtgaccagggcattgataaagaaggaaatgtgacggatcgtactaatatattgtaaaagatcaatatcattagtgtccccataactgcatattaaaatacttagataacctttccatttagaagattagtaccaattaaaaattactgatactattcactgctgaaggagatatgaggaaatggtcattattttacactgctggagaaagtttaaattgctactaaaataatctggtaataaatattaatgtgaaaaatgcgaactcctacgaatgttctagagagaatctataatatagatttaaaatcacataaaaaaaactctattgcagaattgcttgtagtattcaaaagtaaacattcttttttaaattttattttttaattgacaaataataattgtttatgtttgt

SEQ ID NO: 853047 - DNA, 600 bp, Homo sapiens
cattattttacactgctggagaaagtttaaattgctactaaaataatctggtaataaatattaatgtgaaaaatgcgaactcctacgaatgttctagagagaatctataatatagatttaaaatcacataaaaaaaactctattgcagaattgcttgtagtattcaaaagtaaacattcttttttaaattttattttttaattgacaaataataattgtttatgtttgtgaggtacatagtgatgttttgatgcctgtaatagataataatgagaccagagtaattaacatatccatcatctcaaaaatttatcatttttttgttttaggaacattcaatatcctcctcctagctatttgtaactactaatataatattattgttaaaattgttgtcctgcagtgctatacaacactagaactattcctcccatttggctgtaattttgtatcctttaacaaatctctccctgtccctcccttcctcctatcagtctcagcctctcatatcctctgctccactttttatttctatgrgatcaactttttttagcttccacatatgagtgagaacatgtggtgtttaactttctgttcctg

SEQ ID NO: 853048 - DNA, 522 bp, Homo sapiens
agatagtcaacagcctttaatcaatcttaggaggatgaaaataagccagataaagccattggaagaaagtaagtgaaaaattctatctctttctgagttaaagtcttattaatagaggttagattagttcttctatcagtacaattcagtttcggcttttaagatgttaccttaatgcagaaggccataataaatatgttggcttatcccaacagaattttcaaactcaatgaaataagaacaccacatttcgagaatttcaggattgtgatttttggttttccagttttaataatctgatggtgggtagccagtctaatttacaagccacgtaaagttatacgtataactcgtttgaaaaactcaatgaaaaatacctttaaatgtccaaatctgtggagtgattattaatttgctttcgtctgcctgctgatactagataacaagtagaayatttttagctattttaactactcagagacatagtcttgctcatataattataagtatttgcaattactt

SEQ ID NO: 853049 - DNA, 661 bp, Homo sapiens
aggtctgagttctaaaatggccctgctaacagacaatctgggacattatatttaatctccctgggccttggttccctaagctgaatattattttacaaataaggtaacaaatgcaagtattgtgaaagaactgaaagtaactaataaaatatcaagtatttatttcacaattttttctattttttatattgcaggggagaagaagtagactagtctaatttacaaagtttttttcccatatatatcatttaaagaaaaacctaccagttccatgaaatgttgtgccaacaacacgaacacaacttggtactcgaagatcccaaaatctaacagtcttatcttgggaaccagatgcaatcatccagccactccaggtataaagtgctaaaatatgccctataaaagatcatatactcaattattaaggtgggagagtatctttccataacatattcaaagctaagcactctagagttgggcaaggtggctcatgmctataatcccagctactcaggaggctgaggcaggaggactgctggagcccaggagttcgaggctgcagtgagctatgatcaagccactgcattccagcctgggcaacagtgcaagaccctgtatctgaaaaaaaagaaaaagctaagttctccttatttacagggca

SEQ ID NO: 853050 - DNA, 562 bp, Homo sapiens
attgctgcattcaccacgtctcacctgtcttcagggcacttagcttttgggtttggagctatcccagggcactgctcataaaaggagacacctcactttgctgcaggcctctccttccaggcttttttctttcttttacgagtggcttggagtctgacttgaaggagcgatcataaagagaatgattgcttttacgctggctgcaatgagaaaaggattctgtgaggagggagttatacatggaaatcaataccagcattggaaagcatccccttttgcctatataagtgctacccacagggtcaatagctggaattaacctggaccctttcattattattgttatttttaataaagctgctttacgatagactctgatatgagctcccaggctgcagctgcaccgatgtaaagggagtgaaaaaatagttttatataaaagttatcttttgtcccagtgggtaccactccccagtcscacctccctccccgtctcagtctctatagactcagagggggagagtgaaattcagctttttataaacataagcagagaccaaca

SEQ ID NO: 853051 - DNA, 498 bp, Homo sapiens
atgacaaataatgctgcagtaagaattcttggacatatgctcttgaatactttctgtggcatagatttgttttggcttgctggctgaaattgtaagagcatttcaaatttaataratattgccaatttttccttccaaaaatgtatagcagtttacattaacaataccagaaaggggtcatcattctcctgaatacccaacagtactgaatatattgctctttagaaatttttgccaggctgatgcatgaaaaattctatcttgttttagtttgcatttctctgactactgctgagattaaacatgttttagatgtttatgaatcctttggatttcttcttccatgaattgtctaattatgcatgtggctgtgtatgtgtgtatatgtgtatgcatctgtatgtttgtgtgtgtatgagatcaagtgattttcctattgggtaggttgtctttttgaaaatctagtgtaaaggtgcattagttaaaatcaggcctagc

SEQ ID NO: 853052 - DNA, 492 bp, Homo sapiens
ttcatttagaacttcacggtcctgtttcccaggcagtaaagttctmtaaacaagaatactcattctcaatattatcaatgactcaaagacatgaacatataattcacagaaaaaagcacacaaaatgttcatatttgctggtaacaaaagaaatgcaagtaaaacatgaatttaaacaaaaattaaatattatttttgtccataaaattgatattacccaaaaatataatattcaataattatgagggtgtagtatagggaaagaagtatacattgatataaactctctggaaaactattcttttgtgatataattccaggcttgaatcacagacacatggagacacatatacagcataatatttagcctatcagaatatatatacacacacacacacacacacacacacatatatatataatgtacacttttgttaaaattgtgaaatcaataacttacttggattctagcagctgaagtatgtctggagt

SEQ ID NO: 853053 - DNA, 492 bp, Homo sapiens
ttcatttagaacttcacggtcctgtttcccaggcagtaaagttctataaacaagaatactcattctcaatattatcaatgactcaaagacatgaacatataattcacagaaaaaagcacacaaaatgttcatatttgctggtaacaaaagaaatgcaagtaaaacatgaatttaaacaaaaattaaatattatttttgtccataaaattgatattacccaaaaatataatattcaataattatgagggtgtagtatagggaaagaagtatacattgatataaactctctggaaaactattcttttgtgatataattccaggcttgaatcacagacacatggagacacatatacagcataatatttagcctatcagaatatatayacacacacacacacacacacacacacatatatatataatgtacacttttgttaaaattgtgaaatcaataacttacttggattctagcagctgaagtatgtctggagt

SEQ ID NO: 853054 - DNA, 480 bp, Homo sapiens
cgtggagatccgaacttctatctgaattattttctgagttaaaaataatgagattgtataaaaacttattttaagatatttattctaaataaactaataaaaacaaacatggaattatataattttatggctatattatttatttatttattcattgagacagagtcttgctctgttgccaggctggagtgtagtggcgccatctcggctcactgcaacctccgtctcccggattcaagctattctcctgcctcagcctcctgagtagctgggactataggcgtgcaccaccacgcccagctaatttttgtttcatcatcttgtccaggatggtctcgatctcttgacctcatgatccgcccacctcggcctcccaaagtgctggaattacaggtgtgagccaccgygcctggcctatattatttattagagaggatttattccataattaacttgacatggcaaatataaagacccata

SEQ ID NO: 853055 - DNA, 537 bp, Homo sapiens
gtgttaataccctttttttcataaaattaaacagtctagtaccatttgttgaraagacttttcttttccctttaaatggccttgatccctttggaaaaaatcagtttaccatgtatatataggtctacttttgcactctctattctgttctagctctctgtctatgttgataccaatttcaagatgtcttaagcaatacagcctaatagtgtagtcattccttgatctgcaggggaggaattccaggacaccctgtagataccaaaatctgcagatgctcaagtcttttacataaaataacatagtatttgcatataacctacacacatcctctcatatacttctcatatactttaaatcatctctagattacttataataatacaatgtaaatgctatgtaaatagttgatatactgtattgtttttaaatttgcattatctttattgtggtattgttatttttattgtttttttcaaatgtttcctgtgttggttgaacctacagatgcaaaacccacagatatgagctgactgt

SEQ ID NO: 853056 - DNA, 555 bp, Homo sapiens
tgcaatctgatccctcacatgtgcagttcacaatagggttcatgctcctataagaatctaatgctgccactgatctgacaggaggcagagctcaggcrgtcatgctcacttgcccgccattcacctcttgctgtgcggtcacattcctaatgggccacggacccgtgggttagatgacacccaggagacacaattagaaaaatccaaaagatgagaaactctataggtcacatggtcccatttcttcaaaagcaccttgcaaaggaaagagggagtgagagaaggacataggaagagcacacagatcaagagactgtgtctacactttatttgaatcctgatttaaatattaaactatggggagagggagagagaagagaattgaattggggaaatgtaaacactgactggatatttgatgatagtaaggaattattgttttttgtcactgcaaggataatgtgaaatttcttcaaaataatcaatagccagcgggagcgagtagaagtaaggatatagatgaaatgatgtccatgagctagtagttgaagctat

SEQ ID NO: 853057 - DNA, 569 bp, Homo sapiens
agtagacacatttttatttattaatgtcatattaactgacttttcattatatgataggtgcttgggatgtatcagttaacaaaaacagacaaatctacctgctaatgttgagtttacagtctgattttatatttgaagatgttatattcataacattcttacattttactatgagaagtaagtaaattatattgtatattaaacgatggtaaatgctttgcaaaaagtagagcagatgacgtcaggtgatattaaagatggagaatgtctgtttgtgctgctataacaaaatatcacagacttggtaaattataaataatataaatttatttctcacagttctggaggctggaaggcccaagatcaagatgccagcaggttcagttgtctggtgagcactgttctttgcttgcatccaagatggcacctcatttytgcagccttcaagggaacaaacgttgtatcttcacatggcagaagggacagaaaggagtacttactcccttatgcccgttataagggcattaatcccattcaagaggattctgccctcatgacttattcacttc

SEQ ID NO: 853058 - DNA, 449 bp, Homo sapiens
gttgtagagtaatatgtaaccagactggagaaccacagcaatgctctctcctctgcccatcacctccccttgkcccctccctcttcatcagccccattttggagaagggagaaagaagggagaggcagcagtctcctcccaggtggggccggactccagggaaggagaattttcagaagttgctggagttgccgaatctgtcagggcccagggttcacagagcagtgatggaggagaaaggagaggaagcagatctaagcacacatgggcatcaaaccagaggaacaaagtcacatgcagagggctgcacatagacacagggaaacacacacacggagatgcacagaaacacgcagaccccatgcagggacctgctttcccgccacagaggaaagcaatctgatcaaacagacccactgtgcacccagccctccatgcttggggacaac

SEQ ID NO: 853059 - DNA, 653 bp, Homo sapiens
caaatatatgtatgtctgtgtctctacatagacctacatttattagtcaaacaataaaagaaaatttgttccagttataaaatgctcaagccaaatttgtcacacagtcaagggcttactttgttctttgaatcatccctgaatgacctgtgtacaaattacaaaaccctaaagagttaaaagtgtttgtttcacaggaaattggaagaaatttatgtgcgcaagtgaaactgaaaggtcgaatgtgtgactcacatctattgacagatggaatgagcataacataagcagacagtgactagaaaacaagccggttgtgtgaaagtatttttagagactaatttctacccagctgtgtcatctatgaatgggagaagtttgagaaagttacctagggatgtctgagcttaatcaagtgaaagttaatgatactgatttggcttaaatattcacttcaaactttggtgtgcaaacatcaaatataccagtatttgaactaattaccagggaagctggattgttcctttatcaaaatgacataattstctttattaagacctctcatgatacctgaatttttagcaacataaacaataatggctcacatttataaactcatttacaatttgaatagcattttcatattcctgtga

SEQ ID NO: 853060 - DNA, 585 bp, Homo sapiens
cacctctggttctctttttctactatggaaaccataaacccaggggaattctctttgtgtagtgctgtgccaactttgggtaggagaaggggtagtgcaggctaagtccatttctcctccttttctaatgtttttattcaattttgtggcccttgcaggagtctcagtctcattcccaaatattggggttttcacaaaagtgttcttctctgtcaatagctgctgcttgtactttctgtggaggagggtagtgaagcctgagacctactattctgccatcttgctgatgtcactgtgtttcagcttcttaacttgactcctgagctctttcagggatattttcattcatggatagttgtctaattgtgcatggttgtttatgtgtgtgtgtgtgtgtgcgcgtagggggaatgaaagacaagatctccttctctgccatctggctgacatcaccttctctcctctattttaaattgtgggtaattwtaagtttgattttggaccttttgattttgaagtgtcactatgagattcaaaaggaagtttcttcaagtagctccttggatttatggattggagcacaga

SEQ ID NO: 853061 - DNA, 607 bp, Homo sapiens
atatagaaaaaaatagacttctttttatttttttcctgctatgaattgtacttctttttctattatgaattaacatctacattctatttcttactggtctgttgtcaaaagttctgttcctccccaccccccattcattctggcgtagagtttttgaatggtaataatggcagatatcatgctcttgccttggactagtggcccataggccaaatatttctcagcctaacacttatctcagggtgactcggcttttccacactctattgtttggaaaacctacataggaaaatgaaaatactttacacttaggtaaaaggtacacttaacataccatttggttcaattctcaacttttattctagttatgtttcaacatttgaaaactgagaatcagagaggtgatatgattttacccagggcacacagcttgcagttagagctgggacttaataccaggacttgggctccatgttacatggtcttgtaatcttgctggagttgatgttcaggccttgtgatggagaaaggcgctrttttccaagagtttaaattagacattgctgttcagtttctagattgttcatagattaaaaaaaacctcagc

SEQ ID NO: 853062 - DNA, 638 bp, Homo sapiens
gtagaattctttagtgctgcagtaatagaaatggctgsaattctacaatgtcttggggaaaccttgacaaggtcctaaaatggaattacagattaagaatttttacatttctattctccacagtatgaaaataatgagtcgcttacaagtcttaaagacattcatgaatgtttcaaatcctttctcaagtagaattgcaacatagactacaatggaaacaatgtggatatagagagaataatgttatcattcccatttccacatgctaatttacaaccaggccttgatttagaaatgcaatggcagttgaaaagcaattatggatcacttggatgcagttttcctgatgaagtctattatagtttcaggagtcaataaacccctaaattatcttgaatttttttaaacaacttgttgaattaatgctgcctagtaccatcctaccgagagcaaaactttgctgtagctaataaactccttcaagattgctgttgacaagttaagttttaaacagttctctttgaaggtgtagtttgaatattgcagtttttctgatttgtttttaatatagaaattatgcaaatcatatttaaaacagtatatttaatttggcagcagttcatggaatgaatggagta

SEQ ID NO: 853063 - DNA, 470 bp, Homo sapiens
ataatgggatcacagaaagaacactcctgaaggaacagcaaagaaagtgtttggacttggggcccctgggggagccttgggccaagaaaaaaataaatcatctttcctggagacagagggacwtgaaaggggtcttgaaagctatgagggaaaagaaaggcaggcgacaactattgtgatcaaaatgtggaattcacccaaactccctgaacagaagtccatcagggtaaagcagacagactgtggtttcctcgtgcctcctctctttcctgttctcaggggagaaattctatcctccagcttcttgagctcctgccccctgccctaagggacagcctgtgtggagccaggagtagtcaagaccacaccctcacgtgggaggaggaaatctcccacctcagtgtggggggattccaagctgggagcactgccatccccccacagccctgcaggacacagggagcccacca

SEQ ID NO: 853064 - DNA, 589 bp, Homo sapiens
taagaataggctataccaggtagccaccaagcttaagtaaattctatgatgtttgcacaatgacaaaatcacctaatgatgttgatatagtttggctgtgtcgccacccaaaccttatcttcaactgtagctcccataatccccatgtgtcgtgggagggtcccagtgggaggtaatcgaataatgggcgtgggtttttcctgtgctgttctcatgattgtgaataagtctcagaaaatctgatggttttataaagggcagttcccctgcacatgctctcttgcctgccaccatgtaagtcatgcttttgctcctccttctccttccaccatgattgtgaggcctccccagacatgtggaactgtgagtccagtaaacctctttcctttataaattactgagtctcaaatatgtcttcattagcagtgtgagtacaggctaatacaggtgcatttctcagaatatatccccctcattaatcaacacttggttgtgtcaacataaatgttttttgttaacattgctttygtagcaaccctggattttattttatttcattttgttttttatagagaaagggcctcgctct

SEQ ID NO: 853065 - DNA, 600 bp, Homo sapiens
ccatatgtagtaaattaaacagtacagaactatgaatcaggcttaattgtaagaatagtagaatattgttttacaatatattctgtatactaattcttagaatgagaagattgagactcacctgacctataraattagcaattctgtatttctgaatccaggattacattataactacaggggaccatgacacatgtagttatgtccctgaaaaattaaagagttcccaaagaaattatttatgagagctaataaaaaacattttgacactgaaaataaactaagtaaaactttactaaactcaggggttactcctttacctaggctaggcccaagtttgtttcttttaaggtcaacggaaggtaggtttcatgacataaagcaactagttaaaaggtttttctgctgccagttttctagtcaaggcaatactgctacattgctttgtggcggtttctcctggagtggtttccccctctcattcttttgaggtgttggaggggtgtgaagtggagtagctggattttaaactgtgggagttacgtagatgattagatatcctttttacagacagcactgtggcaacagcctgcagaatgc

SEQ ID NO: 853066 - DNA, 609 bp, Homo sapiens
gacatacgaggtcagttggggaattttccacttggggcatgatgtcggtactccacaagtttcctattttgaaccattttttttctttttttttttgagatggagtttcactcttgtcacccaggctggagtgccatggcatgatcttggctcattgcaacctccacctcccaggttcaagcgattctcctgcatcagcctcccaagtagttgggattacaggtatgcaccaccacacccggctaatttttgtattattagtagagacggggtttcaccttgtcggccaggctggtctcgaactcctgacctcaggtgatcagccaaccttggcctcgcatagtactgggattacaggtgtgagccactgtgctcagctttgaagcatttttgatttgaggtttctgactagaaatgctcaacctgtacttctgaaaggaggatattcttttcagtgtaatccttcaggaccgattttgtactcctttcctaaggggaatgaagggtcwttcttcttttagtccagatattaggagcactatagtaatgcgatatttggttattatgactgcatggtgtggaaaggtcactggactaaaaaggaactgt

SEQ ID NO: 853067 - DNA, 639 bp, Homo sapiens
gtaggatccttttaagctaattgttcattttatgaatgttagttaatgctagataatataatatccattaaacaatatgttataactgcaatatgtggctataagttgaaatttgacaggagaaaaartgccactgtcaatgcctccaagttccagaatgtcacactgcctttaaaattcctttcatattatacctctcaagcatgcactagacagagcgggtgaaggtgccagcgttgttctctgtgttacattagcaaagtttaatttccaacttattttttatttatttatttttattattatactttaagttttagggtacatgtgcacaatgtgcaggttagttacatatgtatacgtgtgacatgctggtgcgctgcacccactaactcgtcatctagcattaggtatatctcccaatgctatccctccacccctccccccatcccataacggtccccagagtgtgatgttccccttcctgtgtccatgtattcccattgttcaattcccacctatgagtgagaatatgcggtgtttggttttctgttcttgcgatagtttactgagaatgatgatttccaatttcatccatgtccctacaaaggacatgaactcatcattttttatggctac

SEQ ID NO: 853068 - DNA, 465 bp, Homo sapiens
agtttaagcatgtatcttcaatattatccatccaggaccaaagtaagtcctgatgcaggaaataagggagtttcacagctttctgagcccctactcgacccaggaagcccagccagcccctcytctcaccactgcactgggctgtagaggaaggcaatagaagaacagcatatgtaaagttcctgagaatggaaaaagcatggggcctttgagtattgaaagaaggtcagtgtggctgcagagtagtgagaaaggggaaggggccgggagatagttgagttttgtgagacaggaaatagccaaatcatatggggtctttgtagaccatagtaaggagtttggattttattctcatgcagtaggaagccaatgaatgggttttaatagaaaagtgacatgttcacagatcaggtcaaactcatggcaatccagagtagccattttgcagtagggtctaaaatttgc

SEQ ID NO: 853069 - DNA, 477 bp, Homo sapiens
ttttcttcataaattttgattctccctgaattctctggataatttccacaattctctttattttgctaacatatgcagaatctataatcttcaagtcttcacttttcaaatgcaaaactattttagawgcagtttattgtcttttgaaaattatccatgttcatttaaaaacagattagctcttcaccttcaacgtatttgaattgtcatgttacaggagacttggaatattaagcttatcggaaagttaggacaagttttccctagagggtggagagtagttttaaattcgaagtggaaaaaaagttccatatcttaaaatagaagcaaattttttctctgtttcacattctctcaagatatcctcaatcctttttaaactctctatttattattaaatacaagcaatttagctcctttgtaaggttatgcaaataactcatccagaattagcatttaacatgcaattcttatatc

SEQ ID NO: 853070 - DNA, 462 bp, Homo sapiens
agaaagataatcttcacgtgttctcattcatttgtgagatctaaaaattaaaacaattgaactcaaggagatagaaagtagaatgatggttaccagaggctgggaagggtaatgaaaggyagggggtaagtggagatggttaatgggtacaaaaatatagttaaatagagtgaataagatttagtatttgatagcacaacagggcaactgcagtcgacagtaatttattgtacattgaaaaataagtaaaatagtataattggattgcatgtaacacaaatgatgaatgcttgaggtgatggatacctcatttattttgatatgattatcatacactgtatgtctgtatcaaaatatctcatgtatcccataaatatatgtatacctactatgtacccacaaaaattttaaaaacgattgtcccaaagaaaaacttagaaacctgtagttatcttgcaggaa

SEQ ID NO: 853071 - DNA, 638 bp, Homo sapiens
cccacaaaaattttaaaaacgattgtcccaaagaaaaacttagaaacctgtagttatcttgcaggaaaattgttgacttatatgtgagagaattggtcgaacaagttaaggaaaaakgtaaaaaacaaattttataaaggaaggagagaggacagagaaaaattgatgttccaagtgaatcttgttagcatctttttgggtaaactgattttctctcaacaaaaaggagcatctggtaattttatccttgagtgggcagggatatgaaagaaaacagttccagttgtttatgggttcttcagaaaacttgagaatttagctctctaaacgtctggctaaaactactttaaggtctgtctgtccttctgtcagtacctctcccatagttagactaggtctgcactgtttcctcattatatattgttttcttagccagttagttatgcctggcttctttagacaggagctacaggaggtagccacataagctggttgtgagactgggggcaaggtagcaaagtgtatcagagaaatggacaaaggcatcctctctaggtatgtctgtggaagttcaatgaggtctgaaggtatgatatcttatggagtttgcagctttgtaggggcatttggggacaaca

SEQ ID NO: 853072 - DNA, 519 bp, Homo sapiens
ctctcagagtcttctgaatgtccctcactgtcactgtcctggctcacactggatccctggcgcctgcttctcctggacccctctgattgtccctggactgcctgtgagtgtctagagatgtcggcatgagtggaagcttcatggtgacgcgaccctgagtgcctggagcygtctcctgattgttcctcattacgtgttgttctgcttgcacttctggatcctgactgcccacgggaggcatcagaccttccctgggatgtggtgtggctgtgatgggaccctgagtgtccagagctatctaccgaatgctcgtggtggtacccctgccttcctcctctgcttgaccccgggtgtccacgaatggtgtcctgaccgtcttgggatgctgagtgcctggagctgtcttgtgcctgctcatggcgggatccttgtcttcctctagtgctgggccccgtccatccatgggaggactcagactgttcatgagtgctcacctggtagaggaaagatcctgaatgt

SEQ ID NO: 853073 - DNA, 522 bp, Homo sapiens
gagtgcctagagccatctcctgattgttccttgtcatrtgtttttctgcttgcacttctggatcctgactgcccacgggaggcatcagaccttccctgggatgtggtgtggctgtgatgagaccctgagtgtccagacctatctaccgattgctcttggtgggacccctgtcttcctcctctgcttggccccgggtgtccacgaatggtgtcctgaccctcttgggatgctgagtgcctggagctgtcttgtgcctgatcataatgggatccttgtcttcctccagtgctgggcgcagactgtccatgggtggactcagactgttcatgagtgctcacctggtagaggaaagaccctgaacgtccagagctttcccctgactggccacgtgcggactctttgtggctctgctgatggggcccagcttttccctgtgctgacactgactgtgtgtctgagtcttctgaatgtccctcactgtcactggcctgactaccactgtaccctcggtgtccactgtct

SEQ ID NO: 853074 - DNA, 522 bp, Homo sapiens
gagtgcctagagccatctcctgattgttccttgtcatatgtttttctgcttgcacttctggatcctgactgcccacgggaggcatcagaccttccctgggatgtggtgtggctgtgatgrgaccctgagtgtccagacctatctaccgattgctcttggtgggacccctgtcttcctcctctgcttggccccgggtgtccacgaatggtgtcctgaccctcttgggatgctgagtgcctggagctgtcttgtgcctgatcataatgggatccttgtcttcctccagtgctgggcgcagactgtccatgggtggactcagactgttcatgagtgctcacctggtagaggaaagaccctgaacgtccagagctttcccctgactggccacgtgcggactctttgtggctctgctgatggggcccagcttttccctgtgctgacactgactgtgtgtctgagtcttctgaatgtccctcactgtcactggcctgactaccactgtaccctcggtgtccactgtct

SEQ ID NO: 853075 - DNA, 651 bp, Homo sapiens
ctcaaatttgcctatataacaaacatgcaaatgtacccctgtatctaaaataaaagtaaacaacaacagcaaaacaaaagaattttaagatttatccactgtaaagttaaaattttttttgaaagaaataaaagatctaaataaatggaaaagcagctaatatttacggaaaaaaaagtaatcaagaaagtaattttagagatgagcgggcaagatggctgaagaagaacagctccggtctgcagctcccagtgagaccaatgcagaaggcaggtgatttctgcatttccaacagaggtaccttgttcctctcattgggattggttagacagtgggtacagcccatggagggggagcaggaggcattgcctcacccaggaagcacaaggggctggagaacttcctcccctagccaagggaagtcatgagggactgtgctctgtggcccagatactacacttttcccatagtttctacatcccacagaccaggagattccctcgggtgcctgtacagctaggrccctgggtttcaagcacaaaactgggtggctgtttgggcagacactgagctagctgcaggagattttttttccataccccagtggtacctggaaccccagcaagacagaactgttcactcccctggaaa

SEQ ID NO: 853076 - DNA, 519 bp, Homo sapiens
atagctcactataaccttgaactccagggctcaagggatccttccatttcggcctccygagtagttaggactacaggtgtgtgccactacacacagctagtttttaatttttttttattttcatagacacagggtctcactatgttgctcaaactggtcttgaactcctggccccaagcaatcctcctgccttggcctcccaaagttctagaattgttacaggaaagaggtcccaatccaggcccaaagagattttatttatgtactagtgtggagcctagcctaggacacatcaagcagaagtgcagataaggtctgactctttccagtacagctagggtgcctggctctccacatgtccccagaccttatctagaatctaatgtctccaaggtaggtacattgaataattttcaaaagtcaaggaagcagtttatgaccttaaagtagttagcaaacttaatatctgacctgactaatttagaccaaatgtttacatttttgaagatatttttattt

SEQ ID NO: 853077 - DNA, 578 bp, Homo sapiens
cacacaaagccaaaatattggctatggcattaaggcctcctgaagtgaaaagtgagaggaacccaaattgttttctacgtggagagccaggtcatatgaagtgggaatgccccccaatartagagactaaggtaactcaggaaaacaacccctttctatatgccccgatgtaaaaagggaaacattgggcaaatcaatgcaggtccaaattgataaaaacagcaaccccataagtaatcaggtgggaaacttcatgagggactggtcccaggccctgttctaaattggagcaatgccagtggctttcctcggtcagatgaaaagcccacagtcctctctctcagagctgccaccactgggagcacaggactggacttactctgccccaaagaatcagggctaaaagaaggagaagaccctaaaagggttgcaactgggatctggggcccctgcctccaggaacagtgggattagtcctagggcgattaagtctatccagtaaaggaattaatgtgcttaccggggtagtgattatcaaggtgagatactagttatgatggaatgtaaaggtctgcata

SEQ ID NO: 853078 - DNA, 629 bp, Homo sapiens
aggctagcagcctgcagctcctcaggctcctgccgggtcctgtctttcagcttctccaagtccagcgccaggtttttgtgcagctcaaagcaaagggcatcagttcttctatatgtcaccrtgtcatcaaggctggaggtggtgagagacagagtcaagtggttcttaagggtttcagtccttgaagctccttgtttgccctgctttttcctatttcctatccagcctttcttcctgacagccgacatctgacctatggagacagcaggtccaacatcagattcaagaagcaacagccctgcatagattcctccaccagcacccacgactgcatcagggctaacccgtggaataaaccactcttaatggttccgcttctctgatcaaaccctgattatgcccagccacctcatttccctcttaatctcttcataggcatctctctggtactccaagcagtttaattacccaggcatgttatgagagctccacctggacgccattgctatggccttgtcttccactgactcacctctccagtcacccaaatctcacgcacaacctacaaactccaactcaagtcctctctgcagcttccctcgaccacttcagcccctggtgacctcctc

SEQ ID NO: 853079 - DNA, 580 bp, Homo sapiens
tgcattggaatgcctgcagacagacctgcacgtctcgaggcattggaatgcctgtagacagacccacatgtctcgaggcctcagaatccccacttcttgttacatcctccacttcccggcttgagctgcctacttggccttttaacgcatttgcgtaggtgacacctggcttccactctgtgagccctaatccgcatgtgccctcctaagtattattttatgcgtctgtgttcttcatccaccaccacatcttgaagttactgaaggtaggcactgtcagtaaaagcatcccactgccactccgcttcaccacggccgtaacaggaaccacaggtatcactatatctgccatttactgagctcctcacatgtggcaaggcctgttccaaacactttacgtgtgataattcattcgatcctaaaatacaaagaggtttagatgaggaaactgaggcacagagtagttagcttggccaaatttaacacagggaaagcccaggactccaaaccctttcaactttacaggytgcatgctcaatcaccacacccaaagccaaattcaccattgacagtggacagc

SEQ ID NO: 853080 - DNA, 591 bp, Homo sapiens
caggaaggtacaaatgactgtcaacagttcagatttttcttcctggtgtaattrcattatagcagagttcaacgccttccctatagcaccttttcctgcataacctgaatttggtcttagaactcatctgtcattaccagtcaatggaggttttatgaattttttttagagccctgaaaaattagatgatataagtaagagcctacccctattacatataaggtctgaacttagcaaaaagcatagcccaaaggtggcaattttcatgtggaaatgttctttatgagaaagaaaaccagagatgacatttactatgctgaaaagctagccattgtgaggagtgtggcatttatatcattataaaggcacagctgcttaaaatacccacatgaaattcagaactcagagcacaagaattttgggcattgagagtcccagagatgctttaaggtgatcaggtgaccagtttgcctcaggaagaatctaatttaaatgttgtagaacaaccctatgaggagctctattctagaaagttctaccatcttaagcccattgttcaaaaggcactaatgtcttaagacaagcttgtcc

SEQ ID NO: 853081 - DNA, 574 bp, Homo sapiens
tggttgtttaaaagtatatagcacctcctcctctctctcgctcacgctctctccgtgtgacatgctggctgcccgtcgcctttgtcatgattaaaagcttcctgaagccctcaccagaaacagatgccagcaccaagtttcctgtacaggctgcagaactgtgagccaaaataatatctcttttctttataaattacccagtctcaagtattccttttaagcaacataaacacagcctaatacgctaatttatgcccagcacccaggtcttcgtttctaacaccattctccaataaaaggaaccagggctccttggaaaagtggccaactctaggattggggcaggaaaaatgcaagatgagcctggagcgtctcatggtgctagaagtaaggaagggctcaaagagcaaaagtaaggaagggacaccttcaaaggggcacaggagatagcctggaagagctcctggtggccaaagctggaacaatacaagcaggaaaatataggcacttccctacttaygatggtgccacttccgatttcaactttacgattgatttattgggggtattaaat

SEQ ID NO: 853082 - DNA, 576 bp, Homo sapiens
ataattatacaattgcttacttagttatataaatcattcatccaatttaataattttcaaatcagttattgatttatttagaagtcaataatataatcttttgtttatcatttcactaagtttctcctgtctgagtccagatttaatattgtgagccacatagcagtgttccaatgacttctccaataggtagttcccttatgtgtctgaaaatattaaatggaaaattccagaaataaacaattcatatgttttaaattgcacactgttctgattagtgtgatgaaatcttgtgccatcctgggctgtcctgcccgggatgttaatcatccctttgtccagtatgtccacactgtataagctacctgctcatttgttgtcaatactgtctgctccagacatccaaccatctaccctatcatggctccatcaaccagactcacccaaagcagatgctcctccttctgatgtatcattacagggtcagtagtagtctaacactrtgtcacaatgcctacatcattcacctaacttcatagcatcacacagtcgttttatcatctcacatcatcacaa

SEQ ID NO: 853083 - DNA, 612 bp, Homo sapiens
cctcttcagtgtcttttcttcattgcccgcaaaggtgcttcccagtctattttctgttgggtagagtacaacatagcagaaagaggaacttgggtcttctgatatcaagagamgtgaaataccttagagtagagtcacctcccttgagtgcactatggtttctaatgtctcagtcaaatggtatatttggaacttacatatttttcatgcagaaggaactggaaagttaattagtcctctgatttttcatattgttttctgggaatcagttcaacataaggcaaggagacagtgaactgctgaggggttaagggaccacacagcaggtaaatccatatctctgaaacctgattgaatgccaccgaaggaaacttacagtgtgattcttatttctcagcccacatcagcctgagagtaaaagagtaaaactgtgtataataatagtcttgaaataaaaatggcacttctctggatctttctacaacaacaactacaacttcaaccccagttcaagactcccttccctttaagttcttcttggtagagctggtatcactgggcatgcagcgtggtatatattgtctatcattttctcgtttcctgttctgtgtc

SEQ ID NO: 853084 - DNA, 519 bp, Homo sapiens
taattaacatatccctcacctcaccaacttagtttttttatggcaggaaaagtcaatctcatagaaacagagcatagaaaggtggttcccagcggctgtgggaaagagggagggatggggagagatgcagatcaaagcgtctacagtttcatttagactgcaggaataagttattgcacagcacggtgatcattgttaataataatgaattgtgtatttcaaaattgctaaaagaacacatttttaacattcatgcactgctgttttttatttttacattttatttatttattttaaggtggatgccagggtgttactttgtatgaaggcaaaccagcctatgaaaaggaggagggatgctgtgagtctaaaatggcttgatggttctgctttgttttatttgtmtgttcattgctaatactttattaacttttttttgtattttcttaaacgtttaagtttggcgtacatgtgcaggtttgtgtaaattatgtgtcatggggatttgttgtacacatt

SEQ ID NO: 853085 - DNA, 503 bp, Homo sapiens
ggccctcaaggccatccacaaacatgtactgtattagttcattttcacatgctgatgragacatacccaagactgggaagaaaaggagatttaattggacttacagttctacatggctggggaggcctcagaatcacagccggaggtgaaaggcacttcttacatggtggcaactagagaaaatgaggagaaagcaaaatcagaaatccctgataaacccatcacatcgtgtgagactcattactgagaggtgacagcgtgctggcagtcctcacagccctcgctcgctcgctctgggcgcctcctctgcctgggatcccactttggcggcacttgtggagccctgcagcccaccgctgcactgtgggagcccctttctgggctggccaaggccggagcctgctccctcagcttgcagggaggtgcggagggagaggcgcgagcgggaaccagggctgcgcgcgcaggtcagctggagttctgggtgggcgtgggcttggcgg

SEQ ID NO: 853086 - DNA, 555 bp, Homo sapiens
cagtttattaaatcacgctggttgtaattattatcccaccaaattcttatctgtttcaaggacataaacatttatttcaggctagaataaatattaaaatagatctggcttyggcttcattacttcctaagtcactgcttatctgcagaaagctcagtatttaataagtgttaagaggtacttctaataggtgctcactttttgagctgcagaaagagcaaaaggttttgaaaggagttgggaggggcattgtttgtttgtctatctgcttttgtttccaacttttattttaggttagcaggggtacatgtgcggtttgttacataggtaacttgtgtgtcatgggagtttagtgacagattatttcgtcacccaggtaatgagcatagtgactaatggatatttttttggatgtcaagtaggccctgatgtctattgttcccttctttgtgtccatgtgtactcaattgtttaactcccacttataagtgagaacatgcggtatttggttttctgtttttgcattagtttgcttaggataatggcctccagttc

SEQ ID NO: 853087 - DNA, 659 bp, Homo sapiens
taaagtattaattctatcactcttctgcccaatgtccctgccttcatgccttctcatctcattcagagtagatgccaaagttcatttgcttacattgyctgccacctcttcattgcctctctgacctgacctgccaccactttcaccctggatcattttgctccggccactccagacccctcattattctttaaaccttccagaaacactcggggccttggcatgtagtttcccctgcttgggaattcttgcctagagtattcacatgaatcactcccttacctccctttacatctttattcaaaagctgtcttctccgagaggtcttccctggctttctcacctaaaattacaacccaacctcttcctaatacttcctctacactgctttctttttccacttagcacaaactaacataccctacatttatttacttatttgtatattttattgtctctttcacactagaatataagctctatgttagcattttgttcacttattgactatgtgatgttgtggaaaggagaaaactcaacttttctagagtttattcatctgtttccaggatggtcctacaacaatgattgacacatactaggagcttaataattggttgttgaatttaagtgaactttgaaaatgatgacccttgaca

SEQ ID NO: 853088 - DNA, 586 bp, Homo sapiens
ggtggggatttctcatgaatgatttagcaccatactcttggtgctgttctcttgacagtgagtgagtgagtgagttattgcgagatctggttgtttaaaagtatgtagcacatcctcctctctctcttgctcctgctcttgccatgtaagacatgcctgctccccattcaccttctgccatgattgtaagtttcctgaggcctccccagaagccgagcaaatgccagcatcatgcttcctgtgtagcctgcagaaccacgagccaattaaacctcttttcttaataaattacccagtctcaggtatttctttatagtaatgtgagaatggaccaatacatatattttggtttttcggagtttttttgagagagggtctcactgtcacccgggctggagtacagtggctcaatcttggctcactgcaacctccacctccaggttcaagcgattctcccacctcagtctcgcgagtagctgggaccacaggtgcacaccaccatgcccagctaagctttgtrttttttggtagagacagggtttcaccatgttagtcaacctggtcttgagctcctgacctcaggtta

SEQ ID NO: 853089 - DNA, 670 bp, Homo sapiens
aaaaaaggagtgtgaagttgaaaactgaagagaaaattacccatgaaaacgtttattggtggtgcatgcctagtaaaytcttcatgacaatcacaaaataacttacctatgagtcatatttagcatgtacaaaatatatgcacatattaatgatcatacatcctttcaagataagtgattattaaccacagtttacagatgacacatctgagggataaaatatttattgtcacagtgtcacaaagcaatgaaataatggatcctagattcaagttttggtcctttgaatacagatgtcatgaacttcttactatacaccaccacttgctcataaaaattttactagcaagtaacatatcatctatcacgttaaagttttcacaatggccacatacttacccagcacccaattggcaccatcaagaatagacaactatagaattctctccatgccagactgagtccagtccttggcaagatgaccaaatgtatgcttttattccttctagtatctatatgggagatactgatgtgctagaaatgaatgggtattctacactttccatccaatcttcaagatcagtatccctagaaaatgttttacctactatgcctgaatcagtccaaaatttattaagaaatgaaaattctttcaaaggttaagtaagga

SEQ ID NO: 853090 - DNA, 669 bp, Homo sapiens
ggcacatactcccaagttaggttacagtttgtccccaaggtctcaaatatagaagtatagagtccttctcatcccatatttagtttaacaatgggaaatgggaggtcaagtgactttcttataaggtactgtaagactacatgctgattcagttaaaaggaaattataaagatgtatgggcagagggatgatacaatgtcatgagtggcatccttttagagttatgaaatatgaccctgctccgttaatggttgtttccacttggagtacatctctggttacactgtttccgtcacaaaaacataagacaccttgttgcactgacttaattaatcttgaaatcccaaccacacacctgctatagcttgtttttaattttgtaaccttctaaacaatgttataatgtatgatggatttttttcctggtttaccattaatccaaaggtgcaaaactgtcttttaaataggaatggtgtgtgctgcttctgtaccatcaagtgctctggtactgtaaaaacatttagtacacaaggaccactagaaatcttctgaattactgatcagcaacaaagtcattcttcagtatccatggggcatgggtttcaggaccccacggaagctaaaatcagaggatgytcaagtccctaatataaaatgatgtagtatttg

SEQ ID NO: 853091 - DNA, 602 bp, Homo sapiens
tattataatcttaccacttctcatctcatctcttgctaccatttcctttcaggccattattacccctcactaacctcctacctgctttccctgcatccttcttgatctcctaccgctttccctccrgagaaatcttcatagaacagtcagggtaattcttcttaaatatgattcacagcatggctttccccctgtcaaagccagccaatggctccccatcatatttagaataaaacccagtctcctttgttccccaaattccccccagataataatgcctggccctcaataggtgcttttgtaatgagtattttaatgaataccaaatagataaacaagactgtactaaggtattatcttaacagtctttaaaagaaaaagtaatgaaattggaacaatagtgaaaactcgttgctaaatagcagttcaacttgagtgaattcactttacctttctggatcttatttgtcacatggactaaataatgatcctaggtctaaagttttaatgggccaaggtctcaagttgttacccatagacacagacataaacacacactcacacacgtgccagctgtgtgcttattatagatgaaatcctat

SEQ ID NO: 853092 - DNA, 587 bp, Homo sapiens
aaaaaaggaagaaatggttcttttttcttcacttgcttcataaaacccctttctaaagcrtttaaagtttaatggccaagtgctcaaactggagaagggttaagtagcgtaaggaaacataggaataaaactttgttccaaatttcataatactgtcacactgcactcaatattattgagttccaaatctgttacactaagtattaacaaaatttcaggggagctccctaaactatttatagaacactttgttttcagcatataaccaatattgaaagcaatgagtaaagggaatcctaaatatacacgtctcctagggctttactctaaatgactttgaaattttcggactctgaaaattaattttcccaaatcaggtcccttgaaaagtagtctctacaaatagaaggcagaaggatgatgaagataagcaggagaagaaaaatacataaattggccagagaccaaactatatttggcttcttggatttcaacattgattttattttattttcccaaatattataaacatcatgagatcctataaaccataacaagcagatagactgccttactgtaccccattt

SEQ ID NO: 853093 - DNA, 587 bp, Homo sapiens
aaaaaaggaagaaatggttcttttttcttcacttgcttcataaaacccctttctaaagcatttaaagtttaatggccaagygctcaaactggagaagggttaagtagcgtaaggaaacataggaataaaactttgttccaaatttcataatactgtcacactgcactcaatattattgagttccaaatctgttacactaagtattaacaaaatttcaggggagctccctaaactatttatagaacactttgttttcagcatataaccaatattgaaagcaatgagtaaagggaatcctaaatatacacgtctcctagggctttactctaaatgactttgaaattttcggactctgaaaattaattttcccaaatcaggtcccttgaaaagtagtctctacaaatagaaggcagaaggatgatgaagataagcaggagaagaaaaatacataaattggccagagaccaaactatatttggcttcttggatttcaacattgattttattttattttcccaaatattataaacatcatgagatcctataaaccataacaagcagatagactgccttactgtaccccattt

SEQ ID NO: 853094 - DNA, 446 bp, Homo sapiens
tgcccaggaatctgcattttatacatgtgatactgcaagttgtcttcagaccttaatttgataaataactttattagaattttagatgccaggtaaagaatccaagcacaatttgtgaactttagtggtcaggagagaattgttttttgaaaaagaaaattatcaattgtgctgtaaacagtggcaaataaaaagttgggacaaatagaagcaaaaattatgaaaatgacaggtagcttgatgtttgaagaagactgattaaatagagaatggaagtatgtatggtaaacaataaggagcttacactactttcacatgaaacagaaagagagatttgtagatattagtattgaaatagawacagtgttttaaatgtccatgttcacttcactcagttcttccaggtatgatgtcagaccagccactacaatatcaaattgggcctt

SEQ ID NO: 853095 - DNA, 536 bp, Homo sapiens
gagaaaataagaatatttcaacttgcatagagaagaactgagattccagaacaaatgacacaggtgttggaatcatcggacagaaatttaaacatyttattgtagaaatgctacagcaagcaattgcaaacacttctgcaatgaatgtaaaaatagaagattttacaaaagaaatagaagatatacaggagaacgtattagaaatttaagagctgagaaaagagtagcaacaacaacaaaccaaaccaaattctcactgaatggggtcaagagcagaataaagatgacagatgagagtaagtggacttgaaaatgggtcaataggaattatataagtagaacaacagaggaaaaagatatttttaaaaactaagagcagccccaggaacctgtggagcaatgataaaatatctaaaattcatgctatcagagtgccaaagagagaaaaagtgcagtactgaaaaaaactttttgaaaataatgtctaaaaaattatcaagtttggcaaatgacataaacttagagacttaaattta

SEQ ID NO: 853096 - DNA, 561 bp, Homo sapiens
atcatggtattccctggaaatcattaaactattttttcttcatgactttcygtatcatatttaacccattcatccaaacttcaagtaattcctaacctccaccttcatctctttccacactttcctattcttcagctcataggctttcacaaattttatttttccatttgatttctttaccattttgattgcaaacagaattatgaaatgtctaagttagatcatttttggtagtcaaactttgatgagcagatgcatttattaacacatctacttctagaaggcaaaagtctctcactcttcattgggtctacttatatttaaatgattttacatgtatgtaggtatggctgcctaggaagaaggaagaagagttttaaagaaggggattcattcataggtgagagcatgaataaatatagtttgtttcctaagctctaaacgtagccataagcaatatatagtttgtataattccttaaactctaaaagtagccataagcaatgaacactgaactaaaaagagaaaagacagtataccttccatctcaaagaatgggaa

SEQ ID NO: 853097 - DNA, 623 bp, Homo sapiens
ccagaatctcattagaaatgaatagtcggccaggcacggtggctcacgcctgtaatcccagcactctgggaggccaaggcgggtggatcacaaggtcaggagatcaagatcatcctggctaacacggtgaaaccccgtctctactaaaaataaaaaaattagccaggcatggtggcaggcgcctgtagtcccagctactcgggaggctgaggcaggagaatggcatgaacccggtaggcggaggttgcagtgagccgagatcgcaccactgcactccagcctgggtgacagagtaagactccgtcttgaaaaaaaaaaaaaaagaaatgaatagtcatggccgggcacagtggctcatgcctctaattccagcactttgggaggctgtggcgggtgatcagttgatgccagttcaagactagcttggctaacatggaaaaactccgtctctactaaaaatgcaaaaattagctgggcatagtggtgggcacctacartcccagctactcaggaggctgaggcatgagaattgcttgaacctgggaggcggaggttgcagtgagcctcaattgcactactgcactctagcctgggtgatggagtgagactctgtctcaaaaaaa

SEQ ID NO: 853098 - DNA, 608 bp, Homo sapiens
cggtgaggtcacagggcttggcaggaggctgcttgagagcaaaccttggctctgctccctgactatttggttggacactatcaatctgccactttatttacagctaacagttatctggaaascaggaattctcttgctctaatctctagctactgctttgtgtaaggctgtatgctaatcatcttgttgagtgaagtaccagaagggtgactgatcattccagggttaggaatccatgtcaacatatattgatgttttcttcactttatttgacttcagctcattttgcaacatccttgaggtaagggattcccttataccagcagtcacatacttcagtatcaatgactcatgtcctccagtcaattctttcagtatataatatttggcttaaagcaaactaagttgttctcatgttttaaagagtctgagaaagaaatggttcttaaaactggggatactgaaattgaaacccagtgatgtttggcaagcttccatcaagcacattcctgtctgaaatatatataagccctggagtttttcttttaatgtgagacaggttattttctcgggagatgttttgcctagagaagaaaagattaaaggaa

SEQ ID NO: 853099 - DNA, 622 bp, Homo sapiens
caataaatactgaataaattcccttttctttgacccaagtcttttctgcttttctgtctcttaaaagccttataaatagttatttatccaactacttattaagtatgttctttctatcaactccagtgccaggcagtggatatcacggaagaatcaggcatggcttttacctaggaggagctcatggtctggtaaggaagaacaatatataaacaaatgctacatcgccattctacagtcaaaggcagtagtggaaagagtagaaccacacaggtagagtgactagttttgcttagctgtctcaggcaaggctttttagagaaggagcacaaagcaggtcttgaaagatgcgtgagagttaaccacgtttatgtggatttgattgtggattccaaactgaaaaaaacaaaagctgtacattgcattcataactattaccaacaaagtcctttttatagctcatacttcatgatataattctgaatccacatgcactgaaaacaacttcagggcctccctgagcttagcaatctgccccaatactccctggtccatttagagaggcytgatcattctgtatgattttagcctccttgatcttgcctgggctctcagaagaggc

SEQ ID NO: 853100 - DNA, 628 bp, Homo sapiens
tttataaatttgttgggattccaacaaaaaaatagtgttcggtttttattttgttttgttttacaactagccaaattgattagcaagttaatttggaataacaarcaagcatgaatagtcaagaaaaccctgaaaaggagagcagcactatgagtaatgggtaagataccattaccagatattaaaacaaaaagtctctatatttaaaatagtgtggttttggcacatgaatacatgaaagaccaatgaaattgaaaagaaaaattcagaaataaacccactggcatattgttattttgtatatgataaaggtgacattgaaaattaataagaaacagatggacattttaatcagtgacacattattggatagctatagagaagttttaagttgggtctattcctcatataccatacatacgtaagatgtacattaggatatattccaaatacatcaaaggtttaagtgtaaagaaataaacatatacaaatagtacaagtaaacatgagtgatttcttctatcatctgggataaggggaaactttcttaactgtgactcaaaatgcagatacaatgaggaaaatgatacttttcactgaaggagtgattattttcaccataagggcc

SEQ ID NO: 853101 - DNA, 610 bp, Homo sapiens
gtctttattaggagctacatcagaccccctttgaattagttttgtaaagacagaaaaaataaaccccaaatggagttatgtgtaaaggaaaacagccacagagaacaatccccaggcttcttcccacaagagctggggattggccaagcgggacctctggtagtcacccaagtgcccttctctgcacagaaaatctgaacccaggggctctgaggtgtgtgaaataaaaacaaatgtccatgtctgtccttttatggcattttgggactttacatttcaaacatttcagacatgtatcacaacacgaaggaataacagttccagggatatctgtagcttaaatgagtagaggaaagtccctgaacactttccaaattgctctcttggaactgagtttctaactcactgtccaagcccagggctagtcagtaagcacattcactttgactcgtgttgattttcattagccacattatgtggtggtcaccctgggtctgcatgtcagtgggggctacttgaccttcaacagctyccctccaattaaaatagttttattctctgttttctaccacatgcctactgtgctattatgtaatatttcacctgtaga

SEQ ID NO: 853102 - DNA, 610 bp, Homo sapiens
gtctttattaggagctacatcagaccccctttgaattagttttgtaaagacagaaaaaataaaccccaaatggagttatgtgtaaaggaaaacagccacagagaacaatccccaggcttcttcccacaagagctggggattggccaagcgggacctctggtagtcacccaagtgcccttctctgcacagaaaatctgaacccaggggctctgaggtgtgtgaaataaaaacaaatgtccatgtctgtccttttatggcattttgggactttacatttcaaacatttcagacatgtatcacaacacgaaggaataacagttccagggatatctgtagcttaaatgagtagaggaaagtccctgaacactttccaaattgctctcttggaactgagtttctaactcactgtccaagcccagggctagtcagtaagcacattcactttgactcgtgttgattttcattagccacattatgtggtggtcaccctgggtctgcatgtcagtgggggctacttgaccttcaacagcttccctccaattaaaatagttttattctctgttttctaccasatgcctactgtgctattatgtaatatttcacctgtaga

SEQ ID NO: 853103 - DNA, 664 bp, Homo sapiens
atccatcaagtattctgttttggccccaagaatacttagtacggcatcttattcagagtaggtacttgatatggtttggctgtgtccccacccaaatctcatcttgaattgtagttcccataatctccacatgtcagagggaagacccagtgggaggtaatttaatcatggaagagtttactctcatgctgttcttgtgataatgagtgagttctcacgagatctgaggattttataaagggcttttcccccttttgttaggcacttctccttgctgcagccatgtgaagaaggacatgtttgcttccccttctgccatgattgtaaatttcctgaggcctacccagccgtgcttaactgtgagtcaattaaacctcgttcctttataaattacccattctcgggtatgtctttattagcagcatgagaacggactaatacagtactcaatgagtgctagtaggtagaaactttaggtggcactggtaaattaacaatctacaggggccaaagagtctgtgagcacctcatattcacacacacaagcacacatgcaaactccaaaacaacagacatttccaaaagtgggactccagtctctagcaactyacagagacaccagaagtgaggggacctaagcaaattcctctgttggattgtgttg

SEQ ID NO: 853104 - DNA, 635 bp, Homo sapiens
tttgatactgtcattatgacgttagctggttattttgcttgatagttgatgcagtttcttcctagcatyggtggtctttataacttggcatgtttttacactcttttgcccatttttaaattgtgttgttttcttgctaatgagttccttgagttcttcatatattttgcatattaattccttatcagatgtatagtttgtaaatattttctcccgtttcataagcggtcttctacctctgttgattatttcctttgctgtgcagaggctttttagttagacgtaattctatttgtctgtttttgcctttgtttcctttatttgcttagaccaatgtcatgaagcatggctttatgtttttagatggtcatctttcacttaatgcacaatcattgtaattttggcgttttaaaaataattcatttatttaaaaactaattgttgagcaattattacgtaacaggctttctgcaagtgccagggatccagagataacaagggaatctcctactctcaaagagtctgccatctagtgggagacgcaggaatgtaattgagtaggagaacacaatgagattcgttgcagaacagccatgagaacagaacaaagttctaagagagcataaaggggtggc

SEQ ID NO: 853105 - DNA, 612 bp, Homo sapiens
agagcatttgcaaggtgtgtgagtgtctggttttgttggtgaacccctctatacaattttagaagttggacttgctaagaagtttggactttaggtggtgtggtgtggggttsagtcaagtgatgaacaaggtaaaaggaagcagcaccatcttggtcaagaactctcaaaatttcattaaatagataatagatgggctggttgtgctggtcttttttttcccagcttcacagacacacaggtgtttcaagggctgttagccagtttccaaccccactgcagagatggactatgagaagttttgcccatgatttagacaagtggctcactccatgtggcacagcatccttaacactcccaaatttctttcccgccccaaaggtggatgaggtcttaaatagtaccaaaagagtttctttcttttagagtaaagctttgatttttgttaattctattttccccagaataattctttgagttgctatcaggcatttataaaaaggcccacagaattttagaatgttcattaagtcttttgacaaatattcactagaacttactctatacctgatgctgcacttggtctggaatctcttcagaagactggtactg

SEQ ID NO: 853106 - DNA, 674 bp, Homo sapiens
tgcagttggatccttctcacccacatctggaagccacatgtcagcggcagctatataaaacggtcagaccagcaatcttagagtgacattgtttgccaaaatcccaggcagcatggacctcagtcttctctgggtacttctgcccctagtcaccatggcctggggccagtatggcgattatggatacccataccagcagtatcatgactacagcgatgatgggtgggtgaatttgaaccggcaaggcttcagctaccagtgtccccaggggcaggtgatagtggccgtgaggagcatcttcagcaagaaggaaggttctgacagacaatggaactacgcctgcatgcccacgccacagagcctcggggaacccacggagtgctggtgggaggagatcaacagggctggcatggaatggtaagggccagtccctgcactgcactggggctgggaacatctctgcatatccctcctcctgggggctgctagactctcaaggaatatcagtaaccaaagcctgggcaaatcccaccccaaacctcaccactgcatgctctgggtggagcagggctgctgctgagcrgactacatgacaggacaaaaacctgggatggggagtgtctgtgggagacagactcctctgtggctctgttccttccagaagctgttctacc

SEQ ID NO: 853107 - DNA, 574 bp, Homo sapiens
gtcttatacatttatgagtcgtactcctgattagtagataaggtaactattcaataatacctgtcttacaataaaaaagatgaaggagatgacatatctagcaagagaaatccwataatattaatgcttaagaaccattgatgtttcagttctcatttgtcagaatttgatattaaattgctttttgtcaagaatctggaaaaaacatgtcataatatagaatcctttataaaaagggcaatctaattccttatagctcggaaaggacttcaaactgtgtcattccatttgccaacaaggaataaattcacataaattaatctctcattcatgtaatgtagtacagaaatttatagtcttgtcaatagttcatgtggagctataatttgggataggtaaaggaaatgtatccagtgactgtgtatggtgctatatccttccagaatcaatgactgagaaaatgttttactctctgattttctttatccattagatatcaaatgtttggacttctctcatttttaactttgaaaatgctattctgttttagttccaaggtatacagtgacatgct

SEQ ID NO: 853108 - DNA, 637 bp, Homo sapiens
gaggcgtaggttgcagtgagcctagatcacaccactgcactccagcctgggtgatagagcatgactccatctcaaaaaaaaaaaaaagtattaagtaaatgaaagaaaaactcaatagtttaattaaatctctcaaatgcccagtctttaagaacaaatgttttcttagttattctgctggaaacaaaggaaacacattgtaaatgcattcaatttttgctaaagatataaatacaaaattaaaaagattcagactgtggcccacaatgaaaaacagaatacctaaagactgagcacctatagaaacacacaatgctagagtgatcaatgaccacacagccttaacaaaatctcatctgtccactgaacacagtgtggagacgagaaagtaaaaccatgataagtttaatttagttgttgagaatatcttttaaatacttactttttcattaggatcatatcccactgaaccaagattacgggacaccattaagcactgtcttgaatagtacagaacatgctacaaaaaaaggaaagcaaaataaattgcaaatacttgatgggctttagaacattttttcaggatatttcttccagttaggttctagcgaaygtgtctgatcaataaatgtagttc

SEQ ID NO: 853109 - DNA, 601 bp, Homo sapiens
tattccaattaactaatgaaaaaaatgttagcattaaactaccaaaattttgtaatccaataaattactagatatgggcagtaagcatcaaagtctgcttatatcttaaaaagagctaaaaagacattatgtgcctcctatagtcttcatcaaaggcatcaaatccaagtctgatcccatctctgaattcaagtgccaatttgtaggaaacaccaagaatgggggaaaccactgagctatagcatcgccatgcagtgagctaagtcaagactggggtaagactctgtaagtcaaacacccaagttcttcaacagataagtcatgaagaaaaggaagcaagaggagcctacagactaagattttaaagacttatcaaatttaaaaataaatggacaagacttaaatattgtgtccaaggtggcacatttggacaataaaattatttttaaacgcaaaaaaaaatgattactataaaagccaaaggaatgggtatgtttagagagaggccggaggttagcactgagatgggtcacacrgctttccaggattcagggtaaacatctgcgtctggacctatttcatgatttcaaaatagttcgcc

SEQ ID NO: 853110 - DNA, 662 bp, Homo sapiens
ccaccgcgcccagccacacccagctaatttttaaattatttgtagagatggggttttcctatgtgcccaggctggtcttgaactcctggactcaagtgatcctctggcttcagcctcccgaactgctaggattacaggcgtaggccactgcgtctggccgtaaagaattattaatgactagtaagtaaagtggtaagcaacaggaattcagaaatgaatgagtaaaagtccttgacttgacatggaagtaattatactaaggctaaaaaagaatgtggaagtggagtggggcatagtagtcagaggaggcatgctcattctgtctagaatctcagcttaaaggccacactctcagagaagactgtcatcaccctatctcaagaggctacccagtcacctttcaggacagtgcctatcaaattttctgggctttacagttttaaatattgacaatctcaaggagctttggcttatacatgttgtatatatcaatatttaccatgttaaaattaagaaatttttaaaaatgtatttcaaaagaatagcccatttaatgttaacaattagaagtaacatttttatgacaaattcattagagtagaaatgttttacattttcacaaatctcttyaacatgtggcttaagacagctggattctcaaa

SEQ ID NO: 853111 - DNA, 615 bp, Homo sapiens
tttttttattgtacttatttacttatttatttttttgagacagggtcttgctctgtcacccaggctggattcatagctcgcyacaccctcaaacttctggcctcaagtgatcctcctatctcggcctcccaaagtgatgggattataggtgtaagataccacacctggcctgaactctgctttaaaaactgcatgctgaagtgtacaggagagtgaattgtactattatctacaacttaagttgacgtgcaaaatgaaaatgagattgatagatgagtagaggaaaacacaaatgaataaatatgttaaaaacaaataagaaaatgttaattatagaatctactggcatttgtagtagtacaattcttcaaacttttctgtatttcttaaatttttcattaaagaaaatgtgaggggaaaaaatattaatactcccacaagtctgtgcaataggtctctggcagtaacactagactaacaagcataaacatattggttaggaagatactgtcaaattaaacctcttaaacttatgtaaagcggacattacaaatatccaatgagtcaactaattacccagagcttgcattaaggaaaggcatgatttggtggtta

SEQ ID NO: 853112 - DNA, 483 bp, Homo sapiens
cttatgttattaataaaacccgatggaatttcttggtatttttcatgctgttttcaagtctgatcaggaggtaacctgagccctggacccaaagtgaacaaacattcttcatagctactgtgacctgttaatttaagccaaactcacaatttttcagttgttccaattcagacttttactacaatcacctaatctttcatctgtgatattatcttgtgaatatttcagaattttcatggcagcattgtctgtacagtacagaaaaggaatcaaggattctatattttgaagcttcacagatacttactatgtggcatttaaatttaagaaaaattccaatttttcttaaaatgttgcttttgtattatgacactttcctggattacttaacaaggattccattatttcctcttgtttaaaactaaaaaagaktaaacatcttcaatggcttctgattgtactgttaaagttacaattgtgtgt

SEQ ID NO: 853113 - DNA, 624 bp, Homo sapiens
ctacattctgactccaactgtcagattgtgacattttctctttctctgactttatgccaaatttacttcaacttctagcatccatcattctcatttatgaacaaatatgtatttaacaaatgtggaaatacaaatcatgaagcaaacaaaaccaaaccctgggcttacgtagccgatagtaaaaaattcaccaaaataaccacccgattacagtttcatgcaatgtgataggagtaagggaccaccatagggaggtcagaaggtgcttttcagaggtggagactacagctgttctcagaagaataggggttaaaagaaccttccaggcacagagcaaagcatgagcaaaagctctgtggaggccaggaagctggtaaatagggaataaaagaggccagtttggctggagcagagagagcagaacggaattggtctgagtagtgagaagagatgaagaagtgggcaaggcgcctggccattcggggcttggttagttaggaggttttgtctaagagaatgggaaggtgtttaagtgctttaggctgggaagtgacayggtcacattatattttggaaaagccactctgcctgttgtgttgagattagagaggcgataaaggggat

SEQ ID NO: 853114 - DNA, 409 bp, Homo sapiens
atgcaacacagccagctgcaatggggaacgcaggggactggggcagccctaactggccaccttatatgtgggctggggggtgtgttagggaaggaggaggtgatgtctaaggtaacacttggaagacgagtsaggggtggccaggcggagagggggctgaagtgccgcaggtgggacagggcagtctggaagtgagagtggatgtggccctgactgtcctggaggaagggggtcgctgatctggagagacctcagtgggggccaggttaccaagacctggccagaggcccagaagagaacggactttctcctggagcactggggagccgggtgcggggagtgttaagcagggaagaggctgcttcctatttgtatgtggggagtggatcccatagggtcaagatgaatc

SEQ ID NO: 853115 - DNA, 532 bp, Homo sapiens
ggtagtttcactcaatccatktctctttataatatttcctttgccttttcatgaatgtattcttccttatgaactttaagaataaaatacaacattcattgaatatatttgcaaaattgatgtgagaaatgtacttggaattagattgtattctcatagcaaaggcatcctggagcacgtatatatctaggagtttgaaatggactagtaattttgcaagggattatggtattgagcaggagaaaggaaatgacccatggaatgtgtttctcatatcacatgaagtcaactcggagaaggtgaggatctttatggtttaaattcattctgttctgtggataagaactggcaacttaattctgtcatgtagtatatcttcctttggcctaagaattgagccaggaatcccagggtaaagcaaccttgaaatttgtttttttcccagaatcatttgaaaaacattccaggaggaaaatatgtagcattggcaggatctgagtgagatacagtagtcccgtcctttattctcaag

SEQ ID NO: 853116 - DNA, 606 bp, Homo sapiens
agtggataattatcttacttttttattaatctttcttaaataaatgtgtagctcacatttattttgatgttgagtagcagaagtgttttggtctttatttagaagcttggtggtgtttttggatcagaaatgtgctgtaagaacttaactcttgtttttgcctttttttttttatttttgatttccataggtttttggggaacatgtggtatttggttacatgaataagatctttagtggtgacttgtgagattttggtacacccatcacccgagcaacatacactgaacccaatttgtagtcttctatccctcaccctcttcccaccctttccccacaagtccccaaagtccattgtgtcattcttatccctttgcatcctcatagcttagctcccacttgtgggtgagaacatacgatgtttgcttttttattcctgagttacttcacttagaataatagtctccagttccatccaggttgctgcaaatgccattaattcattccttttaatggctgagatgtattccatmatatatatatctcacagtttctttatccattctttgattgatgggcttttgggctggttccacatttttgcaa

SEQ ID NO: 853117 - DNA, 376 bp, Homo sapiens
agtcccagctactcaggaggctgaggcaggagaatcgcttgaacccgggaggcagaagttgcagtgggccaagattgagccactgcactccaacctggacaacagggcaagactcccctctcaaaaaaaaaaaaaaaaaaaaaagaaatgcaggagtaatgaggtttcactacttgtttttaaactgacactaaacaattattaacatcaaataaattctatgtatagaaatacaaaatataaggattgagtttttaatctctactatatataaaataggactytaacaattactgcagaggtcagcaactccaaggtttatggaaggaaaaggggagacaggagacagagggcgtggtattgtctgcaggtcatt

SEQ ID NO: 853118 - DNA, 512 bp, Homo sapiens
ttaaaattaacatttagtcttactgatacctaattactataatagctttctccaacrggtaccatgatgtcagaaaaaaacacacatacatactaaaatcatctcttaacacgactatattctaacactgtttttgaaaacctagagaaactacctgagacaagtttagaagggaaatatcatttatagcacacctacctgaaagtaggtgcaggctttgcaattaggcagacctgggtttacattcacctttagtgactgtgtgacctacgggcagatttatctaaacttactatgtcatagttctttgttttacatgtagtaaattcaattacatagttacagcaatagatattatagaaccatttttataaaagggaaaattaaagctcatggaatttacacaacttattgaatcacctagtaactggaaaaatcagaatttgagtccagctctatcagactccaatgcccagggcttctcctgtgagccatatacggcctgtggagtt

SEQ ID NO: 853119 - DNA, 274 bp, Homo sapiens
atcccagcagctctgccagggccaagctctgccccattgggatctggaaccctggacacatttgggatttagggcagggaggtcacagggttcaggacttaagtccagcayggcacagggcaggggtgagagcacaacccagggtcacatctggattcttggggttacccagttaccgcctctctgaccccagatgtctcacctgtctaatgggcacatttgggagcagcacccaccctatggagccaccatgaggacgaaggaaacatatcat

SEQ ID NO: 853120 - DNA, 564 bp, Homo sapiens
ccttggacctgcctctcccacgactccatgggggcctggcctcaagtcataggcccccgactgtgccactgtgtccactggtaattgtacacctgagcaatggaagggtcacacagaccccaccacccacaaaactgcatgtcagatcaccccatctctgggcgcatcccttgaccccgaggctcggagggcagaagaatcaccatcaggccatctggtatagctgaaacaaactcagcctggagctgagagaagggtcagaactggagggctacacaaacacactaaggattttggattttatgttgtaagaaatcaggattcagagaaatcttagatagctcactctatgagctaacaaaaaacagattagtaaataagaaatgagaattaagaaacattttaggtcgaaatgagatacatactatacaatttgctggtaaacaaagcaacaaaatacattttaattgagtagaaaaaaagaaagaaaaaaatggtaggggacagcaaaatcacatctaagaggctgtgrcagggatgacatccaggtgagaaactgggggc

SEQ ID NO: 853121 - DNA, 528 bp, Homo sapiens
tcccttcagaaaactccttagagaaatcactgattccarttaggactggaacaagcaaagaatgagactggaacaagcaaggaatgagaacaagcaaagaagacacaacttatcctgttgtataagaaaatactcaaagaatgaaaggtatatactaaatgtacacagaagccagcttaaaggggctcttattgaccaaatattggacaacttgaacacgaaaattaaaaaagacagtattaacaagttataacacactgaataaaataaagacatgcatccatactgatataaataactgagtaaattaaaagtttcaggagaaatagtatctttacatagtatcaaagggactccctacataaatttattaaatataaagaaagcagtctgtgagagattaaatgatagggaaagtcttaagcatctcctagatttgcagtatgcaattagaaaccaaaaatgatgctccttatgctgctgctgatgccaatgatattaatttagaaaataatgctcccatttaca

SEQ ID NO: 853122 - DNA, 544 bp, Homo sapiens
agaaaattatgctggaaataacagaaattgcttgcgttcacttggtcaactaataatgactgaacctcggtaacaaagatttctggggttatgaacgtcggtttttgcaatgttcacgaggttccaaggattatgacctaggccatacttaagggtacatagatattatatctatacaatctgtatagatatagtacagtcataatatgagctggaattgattttattaaagctgataatagaaaccagatggtccaagtatctgaatcaaatatagacttccttaagctagggttgaaaatagctcaagaaaaaatgaatgaagttctaaatatgacataagagctctgcggaggtaatataagtgtggatatccaagaataataatgacttgttctgaactaagttaattaygtcttccaaggtattttatttggagaacgctgcatggttgtgtgctatatcctaaaattcaagtgtgcagaagacttatcagagggtgggtagaaagttgcaaccaatcaagttttacatgccttagtct

SEQ ID NO: 853123 - DNA, 608 bp, Homo sapiens
caacctagcaataagtttaagggatgtttttacattatggtggactttataggaaacaaatattattcttgtgtcacatgtttacatgtcaaatataactctattcaagttaacatggaggctgcctgccacacttgggctgcaaacatctgtgattacaggatgtcagcttttacgacgcactgcattctaatccgataacccagtacactgtttttccattattcaattccgcatatagctgagaataggacacagtatttctaaacctttttttttttaatctagacttctgtataggatatatctatacattacatattgaattgaagatattactgttaccctattaacccggataatacaaatagttgaactaattcaagttccaaagtaaaatttcatgacttggatgatccagttcagctgtcatgaaatagggatgaaaaacggcacattataaaattttagtaaagtattttgcttatactacaaaagggccagcatatggtattcctaataaagagatwagataggaagaacgagaggtatttccaaactctagaatgccacttagcaaagcatcactgtggtatattttagcgctc

SEQ ID NO: 853124 - DNA, 541 bp, Homo sapiens
acttatatatgattaaaatttctgtttctatactcattttattaaaataaatgtttgaacactaaagttaaaagcactttttaaagcaacaacaaaacaagaagtgatgaaggaaatactcaagtcatggaggaaaacctggctaagaaagaatcaacacattggattttgacatattgtcaataactacaagatcatgttccttggaagcaaaattatagtttacatctaaagtatatgctttttattgtttcatgtaaattgttttataacaagttgtgataagtcatgtataaccaacaataatatttttcataaaatacttgtcaaagtaagtttcacaaagacaaaatagagtagagctaagctaattcattggttatggacagtaaggtgcaagagagtggtacaagagtgcagactcacagtttaaattattctsttaccattagatgcaggcatatagggtctgcacatgttacaatcaaaaccaatgtctgctacattttccacttcttcctcagtatttaagttctgacga

SEQ ID NO: 853125 - DNA, 557 bp, Homo sapiens
gggactgtttgtggaaatgtaaattggtattaacactataaaaaacagttgggggtcctgcaaacaatagaaaaaaaaaaaggaaataccataccatctagcagtcccactactggctatayattcaacctacctgttcacccacagataaagagatcaagaaactctcatatacatacactggggaatattcttcggctatcagaataatcaaacagtgtcatttagagcaacccagatgaacctggaaaacattatgataaatgtgatgagctaggcctagaaagacaaacactgcatgataccactcatgtgaaatcttaagatgtttatcttaaagaagtagaaagcacaatattggttaccagagtctgggagacagaaggggaatggagaaggattggttatggaaacaaagttatcttaacattaaaagaataaatctgagtgttctcctcagcctggtgactggacttaaccgtattacatttttctaaagagcaaggagaattttgaatgttctctttacacaaaaataatacctgtatgagggaata

SEQ ID NO: 853126 - DNA, 557 bp, Homo sapiens
gggactgtttgtggaaatgtaaattggtattaacactataaaaaacagttgggggtcctgcaaacaatagaaaaaaaaaaaggaaataccataccatctagcagtcccactactggctatatattcaacctacctgttcacccacagataaagagatcaagaaactctcatatacatacactggggaatattcttcggctatcagaataatcaaacagtgtcatttagagcaacccagatgaacctggaaaacattatgataaatgtgatgagctaggcctagaaagacaaacactgcatgataccactcatgtgaaatcttaagatgtttatcttaaagaagtagaaagcacaatattggttaccagagtctgggagacagaaggggaatggagaaggattggttatggaaacaaagttatcttaacattaaaagaataaatctgagtgttctcctcagcctgktgactggacttaaccgtattacatttttctaaagagcaaggagaattttgaatgttctctttacacaaaaataatacctgtatgagggaata

SEQ ID NO: 853127 - DNA, 669 bp, Homo sapiens
gcggatccagcccgctggttgcctctagrgtcctgggcgcccggcggtccgcatgcagcccggggcctgcccaggtgaggtctgcggccgccacagcgctgaggtcccgcctggccggggcgcacgggccgctggggatgctggctgcgaggctccggggaggtggagcgggaggttgtcccaggccctggctgcagagctcttgatgtcacgcctgacaccctccatccaccgcctcggggcagcgcttcagagccccggcagaggcaagaagtcgatcactttgttcttcattcgttggaaaaatggaaaagcacattataatccctggaacaaccacttcagagaaagagcaaaaaattaaaataggattgtaaatgacacactgaaataagttgattttaaaaatggtagtcaatggaaaaacaggatcagaagacaggagagacagggaaaacaaataagttatctgactgaaacagaattagaaactaacaacagtaagaaatattggacatctgaaaatatgtgaaaatttaacaacccacctctaaatcattggatcaaaaaaaatcacaagataaattggaaaatattttgagctgcactccagtttgggtaacagactgagaccttgtttctaagaaaacaaaacaaacttcaaaaagc

SEQ ID NO: 853128 - DNA, 669 bp, Homo sapiens
gcggatccagcccgctggttgcctctagggtcctgggcgcccggcggtccgcatgcagcccggggcctgcccaggtgaggtctgcggccgccacagcgctgaggtcccgcytggccggggcgcacgggccgctggggatgctggctgcgaggctccggggaggtggagcgggaggttgtcccaggccctggctgcagagctcttgatgtcacgcctgacaccctccatccaccgcctcggggcagcgcttcagagccccggcagaggcaagaagtcgatcactttgttcttcattcgttggaaaaatggaaaagcacattataatccctggaacaaccacttcagagaaagagcaaaaaattaaaataggattgtaaatgacacactgaaataagttgattttaaaaatggtagtcaatggaaaaacaggatcagaagacaggagagacagggaaaacaaataagttatctgactgaaacagaattagaaactaacaacagtaagaaatattggacatctgaaaatatgtgaaaatttaacaacccacctctaaatcattggatcaaaaaaaatcacaagataaattggaaaatattttgagctgcactccagtttgggtaacagactgagaccttgtttctaagaaaacaaaacaaacttcaaaaagc

SEQ ID NO: 853129 - DNA, 456 bp, Homo sapiens
gatgaatgaagccaatgtattgatattcaagtttatctagtttttataacaaaaatcaacaaaagatatgtcttatgcctaatagtaacaaagagaagtaattagtcaatgtggtttatcccaattctagctttctttgcttcatccagtagttcctggagctgccaaaatcaaatcctttttgtgtaaacatgctaaatgcatctgaagtgagttgactcaggtttcctcagcagaaaccccaaaattacataaataacttcttcttttccctccttcctgcctcaaaatccctcttgcttgaggaaaataattgctacatcagtgrtctcattggttctcgttccacaattttactggttattacaataacttttccgtctgtttttagcaatacgatgtgacgtctgtaaaatctatacttcaactcattctccttccacccttggtgaaaac

SEQ ID NO: 853130 - DNA, 602 bp, Homo sapiens
aaaagacttttctaatttaaatcattttattattgctctaaatttgccaggttcattttagaattttataaactgttttaaaactaatttacattaagttggaataaagttaaccaaattaatacaaacatattttattgcacttctctttattgtgcttcacagataggaacattttttcttttatttacaaatgagatgtttgtgacaaccctggtgaagcaagtctattggtgccatttaacaaacagcctttgctcactttgtgtcttggtttcacactttggtaatcttcacaatttttaaaatatttccttattattatatttgttacggtgatctgtgatcagtgatcattaatgttatgggaggcggagtttgcagtgagcagagatcacgccagtgcactccaacctgggcaacagagtgagactccatctaaacaaaaaaaaaaaaaggagtttttatatgtagggtacaaaatactatctgaccttarggtgtgtgcaaatttttctgaattaattaagacttaaatatcaacaggagtgattgtttttgttacaatcaccaggtgggtgatctgatactttcccctgaaa

SEQ ID NO: 853131 - DNA, 558 bp, Homo sapiens
ctgcaaccctgggaggaacatattgctttcccattttataaatgaagtaacagaggctctgagaggttctcagttcctcaaattaaacacctaktgagtgggggaagttgggatttgaatccaggtgtgcctcgttaaaaagtaattgcggtagggagactttgacctttttaaaggctatgtaatcagagattcttctttctgcattcagttaatgctgtcctttacagaagaattttctccttgtagattgatgatgtggaggagttatggcactagtgttactggtagtaacaacagtagcagctaatattcactgagcatttcttgtaaaccactgggaatgctttacacataataacttagttccttgtttcttaatccatgcagtgctgtgagggggaccattttacccaacttcacagatgaggacactgacacagaagttacataaattgcccagtgtgccatagtaagtggcagagccaggattcaagtccagacaggcagtttggctccagagtccaagttcctaattttattattatatgttctaga

SEQ ID NO: 853132 - DNA, 618 bp, Homo sapiens
atgtgactgtagttctagaaaacaattatgtatctatgaaatgcatgaataattaacttcatgatacccaataaaaactargaacaataggtcaaacttccttggattatgggcagaaatgttacatgtttttaaaaaatggtcttcctgagctgggtgcgggggctcatgcctgtaatcccagcactctgggaggccgaggtggcaggcagatcacgaggtcaggagatcgagaccatcctggctaacacagtgaaactctgtctcttctaaaaatacaaaaaattagccgggcgtggtggcgggcacctgtaatcccagctatgcgggaggctgaggcaggagaattgcttgaacccgggaggcggaggttgcagtgagccaagatcgtgccactgcactccagcctgggcgacagggcgagactccgtctcaaaaaagtcttcctggcatttcttttttcatgtcccaataaaaagagttagaagcactgcaaataaatgcaatgctcagctaatccactatgagctttttcctggaaaagatcaaaaggcagggatctatttacacaagaggagagagaatactccagaagctcatctggaaaaatcagagtat

SEQ ID NO: 853133 - DNA, 593 bp, Homo sapiens
accttatgattcaggtactagttttgctgtcatcattgtgcagtggtgtgattgaaacttagaggcggccaggtgtgttggctcacaactgtaatcccaacatttttggaggccgagagaggttgcggtgagcyaagatcatgccattgcactccagcctgggcgacagagcaagactccgtctcaaaaaagaaagaaagaaacttagaggcattcatttaattacttgttcaaagtcactgtactagtaatgaccattgctgacattagactccaaagcagtctgattcttgaatccattttcttattgaacatactagaatcagtgaatttgtgcatgaataaatttctgaaaggcaataatgagcttctataatgtctttatatacctgtttatagcaaaacttacagctatttaaactttggtaaatggtagatgactgatggaaactaaaaataaatgatgaattcatgcctggaaatggcagagagattaattaaatcagtgtttctctgaacttgacaatttttaaaatcacttggaatgattaaaaaaatacacaccctgagcaacacccctgagtggtgtcatt

SEQ ID NO: 853134 - DNA, 564 bp, Homo sapiens
aagctctgttctgatttatattcttgtgcaataaactactctaaaacttgttggcttaaagtagaagaaaaacacaacattttattatgctcatgaattgtgcgtgacaaaaaattaacatagaatataatggggtatgaggttgcctattttctttatgtctgaaaactcacctgagagacatagcctaggagtgatttcacattggctaactccttcttatcctcctttgtgggttccagttcttcacatagaattatttaaatcctattccttgggatttcatacttttccaccttggtctgtagcctttcattgggtgattttatctcattgctttggttaatggctcgacaaatctatattggaagcacattttttctttcttgagcttcacacatgaatatagcagaaaagtgtaaacctaatatgttataagtgytcctttccaagtttgctcctctgactatattttttaatgagtgatcacatagttaggtaaatgtttcaaataagaaaactgcaagtaatccatttctcttaaacctaaaattcactgaaact

SEQ ID NO: 853135 - DNA, 625 bp, Homo sapiens
ccgtaaatgagggtgtgttgttaaatgtgtggcttagcagtgcgactgtgttgagttatggggctgctgggacagtggttgtgtgactcggttgggtatttgtaggttcacgtcttgtatgtatatgtttgtgtatggagggagatagtcaagggaaaaggtagattgccaggcctggaccccatcctacttgggggcagggggtaggtcagagaagcaggaaaacacactattgaactcaggaaacacagtggccagcaacttcctctggagccccatatctggctcctccccatttgcccccaggaacccctggtgaagaggaattactggggtgagggaagagagagaccctccaaaaccctcatgccctttgttttcaggtacatatgtgggcccagtcccaagccttagcacattgctgaagagctttgtgctgctgagctagggagggcctggatctgtttatatgtgcaggtaaggcagtgtatacgtgtgtttgtatgtaggcatgtataygcatatgtttacgtatgtgtctgttggtgaattaattcattcggatagtctgaccatgtaccccagccagggcttctggatccacagaggtctgaacccaacccca

SEQ ID NO: 853136 - DNA, 642 bp, Homo sapiens
tctggttccacttttgtttttgaccactccaacttacgctgatcttagccactaaatctgagttaatcttttttaactgacctatacaattacttaactcccttgtcaaacatatcttatttgtctaccagtaggcaagctccacgttagggatcctatgaagtgctttttgcacagcactaaacacagtgaatatttaatggtcaagattatgtgttgaatgaaagaaagaatgattaaatggccgaataactgacagtgaaggaataaatctgagtggttgcccagaagtcatgaaagcacataagtcattaaagcacatttttacgtctgggaaacactggtgttgataaactagaagatgggtattggagattaaaagcaaagctatatatctgggatgtatgtatatatatgtgtgtgtatatatatatatatatatatatatatttatatataatatttttatatatcccaaatctgctgtgtccagaaatgttaaagtgtagtgttcactgcagaaacttctttcactccaagcaatgcttgctttsctcttcctggggctcacctgggcttgcccttcctaagctgtgctctgtgacatctgtcctgcctaatcccactctttcttacataaaa

SEQ ID NO: 853137 - DNA, 586 bp, Homo sapiens
tttagaggagctaaaatcagtgacttcatttttgaagagaatgactgtcatgggtaattgacagaattactgcatcttagccatagaagcattggaaattgtgcagaagctaaatggtttttgccactcaatatagttaaactctggaatgactttcgggggatacgtgatgaaagtagcgtgtttttctttaaccctggctactgaactggaattatggagggtcactggcattttttcaaagctctgtaggcaatttggataaacaaccagagctaaaactctggattagagagttagaccgacttttgaagtgtaacagggactagggttgtcaccttccacatgaaatcatgagcttttgggggctaaaagcccaaaggtagtaattgttaaaattatattttaaaatttttacctaattcttttaggtattacccaataaattcacaatagagtgtgaaggaagaaatagaagctgcagtgaaccatggtagttccttaaatctgaccccctgtccgattaactgagaacaatcmcacttgtcccaacataattatagccacctccctttcactttcaaaa

SEQ ID NO: 853138 - DNA, 530 bp, Homo sapiens
gttcaaaaactacttatttgatactacgctcatgaactgcatataatacacccatgtaacaagcctgtacgtgtaccccctatatctaaaatataactggaaattaaaaataacaataaaagcatcagagggcagcataaaagtagtttatttctattaatatttaaatagtaaatagtttatgactatttactattacagatcatataataagctagctaaatagttatgtactagggcaataacactgaggacacactgttctcatcccatttacaatacttaatgcttgagggcccagacattttgtccttcacaggctgcctgcaaatgggtttagatcctgggctaatttgggaataccatatcaatagatattccttgaaagaaaagacagtaatttgtacaatagttttcaagttatctcctgttcgcggctgtttttatctagattctagacgagtcattctkaaaagaacaaagtggtgtaaggattttctgtaaccattttaaaataaggaaaatttcca

SEQ ID NO: 853139 - DNA, 598 bp, Homo sapiens
atagcctggcatggctgtctgcattccagattcaatacaagcagaaagcgagtatgcagtttctgggaagtgcatttaaaggtaagggcaatctccgttttttaawtttttttttttttttttttttttggccaggtcttgctttgtcacctaggatggagtgcagtggcacaattatggcccactgtggcctggaattcctgggctcaatggatcctcccacctcatcctcctgagtagctgagactataggtatgtgtcatcacacaccctttttttagttttttggtttttttgtttgtttgtttgtttaaatttttgtagagctaggtggtgtcgctttgttgccctctttcttttctctttccttttcttttcttttgagacggagtcttgctctgttgcccgggctggagtgcagtggtgtgatctcggctcactgcaacctctacctcctgggttcaagcaaccttcctgcctcagcctctcaagtagctgggattacaggtgtgcaccattacgcccagctaatttttgcatttttagtagagacggggtttcaccatgttggttggccaggatggtctcgatctcttga

SEQ ID NO: 853140 - DNA, 644 bp, Homo sapiens
cattgctattgtgtttttgaaatgcagctagtttaacctatatgtattggggccaacaggcatatgaaaaaatactcaacatcgctaatcattacagaaatgcaaatcaaaaccacagtgagataccatctcacaccagtcagaatagctattattaaaaagtcaaaacattaacagatgccagcaaggctgtaaaaagaggggaacacttatacactggtgattggggtgtaaattagttcagcaattgtgaaaaacggtgtagcgattcctcaaagaacttagaattaccattcgacccagcaatctcattattaggtatatacccacaggaatataaatcattctaccataaagacgtatacatgagtatgttcaccacagaactattcacaattgcaaagacaaggaatcaacctgaatgttcatcaacagtagactggatcaacaaaatgtggtgcatatacaccatggaatactatgcagccattaaaaaaagaatgagctcatgtctttgcaacagcaacaaggaggccattatctaactaagcaaactaatkcaggaacagaaaaccaaataccacatgttctcacttataaatgggagctaaatgataagaacacatagacagaaagaggggaac

SEQ ID NO: 853141 - DNA, 412 bp, Homo sapiens
ctacgtagccagagcacttgaataagataggagtgaaagggcagcattataacctgttcctctaggaattgagctctgcawacctctgatctaagtgtgtgtgattagattttaatataggcaacaccctaagccacaaactactaaatgaggctgttaatagatactcagtctaaaaccccagttatactagcacactattgaatgccaattttttttcataaagtaaagcacaattttcccccagaaattgtccctcatctcatccaaaaattgctttgccttattagccttgcaactctggaagctaaaacttgaagttaaattccattctggccttgctcttccaaaatcagtgtagggtatgggactagaacgctagacttagtataaggacagatactagtcctga

SEQ ID NO: 853142 - DNA, 595 bp, Homo sapiens
ggagcctgagtatttcccagcacactaggctgcctccccatccacctgcgcctcagctstgctgccaccgcgggccccggctcctcctctgctccacgggtcaccccagaactctgctgtgttgtgctccctctgcagccagccatgccaagggaaaaggggcacaccataaaggcaagtgagggagaccttgggggctgcagcgcagggttgggggtggactgtgaccttgcatctgcttcagcctgaaggtcctggggcagctggggagcaaggtgctggcgtgacgctcctgagagctgatgcagctgccttgcatagtaagaactcatgcatactctgggtgacagtccacataggaagaacttgtgcatactctgggtgacagtccataggcatccattgtgccaagccctgtgctggttgctgtgggagaaactgaggcaaggcaagtgttgtttctagcctcaaggagtttatgatccagagccagaggaacaacaagtaactggggtgagctggagtgcatgggaggccagggcaggtcaaaggagttcaaagagactcgtatggtgattttaggggacaaaaccaa

SEQ ID NO: 853143 - DNA, 640 bp, Homo sapiens
tgaagctgctaggagatctcaggatcccagccctcccaaacaggagcctagctctcaaggagccctagccactgtccctgtgcttcatggagctacttagtagaagccacatccccgggcaccctgcagctctctggggccatcctcgaggccctccaacaatcccgacgctaggaaggctgtgacgttccactgcaccagacttcccatcccatctcctgaagtgatttctcatctcagggctctcaaaccaacagaagcttcagccagctgtctgggaggggaggcaggggccctgggctctggttggaggacccatggctccgatcactgtcctggggaggttgcaccttcgtgttggcctcaagggcttcaccacctttctctggtcttgcaaaaagagggcttggcatgttcagcatcttcgtcaactgtcctcccctgtagttgggaagaattctcagggtgtgaactcattggaatctcaccataggccagggaggggggtgctctcgggggccgragaaatcccagtctcgatgccagggttgactcctcagagctggactcctggatctctgctcagatccctcttccataaacactgatcctggagagacacagccagctgtcatgaagc

SEQ ID NO: 853144 - DNA, 561 bp, Homo sapiens
gcagggtggcacctctctctttccctctgggtgagtgcggggctgtcttagggtgggaggcccagcagacctgwttgaatcctgtctccgtcgtcttccgcctctgacctcgaacacttcacttccctgtatgagcctcagtttcctcctttgcataggggtatgaatgatgctttacgttatgggctttcaatgaaagtagtgatgcaaactgcttgtccccgtgcctggcacactataccggctcaataaatggaagttgttttgtttattcagatcaggagccaagtttcccctcctgtgcaacccatccctcccccactgtcccctgccccaagccaggatgaaggtggctgtctctatatgtgttgaggtcacttgaccccaaagatctcaaaacccgagcccttcatctgttcccacaagctgggaggctggtaagtgtccctactttcccagaaaccacatccagccccaagaatggagtttagagagaacagcagtatcaggggatccccagccctatcccaggaaaagcagcacccctcaagtggcaaacag

SEQ ID NO: 853145 - DNA, 550 bp, Homo sapiens
agtgagactgccgatgacgctctcccgccacctgccctgtcaccgtggggcctcccacggtgtcccaggccccagcagcctcgcgcccggttcccactgctgtgttaggraagcgcccgctgttggaaatgtaattcggaacgttcaacccgtgactctccctaagtctttaatctgcggtgtcgtgaggtcgcagttgtcctggagacacgctgacgagccccccagccgtcgcggtggagcagctgctgggacgatgaggcagcccctcctcccagtgcctccgccgcgtaatgagaccacttgtcaaaacagagagagacacccattttcaaggcctaaaaaattgatttttatggctcttcttgtaattctctttttgaattaggcacatgatattgatgtgggcctacgttttaatcataatagctactgacaaggtaattaattttagaacaactgtttttttttctcctgctccaaatggcactatattgaaattgaaagtgagctctgggagggcagcggggctggcactcaggtgattgcc

SEQ ID NO: 853146 - DNA, 507 bp, Homo sapiens
tttttttttgagacggatccggtcttgctctgtcacccaggctggagtgcagtggcgcgatcttagctcactgcaacctccgcctcctgggttcaagtgattctcctgcctcagcctcccgagtagctgggattacaggcacaggccactgcgcccagctaattttttgtatttttagtagagatgggtttcaccatgttggccaggctggtctcgaacttctgacctcaggtgatccacccatcttggcttcccacagtgctggtaaaaattcccttttaaagagcttttctgtcagtgaagttacagataatgtagcctcaattgaatactgaggtcatttttaacactaaaaatgtccttttttaatgttaattgaamcatatatatttgttttgaacatggcccatcatacatatatgcatacacacacataaaacctgcacacttatatatatatgccaacatatttcctttaggaattctctctgctaggctgatgtgtaa

SEQ ID NO: 853147 - DNA, 632 bp, Homo sapiens
aggacaggtctcctccctgccacagagaaggcgcaargttctaacttctgggggatcacacaggtggtagggggcttacctctaatttaggagccccttgagaaagaaaactctcagcggacatctagaacaagaacactccacagcctgaggttcacgaaccctgagatcacccaaatacccatttccagcacatccaattgttagtgtaaaatcgtctgtaaacattgcttctttgtggctcaagaataacagtgagataaactttaaatgacagtttgctgttttgttatggaaatgttaacaaggtgtgtttggcctaggaaacatcattatcttttgttttcctggggaaaatgatattgaaaagttaaccagagttcactttccagacctggaataacataagaagagatttattatatcatatttcccaggatttgaacaaaagcatcaacaatgcaagataatgacagttcaccatttttattatggtaaaatacatgtaaacttgactatattagccactttcaagtgtgcagtggcattcagtacgttcacattgctacgcaaccatcaccaccatcatctccagaactttttcatcttcccgaattgaaactctgtatgtt

SEQ ID NO: 853148 - DNA, 534 bp, Homo sapiens
caatgtcaagaagttatcctacacggtctaaaagggggaggaaccctccgttccaggaattgcccacccctttccctcatgaataatccagcccttgtttagcatataatcaagaaataatcataaaaaygggcaaccggcccggcgtggtgactcacgcctgtaatcccagcactttgggaggccgaggcgggtggatcacgagtcacgcctgtcatcccagcactttgggaggccgaggcgggtggatcacgaggtcaggagatcgagaccatcctggctaacatgtgaaacctcatctctactaaaaatacaaaaaattagccgggcatggtggcgggcgcctgtagtcccagctactcgggaggctgaggcaggagaatggcgtgaacccgggaggcggagcttgcagtgagccgagattgtgccaccgcactccagcctgggcgacagagccagactccatctcaaagaaaaaaaaaaaaaaatgggcaaccagcagccctcggagctgctctgcctatggagtagcca

SEQ ID NO: 853149 - DNA, 484 bp, Homo sapiens
taatgacaaaaattgtcttgttattgtcccacaggaccctgaagctcttttcattaccctttcaatcttttttcctcattatatttagattatgtaattcctatttgtttatctttaagtttgccaacacttccacctgtcttctttattttgttattacactgaactacagtgaggattttttttttattattactatttggtctgccttttttggcttttacatttttatttagttcttttgtttttctttgctgagaattctcttcactaaattatagacttaatgttgtagaaagtacatttagacctcctctatttctggaactgtatgcaagtccagctgctcaccacctagaagcaaactgcaaaagargtaggatggagtgacaggaaagcagttttatttttcaattgctaggagatgggagatgggctgcctcaagcctcaaaaacaaaacaaaacaaaaaaacccatctcaaa

SEQ ID NO: 853150 - DNA, 607 bp, Homo sapiens
aagcacttacttcactgtgagggacacagaccatcacatgtcacataaaatgatgagacaatctagcaactgcaagttaacttagrtcttttgttctttcattgtaatgtataaaattaatcataatattttatcaatcttgtctacattaatattttaaaactctctttctcatattttataatcactgccttgctccagatcctcatcctctcttcactaaagtttttcaaactaaatcaaaatataatttgaaatttgatattatcagctaagattcttaactaaaaacaacaaaaataaattcatcgtaattaaacagaaaatataatattttaagaagatgcaaaggcttgccaaatcaccaaaaaatggacactagtaaggtctgaaaatctgccaccatgagcagtttccaatatgtgcttgataatgagttctgtgaagtcaccactcttgctccttctgggtgccattcacagccctagaaacttggtgaatttatttctgcggtgtccaggtagcctttgaggatttgcacccgccctgctgctttgagctacccattcccatgttaaaatctgggatccaaaaatctaatatagac

SEQ ID NO: 853151 - DNA, 515 bp, Homo sapiens
acatttaaaacaaaaggtcaatctcttaaaaactatatacttggtttatcttccactttcctttctcgcaaaaaaaactaaaagtcttttagcacaggtactacccccagaatttccagtaaaccagcaccagcctgaagatcacgttctcatcgaaaggtggaaagaagaaaaactcgagtcagcctaggaaggaccctaccttgtgctgctaaccaccaagacagctgctcatacagcaaaaaaggatggactcatcacacccagtcaagaaagtgccacccccgccacagagttgtgggccatagtcccagaggaaaaccctaccaaactaaagctaagaaaaatctaacgcttttcatctattactctttcttctttccgcgctctattgctgaccctctagttattaacataaccaagtcaattttgcctcaaactattgcatttaatgcttgcccttttataccctgtggggacktgccaagtcaaagacagctctctacttcagaaaa

SEQ ID NO: 853152 - DNA, 611 bp, Homo sapiens
aaaaaaaaaatagaatataacttgtagaataagaataaaaaggaagtatttaatacagttttacaatgtgtgttttaagctaagtgctattacaaaaaaagtcacaaagttaataaaaagtaaaaggtttacaatgtaaaaatgtttccataaactaaggatagtttctaattgaagaaagaaaatactttttaatgcatttaatatagactaagtgtacaaagttgataaagtctgtagtcatgtacacgactgtcctggctcttcacattcagtcaccacccactcactgactcacccagagcaacttccagtcctgcaagctccattcatggtaaatgccctagacaggttaccattttctgtattttatacagtatttttactgtgccttttctatatttagatacacatatacttaccacggagtgacagctgtcttcagtattcactacagtaccatgctgtactcgtctgtagcctaggagtgacaagctatsccagacacttatggcccaggattgtggtaggatacaccatctgggtttgtgtaagtacatgctgtgatgctcacacaacgacaacatcacctaacgacgcctttctcagaa

SEQ ID NO: 853153 - DNA, 568 bp, Homo sapiens
tctgttgtcattgaaatatctaataatttcatctckgagtatgaatgtgatagaggagctagacaggctggcagtgttagcacgcagtttgggtccactggtagtgactacacaagtgggctcaggcaacaaccacatggggcaattggcctggtcttctcatgcgcgcacgcgcgcacacacacacacacacacaaacacacacacatcttgtaatacttcacagcaccacaggacccaagcagtgtctggggtatgcctgggctcatattgatggtgatgacagaagcagcagtgcaggtggcagtagggtccaagtgtccctagcttggaagagaggaggtgcttgccctggcagcagcaagtgactgctgatgggatgcctattttccctctgtcccagagcccacgcctgttgtattcattgaatatcagaaaagaaaaagccaggaagattagcagtaaacattgttagcaaactattacaaaataaaaatatacactgctcattgcagcaaaacacaaaaaggacttactctgattcataagacaagttcaaaatgtgtgt

SEQ ID NO: 853154 - DNA, 598 bp, Homo sapiens
cgagtctttaaatactcagagagagaaataatggaaaaaactcttcagtctctgttctgttggttcatgagattttctcacaagtcatttggatgggccattaagtaagtcacataatgactggaattttctattaattgcctcactttgggtttctggctaaagtatctggcagcaagactgaagaacaagcgaaagagaaaaggagtgggtggtggtgggaatgtgagaccatccattgtttgtttattgcctggaatcctaacttaggggagagggctggagggctgtctttgataggaccatccacttggatggctagaagtaaatgacttggcttcttgtcttttaaacagtttaggtttctttgtttcagagggttactttactttctgtgtctgctgttgtcaccgggaagttcatggatcgaattctctggcatagcgcacacacattagtttgtcttcttatacgcatcagtcattagctgtcttggctttgggaaatgagaacttagtttaatcctagttttccttttgctttctgctttctgttaatccctttgtggtatrgatcctgagtctatcagtcaggatcc

SEQ ID NO: 853155 - DNA, 560 bp, Homo sapiens
gccaaaatagctgtaactatttaaattgatgaatggatggatggctatatggatggatataaaaatagttgatagattttttttcctttctgctgctgcttcatggtagagctaacccaccccttgtctctcactccagctgcagtggatatcctgtctaccttttttgtggacatttgtccatcaataacaaatgggtaccccaaaagtcaagagtcacacaaatattaaaccaagttttataaatgtttgtgctgttgagttaaagagcttacaagtactacagggactgattctctgacaaggaatcaaacccaggccacaggtgtgaaagcacagaatcttagccactgcaccacaaggtggaatgccttatttgtaaatcccacagggaattcaaagcaggcagtttgagtgtacaaaggattttaattttgttttgggttagayttttgcattttaattttgtcaagagaatttctaagccaagacactattgtgtctttctttattttgattgtcccataaatacaagtaagacaattgtttagaatgagaga

SEQ ID NO: 853156 - DNA, 552 bp, Homo sapiens
ataaaaagtagttattgggccgaatatgtttaggacagaagattttctgtcttcaagggtgttattataactaaatgaggcagactgamacagtaatgttaaaaatgccaaacacaaatactatgaaagataaagatgatttcatattatatttgtatatgaaaaagaaactggatagagctctttaaaagggttcacgggtaggtgagtttttggtaggaactgaaagggaagaaaaataagttgattacggacagaggagggcaagtagaaacaggcagaggtgagcatggaacagaaatctggtttacttggctctcacaatgtttgagaattaataaagatcattgctggggatacaagttgcaggcaattgaaagtaaccttaaatttctgagcatagtctttaagaagatgctttaagataattcttactttttaaggttagattgtttagagaacagaggaatacaagttgattaatctacttcagagtttcagatgatactgtgtcaagagaataaaatgtggtcagtcagtaagaatcagtaa

SEQ ID NO: 853157 - DNA, 560 bp, Homo sapiens
gtgtgtgtgtgtgtgtgtgtgaagagcgggtcagtgatgttgggttttgctttcaatgcctaccaaagacttggccagctgtggatgtcagatataaaaaacaccttgttcagctaatttgcaatttagtgatraagagcttcccacacctccatctaactagaaagcttatccaagctcccatttcatgagtgtggaaactgaggcaaaaatgtttaagtagttacccaaggtcacaatgccagtcagtgacagagctggaaaaaaaattctggagtcccagttcagtgctccctccattacactgggctgcaaatagcaccatgaaactttagtgtctgctcacctctccctcccatttcctctgtcaggcagtgcagtgggacattgtggctacctctctggccgccatcccagccctcttttattccccagcagccctactgtttaggtgaatgaatcctgctctcagctccatgaatcaattaggataatcttcttcccctatccgattttcctcctcccttaccaatagaacccttactttcttggagctgcaa

SEQ ID NO: 853158 - DNA, 622 bp, Homo sapiens
aaaatagatcttctggacttcacagactgtacttgaatcactactctatatgatctctttcctatgctagatacaatgataatcataaacaaggggtaatctagactttcattatctttggtaaattyacagaaaatgcccatttaattacaagatactactatactgagattttaatagtaaagaattaatgaagaatttaaatattctagttacaaaaataattaatttagaactatgtgtagcagtttgagatttaaatttatttatgaaaagttacattaaaatatgtttcatatattctcaatacctctctgaactttttcttattcttaagatatttcattgaattgtgatactgatttcagatataacattgttagaactctggttaaatacactggtaacatttgttagcggttaaaaatttaacacgggcttatggttcaatgtagtagattgagcatatgctgatgtctactgctttgttccaaaactcattttaataggaatacaagtatagaaataagaaatggaggaagagtgtcaatggggtatgaaagcatttgtaaaatcttatgggaagtaattagtggatgaaggaatagaaatacaggaaacc

SEQ ID NO: 853159 - DNA, 531 bp, Homo sapiens
atggtggtggacgcctgtaatctcagctactcagcaggctgaagcaggagaattgcttgagcccgtgaggcagaggttgcagtgaaccgagattacgcccttgcactccmgcctgggtgacagagcaagactctgtctcaaaaaaacaacaacaacaaaaaaaattaagcaccttgggaaactctgcatatgtgtcatcagccaccatgagggtccaaagcttcctttatgtcatattcatgacgagtttgttcatttaaacaccacaaggctctgaataacacagtggataaaaactgtgtgaggaaagaaaatatacctgtgaggaggagaaaaataacagggcagaaagaggaggggtgacaccgggccgttaagcattcattggcatttggtgactggcacagagagaatgcactgtgcagggagcctggtgccccatggaaagttcccgaagcagaggcagccacagtgcttagaatatggctgctcggtatttccacagcatctagaacatcttcccttagaaaa

SEQ ID NO: 853160 - DNA, 538 bp, Homo sapiens
tttcagagggtaggacgcaggcaaggatcctctctggggcctgcaggcccatcctctcctggctccatcccaccctctctaaccactcgccctgctcagggcgcagggctgggctgtttcctgcttctgaagcctctctgtgccttggtctcctccatgaaggtgcattgagctgaccaggtaagagctgggtgcagcaggtcccctgtggtgcgctgcaggactgtccctgatcatctgctgcccctcctgcccaacgccatctgactggcagtgtcgctatgggaggggtgtccacctgcggcttgcgggtgtggccgatgggatgtggacagaagtgacccggccttgcctcagcaggccttttccctctgcccatagggtcctgtctctgcagggagctgagaatgggggatctttaattagcattctcttctmcagccaagccagccttccttcctggggggaccctgtcctccctctgttgggccatcagcctgcgggaggctccatgtggctgggccctgcatggaggtgc

SEQ ID NO: 853161 - DNA, 596 bp, Homo sapiens
ccggatgctgctggccatgtcaggagctgggtgatgtggggccctgtgcacacgggccctgaggaagcaccagactcccctgtgctctcctctgtggggaaagggggtgatatggtctggctgtgtcccyacccaaatctcatcttgaattgtaactcccacaattcctgcatgtcatgggaggaacctggtgggaggtgattgaattatgggggtgggtcttccctgcactgttctcgtgataaggaatgagtctcacgagatcttatggtttaaaaatgggagtttccctgcacaagctttctctctttgcctgctgccatccatgtaagacgtgacttgctcctccttgccttccatcctacttgtgaggcctccccagccacgtggaactgtaaatccattaaatctcttcttccttttgtaaattgcccagtcttgggtatgtctttatcagtagcgtgaaaatggactaatacagggggatctcccatcctttcccctttcagtcaggagtctctgaaacccgtgaaatcacgtgcagaattctgtgtgcagaggaattttcatggagggaggatccgtagctttcccca

SEQ ID NO: 853162 - DNA, 457 bp, Homo sapiens
gcctgatgaggccatgatcatggacagggtggcacgtgtctcttcctaccctgggagygggtagaagctgcgcacggctcctcccgcacccccaaagcctgcgctgggagtggagagatttacgccccaaggggggcagtgccactgctccttacggcacattaagctgacgaatgagcatccatcagggcacatgctaggtgctgctgccaccgatggaagtcacagctcatatttctgaaattgatgctgtgaaggccacagtctattaacggtcctgcgcagggttattaaagtagattaactgaataatttccatagaataataatgtttcttaaggattatggatgggccctggtctttccttagctactgttagccaaaaatgtccaaaggtgggtccgctttctcgtttaggctgcagagcaaatgacgtttccagtgagaacacagacc

SEQ ID NO: 853163 - DNA, 622 bp, Homo sapiens
gcctgtatcataatttaaacacatgaaaatttctttccagagaaggtagtcatatttttcctgaaagctagctatacaggttcattctctgttcaggcatttctacagacatgggcaaactatgtttattatgtattactactgtacttctaagtaacttaatcaaaaatcagagtacagagtggatccatgggttctgcatccatgaattcaaccagccttggattgaaaatattttttaaaaaatggatggttgtatctgcactgaacacgtacagactctttttttcttgtcattattccctaaacagtacaatgatttacatagcatttgcactgtattaggtattgtaagtagcctaaagatgatttaaagtacagaggaggatgtgcgtagattacaggcaaataccacaccattttatataagggacttgagcatgtggaaccagtcccccacggataccgagggataactctaatcatgttygtatttaattacaaaatatacccaatttataatctaaggtcctccgtttttcataattatgtttctcaaaggttgataggtattttatttttaaaatataactatatgtcaaagagtgtatgtcaaagaagg

SEQ ID NO: 853164 - DNA, 597 bp, Homo sapiens
ccatgttggccaggctggtcttgaactgacctggtgatccctctgcctcggcctcccacagcgctgggattacaggcatgagccaccgcatctggccctattcctttactttctcaataaacttgctttcacttcactctacagactggctgtgaattctttcttgcgtgagattcaagaaccctctcttggggtctgtatcgggacacctttcctataacagacactgacactgcctctcctagggtgagccagttcctagagatggtaaatgactcacctgtgaatgcaccttccataggccaaccaaccaatccagagcccacaccccacacctgagctctcacactgcaggtcactgtgccctcatcacccagggccaggtagtggactaacccctgggacccacagcctgctgaaaacaattcaaactagccaaccctatggcagtttactctgccttgcrtggtccttccctcaggaaacacaataaaggctcttgctcacgttttcctctcgctccttccatctcctaacctgggagctttctcgtgggatcccacatggcatgatgggcccccagctcttgggaactgg

SEQ ID NO: 853165 - DNA, 544 bp, Homo sapiens
tttactatttgccttgttttgctctctgtggccaatttgtcactagattctgaagctctcagtcatgtctcttttgctattctcatgggtcctgaaaatggaacccagtgtttttttccctttgtttctttgaccacaccgggttttgttttggattatttaactgggatatgtggtagaacgtttccactggaaagatgagaaaagataaactacaccaagacttctctgttttcaattttgctgtgacttatttcatctttgctcaatatcatttcttgctcttggtgagaagtggagctcataataaatatagtcttgtgggaaaatgatataacattatgaagcccaaaccaggggacacagtcatcgtgcaagtcactgtatgaaaagcattcttagctttggttttcattccctttaggcagtttctggaggagataggctattctattctaaaattatgtgcctaatactgtcattttatttcttgagaagatttttgtgtatattwgtataatatgtaaaaatacaatataataaa

SEQ ID NO: 853166 - DNA, 636 bp, Homo sapiens
cattgtggttttaatatgcatttccccagtggctgataatgttaaacatcttttactgtgcttatttgtctatctctctctctctctctctctctctctcwcacacacacacacacacacacacagtttattttatcttattttttggaaacagagtctcgccctgtcgcccaggctggagtgcagtactgcaatcttggctcactgcaacctccacctcacaggttctagcaattctcgtgcctcagacgcctgagtagctgggattacatgcatgtgccaccacacctagctaattctcactcatatattttctttggtgaagtgtctgttcaaatctttagcctatttttaatgtggattgtttgtttcttactattgaattttgagaattctttatatattctggatgcaagtcctttgttggatatgtgatttgcaaatatttcctcccagtctatagtgtctattaattctcctaacaccgtcatttggtgaactctaatttaccaatttttatgttgacagatcatgcttttggcatcctgtctaaaaaactctttgcctttgggaggccgaggtgggcggatcatgaggtcaagaaatcgagaccatcctggccaacatggtgaaacc

SEQ ID NO: 853167 - DNA, 634 bp, Homo sapiens
gctccttccaggggagcctggatccctttgcctgttgctggaatgcggtgtatctggctccctccattctccatgtccgggggcctttcttcctcattaccccacaggtaactcttcttgattttggatgccagtgagtctggtccggggctttaatgccacagcactcatgactctgggattttgtttcatttctgatctatagagtattactttgtccttgaacgtggctacatttgatgtttattatttatttatttattttataattactgtgctgtgtttagggttgatggggaagttcaaagcatgacctcaatgtactattttactagaagattttgccaaagtttctagtacatcctttctagtatcgccagtgttatatttttaaccattaaatcccatttcacttctgcctttgtttaatcactttggctctttttttcagatatgccagtctcagtgggggcatttaagatcccccaccatccttgatctagtcctattctgcttatccagttatctcctattacacctaacaacttaccacaacaarctacactattcaaccatgtccattcgtcaaaatcatacacatctttcaacttgtagtctgaagacctcctctgag

SEQ ID NO: 853168 - DNA, 598 bp, Homo sapiens
gagtcttgacatattaaattcaaatttcccttttttttgcttagaaatgaaaaaagtgaaattagctcatccattgtaatgacataaacttaagacctccaccctttccccataaaattagacaatttggggagaatgacatcagcaaaatggccactgagaagcccctagcacctatcccctccccaaagacagtcaaaaccatgaataaataattacatttcgatgaaaataaccaaaagagagcactggagcatgtaaaaatagttttatagtgcactgaaacccaggaaggccacctagagaacagaaggaaacactctacctctaccactctatctcccagttgggatcgactgagaactagcagcaacttctccttgcagggaaaaggtaagcaagaagccagcagcccccataaccaccttggacacctacagtcctcaccactggggacttctgcagttttcatagggactgattccagttgagggagctgcctcgagtccatatggctgtgttcctcctaagagggaactgacgctatgtcctagcccccatgagccatacagctamtgagctgcaccactgtaaactc

SEQ ID NO: 853169 - DNA, 464 bp, Homo sapiens
caccggagtcctccctgagcaggggatggagctaccacaccggagtcctccctgagcaggggatggagctaccacaccggagtcctccctgagcaggggatggagctaccacaccggagtcctccctgagcaggagatggagctaccacgcccgagtcctccctgagcaggacatggagctaccacgcccgagtcctccctgagcaggggatggaactaccacgcccgagtcctccctgagcaggacatggagctaccacgccagagtcctccctgagcaggggatggagctaccacgcccgagtcctccctgagcaggacatggagctaccacgcccgagtcctccctgagcaggacatggarccaccacgcccgagtcctccctgagcaggggatggagctaccacaccggagtcctccctgagcaggggatggagctaccacactggagtcctccctgagc

SEQ ID NO: 853170 - DNA, 502 bp, Homo sapiens
tttattctttcactcagcctctgggaatgtgagatccatacaccagtacacacgctgaagggcatgtatactaggttactaattgcaccactacartagtgcccatcagcagagacgagtgaatacagtgtagccactgcccactgtgcaagagaataaggatgctgcttcttcatggatgtggagtagtcccgaagacagagcgaggggagaagcgtgcagacgctatttaccatgtgctaccttttgtacaaaaaaggaggaaagtgtgaacatgtgtctcagctcgcacatggcaaggccctcttgggggacgcaccaggtcctggcggaaggaccagtgcagagcaagaatcctcaagccgtatcttctttattattttgatttcttaaccacaagactgtatattacttattacaaacccaaaaaagaaagaaggaaaacagggaagaaaggaaaaagaaaagaacccaggctggctcacagggggagaaggggctg

SEQ ID NO: 853171 - DNA, 593 bp, Homo sapiens
tgtgcgtgtccgtgcgtgtgtgtgcatgcctgggtgtgagcgtgtttgtgtgtgcatgtgtgtgmgtgtccgtgtgtgtgtgtgcatgcctgggtgtgagcccatgtgtaagcgtgtttgtgtgtgcatgtgtgtgtgcatgtcccctcgctgtgcaacggagaagctggcgcaggcagaaactggaggaggtgggtgagtgaggagcagagcgggagggtgggagtgagggtgaatgagtggcctctcgtggtcacagcaaggcaggaggcccctctgattccgtaccccagcaggccatccatcagtggcctctcctgggctggggcgaggactcagtgtcacaggaagcaccttccggaaggacctgaactaggaggacagaggggctcactgagggtgactgcagctcccgggaagtagcagtggggatgccctcaacagcccagctgtgtgtgtggccacagacatgggaaggagggctgcaggtcccggccaggccatggcaggaagggcctcgagaggggtgggctctggcctgggcctgggaccccacaccaagcccacagcagcaggaagggaacggcagggcc

SEQ ID NO: 853172 - DNA, 543 bp, Homo sapiens
taagaaaaggatcttgtaaagaaaagtatacttcccatacttaaaatcttcagaactgaatttgaaagtataaaaaaacaacaattcatttaaatggattggtctagcgcactgaagattaaatatatttgttagctataaatttaaaaattgagacattagcttaaaaagtattttaaagttcttatgaagaaaaaaacatgaaagtgaaacagacattcacttctctggaaataattcagaaaagccagtagtgatagaaaaggacatacatatacaagacaacagagatgaacatgaacataatctgcacctttagtataataaaggaattcagttaaatctttctgtgtggtccctaaaaagtccagaacagaaacacctcttttcaataggccacaggttaaatctattcactacattgtcaggccaagtcctccagtaggttattatgaatctcgagaataatttatccttaataaggctacctctttctcyttcattccttattagttatggaatatgtatatttataaagccaac

SEQ ID NO: 853173 - DNA, 529 bp, Homo sapiens
cctgcatgcaatttatctctccaccgcaagatccacaggaaaagatgaaacatacatttttaaaatgagaaaataaaatgaattaaataaatacgatgttagtaaccttgattatgtttgggtggtasaattatatcttcaatctatgtttttagaagtatgggtggtatcattttatatcactactttattattacattctcttttactattttatggtgaaatatgtaataaggatattggatctgatgttaaggaaactttggcaaaataacttgtgcaaatattcattcagttctcatccttgaaaggagatcagagaagccaccatacaaactgacgacaggtttgagttctgaaaaacaaggcattattattttgtcttactggtatcaggggatgaactgtgattttccctgagttgagagaggaagagaagaaatattcatgtcaaccacaggtattgacttaccagggtggtttctgcatattgtttaggggaaggagacagactctgtcctctgggtgg

SEQ ID NO: 853174 - DNA, 622 bp, Homo sapiens
aaattaaaactgaacccatagayttcacaattaccccctttgttaagaaatacaactgttctccttagtgcaccactcaattttttcccaacatatataacagaaaatgctcagaaattaaaatttgtgtctcaaagatgagaagaatttttcaaattaggccattcccttaatgcttatttaatttgcaatatacattcataattagtgataagataatttttccctttgggggaatttaaatgaagcattcattctggaaaggttcctttccttcacatatgaactgctaaaagagacagaaaatatttctttctgtgggcaaatttaaaaaattcctaccatatttataaaggcacataaataattaatgtagaaacactaaaaaatttagaccaagaattaatcaatgtgtccttttaaggcaatgtggattggggataataaaactggtgaaaaattatactaagctgctttgagattcctggatggaaccagatataacacacaaacttatttttcagttgtccctttcacacctggctactaaatcaccccataggttgcctctgttagtctagaaggttggaatatgtgatgctgcctgggaatgaattatact

SEQ ID NO: 853175 - DNA, 589 bp, Homo sapiens
aaattgactgtgttgtatagatttgcctccaacatttttggaagcacaagagtgtgacgatgctttcccttgcagggaaactgaattgtgataccagtatgtcaagattatcaaccagattccaggatggttttcttcacaattttgagatagtctatttcttcgtgcattatgttatttttatgtcactaatttaaaattttaagaagcctcgtcccatatattttccccttatagccatcggaaaagcacatacacaacacagtgactaatttttgttgtcatttatgcctttcacttcaccaatttgtttacagatttatggttcattgactttcacagttggaaaattaatgctaaatcaatactttgtataaatttattatgattttactgtaagttattttgcaatagattgcttaactgacatggtgtaaaatgctattgtatataaatgaaaacattaagcaagttgaaggcataaaatcagctagcaccctaatatagtagcttttgagtgttaaattgtatttttttaacrttacggatatcataagtgtacagctcaatgaattttcacaaactgaac

SEQ ID NO: 853176 - DNA, 662 bp, Homo sapiens
acacttaaaaaaaaaagttctgttgacttctttgttaagaaagactcaattagggtgaagaggtcttcctgcttcttcccagaatagcctcatcttgttggattggcagctcctaggctaggaacaggtgggaccagtaaagctgccagggacaggcccttgagaaggtggctgaacacactgtccagtccctttcaaagtctagtggggatggctctcacacaggctggcagggtggatcctgggtgttgagctggggtgtgaccttgaacaaaagaggtataagtaccccaggggcaaaagtcaattgttctgagaaggaagctggtgaagtggtcctgggtgccagttataggggggtcaggaagctaaagctaagggcactgggagtggccatgagccaggaggccaggggctgagagtctgggggaaagtagtgaaagcctcagacaggctgcaagcaataccacgcttggcaaggggcctttgtagtgcaaggtctctgaccccatggtatacagcggggagtgtcaatgtgtaggtgaaggggtgrtatgggacaaattcaacctcagaatgctcctctgggtaaactcactttggaagagggacaagtgacaagcttacaaagaaccatcatcatatcaccatcccaggagttg

SEQ ID NO: 853177 - DNA, 350 bp, Homo sapiens
gagagagatgatttagggtatctggcataagaaattcctaagcagcaaagcattcaagaggcgacttgggtgctactaaaggcattcagtttcaaaaggaaaacagagcatgaaagtttgcaaaatttgcagcctgacaatgcaatagaaaagaaaatcccattttctgaggagaaattcaagccggctgcagaaatttgcataagtaacgaggagccaaatattaatccccaagacaatgaggaaaatgtctctagggcatgtcacaggtcttcatggcagcccctcccatcamaagcctggaggcctaagaggaaaaagtgatgttgtgggccgggcccaggatcccc

SEQ ID NO: 853178 - DNA, 656 bp, Homo sapiens
aaacataatattgaaaagactgcccttggccactcttagcagaagcagtgcactctcctaaacatctatgacatcatctcattttcttttcctcataacccttgatagcacatcatcatctgaaattatatttttaattgtttattgtctgcctgcttctctgtggtcctcacctctgctctcctccctcctgaatctaagctccatgaaagtggagtcgttggctttcctttctttgaagtatccctagcttttagcaggacatttgttaaatgtaaggtgaaagtgcaagtttattgaatgcctattttacgcaaggtactggtatacagatcttgcctcccttgatcctcactaacagtctctgaggaaggtcttattatttaaatttacaatgaggaaataaaggctcagagaggttaagtacttgcttaagctagtaaagggctaagccaggatttgaaacttgctttagctcatgaataagaccaggcccattccttaagaagctcacagtcaacaggcagatctccagctttagttcatgacaatttatyttcttctgatgactttggggccctgtaaagccctaaaagcctgctttcttcactgtcaaagacaaattcaattatggtcattatattgtgcttacaaag

SEQ ID NO: 853179 - DNA, 590 bp, Homo sapiens
gtaaatctaaagaacgtgattatcctcaggcctgggagaaatagcagatcatgttgatattaaaacctaagcattctagcttgctaactcacatgctgatttggtgcattcttaaagctgggcgtttccagggttgccttacgatatttttactgctcctcttggaacttatactccccagtgcaactggcaacaacacagattatgctctgaatataaagatcaaatgcccagtctkgatcttcacaagagagggcttcccttctggatgcctcactgggactccagctcactgtggcatcgggtcctgtagtttactgtagctctgcaacatgccactccattctgtcattcttgtcttttcttcctcacctcccccagcttttgttctctttggctcttttgaaagccacatttatgttcttcgcatatgggaagtatttttggtcaaaatttaaaacctgtaatgcgttccttggcaaaatgatttgctaagcaagtctggctttaacttgaaagaaaagctttcagtaggcaacaaaacaaaaatctcacaaaccactctggccacactgcaattcttattcatc

SEQ ID NO: 853180 - DNA, 604 bp, Homo sapiens
taaaaacacaacaagattaaaaacaagtaacaaattaaaacagagataagacatcactcactgcagactcattttattaagaaaatatatctatttctggtccctgttgtgaagayatcacaggggaatattattacattgtatcctaatatttgaaaacttaattttgaattagatatgatgccaattaaaatgtgaattttagatttttttaaaatatatattcaggaaagtagcccaaatcacttttggttaatacaacacaacagaaactccctctcttcgttgtcaaacaaatttctttaatgctcctggataaaaccaaccaagatggatatagcccataagtctacgttgtaacggataatgggtccattctcatttatgtacaaaatatagattttcgtattgttttttgaaaacaaattaatggaaggtccatttagatttattattttgaaagaaatttagtaatttattttaatataagaattaagaaacaaaataatttacctgaaatccacacattattacttgtgatattattactgcctggtttaatctgataatatcagtggatacttgggcaaaactgaaattacgt

SEQ ID NO: 853181 - DNA, 556 bp, Homo sapiens
tttaattgttaaatctaactatataaattaacatttaaaaatccattttcatcactcaaactaattacagatttttttttaccacataacacaaattttatctggctgatcttgtctctcaattcttactatatagtatagctttactagaagcataatttcctggatagaagcttccatttctggcagggcatggtggctcacgcctgtaaacccagcactttgggagggtgaggcaggtggatcacctgaggtcaggagttcgagaccagcctgggcaacatagcgaaaccctgtctccactaaaaatagaaaaaattagccaggcgtggtggtgagcgcctgtagtcccagctacttgggaggctgaggcacaagaactgcttgaactcaggaggcggaggttgcagtgatctgagatcacaccactgcaytatagcctgggcaaaaaaaaagaaggttctattaaaaaaagaaggttcattaaaaaaaaaaagcaaagaagaaggttctatttctgtaggtttcttatgggcctctggaaggtctatgccta

SEQ ID NO: 853182 - DNA, 627 bp, Homo sapiens
ttatttttttttacaggctaaattgaactcctgggctcaagcgatcttcccatctctgcctcctgagtagctgggactacagatacatgcctggcttacttttattattttatgcatccatcttayaactaaaattatccacttttaagtgttaaagtttcttgcagggaatcaattttctttatgaatacacttagtttagagcttctgaattttcttatttttctaggttctaatttggatctagctgttgcacagcgatcaccctagagtatcttttcacgctctcctgggttaacactactgtgtctgtcactttcttgcactcctttgttgtttggctggggtgcatacttgagtagtgctctcagagaagatcactatttgataaatatcagagtctttgcttatccattaatatctaggttttatttttattcttgattgatagctcaggaagctataaccttttatgttatttcgtcaaaacttaaaggtaatactttattgtcctatggcattgaagattgctgattaaaaatctaatgccaatatgattctggttcctttgtaggcaacttattctgtctggaaacttcatatttggcattctaaaattttatgatg

SEQ ID NO: 853183 - DNA, 440 bp, Homo sapiens
ttggttgatagcagatttactttgtttttctctggcaagaatgaggattccaaacaatttgtttccttgggttctagatggaagtgcctggagcctgcagacagggtctctccaccccagctgctggtccaacctgcctcgcagggcgtgacatggctgttgtcctcactgccttgtactctgcctcaccagtcccagtgagtacagtgaaccagtgcctcctccattcctgtcttcccccttcccacgtgcccactcagttgaggtcattttctgcacaaacgttgtgctgtgtgtattttcttatgacatgcatgggaggtaacctacgggctacctggactagcctgcyggaccaggctgtgaaggctgaattaagcttcatagagccgattgtgtggagtcaaggatttgggttgtcattaccccatgaagccagg

SEQ ID NO: 853184 - DNA, 611 bp, Homo sapiens
ccacgtacattcactttccccctccatcaagaatatccctttttttgagacagggtgtcactctgtcgcccaggcaggaatgcagtggtgcaatctcagctcactgtagcctccacctcctggactcaagcaatcctcccaccttagcctcccaaatagttggggctataggcatgagccactgcacctggcctaagagtattcctcctcccaatacctactgacttgttgaaatttcactcatgctctaagctaaccagaggcatgccactggttttacagagccttcctctgagttgcaatgatttccttcctttagtaatttgttagctccagaccctgtcactccttgcctcctgctggtatcgtagttacacatgttcccgtggccttctgtaggcactgactgcatactcatgcagggcatggttaagttatagttatcttgctcactctataattatgctaactatagggcctaccrtcccaaatcagagcgtgtggtctgagatgtcttcctgtacatgcaccaggatcaagtgggtaaaatactggatactggcagtcttcaggaatatcccggaacaggatcctgaagatgcaatagaaac

SEQ ID NO: 853185 - DNA, 611 bp, Homo sapiens
ccacgtacattcactttccccctccatcaagaatatccctttttttgagacagggtgtcactctgtcgcccaggcaggaatgcagtggtgcaatctcagctcactgtagcctccacctcctggactcaagcaatcctcccaccttagcctcccaaatagttggggctataggcatgagccactgcacctggcctaagagtattcctcctcccaatacctactgacttgttgaaatttcactcatgctctaagctaaccagaggcatgccactggttttacagagccttcctctgagttgcaatgatttccttcctttagtaatttgttagctccagaccctgtcactccttgcctcctgctggtatcgtagttacacatgttcccgtggccttctgtaggcactgactgcatactcatgcagggcatggttaagttatagttatcttgctcactctataattatgctaactatagggcctaccatcycaaatcagagcgtgtggtctgagatgtcttcctgtacatgcaccaggatcaagtgggtaaaatactggatactggcagtcttcaggaatatcccggaacaggatcctgaagatgcaatagaaac

SEQ ID NO: 853186 - DNA, 611 bp, Homo sapiens
ccacgtacattcactttccccctccatcaagaatatccctttttttgagacagggtgtcactctgtcgcccaggcaggaatgcagtggtgcaatctcagctcactgtagcctccacctcctggactcaagcaatcctcccaccttagcctcccaaatagttggggctataggcatgagccactgcacctggcctaagagtattcctcctcccaatacctactgacttgttgaaatttcactcatgctctaagctaaccagaggcatgccactggttttacagagccttcctctgagttgcaatgatttccttcctttagtaatttgttagctccagaccctgtcactccttgcctcctgctggtatcgtagttacacatgttcccgtggccttctgtaggcactgactgcatactcatgcagggcatggttaagttatagttatcttgctcactctataattatgctaactatagggcctaccatcccaaatcagagcgtgtggtctgagatgtcttcctgtacatgcaccaggatcaagtgggtaaaatactggatacyggcagtcttcaggaatatcccggaacaggatcctgaagatgcaatagaaac

SEQ ID NO: 853187 - DNA, 590 bp, Homo sapiens
atcatagcaactcttgatccaatgcactccaccttgacccagatttctgctctatggaaaccagggagaaaggtagaggggaggagagaggcgatgatgaacctggtcatggcatttgacagcccytcccctcccccacagcatctatttccactctgcccctccaggacagtcttattcacagcattctgtttcaggggaagaaccattttcttcaaaatcctgatttaagagccttcagagtcagggacacagggctcagtggaaggcaaggatgatatttgggctcaaaatgggagttacaagggaacgttgggaagaatgatgcttccttgcatcagcctgcttcccttgctctctgcctggaacaccagaaatcgggatgttcttcctacgcagggggatggaaaattcacccttggagggactgtaaattctcaagagaaaacaccttcagacattgacattttcccaaaggaaaaatcatctttctgctgctttatcattttccgaaggcaaccactcaacacgttctacccatgcttacaggacagccaattttaaggcccctatcttagttaaatatgaac

SEQ ID NO: 853188 - DNA, 590 bp, Homo sapiens
atcatagcaactcttgatccaatgcactccaccttgacccagatttctgctctatggaaaccagggagaaaggtagaggggaggagagaggcgatgatgaacctggtcatggcatttgacagcccctcccctcccccacagcatctatttccactctgcccctccaggacagtcttattcacagcattctgtttcaggggaagaaccattttcttcaaaatcctgatttaagagccttcagagtcagggacacagggctcagtggaaggcaaggatgatatttgggctcaaaatgggagttacaagggaacgttgggaagaatgatgcttccttgcatcagcctgcttcccttgctctctgcctggaacaccagaaatcgggatgttcttcctacgcagggggatggaaaattcacccttggagggactgtaaattctcaagagaaaacaccttcagacattgacattttcccaaargaaaaatcatctttctgctgctttatcattttccgaaggcaaccactcaacacgttctacccatgcttacaggacagccaattttaaggcccctatcttagttaaatatgaac

SEQ ID NO: 853189 - DNA, 408 bp, Homo sapiens
ggttgtgagtgcctccaaataaaggtcttttatagctctttaaagctgtaagtcattcagtcatagtttctttcacctgctggcttgacaactttaaaaatttacatttctgaacttgtactttaacaggctttcatcataacttcgggaaagaagaattagaatggggaagatttaggtgcacagatggggtcgaaatcaggataatattgactaagcaccctcctggggctctcctaacacaaacgattaccctgcctcctaggattttatagttcaaatagaataggtgagcactaaaacaatcaaatctgttatcctgaaaggccaaattggcaaagtrgttcctagtgaaaatcatggaatattagccctcaaagatattttaaagcccacccctcctttttt

SEQ ID NO: 853190 - DNA, 628 bp, Homo sapiens
aatatttggaaatgtgtctgcttacttcttttttgaaatgacccctttcttgaattctggaatattgcatcctctttcttttagttctctctctgattaagcctttgtcctgtttgttgttgttgttgttkttttttgttttttgttttgttttgttttgtttttgagacagaatttccctcttgtcacctaggctggagtgcaatggcacaatcttggctcactgcaacctctgtctcccaggttcaagctattcttctgcctcagcctcccaaagtagctgggattacaggtgcccgccaccatgcccacctaatttttttttttttttgtatttttagttgagacggggtttccccctgttggccaggctggtcttgaactcctgacctcaggtgatccacctgcctcggcctcccaaagtgctgggattacaggcgtgagccaccacgcccgaccacctttgccttgttaaacatttcttcctcttcacacccctaattgtgtgattccccaaattcagcatttcttccttcatgctgacctaggataactaaaccttcttaaagtatcaactatcattcttaacagatgactctgggacctgaatatcacttgagttccaact

SEQ ID NO: 853191 - DNA, 565 bp, Homo sapiens
catccattgatggctgttccagttcactttgggagtaaaaaatttgataattacttgttttgaggaaataaaatacatgtgctcacctaccgtattcagctagaagctggtgttgatattttgattaatstaggatagatgctttttccaaataagattggaagtctgtggaagtgcatgatttattttgctttccagccaaactatcaattaagtcatttcgtcttcatatgatctctcattagatcaagcattggctaatttctgtaaagaactatatagtaaatattttaggctttgtggcccatatgatttttgtcgtatgtgttcaactctgatgtagcatgaaatgaatgaatgtaactaataagtgtggctctatccctgtaatgtacaattttactaaaaatgtagcacgaattagaacgtacatgaatttgaattttacataaatgtaaaaatgtaaaatgaattttacctatgagccatatatttttggaaccctgcagtagatgatgattgacttactttgggggcactgttgttattattgtctcatattata

SEQ ID NO: 853192 - DNA, 511 bp, Homo sapiens
ctttttaagtcatcacaagaaggtggctacctacatggtagtttcrgagaagaatgatgcttcacactgccacagagactgagtcatctgttccttctaccttccttaatgtctaaaagatcagtaaccctaaaagctctgtggaatccccctgttcactaatcactcttctctgacatcaaaaagaaaacagaacaggaaaccaagagacagaagaagggaaacagggaagaaaaaaagaagaaaaatgattttgtcaactggactaatggttacactaccccatgtaacctgaacatcttcatggcgctttactaacccttatcaggacgaagctaccctggaataagtgaaataaaccagtgtgacagttgtatataaaaataaattttgttaggtttgcatcacattataaagaaacagaaaaacatagttaaaaataaatccattcaccaactcagcaaacaaattatagaaacttttttaagatgctgatagacaatcacttact

SEQ ID NO: 853193 - DNA, 701 bp, Homo sapiens
caaatggtagatttacttttagttctttaggaatctccactgttttccatagtggttgtactggtttacattcccaccaacagtgtaaaagtgttcccttttcactgcatctgtgcctacgtcgattatttttttgattttttgattatggccattcttgcaggagtgaggtggtattacattgtggttttgatttgcatttccctgataattagtgatgttgagcatttttccatatgcttgttggccatttgtatatcttcttttgagaattgtctgtccatgtctttagcccactttttgatggaactgttttgttcttgctgatttgtttgagttctttgtagattctggatatgagtcctttgtcggatgtatagattgtgaagattttctcccactctgtggtttgtctgttaactctgctgattatttcttttgctgtgcagaaactttttggtttaattaagtcccatctatttatgtttgcttttgttgcgtttgcttttgggttctttgttatgaagtctttgcctaagccaatgtctagaaaggtttttccgatgttatctyctagaatttttatggtttcaggtcttagatttaagtctttgattcatcttgagttgatttttgtgtaaggtgagagatgaggatccagtttcattcttctataggtggcttgccaattgtcccagcac

SEQ ID NO: 853194 - DNA, 620 bp, Homo sapiens
ggatataattatctgtggatctcttgcatttctgtattttttttgtttttgtttttgtttttgtttttgtttttgtttttgttttgagggrgggtcttgctctatcactcaggctggagtgtagtggcgagatctcggctcagggaaacttccaccttcccggttcaagcgatcctcccacctcagcctcctgagtagctgggattacaggcacgcaccaccatgccctgctaaattttgtattgtttgtttgtttgttttagtagagactgggtttcaccatgttgcccaggctgttcttgaactcatgggctcaagtgatccacctgcctcagcctcccaaagtgctgagattacaggtgtgagccaccatgccgggctgcatttctgtatattttgagtagaaacactgcctgtcctttgctctggcctatcttttgaaggatgtttctgtagtgaacaaacttgaaaacagagatcatatgtaccttgggagcaaagggtaggtttgcctacatccttggaagatagagataataagtaatcctgaaatcaagggcgtgcatgcttactgccctttgttcaggtcccctaagctcagaattcctgtcctaaaatgc

SEQ ID NO: 853195 - DNA, 643 bp, Homo sapiens
cgacacagtgaaaacagataagttacagagtttgagaagatatttgtaacatatataagcaaccaaagacttgtatcaagaatatttaaggaatttytaaaaatcagcaagaaaaagtcagactacccaatagccagcgtgcctggcaatgcacagtggccggaccctggtgcttgcttgctcatgcacccctcaccactctgtgcctggcttgcccttggccggcgtgggatcagggccagtagctccagccgagctcagcctgccaggcccagtggtcagaacgctgggctcaagcaaaactccagcaaaggtgccaccaaggatcctgcaacacaagcactttggaaaacatattgaattcatctattaatactgcagctgtgcggcactacctagcaattcactcctaggatggaatgctccattctggcattcttaccactatacatgtatgaaaatgttcacagtagcactgttcataatagcctaaaacaagaaataattaaaatgtccaccaaacaatatgatggatacattttgatataatcacataatagatggtatgggttaaaccatgtccctcaaaatttttaggcaactcctaacccccagtacttcagaatgtgactgtatttagaga

SEQ ID NO: 853196 - DNA, 561 bp, Homo sapiens
gggctatcccagtcatgtcccaaatttatgactggggatcatggatccctcttcttagttcacatccattggtttcctgtcacctattgggcaacttgccatcgagctctcccatcaagtcactgccaaaagtgttgagctaattacagctcatgggtatcggctacttctgtcagtgtgccaccctccaaggcagggaagtcagcgttcacagagcttatctaactggccaataagggatggagccaagtcaaacccaagtctgtcagccccaaagccagggcattggaaggagaaatcctctaaggagtccctgcccacaagagacctaggggggaggttgcatcttacatggttcctgaagacctgggaacaaagggggttgaggaaccatatgaagccagtgcctggatgcaaaaggcccaatctcagactccatgtgctaattaacrgagcagtagagctcaagtgttgaggtgggagacaggatggcagaggagaagaggcacaagatttccagcaagacaaagacctgggtttggaaggatcctccaacctagg

SEQ ID NO: 853197 - DNA, 561 bp, Homo sapiens
gggctatcccagtcatgtcccaaatttatgactggggatcatggatccctcttcttagttcacatccattggtttcctgtcacctattgggcaacttgccatcgagctctcccatcaagtcactgccaaaagtgttgagctaattacagctcatgggtatcggctacttctgtcagtgtgccaccctccaaggcagggaagtcagcgttcacagagcttatctaactggccaataagggatggagccaagtcaaacccaagtctgtcagccccaaagccagggcattggaaggagaaatcctctaaggagtccctgcccacaagagacctaggggggaggttgcatcttacatggttcctgaagacctgggaacaaagggggttgaggaaccatatgaagccagtgcctggatgcaaaaggcccaatctcagactccatgtgctaattaacagagcagtagagctcaagtgttgaggtgggagrcaggatggcagaggagaagaggcacaagatttccagcaagacaaagacctgggtttggaaggatcctccaacctagg

SEQ ID NO: 853198 - DNA, 582 bp, Homo sapiens
atcattcaataatctcataaaacaattggagtatttaaaaaaatcttttaaaacaatggcaaaagagagcagaaacttctcactgttttaatgccatcatctggttatggcaaaggctaaatcaatcattcccatgagaaaaaagaaatttctaaaaataaaggttatatggctggtgaagctgggtgatagatacataggggttcattgtactatgctttctactttcatatctggaaatttccataatggaaaaatttttcaaaaataaatcaacctcaatcctcaaatatacattcttaagttactgcaaatcccatatgaaaaaggaataaactttaatgacgggtcagactctgatttttaaaatacatatgaaaatattcttctgttccatcagctccctagagatccagaaataccagtcaacccacatatacgaccaaagtctcttcttccaccctgagtggacaggatgccaaaaggccttgctttaccttaaagaaaaagatacactgaagatacaccaactaccccacaaaacccatcaycccaattctcatcagtgtgtcaagaactatt

SEQ ID NO: 853199 - DNA, 537 bp, Homo sapiens
gccatggccagggctgcgtattcagatgtggcgtttggatttcccgttacgagctaaagtatttttgtggttttagtgctgacatcaaatggcccgcctgagtgttgttgaaatatttcttgtcagagctgtttccttaactcctccaaatacagtgttccgagtaatacagagatggtcaggcccaagtcagctttgcaggagagccttcctgttcctgagcagacacctagcagggttgagcgactcttacccatctgcagatgcagggccggtgaccccacagtggggcaagagcctggagagctcttggctttgcccaggaaggaattcaagggcaagcaggaggcggaagaaacagcttcattgaagaggctacagctccctgactgcccctgcagagcggggctgcccygttaggcggagaggagtagctcagggcagatttaattgcatgcagattaaggggtggtttatgcagaaatttctaggagaaggatgtaacttgtaggcgatcgggtcattgccatggaaagg

SEQ ID NO: 853200 - DNA, 557 bp, Homo sapiens
ttgtgtatttacacacacgcatgtgtgtatgtgtataccataatgtcaaaagacaaatgaaaaactgggaggccagtcacagtggctgatgcctgtagtcccagcactctgaggcgggagaatcactggaaccaggctgcagtgacgcgggatcacagcactgcactccagcctgggtgacagagtaagaccctgtctcaaaaaaaggggggggggattatctgcagtatgcatatcagtcaaagggccaatgtctgtttttttttttgttttgttttgttttgtttttgagatggagcctcactgtcgcccaggctgaagtgcactggtgcgatctcggctcactgcaacctccaccttccgggttcaagtgattctcatgcctcagcctccctagtagctgggattacaggtgcgcgtcaccacatccggctaatttttgtatttttaatagagatggggtttcaccatgttggccaggctggtctcaaattgctggcctcaaacaatccacccaactcakcctcccaaagtgctgggtttacaggcatcagcca

SEQ ID NO: 853201 - DNA, 528 bp, Homo sapiens
cccaccaggtccctcccatgatgcgtggggatcataggtgctacaattcaagacgagatttgggtgaggacacagccaaaccctatcataaattaaaattttatttttcagataattttacatccatatgcagttgtaagaaataatagattctgtgggccctgatcccatgtcccttagtggtgacacgcaagaaactgcagtccagcatcacatccagtgtactgatgttggtgccgttcacccgttcccttattcagatcacccagctttccctgcacttacgtacatgtgtgtacatgacacgtgtatgtgtgtgttcaattctgtgcagtcttctcacatgcgtgtttcctgcatccaccaccatagccaagaccactcacttccctgcctgggattctgcaggaatccgtgcatcggcctcactgccctcatcagaatatttagccattctgtgggatcttgacggcttggatccamaagtaatcactgtaggtgattaaggacgatgataaaaaggcaaac

SEQ ID NO: 853202 - DNA, 528 bp, Homo sapiens
cccaccaggtccctcccatgatgcgtggggatcataggtgctacaattcaagacgagatttgggtgaggacacagccaaaccctatcataaattaaaattttatttttcagataattttacatccatatgcagttgtaagaaataatagattctgtgggccctgatcccatgtcccttagtggtgacacgcaagaaactgcagtccagcatcacatccagtgtactgatgttggtgccgttcacccgttcccttattcagatcacccagctttccctgcacttacgtacatgtgtgtacatgacacgtgtatgtgtgtgttcaattctgtgcagtcttctcacatgcgtgtttcctgcatccaccaccatagccaagaccactcacttccctgcctgggattctgcaggaatccgtgcatcggcctcactgccctcatcagaatatttagccattctgtgggatcttgacggcttggatccaawagtaatcactgtaggtgattaaggacgatgataaaaaggcaaac

SEQ ID NO: 853203 - DNA, 502 bp, Homo sapiens
tctctctcctcccatgcctctgaataaggatctcaaatgctggaagttctcagtcaaccctggcagcttttggtaacatttttcccatgttatttcagacaatggatttgtcctttttaaagacaaaatagaatttactttccaactttatattttgctatattttacaatatttcaagtttttcttgttcattagcaaatgaaataacagcatatggctaaaaggcctaaggataagacttcaccccaaagaaagacagctaatcctcaaaaaaaaaaaaaagaatattatcccctactaacagatctctattccaattttaagttatctccttgaccttaaagataatactctgtgggagtgagaaacctaagaccaccgctcttcatagccagttgagttatgaatttaaaatttcccacaaaatagcaataaatccagatccaaagacagtttaagraagctacagaaaatgttactctctcatcccaaaagcttttc

SEQ ID NO: 853204 - DNA, 501 bp, Homo sapiens; identical to SEQ ID NO: 847192

SEQ ID NO: 853205 - DNA, 513 bp, Homo sapiens
gcaattctttaccaaatctgaaggattccttgcactttttatgtttctacacctctctgtgacatctgacacaactgaacattcttctttagtgaaacactaatttcttgcatccagcataaccctcaccattatacttttactctattggctccctccctggccacttttaaagtttaaaaacttcaaaccttcttaaacttggggagtttaaaactcagcccttttctatcacatcttttctttaaacaaatcttcattacatggagcacttgccaaatctcattctccagccaacttctcataactgtgtgctagctacctctgcttatctctgcagctcctcttctaccatccagccttctactctaagatgttgctacagtaaatggtctacaacttgcactcagctggaaactcccctcttggagctcccccatccacctgcttttggaaytcctcctcatccttatacatcttgctaaattgtcatacactctacaagtttcccca

SEQ ID NO: 853206 - DNA, 595 bp, Homo sapiens
  misc_feature 287: n = A,T,C or G
ttttcctcatgcattatcataagagattagagagtgttttcaaatactatgcaagttctctgttctgtttttttcttttttttttaagttcatagtattaaaagaaatatgttgcagacaataccagacaccagaaattaagaaaaacagagttggggtcgctgaactgagcatgaactttgcctcaggaggacttaggacagcgagccaaagaacctgggcaggatatggagaatgaagtgaaacagactgagctttagaaactaggtggcagcacgctctgacanaaacgcatggtatgttgttaacagtcaggtagtggttaagttctgtgccgtgatctgcatcaaccctaacctcaagtagcgagaacggcaatgaaaataatgtatttccttctacagtacttaattgtgtgccaaggactatcttaatcatgttacaagtaatcctcaaaacgtttcattaagcaagtaatgtgattatcactcccactttacagatggagaaaytgaagtatagagcagtctactaatcatctaaggtcatacacctggtagggggctagtagagtcacatggaatactggcaaagc

SEQ ID NO: 853207 - DNA, 632 bp, Homo sapiens
gttgctgtgaaggttttttgtaggtatggttaacatccatattcagtaagctttaagtagaggcattagccttgataatgtggggaggcctcatcaatcagttgaagacctcaagaacaaaaactgaaaagaagttttgcctcaagactgcagtaccagctcctgcctgagtttctagctagcttgcctgcccttagattttggattttccagtctctacaatggcatgagacatttacacacacacacaaacacacacacacacacacttgggtcccctttctctggagaaccttgactaatgggctgatacaggttctgacagttaaatagacaaaatattacactagcatttttattgcattactttaaactctcaaattaaaagtgttttaaagtttaaaatgtatataccatatagtaattttattttaaatagggaggattggtgccaggggtcttatcatgaagggaccaagtgtggagctagaaggaaagggatgaaggactgractgtttttcaaggtgattgaaaaaatagagggatgtcacaacttaaagttggtcacattatagctgtccagggaaagatttataaaattgttgaagatactcatttcaaaaaattcaaa

SEQ ID NO: 853208 - DNA, 509 bp, Homo sapiens
gcgtaagttacaggacatgtttttcccaagatgtaagctgaatctcaagaatgttacctaatgattaactgctttagttcttgcttctgtaagcctgattcctgcatcamgtagttcctgccaaaaactgcttaaaaggcaacttctttgtctagtgctcagtctttcaggatacatgtccactaagccagtgtacaccttaaataaactctcctgccccccccattcagtctctctggtcccttaattcactgcaacatttctggtgctgaaacccgggactggagatggcagatttctgtctcctttgcctgtgggactgaggccccgggacagaggagacctgggaaacttggtgccaatgggagagcttcagccctgaaggggataggccctcccatgtcccggtgcccttccagacagtgcaacggaaccagtaaaggggattcctggatggcatcaggagcactgcacagacatctgaaccgtggtaaggtttgggccctgag

SEQ ID NO: 853209 - DNA, 599 bp, Homo sapiens
aaaaggagtcaattcccagccaggaccactgtctatgtgaattttctccaggtactccagtttcctcccacatcccaaagatgtgcacattaggtgaattagcatgtctacatggccccagtctgagtgagtgtgagtgtgtgtgtgtgtgtgtgtgcgcgcgttcatgcatcctgggataggatgatgtcctgtccaaggctggttcctgccttggccttgagctgctggaataggctctggccattcgtgatcctgaactggaaaaactgggtagatatatatcttacttgtttttcttcatctttcttaaatgtatgtatagctcgcatttaattcaatgtttagtattaggagtgtttttatctttacttagaagtttggtgatgtttttgtaaccagaaatatgctgtaggaacttaagttttgtttatatcaactagcttatggtaaaattggttttgttatacattattttacrtaaagttgcagttcccaagaacctaccaatgacattgaatgaggagttactgtatataatttggagctctggcagacttagtattttttaaaaattcatagttgatttttttaaacaa

SEQ ID NO: 853210 - DNA, 544 bp, Homo sapiens
ccataaaatttaaaaagaggtttacaaaccattatctgaattaatatgtaggacttatgtaatttttgcatctgtctgatttcttaatatggacgaggtccagatgattacttgataccaagattgaactagcaccaaggcacaccatttttgctgatctctggaaatctccttagattgtttaaaggtatatggcccataacataaaaactagagattcaagaaaaaggtcaaggcaaaaggcctgagcctattctatagatttttttaaatgggaacagaaataatagaaggggaagacttattagttcaaatccattttgtttcagattattgtacttaaaccaagctcttccatggagttagcctgatttctgactgagcttccctctttaccttgggtatctgttgtacttaagacatgtgcttggccttgtacggcaggcacwtaaaatcattcagtctcatctttgcctttaagaagccagaagatatggaattaaagccggggatgagttatgagaatgcagaggggaaagatgaa

SEQ ID NO: 853211 - DNA, 611 bp, Homo sapiens
gcatcccccaaaattgttgctatgacctttgcgtctgaccagtcagctcttgctttgactgaaccactttcaccccttggtagccattggtttgcttgtgctttgtcttcaggattgtaatgataaagctatgttttatctcctgctacaattctttggagaaatgcttcagaatcttgatcccacttgcttaaaatttcagttgaaagctctgctctgcagagctgctctgggtacagtggttttggtaccccttgagtggaaaatttgctcaactttaattgtccagtcagaattgtataagctgaaccaatacagatgtctatgttttggctattgtttgtgctgttaatcattcatctgtgtctcctcttcaatcaagatacagacaagattaattttttcctcataaattgatgtggatagtctgccactgcaggctttatcttcagtattgttttgtcccttcttaaaatgagttatccatttgtaaataaataactgctgatttctttgggcactgtccccataaactttttgtaaagcatcartgatgtcaccattctttcatctaagcttcacaataaatttgatatttgttcttgcttaaa

SEQ ID NO: 853212 - DNA, 528 bp, Homo sapiens
aagtgctgggactacaggcatgagacaccgtgcctggagtggttactgttttcacattggcccaccaggctttccagcaaggatttgtcactgactttcagagacaatagaaatcatgtcacctctcttgcacttcctcctatacatttactgacaccatacgtaggaataacttgccacttagtttgtcttagatactgtattgtctgtggctgtgagttttaccctcttcatagctctttctggttgcatgtggagattcaaagagatgaaaaactatgcctttttgataaggcttcatttctccctgaatttttaataataacaaggtaggtctgtctcaaagtgaatagttcctaaaagcaaaacctcaacttctaatttctgaaatatagagacacagatgaaaattcattcatatacagaacatacagtaaatatccacaattaggaatcaggaataattaatcaaaacatmtcaacagaattaagtgtttatatttctgcaagaaaatctatgctgatatt

SEQ ID NO: 853213 - DNA, 432 bp, Homo sapiens
agaaagtcagctcctttttgtgcctatagatgatgttgcctttggatatcatccctgaaattcctacaaggtatcctgtaatcatgagggaagctagcctgtgaaccaagcaaacacaraacagggcaaagagaactacagaaatctcacctagagcttggatcaactaaatctgaatcttctcttcctctggacattttgtgtcctgattttttaaaaaccatatataattaggtggtaaaagatgacaagacagtatatgattccatttatataataatatttttatgtataaagttatagatggctatatactaatcttttagctgtggttatcttaggggggaatgaggactatgaagagggcatttttattttatactcatatattactgttataaaaataaaacatttcaatgatttagaatttaa

SEQ ID NO: 853214 - DNA, 565 bp, Homo sapiens
atatcagtcacaggaagtctcattgaaaataaaataaccaaataggctttgaaagaaaaatacttgcattaggaaaccacataacaatttcagggctgggcgcggtggctcacgcctgtaatcccarcactttgggaggccaaggtgggcagatcacgaggtcaggaggtcaagaccatcctggccaacatggtgaaaccccgtctctactaaaaatagaaaaaaaaaaaaaaatagccaggtgtggtggtggcaggagcctgtagtcccagctactcaggaggctgaggcaggagaatggcatgaacccgggaggcagagcttgcagtgagctgagatcgcgccactgcactccagcctgggtgacagagccagactccatctcaaaaaaaagaaaagaaaaatttcaattttcagaggagaaggattagctgtttgcaaaattacaatagcctaaagccatatcaccaaaatttggttacttaaaatatataacagtgccatgaaattttactttccatgaaaaagctcagaacatagtcacatagtgacagacatttgaaaa

SEQ ID NO: 853215 - DNA, 531 bp, Homo sapiens
ttgagaataaaggacgggactactgtatctcactcagatcctgccaatgctacatattttcctcctggaatgtttttcaaatgattctgggaaaaaaacaaatttcaaggttgctttaccctgggattcctggctcaattcttaggccaaaggaagatatactacatgacagaattaagttgccagttcttatccacagaacagaatgaatttaaaccataaagatcctcaccttctccgagttgacttcatgtgatatgagaaacacattccatgggtcatttcctttctcctgctcaataccataatcccttgcaaaattactagtccatttcaaactcctagatatatacgtgctccaggatgcctttgctatgagaatacaatctaattccaagtacatttctcacatcaattttgcaaatatattcaatgaatgttgtattttattcttaaagttcataaggaagaatacattcatgaaaaggcaaaggaaatattataaagagamatggattgagtgaaactacc

SEQ ID NO: 853216 - DNA, 516 bp, Homo sapiens
tttataacttttggtggatttctctcttagaaccctttgtactctgtggagcaattttgcattcccctggagtctagggatttcaaacctctaggtcagtctttattttattttatttttttgtcttgaggtttccataccacagatgcagtaaacatttagaatttacatcctgcaaggctgaagttttgatttatctcactcaagaaattattttcttttattctcttcccaaaggctccatcataggacaggcttctttgctgaatctgatggtgggccgagtttttctatcccccctccaataaatgtgacaaactttttagactccttcctctgtggattgcctcttgcttttgcttcctgcccatcgccataaaagaagataatgacaacaaaacrataacaacacaaatgtaaacgtaccttttcctcttaacttttccatatcatcaatttctcatgaattaaggtgtgatacctgaaagtcacatttgccttatcagttatattcat

SEQ ID NO: 853217 - DNA, 476 bp, Homo sapiens
aatggctgtgaatgtaggttatacctagcaatagctcccttcatactgtgaaatatattgtatttttgtattcaagcagagaatgagcaatatttattatttttatagcttctataatatctttatagattgaggtgttttataatcctattttggtggtccgggatattacttcagattttttctcatccaaaacattcatatcaacatgagatggagtctggcctaaattaatgatcaagccagcaggtttgaaaagaaatatattttattaatgttaagtattgtatgttataaagtaaaacattcgtgaatattaagtaaaactaagtaaaatgaataagttacagyaggattgctttccctaaatgttatgcattacgggcctgaacattcatatgtatttccacattgttactaaatcaattcacttatattgttggtggcatgattttattagtgacatctaaattaac

SEQ ID NO: 853218 - DNA, 613 bp, Homo sapiens
aacaattatgggacagataatatgacatgtactttaaaatatattagrtttaatgtgttttggtttaaagttatctagcgaattttacttgtttcttaacgatagaaatttttttatttttaaaaatatattaagcacttacagagtatcacccacacttctggattctagagatattcagaagtatgtagaaaaggattctctgtccttttggcagagagaattggtactatttcaatacaagttaaagataatctcagagtgtgatcattccttttaaaaaaataaaactgacttttatagataatattgggtgaagtggctgagggatgggaagatgttgctgtagattggatagccacctctaacaaggagaaattcaagctaaggaacacattatgagaacccatcagtctgctaagatgcacagagatagtaagaggtgaagctagctgtacttcctgggtcaaatggggacttggagaactttactgtctagcaagaggattgtaaaactcaccaatcagcactctgtagctaggattgtaaaatgcaccaatcagcactctgtatctagcaaggggattgtaaaatgtaccaatcagtgctctgt

SEQ ID NO: 853219 - DNA, 544 bp, Homo sapiens
actgtcagatattttaaaatgtttgccattctggatataaaatgacacctcaactggatttccggattgctaatgaggtgagcatcttttccattgttggttgatcttctgggagtttcttttatgaagtggctattccagtctttcctcttttctctacttgcctatttgcctctttaaaagtcaatttgtagaaattctttatgcattttgagcactaatcctttggcaaatagagatattgcagatactgtcaaccattttgtagtttgtcttttcactttctgtttgctgtttttcatagtaaaattctcagttttaatattgttgaatttataaatattttactttttagtctgtgttctatatgtcatatttatgaaataatttcctgagtcaaaggtacaaagatattcactaatactgtctcctccttcttcttcttctccttctccttcgccttcccattctccttccccttccccttctcctttgtcttcttctttttttttcmaataaggtcttgctctgtcatccaggctgg

SEQ ID NO: 853220 - DNA, 544 bp, Homo sapiens
actgtcagatattttaaaatgtttgccattctggatataaaatgacacctcaactggatttccggattgctaatgaggtgagcatcttttccattgttggttgatcttctgggagtttcttttatgaagtggctattccagtctttcctcttttctctacttgcctatttgcctctttaaaagtcaatttgtagaaattctttatgcattttgagcactaatcctttggcaaatagagatattgcagatactgtcaaccattttgtagtttgtcttttcactttctgtttgctgtttttcatagtaaaattctcagttttaatattgttgaatttataaatattttactttttagtctgtgttctatatgtcatatttatgaaataatttcctgagtcaaaggtacaaagatattcactaatactgtctcctccttcttcttcttctccttctccttcgccttcccattctccttccccttccccttctcctttgtcttcttctttttttttcaamtaaggtcttgctctgtcatccaggctgg

SEQ ID NO: 853221 - DNA, 553 bp, Homo sapiens
atccagaagttcaaagctgcaatgagctgtgatcgygccactgcactccagcctgggcaacagagcaagaacctgtctctaaaaaaaaaaaaaaaattaaccagggttgtaaggcagaactaggaaagtgaacagaccacatgtgtttgggacctgccgacaatgtgaccttgggtcagtcacttaccgtctctgtacccaccttctctcccttctaaaaaggggacacagggcctgccctcccacattgacagtactgttgacggttcaaatagataagtgaaagagcattgctagattcaacgatgatctgaagagacattgagacctaagcaaacgtccctgccttggctgccatacaaccagccatattgtgtgcataaattcttggccacagagggcagcaaaggagggaagagcagatccacagaggtgtgggagtttaccctgggggtaccgctggatggagaagtgcgggcattttgggcagaggtgggctcacgtgtgatgagttcaggggatggagaagtcactgtcttggctgggtgcgggt

SEQ ID NO: 853222 - DNA, 564 bp, Homo sapiens
agcccgctaattgtcatatttttttagagacagrtctcactgctcactgtgttggccaggctggtctcaaactcctggcctcaagtgatcttcccacatcagcttcccaaagtgttggaattacaggtgtgagccaccatgcccagtcagctttcagccttcaccattgagtatgatgttagctgtgggcttgtgatatatggcctttattgtgttgcggaacattccttttgagagtttttatcatgaaaggatgttgaattttgtcaaacgtttttccacagatactgagatgatcatcatatggtgtttgtatttcactctgtcagtgtggtgtatcatatttatttatttgtatatgttgaactatccttgcatcccagggataaatcccccttgatcatggtgtgtgaaatctttaatgtgttgttgaatttagtttgctagtattttgtcgaggatttttgcatctatgttcattgaggatattggcctgtaattttcttttcttgtggtgtccttatctggctttggtatgagggtaattctgggcccataaaacgt

SEQ ID NO: 853223 - DNA, 593 bp, Homo sapiens
tccagtgggccctggggcacaggtatctagttgtctggtcccagcyctgagatgatttaaaacagggaaatactggcttagtgtgtgagagtgagaaaaggagctgattgtggctttatacttgggattcattggtatgtatatgaaagacatgttctcagtggaacccctcactaagactgcccaggaaggggcaatcttttcccaggtctgtaaggccccccaggtaccagatcatcattggcctgtgaatagatggcaaatagacaaatgcagaatctgaagaagtgagacattaattcattataaaacccctaagaaaaccgggaacaaaggaaaacttccacaacttgataaagtacatctataaaaagtacatctacagctaatatcatgtttactggtgacagactgagtgctttccccctaagaattaggaatgactgaaaaatgttcactctcaccactgctattcaatgtagtactggaaattctagccaatgcaataaggcaagaaaaggaaataaaaggcataactattggaaaggaagaaataaaaatttgtaaaggcagtaatcctaccttataggaca

SEQ ID NO: 853224 - DNA, 441 bp, Homo sapiens
gggtgtcattcagatcagctgacatcagtagtttcattggtatgcaggagctgaaagaatatctcaaagggaaaacttaagattttacaatgtttaagttgttatctttaaagcagttaaggggaacgatagtcttgtgataaggtctctgtgagtctgaggcaataggcagtggatcgctctgaggaagcaggttggagagcaagctgcctaatgattaatgctgaacatgctgcaagcatgatttctttttgtttctcctcttccttcttccctgattagttttataaaatttataggaatagtttcatcacctgtagaaaatattacaaatttgtataccttgttacagaagttgtttagagtggctgkcaaaggctgcatttctctctttcctagttagtagaggtgtttctgtgactgaggcctagccatgaaagg

SEQ ID NO: 853225 - DNA, 587 bp, Homo sapiens
taatcacttcttaaaatcctcaccttaaaatatcaacactatgggatgaggttccaacaygtgaattttggaaggacacaaaaactcagtccatagcactgaagatacaatgaaattctgttttgaggactgcatgagttacagatgatagaaactatagcttagtacctgtacaatgcaggaagtctaatagcagatgcccatgtagatacaatttttcctaatataacattctcagtataattgtgaatgaaaaataaacataacttgcaatacaaaacttgcatcttaactttagtgttgggagaccacacagaaacaaagcaaacaaataaaatatctccccagcaaatcataaagatgtaatggccattgtgtgattcttaaaaatttcaagttaaaatttgtatctgaaatattcttttattgtaagtctctcaggtaattggaagaagcaagcacacatcctctttggaggaatgactttttaaatccagacttcagagcatttcacttataaagttcaaggaacatagactcacaattaaaaataaaacagacaagcaaacaaagaaacaaaaatagat

SEQ ID NO: 853226 - DNA, 510 bp, Homo sapiens
gaagaaaagctttacaaaggaaamgggttaacaatggagagaggctttaaggaataaaacgtaatacaaaaataagtaatcattatttgtttaattaatatgtttaatcattatttaattaccagtaaattaacgaactgtaatgctagggaaaaattggtcaaaatgagaaatatgatcatattcacaaaatgccaatgtggttttaacttagaaagaaaaattgtcaaaatgataaaataatcattaattctagaaagtctagataatctgaacacccttaaagaagagagcgaaaactgtcaagagccagcaaaggctcactgggaaggcatcagttccaaccagatttcttttccttcttaaaatatttatgtatgtatgcatgcatgtattgatattacaggatcactagaagtatagatctagtagcacttaatttcaacaagatagttcatattttattctttagaggagatgaagaaatggtagtaggcctagatgaattca

SEQ ID NO: 853227 - DNA, 460 bp, Homo sapiens
tataacacataattatttgtcaatttcattgcttcccttttatacataattaattgtgtgccatccttgaaagacagagatcacagacaatgcattaataggttcttgtttaactttttattgtggactttaaaaaatttaccccaaagtatattacagttataatgtgaatccctgtaactacacatcaacaattatcaatatttagccaattctgtttcattttaaagcaaatctgagaaaccaagtcatttcagaaataactccttttgtattggtgactgataaaattttctctttttataaccaccataccattatcaaatataataatattttacrtatgataaaatatttgtaacaagacttagcaataattccttaatgtaggctaatacttaacccaccgttcatatttcctaatattgtcacaaattttttttatggttggtttcttcaa

SEQ ID NO: 853228 - DNA, 620 bp, Homo sapiens
aagaaaaaagttaaaattaagaatttttaaaatatttatttaaaaataaaaagactcattaaattaatgttaacataaataaaacattgttaaatttaaaaaaamccctacatttccaaacaaaataattagtgagaaaaatggcattgttttacatttttacaaatctttttaattctgggttaatgaaatgcagctaaatttccatatctacttcttcatttgatctgttgaaatatggtgttttggttgaagcgtatgaagaaattcagtctcacacagataactagaaaaggtgggcgtataggcacatgccctcttattgcactccactttatttttttattcacggatattgcatttcttacaaactgaaggtttgtggcaacttcatcaagcaaatctatcggagccatgtttccaacagcacatgctcacttcatgtctctgtgtcacattttggtaattcttacaatatttcaaattttttcattatgattgtatctgttatggtgatctgtgatcggtgagctttgatgtcactatcatgcagttatgtgttgcttcacaatgggcatgtattctgagaaatgcatcattaggcaactttgttgttgtgc

SEQ ID NO: 853229 - DNA, 368 bp, Homo sapiens
gtaatgagagatttgctgttgagattgtgttatacatgtgtaaagtatgaatgcagacaaaaggttgargattactagtgtaggaatgaagacctgctccatctgtaatcttgttttgcttgctcttccttgcccttctctaccacggttggtcattctcactgccaaggaacctgacaatgttactcttgcttggcgttttaagccttggtgtgtaagcattacaggcaagtactacagtttgaaatgcccatctccttgattacatttcctcaaagttctttctcccctttcttcaaagtgattttctgcaacaaagtcttaaacctagatcttaagggcattcatctgaccttcatttcctcttc

SEQ ID NO: 853230 - DNA, 652 bp, Homo sapiens
aaattttgatatgtctgaattgtcctatgatgattttatctgaagaccattgagtcatttgcatcaaacagtgagatccactttttttttttttccccggagacagaggcttactccgttacccaggttagagtgyagtggtgtgatcctgactcgctgcagccttgacctcctgggctcaacaattctcccacctcagcctcctgagtagctcacactacaggtggagaccaccacatctggctaatttttaaatactttgtaaatacgaggtctccctatgctgcccaggctagtcttaaactcctggattcaagtgaccttcccaccttggcttcccagagtgctgggattacaggtgggggctactgagcccagcccacatcttttacaaatatgtcctcccctcacttcatatttaataagctataaactgaagatccgctgataaacaaaagacactttgaaagtactattctcacgtttgacaactaatttgttctcaaatatcgagagacagaatgggtcaaaattattctctgtctctgttttgtatgttctcactcccttactaaaaataattagccaaattctcctctaatgcttttttcccttatgttaatgacattcaataaaatttttgtgttctcaa

SEQ ID NO: 853231 - DNA, 624 bp, Homo sapiens
catttctactcatatttttcaaagttataaacttcttatcaaataaaaagaaaaaataaagcaagaatactaattgtcatggtggtgcacatctgtagtcctagctacttgtgaggctgaggcagtaggattgcttgagcccagaagttcaaggctgtattgagctatgatcacaccactgcactccagtctgggagacacagcaagaccctgtctctttaaaaaaggaaagaaagaaattacaagttatttctcttaaaaaagagatgttggccaggcgcggtggctcatgcctataatcccagcactttgggaggccgaagcaggggggatcacctgaagtcaggagtttgagaccagcctggccaacatggtgaaacctcatctctactaaaaatacaaaaaattagctgggagtggtagcgggtgcctgtaatcccagctactcgggaggctgaggcaggagaatcgcttgaacccgggaggtggagattgcagtgagtcgagattgtgcactgcaatcaagcctrggtgatggagcaaaacaccatctccgaaaaaaaaaaaaaaaagatatgttctggcaatatgcttttgccaagaaaaaccctgagcaacaaagga

SEQ ID NO: 853232 - DNA, 602 bp, Homo sapiens
ctcagcctcccaagtagttgaaactatggatgcgtgcgaaaaattgtgttttgaattgtttttatttagtaggttttacatcgaatttatgaatgagtatgagcatcttttcaagtgttgagtccattgtaattctttttatatgaaatatccttttatgtcatatgcccatttttctgttgaatggttggcttttttttttttttttgaggcagaatctccttcctgtcccccaggctggagtgcagtggtccaataacggcttactgcagccttgaacctcccaggctcaagtgatcctcccacctcaacctcctgagtacctggggctacaggcacatgctaccatgctggctaatttttaaattttttaatagagataaggcctcactatgttgtccaggctggtctcgaactcctgggctcaagcacctcacctacctcggcctcccagtgttgggactataggagtgaaccactttgcctggcctgaatggttggtctytaaaaaaaattactgattttagatgttctttatgtatgagagtcaagctctttagtgatgtgaattataaataactttttgtagagtttgtcattta

SEQ ID NO: 853233 - DNA, 610 bp, Homo sapiens
tataataaaaaaaaagaaaaaagaagaaaaaaaaagaaaataaacaatagtgaaataacagcaaawaaaagaaggaaaagaaaagagagaaggatcaaatagacacaataaaaaatgataaaggggagatcaccactgatcccacagaaatacaaactaccattagaaaacactataaacatctctacgcaagtaaactagaaaatctagaagaaatggatgaattcctggacacataccctcccaagactaaaccaggaagaaatcgaatccctaaatagatcaataacaagttctgaaattgaggcagtaattaatagcctaccagaaaaaaaaaaaaaaaaaaagcccaggaccagacggattcacagcccagttctaccagaggtacaaagaggagctggtaccattccttctgaaactattccaaacagtagaaaaagagggacacctccctaactcattttatgaggcaagcatcatcctgataccaaagcctcgcagagacacaacaacaacaaaaaaattcaggccaatatccctgatgcatatcgatgtgaaaatcctcaataaaatactagcaaactgaatccagcagcacaccaaaagc

SEQ ID NO: 853234 - DNA, 610 bp, Homo sapiens
tataataaaaaaaaagaaaaaagaagaaaaaaaaagaaaataaacaatagtgaaataacagcaaaaaaaagaaggaaaagaaaagagagaaggatcaaatagacacaataaaaaatgataaaggggagatcaccactgatcccacagaaatacaaactaccattagaaaacactataaacatctctacgcaagtaaactagaaaatctagaagaaatggatgaattcctggacacataccctcccaagactaaaccaggaagaaatcgaatccctaaatagatcaataacaagttctgaaattgaggcagtaattaatagcctaccagaaaaaaaaaaaaaaaaaaagcccaggaccagacggattcacagcccagttctaccagaggtacaaagaggagctggtaccattccttctgaaactattccaaacagtagaaaaagagggacacctccctaactcattttatgaggcaagcatcatcctgataccaaagcctcgcagagacacaacaacaacaaaaaaattcaggycaatatccctgatgcatatcgatgtgaaaatcctcaataaaatactagcaaactgaatccagcagcacaccaaaagc

SEQ ID NO: 853235 - DNA, 624 bp, Homo sapiens
tctcctctgtccttctgctttttctcctccttctccctcaccttcttctgttactcatatctcctaaaagtcatctgaagacaaattagacttagaacattcaccataatgcttygggaaggttgtcacagatatcccctcaccagacatttcaacaagttgattgtatcacataccatttagccacagtttttaaaatttattcacttatttttggatgcataataaatgtacatagttttggggtagacatattgagttttaagtgtctgtaaaatattgatgggaatatctgacagagagtggtagaaatttctgaggcttaagagaaacaaatactaagaagaacatagggtaagaatgttgctgttcaaatcaagggagaaatgcatcttaaggataattgagtactcaacagcttgaacaccaaaatgaggtccttatctcaacaccagcccattggctggtgggcttttccaccactacccaactcaggtcttctctgctcattttatttttaagagctgactcttatatctgtattttcagacacttattaatgcatggcactataagtatatatccaaagataataactatttacatcattcccaaatattgcct

SEQ ID NO: 853236 - DNA, 608 bp, Homo sapiens
tattttcaccagaaaatatgctgtgctaaattaatataggcttgactgctgatcttaataatctttcttataatgaattagattttatagtgatttagagtaaggcattttttttcatattattcacaaaggacagaaaagagccaatcatatgtgaccaaccaacatgatttctttcgcttacatagcattttaaaataatttgaattggttttcaaaaatggagaaataatacttttactattaagatcttaatttcttgcttcccttgaaaaatcagaagggcagcaatattgagcccataattccaggtgccgacataggctgagactgtatgaaggattctgccttaggactaggcaggcaagtgctttccagctctcaaccatctgcaccactccctataatctgcactgaggcccacttcactcattgtcctgcctaccgaatgtcaactagcaaacatagctgtattgtagtaacwcttccagtgaagcaaacaaatattatattaacaatttgcacatggttctgtacttagaaggatatattgcattatctagaaaccctatcatagaaaaaaagaaattggttttagatttagacag

SEQ ID NO: 853237 - DNA, 483 bp, Homo sapiens
tctagtggtcagattatttcatgtctgtcagaaaagctattaccaattttgaaattaaaaattcataatgcgtaggtttcttccagttactcaagggaaaagatataaatacaaatcagataaattatccaaatggatgttcattctatttttttgccttgtcaccattaaaaacaaccttaaacttcttatgtgctcctcattaaaatcctaaccttgagtagtaccttctgtgtggttccaaggggagaatctcagtgtcattgctctatcagtgatgtcaggcaagtcacctcctgtggtggagctgactcttccccctctttttctctcatcaaaggggtagttcagttaaaagcccttaaaatagartaaatatgatcaagtggaagaaagtttggtgcttatgctgtattagagtttcttctttctcactttctttttcctagctctgagattttatttccaaaattattttcctta

SEQ ID NO: 853238 - DNA, 466 bp, Homo sapiens
aggaaccctaggaggattgaaaaaaccttgtttgccctgaatggtcaacactggataggaaaatggcaactcaggcacaacggcgagcggtgaaggcatttttcagatcacacctgaaaaccagtcctcacaaacacctctaaactgaagctgcccatatcccatatttggtgtaatgcagatggtaaaaagcacagcctgatcgtaagtcacacagatctgggtttaaattccaactgcaccacttactagcggggtgaccttggacaaactctttaactttttatgcctcagtttttcatctgtaatgtggggctcataatattatctataaccccaactrtaggtgtggtaggagggtgaaatgaaataccacattgcctgaactggaacaagtgctccataaacattaaattgttgtaatatttacaaatctctaccttagactgtacacttctcatcagtc

SEQ ID NO: 853239 - DNA, 466 bp, Homo sapiens
aggaaccctaggaggattgaaaaaaccttgtttgccctgaatggtcaacactggataggaaaatggcaactcaggcacaacggcgagcggtgaaggcatttttcagatcacacctgaaaaccagtcctcacaaacacctctaaactgaagctgcccatatcccatatttggtgtaatgcagatggtaaaaagcacagcctgatcgtaagtcacacagatctgggtttaaattccaactgcaccacttactagcggggtgaccttggacaaactctttaactttttatgcctcagtttttcatctgtaatgtggggctcataatattatctataaccccaactgtaggtgtggtaggagggtgaaatgaaataccacattgcctgaactggaacaagtgctccataaacattaaattgttktaatatttacaaatctctaccttagactgtacacttctcatcagtc

SEQ ID NO: 853240 - DNA, 610 bp, Homo sapiens
tggatggctgtgtagcagaggagttgggtggtctgcagggcaagaaacctagcccaggatgccatcatgtttgatsggtgagagaatgagattcctcaaggtgatttctgctccaggcttggctccagttaccaaacagcagagtatggtctaattttggtgacctaggatttctgggacagtcctgatttcaaatgttgtgtgtcactatctctgaactcttgaatgtactagaatcacgctctgatcttaagttaaggtcatcatcactcacagcccctaggaaggagccaggaaacccactcacctactgtgcatggcatgtcacatttctttttctttttctttttttttttagatggggtgtcactctgtcacccaggctggagtgcagtggtacaaccatagctcactgctcactgcagcctcaaactcctaggctcaagcgatcctcccatctcaacctcccaagtagccaggactacaggtgtgtgccaccatgcctggctaatatataaatatatttttgtagagtaggggtctcactgtgttgcccagtctagtcttaaactcctgggcttaagggatcctcctgccttggcctcccaaa

SEQ ID NO: 853241 - DNA, 597 bp, Homo sapiens
tgccaaagagacttcaacaccctactggcagtatgagacagatcactgaggccaaaaattaacaamgatattcaggccctgaattcaacatgtgaccaaatggacctaacagacatctacagaactctctacccccaaaacaacagaatatacattcctcttatcaccacatggcacatactctaaaatcgaccacacaattggacataacaatccacagcaaattcaaaaaaacaaaaatcataccaaccatactctcaaaccacagagtgataaaaatagaaatgaatactaagaaaatcactcaaaaccatacaacaacatggaaattaaacaacctgctcctgaatgatttttgggtaaataatgaaattaaggcaaaaatcaagaatttctttaaaactaatgaagaacaaagatacaacataccagaatctctgggacacagctaaggaagtgttaagagggaaatttatagcactaaacacccgcatcaaaaagttaaaaagagggccgggcacagtggctgaagcctgtaatcccagcaatttgggaggccaacacaggcagatcatctgaggtcaggagttcaagacc

SEQ ID NO: 853242 - DNA, 392 bp, Homo sapiens
tggccaagcactgcataaggcacatggattgagaaaacaaatataacagctgtaagggacagcagtacctgacatataacggacagttagtcaatgataattccccaccccactcacctcccttgttcgtgtccctctttcaggaaccaattccaatgcacagcttccagggatgagcaatggaggacagaatggaatagagcaggaactaagcaaggatgctaatgcaagatatagccggtaggtggcagcagcgtccgtgaaatgagcccggtctcgggcagccytgcctaaatttctcccaagccaagctgtttgactgtgtgcacgtgtatgaacacaggtgtacggatgtgcatgtgtatgggtcaggtgtatgggtcacaggtgta

SEQ ID NO: 853243 - DNA, 602 bp, Homo sapiens
tcacgctcctatgagaatctaatgccagccgctgatcagacaggaggaggagctcaggaggtaatgctcacttaccagccactcacctcctgytgtgctgctggcttcccaacaagtcatgggctggtacccgtctgcagctcaggggttggggacccctgttctagaatatgattcaaattcttaaaacaatggtacgtttatataaagcaaataaacttgtggtaaaccatgctgtgttttcaatagcagttctttaggtattgagataattataagcactcagtacatgccaagcactatgttcagtactttatatacattgcattgtatttatgcttgcatcctgccttcatccctcttgtatgtctgaggaaactgaggctcaggacagattagtaacttgcctacagcaataaagtttttaaagggaggagccacaatacaagctaaagccagcttgacccaaaattcatgctcttcacatccatatctgcctataggtaattttgtatcgtaggggatctaagataagcaaatatagagcttttataattgggaaacaaatcagtaatataaatgttgtattaaacacatatata

SEQ ID NO: 853244 - DNA, 629 bp, Homo sapiens
tctcaccagcacctggcagaggcacttcccccagaaaatctttgcagaccctcctggcctttgggaaggtgcccagcactgctccatcttctttggcctgtaattccctgctgacttmgagttttgccatttgtaggtttttcctacaaggctctgagctctttgagggcagaggctgggtcattcatcttagtactcttggtacacaagaaaaaataattataagtttcaattaagttccaacgaagcactgatattttgtgagctggagccattgttctattttgctcagagaggaaaaaaataatctaatcaggagaaatgtctctactaaggtttatcgcacttttttttttttcttaaaatgtcggtgcctactaatgtttgtgtattttggaattccaaatacacaataaatctatcacaataaatctatcttgcagtgatatttaaaaacccattatgaaattctgaacccagtatttcatctagaacaaccatttaaaaattattttgatgctagtattttgagaatgccatgtgataagaagcatcatgaataaccttgagaaccagtgagttcagtaaatgtatgttaaatgagtgaaaaaaggagaatgagaaggcat

SEQ ID NO: 853245 - DNA, 635 bp, Homo sapiens
ttttttttctttctgcattattggtatgcatgcattatgaaacacrttttacaaatgtgcataggtatatatgtatatatgtatatatgtatatatatttatttcttattaagaggtttgagtagggggaagtagacatatgtggtttttgccaatagaatccaattaataaaaaacatttatatttttgaaattagaactctaagagttcatctagaaatagaaataagtccatttttgataaaaatgaaaataatggatctaacccaactgtaatgctggtgattaagcagtcaaaatgaacaattaggaagtggtccagtcatttagtgaatgttgcttctgccatcaacacattaaggagacatggtactttagtctgcgtgtaagaaaatgatatttagaaaatctaagtagatgtgttcaaaaagtgttattctgaagttgataaagacgacttggtgattttttttttcctaagggaaattaaccacattcatgatctgtttggacttagtttttctctgctatcactgcatattttataagctgttaaataaataaatctggtaatagtttaactgactgtagagaaaagataaagatgcattaagttttttaaaaaacacctatac

SEQ ID NO: 853246 - DNA, 484 bp, Homo sapiens
gcagctccaaaagagaccccttccttctgcttgagaagaaaacatggaagagtggggaggatttgtcttgcatcttaaataccagctctaccatagcataatagggcaccagttaagagtagtgaggccttattccaggcactagctccaggacatttccagacagaccctgggcccaaagagaaccttctaccttaaagggaaaaacccagtcctagcatttgttacctgctaactgaagagcccttggaccctgaataatcagcagtgatactcacatactacctcaagggctgtgcgtgagccttaggcttgttggcttcaggtgagacccagcacattaccacctgtggtagctgtggggaaaaactccttcttgagaaaagtagagaaaaaaataaaggggactttgccttgaaccttaggtacyagaatggccacagtgtgtcagagaaccaagctggattttgggatccctgattct

SEQ ID NO: 853247 - DNA, 615 bp, Homo sapiens
ctagtttttgcatttttaatagagatggggtttcaccatgttgggcaggctggtctccaactcctgaactcaggtgatcctcccactttggcctcccaaagtgctgggattacaagcgtgagtgagccatggcgcccggccatgtatttgttttataaccatgagaaactaaaatcaaaagtctatttgtagattctcccagtgggttataaaatctggaatatttctgaagaaattatttctgctacacacacacagacacatacacagagagacacacacacagcgcaggtgacagctctttggtaactcaactatgaagtatagtttttagaatattttcactgatgaaagatcaaactacagtgattctgtgtgaactctggtgtgtatgcgtgtttctgtgtgtgttgtataaatatatatatatatttcaccttaaaatcagagaagaacctgattttgaaagagcaactgacaaattttatttccagggagattcgctgccaaaagggaaaaaccatcctgtctggtctcaccaaataccayctcccgtctattcgccactcagcaaccagagtgatctcttagaaacataattgggtcatatcactc

SEQ ID NO: 853248 - DNA, 431 bp, Homo sapiens
tagtctgattgatcaagaaaaagactaaattaataatatcaagaattaaaaagggcacataactacggctcccayacacactgaaaggataatcagtaaatattatttacaattttatgccaagaaattcaacaatttagataacatggaacaaaaattttaaagacaaactgtcaaagctaaataaattaaatttatattacaaattttcacataaagaaaactcgaagcccatatagttttactggtaaattttatcaaacatttaagaatgaaagattaccatttccacataaactcttccagaaattgaagaaaatacttcccagctcgttctatgaaatccactctttgtgacaacctattcagtttccagcattgctttgttattgaaatcagacgacattacaggaaaaaaaaatcatagacca

SEQ ID NO: 853249 - DNA, 587 bp, Homo sapiens
catctgcacggtcctatcagcacagaagcctcaatgggatatttcgcttaaagacatttgraaaaacaagagctggaaagctctcactgaaaactgcccttgattccataaaatacactttatttttcctaggctataaattcaggaagaataggctggatgcgacggctgatgcctgtaatcccagctctctgggagatcaaggcaggaggatcacttgaggatgggagtttgagacaagcttggacaacacagcaagatcccatctctaccaaaaattaaaaatagctgggcatgggggtgggacctatactcccagctacttgggaggctaagctgggaggatcgcctgagcctgggaggtggtggctgcagtgagccaagatcgtgccactgcactccagcctgggtgacagagcaagacgctgtctcaaaaaaaaaaaaaaaatctggccgggcacagtggctcacgcctgtaatcccagcactttgggaggtcgaggtgggtggatcacttgaggtgagaagttcaagaccagcctggtcaacacagtgaaaccccgtctctactaaaaatacaaaaatta

SEQ ID NO: 853250 - DNA, 472 bp, Homo sapiens
gaggaaatgagccaaaatgttaactgttactttctagacttatgaataaatgttatgcttttacccatacttactcttattttcctaatattctataatgagaactttttatttttttcctttttgagacagtctctgtggcccaggctggagtgcagtagcgcactcttggctcacgggagcgagccaccacacctggcttccgttcgttgcctgtgcttgtggggtattactcaagaaatctttgcctagtccaatgtcctgtagagtttctccaatgttttcttctagtagtttcagcttgaggtcttaaagtcttttaatttgatttttgtatgtggtgacagagaggggtctagtttcattcttctgtatatagatatccagttttyccagcaccgtttattgaagagattgtcttttccccaataaatattcctggtacatttgtcaagaatgagttcactgtaga

SEQ ID NO: 853251 - DNA, 634 bp, Homo sapiens
acctctggggaccacgatgtctgccaggcgcatggtgggctggatgtactggtcgaaggagggcttgacaaacttgttgtactgcttgatgacaccctcgatgtcccggccgcgctcactgatgtcccggcgcagccgccgtaccaggcggatgtcggagtctgtgtccacaaagatcttcatgtccaggagctggtggagacagcgggccagtgagtggccagatgccagcagtgggcatggagacactgggaccagcccctgcactgaggccgcctggtccgtgggcctggccagagccacttccccagggcaccctggcaggtggggaggagtggggaggtgggggtgtctgcacctggtccgtgggcctggcccgagccacttccccagggcaccctggcaggtgggaaggagtggggaggtgggggtgtctggggatgcggtgctgcccgtcaggggcttaggtgaagaggcatggcatggtggctggctaaggaatcaggcaggaatggggctgggcacatgtgatctccttactttgcttggggtaacttgcaccaacacactggggaacgggggacgtggygagtttagggtctgtccccatgctcagcacacagtagttggcccg

SEQ ID NO: 853252 - DNA, 588 bp, Homo sapiens
ggttctctgatactatttctgggctacatttcctgtttcatttcttgaagctttcatttctatatgtgaagaaatttgaacaatttttttktgtctatgagctacactttttaacatagataccaattagctcttaattattaagcaggtgagaggacacagatacatatttatagcttggaggtcatttatattaaatattatgaaaatctttataacagtaatgttggaaaattaagtaatgaaatgagctaccaagaaagggtgtacaatcactgtcacttgagtacctactcaaggcagaaatggccacctgttgggaaatgatgttttagagctaattatgtcttctggccatcatctgtggtatatatctaagccattctcttcacattatttgaaatcttaatttatataaacacatgcctattccatcaatagtacttattaaaaattgttgtaaaatgcttagaattttcactcctagactcagtcctcaggaaataatctaaaaagccaaaaaaagagacaaaaatatttactatagcattatttacaggagtacaaaacttataaacaacttaaatg

SEQ ID NO: 853253 - DNA, 592 bp, Homo sapiens
ctggaggaataatttaatacaaacagtctcctccactacaaacacttaggaagacaggataaaaatrtattaaaaacaaagaaaaataatttaaattaaaagtaaaatttaacaaaaagacaaaagttccagatgctaaaataaaaagtaaactcaaagccaaagtaatcaattctagctgatggtgatggacccagaagaacagtgccactggatgtaggccctgggaataacaagctaagtcttcaatgcttataaagctatgatagattcacaggtacctaactgcaggtctatttaaatcatggagatgaaactatgggttctccatgaaactaggactcttaaaaaaaaaaaaaagaaatctcacattgaggattttctttaacaaaaaataattgtaaaagtctcaaagaaacagaaataaaatgtgctaactgctctgggcttggggtgggtagagccccacaccatgtttcccatatttttatgaagaatcaaagtgtgtattaccaagaaagtgtggaaattctgatttaaggccaaagatatacttggagattcagcagagggaaataacataaggccaggt

SEQ ID NO: 853254 - DNA, 589 bp, Homo sapiens
aaaatgaaaaacataccaattaaaattaaaaattgaatagataattttaataacagataaaactatgctaaagggagaattataaactagaagagaaatataagaaaatgttctacaatatagcacagaggttttttttaatacaggaaattaactaataagcatgcagaaaaactgaaaagagctaatctacatttgatcagagttctagaataagcagagagagtgcaaggaaaagagacaatttgaagaaataataagtgagaattttcagaactaataaaagacaacaatcttcagattcaagtctttaataaattctaaatgaattaaatcaaaaaagaaatccacatctcaatacatcatagtgaatctgaagaaaaaaagatgatcaccaataaaagaagaacaaatttttttggagacaggatcttactctgttacccaggctggagtgcagtggtatgatcacagctcactgcagccttgaccttccaggctcaatcgaycctcccacctcagccttcctgagtagttggaactacaggaaataagcctgacttatttccctattttttgtagagacaaa

SEQ ID NO: 853255 - DNA, 565 bp, Homo sapiens
  misc_feature 559: n = A,T,C or G
ggcctcccaaagtgctggaattaaagrcatgagccactgcatgtagccaaaggaagaacaattagactagtgactttcttatcaacagcaacagtgtaaccagaagatgtagaataacttcaaagtctaaaagaaaataactgtcagcctagatttgtatatggagaaaaattatctttcaagaataaggaagaaacaaagacattgtcaggtaaatattaagctgagagtttgtcaccaacagaccctcaccaaagaaaagtctaaagaatataattcaaaaaagaaggccggtcccagaaggaaagtctgaattgcaatggtgagtagagaaagtggcaaatgcacaggtaaatttaaataaacattgactgtgtaaaacaacaataataatgtctgtggaatttttttttaaagatagaactaaaatagccaacagtaatcatatataggcctggggggagagttaaagtgttcaaaggtccttgaattttcagaagggaacaaagtatccataatttaaatttaatttatttaatttatctaattaaataaactntaactt

SEQ ID NO: 853256 - DNA, 419 bp, Homo sapiens
tgaatttttgttccaagaactagtgcaggaaaacacctggaaagctgacagaatccccagaccctctgaaggaagcagattgctgttgcaggccccggcaaacagtcaaaaaactgtgagtgtctaaagtgtgaaaggggactcatctgcccctgaacacacaccctcattgggaaaactgaaagtccagatcgagggagtaggatttgaccttacctggagctgagatgaatttacagagctgagtgaaatacaggggtagaagaagcactgggcactctcagtccccaaagaagccatttctgactttgtctcwtaggagtccctagggagggctgccagaggaactgggaaaagaccacacaaagaaggaaatttccagccgaacttcgtaataaatttgactgaacgtgaagttt

SEQ ID NO: 853257 - DNA, 637 bp, Homo sapiens
gactttgaattctgtctttcgtcccacactggtgaagataagctatcaatcttcattgccaaggttaaattcaacataaccatttcagagtaaagatcttgaggaccacaaggaatttccttgtaggcaaaytgtaagggaggtatatagctttttatctttgcagccatattatttaggaacaaaatgggaggcaggtttgcctgatgcagttctcagcttgacttttcccctttgacttagtgattttggggtcccgagatttactttcttttcacgtactccacagaagttattggagaaaccaatgacctggaaaagccaatagttgcagacaaaaaaaaagctccccccaaagcctgctctctttagttgaataaacaaacaaacaaaaaaaggcagcctgacaagtgcagatcttttcaacaataacagctgtgctcaagataaacactgtaaaataactgtggcaccaccctcatctaaaaaggtcaagcagggagcctagatttccactgtcaccaggttgtaatgaggtgacccacactgattacagggtgttgtcagaggaggaagaatggagatcaagaacactcatcaccactgggtggtaacaaggactctcccttcatagtgt

SEQ ID NO: 853258 - DNA, 635 bp, Homo sapiens
ggaattaagttcacaaattttaaatgtgcagcctgagaaatttttataattgtatctaatcatgaagacatcacagatattaatactctaaaaaakttttttgatgtccctttacatccaatcctcaccccacaaccaccacatcagacaaagcccatctgctttctttcacaaagttgtgttttttccagaatttcatataagcagattcatacatagtattttctgtttgatttctttaacttaccatgatgttcttgagattgattaatgttgctgcattatttctgtgtagtattttatgcgacagacatacagaatatgtgtatgcattcacaaatgaatggaaatttgtgttgcctccagattttgatgattttgaataatgctattgtgaacatttatgttcatgtttttctgtggatgtatatttgtatttctcttacataaatatctacaagtgaagctgctttgtccttttgataagtgtgtatttcactttataagatagtacctttcttcattctcatcagcaatgtatgaaatttccagttactacaaattccctgcaacagtagatactattgttttttgtttactcattttagttggtgtgttgtgatattcacttgtgg

SEQ ID NO: 853259 - DNA, 600 bp, Homo sapiens
taatcctgtggtttttgtctttggttctgttatgtgatttggttctttttatgtctttgtttccrtttgagttgatttgcgcatgttgaaccagctttgcatcccaaggatgaagccgagtggaccttggtggataaattttttgatgtgctcctggatttggtttgctagtattttcttgaggattttcattttgatgttcatcagggatactgacctgaagttttctttttttgttgcgtctcttcccggttttggtatcaagatgatgctggcttcataaaatgagttagggaaaattccctctttttcattttttaaaaatagtttcagaaagaatggtaccagctcatctttgtatttctggtagaaatcaactatgaatccatctccagagttttttttaggttggtaggctattaattactgcctcaattttagaccttgttactattggtctattcagtgatttgacttcttcctggtttagtcttgggagggtatatgcatctaggaatttatacattttttttttttagattttctagtttatttgtgtagaggtgtttataatattctctcatggtaatttgtatttct

SEQ ID NO: 853260 - DNA, 628 bp, Homo sapiens
atacctaagagtggagttgctggatcctaggttaggtgtatcatctacctcttgcagatgagataarttagataaactaacttagatgttaatttagatgttcagctttagtagattctaccaatctgttaagtgcctacaccattttacttccaccaacaatgtatgagagcttcagttgctctacatccggccaacacttggaaggaaattggaagggtagcagatccaggatttagggggagaaagactcaaatagaatgcaaatagctgggcctggtggggtggctcacgcctgtaatcccagtactttgggaggccgaggcgggtggatcaccaggtcaggagtttgagaccagcctgaccaacatggtgaaactctgactctactaaaaatacaaaaattagccgggcgtggtgtcgggcgcctgtaatgccagctacttcggaggctgaggcaggagaatctcttgaaactggaaggcggaggttgcagtgagccgagatcgtgccactgcactccaacctgcgtgatgggagcaaaactccatctcaaaaaaaaaaaaaaaaaaaaaaaaagaattcaaagagcctttcaggaaagctgaaggttgttggtcttaatttc

SEQ ID NO: 853261 - DNA, 591 bp, Homo sapiens
tcattcccacggttacggtcattatcagaatcattcctctgagagtctgtggcccgtttattacgcatgaaaagtgagagggtgacgttgaaacctagaaagaagcaaaatgtttattccttaagggacaaacttaggcctggcacggtggctcatgtctgtcgtaccagcactttgggaggctgaggcgggaggattgcttgaggccaggagttcaggaagagcctgggtaacacagagagacccccatatctacaaaatataaaataaaattagttgggcatggtggcatgtgcctgtagcctcagctactccataggctgagcaggaggattgcttgagcccaggagttcgaggctgcattgagctatggttgcactactggactctagcctaggtgacagagtgagactctgactcaaaaagagagagagagagagacggagagggacaagaccagaggaggaaggtagggtgggaggtgtgctgtgatgccacagagacagctgggctcatcagaacagacacctatgggaragaaacgtgcaggatccaggtacgagctccactgtggccagtccctgccctcag

SEQ ID NO: 853262 - DNA, 648 bp, Homo sapiens
cttttctattccaggatcccatcctagaatgactatttgattaataactatttgatagtcatgtctccttaggtgtgtcttggctgtgacaatttcacagaccttctttgtttttggtaaccttgacggttttgaaatatacgggtaggatattgckaaggttacctcttaattgggatttgtgtgatgtttttctcatgattagactggggttctggttctggagaggaagaccacagaggtgaagtgccatttttgtcatatccatatcagggtacatactaccatcacgacttaccactgttgatgaatcagtgtagactcatgatatttattttatcctttgagttaaaatgcagtgcttctttattttgttgctaaaattgttccatctttggccattgggagctctttcagttgactcctatatgattttcacatacccacatcatcgtgtgtgtgtgtgtttagcactgttgtactgtactttcttacactactagaatcagtcatttctccaaagagcccctattccctttattggagaatgatattcgaaaccaagatctgggtgctagatgtgctcattactaccaggatgtcattgcttctaggcctactcgactgtcagagcaaggaaatatatgt

SEQ ID NO: 853263 - DNA, 507 bp, Homo sapiens
accagcctaggtaacataccgagaccttgtcactactaaaaataaaaattataaaaataaaattagccaggcgtggtggcacccgcctgtaattccaactgctagggaggctgaggcaggagcttgagtccaggaggtcgaggctgcagtgagctatggtcgcctgtcaccgcactccagccttggcgacagggtggaaacctagtatttaagtttcttagaaaaacggctgggtgcagtggctcacgcctgtaatcccagcactttgggaggccgaggcgggtggatcacctgaggtcaggagtttcagaccagcctgaccaacaaggtgaaaccagtctctactaaaaatacaaaaattagcaggtcatggtggtgcgyacctgtaatcacagctacttgggaggctgaggcaggagaatagcttgaacccgggaggcggaggttgcagtgagccaagatggcactgggcgaaagagtgggattccatctcaacaacaacaacaa

SEQ ID NO: 853264 - DNA, 507 bp, Homo sapiens
accagcctaggtaacataccgagaccttgtcactactaaaaataaaaattataaaaataaaattagccaggcgtggtggcacccgcctgtaattccaactgctagggaggctgaggcaggagcttgagtccaggaggtcgaggctgcagtgagctatggtcgcctgtcaccgcactccagccttggcgacagggtggaaacctagtatttaagtttcttagaaaaacggctgggtgcagtggctcacgcctgtaatcccagcactttgggaggccgaggcgggtggatcacctgaggtcaggagtttcagaccagcctgaccaacaaggtgaaaccagtctctactaaaaatacaaaaattagcaggtcatggtggtgcgtacctgtaatcacagctacttgggaggctgaggcaggagaatagcttgaacccgggaggcggaggttgcagtgagccaagatggcactgggcgaaagagtgggawtccatctcaacaacaacaacaa

SEQ ID NO: 853265 - DNA, 571 bp, Homo sapiens
acaactggagaaatctgaatatggactagatgacagacatygaactgaattatttgaaactttcttaggtgtgacaatagcgtggggttatagaaaaggatgtctttgttctgagcttcatgctgaaaagtttacaggtgaggtgccatgatgcctaaaactttgttttcatcagttcatataatctacacataaagaggaggcaaatacaacaacatgttaacaattactcattgctattcttgcaacttttctgcatgtttgaattttctcacagtaaaaaataagaagggaaaagaaagaagcagaagataaatgaccatctgtaaaaccttattgcagagagaacctgccctctacccatctccacaggtgttacaaaatgaactgcacaactcgtatgttgaaaccaattcacgtgttgaagccctggccccgagtacctcagaatgtggctctattttaacacagggtcttaaacaagtaattgggaaaatgaagtcattagggtgacccctaatccactatgactggtgtccttctaagaagaggtttggacacagacatacac

SEQ ID NO: 853266 - DNA, 555 bp, Homo sapiens
atatgtaggaagaaaaataatgtaacatatcaaacagataacaagtaatcatattttatttttctgcattttgtgatgtaaggttgtcagtttcttaaacatatacttccttgtgttttctttcatcatttgmaatctatactcactcttatatctggtacttttacattcttttctttctttttttttttgagacgatgtttcactcttgttgcccaggctagagtgcaatggcgcaatctcggcccactgcaacctccgcctcccaggttctaaggattctcctgcctcagcttgagtagctgggattacaggcatgcaccaccacgcccagctaatttcgtatttttagtaggacagagtttctccatgttggtcggctggtttcgaactcccaacctcaggtggtctgcccacctcggcctcccaaagtgctgggattacaagcgtgagccaccacgcctggccttacattcttttcttaaagaggtacccacccctgccaaattgaataggctttcaggccacacaaagcctgcatccaaccctgtgtgt

SEQ ID NO: 853267 - DNA, 627 bp, Homo sapiens
cttgtttaaaacaccttggctaatctgggcccttcacatttccatatcaaatttaggatcagctcgtcaatttctgcaaaaatgcccactgggattttgataggaattgcactaaatctatctactaatttagagagaatcaccaccttaaccacattaagtcttctaatccatgaagtttgaatgtttccatttatttaggtctttaattttactcagcaatgttttgtagttttcagtgtacaattctttcagttattcctgagtattcttttggtgtcattgtaagtggagttaatttcttaatctctttttcagagtgttcattatagtatatggaaatataattaatttttgtgaaatcaattggtcttgtattctgcaactttgatgaacacattagttgtagtaacttttttgtggaatccttaggattttctatatacagggtcacatcctctgtgaataaaggcagttttatcctctccggtctagatgtctttcatttatttcttgcctgactgtaccagctagaacttccattccagtgttgtataaaattgtgagagcasacatcctagccttgttcccaatctcaggaagaaagcattcacacttgccatttaa

SEQ ID NO: 853268 - DNA, 562 bp, Homo sapiens
tgagtccagcatacgcttcatcttaaatgaggtgtatgagaaacatgctaaactatggttccctatctctgcttcacaatataaaggtgattccagaatttggaagcctcaactrtaacaaactagatgaagacagaagctgattagataaactgcagtggtcaggaagcctcaccaacagagcaaacaacctccatcttcagctgcttattgagaggccataatcctttgctgcaatacatacaacagtggctagactgaacacagagaagggacatctgtttcttaggcctgttctttctcataaatgattgatggcaaatatggaggagagtgatctggatgcacaaagaaacttgaaaattttactctagccaattttaggctttcgttaattcaaagctgtatctgccatacaacaagaacattttcactagatcaaaagaggaataagaatatctgcaggccttgagatttcaactattttgccttttaaactatatattagctgaacgtggtggctaacataaacataatcccaacactttgagaggccaaggtg

SEQ ID NO: 853269 - DNA, 561 bp, Homo sapiens
ggcaattgtccagctgggaagtgataatggcttggaacacagcaatagcaaggatggagaacagtgggcagatctgggagatattstggagaagaactgacatgatttggtgataactggatgtgggaagtgagggagagggaggctccaaggacattttcaggtttctagtttgaatgacttaatgagtaaagtctaatgaataacaacttgttagtataatccgcaagactacaccaaagcagtaggagagctacacaactttcacaagctcccatgtctgcaggagtgctctgctctctttggattctgtaggaacagaggcatcaatcaggtgctgggaatacagaaattttccaccaacgtgctcatcaaactttcctttaccgtaagccaaaagaatgtctctgagctatgaacatcagactttaatataaactttaaaatcttactctcagctctacggacatggttataggtgtctggcaattgaactaggagagcctgaaagtaaacacattgtctcttggaaattgatgaaaaaaccaagcatgtttcttt

SEQ ID NO: 853270 - DNA, 485 bp, Homo sapiens
aaggataacttttgatatctaaaggacccaactccatagcaagatactcaaagcattttataatyggaccatagactacctctgtaggcagtgtcacctcctgcattgttcttcctacacgatcagctaaattgtcccctaatctcccagtgtacactatatgctttacacatgctgttctctgcaatgccttcaacctctgtaatcttttcatccttcaaaccctagctcaaatgtcaccatatctaagaacttccttaagtcaactgcatcagtcccttttctgtactctcacagcacggttatggttctgttacagcgctgtaccataaattggcctactaacatatttattttatttttaaccaatatacactgtgaccttcatcattatttccatatcacttagttatttaaatgttgaatatatgtttaattaactaaacaagtatatatagtacttcatgacttttacttaggaactt

SEQ ID NO: 853271 - DNA, 583 bp, Homo sapiens
atatagccagtctatgtctttttttattttttgagacaagatctccctctgttgcccaggytgcagtgcagtggtgcaatcatggctcactgcagcctcaaactccctggctcaagtgattctcccacctcagcctcctgtgtagctgggaccacaggtgcatgccaccatgcttggctaattcctttttggaaagattgggtcttcctatattgccttggctggtctcaaactcctggactcaagagatcctcctacctccgcctcccaaagtgctgggattacacatatgagccactgtgcctggctcactctgtcttttgattggagagtttatttcatctacattcaatgttattattgataagtaagggcttacttctgccattctgttatttgttttctggttttgtggtcttctcttccttctttccttccttcctgtcgtcctttcagtgaaggtgattttcttaggtggaaggttactttttgtgtatctgttgtatgttttttgatttgaggttaccatgaagcttgcaaatgatatcttataatccattattttaaactgatgacaacttaa

SEQ ID NO: 853272 - DNA, 504 bp, Homo sapiens
cttccagtcctccaactccagcttttgcaggttccctattgccattttctgctggagtgaccttcaaggagctttaaacccagtgactttctgaaatatcctcttggcacttggaaaactcatgcatcccttccatgctgaatggtagagccagattgttcctctgttgctctttctctttgccctgctgctgcaagctgctcatccagcctcccaccttcacgctgcttaagacaagaagtaggcacaattctgtgttctcatgtgccccacctccagggaaaggaccacgtttcaagcccccaagaaccttcttgctctcttctgcctgagaagcagcacctgcatgggcctgggagtgtctataactcagccagcgtctggccaagagtgagaggccagactctctttcttgtaggcagcaccagcttcttggaatggttctcttagagctactctcattaggctgtsaggtgaggaaatataggaaaaggcaggagcgat

SEQ ID NO: 853273 - DNA, 587 bp, Homo sapiens
aacttgtattgtgtaatagtaagctggcaaaacccaactggttgaatatttgtaaatattatagataaccttgaaaatctacttataggatggtctatgggagagatcacaaaactaaaaattagctaaataaatatgatcaatatcaaaatcggtactcaaaaaataatgcatcagtaataagaatatggcatataaccaccatcaaagtaaaatgttgagttcctaaaatgaattgtgtaggtacagcactaagctggcccactttgaaaataatgtgcataaaaagaattattttttttctaaagtacaacacaaactaaatgtgtagtatgcttgtgaagaagtatgggaagcagtagtctcagtttactgtactaaactggctaaatccagaatattttgttcagttcttggataaccacaatggtgaggaggtgttaacaattagaaaatgaaagccatgcagcycaacaaagaggagctctgggaacaacctgacagctatgctcaatgccatcacttggagggtacacatgttctgctttgctgcaaaaaattggtggatccaagaacaactgggggga

SEQ ID NO: 853274 - DNA, 569 bp, Homo sapiens
agccatttttcttggtttctataatastacatttgcctaattttccttctatctttctgaacactcctttttagtccagtttcttctttcaatagacctctaaaggttcctagtgttaagtcttggatcctctttatttccctacatgtactttcctcctaggtgatctcaccactttcatagctttaaaaaccatatatatgctaaagattcttacatttctccatcccagccctttcttttgactccagactggtatagacaacttgccaataacatcttgacttaaatgtttcacaggcaacttatacttaattttttccaaagttaagttttaatttatttctcaaaagctgatcctgtctgcaatcctcctcgttataataagtaaatctgttctggcctcctttcatttctttgagtaggcagctctttgcttcagtctggaatgctttctccttaactcattagatggttggctcctactcatctttcaaatcttaacttaaatcttactatgaagacagacttttcttgtccttcctccatttctatcagagcaacatgtt

SEQ ID NO: 853275 - DNA, 554 bp, Homo sapiens
tatatccagaaatcagttgatggtagtagtatgatcttgaccaggaattagtgggtacaaaccctatagtgacctgcctcatatggcccataaaataagaatggttttcacatttttgaaagttgtaaaaaataagcaaagaaatttgacaaactcagttactgacttgaacaactgagtcaatgggaatgccattacctaaaatgtaagagactgcaagtggaatgatttgtggagagggaaatcaaaattccgttttgaatactgtggcacaatctgttctatctctgtcggctcaataccttttcacaaccattgctatgttcgggacagttttctttttaataaatcctgccttcccaaggaagaagccccaaatacccttctcagccttttttgcaacttgatgttatgtctatgcataacataaacctgtgcaaggatttactctgctaatgtggtggtgacagtgggctccacctaccaggaatagggggcagtgmttgcaagatcatcttcctgggttaagccatccgtgctgggggtcagctgtg

SEQ ID NO: 853276 - DNA, 590 bp, Homo sapiens
tgatttccatccttttacatttgtttcgccttattttatagcctggagtattaattaccttgggggatttttttttgtgattgaaaggacgagtattttgttgctggatgaagtgtttactagttatcagttaggtccaatttgtttatagtgttggataactcttctatatctttgataattttctctctaggtgttctatcagttcttgagagtgagatactgaagtctgtatctattataaaattgtctaattctcttctctgtcagtttttacttcatgaattttggggctctatttttagatgtgcttaagtttataattgttacattattgattaacacttccattataaaatgtcccattttgtctgtaggaacagttttgtctttaaaactattttagtatggccactctgaatctcttgtggttattattggcatggtgtgtattttttattttctttgaacttatttttgtcattaaatatgaagagttctcttgtagactgcatacaattacmtatcctttatccagttagacaatttctttatatttaatcaataggaatttattacaattattggta

SEQ ID NO: 853277 - DNA, 633 bp, Homo sapiens
ctatgcagatgagatatatagatctaatataacaattaagaaatgaatacccaatattwgcttgaatggtattggtgacttcccaaagtaactacactattactagaaagttccttcttatattaaaaccagtctaactctcctatcactaacctttattgttgctggttctgcctgttgcaatacagggatacacaaagccagtggggactctctctccttaccctgaatgtacacttcaattcttatttttatactgtcatgtttcactacaaaacatcctcatctaccctaatttcaagaccctatactattggggcagccctcctttaaaagttttctagtttatcaatattctacttgttacaatgtgaccatcaggacaggttgctccaggcacatctataatttgtcacctgatttttttcagtattgatcaacatttatttagtgagacagggagaaatatattgccaattaatataaactatatttttgatatttggaaataatatatatcaattgtccccttatcctcttctttgggttctccccaaaataaccttcacttgccaaaaacagtgttgaaatttccaaatatgtacttgttagaatgaaagacagcataagttg

SEQ ID NO: 853278 - DNA, 580 bp, Homo sapiens
taattataaagtttataaagacagtttcattgatgggttctagagttagattagcctacaaattgacaaagaaaaccagcatttagttgaacagctatcattactatgccccaggaagtatgctaagtattttacatataaaatttcaggcaatccttacaaaaaactctgggaatggtaattattggcctgattaataaaacaaatgggaaaattgatgacatatacttaagttaacatttagaagtcatagagttactaaatggcaggattaaaattttaaatcaagtttaacctattccacagtccactctctttccattataccctgtggaagggtcctcatatttctctctttataaaagtttaagctggatatgttggaaaacatcttttattataaaactatttcatttaattgaatcaccggtttcatatttttatctagtcatcccacctctagtcttagaccttctagatgccccaagtcctttatgcttattagtaggcatgtaagcaatagttattgcrcacctacgtttcatctattagattatttatttcttaaggcaatggctac

SEQ ID NO: 853279 - DNA, 591 bp, Homo sapiens
agacaccaaagtcctcataaagaaaatttggagaaatttttttctcctccatggagacarcttccagatttgaactgctttactagaaaggggagtggtggtatgatcagtcaaatacaagtgccacatacaaggtactcagagcatgatgggaaatttccaaaagccacccacttcttcagatatttctccaagatttgtgaccttcctggcttttgacctcgtggtttgtgagtcccatttaccctttctaccatgaaaatgattcaaaattaataagcagggactttgtttttaccttataaattaattcattttgcatatgtggttatagcccctttctcagtcctatgttgtatatttttgctttttattagaaattttacctattttattgatattttataaaaattagctcttagatttagttatcatttctataggtttgatatttagctttttttagtttgatggtttgttttttaacatgccaattttgtcattgatttctttctccagttttcccactattttcttagcttgttgagttgaatatttagttcatttatattagttcttgtttaataataa

SEQ ID NO: 853280 - DNA, 615 bp, Homo sapiens
ttgaggcaggagaattcttttagcccaggaatttgaggctgcagtgagttatgatgatgccactgcactccagcctgggtgacagagtgataccctgcctcaaaataaataaataaacaataatactgcaccttccagtccatgaacttggtacatttatccatgtattatatttaaatattttagagtttcagaatattttatagtttttattatgacgatctttcatctttttgttaaatgtatttctaaatattttgcttttgatattattttatattttattatttaactttaattttcaaatgttgccaggatataagaatataattgctttttgtatattgagtctgtataccatgatttagctgaatttagatattagttttatggggtttttttttggtagattctttgggatttttatataaacattatgttcttggggaaaaataattttacttcttactttatgttctatgtgccttttatttctttttcgttatatttattcctttcctgagattcaatctttttctttatkgtactaaaacctcctatttaatattaaataaaagtgtcgatggtggaccttatcaccttgttgccaatttt

SEQ ID NO: 853281 - DNA, 615 bp, Homo sapiens
cgatatgggtgaaccttgaggacatcatgctaagtgaaataagtcattcacaaaagaacaatactgcataattccamgtacacgggtacccagattagtcacgcttgcagaaacagaaagtagaatgatggttgccaggggctggggggatggggagttattgcttaaggggtacagcgcttcagtttggaaagaagagaagttctggaaatggatgatggtaagcatcccacaatgtgaatgtacttaatgccactgaactgcaaacttaaaaatggttaaaatcagccgagcacggtgtttcacgcctgtaatcccagcactttgggaggctgaggcaggtggatcacctgaaatcaggagttcaagaccagcctgaccaacatggtgaaacttgtctctgctaaaaatacaaaaattagctgggcgtggtggcgcacacctgtaatcccagctactcggaaggctgtggcaggagaatcgcttgaatccggaaggcagaggttgcagtgagccgaggtggtgccactgaactccagcctggatgacagagtgagactccgtctcaaaaaagaagaaaaaagggccgggcgtggtggctcatgcctgtaatct

SEQ ID NO: 853282 - DNA, 601 bp, Homo sapiens
aaaaataaaagacttaggctgggcacagtaactcacgcctgtaatgccagcactttgggaggctgaggtgggcggatcacctgaggtcaggagtttgtgaccagcctggccaacatggcaaaaccccatcttgactaaaaatataaaaattagccgggtgtggtggctcatgtctgtagtcccagctactggggaaactgaggcatgagaatcaattgaacccgggaggcggaggttgcagtgagccaagactgtgccgctgcactccaattaaagatggcaatggctaatttaattgtagcactcaattaacaacagtcatatttaagtagagaatcctgggtgagaccctgtctccaacaacaacaaccagaaaaaagacttagcagcctgcttatatggcatcattgaaaaatgaggtattcaatcaagtgactttcacaaataactaatccatcaatatttatgagttaaaactgcttaamttttcaaaggttttccatttttttgtttttttctaaagatggcatagacccttcttcaaatgaaaatcccatttggaatctgatatatattttaaaaagtagagctgcaccagttg

SEQ ID NO: 853283 - DNA, 588 bp, Homo sapiens
gctaacacttactgagagtttactgtggggagctgctgttctaagcactttagtcatttaggatctttgagtcaggcataatgttgggaacaagccccccaaaatctagccataaactggccccaaaactggccataaacaaaatctctgcagcactgtgacacgttcatgatggccataacgcccatgctggaaggtggtgggcttaccggaatgagggcaaggaacacctggccagcccagggcgaaaaaccgcttaaaggcattcttaagccacaaacaatagcgtgagcgatctgtgccttaaggacatgctcctgctgcagttaactagcccaacctattcctttaattcagcccatcccttcatttcccctaagggatacttttagtcaatttaatacctatagaaataatgctaatgactggcttgctgttaataaatacgtgggtaaaactctgttggcgctctcagctctgaaggctatgagaccccgatttcccacttsacacctctatatttctgtgtgtgtgtttaattcctctagtgctgctgggttagggtatccccaaccaagctggtctcgg

SEQ ID NO: 853284 - DNA, 530 bp, Homo sapiens
tcaagcctagaaaaaaagcttagcaagatagataactcggacgatgmctgctccactccagccacagaccacaggaacgaacactgtggccaacacccacgtgagcaaagccaggcggaaggcccagacttctacatttccaaggcaccccaacactcccaccggggtgggatccgaagaggccaagcagggagccaggacttccattccagccagaccttaatgactcccatctccttctccacatccccaacctgccagtatccatggagctgggacatccaccccacccagcagtaataagggatccctccccctccctactggggtggtatcagacggggcctttagtagggtcaagactttcactattgtacagcagtaatgagaaataagttccctctagagtgtcaacagaggccaaatggaaaacctgaacgtctacctcccctagcagtaatgaggcagtgcctcccccttccccatcagggtgaggtcacagcttccacccacaagtggacctctaccac

SEQ ID NO: 853285 - DNA, 606 bp, Homo sapiens
tataagagtactggggaagtgataaatgtccatgaaatcttcacaatttatattcagagattgcaataaagacaggagtaagaaattataaaagtattaatttggggacttaataaatgtccatgaaatcttcacaatttatgttcttctactgtggcttcagttggtccctccgtttggggtccctgayttcccacaacagtttgtagacaacatggtcttttatatacagaaacacttaaaggattccactaaaaagctggtagaactagtaaacacatttggtaaattttcaggatacaaattatcgtacaaaaatcagtagcattttaatacactagcagtaaactacctgaaaaagaaaaaaaatgccatttacaaaatctacaaaaaataaaatacataggcataaatttaatgaaggaagtggaaagttctctatgctgaaaactgtaaaacattgaggaaaagttaaagacacaaagagttcatgaccaagaacccaaagcaaatgcaacaaaaacaaagggacttaattaaactaaaaagcttctgcacagcaaaagaaataatgagcagagtcaacagacaacccacagagtagga

SEQ ID NO: 853286 - DNA, 598 bp, Homo sapiens
catacgtatcgagtgaacaatgtgtactaaaatggacagatgagaggtatacattgggatgtgaattgataatctagcaggttgtggggctagagggctttgggaaaagacaaaggaagaacatacaaacaaataaaataatactgtctttcaaagactaaaacctgtttggaaagagaggtagagaaagcaaacatataggatcacactgagttgatattttcccctagatttcagactttaagtcctctgaccttctctactctgagaagaccccttctcttctctatttacataagatactgtaagtctatgcattttgttctctataggatgttcacagggaaagatataggcatggttcaatacatagatttaaaatgaatgcttgtaactttggttcccttctctccatttccttaatgtggtgactaagtacatttctataaataaaaaggctgtagtacacatccttgatagcagcagtagcaaacatactggggagactggatctcactctggtgtctgtcctgggacacaagtgcctctatragaggtgtgtaagacaacttcaaagggaaaaggaatataggtaaaa

SEQ ID NO: 853287 - DNA, 596 bp, Homo sapiens
tattctcaacatcactaattatcagggaaatgaaaattaataccacaatgagatatcatctcccatccgttagaacggttattatcaaaaagacaaaatataacaagctttggcraggatatggagaaaagggaatctttacacaccgttggtaggaaagtaatttagtacagccattgtggaaaacagtatggaacttcctcagattaaaaactaaactaatatatgatccagcaattctactactgtgtgcatatccaatgaaaataaaattattatgtggaagagatatctgcagtgcaatgttcacggcagattattcacaatagccaagatattgagtcaacctaagtgtctatcaaggggtgaatagacaaataaaatggagtgtatatatacacaatggaatactattcagccttttggaacatggaaattctgtcaatcgtgataacaaggatgaacctggagaacatcatgttaagtaaaataagcctggcacagaaagacaaataccacatgatcttacttatacgtggaatcttaaaacatcaaactcatagaagcataaagcagaatggtggttatcaggggct

SEQ ID NO: 853288 - DNA, 621 bp, Homo sapiens
gatgttttgtcaacattgaataatcttatgggayactggtcccgtaagatcataatggagctggaaaattcctatcacctggtgacattgtagctgtcctaatgtcaaagagcaatgcattactcacatgtttatggtagtgctggtgtaaacagacctaatgtactgtcaggcacatataagtgtggcacatacaattatgtatagtacataatacttgataacgataaacaactatgttactggtttatgtatttactatactatacttttatcattattttagagtgaattcctttgacttattaaaataaaaagttaactgtaaaacagccacagatccttcaggaggtatttcagaagaaggcattgttatcataggagatatgatattgcccatgaagaccttccagtgggacatgacatggagggaagacagtgatattggtgatcctgaccctgtgcaggcctcggctactgtgtttgtgtcttcatttttaacaaagagttttaaaagtttaaaaaaattaaaatattaaaaataggaaaaaagctgttggaataaggatataaagaaaggtttttttgtaaaggtgtatgatgtatttgtgttttaggcta

SEQ ID NO: 853289 - DNA, 468 bp, Homo sapiens
gaggacaatgaagagctggagaaaaaattagaaggtattttcagaataccatcaaatactttaggtattttcagaagttttagatactcatgacactggatttttcaattatgttcaattttaccctcatacttgtggcttatcttttctcaattcaattttatcatacaaactgcttttaaattatgagtaaagtcatgatgtaaactcacagactgaattaaaagtgggagagagaatttgctgagataattctaaaggagttggaagagagaaaaatgataagggattattatgaatttgggctcatgtgtctgagtaagtcccatttggagaaattaactgaataagaaagaggtcataggtagaacagaattgaggagcatagtaaaagcaggaaaaagtacggtgtgaggcaraggtattgggtctcacaggtttgtgtgctaactaccaaatgtaggtgtg

SEQ ID NO: 853290 - DNA, 557 bp, Homo sapiens
ccttccgtctttggcacatagcttcaaaggcttccaagttcatcagcatcaagccagtggaagaagaaagagcatagcggactgtgcaaagaaggtgttcatgggccaggcctgaaaacagcccacgtcacacacccttggtcagaacttaatcacaagcacacacctaacgcaagggagtctggaaaatgttatcaaaatgtcggccccagatgaggagaaataggtttggaaaatagggccaatctctgccatagttctattcattaaaaagttcatcctcaaaatgagccaaaattctgcataaattgcttctgattttttcctccaggacaacataattctcatcccacttccacaagataaccctttaaatgctcaaaaaaataattttgtatctctcgtatgtcttattttgttcaatgtaaatactccaggttttcttctwtttttttttaatgtgacattgctattagagtcattttgagttgtcatagaaataagcaaatttatgtgctttcatactcctttaaggcgtgattttttaggcaaaacat

SEQ ID NO: 853291 - DNA, 625 bp, Homo sapiens
tctgtatcataaggtgttatacaaattaaagaaacacagaatttaccatgcacccrgcacaaggtcaaagctcaacaaatagataacaaattcatatctatttgtatttccatgtctatttctcttttggagtagctcagactttaaaatcctacttacacattcctgattttatatttagctgcacattgggaaatgaaggcaaaaagtctgcatctaagactaggactgagtattaaaggtggaacagcaccctcctgaggacaaagtggatttgacagccattgtcacctcaagagtccttagacggtagctagctgccacttgccttgggaaccagaaccagcaacataattggcaaggctcagggcagaataaaaatatggtgccctttgtttaaaaagtatctagaattttgagacagcaataacagagcattaagccaagcaaaggaccccttgagctatagggtgttttgttactccatggttgcatgcccataaagcatctctctccattttcactcatagagaaacaggatttggttcttattattaaaccaaaagatctcttatgtatgatctttagtcagtaaaacttagtttcagtttggtgttttgctgga

SEQ ID NO: 853292 - DNA, 590 bp, Homo sapiens
ggatcctgctgtcactgcaktatgaaacactttgcctgacaccacccattggagggtaatgaccagcagtctgggagtacctcacccctggacccccagcgcagtgggttcctaatctcaaggagtcagggaacaaagtcagggcccaataaaagtcccccacagtcagaacacacagtccaggagttcagagctgagtgttggccccctaaaatcttccagaaatgaagccacttggctgaatcaccttataccacagtcaaacctcagggtcatcaaataggataacagaagaaaagaaaagccatccaaaggtcagcaatttcaaagattagaggaacatcagcccacaaaagtgagaaagaaccggtgcaagcaccctgaaaactcagaaacccagaaacccagagtgccttctttcctgcaaaggaccccaccacatttctagcaagcattctgaaccaggctgagatggctgaaatgacataaatagaattcagaatatgcacaggaaggaagatcattgagatgcaggagttcattgaaacccaatgcaaagaagctaagactcacaataaaacaatgcagga

SEQ ID NO: 853293 - DNA, 633 bp, Homo sapiens
tctgcacattaacatctgagatgtgctgctctgatgagaaaaatctgggaacttcctcaaccttgagactcgatagtctggattttcgtaattctaggatgtagcatggtgaagtttgactgaccttgaatcccagagctgccactgtggggatattaattaacctttttaatctcagatgtttttcatctataaaaagtatatgttgggtattttgctaggttttttttttttggtgaggattaaatgaaataatataatgctcttggcatatagtaggaacttaataaatattacttattgctgattttgttattttatctgagccctggtgtagatggtttatttatttattatgataggagaaaattgctgtattattatgattacaatgttgtaattttgcattagttttatgtcatttatatgatttaatgagtattcttaaagaattaaaaagcatttgcatgcttttgacctcttgttttaacctgtttttgaatcttctactcataacatggacktattatgtggctgtatttatgggtatcatgtttttggtcttttttttgagacagagtctcgctctgtcacccaggctggagagcagtggcatgatctcggcttactgca

SEQ ID NO: 853294 - DNA, 584 bp, Homo sapiens
ggataagaagaaaatttaatgaaatagaaaacaagtaaataataaacaaaaatcaacaaagatgaaagtttgttctttgaaaatattaatacaatcgggaaactcctagtgatatcaaagaaartaagaggagaaaaaaacctacaaattaccaacatagggcatgagagagagagactataaccacagggtctacagacaatagaggacaacaagggactattatgaataactttatgccaacacataaagttgtagatgaaatggacaaattccttgaaaaacacaactcaccacaatggatagatagaagaataaataaaagacataaatagctatgtacctataaaagacaattgaaatcttaatttaaaacattttcacaaggaaaatccctagcccagatgactttacaagtgaattctatcaagtattttaggaagaaataattccaacattgggcaaactctttcacaaaagagaggagggaacaattcctaattcattgtataagcttctatgtcccaaacaccaaaacattatgataaaagacgtttcaagaaaagaaaatcacccaatgatga

SEQ ID NO: 853295 - DNA, 556 bp, Homo sapiens
gtcctttagttagtaaatctatttctcaccagggtatgggttagtaattctaaaattagattatctatatattgtatttccaggctctgcctgccgagagggcctagaagcaatgatatcccagcagcaatgggcacacccaactctcagatcttggttcctaaatactaccccccagagaagccagtgctctttggagaagtgctgaattccaggggtaaggcaagaaaagaaaaatacaagatgaacctgaactatctggtagtgtgtcaaaaattaaggaagggcttggaaaaagatgaggagatgttgaaaggacacaggagcaaaactgaagtagttcctaatggccaaagctggaagaatttgagcaacaaaataaataatgattgtattgggttacaatccagaggataaaataaatattcatgggcctctactgatataaataaaaaattgaataaatacataaataaaatgaggggaaagggrcagtgcttccttacaaagcattccaattaacatagagggaatgtaggaaaaagaaaagcaccat

SEQ ID NO: 853296 - DNA, 241 bp, Homo sapiens
ctcatatacaatgcatttttaaaatatgagcattttgacatttatttattcatccatccatgcaattaacaaatattaagtacctacaatggccccaaaaagagaaaatatattacaaaacataatcaaatgctgacrtttattttatttcattttacacaatacatttgtagtagccttctccagagggacaaaaccaataggatatatatacatatatttcatatatttgtatatgaaa

SEQ ID NO: 853297 - DNA, 623 bp, Homo sapiens
gttgcaatgccgaagtggaggagaagtttaagccacttcccccttatccccaatcaataaagaaggagatttggtggagttggagggttcagccttcccacacctgggagtgagttcagaaactcactcatttctgaagtgagttttctcagaggattccaaaggagtcccagttgcctacagtagaaacttcatattaatatgccatttactggctcttttagcttcctttttttacttttatttttcctaaaaacgtgctctacttgaccttggggtcacctcctaaataaattacataagcccaaaaccttgtctcagggtctgcttttgaggagcccaactcaatatgagttgagaattctattacttgcagctgaaagcattctaatgcaaatccgatagagcagcactgttcagtagaactttctgtgacaatggaaatgttccatatctgcagtggtcatcatggaaggtagccatgagccccttgtggctgctagaacacatgaaatgtggctagtatgattgaggaactgaayctttcctttcattttaattaatttaaatttaaatggccacatgtggctagtggctaccatattggacagcacagctctaga

SEQ ID NO: 853298 - DNA, 523 bp, Homo sapiens
atgttaagtcccttcctactcctattgttcaaaggggaaggtgttaaatttgttcttcctgtacccttcggtttcattctgtgtcttagtcctttggagataattggggtagagtactacatactataattaggatagtgggtttttgttttgttttgttttgtttttcagaatgagtctcactctgtcacccaggctggagggcagtggcttcatcatggctcactgcaacctccgcctcccgggttcaagtgattctcctgcctcagcctcccaagtagctggattacaggtgtgcaccaccatgcccagctaatttttgtattttcagtagagacggggtttcactatgttggccaggctggtctggaactcctgacctcaggtgatccgcccgcctyggcctcccaaattgctgggatgacaggtgtgagacctcatgcctggcttaggatagtgtattgatgcaagaggttttgagtgtccaaataattatctgctgaatttggaacctttaggaaag

SEQ ID NO: 853299 - DNA, 612 bp, Homo sapiens
atcctctgcctcagccacttagggttctgctcattactagctaacagaagagaatgaaagtaggaacaactaaatatgaaatggcaaagtgtgaaaaccttcccaggtgtttacattgcggctcaggggttctgagtctcaacccaaatgaatgaatcactagaacacttatcttactctagaatgattaaagaagagctggttttagagagagccttggacgggagacagttcagtggtcagagctctgaggctcttactagcactttagaagcagctactctactttttctttcttttatatagggtttctgaataaaactgaagaaagaaaaaatgttctactcttttaagttttaaaaagaacagaaacaaagaaaaatcagtgaagtaaagggctgtgggtaggaacttcctgaccatccctggagaatctctgaagacatgagccctaatgatgcctcattctacatcagaaaatctgcatttgtaggctgtcccaggccagtgagggtaaagatatgcgtcataagggtagaggkaagcattactttacactgcatcaaccgcaatatttttatttttgaaagtcattccgcgcagtcattaaat

SEQ ID NO: 853300 - DNA, 614 bp, Homo sapiens
aagcactgttgagtgatcatatgcaaaatactgtggggacggggttctgggagcacctcacaaaggaggggactgtggggcatagccaaccccaggggctcggctcctggccactgtagctggccttttcctgaaagcagatcttaaatgctcctatcagacacacacacacacacaaacacatacactcacacacattcacacacacacacactatgtgaggtgatgactatcttaattagtttgattgtgctgattatctcacaatgtatacagagattagatcatcaagtcatatgccttaaatctatacataaataaaataactggccttttcctggctgcagagatgggcaacctgagtccacagtggggcagtggaaaaggggtttctgcccctccagtcttttctccagcggggcaggtgggcacagttcccccaggtccaccccaggggacccaggggcttgtttttcactgtttcttcttcccataggaaaaattcaaacagacccaatcccctcgggccctgggatatgagccagattgcctyggcggagggtcttctatgaccccagcccctttcagctgctctctgacccctccatccccca

SEQ ID NO: 853301 - DNA, 556 bp, Homo sapiens
caataaatagtagtttttaccaccgccctcccttcccgtatctcaagacactttcttatggaggtcaycacctccttgggttacctgccaacatcgctgacccttgtctctgatttccaggcgtctctctgggaaccatctctcacacatcccaggacaagcattctctggtctctacagcctgaaaatcctgtaagtataggtacacctcattttacatagagctgcagcactgagaatggtgagcaaatcaaagttttagaacccaagtcttggtttaccactgacttgcttattatttccttatcttcactttcagtttcaattgttatttccatttctttgcttcaccttgtctgtaacaaactttatgatttgtaaataaacatttaattgtacctgctacattcagccacactaaaaggaagtgaaacatttaaaaaaattaaagtgtataatgaccatcgacataggtctttgtgggactgagttcagttacagacccacaggtctctccccatgacctctagcccaagagacggataagactgtttct

SEQ ID NO: 853302 - DNA, 385 bp, Homo sapiens
tgaatttggttcctgccctcaaggaactcatagtctakcaacgaagattaacaaataatcaattgtgattgtgtgtgtgtgtgtgcgcgcgttagagagagaggaaaagagaggctgtgtctgaaaatggtgtgcaccaagagttgagggaatgaattaaagggtgtggaaccttcagccacggaggtaggacaaacttcctagaaggagtaaagaggggacattcatgtgagtcttgaggaataactgaattttcaccaagtggatgagggtaatgagcatttctggcaaagaagggtgtgtgcagaggtactgaccaaagaacaacatgggagaggagaacaactcatctgtgctgagcagagggtcctgggtgacgcaggga

SEQ ID NO: 853303 - DNA, 637 bp, Homo sapiens
  misc_feature 1, 2, 3, 4, 5, 6, 7, 8, 9, 10, 11, 12, 13, 14, 15: n = A,T,C or G
nnnnnnnnnnnnnnnctaagggggatccagacatggtttaatattagaaaagttagtgtaatctaccatatccacaggctaaagaagaaaaattatatgatcatcttgatcagttcagaaaaagcattgactactcattggtggtaaataaaaaaatcagaaaagtaggaacagaagaaacttcttcaatatgattaaaagcatccacacaaaacctagagttaacatcatacttaataataaaagacaatgcattttccaaaagactggaaacaaagggaatattcactcttactcaacataacgctggaagtatttgccactacaataaggcaagaaaaggaaacaaggatacaggtaatttttaaaaaagaaataaaactgtctctatttaaagattacattattgtatacatcgaaaattctaaggactctataagaaactcctagaattaaaaagtgagtttatcaagggtgcaatatacatgataaacttatacaaattaaktgtatttccatatattagcaatgaacatggaaacaccacatttataagaacagtattatttataatgtccccaaaaattaaaaacttaggtgtagagctaaaaaaaaaaaaaaattacaagacttattt

SEQ ID NO: 853304 - DNA, 610 bp, Homo sapiens
acatgtatgaagtgtttcaaacagtgcctggcaaaaaacagaagtctaataaatgttagcttctactgtgattcctcagaattatggsggcaataaaataaatgcatttgcatcaaaatcacctggtgatgggggaagcttagtaaatgcagattcctgggcctccatctcagagtttctaatttagtaggtctaggtggagcttgggcttctgctattttaataagcacccgggttggaggtctttttaaaggggtggtggctggcgaaaagttgtgggtgatgaagttagaaagtgaaagtaatttctggagagtacctgagaccatctaattaaagcatttcagtgaataaatgggtcaaattggtttctgatttcatgtggacaaaaatgagggatggagtagaagttcgatcttgcagtttgtcatggtggtgataagtagaaacagtcaatactgtgctagttaatcattatgtcatattctcttctgataaccagcactgagcatttctagggagaattcagcttagatgctggtagtggggatatttagacacagcaatgagttaaaaataaggatgtgagctctctccctcttcctcttat

SEQ ID NO: 853305 - DNA, 547 bp, Homo sapiens
tctccattttcaatttgcatccttttatttcttcttttcctctgattgctctagcttgaacttttagtactatattaaatagaagtggcatgagcaggcacctttactttgtaccatatcttagagaaaaagcccatcacacttcctgatttcaaaatgtttacaaagctacagtaatcaaaacatcatagtattggcattaaatagacaaatagacaagtggaacagaatagacagtccagaaataaatccattcatctatggccaactggttttcaactaaggagccaagaagacaaaatgaggaaaagatagtctcttcaataatatgtggaaaaactggatatctacatgtggaagaatgaaataggatctgtatctcataccatatacaaaaatcagctcaacatggattaaaggcttaaatctaagacctgaaactgtaaaacttctggaagaaaacatagggaaaaccttcttccattgtacattggtctgagtaatgacttcttgggtatgacccyaaaaacatagaccagaaaagcaa

SEQ ID NO: 853306 - DNA, 518 bp, Homo sapiens
ctggccgagggactcattaaaggttaaaagtcacatcggaaaactcagttatagatttaaaaatatttaaatgactatatcttcttagaaagtttcttaagaatttgagaggttttatgtgctgccttaagtaccaataaaatctggaataaacaggtttcttcccaaacagctttttttgtttacaataaacatcagtatttgatctgagaatgttttggctaggtctcctttaagtacttttaaacaatattcagtggtatggatactgagacaaaacataacaaaatctaaaagaagagcagtaaactcaatattcttttccaagttattgcttcttgagtttcttcataaaacacaaattttcaacatcatcactgaagcccgctttacaaagggcaagtggatgggagtaaccaaayatgatctctaacttatttctgttccacctctgaatatttctgctgataatcttttttccttctagttttaaaatactgatagtaatctaataaaat

SEQ ID NO: 853307 - DNA, 638 bp, Homo sapiens; identical to SEQ ID NO: 847260

SEQ ID NO: 853308 - DNA, 658 bp, Homo sapiens
agattaaaatggcaacccacagaatgggaaaaatatttgcaagccatatatctgataaagggttaatatccaaaatatttaaggaactcaaaattcaatagcaaaataaataaataattaaataactgaattttaaaatggtcacaggacctgaatagacatttttccaaagaaggcatacaaatgggcaacaggtatataaaaagatgctcaacattactaatcatcagggaaaagcaagtaaaaaccacaatgaggggtctcctcacacccgttagaataattattaccaaaaagacagaagataagtgttggtgaggttgtagagaaaagggaatccttgtttattgttggttgtaatgtaaattggtacagccattatgggaaacagtagagagggtactaaaaaaaatttaaaaagaactagcttatgatctaacaatctcacttctgggtatgtatgcaaagaaaatgaaattagtatcttaaagtgatagccacactcccatggttattacagcattatttacaatagccacaatacrgaaacaatcttaatgtccctcaacggatgaatggataaagaaaatgtgagacatacacacacatacgaacattatttagccttaaaaaagaagaaaatcctgccatttgcaac

SEQ ID NO: 853309 - DNA, 576 bp, Homo sapiens
cactcccatggttattacagcattatttacaatagccacaatacagaaacaatcttaatgtccctcaacggatgaatggataaagaaaatgtgagacatacacacacatacgaacattatttagccttaaaaaagaagaaaatcctgccatttgcaacaatatggatgaacttggacgacattatgctaagtgaaataaactagacacagaaagacaaatattgaatgatctcacttatataggcatatggtgggtttagtttcagaccaacttaataaagcaaatatcataatacagtgagtcagacatatgttttggtttcccagtacatataaaagttatgttgacactatactgcggtctattaagtatacatacaaagtgaacagtgcctgacatatggcaagctcttagtaaaatttatattttgtggtaacaataaaatgtagtgaagtttcttttatgtattccctggctaaaaggattgatatgttaggagaagcaccagtttctgttgttgtttttttaaatcawgtgtggctatagataaaaaaaaaaaaagctaacaggaaatt

SEQ ID NO: 853310 - DNA, 562 bp, Homo sapiens
gtgaggtacctacaaaatttttttaatttaaaaatttaattaataaaatgtatgttttagaccagttttaggttcaccagtaaaactgagtagaaagtrtagagagttccacatagctccttccccctccacaagcacagcctactccatcaacatgccccaccagtatggtaaaattgctgaaccaacatttacacatcattattcaccaaatccaaagtttacgttagggttcactcctggtgttgtatattctatgggtttttataaatgtatgattatttgtatctaccattacagtatcatatagaatagtttcactgctttaaaaatcccctgtgctccatctattatccctccttctctcaagtctctgccaaacactgaccttttattgtctccatagttttgccttttccagaatgtcatatagttggattcatagaatagatagtctttttagactggcttcattcactttgtaatataaattcaagtttcacccatgcattttcatggcttgatagctcatttctttttattacagactaatattccattt

SEQ ID NO: 853311 - DNA, 512 bp, Homo sapiens
caagaattgggccaggtgaaaaagtagcatagacattgtcctctctttcttgaagctttgagtatgacagagagaacaagtcatttaactaacgtaaaaagaaataagaaaatattataagtgagttaaaactcatgtatcccggtttctaaagagggagctttgatgcgactggtaattggaatgatggtgactggtattaaatttttgttgttatgttttattgttcttattgtttgtgattttacaatatgctgagattggcctctcaattggaaataaatgttctacaaaggcccagtaacattagattacataagcaattgagaggaagcatggaaagggaaatagaaatgtaataaaagcagaatacaatggcacatgcaacatttcatgacaacacagcaagggtgtctttaaaaaaattatgtttccaggcaaggtggctcatgcctgtaatcccagcactttgggaggccsaggcgggcggatcacgaggtcaagagattgag

SEQ ID NO: 853312 - DNA, 452 bp, Homo sapiens
tgccatattaggtgtacctggcttttagtatagctgytggtattcgtctatgcaagcttccagcttgcttatttatgcttgcagcttggcttttcaggcaggtttctgttagaaaagaaatggtttgggggctgcttttaattaagaaaaaagacttaccgaggactcctgtacactcactatctgcctaaataatttatttttaactcctatattagtatcagcctgcatgccagcattcttgggagctatgtcaaaaagggcaatgagattctcacttttcatatgtagattttcatttttagtatgatatccctttcttccacttcctgatgtcctatgacctgagccattatggtgcagcttcttcagagagcaatccagtcttatactggggtgggaaaagggtagtcattatttggagtgaaagaggggatctggggattctattt

SEQ ID NO: 853313 - DNA, 602 bp, Homo sapiens
tcctttgcgttctatcttcaggactcagttttcttcctctgttctgagtctaaccttcaggtggcaggtctttatgcggaaaaaccctcccgctaatcctcaccagaggtactttacgggtagcattggtgttaagaaatgtgctgctacctgtgtacattgctcttggatcagggttgtagggctagggcatttggcatcctcagaggtttgcattacgtgggagtgagacattacttctctttctgtttttgttgttgtttgtgtttttgaggcggagtttcgctctggtcgcccaggctggagtgcaatggcacaatctcagctcactgcaacctcagcatcccggtttcaagcgattctccagccttgcctcctgagtagctgggattacaggcatgcgccaccacgcccacctaattttgtatttttagtagagacgagggtctcaccgtgttggccaggctggtctcgaattcctgacctcgggtgatctgcccacctcgrcctcccaaagtgctgggattacaggcgtgagccaccgtgcctggcatctcattcattctcagagctaaggacctatttcaatgtgattaagtgct

SEQ ID NO: 853314 - DNA, 558 bp, Homo sapiens; identical to SEQ ID NO: 827197

SEQ ID NO: 853315 - DNA, 616 bp, Homo sapiens; identical to SEQ ID NO: 845561

SEQ ID NO: 853316 - DNA, 510 bp, Homo sapiens
tacccagcctccccaaaatagagagtaaggctggatcctcaatgtggcactgaagcctgggtgatccagcccgagacgtggtggctgagaggttacaccaaactgcttccatcatggtgggtatagagccaccttcactggataaggtatgcattctgcatataaatttaccttccctgactgtgacatttttgccagtatgactgtccatgaactcacaaaatgcaccatctacagtcatgatatcctgctcagcattgcttcttcttcttcgtatttttttttttttttttgagacagagtttcactcttgttgcccaggacagagtgcagtggggtgatcttggctcactccagcctccgtctcccaggttcaarcgattctcctgcctcagcctcctgagtagttgggattacaggtgcccacctccacacccggctaattttgtatttttagtagacacggggtttcaccatgttggccaggctggtcatcagctcctgacctca

SEQ ID NO: 853317 - DNA, 507 bp, Homo sapiens
catagacttgagggattcttacacattaggacttatccttttgtgcttgctctctttcttctctttggttccaaccaaagccatcctaggctattctaggaccaccagacccccagtacatgaaagaactcacccaggatcctcgagttttccacccaccttgaagctagctgtaggtatgtgattgagctcagcagtgatcagaaagcactctaactgactttcaggctcctaaacaagactaaattcttagtgtttgggtcactgagctttgtggggttttcttatacagcaagggttaatttaaacacaaataaatagattagaaaagacaaaccttggggtctttagaggaaaagagtgattctttaatacatggtaactgggtaacgtttttgaaaataaattggcaagctaatcaagttagaaacgcayctcccatcttaagccatactgaatttgagatgaataaaaatattggaaatagaaagaatgttcattgtaagc

SEQ ID NO: 853318 - DNA, 594 bp, Homo sapiens
aactcgtgctacctgatatccttcttgtcacaatgagtgattgcccatctcttcaagagcatagtcatccttctagagaacacaaagatttgcccctgcaattgtctctttccttcatcattaatttcttcctgtagttctattttctttacaacctcccatctcctgttattcttcacataaattaccttcattcaaatgaaaccagcatggcagcccctcctttcttgaccacattgtatgagatatcatgggatcttcctcggattagccttttgctgattccaagtgctggggtagtttgaattctattttattggacgggggtaaagggtaaaaatgcatctggtttttcacttccagttattccatggcagtgatccttcctaaaacacacaaaggtaaacatactttgtcaatacaagaattaattctgtttctgctgctggagactgctggtttacgtgacggatgcacattctttctgygaatataacttccttgcaaaaatgatgtagttgaccctgctatgtaaatacacattctttcttggcctgatttttattataaaggcttatcatcttaattaacaaa

SEQ ID NO: 853319 - DNA, 611 bp, Homo sapiens
tcacgctcctatgagaatctaatgccagccgctgatcagacaggaggaggagctcaggaggtaatgctcacttaccagccactcacctcctgytgtgctgctggcttcccaacaagtcatgggctggtacccgtctgcagctcaggggttggggacccctgttctagaatatgattcaaattcttaaaacaatggtacgtttatataaagcaaataaacttgtggtaaaccatgctgtgttttcaatagcagttctttaggtattgagataattataagcactcagtacatgccaagcactatgttcagtactttatatacattgcattgtatttatgcttgcatcctgccttcatccctcttgtatgtctgaggaaactgaggctcaggacagattagtaacttgcctacagcaataaagtttttaaagggaggagccacaatacaagctaaagccagcttgacccaaaattcatgctcttcacatccatatctgcctataggtaattttgtatcgtaggggatctaagataagcaaatatagagcttttataattgggaaacaaatcagtaatataaatgttgtattaaacacatatatattcccaaaa

SEQ ID NO: 853320 - DNA, 617 bp, Homo sapiens
taatacaccaaacaaatgagaaacaaaccataagctgctatatactcatctgcatttctttctttcttaacaattagtgaaaccaggtgaaagaatagwttgaaattaagtacctgttgctgctttttcttgcgaattagcccattcgatattagacttcgggatattttggtggggctaagatgaaaagatccacctcgtgatggaattgaccttcagcaggggacagtgaggtgtctgcggttgttcctcttgtgaacaacgccttaaaggcgagaaacagcctactgtacagtgtgccagggaaagcatcacatcggtgggcgtcggtggcaacaccacttacacttcaccctgattttgtttcctccttgcacgtgctcctttgacagggcaggctcccaagcaggtgtgcagtcagggccacaagacacaggcaccccatcccatctcagagtctgacgtcccctcctcccctttgtctctaagcctcatgtaactgagcttatagccgaccatacagaactggcaaacttggtgagatacctttattttttatttcttaaacaagattttaaaatttcataagctctcacgtatcctaacgagaaggcagg

SEQ ID NO: 853321 - DNA, 639 bp, Homo sapiens
tgtgtggagctggctggcaggtgtgctgcagtgaactggacctgctcctggattccctggtctttgcctgcctttgaagagagaaaaaaggctgtaaaatgccaactggagggagtgactgttctgacacccctgatgggggcctctgcattgtctctgcgctgcccctcccatccccctgcaaacagccctcgaggctgattcttcgctctccctggaatgcagatgccacgtgaaaatgaatcaaaaagggcagcgcgggcagcgcttccaggcccagctcctcagcgcggtgtctctcctccgtgccagcgccaaagccttggcatcgtctctcttcctatatttctatgccaggaagaagcagcccaccacctgaacagcagaggaaaagagtacatcggctcaggcgctccagagtgccagcaagacagcttgcgccacacgggggggccagagggggacttggagatcatctggggatttcaggaaagaacattctctaggcgcttctgaggcattggaygaatatggccacagtggtgtgaggggccaggagccccatgccaggacacccacccacaccacatagccattgccctaggaacctggacttgcccgtttcaaagactgggaggc

SEQ ID NO: 853322 - DNA, 556 bp, Homo sapiens
aataattctgtttggaatgggttagaaccctcacgggatatctataacaggaagttttttcttgaaaacatttataatctctgcctcatctcctgaccttcaaagtttccttaacaccactcgagttcttcataatttattctaaccaggttaaacagattttacagatcatacagtccttctcactgagtatcagtgacagaacaaatataggattagataagcataactgagattttatcataaacaatgtaggttttctaagcattcattattttcatatttgtggagttgctaattcctctctccgccttgctgtttcccacttatttttcaacccctagagtaaataacacccattctgggaagccgttctgaacacttcccactctcattcctccctggaactcaccatctccgatgaggttggggcttcttattatattctctcattatgcactagmtttttacttcataccactatcaaaagagtaactaaattattactagtataatcccctgcttaatgtctatgtgaataaactataacttcctt

SEQ ID NO: 853323 - DNA, 584 bp, Homo sapiens
agttaatttgtatgttaattgaataaaagaggaaaagggcaggtcaggtttgtcaggtttaacattaggaaaaatctgtatgaggatattttctgagaaaaagcagataagcattcatataaatgacagctgggaaataatgacagtacttttttatgtgtttgatcccttgtttcattcattagtttaaaaaacaatcatttatcatcaatgtgtgctggacactaagattagtcttgggggggtataaggggtttatatgaccttgggatcagtttttacagttttaagtttctatatacatgctgtttttaaaattaaacttcttttcaaagcatagaaaagaacacatagaaaatgcacaaataataagtaacagcttgagaaattataaaattaacagtctcatgtaaactacctaccagatcaagaaatgaaacagttctctgcagaagcccctcttgtttcctgccagctactgctattccaagtgtaaacattatcaaatttctaacaaagttttttatcttctaacagcaagrtataatattgcacgttttgagctttatataaatgacatccta

SEQ ID NO: 853324 - DNA, 555 bp, Homo sapiens
taatagtgctaccatagacaatatattgtgtatattctttggtgaacatgtacacagtagtcctccttatctttaggggatatgttccaagaccccttartggatgcctgaaaccacagatgtactgaacttgcattctgtcagttagaacatgtttccatccatggcttctgcctgcaaatttaatgcctttctcaacttaactaagcacttaccatgcaccatgccataactttttatagtttgaagtgtgacagcaaaactagtatgaacttttttttcttctttacaatcccaggaatagaagattagttcttaccatagattatagcactctcagaaaccatgtttttttctttccaagtcaagaactttcaccttttcacttaaaggaagcactttactgatttgctttggcatatccaaatggccagcatcactattgtgctttggggccattgctaagtaaactaagggtaacttgaatgcaagctttataatactaccacagtcaatctgatagctgagatggctgcttagtgacaaataggcaag

SEQ ID NO: 853325 - DNA, 629 bp, Homo sapiens
gtcttacaatgtcacattatcaaaaacttktacttatatttgcagaatttgtacccaaatggcactgattcagcaactgggctgttggacttctaaatgaaggaagccacttctcttactgccaaggaaatgacagcttccatatccaacttgactattctattatattgttgctttcctactgtttgctgtgtaaattatgcagctagatatagctcaaatcactacaaattccaacagggagccaattcctttattgctgtggttggattttaagttcctttgtagtgagatgttgcagtaacagaaccatcacctggctccagatattcttggttattcagatgtttttgttacaatgggatttaatttaataggatttaacctggagggaccacaagagtggtggccccagcatccatgtaagcactggggaataacatcgattgcatagtacttgatgtctaatcctcttggttccactaagtaaatttgttgagaagttaacctttaatattcaaaaggaagactgtttacttcctagagccattttactagatttacaggaatgtaccaatttcttctgctttcagagcgtggaaaatttgacaaaaattaactcaagtttt

SEQ ID NO: 853326 - DNA, 608 bp, Homo sapiens
catagactgaaccttggctccaatggaactcttatgcccttgtgtcaatacagccattaaagttggcttatagaagwagtactcctgaagtgaagatgaagtgtgaagagactgggagggtaggcgccccaaatatatacagcacaggaaggaacattcttctatgcaaaattattgtttaatccttctcctcaacacactaggaagatatagtcaatgtgctggccaaaggaaccaggatcaagatttttgacccagatgactgaagctggaatatgtcatttagaaaaggttgctctgagaaaaaaattcccataaatataaagctgagctaaacataaggattatatagtgttaaacacagagaaagcaagataaaaaaataaggtcctggggacagaaacacaaattcaggcactgaaaataattaaaaatgaactagaacaagttgaacagaagagaggatgaccctggaaaatttctctaaacccttcctgagtatgtttagcttatcctttttgaatattgtgcataggttttgatataaagttagaatagaaaattatgaatggatacttttaagaaaagtccttttctttatctttttg

SEQ ID NO: 853327 - DNA, 624 bp, Homo sapiens
atcatgcagtatttgcccttctgtggttggcttayttcacttagcataatttccaggttcatccatgttgtcccttatgtcaggatttccttcatttttaaggctgaattagtattcattgtgtggatatgtatatgtgtgtatgttctttgctaaataatatttcagttttcatattttgactattgtgagtaatattgcaatgaacatgggagtgcagatgtctttgagacactgatttcatttcttttggatatatatccagcagtggggttactggatcctatgatagttatgtttttaaaatttttgatgaatctccatactatttttcatatttatatttccaattcatattctcaccaacagtgtaccagcaatcctttttctctaaaccatcaccgacgattgtaatctcttgattttttgcagaatagttattctaacagatgtgaggtgatagctcatggtggttttaactttcatttccctaacgattactgatgagcattttttaatatacttatgggtcatttgtacatcttctttggaaatgtgtctgttcaggtcctttgtgaaaaattattttttgtttgctattgagtagtttttaaaatatatttt

SEQ ID NO: 853328 - DNA, 624 bp, Homo sapiens
atcatgcagtatttgcccttctgtggttggcttatttcacttagcataatttccaggttcatccatgttgtcccttatgtcaggatttccttcatttttaaggctgaattagtattcattgtgtggatatgtatatgtgtgtatgttctttgctaaataatatttcagttttcatattttgactattgtgagtaatattgcaatgaacatgggagtgcagatgtctttgagacactgatttcatttcttttggatatatatccagcagtggggttactggatcctatgatagttatgtttttaaaatttttgatgaatctccatactatttttcatatttatatttccaattcatattctcaccaacagtgtaccagcaatcctttttctctaaaccatcaccgacgattgtaatctcttgattttttgcagaatagttattctaacagatgtgaggtgatagctcatggtggttttaactttcatttccctaaygattactgatgagcattttttaatatacttatgggtcatttgtacatcttctttggaaatgtgtctgttcaggtcctttgtgaaaaattattttttgtttgctattgagtagtttttaaaatatatttt

SEQ ID NO: 853329 - DNA, 643 bp, Homo sapiens
tgtctagaagagactctctttggaaagatccaaggaagagggaaacctttgagaactttgaatcagcagcytctatttctgattttaataccttatttgacgaaggcctagagacactttgtcacacaggcagttagtggaagaggtgggagggaactgaggtctttggtttattccatgcaggtgaagataaacctctttggatagccttccctgtttctcccacatcaagtggaagacccatgggaaaaaggcaggattctgtcttgttcacagccacattcacaacaccctaaattcacatatcgggtactcaggaatgattggatgactcaatactatattttccaggttcctttctttttggtatattcttactctcactatgttcttctaaactgggttttgttgtgagggcatacttgtgaggagcaaaggactatgaaaattaaagcctttgcaagtgaatatctttgtatgctattactgcatcaggacagaattcaaggagcagaatatgggagtgttgatctgaacctgaataaacctggagaatcatactatggaggataagaagggacaagaaaaagagaacactagggcaggaagatgtcttggcgggacaggggagtcaaggcatttt

SEQ ID NO: 853330 - DNA, 656 bp, Homo sapiens
gataaattagtacaactatggagaagagtctggaggttcctcaacaaattaaaaatagagctgccatacaacccagcacttccactgctggatatgtaggcaaaacaaagaaaatcagtatatcgaagagatatctgcactcccctgtttgtttaagcccttttcatagtagccaagatttggaagcaacctaagtgtccatcaacagataaataaataaggaaaatttggtacatatacacaaaggagtactattcagccctgagaaaatgtgatcctattattgacaacaacatggatggaacttgaggacattatgtaaagtaaaataaatcagaatcagaaagacaaacttcacaatttctcacttgtatgtgggagctaaacatgaaaacaattgcactcatggagatagagagcagaaggatggttactagaggctgggaaggagagtggggatcaagagggaagtaaggatcagtaatgggtaccagaaactatttatgaagaacgaataaaaggtagtgtttcataatacaacagggtgactatagtcaataacaatttaattgtatgtttaaaaacaaccaaaagtgtataaytgaattgcttataacacaaataacaaatacttgaggagaataataccctatttt

SEQ ID NO: 853331 - DNA, 638 bp, Homo sapiens
accctggagggcttcatttgtttgttattttgtcttcttttatctgcctgtctgtgtatctacctatttggtcttcgcaacaatcttatcttcaatgtagaaatgatgtaatacagttaaacatgcgtgcaatttagaaacatggatttaaataattgaaggagtcttatgaaacttattcccacacctttagtttgttttccaacactcttcatcatattactgactacatgacctcaggataagagtaaataacatgcattttgtattgtggagcttcacaatacaacgaaatcatagagaaaatgacatcttgaagtttttcctcatcaaaaagtgagacagaatttgctttgatagattgtagttgctgggctagcccatttttattaactgtatcaagtaggcatcaaaattgctgaccttcaggagattcttccattttaaaaatttgatttctaaataattggaagttttagagaatattcttctatactttatcaataacagtattgycacaaaacaaaaggtaaatctagttatgaaaaacgcaaaatgcctgtcttatatcaatggagtagagtaagtaaaatatgggaacatgaatattatcaaagataccaaaacccaatcacttg

SEQ ID NO: 853332 - DNA, 638 bp, Homo sapiens
accctggagggcttcatttgtttgttattttgtcttcttttatctgcctgtctgtgtatctacctatttggtcttcgcaacaatcttatcttcaatgtagaaatgatgtaatacagttaaacatgcgtgcaatttagaaacatggatttaaataattgaaggagtcttatgaaacttattcccacacctttagtttgttttccaacactcttcatcatattactgactacatgacctcaggataagagtaaataacatgcattttgtattgtggagcttcacaatacaacgaaatcatagagaaaatgacatcttgaagtttttcctcatcaaaaagtgagacagaatttgctttgatagattgtagttgctgggctagcccatttttattaactgtatcaagtaggcatcaaaattgctgaccttcaggagattcttccattttaaaaatttgatttctaaataattggaagttttagagaatattcttctatactttatcaataacagtattgtcacaaaacaaaaggtaaatctagttatgaaaaacgcaaaatgcctgtcttatwtcaatggagtagagtaagtaaaatatgggaacatgaatattatcaaagataccaaaacccaatcacttg

SEQ ID NO: 853333 - DNA, 638 bp, Homo sapiens
accctggagggcttcatttgtttgttattttgtcttcttttatctgcctgtctgtgtatctacctatttggtcttcgcaacaatcttatcttcaatgtagaaatgatgtaatacagttaaacatgcgtgcaatttagaaacatggatttaaataattgaaggagtcttatgaaacttattcccacacctttagtttgttttccaacactcttcatcatattactgactacatgacctcaggataagagtaaataacatgcattttgtattgtggagcttcacaatacaacgaaatcatagagaaaatgacatcttgaagtttttcctcatcaaaaagtgagacagaatttgctttgatagattgtagttgctgggctagcccatttttattaactgtatcaagtaggcatcaaaattgctgaccttcaggagattcttccattttaaaaatttgatttctaaataattggaagttttagagaatattcttctatactttatcaataacagtattgtcacaaaacaaaaggtaaatctagttatgaaaaacgcaaaatgcctgtcttatatcaatggagtagagtaagtaaaatatgrgaacatgaatattatcaaagataccaaaacccaatcacttg

SEQ ID NO: 853334 - DNA, 504 bp, Homo sapiens
gtgatttctgttaacaaaacttctatttgaataatcttataggaagaatgttgggcagactatatccattgaaaaaaaaaaagattccctgctatagatgtatttccctagtgttgggagaatggrcagaatctgcttcaaaggaaatactagtccctgaatctaattgactggggaaaagaatgcactgatgtgggtctacactcacccatggttaacccaatagatagtgtgaaatgtttgtagaattgaattatatccttccaagtgccctaagctattcttctttctcatttcctctaaacaaaagagaaaaggatctttcatcacacccttccctcagtgggaaataattaaaagtcatttacaacagtctcattttattatgacaaacatttgcatcgtgtctagtatatagcagacagggataggttctaaggattaaaagatggttatgattggcacctgccctcaagaaattcaacaaatatttaatgaatgtgt

SEQ ID NO: 853335 - DNA, 652 bp, Homo sapiens
atattagactgtgaagttagactctgggtaaacttttttgatgaagggaatttaacataccagaaagaacaactttcaaatctcaaggtcaaacatggggctatgaacttatggmcactggggtgatcaaatggctgaaattcattgcagtataattcaggtagtaaaacctgggaaaaggtgggaaaagatgtcatagggaaagtgcccaaatgttggaataaccccaaaagctaaaagaagagcctcagacacattagatagtaaagaagtacctacaggaaagcaagactattacttatcagtcataccacatgtaagacctacaacttgaatgctcttatgacactgagtgctaaacaactccttgcaggagaagtgctgtgtctaggtttcagttctatagttctgtctattcatttgatcagcagataatgagaatcttcaaatgctgcgcaccatccaaaggccagagttatagagatgaaagatactcaagggctttggagctgaaatgggaacaaggaaaggaaaaaaaaaatagatggtgtatttgagcagggatctgtggagtgctaaggactggaagatagtatagaaacaataatacacatacatgctggcactgttatgaaccctttgtatggattaa

SEQ ID NO: 853336 - DNA, 632 bp, Homo sapiens
ccacataattttataatgtagcagcaggtactctgtggtttctagcctataatgtaacrgttattggtttgatatgttacatttatttaattttgaatctgtggtgtttttttaaagcaatttaacaatgaaaatctcgtcaatgcagcagggatgagatcaaactgactgatgggtaaatcaccagcctaaagggacacgccaggtattagacagtctggcatgtgtagctggagaagtactcaaaaatgtataaaagtcaatgagcacatatacggagaattacacagaaaataataagcagcactagaaagagatgatgtgtgttttttgtactgtccctgtcacatagcatcaaacatccacattcctgctttctgagatgagagggttggacaagtaccctcaagaagctttctggtatacggtacacagtatcttattgttttataaatagaaaaaagagaatacagaggaaaaaattaaaatacatcacctagagttcagaggcattggaggaatttggctttcatcagcaattttgcattaaaagcaagtatctgtcggccaggcgtggtggctcacgcctgtaatcccaacactttgagaggccatggtgggcggatcatgag

SEQ ID NO: 853337 - DNA, 505 bp, Homo sapiens
gcctccttaagttctctggacccgtttcctcatcagcaaacagggagaatgatagcaacttcacaaggttattgtaaggctcaaatgagataaagtatttaaagcaaaaaaaaaaaagtgytcttaaaatcaatttcaagaaaattaagtcacaaagtaatgtctgttgtgggattccttttttgtcaagataacagatcttatctcacttaccattgcctgaacaaaccaggacattgtccatctgggatggtttttgtccaaacaggaggcgatagttattaattaaggaagcgagactgggtttggactgtggcatacgacgagaggatttggctagttcttagtaaaaggagaccatagcaggcatgcagcattatgtacagatgccctaagagactgagaaacaaggaaaatggggttggaggcattttgaggggaggagcaagtgtgagcatgagcccaaccctgagatccttcaagagcccagttctagttgcaggcc

SEQ ID NO: 853338 - DNA, 612 bp, Homo sapiens
actataatatcaaaaagcagtaccatttagtattagtctgaaagcaactagtgaacrcattaatataaccaacaaacaacctttcacgaaatacttagagattagggccataaactacaagctagtgttcttttcactttgaaatgaaagatcagaggttccatataggccttaattagactcatagtctagaatttttctttctttctctaattaagaggatcacgcaaaaacactgaagtagtagtgccaagatgattccagccaggtagcccagtgcaacacacacaaaaatagttcacagagataatgttacccaattatgaattcagagagactcaatgtacaacatatttcttaagacacagctacaagacagagagtagggcatcatccataaaaggttgggcaaaagatgagggcctcaaagccaggccaaactgggtggtttttcacctagaataatataaggtagtctgcctagaggaacaatctctatcactgttgaggaagaaagccaaggtatataaatgaagaagaggttctaagtgtcaggtccaacgtaaatggtgaggtcataaaaagcaaaaggaatttctaggccagacatga

SEQ ID NO: 853339 - DNA, 612 bp, Homo sapiens
actataatatcaaaaagcagtaccatttagtattagtctgaaagcaactagtgaacgcattaatataaccaacaaacaacctttcacgaaatacttagagattagggccataaactacaagctagtgttcttttcactttgaaatgaaagatcagaggttccatataggccttaattagactcatagtctagaatttttctttctttctctaattaagaggatcacgcaaaaacactgaagtagtagtgccaagatgattccagccaggtagcccagtgcaacacacacaaaaatagttcacagagataatgttacccaattatgaattcagagagactcaatgtacaacatatttcttaagacacagctacaagacagagagtagggcatcatccataaaaggttgggcaaaagatgagggcctcaaagccaggccaaactgggtggtttttcacctagaataatataaggtagtctgcctagaggaacaatctckatcactgttgaggaagaaagccaaggtatataaatgaagaagaggttctaagtgtcaggtccaacgtaaatggtgaggtcataaaaagcaaaaggaatttctaggccagacatga

SEQ ID NO: 853340 - DNA, 595 bp, Homo sapiens
aaaacatcctagatgttaagatgtgtagcctaggacagtggttttcacacagtgctctaaggaacctttagagccagacacacagaggaggtatcaataggaggggtctgatgccccttygacacatgttactataattaacatgtattttgagactgagaatgtaggctccatgaaagccgggattcctgtttcctcacagccatcacctcgtccttttaacagggcccagaatacagtaagctgccggataaaagttttttgactgaataaactgcacggttattacagctgggaactgatttcgctgatttccacggtaaccctgtgaggcacgtatagtagttatcctcactttgcagatgggcaaactgaggctcagagcagcctggcttccaagaccctccttctaaacatcataccacatgacacagcctcccacgtgagccagcagctgtatttcatctgttttacatgtgaggtttcccaccatttgactggagaaaggtcgatgttaggggagaaaaaaccatttaaaaaccaccaacttcatggtgaaatccaaaggctgcaagtaatcaatctcactccttgc

SEQ ID NO: 853341 - DNA, 584 bp, Homo sapiens
taagtataagcagatgaaaattctaagaaagcaaaagtaatgctagagatcaaaatcattttaacagacttgaataatccttttgaccaacttattaggagactgaacacaactgaggaaaaatctcagcttgaggatacgacaacagaaacttctgaaatgaaaaagcaaagagaacaaagattgtaaaaaaaaaaaaagaatatccaagaactgtaggacaactatgaaagatgtaacatacatataatgggaatattagaaagagaataaagagggaaaggaacagaagaaataatattcaaaacaataatgactgagaaattccccaaattaatgtcaaacaccaaaccacagatccatgaagcttagagaacactaagcaggatgccaggaaaactacctctgggcatatcatatttacaactaagaaaatcaaagataaagaaaaaaaatatttaaaaaaataccccagagggaagaagaacatacttcagyggaggtaaaagaaaaacttttgttttcttattcttaattgatcaacacacaatatctttttcaaaataatagcaacaatgtactca

SEQ ID NO: 853342 - DNA, 626 bp, Homo sapiens
gatgatattaaaaatagggtttttcacaaggtaagcaacagggaaattacatttcctagattcaggtcccctgcacaatttccaagtggtgtagcatcaacatcaggcaagccgtttgattttatgacaatgtgtttacaaatatattaagggtggaattttcagcaccctgaatgggatttgagattcagttcttgcttatcatacccatggatgcttatctatagttgtgtctcttggcaagatgataaaaatgagtccagtgtttatttttgttcctctttggtttaaactatccccccaccaaaaaagcaaacaaacaaacaaacaaaaaaaaccatttagattatattttaagtgacaaaaggacacattaattaaaggttatggagtgaatgttccagcaaaagatgtcactcatacagcaaagcttcagtaaggagtcatttcttgaatactgagaagtcccaaataaaatacaaatgtaaacttgcagtagcttatcaaaactaacatacatctcatgaactattcaacagttctccgttacatagtmtgaaattaaaattcgtatgttttactctaaggtctagtccccgttgtctcatatttttgatggataaaca

SEQ ID NO: 853343 - DNA, 418 bp, Homo sapiens; identical to SEQ ID NO: 848635

SEQ ID NO: 853344 - DNA, 487 bp, Homo sapiens
gaagtttcatacaacacttctctttagcacacattttaaaaaaaaattgggagtctcaaggaagaagggagaatgggtatttcagactagctggcattttycatcacctggaggtgtctcatcagatgttgatttacaaagatttccctggcagaggatggaggatttgttggaaagggtatgaaaccagcagaaacgaacacgccacagtttgtgcgtttaatgtttcccatcgctgacattcttgagtaagcgtcagtgatggttctagcttgaggcatttggatcattggggtgcaggtgcaccatattgcacataatacctgcacatgcaacttcctgatgggatttaatggaggcttctagggtgtctctaagggtcttcggtgcatttgaggtgaggaatggagttgagttctgtcttccgtgatttcagtatttggtgcactttctgcttggaaaaatctcacctgctttaaaaatattt

SEQ ID NO: 853345 - DNA, 594 bp, Homo sapiens
aaattctggcatgacccttctgtggtcagatccctctgagaacaactcaggagattaactcacagtgaccttcagtgcctctgagcctgtcagtctccactcccccatccaagactggacttgatgaygcaaatgccaactccagttgccgggtacggctgcctggaacagagaactgacattgattcagaggagcctcggcttcatgagaaagatgcttgtttgattagtaatgtctgccatggtcttgagatgcagggagtgatgctacacacaccatgtgcttgctgtccctaatagagtcccccaagggccttttagctctgacatcgtggcctctgttgtgccctgtctgtataatggaggtgataattgatattccctatttgtaaacctgggggttagaccaggagaatcaaggtcttcctctgtgctcctgcagcattttgtccatgccactgtaagccagtacgtgcgcatgctagcctggggtactctgaaggctggcatctgatttatctctgggtccctggcagccagcacagacatacgcacagagtgagctctagtgaatgttgatgaatggatggatag

SEQ ID NO: 853346 - DNA, 563 bp, Homo sapiens
tggggtggagaactctccttttttcccttgaaaaagcatgattttttatattgcaattaaacagycctttgggctgattttgcttctctactgctgacatcgaaaaatgccaaacaaagatagcggctcgctctccttgagatgcacctccagagatggggaagcagctgctgtgtctcttgggaaaatggggtgagagatgccagctctggggtcaagggctgccgacaccctcttgggaaatgtggcttcccaggctgtatgcacatgacctccaggcatttgggggaccccagcccagcttttcccatgaaggatcaccagcccatgccacaagttagctcttctaccctggagcccatgaatgaccctatttgctaaggaccccaaagactgtgtatctgagattccccactgggagcctaaggttttgagggctggacctggcaaatggtcctgattaggggtcacttcagtcctgtgggggcacttgaggctattgagtgcccaatatctgagtccccttccatctgcggaggcatttcaaaagagttgagatgcag

SEQ ID NO: 853347 - DNA, 549 bp, Homo sapiens
ttggacatgtaacttaacatctctgggtctggatttcctcatatgtcaaatgagtacatagcaggccccctgccatgaggtttcttgggtaaaaacacctggcagagactggcacagaggaagcacctagtgagtgttagaacgagaaaaagagaaaactaggatatacgtttctttttttggatgctgagcttcttgtggggggaaaaccactggtgttcacattaggaaattccccaggtgctgtggttcatattggtacttactttaagatgattatggactatgatttaccaataggtggtattcgcatctatcattgacgatgacctctcagtgcaggaaacagggagggcctctccagagccctgggctgagaggcaggagagctgttcttatccctgccatgctgtatttccctcagccagcccctttccctttctgggcctcaatctacccatctgaaggtggactctgattcctcaggtttcttctagttctgcacgtacagaggcattcttctaagyaaagtgtgaagaaaactcatct

SEQ ID NO: 853348 - DNA, 648 bp, Homo sapiens
atcgcagcctgttttatcagtaaggtctttgtgacctgtatcttgtgccgaccacctatctcattctgtgactaagaatgcctaaccttctgggaatgcagcccagcaggtctcagcctcattttacccagctgccatttaagatggagtcgctctggttccagtgcctctgacttacccactctgaatcatgctgaacttccatgaaatgtgggtctgccagaattctttactcataaggcactgcaaaaactatatataaatgggaggcaatggatgatggacatgcatattatgagtatcttctcttcccatgtgcattctccattgtcccaacagacttcatttacaaaacacgagttcaaagataagaatttctttcaaaggtaagaatttcaagatggcaacatcacaatattaaaccaagtgcagggcccttctgagtgccaggccccatgcaactgcttaggcagcacgtccaggaagctggccctgcatgggaaattgcgctcttgtgaagggcttcaggttcctttcatttcccytggagagtcaaagaagcatcggagataaaagaaaaagttagagttttctggctatgttgtcatattcttctgaaatgatcctaactcttcagggtagaaacag

SEQ ID NO: 853349 - DNA, 648 bp, Homo sapiens
atcgcagcctgttttatcagtaaggtctttgtgacctgtatcttgtgccgaccacctatctcattctgtgactaagaatgcctaaccttctgggaatgcagcccagcaggtctcagcctcattttacccagctgccatttaagatggagtcgctctggttccagtgcctctgacttacccactctgaatcatgctgaacttccatgaaatgtgggtctgccagaattctttactcataaggcactgcaaaaactatatataaatgggaggcaatggatgatggacatgcatattatgagtatcttctcttcccatgtgcattctccattgtcccaacagacttcatttacaaaacacgagttcaaagataagaatttctttcaaaggtaagaatttcaagatggcaacatcacaatattaaaccaagtgcagggcccttctgagtgccaggccccatgcaactgcttaggcagcacgtccaggaagctggccctgcatgggaaattgcgctcttgtgaagggcttcaggttcctttcatttcccctggagagtcaaagaagcatyggagataaaagaaaaagttagagttttctggctatgttgtcatattcttctgaaatgatcctaactcttcagggtagaaacag

SEQ ID NO: 853350 - DNA, 568 bp, Homo sapiens
aatatggtttggatctgtgtccccacccaaatctcatgttgaattgtcatccccaatgttggagaaggggcctagtrgaaggtgactggatcatgggggcagactctccccttgccgttcttgtgattgcgagtgagttctcacaagatttggttgtttaaaagtgtgtatcagctgggctcagtggctcatgcctgtaatcccagcagtttgggaggccaaggcaagcagatcacttgaggtcaggagtttgagacgagcatggccaacatggtgaaaccctgtctctactaaaaatacaaaaattagctgggcatggtgatgcatgcctgtaatcccagctactcggaaggctgaggcaggagaatcacttgaatctggaggcagaggttgcagtgagctgagatcgtgccactgctctccatcctgggtgacagagtgagactttgtctccaaaaaaataaaacataaaagtgtgtagcgcctccttgttcactatcttccttctgctccggccacataagaggtgccttgcttccccttcaccttccaccatgattgcaagttt

SEQ ID NO: 853351 - DNA, 626 bp, Homo sapiens
ggttatgtttttcactcctcccttctactgattgtatacagatgaaagagttgccaatgggataccagaagaaagacgaaacttcagtatctgccattcctgcaagtcctaccctgtgagctccgatgatgaaaactgctttagagcaatcattgaaatgtgacattatttgtaaatatctgtttacacacccatcttacccaatgcattatgagctctgaaggcacagactgtgtcatatcccctttcgtgttcctagtacatagcacaaggtcttgcacatagtacttgctcaataaattattgcaaaattagtgactaagtgcagttatcagtctggccacacattcaatgcttattcttccctaatagaatagactacttagaggaaatggcctttgagctgagctttaatgcaaagaaagacagcacatgatagcaggatgaaggaggttgtttttatgcacatggaacaagccagacaaaggcttggaagcgggagactaaaattactaggttgcccatcaggaaattaaacattctatccattcattagagaaagaataaatgacaggcctwgtgcattaccagactgttaaaaagcaagagccagacttgttcttatg

SEQ ID NO: 853352 - DNA, 558 bp, Homo sapiens
taacctactctaatgtgcttggacattctttcgagatttctcccttctcagccttgccccatccgttcttccatatcttttggatgattcccatctgcataaaagcatgctgttatttctctcatcttaaaaaaaaataagcaaaaaacaaagaccttttcttgacctgtatcttccagccataccctgtctctgctcctctttagaaaaatactcctcaaaagaatgtttaaataggtgctctccattacactccttttactttctgacactcactccagtccagcttctgcccccttcattccagcaaatctgctcgtgtcaaagccttcaaagtgggcttccacttcagttcactccaacaatcacttctctgtgctcaccttacttgtcctctcagaaatgtctgacatgattgatcgtgccccctaaacactgatggcatttgacttccagggcatcactgtctcctgattttcctctgtcwccctggctgctctttcactgttagcattgctgcctcttccccatctccccaatccccaaacatggcagtgc

SEQ ID NO: 853353 - DNA, 609 bp, Homo sapiens
gagctaataggattttctttctgtgatttgaaccaagacacagaaactgaggtcagcagatgttgggaactggaggtcatgtttagtccgtgccatagtttgggccatgaaaattcaaatcattttaatggagcagcaggaaccaagaagctttcagagaaggatgatgctaatgcatggcatagataacagattatgtggagggagggaataagtaggagggagggagcaagagagaaagaacgaagtttagaagcttccagatgccaacaaggccagcttggattcagagagtattaagctcccatctctgaccctcaagagaggaactcccacactctccttagtccctagaagctacagcctaaatgtcttgaatttatccaggaccacatttcccttggaatgccttccttttttttcatcagtttctaccctcccacaaaagttaataaatctgagtttacttcttacaaggtgctggacctacagatattaacaagacattttcagattgtaactcgatgtttacactacatattttcttcttayagcaacactatatttattgtcaagcttctctaccctctattacaagcctagtctgag

SEQ ID NO: 853354 - DNA, 663 bp, Homo sapiens
gagggaagctgataccttaatttcagatttctgggttccaggactatgagacaatgaatttctaagcttttaagcaaccgagtttatgttagtttgtkatggcagccccagaaaactaatacaatcaatcacataggtgagacattctctagagtctgtatattaaatgagatttgttatatcacaggatagagttatctttaacttcagttaatgatgccaatttgctctccaacatgattttacctatttacagtctcatgagcagaaaatgagagctggtattatcagactttttttttttttttggcaatttaatgagtgtaaaatggctttgtgttattttaatgttcctagcggagttgaaatggtctgggcaacttggactacctgatttgtaagatgcctgccaattcaaaatatctatttccatgatttttaattcttcaatttagcatacctttcttgaatgcctactttgtttcaggcattgtactcggcactaagaatactactatggtctgaatgtttatgtctccccaaaatttattttgaaacctaatcccaatgtaatagtattaagagttagggccgttggggaggcaactatttcatgaggatggaaccttcatgaatggaattagtgccacataatgagaccca

SEQ ID NO: 853355 - DNA, 611 bp, Homo sapiens
caatccccccacctcggtcccccaagtagctgggacyacaggcgtgcaccgccatgcccaaataatttctgtattttcagtagagatgggatttcgccacattggccaggctggtctcgaactcctggcctcaaatgatccgcctgcctcggcctcccaaactgctgagattacaggtgtgagccattgcactcagcctaggatcaacaaactatatttcttatcagccttttctcactcatattcttgaattcttgaatacaatgaaagttggacaagagttcttcctcctgcctcccagttcgatttggcctatttatctctcttactgccacagcaaataaggccatggaaatgaaataactttcggtgtacgtggagaggagatgccaataagagacaatcttttcttttaatgatctcaaaaattaagagtttaatgaattggaatttgagcttaatctcagtaaaatgtcagttccttgagggagggaattttttttgtcttcttgtcttcttgctacatcttcagcacccagaaaagtgctcagtgcatagcaggcattcaacaaatatttactgaatgaatgaataaatgaaagagtaaatga

SEQ ID NO: 853356 - DNA, 596 bp, Homo sapiens
ataaaaaccttttgtcttaactcgtggcttctaatcgtctgtgcggaggcattgctaacctgcatttattgagcatttggtaagtgccaaagaattgtaggagaaaggaattctcagcctaaatctggcttccttcaacattgggatttctaggatagtcatcttcctgaaacgaatgtatggtcaaggggtaggaccagtattgtcaaaatttgggcaatatctggcatgggaggcctaataaaataaccttttccagattacaattttaaagctatgcaaataggatagatgtgacaattttcaagtgttcaatagccatttatggctagtggccacctcatataaaacatcattgcagaaagttctattggatggggctgatctagagataacaaatacatacctattaccaaactaacccttgaagcttttatcagttgtctgccactgatagtaaaacattttgagcrtgtccccttggtacacgtgaagtttattgaaaaactattgcctctattactctcggttcctgattcaagtttccttcacctttagtgtgaggtttagtttcttttcgagactgagtctctgtc

SEQ ID NO: 853357 - DNA, 341 bp, Homo sapiens
atttatcagacgtgaagtaggttgaaggagaaaaaataataattgccaatcaggaggcactttacatacataattttataatgtaagtcagagcattttcctcctgactgccaatggcttttctcatcatgcagagtaaaggcacagacctgaaggtggcctcaaaggccatgcggagtctgcaacggcttgcctccctcacctcatctctcattacttgctccccctgcttgctcctctccaaacacactggtctctgctgattctcgaatgttctggtacacacctggctcagggccttcctacttgyttttccctcagccaaacattctttgtattag

SEQ ID NO: 853358 - DNA, 510 bp, Homo sapiens
tgtgtgtattgtgtgcacaatttatggacaactttaacgaaatctcttgccttactgagcaaagaaggcagaaaacaatttaaacttttttgatgagagagggttatgaacacacacaccagttaaacgtgttgcgccttagtgtagagatgtcttagaattatttcagtggtagagggcatagcttatcttcttccttaatttcccccaaactcatttgtatatccagtaactcttggttattctttcagtgtttcccttactcttttcagatgtcgtttcatgatgcattggcttctaggagcctaccactctccaaacttaactactttacatctgttgtagatgatagcttagaagaaatcaaatattgttggagcaaatcagatttcaaatccttattayatgatttttaagtcaatcctcctgaaggtagcccaatgtctctcccataaagttcatgaattttataactctttttgtgtatgttttctgctatgtctaggttaa

SEQ ID NO: 853359 - DNA, 610 bp, Homo sapiens
gtgatttcagctccatcagcataattttcctccacatggtacaggtaaatcatggttaaatattgartcatttatcaaccagtgcttcgtaagccagatctcataaaatctcaggaatagattgtgctaacaaagcagctagcaaccaactatgattatcaaaattttccttccacaatctgttcctcatttagagagaaagtgctaaggaaattaaaaattagtaagctttacccctttattggtaacaatatacaaagtactatgattttctttagaataatagtcttatctggagactttataataaaggaggaaatttggaatctctggctcttctggaagatggattatagttctctgtgaaaatgtatttcagaaagtctatacccatcttgagttccctcagtgcttaggcttaaatccacagggctagcacattgcataaaaaaaactttatgattagatgaaggggttcagttacaaccagggaagtcaacgtttacgtattctaggaagggaaaatagtgcctgggtaaagatgtttcatctgcaatcaaaccttatttacttctaaaatggtattaccaattgctttgctaggaaatga

SEQ ID NO: 853360 - DNA, 574 bp, Homo sapiens
actccctctgcctcccagttgtagtttcccagggaaaccaaacataaatcgaatagaaaggaaatgcaaggaacattcaatttcttttacacttgacacctgattccttccagattcagtgtcagtgttatttccacggctcaattgacttgtttgagcataagaatgtgtatgcatgtgtgtgtgtgctgcccacataaacctaatcattctacccagtattaggtgattttttgatatggtaacatgcttcatctctctgtagcatccccttcctttcagttcttgaaaaaatgatggtgctgtttgccacaggcacatgctctgtgaaaagacagaggaaattctaatgagttagaagaagagagccaaactgtctagttaaagttgccttaatccctctgtgctcattaccacctgtttctgcctattgtcaccaacccttctgcagccatccctgccctactccctgtctgaccacctatgccaagggaggattttgaaatgccaagaggcagagacaagygcattgccctatcctctttctttgtccacaagaagctggtgcagcagg

SEQ ID NO: 853361 - DNA, 578 bp, Homo sapiens
tgtccagatgtttcaatccaggtggaagttcttcagtagaagaatatgaatgctaggacgtttcattgtgctttccctttttcagccttcccattgtcactcttaaccccatccatcatgagcccccaaaaaaggaatcaaggaaggccgtttatgcctcttaaacagactgaagccttcagtctgcacctgtgtctacaggccaggttatttcattcctccactgacagagcacccagctgaatttagacccaaaacatatatctcagcctgcagagtaatgcccctcagctgctgtatctaagccattttatttcagggcatttttagcaaccttgcctaaaccgatgttgtcaactaaataacccctatggacactaatggaaccttcaaaatgaattgtcctgttatgaaacttatcattcttttgttattgcctaaacaacctggagtttgatttttttcccccttgggtctggttgcaaaaaatagcagaaagcaccttagttatgttcaaacycttgccttgatatgattttacatagccctttcagagaaaaaaaccatcagccatgaca

SEQ ID NO: 853362 - DNA, 620 bp, Homo sapiens
tatgcagcgctgtggcctgcagggacacagaggcagaaaacgtgcagatgccctgggcgagcggcgactccaggcagaaaygccagcaggctttattgcagctgtgcataagaaggagaagagagggttttgtttaacttcagttttcaagcaaaatttagataaaattaaagaagtcaggacttaacagaatttaaaagaaagctgttgacaatgccaagtgctgatgaggactctggtggctggaacactcacccgtcgccggtagacgtggagagcaatacggccgctcgggaacccagctcgacagtttactataaagttagacctgaaccttcttataacacagaaattccactcctagagaaaggcaaaattatgttcacacaaaatcttgtacacaaatgtttcttacagcgctattctttttttttttttttttgagaccgggtgttgctctgtcacccaggctagagtgcagtggtgcaatctcagctcactgcagcctcttactcccgggttcaagcgaattttcacaatcatcaacaaaattggaaaccacccaaatgtcctctaggaagtgaaaggataaatagtcgtacagccacacgatagactca

SEQ ID NO: 853363 - DNA, 496 bp, Homo sapiens
catcgtctgtctagagtagactattgtagatcctctaaccatccgcccttcctctcagtcctaatcccggtctatctttcatgtaactgtcaattaccatcctaaaatggcaatctgttttgtatttcctttctaaaagtcttctatttaagagaagcagggaaaatggctgggacatcagggttccttggcaccaattaaccaatgtgctatgtcatgaaaaaaggcttggatcagcagagggatggaagtggcaaatgttcactggttgctgtatggtttacatactaatgtaaatattctttaggaggccagtgacagtgtcatcccagtttctctccctacttcctgctgaagtcacctaattctccaggtgtatgtgtcccatgttcaccagtatccagacattccatattcctctgtttctttgtcttcacgtawactgtttcctctatctggagtccttcctatccacatctaccttatgagtgccttc

SEQ ID NO: 853364 - DNA, 607 bp, Homo sapiens
gcctaacttcagtaatagatctggctgaaggcggcctgatttctttacctttaaacaaattaraatagtaataaagaaaggcagagtagtttacctggctagcttgtttactcatataaagactaacctttgatgtaccgtgagtgcttaagtgccttttactcagaagtccacaatgtcaatttccctctaatggtgttgactcaagcttttgttaattaatcttactgaataaatgcgagtctgactagctgatcagggcctagttgcaactgtttacaggactcagcaggagcctgtaagcggctgggaccctcagctggactggcagagcagaatatctgtgtgtcagcatactttatttatccgttgctgaatcgggtctgcaagaacagacctcccgcagctagtgcccccgtgaaaggagcgctgcctcactgtggtgacttacgaggccactgagacgggagtagactgaggaagggatagtagaccaagcaggaatggttctggttcacctgaagttaaaagtgttcttatgatactttcagttttcttctattagactgggtaatctttaaaatatctttgaacgcttaaattctga

SEQ ID NO: 853365 - DNA, 603 bp, Homo sapiens
gtttgaatatatcagtttatctgctctcctgttgatggacaactatccctttccagtttttggcaatgatgaataaaactgctgcaagtcctttggcggacatatactttcacttccgttgggtaaatacacagaagtgaaacaactggatgaacgaataggtgtatgtttacttttttatgaaaaacttgagggccttttcccaaagtggttgttcagtttacatcagcaatgttcagtggttgttcagtccatcggcaatgttgctccatgtcctctccaacatttggtgttgtcattttaattttagtcattctagtgtagtagtattctcaatgaggtcttaacattcatttctcccatgataacaatgttgaatactttatcatgtacttcttagtgattcatatatcttcttttgtaaagtatctgtatttttgagttgtaagagtattaagatacattctgmatataagttcagatatatgtgttgtgattattgtatcctggcctatggggtatcttaatggtatcttttgatgaacataaagttctaattttttgaaatctaatttatcaatatttttgttatatggttagtgc

SEQ ID NO: 853366 - DNA, 603 bp, Homo sapiens
tcttatatacatttttaaaagtttattcttgggtgaaatatgtgtgtgtrcatatacacacatatacatgcgtgtgcatgcatgtatatgtgcatgtacatatgtatatacacacatatgcacacatgtatgtgcatatgcatatatacacatacatacacgtatgcatgcacacatgtgtatatacacatatgtatgcatatacacatgtatatgtatttatgtatatatgcatacatatatacacatatacacatatatacatgtatacatagatgtatatgtatggaatatgtatgatgtgtgtatacatacataacacacaaacacgtgtatatttgctataatttgtacttgcatcagatctttttcttcttattttattttcgaactgcttattaatagtaatattcagtcactcaacaaatacttatatgctactgtgtgccaggcactgtgccagacacaaggaccatactagtgtacaaaacagacacggtctatatatactattgatcatttctaaaatattgatcatccttgcatttctggaacaggttctgcttgggtatgaaatattattttagtatattgtactaatga

SEQ ID NO: 853367 - DNA, 603 bp, Homo sapiens
tcttatatacatttttaaaagtttattcttgggtgaaatatgtgtgtgtgcatatacacacatatacatrcgtgtgcatgcatgtatatgtgcatgtacatatgtatatacacacatatgcacacatgtatgtgcatatgcatatatacacatacatacacgtatgcatgcacacatgtgtatatacacatatgtatgcatatacacatgtatatgtatttatgtatatatgcatacatatatacacatatacacatatatacatgtatacatagatgtatatgtatggaatatgtatgatgtgtgtatacatacataacacacaaacacgtgtatatttgctataatttgtacttgcatcagatctttttcttcttattttattttcgaactgcttattaatagtaatattcagtcactcaacaaatacttatatgctactgtgtgccaggcactgtgccagacacaaggaccatactagtgtacaaaacagacacggtctatatatactattgatcatttctaaaatattgatcatccttgcatttctggaacaggttctgcttgggtatgaaatattattttagtatattgtactaatga

SEQ ID NO: 853368 - DNA, 589 bp, Homo sapiens
ttctgttcttttccctttttcttggtcagtggattagccaagattgatttttctgcatggctggggaaggcctaaggttaaaagataaaaaggtggattccttttaaatgtaatttagattttttttcccctgcccttagttctgatatcaaccacagaatcacgtcaatgttccagaaacacctgggccctagctacagctgctggggtagggcaaacctacacttccagcatagcacagctggggcggtctaggcagatttgccatcaggtgtcattctctctctctctttctctccatctccccctccagcccccagctctttctgccaccctacccatttttttctctcttcttttctttctcctattctgcttgcaaaatgcagctagaggacacacatgtttattctactccattgttctttcaagtcagtgtgtatttatcttttgcaaactraagagctcaagggagaactgtttctgagtctaccagatgacaaaaagagccaatcgattgagtcggaaagcctgtcaattcagcggaacatcttaggcatgagtggggtgtgaacaaaacaggattcaa

SEQ ID NO: 853369 - DNA, 610 bp, Homo sapiens
ggactcttgagtaatatttacatgtgtcttagccacattcagtgttaaattcaaagagttggtttcaatccagccagccagtgcaaaaagcttctaaacgccaggatacgatttcaaaaagctagcaggctggtaattccccatccagaaccctccaccaccattaggtcaatagatggaggtggggagagagtttggacaatctatccaaccaaaatgaagctacaacaataaaacaaaatggaagccattatatgagtaataatagagacagacattcgcagacaaactggccataaatgcaagaaggaagaaccggagaactgagaatgaaggaaaatctgaattagtcaggattttcctgattacaaggggtagaaacctatcttgaccaagcttaagtgaaaaggaagtttattggttgatctcattaaaaagcccaggattacactgactgcaggcacactggaggctccaatgccacctggtgttccaatgccacctggaatgacacatctttgctcttctctgtaytagcttcagtttcagacacacttttgcttgtagtggcaagagagcccccagcatttccagactcaaactccatctc

SEQ ID NO: 853370 - DNA, 576 bp, Homo sapiens
ggggagatggaggttgtaaaagtaaatcattttcatgggaaaggaatgacccaaagaacaaaggcctgggacagagttcctctgtgctgtgggggagatggcaggaaggtgaggggtggaacttcactgtgaacaaaagttttgttgttatgcagataaagcctcacaagtaatctcttagaactgtcctcagaagaacagatgaaaaatctgcctgggcatggcaatgactcctagcgtcttctcttctctagagattaatatttcctggttatttgatgagattcctaggaagggggtcttaagacaattgcatttctccagagaaaatctgtcctggtgcttcaggaaagaaagaggatcagagacacaggagagcaggaaaggatcagagagagatcttggttctaaggattatttctgaggcctttccattgtttaaaattcaaagcacttggcatgccagagcactgtattttggggcatcattttcttgccctaatrctaactgccatgatatgcagtcctcatgtcatacctctctgtggttggtaaatgatgctggctccctgcttg

SEQ ID NO: 853371 - DNA, 704 bp, Homo sapiens
tgttaatttttgtctttcttggtgtggggaggaggacacaattgtcttttgtacatctatctcctgcttttaggcaaattgaggaaaggyaggtaacgttttctttatctgcctcctcccagttgcactcagttcaaaacaatttttatgttaaagagatatatttttgtaagcaatgagaaaaggactccctattttataaatggtgctgggatagctgactagccatgtgtagaagaataaaactggactcctacatttcaccatacacaagaaattaactcaagatgaattatttacatggaagatgccaaactgtaagaatcctacaagaaaacctagggaatattattctggacatcagccttgggaaggaattgatgactcagtcctccaaagcaattgcaacaaaaccaaaaattacctaattaaattaaagagcttctgtaaagcaaaaggaacaatcaacagagaaaacagacaacctacaaaatgggagaaaatgttcacaaactatgcatctgacaaaggtctaatatccagaatccataagaaatttaactcaaaaagcaaaaaacaaataaccccatataaaaatgggcaaacaacatgagcagccacttctcaaaagaaaacacacaagtagccaacgaatgtgaaaaaatgctcatcatcactaatcatcagagaaatgcaaatcaaaa

SEQ ID NO: 853372 - DNA, 677 bp, Homo sapiens
gttacagcttgcttctgtacactttagggagacagaagttacaggcagacataaatcaatacatgtaaagtgtacactggttcggccctgaaaggtgagacatctagaaggtagggtgtgagagagggcttttcaggtcctgggtgaattcaaagatttccaaagattggcaatgggttgaaaaagttaagttttgcctgagaagagttgaagtcagcataaagaaatgcttgagtcaagatgaggggggtagtggaagccaaggttcttgttatgtccgtgaagcctgtaagtaacaggcttcagagagaatggatggtaaatgtatcttatcagatcttaaaaaaatctgggaaagacctggtaagtgaaggagattccctacagaatacaaattcctcttacaagagagggctttgcagggacatttcaaaatatgtcaaagagaatatattttgggacaaaatactttgatttccttcaaggcctgctctctatcatgtgatcccataccagagtcaggtcggagttgggtatctcactgctacaaagaatctgttttgtcagccttatgatctctagtttagtgttaatgctggtcccttgtgcctaaactccacagggatgagggtatgtgtgacccgccktttccattatggcctgagctatttcttcag

SEQ ID NO: 853373 - DNA, 553 bp, Homo sapiens
taaatgaatccaaatgaattcmtgaaatgaataaaaaaattcaagttcttagaaattgaggagataattggtacattagctcctcaaaccttagtccatggtttctcaatctaagcattattgacattttggactggataattctttgttgtgtgtgtgggtggggtggagggggaagagttgttttgtgcattgtgggatgtttagtaccatccgtgggctctacctactagaagtcaatagcacactcctgcaagttatcagtggcaaatgaaggcaagaatgtttttagatattacaaagtgtccctgagggacaaaattgccactgcccttgaaaatcactataccctcttccaatccctttgtcttatggttgagaggactcagaaaactcgagagctttcctcaaagtcacatggggaattattggcattgctggtaccaacacttgaatctcatcttaactccttctagagtgccctattaacaaaagcctgcaaatatgagccacaatttgatcagtaagttttgtaaaactgcaattttaaatg

SEQ ID NO: 853374 - DNA, 650 bp, Homo sapiens
ttctaaaatagaatggtggtcaggcattgaatagttactcccccttcaaagagagaaataggaaagaagaaataagtaataggtccctaccaaacccaaaacccaatcaggcaaacattaaatcttaaggctttagaataaacttcttcttttttaggagtcagggtcttactctgatgcccaggctggagtgcagtggcatggtcatagctgaccgctgtctctaactcctgggctcaagtaatcctcccaacttggcctcccaaagtgctggaattgcaggcatgagccactgaacctggcctgaataaagttctttgattcaaagcctcacctctggacagagtggagtgggaggttggccctccaaggcccgaagggggctccagcccacgacattaacccatgctgcaactctcacaggttggagtctcatgcctatagctcttccaggctgaaattgaatgctggtggctttatcagtccggggtctttggggtggacctgctcccatggcttcactgggcattgccctagtggggccctctggagccgctctaccactgtggcagttctttgcctgggcctcaagkttccgggggcatcctttgaaatctaggtggatgtagccacactcccacagctcatgc

SEQ ID NO: 853375 - DNA, 436 bp, Homo sapiens
tcttctgtggaggggccattcagagctgctatttgggctggctatttccactgttgttggcaacwgcctgtattcctgggcattgacctgtcccctgctgctagggctgcagctgggcaactcaggtctctctctcctcttctctctctctggtatctctccctctttcccccaccctctcatttcccccagcctctcagctttatgagggcctgggatgcttactaattcagtcttctctctgacctctcaagtgccacagatacatcacctccagtctctgccctggtctctgtcctgtacctggctctcaccccttgctggagggtcctatggaaagtttactgcttctcaactcaatggctttccatgcctcctcagagtcatgtgggaaatttggggcacctcatcacagaaaatagaagtggctttgaaa

SEQ ID NO: 853376 - DNA, 574 bp, Homo sapiens
cacagggcaaaccttattcttctagttaaattccattatccccaaatagtaaagttataccatttccatcatatttcagctgtgcttcgggccytgaaggaaggagctcacatccatattagggataaagatatgcgtctgcagcctggaaaacaggatgctggagatgtccagctgagctcgagtggggcaagaatgcagagcaagtggcctgcaggggatgacacgccaccacttaagaaacctgtacacattcctcaggagtcccagaaatgccctagagaagagaactttcttgaagaatgcacttcctataatgaatatgacaccaaaaatgcaggcaacaaaaccaaaagtaaacaagtgggacgatgtcaaactaaaaagcttctgcacagcaaagaaaacaatcaacaatgtgaaaaagcaatctatggaatgggagaaaatatttgcaaatcatatgtctgataagaggttaatctctaagacatataaggaacccttacaactcagtagtacaaaaaaaaaaaaaaacaccctgataactcaatttaaaatgggttaagaactt

SEQ ID NO: 853377 - DNA, 580 bp, Homo sapiens
gacttgggtcaatagtgtgatgaagctgccttcgagagctactgtagtctgctgtgtttatatgaaatctgtgatgtatatttatttatatgtataaacatgtgttcacatacattctggggtgctggtaatgttctgtttcttgatctcaaagctggttatgttaggtttgtgaagattcaccaatgtgcacacacatgtgcattttttgtatgtatgttgtacttcaattaaaatattttatgggacagaccacatgtggactattatgtttagttatgaacatttatttcattttaaggagtatgaagaggcggtgggaggagccacagaaggagctatttaggctgaacaagcgaaggcccggcaggggagctgtctgaagtttttttgtgcattccgctcaatgatggtgtttacctaggttgaccgccagctccgtggcactacctgagtgacctctgggcagctactcacctctttttgtcccagcttcctcaacrgcaaattacaggagcttgactagatgatctgagaactccttagctctcaagtgctatgagcattaaaaggcatgtgt

SEQ ID NO: 853378 - DNA, 589 bp, Homo sapiens
aaactcaccaccaggcgtaatgagttagtcacagtttcctgaccatacctaactcatccatgggtccaagttaatcaccccacctctctctgttttccatttttccaaatagccctgtagcaccagaaggctktatcaggcaccccttctccaggttcccatggcatcctgtgcatgtgatcagctcactcttaacacactgcatagtagttgtctgctggtctgtctgctgtgagctttcagcaggtggggctgtatctcccttctgtatccccaacacacagcacagcacagcacactggctgatctacggtagccttcgattaaagttagttgcttgagtctacctatctatgccacaaattattccatgagaaataggaatatacaagtcacaaggtgaaaagaaatttgttttctagaaattaaaaaaataaatatacatacaaattatatttccattaaaacccaaacttaaaggtgtatagaaaaatattttcttaattcagcttcctggaactagaagcattttagaggtgacacaactaccatatctatacattttatctaaaattaaattcactaaaag

SEQ ID NO: 853379 - DNA, 559 bp, Homo sapiens
agtggagacacctgactaacactaccttagccaggtgatcaaggccagcatcagctgtggtaaggcatgtggacggcaggtactcttgatatsatgagatgagaggggagctttacctctccggtcttccttccactaaccaatagccccactcttttttttattattatttacttttttttggagacagggtcttgctctctcacccagactagagtgcagtggcaccgtaatagctcactgcagcctgcaactcctgggctcaagtgattctcctgcctcagcctcccgaaatgctgggattacaggcaccaaccaccacacccagctatttttttaatttttaaaaaatgtttcattttttatttttatggatgcataatagtgcataatagtatacatattgatggggcacatttgatattctgattacaagcgcacaatgtgcgatgatcaaatcagggtaattgagatacttatcacctcaagcatttatcatttctttaatagccctagtcttaccaggagaaaaaacattagacaaattctaatcctgcag

SEQ ID NO: 853380 - DNA, 626 bp, Homo sapiens
agatgacacataagtgatcccaggcaaggccaacggaagaacagtccagctgagccctgctccratcattgacccacacaatcatgagcacataaaatgctgcttcaagccattaagtttgttatgcatctatagagaactgatagagtgaggaaggcatcagttgagaggtaacaagaaatggggtccaagtctccctccagtcctgcaattggagattagggggtcctaccttcactaaagccacctcctgtttgtggctctccaatgaagatcttataagcctttaagtcctaagaagagtttggcaaatctcttcaagcaggatggcagggcactccagggttaagacaaaggaggaatgagtgatgggctttttaaaactcggcactgcctagtgaagaaggaggaagggacagctcccttgctctctgagatacgctctattttgcccctagacgtttctaatagtaaactatagtaagtctgacctcgagagatcaaacaggaaggtgaggacacagagtgagcccaacagtttgtgaaacaaactggaactctaatctaacaggagtatgaaatgaaactgccaactctgagctatgaagactacactttactaaaag

SEQ ID NO: 853381 - DNA, 575 bp, Homo sapiens
tagtagctagatacaaaatacaggtatgataacccaaacaatataataataatacattaatgttgaaaagattttaaagtgtktattttttagagaaaatgcttcttttaggcactcatggcattttaccaatagaagctgcagaagaaatctcaacacattttgaaaaacataatttttaccatttacattcttgtattgaattgttgcaagaaaattttgaaagaatagtaagagattaaacaaccactaccaacaacataaaaaatacaagcttttagaaattaaaacttatctgctaaaaaccatggtgatcaaattataaattaaaatgttggttatatatcaaggttggccaggatgtaggaaaatgggcatggacacatactattgttgtgtggactaacacagccttttgtggagagcaatttgagaatagttatcaaaattaaacatgtacatacaacttgacccaggaaacccattccctgaaatctattataaagaaatatttgtacatgctggcaatgatatgaacataagaatgaacatttacagcatttaaaaaatgtaat

SEQ ID NO: 853382 - DNA, 589 bp, Homo sapiens
ctgtgaaccactgaatactgtacctgtatccagctcagccactcactgaaggctcctcagcagaactgcttctgctgtcagagtggaaaaacaagaattgaagagtcccatccctcatggcaatcttggaggaaaagctgacaaactgagagaatcacactagttctccatcaccagcaatccatctagtcacagttcttgacaacatctccccctttagaaatttagagcctgctctctacctgccatttctttgtcttttaaaatccttttgacaacaatgcttcttcaagaaagaatattatgcaattttcctcattggtataatttcactaagtgcataggcccccttgattttctatttctataataattttattctctttccattgatgactttcagacataatgaattaatctctctttcaatgggcacagccatgataaacctctataaaacagrtggtgtgacttatactgaaaatgacagttaattgcttttacaattatgatatttattattaaaaatacatttttaaaacatctgttagtactctgagttgaagtgttccacacaagatggaaaatc

SEQ ID NO: 853383 - DNA, 602 bp, Homo sapiens
ccatcgtaaagatgaaaactcataagtcaaactgatgcaaggcaggtgacccccaaagtggggcttagcccacaagggttcttttgcttcatccaggaaagaattcaagggctggatggtggagggtggcagacaacagctttattgaagaggcagcgttacagctcctgcagtgttacagctccgtgactgctcctgcagagcaggactaccctataggcagagagtagcagcttagggtggttttgcagtcatatttctacctactttaattacatgtagatcaaggggtggtttattgctagggaaattgctggggaaagggggggtaacttttgggtcatcgggttattgccgtggaaaggaacagtaagtcctgggtgctgccatggcaatggtaaactgacatggcacactggtgggcgtgtcctatggaaaaagctgcttctgccccatccctgttttagctagccgtgaatttggtccagtgtccaagccccatctctggagtcaagtcccacctcctacctcaaaatgatcgtaagtcagggacagtctgtamagaatatccatgcaataaaatattactcagtaataacata

SEQ ID NO: 853384 - DNA, 551 bp, Homo sapiens
aggatttaatcacctcccaaattctccgcctcctgataccatcccattaggggttaaggtttcaacatataaatttggggaaacacaaacatacagtccaaaacataatctaaagaagtaaagaagtttcagagaaaaataactaaaatggttgaggaaatgaggtgggagaaaattataagattgccaaaattttccctctgaaagagaacatgaagatataaataatgtagataaataaacctgaacatttttatcaaagccagaaatactgtaaagagaagccaccatgtgaaactaaatctaaataaatgtaaagcaaactgccgggcgcagtggctcacgcctgtaatcccagcactttgggaggccgaggcgggcggatggcgaggtcaggagatcgagaccatcttggctaacacggtgaaaccccgtctctactaaaaatacaaaaaattaaccaggcgtggtggtgggagcctgtggtcccagctrctagggaggctgaggcaggagaatggcgtgaacctgggaggcggagcttgcagtga

SEQ ID NO: 853385 - DNA, 546 bp, Homo sapiens
atattttgtttccctcttaatttctactttgaatgttgggttatttagaagtgtattaatttccaaatacctggatacttttctggatattgtgtttctattgctaacgaagattcctttgtaatcttcggaatttcggtctttggaattgcctgtgacttactttatggcccagcatatcgtctatcttggtgaacattccatgagcacctgaaaaggagttttataaatgtcaggtcaggatgaccaacagtgctgttcatatcttctatgttttttgtttgttttttaatatctagttattaatattgaaagggaatattaaaacctcaaactatgattgtgtatttatctctccctatcaatcagtttttgtttaatgggttttgaagctcttgtattaggtgtatacagttttgattgttatrtctttctgatgaatttgtcctttcatcattataaactctcctaccaaattgctttgtggtatcacttccccttcagattgaagaacttctttcagcatttcttgtcatacagatttgt

SEQ ID NO: 853386 - DNA, 602 bp, Homo sapiens
actaatacatttttgttcatgataaagctatctctattcctacttgatgctcayaaatttcaaagtccaacaggtatttgacctggttctgatcttatttttctatttcttagcgactaaaaatttcatttaaaaaggtaacaattgctcagtattttctcaaagcatcgtaaataaaataatcattaacaaatacataaactattgttgacttgtttatatttttgctcttttgcctttaagatgacaggaaaaatcgtagttaaaaggctccttaaaagaatcttttttggcactaccaccttttaaacgatatccagtaagttatatactcataaaaactgcacatgagttatccatatagatggtaacccacaacataaagaatttgtacactcaacaagatttaacacactactataggcaagtttaacataacaagtgtaaacaggccagaaatatacaaagcacacgcagtgaaggagcagggcaggaaacagcagcctcaggacgtctgacgctacccagctgcgtgtcctggacactacgctcaacctccctgcaactctgtcgctttctaggtagaaaataaagcagttgga

SEQ ID NO: 853387 - DNA, 602 bp, Homo sapiens
actaatacatttttgttcatgataaagctatctctattcctacttgatgctcacaaatttcaaagtccaacaggtatttgacctggttctgatcttatttttctatttcttagcgactaaaaatttcatttaaaaaggtaacaattgctcagtattttctcaaagcatcgtaaataaaataatcattaacaaatacataaactattgttgacttgtttatatttttgctcttttgcctttaagatgacaggaaaaatcgtagttaaaaggctccttaaaagaatcttttttggcactaccaccttttaaacgatatccagtaagttatatactcataaaaactgcacatgagttatccatatagatggtaacccacaacataaagaatttgtacactcaacaagatttaacacactactataggcaagtttaacataacaagtgtaaacaggccagaaatatacaaagcacacgcagtgaaggagcagggcaggraacagcagcctcaggacgtctgacgctacccagctgcgtgtcctggacactacgctcaacctccctgcaactctgtcgctttctaggtagaaaataaagcagttgga

SEQ ID NO: 853388 - DNA, 644 bp, Homo sapiens
acctacttttatttctcgctctggttctccattggtctgggctcctgcttctcagtcttctctgacstctggtaagtggaactttcattaatacttctgtcgcactttgtacctgacctaggtggccttgcaaatgttgactcagattgtggattttccactttcctctgttttccctattttctcccctgggaaatcttgcagatgatgcatattcattttctgtattcagccttccattattaaggataaaattgatccctacattgaatctgaaattaccactatatggattactctggctcactgctgtccaagcttggttttctctttgcttacttcctgtcatattttcagtttgcccaaaagaggtaagccactttattacagacccattactagtgctagacgtcatccacctctgttttcacctgattcttgtggggaatcctctttaatttgttgtaaccttctcagcaactcttctgtacttcacctatagtgcctagcaaattgttatcactcataagcctgtaatcttcatcactcaggttatttgcaagtagaaagcttctggaaccatttgtccatccgacttctgcactgggccacatccatcttcttcattgtcagaatctgagttt

SEQ ID NO: 853389 - DNA, 595 bp, Homo sapiens
ttgcccaggctggagcgcaatggcatgatctctgcccaccgcaacttctgcctcctgagttcaagcgattctcctgcttcagcctcctgagtagctgggattacaggcatgtgctgccacacttggctaattttgtatttttagtagagacaggtttctccatgttggtcaggctggtctcgaactcccaacctcaggtgatctgccctcctcggcctcccaaagtgctgggataacaggtgtgagccatttttgtatttttagtagagacgggattttgccatgttggccaggctggtctcgaactcctgcctcaggtgatccaccaagcccggcctgtaacattcaacttttggaagagacaaagaattagccaggaatgtgaaaataaaaatttgatttctagaacatgtgtcagggtcagcacaaatgtatcgctcttattctctctgtatctgtgatgccagcccatgagacttcaatttagagtgatgaygcctgaagaagagtgacattctccctcattaaagagagatattattatgttcactgacccctacttaggcaagaatgtgggcagagatgtttcaaaaat

SEQ ID NO: 853390 - DNA, 625 bp, Homo sapiens
caaatctgcctcagggggtagctaccagaagaggaaagtaggccttggaacttgctgagggaatcaagttgaagacagagcctgactgggcctgagacagaccccygggctaagagttgaaaggcacagtgtgttgaataaagtgagccaggttcaatcgtttcctgaggcacaggcatatccgcagccttccaaagcagccttccaaatctgtcttctccgggagaatcttcccctcgtcagagctggtatctcacaggtgaaaatgtgaagtaatctctaacagccctgggaggtgaatgcccagcaaagtatttatcctcaaacaaccccctcctggcacatttgtctggctatgtatttctgtaattaattgatgttgttcagttaagatctattaaattcttgtctgaaaataaacgtcatctggaactccatgtgttaaaacaataaaagcagtgctgttccagttaaggtgggaaagggagaggggtgctgagtcccgcttcccctcagctttgcctcatccacccaccccacttagcatccccaaggcctttcccaggagccctagcattctgaaactcatagcttgaaaaaaacagattgaggatattatagcacc

SEQ ID NO: 853391 - DNA, 625 bp, Homo sapiens
caaatctgcctcagggggtagctaccagaagaggaaagtaggccttggaacttgctgagggaatcaagttgaagacagagcctgactgggcctgagacagacccccgggctaagagttgaaaggcacagtgtgttgaataaagtgagccaggttcaatcgtttcctgaggcacaggcatatccgcagccttccaaagcagccttccaaatctgtcttctccgggagaatcttcccctcgtcagagctggtatctcacaggtgaaaatgtgaagtaatctctaacagccctgggaggtgaatgcccagcaaagtatttatcctcaaacaaccccctcctggcacatttgtctggctatgtatttctgtaattaattgatgttgttcagttaagatctattaaattcttgtctgaaaataaacgtcatctggaactccatgtgttaaaacaataaaagcagtgctgttccagttaaggtgggaaagggagaggggtgctgagtcccgcttcccctcagctttgcctcatccacccacccyacttagcatccccaaggcctttcccaggagccctagcattctgaaactcatagcttgaaaaaaacagattgaggatattatagcacc

SEQ ID NO: 853392 - DNA, 567 bp, Homo sapiens
tgtccagccagtagtgcctaggttgaaaaacaacacatgtggggtaatgggacattgactcttccctgtcgtctccatgctcccaagaactccattctggcttgtgaaaaactagtaatggaattactcgtatatgaaaataactaatgcccgatagacaaaccaaacagttgcctagggcaccagcaaacagagagaaagaaggataagttcagctgtaatgagcttattcacaattttgcaggcagaaaatctagaaagttgctttttaaaattttagcataaactttcatgttaaaccaaaaaataaaattttattttgaatttcatgtgctataaaattttattttgaatttcatgtgcgagtccctggaaacttgtcagtgcttagggcaataaagacattaatcaggttgtaggagtatcccataaaaaagctataaatgtgtgattgaggagttgctggaaatattcacgatgctgacaaggctcatctcagggaggcaagactgaaaaggartgtaattaggaaatctaatcggtggagctctatgttgtctgggggaa

SEQ ID NO: 853393 - DNA, 403 bp, Homo sapiens
tttatttatttatttttttgagacggagtctcactctgtcaccaggctgaagtgcagtggcgcgatctcggctcactgcaacctccaccctccgagttcaagcgattcttctgcctcaccctcccaagtgactgggattacaggtgtctgccaccgtgcccggctaatttttgtgtgtttttagtagagatgggtttcaccatcttggccaggcaggtcttgaactcctgacctcgtgatccaccccccacttggcctcccaaagtgctgggattacaggcatgagccaccacacccggccragggttctctttaagaaaaacacaaaattacagaaacaaaattaggcaggaaagtggacctttatgtagattgggaaaataaataaattgtaaagctttta

SEQ ID NO: 853394 - DNA, 467 bp, Homo sapiens
gtctacccgtcccagctacagcctgttataaaaaggtggccatactgttccttccaaaatcgcccaatgcctcccgctgtcactcagagtgagtgaggttcccctagtggcccctaaggactgctgtgatcatggtctgtgcctctgcacctctccagcctcatctcctaccaccttgcctccctggctcacccactgcagccacactactgcctcgcgcctacttaccgtcactctccatccgccaaatatggccatgtccgaattcccagaagctgcagattactttatgtgacaaacggacttgcaaatgtgattcaactaagaattttaaaatgaggagattatcccggattatccttgtgggtccaatctaatcgcaaagttccttacaagagaaatgcmaggagagtcggaagaaggcaatgggatgatggaaacagggcgagaagaggtgatgtgatgtg

SEQ ID NO: 853395 - DNA, 613 bp, Homo sapiens
agctaggatggcagagacagcattgtgaagaataaaattcagaaggttgtgagatgagggttatgaaaaccaaggccactcaatgactggctgtgaatggcatttgatggaactctaaggaagagagaatgccaggagaggtagatgggagagtggcatgtgcacagtgactgaaatgactctgccaaaccatctgacattatcaggtggcttacacacagttccctccctgtgcccatatcaaaatgggggatatcatgctacgatgtgccagtggaccaagttgctccaataagcaataccagctactagaaatggttttctgtgagcatctgtctttgtctggaatccagctggaatttaaatggttgtggattgaactgctatctgtgttatgtggctgctcattttcagtatcatcctatgagcataaaattcagatttctgatcttagcattcaaggccatccacagtctagcccagtactrtcctcttctctacttttcccacaatccacacactccatccaatcaggattactctccatcattaagaattctcaactccgcatcatacttcacaacttaacttccctcttccactctaattgtcc

SEQ ID NO: 853396 - DNA, 548 bp, Homo sapiens
gaggatcccagaaaggttttgtttatrtggatgatagttattgatatttaccgtgttgtaagttaaagctgaaaaacatttaaatatttagaaaaatgctataataaatgtgtctattaacatacacaacatcttaacacaaaataactatattttctaaaaacaagaaatttagtaaaagtggcaatgttttatatttttacaaaatctttaacatctgacttagtagaagtcggcttccacatttaatctcttggtatttagttggggtatatggggcttttgttgttgttgttgttgttgttgttgttgttgtttttgaaacagagtcttgctctgtcatccaggctggagtgcagtggcgcgatctcagcttattgcaacttctgcctcccaggctgaagcaaatactgacaaatattaagtctgagtaagcatggtgtgtcagccagttgctctttcaggtaaaaactgcttagtgagggaggcagctggttcagctggcaactcaatcatacaagtgcttttccttccacaaccatcagact

SEQ ID NO: 853397 - DNA, 625 bp, Homo sapiens
ctttttcatgcaatgtgttttactcatcagcttcatttagtatataatttgttcttgtagtaaatagaaaacacttttttgcactacggctgctagaccagtattgactaaayaaccttaaaaaaatcaacttctgcatgttgaaacttaatcctgggcatattccagtcatataagactaggatgagagactgattatcttgtatgtttttgttagcctatatctaagaagtttgtgtattaagaatgaaatatgccatttttggagagaaacataactacagttgacccttgaaccccctgaggtatagaggcaccaaccccgcatgtagtcgaaaatctgcgtatatctttttactctccctgaacttaactactaataggatactgttggccagaaaccttaccaataacataaacagttgattcacatatattttgtatgttatatacattatatattgtattcttgacagtaaagtaagctagagaaaagaaaatgtattaagaaaataataaggaagagaaaatatatttagtattcattaagtagaagtggaaatggatcgtcataaaggtcttcattctcaacgtcatcatgttgagtagactgaggatgaggaag

SEQ ID NO: 853398 - DNA, 523 bp, Homo sapiens
ctggtgaggttgtggagaaaagggagcactyatacactgttggtgggagtgtaaattagttcacccattgtggaaagcagtatggcaattcctcaaagagccaaaagcagaactaccattcaacccagcattcccattacttggaatatacccagaggagtataaatcattctaccataaagacacgtgcacacaaatgtccactgcagcactgttcacaatagcaaaaacatggaatcaacccaaatgcccatcagtgacagatcagataaagaaaatgtggtatgcataaaccatggaatactatgtagccataaaaaatgagatcatatattttgtgggaatatggatagggctagagactattatccttagcaaaccaatgcaggtacagaaaaccaaatactgcatgttctcgcttacaagtggtagctaaatgatgagaactaaagaacacaaagaaggatacaacagacacgggggtctacttgagtgtggagaatgggaagcgggagagacagct

SEQ ID NO: 853399 - DNA, 523 bp, Homo sapiens
ctggtgaggttgtggagaaaagggagcacttatacactgttggtgggagtgtaaattagttcacccattgtggaaagcagtatggcaattcctcaaagagccaaaagcagaactaccattcaacccagcattcccattacttggaatatacccagaggagtataaatcattctaccataaagacacgtgcacacaaatgtccactgcagcactgttcacaatagcaaaaacatggaatcaacccaaatgcccatcagtgacagatcagataaagaaaatgtggtatgcataaaccatggaatactatgtagccataaaaaatgagatcatatattttgtgggaatatggatagggctagagactattatccttagcaaaccaatgcaggtacagaaaaccaaatactgcatgttctcrcttacaagtggtagctaaatgatgagaactaaagaacacaaagaaggatacaacagacacgggggtctacttgagtgtggagaatgggaagcgggagagacagct

SEQ ID NO: 853400 - DNA, 407 bp, Homo sapiens
tgattcttctttattttcttctttattagtctagctagsattctctctattttcttagtttttcaaaaaaccagctcctgaattcattgatgttttggagggtttttcatgtctctatctcttttagttctgctctaatctcagttatttcttgtcttctgctagcttttggatttgtttgctgttgcttctctagttcttttagttgtgatgttagggtgtcgatttgagatctttccagctttctcatgtgggcatttagtgctataaatttttctctgaacactcctttagctgtgtcccagagattctggtattttgtctctttgttctcattgttttcaaataacttcttttctgcgttagttttgttatttacccaagagtcattcaggagcaggttgttc

SEQ ID NO: 853401 - DNA, 595 bp, Homo sapiens
gatagcattaggagaaatacctaatgtaaatgacgagttaatgggtgcagcaaaccaacacggcacatgtatacatatgtaacaaacctgcacgttgtgcacatgtaccctagaacttaaagtatamtaataataaaaaaagaaaatacaagaaagactggaaaagatgggaccaagaacatgatagtgtatatttttaatagcctgctgttttagtctgttttcatgctgctgataaagacatacctgagactgggaagaaaaagaggtttgatttgacttatagttccacatggctggggaggcctcggaatcatggtgggaggtgaaaggcacttcttacatcaccatgggaagagaaaaatgaggaaaagcagaaaaccctgataaaacccatcatatctcttgagacttattcactatcacgagactagcatgggaaggacccgcccccatgattccattaccccccactgtgtccctcctacaacaagtgggaattctgggagatacaattcaacttgagatttcgatgggaacacagccaaaccacatcattccacccctggccactccaaatgtcatgttctcacat

SEQ ID NO: 853402 - DNA, 595 bp, Homo sapiens
gatagcattaggagaaatacctaatgtaaatgacgagttaatgggtgcagcaaaccaacacggcacatgtatacatatgtaacaaacctgcacgttgtgcacatgtaccctagaacttaaagtatactaataataaaaaaagaaaatacaagaaagactggaaaagatgggaccaagaacatgatagtgtatatttttaatagcctgctgttttagtctgttttcatgctgctgataaagacatacctgagactgggaagaaaaagaggtttgatttgacttatagttccacatggctggggaggcctcggaatcatggtgggaggtgaaaggcacttcttacatcaccatgggaagagaaaaatgaggaaaagcagaaaaccctgataaaacccatcatatctcttgagacttattcactatcacgagactagcatgggaaggacccgcccccatgattccattaccccccactgtgtccctcctacaacaagtgggaattctgggagatacaattcaacttgagatttcgatgggracacagccaaaccacatcattccacccctggccactccaaatgtcatgttctcacat

SEQ ID NO: 853403 - DNA, 417 bp, Homo sapiens
ttttaaggctggataggtgtcaccaatcattagagaaatgcaaatcaaacctatcgtgaaatctctcataatttatctttgaattcrtgttttgtaaatgaagtccaatgggatattggagcatatacttgggtctaggagcctcagtttacatgtgatttgcctctctcagcttctctgcctccttgcgagggattatcagctgtcactaccccaccaccacgcaataactggtgcctctgttgccctgcccactgtggggtcctgggtgcagctatagggaaggtggaagtcaggcacatgccctgtgtggtgaatctcagtcaatctgagcacatgcaagggtatgcacttgcctatgactatccctatgcccaagagaggttatattcaatggctaataaattcaatggcttt

SEQ ID NO: 853404 - DNA, 622 bp, Homo sapiens
tatcttaataggaacatgatatattatttgaatttgttgttaatatccaaatgttcttttttaaaaagacaagcattttagatataacttggatgraaatctcctgcattttatatggtaaattatttgtcaattgaagtataaatgataacctttatcatttaaaggttaaaatgctgcaataattagtgatgcttgtgaaaatttttaattttacatacacaacggttatcaggtacaagatatgtggggaaatagtgacagtaaaaacatttagcagagtatgttggcacataactttactataacttaatagagagaagtttatttttttgagccttcaactctttgtattgtttacataacaataaaaaacagaataacagagattagattatatgatctttctaatcaggctggaattatttggtgaactaacggttgcagacatacactaaggtgaccctcggtgagtcacatccttgtataatcccctctccttgagtgcagtggaaactgtcttgcctttgtccaaaagaattgacaaagtaagatgccactccttggtaaggttattttatgtgccaaaggctatgctatgtcattcccttgatggcactat

SEQ ID NO: 853405 - DNA, 630 bp, Homo sapiens
taacttcaacagaaagatgaaactttgaaggagagctcaataaaaatattatacagagaaaatacaataacagagaagaaaaaatgccttcaaaaggctsataagtagacttgaaacagctaaagaatcagtaaacatgaagataggttcataaaaaaataagccaaaaaaactgcaagtagaaaagaaagtgttcttgtttttgttttaaaaggaacagagcatgcatgagctgtgggataatatgaaatcacttaatataagtgtagtggcaatttccacagatgaaagaaaaccaagagaaagaatgatggagaagagatagtccaagaattttcaacttgaaaaaatgcacaagtgattcatgacactcagagaacagcaatcaagacaaataacaaaataaaacaataaaaacagaaatacttagacgtctaatattgcaacttctgaacacaaaaaaataaaaacacattgcttaaaagtagctagataaaaatggcacacctatacaaaggaaaagagaactacagcatatttctctacagaaaatatgcaatctgaaagaaaaatggaattaggttgttaaattctgaaacaaattgtcaacccggaattcaattccttaaa

SEQ ID NO: 853406 - DNA, 596 bp, Homo sapiens
gtaacccgctggggtcccccttacatagtgtggaagctttgttctttcactctttgcaataaatctggctgctgctcactctttgggtccacactgcctttatgagctgtaacactcactgcgaagakctgcacttcactcctgaagccagcgagaccatgaactcaccaggagtaaggaagaactccagacgcgccaccttaagagctgtaacactcgccgcaaaggtctgcagcttcactcctgatgcagccagaccacgagcccaccagaaggaagaaactccgaacacatcctaacgtcagaaggaacaaactctggacacgccacctttaagacctgtaacactcaccgcgagggtccgcggcttcattcttgaagtcagtgagaccaagaacccaccaattctggacacagcatgaatattcataaggaggtggaaagaggtgttgctagtaagagtgttctaggtggtcctctgggtacacatgcacagtaactacatgctcgttcgtacatcacatgtctcattagcatcttaaatttccacccagggatgtgatttttttactattataatgagcagttagtttgag

SEQ ID NO: 853407 - DNA, 503 bp, Homo sapiens
aaccataaggaagagaaaatacatttacagtactgtactatatttattgatactgtaagtttacgtcatctgtttactagatgaattgtctgtctgaaacgacatcacctgcagctgcagacctcaatctatggtacatatcaagcaattcaactttctcttgcaacgtcatggcttttctctgcttcttgggagcacttccaagtatcactagtggcactttgtatgggtcccatggtgtcactcaagatttctggtattgcactaaacgcaatgaaaaatatgtgagaaccatgagatcactttctactgtgatactcgatttactagacaagtgaactgctcatgttgagataattaggatcacatggtgttttaagtggatmcctgcaacacttcagctcaccacgatagtaacaggaggtggctgtgaaattattataatagtacagaatgtgctacagttaattttatggggttacaatttaatactgtatcttcat

SEQ ID NO: 853408 - DNA, 606 bp, Homo sapiens
acaaacacacaatgtaccagaatctctgggacacagctaaagcagggtttagatggaaatttatacaactgaatgcccataggagaaagcaggaaagatctaaaatyaacaccctaacatcacagttaaaagaactagaggactaagagcaaacaaattcaaaagctagcagaagacaagaaataactaagatcagagcataactgaaggagatagagacacaaaaaaacccttcaaaatatcaatgaatccaggagctggttttttgataagattaacgaatagatagactgctagccagactaataaagaagaaaagagagaagaatcaaatagacacagtaaaaaatgataaaggggatatcacaactgatcccacagaaatatgaactaccatcagagaatactataaacacctctatgcaaataaactaggaaatctagaagaaatggataaatccctggatacatacacacccccaagatgaaaccaggaagaagtcgaatccctgaatagaccaacaacaagttctgaaattgaggcagtaattaatagcctaccaatcaaaaaaaaagcctaggaccagacacattcacagctgaatt

SEQ ID NO: 853409 - DNA, 535 bp, Homo sapiens
tctagggttttatgaggacaaatggagtcaatatacgtaaagtatatgcagcaasttcttaataaatgttagcctccatggggctgctgacagatgtgtccactgaagtgcaaatttactagtgcaggaattcagtttcagcattttcatctggcagatgaagcaagagacaggcactttaaagtggccagatgctatgtgagtgctccaggtgaggacattctattctagcacctgagattttcacaatcactgtgtatatgcttttaaaccctaatcttgttaataaatggtggctgaactttattgtccaatctaataattcttttctaagaagaggcagctagctagccttcctaacgttgttctctaaggaagccctttgggaagtcaaaagacaacaaaaaagtcagatttctcatgttaaaaaaaaaccacgatagttttctctccaacaggaataattattattgatttacagtgtaatagccacaaacagctttagtgattggttaaatgtcttcacttcactggg

SEQ ID NO: 853410 - DNA, 621 bp, Homo sapiens
agagctctcctgtatgaggtgtctgttggcccctactgggagatatctcccaatcaggataaacgagggtcagggacccacttgaggaggcagyctgactcttaccagagctcgagcactgtgctgggaaatccactactctcttcagagctgtccggcagagatatttaagtctgctgaagctgctcccatatccaccccttcccacaggtgctctgtcccagggagatggggttttatctattagtccctgactgccttttttttagagttgccctgcccagagaggaggaatctagagaggcagtctggccagagtggccttgctgagctgaggtggtgggctctacccaattcgaactcccaggcagctttgtttagactgtgagggtaaaatgcctactcaagcttcagcaatggcagacggccctcctccctccaagctcgagtgtcccaggtcgacctcagactgctgtgcttgcaatgaggatttcaagccagtgaatcttagcttgctgggctccgtgggggtgggacccgccaagctagaccacttggctccctggcttcagccccccttccaggggagtgaatggttctgccttgctggcattccaggca

SEQ ID NO: 853411 - DNA, 613 bp, Homo sapiens
tgtgctggatccaggatcactggacagttttccttattcttgtctaatgtccatcttgtcatctgtcttatcaygtggcgcttttttgggcaggttgtatggaaggggacatacacagcagagtaatcaaaagcttgtgccctagatgcagattgccttggtcaaaagctcagcactaccgctgatgagctttgtaactttggagaatttatttactgttatcatgccagtttccttaccggcaaattagagataaaaacatttctaccttcacgggctgttttcctgagataatacatgtcaaacactgagtccagttcctggcataaagtgttcaataatgttaagtattctgttagtttcagtttttaaatggtaccagattcttgccttgggatgctattgagatggcataatgtatctcaagaaatatcgtcatgtttttttaaaaatgatgaaacaatttaggacatacagaggcaactgaatacagaaatttatacccccacctctaatgttgcagatttacatgttgtttcctgggattggctcttttctctgaaaaggagtctaggacagtattatctcatgaaattgatttttttgaagcacc

SEQ ID NO: 853412 - DNA, 564 bp, Homo sapiens
gcaaatgcaacctcagcaccaggacactcagagtcaatcgtctgcgggggaggcagtttttatctgtagcaggcaaccatgacaagggacaagattgaaggacagcctcctaactattttgttgatgaaagaattaaggctcacggaggatacataacctgtccacagtcatacagctggtcagatgccaagagaagggctgatgcacccatcatcaagggtctgttggacacagcctcgctcttctgcattttctcgcaaacacgagattataacccaggattataaaaattcttctccaacaacttcttaaatcaacagtaaggtctaacaacaagacagttattaaaatagaattacagaatcttagagacacttaaaaggcatttcagatctcactgagtacaaaaaattgagaaagcacagacaaaacagaaattactgtgaagtttacccagaatcacttagccagttctaagcctgatcatgattttctcttctctcytgggacgctgtcttccctagcctacttttaagctttaaaaagaattttttgttttaatt

SEQ ID NO: 853413 - DNA, 515 bp, Homo sapiens
gaatgtgggacttgtatctttctccgaagtttgtttcataattttacaaagcctatttgagagaagttggtaaggttgacccaaagggcaaggtaayttctttgaattttagtgccgagaagtaggacacagaattaataagggggaactctttggaaggggtcacggggcagataattgttctgttacattcatgggctgatgatgtcattggaaggcacttgatgacagattggtagaactgtactgtgcattagagcttgccaccccagcaaacccactgatgggacttggtgttttggttactccctgaagtacagtggcagttgtcccgggagtagaagatgttcttggaatgctgtcattattaccttggctcacgttatttagaaaaagaggaagatgccttcttggcctgataatgtgacagccacctgctgtcactcatttttttcagtgctctgaagatgaccagaacctggtcatcaggtctcctttaaaaagaacaaaacaca

SEQ ID NO: 853414 - DNA, 569 bp, Homo sapiens
cactgttaaataaaggagggggagggctccctgcccttggaacctttccttctcattttctggcccacctctagcagsgtggctgctgaatatcaaacctgcatggtgcacactgggcctcactttctaggacttaaataactcagggttcagataccaaagggacagactttattggtgactcttcatagcctagagaaggaagcagggcagagattatctgctttacagatggggaaactgagcatttgtggcttgcgcaagatcacacagctacttagtggtgtcttaggcagatggttttgtaccacatcctcctgagagtggagaagcctgggtaggagctccaggtgcatgccatattcttgcctcaggaatgatcagaactggaggcagcagtgtccaacatcatatacgttgggcttgttggttgtctcgctggacaggatggctcccatacctgttgtgccatcccaatcttagccattccttcctcgggctctgccttcccactggaccataggatgacatgtttcttgtttccctgtttcttggcatgtccagatgat

SEQ ID NO: 853415 - DNA, 573 bp, Homo sapiens
ctcagagttctagaagaaggaattacagaagtaaaaaaaaataagtgttagtgcccaggccagcgrgccataattcacggtgagatgccagacatggtggagaaagtggtcacaatctatatacttatttactcattcagtatttactggatacttaatacagtacagatactttgctagctacttcaggcaaagatgattaagatatgatttctgtcttcaagaaacttgaaatctgatgaggaacacaaacccatagaaagatgattataaataatatggcgaggacattagtagactaatgtaaggggtcttatggtagcatcaaagaagggcccataaacttaccttaaggaataggtaggaatcaaggaagttcaccaagaaggggccaccatgtacaaaacaaacagcagaagatggaggaaggccaatgagaccactttatgtcccaccagtgatgtgttggaacttacaaatgtgccatcagtcctgatcagagttggttcaggatggggtaagttttacctacagcttgaacaaggtgggaaattcagggaccatcatgattat

SEQ ID NO: 853416 - DNA, 549 bp, Homo sapiens
gtgaatctagaacacacagttagtggggtgtgtaatgtgtaaagaggagaaatgaggaatacgatattattcttaggcaatagactatttwtttatttcttttttgagacggagtctcgctctttcgcccaggctggagtgcagtggcgcaatctcagctctttgcaagctccgcctcccgggttcacaccattctcctgcctcagccccccgagcagctgggactacacgcacccaggtgcccgccaccacgcctggctaattttttgtattttttagcagagacggggtttcatcgtgttagccaggatggtctcgatctcctgacctcgtgatccgcaggccttggcctcccaaaatgctgggattacaggcgtgagccactgcgcacagccggcgatagactttttttaatgaagtactttcttttctcacaataaatgtttataaatatatatttaacagataaatatttatctgtatatgatatatgatatgtatttatacaagatatatttatctttttttttttttttctgagacggagtt

SEQ ID NO: 853417 - DNA, 608 bp, Homo sapiens
ttctccatgttggtcaggctggtctggaactcccgaactcaagtgatccgcccacctcggcctcccaaagtgctgggattacagacgtgagccaccgcacsgcgcttggccttttttctttttaagacggggtctcagtctgtcacccaggctggagtggagtgatgtgatctcagctcactgggctggggcagagtgatgtgatctcagctcattgtagcctcaacatcccgggctcaagcgatcctcccgcctcagcctcctgagcagctttaaccacaggctgagccaatgcgcgcgacgggagacaattaactggagtctgtaacacctacttgcgaatgtgtgcattcctcgttagacaactacaggtaagaactgaacttgatatatttcatggtgtcacccgtgggactccaggcgtccattcaggagcatcgtccttaggaaggccagcccgcaggtcgcagctcagtgctcgaatgcagactgggaattgtgggccaactcgcgagccctgggtcggttctggctcagaccgtcttccccgtactgctgtgccgagcggaccgatccaagggaccgcgcaggctcccccggctctccct

SEQ ID NO: 853418 - DNA, 639 bp, Homo sapiens
ttatttctattcttccatgaatgttatcatcgtagattttagcatattatctttttcctatatactgtcccttaagttagttaacttctcttcctgccaagccacrtttgttgtgccaaccgtgcataagcattatttgagttgtaaatgcttgtttttggtttcataccaagtagatcatttcataaacagaaaagcaaaccaggtatgtatgacaaccaaacaaaagtaaaagctgttataattcatagtttttttcattaggaagagcagcattccgtgtcttccacattgtagcaaattctcagatatctgaagattttaattgataaagctaaaatgaccagtttagcctcagagtaacactccagtttcatgatacttttataaatattataacctttaaaacttttttatcagtggtcttaatggcctttgataataataagccagaccaagcacttaatttttttagacatatggatttgggggcaagaaaaatataaagtgaattttaatttcagtgttgtcaaactgtattcagccacagtttgcgtgatgtgagtctctctctgcctatgtcagcaacattaatgtttccaactcaactgttaagctactttttggtgacaaaattgt

SEQ ID NO: 853419 - DNA, 634 bp, Homo sapiens
aaacaatattactatgatgtataagtccgcagaaaaaaagatggtagaagtatctttactaatttaatcktagaccattaacatcttccatgaagataaggtggatatgtgtcagtaaataaatggtcaactattttactttatgtttagacaattgagccccaggaatattttcttctattttaacaggctttcaagttgatataagtcctaaaaatttgattcgtaatttttctagaagttacaaattgtaatatctccttgtgcatactgttagaagctgttgttgttgttttttttttttccaactggtgttcttttctattaccattattcagtaagtagttaccaaattgtagtcaaacactctattgataaagataccattcagagctagggaatagagtattacacaaatagaatttttatgcctgttttgagtcttaacataagtctaaaaaattaaatacatctggcttttggatgaagaaagacttttgaagtctaggcagtaaaatatgccaaatataaactatcacactggcatttttacaggttgtaaactagacttatccaactgaataagctaagtgttcttatgacactttaatacacattactaagcagtaagtta

SEQ ID NO: 853420 - DNA, 634 bp, Homo sapiens
aaacaatattactatgatgtataagtccgcagaaaaaaagatggtagaagtatctttactaatttaatcttagaccattaacatcttccatgaagataaggtggatatgtgtcagtaaataaatggtcaactattttactttatgtttagacaattgagccccaggaatattttcttctattttaacaggctttcaagttgatataagtcctaaaaatttgattcgtaatttttctagaagttacaaattgtaatatctccttgtgcatactgttagaagctgttgttgttgttttttttttttccaactggtgttcttttctattaccattattcagtaagtagttaccaaattgtagtcaaacactctattgataaagataccattcagagctagggaatagagtattacacaaatagaatttttatgcctgttttgagtcttaacataagtctaaaaaattaaatacatctggcttttggatgaagaaagacttttgaagtctaggcagtaaaatatgccaaatataaactatcacactggcatttttacaggttgtaaactagacttatccarctgaataagctaagtgttcttatgacactttaatacacattactaagcagtaagtta

SEQ ID NO: 853421 - DNA, 657 bp, Homo sapiens
cagactcaaggccctccaagtctttcacagagagtttattcaagcygggattccaaatgtagggactactccgcgtggctggcatcagcaaccagaatcccgcagttcacagctagaagctccggggatttatcctcaagcagtatccccgtggataaaagagcaagacttcatagatgtttataatgaggttttcatggaagtgtgagaaaactctttgatacatatttttagtctccatatcttgaatactttttacagtaaaagcctatttctgacattcatcgagttgattcacgagcaattaaatccacaaatgaaaactcttttctgacatacagcatgcatatagataaaggaagactgtatagtcctagggcatagtgtgatctttctgatgtcaggtgtgctgtcctaagatgtggattctgtattagggtatgggctcccagagttcaaatatttttaattggtatgtgcccatcttaaaatcagtgatctatgtcttctgatactattgctgtggactaaatgtttgggttcccctcaaaatccatatgttgaaaccgtaatctccaatgtgatggtatttttagatagggttttagggaggttattaggttatgaaaatggatccttcattattggattagtttc

SEQ ID NO: 853422 - DNA, 555 bp, Homo sapiens
atgcatatataatatatactttggtttttgttctccagggaacccttgctgatacaggggatctctatctggactatagagaaatgacatttaacttagggacttaaaagtggattaactctgtgatccaaatcgcccatattttatgaattctactcttgccaatgatgtttctgtatatgtgtgccagtatagccttcaaagtgctttcatgcactgataccaagtctctttaaaacttagaaaataaaagtagattataaacttcctacaaaagaccatttgaatctgatgatatttttataaaacctagcatccaaaattccatcacgtatctaggaagctgaacaaatagaaatgaaataaaacaaaatcaaaagcacaatatgtgtaatttggcattaagaaacactcacgcgtgcacacacacacacacacacacacacasagagagagagaaactggatgcagggatgcagccatgacagtatcatatctgcataaaagtgccagttaattcaggcagatatagtccaaaacttaacctaattagga

SEQ ID NO: 853423 - DNA, 564 bp, Homo sapiens
ggccatggtattttttttctaatttttgtatatgtctgtttctttacaacattgaaagtttcaataggagtagaactcatgtgatgttcactctcttatcttgcacaatgatttactaagtcgaaggtmcaacaaaaagagcagaaaagttctcaatacattttccctaaagccattaataaggtaaaagaaagaggacagcaacaatgcaagaaggtgcatttgaaatattccaagtaagatatttcggaacatgtaaaacagtggttttgaaaatgcaggcaaggaaaacaaagaaaataacaaaatgtcaaatgttagctaattataggatagaaagtaagtttggtgtctgcatctgttaaagggaaaaaaatccagctatttcttgacttttaattattctagtcagcattttcattaggtttaatttgtcttactgggaattgagaggcaactggctgttggcagaaacaacctataatgtcccagaactattagcaaaaaagatatgcattgctgcatttggttctacttttgtataaaagcatattattattctca

SEQ ID NO: 853424 - DNA, 582 bp, Homo sapiens
ttggtccatttagccattttcctcaaaaagctccatatggatgtttatcatactgattcattcattcattcatttacccaacaaatccaaaccttccttcaatcatasagatgcttctgtatgctagtcaccatgttaggccttgtattagttttcaatttttgctgtaacaaattgccataaactcaatgtcttaaaacaacacaactttacttttttatggttttgtaggttaaaagcatgacctggcttcactggactaaaattaagatgtcagctgtgctgtattcctttttgtaggttacaggggagacctatttccttgcattttcaagttctagaggccactgacattccttagctcaagatctcctttttccgtctataatcaagctagccatggcagattgatttcttttcattttgcatcactctgatttcttctggctccctcttccacttttaaggacccaagtgatgacattgagctcacttggataattcaagataatctccccatctcagaaccctaatgtgattacctcaacaaagcccaaagtaaggtagcatattgacagattc

SEQ ID NO: 853425 - DNA, 379 bp, Homo sapiens
ttaccaaattacaaacgttaaaggtgatatggaattattgcttcaaaatagtgatgattttgagaaaaacacwtgtgaataataatatatcacttctaaatattaatattacagatttttcttatggtattggcagatacactattacagaccaactctcacaatgagaaaaacaagaagagttagggaaaatattttttacaaaatttgactgaaggcattgcagaaaaatcaagacagcctgaacttaagagatataagttctgaagaaaaggaaagctcaagtgtttgctcaacaaccagtgtagcttttccctttggggcatttgctaacccacaagtgtggggtctcaatactgagaagcaaagaaagcagttc

SEQ ID NO: 853426 - DNA, 576 bp, Homo sapiens
aagaaagagaatgaaggaataagatttgaagtaataatgaccaagaaatctaaaacattaacggcaaacactaagccacaaatcaaggacattcaaaaaacaaaaagcaggaaaaataaataaataaatgcrcacacacacacacacacacacacacacacacacacacatacacactcctccaaagcatataaaattcaaactgcagaaaactaaagataggaagaacaacttgaaagtagccagatctaaaacaaaaacaaaaaacttacctatagaggaacaattttaaggataaaagcaggcttatcgaaaatcacacaagcaagaagagggtaaagtgaaatacttaaaatatttaaagaaactaccaaactaaaattctataatcagcaaaattatccttgaagagtgaagaagaaataaagaattttattggcagcagaacttcctgcatgaaatgttaaaagatgttcttcaaacagaaggaaatgctatgtcagaaatgtgtatctagaaaagataggaataaataaataaagataaaataaaatattttgttttactttttcttaa

SEQ ID NO: 853427 - DNA, 576 bp, Homo sapiens
aagaaagagaatgaaggaataagatttgaagtaataatgaccaagaaatctaaaacattaacggcaaacactaagccacaaatcaaggacattcaaaaaacaaaaagcaggaaaaataaataaataaatgcacrcacacacacacacacacacacacacacacacacacatacacactcctccaaagcatataaaattcaaactgcagaaaactaaagataggaagaacaacttgaaagtagccagatctaaaacaaaaacaaaaaacttacctatagaggaacaattttaaggataaaagcaggcttatcgaaaatcacacaagcaagaagagggtaaagtgaaatacttaaaatatttaaagaaactaccaaactaaaattctataatcagcaaaattatccttgaagagtgaagaagaaataaagaattttattggcagcagaacttcctgcatgaaatgttaaaagatgttcttcaaacagaaggaaatgctatgtcagaaatgtgtatctagaaaagataggaataaataaataaagataaaataaaatattttgttttactttttcttaa

SEQ ID NO: 853428 - DNA, 581 bp, Homo sapiens
acttaaaatatttaaagaaactaccaaactaaaattctataatcagcaaaattatccttgaagagtgaagaagaaataaagaattttattggcagcagaacttcctgcatgaaatgttaaaagatgttcttcaaacagaaggaaatgctatgtcagaaatgtgtatctagaaaagataggaataaataaataaagataaaataaaatattttgttttactttttcttaaatgaccaaaaaagtaactatttgtttaaagtaataataacaatttatttggtgattcaagcatatgaataaaagaaatgaatgctagcaacatcataaggaatggaaagaagaatcaaaaatacttattaaaaaataagaataatatgaagtttaatcttagataacaggtgcagtcaaaactacaagtcaataacagaaatttagctgagaaatttccaagtatytgaaaattatataatatacttctaaataccatatgggtcaaataaaaagtctcaagagaacatttacatagtttaaaataaaggaaaattaaaatgcaattattaaacttgagaatgcagtgaaaa

SEQ ID NO: 853429 - DNA, 670 bp, Homo sapiens
atgcagaagattgaaactggatccctacctttcaccagatacaaaaattaactgaggatgaattaaagactcaaatgtacgctctcaaactataaaaatcctaggaaatatccttctcaacactggccttggcaaagaaaatttggctaagtccccaaaaacaattgcagcaaaaacaaaaattgacaagtgggacctaattaaagagctgctgcacagcaaaagaaactaccaatagagtaaacagaaaacctacagaatgtgagaaaatatttgcaaactatgcatccaacaaatgcctaatatccagaatctgtaaggaacttacaacaagcaaaaaacagaatacattaaaaaatgggcaaaggacatgtacagacacttcttaaaagaagacatacaagcggccaacgaacatgaaagaatgcttgtcatcactaatcatcagggaaatgcaaatcaaaaccacaatgctatatcatcttaaaccagttacaatggctattactctacagtcaaaaaacaacatatgctggcgagtctagagaaaaaggaacatttatacactgytggtgagaatgaaaattagttcagccactataaaaagcagtttggagacttttcagagaacttaaaacagaggtaccattcaactcagcagtcccactga

SEQ ID NO: 853430 - DNA, 627 bp, Homo sapiens
atacaaaaattagctgggcatggtgacaggcgtatgtaatcccagctaatcaggagrctgaggcaggagaatcgcttgaacccaggaggcagaagttgcagtgagccgagatgatgctattgcattccaaccagggcaacaagagcaaaactccatctcaaaaaaaaaattacactaaatgtaaatgtaaatggcctgaataccacaaactaaaggacaaatatagactgaaccaataacccaaactcaaccacatgctgtctacaagagtatatttaaaatatactctttaaaattaaatatgcactttaaaattaaaaatacaaataggttgaaattagaaaacatgaaaaaagatatatcatattaatggtaaacataaagaagctgtgtggctatgttaatactttaaaagtagactacagaacagaagctgccaaggattaaaagagtcattgtataatgataaattggataattaatcagtaatggggtttaaggtggacatgaattttggcagacagtattcaacttattatacaatactaaccaagcaaaaaatagagaaaactttaaagtattaggtataacagttgattactccagaaactacaaatgttgaggata

SEQ ID NO: 853431 - DNA, 531 bp, Homo sapiens
aaaaaggacagggtaaactgagcaatggtagtttgtaacccatattctgaaaggttctataggctgctcagtgggatttgacttcatattgcgggatctggccagcagcccrcaatgcaatggggctttttctttgttcccaggcagattggcaggtcaagaaataatagacacacacaagatagtgaaggctgggtccaggggggtcaccgccttctggttccgtgatgccgccaatgcactggatataccagcatttattattaagtttagggagggcaggggtaggttagtgaaggatttagggtcgtttgattatgaggtgagatggtcacatggggatgaagtaattctttaacataacatctgtatgcagaagtacagtatacagagataagaatttacagtatagtgtgtgcatcagtaatttctaacagagccttaaaacagaaacacagtctttccataacctatgattagccagatattaatcagcagttaacagttgcagcaaaagctggttacaaacaa

SEQ ID NO: 853432 - DNA, 626 bp, Homo sapiens
cacatctgtaatcccagcactctgggaggctgagtcaggcagatgacttgaggtcaggagttcaagaccagcctggccaacatggtgaaaccctgtctctactaaaaataccaaattagccaggcattgtggtgcatgcctgtaatcccagctactcgggaggctgaggcaggagaatcaatcacttgaaccaggaggtggaggttgcagtgagccgagattacgtcactgcactgcagcctggaaaacagagtgagactctatctccaaaaaaaaaataaaaagtcaaaaacagtgaaaaacaacagacgttggtgaggctgtggaaaaaaagggaatgagtatacactcctggtgggaatgagattcgttcagtcactgtggaaagcagtttggagatttctcaaagaacttaaaacagaactaccatatgaccctgcaatcctactactgggtatatacccaaagaaaaatagctcattctaccaaaaagaacacatgcattcatatgttcatggcagcgytattcacaatagcaaagacattgaatcaacccacatgctcatctgcagtggattcaataaaaaaaaaatatggaacatatacatcacagaatactatgcagc

SEQ ID NO: 853433 - DNA, 626 bp, Homo sapiens
cacatctgtaatcccagcactctgggaggctgagtcaggcagatgacttgaggtcaggagttcaagaccagcctggccaacatggtgaaaccctgtctctactaaaaataccaaattagccaggcattgtggtgcatgcctgtaatcccagctactcgggaggctgaggcaggagaatcaatcacttgaaccaggaggtggaggttgcagtgagccgagattacgtcactgcactgcagcctggaaaacagagtgagactctatctccaaaaaaaaaataaaaagtcaaaaacagtgaaaaacaacagacgttggtgaggctgtggaaaaaaagggaatgagtatacactcctggtgggaatgagattcgttcagtcactgtggaaagcagtttggagatttctcaaagaacttaaaacagaactaccatatgaccctgcaatcctactactgggtatatacccaaagaaaaatagctcattctaccaaaaagaacacatgcattcatatgttcatggcagcgttattcacaatagcaaagacattgaatcaacccacatgctcatctgcagtggattcaataaaaaaaaaatatggaacatatmcatcacagaatactatgcagc

SEQ ID NO: 853434 - DNA, 519 bp, Homo sapiens
ggaggataaagtggccttgtgaaaatattgatgattgtattgattccttcaaaatcaacctttggctgagaaagacttcactagtccttctctttggatttttccaacagcttgattaagccagccccactcatctaaaactgaggtctccacgagcatggggttttggggtacaggtgagggttggggttctggggctggaggagggggcacatgcacatgggtgtggcagccagcaggtagggtgtggcccagagaaggtggcgacatgaacttccagatctagaagctaaagctactcccatcccaactggaaagtggagacagaagaccatggtggggaaggaggaactgtccacctggaacacaattctgctcagaccttggccacagccattgcttacatactctgctgccaagcccaaggggtcgrccagattaggagtccgataggaacttgaccttttaggggctcaaagattatttctgtcagatggctttctcagagggaaaagaacc

SEQ ID NO: 853435 - DNA, 358 bp, Homo sapiens
ctccagtctaacaaacctcagataagtggtttgatgggtttgaagctacttcgttttttgttttttattttgagacggagtctcacactgttacacccgctggtgtgtagtggcgcgatctcagcttgctgcaacatctgcctcccaggttcaagcaattctcctgcctcagcctctcaagtagctgggattatagatgcccgccaccatgcctgctaattttttgtatatttagaagaaatggggtttcactatcgtggccagtctgttctcaaactcctgacytcatgatccgcccgccttggcctcccaaagtgctgggattacaggtgtgagccaccatgcccggcctgaagct

SEQ ID NO: 853436 - DNA, 372 bp, Homo sapiens
tattctttctttctcttgtctttattctcagcacatctctgcatctgtctacaaacatttgtctcttttgaatgatccagtccacatacggaatgstatcacttctaagtaaatggtctatttggcagatagcagtaattagtgaacctaatgattgtgcttctctttgtagttctaccagtttagctacctttgttagcacacaccttgtacccacctgacaagaggaagatggggaatggggaattggaaaggaagagggagcaacctcactgaatatggtatgccaagcagtgaacatatgtcgcgtcatcacactctgacaataacccacaaaggagaccaatatcccattataacagaagcagaaaa

SEQ ID NO: 853437 - DNA, 616 bp, Homo sapiens
taactaggaagcatttgtaggaaaaaagtgtatgtgatattaatcaagttttttttcttgcatttctattttgtctggagcaaacagtagctcaagtgagcacttaaaaatggcccagaaaacaaatgatcgaagtcttggcttttgagttccaaaataaagtcctaaaatttacagaactgataaaggtcttaaaagccttttatttgcaagtgaaaagttttctctactttaaaatggttgtcttaaaaaaaacgcataaaattgtcattaggaaaattaattttaaaaagatctcaaataataaggagatatattactacaaagtagtctttactaaatttttttaaacattttgtcttttgcaaagtaaattttaagtttttttcctctaggtcatagttattcatttatctttctagtttttctactttattttgccaatagaactttagaaaacaattcatcagaaaaatctactttgctttgatagagatcctagcactctttaaaaaactgcttctataaatacacctgcytcttccaattctgtactattccttgttagatttcccctaactgaaatttctcctcatccctctttgcttaaataaat

SEQ ID NO: 853438 - DNA, 638 bp, Homo sapiens
ttttagaaaaggacttagcaaagagtgacctgaacatttagaacaagttgaacctgacattacaagaaatatccagaagatttatcaagcaaaataatagacaatgcattaaagacacattgaatttcaagtagctacaagcaaacagccttcaaaatatatcagaagactgaagaacaacttcagacagcactgaggagatgcttcagatgaaaattcctatattatgagaagtataaaactgtcttcacaagaaactaaggaggtttggagtgctctgactctaacagcagcataggcggccctctgcctatgcttggcgttgatgtacattgtttccataaaaagaactgactgcgttagaatgaaaggaagctatctgtgcagacctgtctttagaacctttgaagataataaaataatatttgattctatggtgatattctctagatgaagctatggtgaaaaatgttttggaaaggaaaaaaaaaaaaaaacagacaccgtagtagcagttcccaaagtggtgaaatcagtactaagagcaagtctgtagattctagccttgggggcctttcatagtccagccctgyggccagcctcaatacagattccaccaagagctcagaataaagcaa

SEQ ID NO: 853439 - DNA, 625 bp, Homo sapiens
atgcagtcagagagggagagacaaaagctccagtggcaactttaagtccttcctacagtgcactgagaaaagaaatgttttcaccaaatatctaaygtggagataattcactctgtaaagatagtgaagaagcctactaaaaaagattaaaagattaacacgtaaagagctgtacatttccaaaacatttttgaggaagaacataaatatttgggaaagtaacttcattcagaaaaataactcaaaatggatcaccagcctaaatgtaaaatgcaaaactataaattcctagaagagaatcgccaaggagaaaatctagatgaccttggatatgaaaatgaatatcacatcaagatccagtccatgaaagaaagaattgataaactggacttcattaaaattttttttaaaaaatctctgttctgcaaaagacaacatcagtgtagtggaaagaaaagccacagattgggagaagatacttgcaaagggggtatctgattctaaaaaacctgtaatccaaaatatacaaagaattcttaaaactcaacaataagaaaacaaacaatccaactaaaaataccagacatctcacccaagataatacatatggcaaataagcatgtga

SEQ ID NO: 853440 - DNA, 613 bp, Homo sapiens
caacctgctcaggtccccttccacactgtggaggctttgttttttcactctgcaataaatcttgctgctgttcaaaaaaaaaaaaaaatcaagggatttgttatggaagaaggggagaaggcatccaacttctgcagcaatctgtgaagtatgagcaccttgacgtggaacaaagccagcagcgttatctggcagttattcttacaaaaaacctccaattctcttccccacaacaacaggtcctctccccaccacccaaactcccgccctcagcctcacttctgtcaaaatcccaccctgtcttgcaggcccgtgagggtccatttaaactaacagctattgcgatgtcacactgtccaggcacaagacacacaaaaataaaattatttctactctcaagaatctcactggaaagtaagagactgccaaattactgagtgtgaggctgtgcctggctcataagaaatgctcagtgagggccaggcacagcggctcacacctgtaatcccagcactttgggaggccgaggcggtcagatcacaaggtcargagttcaaggccagcctggacaatatggtgaaactttatctctactaaaaatacaaaaattagc

SEQ ID NO: 853441 - DNA, 630 bp, Homo sapiens
ggcactctacaaatgcctatggaataaatgagtgaatgtttaaagaatgaatttaaaaagggaaggaggagagtagaataataaagttagattatggtaagtcaccaaatacaaaagtaatttatgagaaatattttcattaagtataatttataaaagcaaaatcctacttacgtttcacataatccattggcatataaaatatctctcattcagaaatattttttcattctgagattaagacaacctcctgtagtgtttgagaattctggtttcaaagtctcatagctgtgtgatttaggttagtgtatctctaactttaatgtgcgtatgaatacctaagaatattgttatttgcatattctgattttgtgggtgtggggagtagggtgcggcttgagaatctgcgtttctaacaagttcccaggtgatacggatgccgctggttcatggatagctaggctctagggcaaaagacacctatctctgcacctctgtttcsttaacttaaaaacaaaagaataataaccatgttttgctgggttgagaagataaatgaaataatacatgaaaagcactttaaacaatatctaccatctagaaaacactctttacgtgttatctattatt

SEQ ID NO: 853442 - DNA, 621 bp, Homo sapiens
ccaagagaaaaaataaattttatctaacctggaattcaatagccagccaaactttctcttactctgtcttacatgttcagcaaggtctaaaaaaagactgatctaccataaatctttctcaggaacctccatcaaagtgaaaaaaaggcagggtatggtggctcatacctgtaatcccagcactttgggaggctgaggtgggtggatcacttgaggtcaggagttcaagaccagcctgggcaacatggtgaaaccctgtctctactaaaatacaaaaaaattagctgggtgtggtggcacatgcctgtaatcccagctactcgggaggctgaggtggaagaatcacttgaacatgggagacagaggttgcagtgagctgagatcatgccattgcactccagcctgggagacagagtgagactctgtctctcaaaaaaaaaaaaaagccacaaataaatcaaaaaagaagaagaagatatcaagtccaggaaacagaaartctaacatggttcaaaggcatgatttcttgggattagagtgaagggaaatcccaaggtcatggcagtgtagtgaaccttggagagtgagcagcccagggacaaggctggttgaagcctcctg

SEQ ID NO: 853443 - DNA, 621 bp, Homo sapiens
ttgaggccagcctgggcaacatagtgagaccccatcgctacaaaaaatacaaaaattatccaggtgtgatggcatgtgcctgtagtcccaactacttgggaggctgaggtgggatctcactcaaatgtcaggatggggggattgcgtgaacccaggaggctgaggctgcagtgagccaagattgcgtcactgcactccagcctgggtgacagaccaagaccctgtctcaaaaacagcaaaaacaaaaacaaaaaaacccttgaccatactggcaccctcatcccagactttcagctcccaaaatggtgagaaagaagtttctgttgcttaagcctcccaggctgtggaatcttttgcagcaggctgagctggctaaaatgcatgtaggagtcccccttgcaatttccctttacattgcttcagttacccacaatcaactgtgctccaaaaaataggtgagtacagaataataatatattttgagagagagagagagascacatacacatcacttttattacagtgtattattataattgttgtatcttattagttattgctataatctcttactgtgcctaatttataaattatactttacagtgactatgtatgtgtagg

SEQ ID NO: 853444 - DNA, 575 bp, Homo sapiens
cgtgcaagtggggagccaccctccacagaaggagccctgtgactcacgtggagctcgggggggcccttgaaggacttatggtttaacaaggcccaggggtccatgaaaacctctgcagaggtcagccatcctgagcctcccccttagctgtccctgttgtttccagccttgtgaacctatggtgtcacttcactgcctctctgagccttagtttcctcagccatcaaattgtgctgttgctccctgtccctttcctgtacatgcccaggagatgaacatgagatgtacagggaataaacaggaaatgcacatgagatgcatatgagatcaatgtctttgaaagcgcaaattacaaacttatggcaacagtagatgttaagatgttattaatcccagaaagctaacaggctggatgcacatcaatggccctgaagcagtttgagaatggagagagtccggctcagctaccgagccttactccatcacgaagcccagaagggcaggtaaacaacctcccctcgagggatgcagagkgccccatgagctcgctatatccccttcctttcaggatttgg

SEQ ID NO: 853445 - DNA, 602 bp, Homo sapiens
ttatttttccacttaatactcagctccatctaaggtagtatctgttttatgtatttatagcaccatgtttatcttgtttagtgtccatctcaaygtacgtaaaatatctaactatcttacataatttttgtgaggatcaaatgaatgagatctttgtaaaatctaaagacggaaatttgttattgcagctgctggtatactggggaaacctaacaaaaatcaagtcagccaatggactttccccctgattttttctttaaaaaattaggaagtaactaaactcctttcaaatggattatttaaaggagattcagacttcatttattgttcttctggattctcccaggtttcagtttcacaagtataagactcctgtgttcagactctttctgggaaccagagtatgatccctgtagctcctttccttttccaaatcacattctagacaagaaattggctccaaattattctatgcaattctagaatcatttttctatggcttcaaaaaccctattcagtgctcataaacttggtctatggatatttaaactccacaaggaaaattgatgcaaattgactgtgtctgtttatgtaatatgtcc

SEQ ID NO: 853446 - DNA, 631 bp, Homo sapiens
ggcttaaagagatctaaagtggtttctaaatatcrgcattcttgatgcctcaaatcgtttaaactttcagggtgaatcttaaagtttttgaaaattaaaaaaattatacatatatattttgggttgatacataatgttttgcatatttgatggttacatgtaatttaaatgcaacgtactctagtccacctaaaactccatggatccaacacctacggattcttgaacgtgtgtttctaagttgtccattgttcaagtttcccgtttccatttaattcttgatccatcagatcttgtctctagctacaggtcaccgctttccacctcaccccaccctaaatgtcccagctcccttattcattaattccataaaactcctgttaatacagggctttctcgaatatacggatataagttctgaaggttcgagggtaatagcaagatcacattccacttgacagagaaaagatttttaaatgaatgttagacaatgctgtttttaaaaacaccaaggccatttctgttgctgggaatttcttactggctgttcactcccaccacgtgttataggcacctgatattgcctccagcctgttagtctctggaactacttatagcttcacctcactcc

SEQ ID NO: 853447 - DNA, 542 bp, Homo sapiens
ctgagtggatgcatggaagagagcctcccacggagttggaacacccttcttgcactgtaaagcaagtaaataacatttttyggttatttgtttagcctaccctaattaatatacctccaaattggccttggctctctctcttacctctaaaagccagtgatcttcttaaagactgactctggtcacattgtagctgtagctagaactttcagcgccttccatcacactcacaatggcccacatggccctatacagcactgcccccgctttcctcactggacccctctcatctctcttccctggctcactgctctccagtcactactgggcctctgccattcttgatgagttgccagtccagttcccacctggacttttttacatgccaggtcctctacctggaactcttcttctacttctctgcatggctcactgcttcatgcaattcagttctccattaaaatatcatcttcccagtgagatcttttctaataaacctacctgaaacagtgcatcttcctccccaccctggtctctcttta

SEQ ID NO: 853448 - DNA, 639 bp, Homo sapiens
gactcttgtctcaaaaacaaaaacaaaaaaaacaaaaatgaaaaacaaatcctcatatatttggagcttatcttgaggcagaatgtgaggtatggacaaaacttttgttttttcagatggctatccagtttccccaacaccatttgttgaaaagttcagcttttcttgatcacacttaccattcctttatcataatcacacactaattaagttccatgggtctatccctagacctgctcatctgttccactagtgtgactgttcataagccagaaccaaaatgtttcaattcataagcctttataatatcctttattgttggtaaggctaatcttcctcattgctttttctgcattcttctcgtttgtcctgctggaccactttccatataaatttcagaattagcttatctagaattagagggaggagagttctctgaagtgtttatgttaacttatgaacaatttgatattatttaccatgtttactcttttcacctaggaagaaaaaagatacgycttcccatttcacaaacctttgtatcctccgtagtgctttgaatgatttcctcatatgggattttctacatcttcttaaattcattcctgggcttgtcttctcattgatattgtgaaaaga

SEQ ID NO: 853449 - DNA, 612 bp, Homo sapiens
ttgctgggtcatatgatagayggacaggcatacctcattttattgcacttcactttactacactttgcaaattacagtgttttttttttaattgaaggtttatggcaaccctgtgttgagcgtctgtcagcatcatgtttccagcagcgtgcactcactttctatctctgtgtcatattttgataattctttcaatatttcagaccttttcagtattacctgttgtggtgatttgtgatcggtgatctttgatgttactattgtaattgttttggggcaccacaaactgcacccacataagagagtgaacttaatcgataagtgttgtgtgtgttccaactgctccaccaactggctgttccctcatttctctgcctctactgtgaccccatttcctgagacactacaatattgaaattaagccagttaaccctgcagtggcctctaagtgtgcaagtgaaaggaaaatttgcacacctctcactttaagtcaaaagctagaaatgattaagcttagtgaggaagatacgttgaaagccaagagaggctgaaaagctaggtctcttgtgccagtaagccaagttgtgaatgcaaaggaaaaagttcttaaag

SEQ ID NO: 853450 - DNA, 446 bp, Homo sapiens
caattaatctaaactcaggcatgaacagagtcttccagtgaccacaaacgactacagcagtgattacggttctcagctgggtggggtgggtggggagagagaggcatccaaagctaggagtcactgtgtgcaatgaatctggacctggtgagcaaatgttatccataaacacaataaaaaggcagaaaaatcaagagtttagggaaaaatccaagatccagagtccacggggcatggctcctgaatggctgagaacaatgggtgcgcccaggatctagaaccaaaggctaaggccaacggcatgtgctcaaaaccaaaagggaggatcccagctcctcttccacctcctgtatcagacatccacagatcaagaaggggcctcgaraaatactcagggatctcaattcagccacatgggactgatgggccaggggaccccttgtgtc

SEQ ID NO: 853451 - DNA, 520 bp, Homo sapiens
aggacctgtctggggaatgcaggagtgtttcccaggatcctcatctcgaaattcaggatgggtcccaacttcctgtctctgcttgtgttccacttcctatcgtggcttgctacaggccgactgttcctcagtaataacagtgactctcagcaacaaaaagactaatactgtagagagtgccatcagcttccacaggagctctctgctctgctcctcacggcagccccgtgaggcaggccgggagggggccccactgagggctgaggagatggaggctgagagaagaaacctgacggcccagtctcacagccagggcttcccccagcacttgtaagatctgtgcttttccctgccccacactcacctaaacattacttgccctttttgcccctaaatttaagtctttcaggtttcaaatyctaacactctggactttgcataactgcgaatacatctgccttacccatgaatgcctttgtgatgacagaaaccttattcctctttcacgcgtgccttcatt

SEQ ID NO: 853452 - DNA, 577 bp, Homo sapiens
actaatgctttaggcatccttgttccttgattgtttggatccagcccttgttagaaggctttctgtgggcagtggtccccatcacccctggccagcagcaggcatgccttaggcctccctcttgttctgagattgattctgatgaagaaaaactgactgaccagaatcccagacccctggctctgagcccctaccctgatcccaaaacccagctgtctctactggattattctcatttgctggctttggcttggggatcagagaaaggagccatgggctgaagaggccgtgggacctggtcaagtttgcagaaggaagtgcgagcgagcgctgcccagcttcgacccccgagtctgctcccactctgtgactctgtgagcaggagggatgggctggcccgactccctggctgggcgttccgggtatggatgcctgccacatgcagtcaccagctggggagggcccttccacacttctgagcctcgcccgcctcagccctgagcagctgggagttccgaggaagcgatgggtgaccgctgaggggtgggcygacacatcctgcctgtgcccccccgct

SEQ ID NO: 853453 - DNA, 589 bp, Homo sapiens
atcatctccactactgataaaaactaaaatggagcttgtgacttgacatatggccttagttggggactctaatatgtaccatcaaattcaaacttcccccaagaatacgggggatcccccacataygcacagggcagccgctggggctcctgaggaccagcatctccaaaaagagacaagcccagagaagcggagctgtattcagtagaaaaggtgatcacagtgacgagcacaaggtacagagatgactgctcgggggaggaagactccacaaaagccgtcccagaggtggacacccacatgttggactttgaaatgtgaacaggagttcaccaacaggattagaagaagaatggtccaggcacagagatggtatgttagttcgtttggtgtcactgtaaagacatagctgaggctgggtaatttataaagaggtttaattggctcagggttttgcaggctgtacaagcatagtgccagcatctgctcagcttctggtgagacctcgggtagcttttacccatggcagaaggtagagtgggatcaggcatgtcacatagtgaggggggagcaagagagagaagggaga

SEQ ID NO: 853454 - DNA, 631 bp, Homo sapiens
tcagtagataaagtgttttttccccatctggcttctttcaggattttgtccttatctgtgatttttctgtagtttgaatataagatgcctaggtgtagatgttttgatattgatcttggtgttctatgagcttcctggatgcgtggtttggtgtctgacatcagtttggagaaattctcagtcattattgtatcaagtattctgttcctttctctcttcttctgccatccccattatacatgtgaataccttttgcagttgtcccacagttcttggatattttgttctgttttttttttttttttttccttcccgctttttgttctctttgcttttcagttttgggggtttctattgaggtatcatcaagcacagagacttttcttcagctctgtccagtttactaatgagcccatcaaagttgttcttcacttctgtttctgttgttttgttgtttttgacctcgaactttcctttctggttctttcttagactttccatctctctgcttgcctgctatcaactttgtctattagagctcttaggatgtcctcatagttgttttaagttcctgttctgataattccaacatmcctgccatgtctggaactggtgcttgctctgtctcttc

SEQ ID NO: 853455 - DNA, 608 bp, Homo sapiens
agcggccgcagaaggagcacagactccctctgtgtgcacagcatttgggacgtgagtctgttgtggctgtttttggaaaatacagtctgacacaagatattttaaacccacagaatatttgtccttcctctgttgttcaactgctgttataacttgttttcacttttattttataatatttaagttttgaagtagccaaaggaacacattttataataatgtgtcattttagactagtgaataatttttaaaaatctgtatttctgttaccttttattccaggaggtagagaagtattttctggcatgtcaagaattaactgccattgatttaaatggcataatgaaaaagcagctcactacaacactgaaaataaattattttaaacattctaactttatacttttctatttagagaagaaccaaagatgatacctggaaagcagatgacctcagaaaacatctctgggtaattattgtaaagatttggattgggatctgtgcaggactcgtgtggttttcttggacctgctttacctggtacacaacactgtataactttggttaygtgtgcctcatttcagaagtactttgaactcagaggtgaa

SEQ ID NO: 853456 - DNA, 631 bp, Homo sapiens
caaaaagacaaaaggtaagtgttagagaggatgtggagaaaagggaacacactgttggtgggaatgtaaattagtatagccattatggaaaacagtaaggaggggcctcaaaaaatgaaaaaaatagaactaccatatgattctgtaatcccactactgagtatatatccaaagaaaatgaaatcagtatgtcaaagagagaagtgcacataaacagcagtattcacatagccaagatatggaatcagcctaggggtctatcagcagatgaaggggcaaagaaaatatggtttatatacatgatggaatgctattcacctatcaaaaagcaaaattctgttctttgcaataacatggatgaacctagaggacactgtgttaagtgaaataagcaaagcacagaaagataaatgctgcatgatctcacccaatatgtaaaacctaaaaagtatatcccatagaagtagagaatagaatggtgcttaccagcggctggggtggtttgaggaaatgacaggatggaagaatgttrgtcaaaggatatatagttaggaggagtaagttcaaggaatctgttgtacagcatagtggctatggttaatgatgatatgttcttgaaaaatacaaagag

SEQ ID NO: 853457 - DNA, 631 bp, Homo sapiens
caaaaagacaaaaggtaagtgttagagaggatgtggagaaaagggaacacactgttggtgggaatgtaaattagtatagccattatggaaaacagtaaggaggggcctcaaaaaatgaaaaaaatagaactaccatatgattctgtaatcccactactgagtatatatccaaagaaaatgaaatcagtatgtcaaagagagaagtgcacataaacagcagtattcacatagccaagatatggaatcagcctaggggtctatcagcagatgaaggggcaaagaaaatatggtttatatacatgatggaatgctattcacctatcaaaaagcaaaattctgttctttgcaataacatggatgaacctagaggacactgtgttaagtgaaataagcaaagcacagaaagataaatgctgcatgatctcacccaatatgtaaaacctaaaaagtatatcccatagaagtagagaatagaatggtgcttaccagcggctggggtggtttgaggaaatgacaggatggaagaatgttagtcaaaggatatatagttaggaggagtaagttcaagraatctgttgtacagcatagtggctatggttaatgatgatatgttcttgaaaaatacaaagag

SEQ ID NO: 853458 - DNA, 569 bp, Homo sapiens; identical to SEQ ID NO: 849488

SEQ ID NO: 853459 - DNA, 682 bp, Homo sapiens
gcataattggcatagacatacttaacaactggcagaacccccacattggctccctgactgtagggyaagggtcataatggtgggaaaggccaaatggaaaccattagagctgactctacctagaaaaatagtaaatcaaaactaatattgcatccctggagggactgctgaaattagtgccaccatcaaggacttgaaagatgcagggttggtgattcctaccacatccctgttcaactctcttatttggcctgtgcagaagacagatggatcttagagaacgacagtggattattgtaagtttaacaaagtggtgactccaattgcaactgcagtaccagatgtggtttcattgcttgagcaaattaacacatctcctggtacttggtatgcagtcattgatttggcaaatgcctttttctccactcctgtccataagtcccaccagaagcaatttgccttcagctggcaaggccagcaatatacctttattttcctacctcaggggtatatcaactctccgtctttgtgtcataatcctatttggagagaccctgatcacttcccttctgcaagatatcacactggtctgttacattgaggacattatgctgattgaatccagtaatcaagaagtagcaaacacactggacttattggtgagagatttgcctgccagagg

SEQ ID NO: 853460 - DNA, 682 bp, Homo sapiens
gcataattggcatagacatacttaacaactggcagaacccccacattggctccctgactgtagggcragggtcataatggtgggaaaggccaaatggaaaccattagagctgactctacctagaaaaatagtaaatcaaaactaatattgcatccctggagggactgctgaaattagtgccaccatcaaggacttgaaagatgcagggttggtgattcctaccacatccctgttcaactctcttatttggcctgtgcagaagacagatggatcttagagaacgacagtggattattgtaagtttaacaaagtggtgactccaattgcaactgcagtaccagatgtggtttcattgcttgagcaaattaacacatctcctggtacttggtatgcagtcattgatttggcaaatgcctttttctccactcctgtccataagtcccaccagaagcaatttgccttcagctggcaaggccagcaatatacctttattttcctacctcaggggtatatcaactctccgtctttgtgtcataatcctatttggagagaccctgatcacttcccttctgcaagatatcacactggtctgttacattgaggacattatgctgattgaatccagtaatcaagaagtagcaaacacactggacttattggtgagagatttgcctgccagagg

SEQ ID NO: 853461 - DNA, 704 bp, Homo sapiens
ggggcaagtatcaccacccataggatccgcatacmcagagggccccccagggaaggggaagagttctactacaatcgtattgctgtaatgtgtaatttaagtaacaaaggtgctgtgtttcactgggggcactgttattgatttggaatatgtgctgacaactgtctggtgggagaaaccccagagtgtcattggggaagccatttaaggcccccaaacaaagggggggccataaggagtccagctaccagtatgacaggttccccgtatacgctgttccaggcatatcaggtaggatacaaaagcttttgactcattgcaagggtggatttcgccttttgttgaatttgggcaagaatagactgtttagtttggttaaaagaagttcaggttgtactacaggtgctattctcccaaccccattggtagcgacatagccacttggaaatattagcagagataatattctaaggtaatccattccctgcagcctctggcaactcgacacataccagcactgactgcggttgagctcttttgcagcagtggctaccaggtaataaattcattctaggcctcagacacaaagacacaagacacatcagtagataggtcattccctgtaatagcaaaagtggaggggaacatgatattgttttttcatatttaggaaattgtactatgccttcattttctgctcccat

SEQ ID NO: 853462 - DNA, 480 bp, Homo sapiens
catcttgatccacctttttttttttttttaagtggkgaggtaaacgccaccctatggtcttttgaggaaacaaatgcattggtgccaggtgagaggggctgcaccaagtcactgctgcacgaggaaaccaccttgtgggagaccagccccaggagacagcagctgcccacgcatgtacctgtgtgtaccctccctggtctcccttcactaggtgcctttcccagccttagccctgctgcattgacagcatcggctgcagggcaccgtccattccgctgacccctggctccttgccctggggatccagcttttccctttgtgagatcagaatcctatgggatttttgtgaaacaaacaaataaacaaacaaacaaaacaaaccattataagaaaccaggagaaaataaagggaagatatgcaaaccacaaaagtaataaaacaggtgagctgtaggtgcacagatttctgaattttcagtg

SEQ ID NO: 853463 - DNA, 580 bp, Homo sapiens
ccatgaccaagacagggtgttgttgtttgttatttgttgttattcatataaatcaagcaacatgcttgcaacttcctgatgttaactcccactttcatctagatttctctgactcccctcttaggagtttttcatgatagtgtgtttgctgatgacaccccaggcaatgccatgcgaaaagccaaagtgtactgttacaactgaaaagtttcctctgtttttatagcaaggggctggactgacaccagaaagaagagtcccttatccaactgtcttctaggatagaaaagtccattgtgataattcccttcaaaggagtcactctcagacacacaagttccatggttgctgggagtaatcccacctatagcaccatctcatgagtagcaactgttcaccctttgggggtgggattagttgtgggaaaaaaatgcaaaggcttcccttgctgagttgggtgaaagagtctggcagtcaggcagtgggcaagaatgaggtgtgactggtttttgtattcagccctcaagtctatccccctgatatggtttgsttgtgtccccacccaaatctcatcttgaat

SEQ ID NO: 853464 - DNA, 610 bp, Homo sapiens
gagatcaaagacaagtgtaccagaaagctctagagatcagatgaggcatcaacatacattattgagacctaccctgtgacacagtcatgttccgctttaatgcagaggttccttcctcaggtccccagtgcctggccagatgctcagtttgagagaagatgagccagtaagaggggctcatcttgcacaaattgggcagccttcaaccttctgagggcagaagcacctcccagcttccagctgggaacagggtcaggagcctgcagagcacaggcccctggggaagcagcaaatttcctctgtggaattgtcgggaccaatttttaggagtcacctgagggctggcagcacttccttcctatcagtcatgctcttcacctctccagacaaatgaaagtcgcccctggacatgcccagaggatgagatcccatgaaggagatgcaagggcctgcctgctgggcttacctcacaatattcctcygacagggcagcccctgccctgagcacacccctcccaggaggaaggagcagcttccctgctgcttcccagctcattcctccctggggcagctcactgctcagcctctggtccagcctggggttcccctg

SEQ ID NO: 853465 - DNA, 612 bp, Homo sapiens
tgctaaaatggcaatggtaaccctgctaacctcattctgttaattttaaaaggtcaatttttgatcagaaaatgatgggctgtatgctagcattttgtatattatctagaattctctgatttcttgccttttctatgcaaacttctgagtatctctgcaataattttgtaataacgtgatttttattaactcttttcaaacactttagaaatgctcatttagttatgttatggtgaagttcatttataacaaatagtattgttaaatttattaatgtaaataagctaataacaatatcaatgatggcagtttataaagggaaatgtttcagctgtttgtagaagaaaagccatttagataggagtcaaggtatataggtacttgtctctactgtaagacttactctatgagtaagctggggaaaatcattcaaccactctgcctctcagtttcctcagatgtaaaatgagaatgctagtacctgtgccatgaacttcggagtgctgttttgagcatcaaatgaaacaatggatttgaaatccttttggaagcataaaggcactccacatgccaaatgttktattactcttgtatctaaagcgttcagaaatt

SEQ ID NO: 853466 - DNA, 632 bp, Homo sapiens
gttgtattactcttgtatctaaagcgttcagaaattatcaatttttcattaatccaaactgggcctcttaacaatttctactatgcacagatgtatttaagaagaaattagatggaattatatattggattgaagtcactgttgcatttttaggttgagatcacttcctgtgggagagatgggggaggatatggggttggcggtgcttgtagaattgcaagcattggccagacgtcgtggctcacacctgtaatcccagcaacttgggaggctgaggcaggtggatcatgaggtcagcagttcaagaccagcctggccaacatggagaaaccccgtctctactaaaaatacaaaaattagcagggcgtggtggtggatgcctgtaatcccagctacttgggaggctgaggcagagaattgcttgaacccgggaggcggaggttgcagtgagctgagatcatgccactgcactccagcctgggtgacagagcgagactctgtctcaaaaaaaaaaaaaaaattgcaggcattaactgcatgtggmaaactgagtcatcactagacaaccattgcattatccaggaactctattagtaactattatctaaaagcccaccaaaaaacagctagag

SEQ ID NO: 853467 - DNA, 544 bp, Homo sapiens
ccaatttatctaatcatgtctgaaattttactttgatagtaccttctgggaacaaattatcaattttgattgagcactatatatgaataaaatgtattacagattcaatgctttcaaatttttcattcaatattacaaagtgccaccaaaaaataaaaatgttcctgtatacaactgtctagatttaaccgtgactgaaagtaatatgtacaaagcataaatgaataggtctgcttctaagtgtccattatctatgatggtgatcataatgatactttaacttagtaaaatggaaatatgtcaaagtatgctgtaaatatcatatatcacgtatatacaatgacttgaaaaatgtggagatatacaaagtttaacgtagcactcagtatgtgtgatttattaaatgatatgatgctgatgttgaaatgtttatttttaaaaccatawcttttctaacaaaggatcgatgtcaaaatgtaatattaagtataatgacacacagtaaaattgattagcttgcaataactaatcttcataaaactct

SEQ ID NO: 853468 - DNA, 575 bp, Homo sapiens
atctataatcaattttggaagaggtgacatcttgacaatattgagtcttcctaaccatgaacatgcaacatatttctgtttatttagttctttgrtttctttcatctgagttttgtagtttccttcatataattctatttatattttgatagatttttacctatttttttcttttacctattttcttttcttcaaccccactataatctcttattagttacagtttttttttgttgttgactcttgaattgtatacatagacaatcatgtctgcaaacaaagacaactgaatttttttttcttctcagtctatatacccttttttttgtttgttttattgcattagctaggacttccagtatgacattgaaaaagagtggtgagagaagatatttttgccttttgacaatctaggtgtttggtggatattctgcatccagttgaagaagttcccctctagtcctagtttgcttacatctgtgggtttttaatatggagtatttgattatagattccatggattatagattacagattatagattccatggatgtgcttgaaatatttgttagctc

SEQ ID NO: 853469 - DNA, 541 bp, Homo sapiens
aatatctttggaaggaaatgaaggacttggcaagtaaatatgctctgtgtgtgaaatatccattcctgctgctctgtgcaagtgaagtcttggcaaacacttttgaatgatgaraatggcagcttaaggttttctttaaagtttaattgtatactaagttttttttttttttcttaacctggctacaaactgtgattagatgtcagttgaatgcatgccttcagtgaatcttaccccatagtcttttccccattttccccgttgcaacaccacctttcttttacatggataagtgtcttcttaatttgtcattttaccttgcaggtgcatcggatgctcatgttcaccacaactgtcctcacctgcattgcttttgttatgccgtttatatacaggggaggctggagtagggtaagtatatcttaaatagggtttttttttataaatccattttatgtcaaaacagattgctgttttattttcaaatgatgggtaaaaagatatttcagcattgatccctctttctttcccttttgaatca

SEQ ID NO: 853470 - DNA, 610 bp, Homo sapiens
acccatggtttgtaccctggtacaaaatacatactcagcaattttcagaactgtcaaggtcatccaaatacgaggaaagtctgaaaaagagtcacagccaagcagagcaaaaggagacatgacaactaaaagtaccatggttttctttttgggattttggaacagaaaaaggacattagctaaagactaagggaatctgaataaagtttgagactttagttaataatattgtatcactactggattgttaattgtaacagatgtacaatgctaatgtaagaagttaaaataggaaaatctgggtacagggtatgtggtaattttgtgctgtcttctcaatttttctgttaatctaaaactgtttttaaagtgtattaaaaaaacaagataagattggaggacctaacccgactcgattccaatatttattataaaactacaatattaaccagtataaataaagtgtgcagtattcatgagagatatgcagatgaatggaatagagcagagactccatatgtaggatctcacttctaggaccaactaattaacaracgggtccaggtaattcaatgtgaaaaataatagtgtttcaacaaatagagctgga

SEQ ID NO: 853471 - DNA, 698 bp, Homo sapiens
  misc_feature 3: n = A,T,C or G
canagagatgagttgaggagcamggatcctgtaggggaagaacctgaactctgatcctggcttttcagttcaccagctgggtggtcctggctgagttcccatatcccacacaaacggtacacagacctcaaccccctgccacccctgcctcctgttaggtgtggtgggccctggatctgtgtgctgagcacctttgctggcagccttgtggagctctgagcttgtcaaagccccatttgaaacttcaggtctgcatggctctcattctcaacgtgccaagcttgattcatacctgaaggacctccacttcaaatttggatggaaggtcacattgtgggacttcctgagagctaaataatactccccagaaggcagggggcaagtcttcattcttaggaagcaggagccagacacatcagttcctgctgcttccccccttccatggagtggggcatgactggcaacaaatgggtatatggcatctttttggggagtgatgaaatattcttaagtcagatgtattgatgggtgcacagctctgaatgtattaaaactactgaactgtacacttttaatgaatgaattttatagtatgtgaattacatcttaaagctgtttaaaaaacagtgacataaatgacttatgttttaaagtacacatatatgaacacgaatatatggtaaaatatatgtatactg

SEQ ID NO: 853472 - DNA, 525 bp, Homo sapiens
aaaaaaaaaagcttttgatggggctttgcctttactttttctctgggaaatacttgaacagtgacccaaactaattcttaagaatttggaaaagatcaggaaatagaaaggaagttcatattgattggttttctactgttttaagcattatatgtgccatgtgccagttttttcacatttattatctaattttactcttcaaaaccatgttattgttaccacttttcagataaagaaagtacagcttcaaaaatctaagccatttgtccgatgcagaacagcatttgacaactatggaggtgactctgatgacctggctctacctcagcatggggccctgtgtcattgataagtgtggtattagccgcctgattcgctaacccacagttcagagcaggggtgggccaggcagatattagaacagaaatgaggaccaagacttgcttaaataagcaggcagcaagcycggtgagcagacaggatccaggtgacgcggtgcagtaatgtggggttgtggtcagcacc

SEQ ID NO: 853473 - DNA, 651 bp, Homo sapiens
caacccaaatgtccatcagtgatatactggataaagaaaatgtggcacatgtacaccacggaatactatgcagccataaagaatgagttcatgtcctttacaggaacatggrtgaagctggaaaccatcattctcagcaaactaacacaggaacagaaaaccaaatgccacatgttctcactcataagtgggagttgaacaatgagaatacatggacacaggcaggggaacatcacacaccagggtctgtctgggggttgaggggctaggggagggatagcattaggagaaatacctaatgtaggtgacgggttgatgggtgcagcaaaccaccatggcacgtgtacatctatgtaacaaacctgcacattctgcactaccccagaaattaaagtataattaaaaaaaaaagtggggggtggtaatagaccttgttacctaaagattgttatgatggttaaattaaaactcctcacccctgtcaagctggaatgtagcccctgttaacttgagatcccccttctttggctagctaacttctgctctcccaacagaatcctatctttcatgtctcatctcccaggacacccccctccccaccgggcctgggaaggattaggagggccctgtccagtgaattccttggccttc

SEQ ID NO: 853474 - DNA, 600 bp, Homo sapiens
ccgttgtagccacactgcccctcacctgctctgcctcagtcacactggcttccctgggtcctgggaatacccaggaatcccagagcactttctttctgttcccccttcttggaaagctctgtatgtttctcattttgcagactgtggcttaaatgtcaccccggagaggccttctctatttgaccatcagtgttcgctactcattcccttcagagcatgtataatcacttgtagttgcatatttatttgtttatcattggtatcacccacagattgtaacctacacatggggagggagtacatacttatgtatatttagtgccttgcacacagtaggagctcaaaaacacatgtggaatggatgaatgggcttatgaatgatcggagactgaacaagaaactgagaatttgaaagaagaaagcccagaccttatatgacttcaggacagtataacaaaagagagagattaggatatttgggccaaacttgatggatgactygggatgagttcttacaccttatattgaaaacaaactaaccaaacaaacccgataaagatggccacagtatttgcatccctcataggattgttatctggt

SEQ ID NO: 853475 - DNA, 524 bp, Homo sapiens
atattggcagacaattagttgtttctgtcctcatacttatttcattstaaaatgtaagatgtccagatacctcatggagatggcttggcaaactactaaagagagttttcgaaagcagaaggtcctgtcaggagccaagactaacattcataaggacttctttaatatgtaaggctaatctataggtgacaaaagaaaggaaaaatatgaagaccagaatgacaacataagagcaaagaaacaacctaaattgttgtagtttggaaaggtaaactcacatactcagtctacaaaactcagaaatgactgctcagaatcattatgtaaataaatggtgtggtcaaggtgagaatgagtaagaacctggcagaaagctcagttaccaaccgcattaagaaaaggcacaatattcaaagagaaagacacttttctctacgttttctcagtgctgagcttccattaccaggtcatataggtattgggagatttccctattgtgcagaatgttggaaagaagggttgca

SEQ ID NO: 853476 - DNA, 651 bp, Homo sapiens
taatgtcatattcttattttgacattttccaatcttactatagaataatttgcaggacattsatctatgatgttgcctgaagttagagctctattttcaaagtacagattcctgaaataagtattgtacaataatttcctttctgcacataaatcgtacatacttcgtggaataattactcatttgtctatacataccatgtgtttctgaaattatctgtaaatacaagatttatatgtacaaacacattaaaatgagatgtttaaataaaagagatttctgggtttggagcattttcttggacagggaggtaattggtacaaatttaagttaaattgctttatttttattgtaattactagaagttttaatcaaaactgacagtaatttaagcacttgggaacaaagtacacttaaatcttcaactaattttaatgtctaaagctgcttctctcaatagctctgaaatcagtttggcccttgattgccagaaactgcacaaacaaaatggaaactcttaatgattcgtaccgtgtggaatgaatactgactgaagatggcaacaaagaagctgaggaagagatgtagtgtgatctgcaaatcatacttaaagcaagtcagagaagttaaaaaaagtcctctcttattact

SEQ ID NO: 853477 - DNA, 616 bp, Homo sapiens
tataggtatcacggattaactcttccccgcgtcacctattatcacatttattttctcccctcatgtactggcrtgggtttttcttggcttatcaacaggctatttcaaaagactgtctcttaatggtttattcgaatccagaatacagtttcccacatatatacaacattgtatgggttggttaggtttccaatttatttaactcatgatggggctggttcattagtccctagattgacaaatatttattcagtggctgttaagtgccaggtactgccttagataccgagaacatcaaaatgaataagccagacaagggtcttgccctcctgaatctagctgttgtatatggctgataatgcaaggccctaggactgggttgctggaatatggctgtagatgctacacaaatatgtgtagggcactacatgaccctaatctccatatcaggggttggcaaacaacagccagtgggccaaaagcagcctgatgcccgtttttgtatgacttgcaagctaagaattatgtttacatttctaaatagttgaaaaaaatttgaaggaaggatattttgtacacataaaattatatgagccttgacttttcatgtcataga

SEQ ID NO: 853478 - DNA, 601 bp, Homo sapiens
ttcttagacagaaacttggttaacccctgggtttgtgggtgagggtcctgcacgaaccccccttccctcctgtcagctgcaagtgcagcggctgggctgctggtttacattgctgcctgggtcatggtgcccackcagttcgctctctcccatggctatgtgcagtccacaaacctggaccgtttggcctcagcctctctccatccttatcccctcctgcctcccgggtcttcgcgtgcctggtccagtctggacacaccctggccctcaatctgaggtcatggctctgagtctcatggctgactgcctgagactgcagtgaggtctgaaccctcattcaaaactcgatctcagttctgttgtttctttacgttagggtccccacagatcatccaaccagaggaaatttcctctgaacatatttaatttgttcttttttaattgtttatgactcatttaatcttgaattataatactttgtgggcatgccttatcccctctcttctagactctataaactccagaagctcaggccttgaatctggagtcaaatctcatttatcttcatccacagtctcagccaagagcttggacatgcttg

SEQ ID NO: 853479 - DNA, 647 bp, Homo sapiens
gttgctaagacatctgttgtggccgctggaattcctcagagatctctaactactgggagtgtaattgacaagagccccacttctatgctgcgtcccccattgctgagttgtcctaaggccacattccccactgctcctggggccctgctcccagccaatgactgagtgtggcagaggcatagggcagccccattcctgggagagatggggctccctgacacctgatggcttaaggacacctaggtggccttgccaagtcttccttagacctaacagcaatgtagttcacttccattccaccttcttttcctcttgcctaaatctaggtcagacttgcatggtagtctgatgattcccccacccttccagggctccgtctccattttctctcatagtcattgcccttaaaaaaattttctatgtttaatctcaccttgtcatcttcttctcagaaacctggacaaaagcarcattcacatgttgcatataattgaaattcattgttttgactgctgcataatatttaattatgtgaatatactaagaaagtggataaatacattgtggtatatttatacatagtcatgtactgcataacgacattttggtcaacaaaaaacctcatatacaacagtggtctcataagg

SEQ ID NO: 853480 - DNA, 608 bp, Homo sapiens
gacacagaaataacacaaatcatagaattaatacacaaatacattaaagcagttactaaggctgtatttctygtattaggaaaactggaagaagtaacatggaaaatataaaagagatttaaacctaaattccagaggtaagaaaaataatgtgtgacttgaaaaataccctacaaaaaattgaagctacattaaacatttctggtgacctacaggacaatttcaaagagccaaatatatgagttataaaattccaaaagagagatatccaaaataataaaaattgaaaaaataattgccaacagtatttttaaaatttgatgaaaactataaagccatagatctaagaaattaaatgaatctcaactagaagaatttttttcaaaaaccaacaccaaaacacattattgtaaaactgcttaatatcagcagttaaattgggaaaacaaacaaaacaatctacaaagatcgagaagaaaaagttaccttatatatggaaaaacaaagataagaatgacagaagcagatttcttgtcagacaacacaagttagaagacagtagagcaacatttttaaagtgctgaaaggaaaaagtaaactagcattcc

SEQ ID NO: 853481 - DNA, 623 bp, Homo sapiens
ggtgcctggaatgccagcaaggcagaaccattcactcccctggaaggggggctgaagccagggagccaagtggtctagcttggcgggtcccacccccacggagcccagcaagctaagattcactggcttgaaatcctcattgcaagcacagcagtctgaggtcgacctgggacactcgagcttggagggaggagggccgtctgccattgctgaagcttgagtaggcattttaccctcacagtctaaacaaagctgcctgggagttcgaattgggtagagcccaccacctcagctcagcaaggccactctggccagactgcctctctagattcctcctctctgggcagggcaactctaaaaaaaaggcagtcagggactaatagataaaaccccatctccctgggacagagcacctgtgggaaggggtggatatgggagcagcttcagcagacttaaatatctctgccggacagctctgaagagagtagtggatttcccagcacagtgctcgagctctggtaagagtcagrctgcctcctcaagtgggtccctgaccctcgtttatcctgattgggagatatctcccagtaggggccaacagacacctcatacaggagagctct

SEQ ID NO: 853482 - DNA, 638 bp, Homo sapiens
tttacttatatcaggatcatgaaaatcctgttgctcattaactttgtcagtttaaatagaacccctcacaaaacgttgaataagcatcaaaaagcatgacatgcggtgtgtgtgaaggcaccagtcgtctgtttcactcactctgtcatttcagcacttgctgctaagaactctgcatactgaaaggggtggacaactaaaagagacagatgaaatgcttgatttgtttagttgctaaatgcagctgggacaggtaattaaacagtcctgctcccgcagagaagcttgcagcaatgtaacatgaaatcttagaaacccagctgtactcagatttagattcagaactaatattaggtaggcatccttcagattgacagatttcataagcattgtttctggtttatttgttcagcctaattgaagatagagcatgttttgttcaccatttaagttttctagggagcatgtggtgtttacagatacctgggggaatagcctagaaggcacagcccatgtctggagggcacgagatgacatgggtgagcctctgcgaatcctgactccarctgttccatggaggtgggaatgggggtcatcatatgaatagatgcggattgggagaggattggaaccagttc

SEQ ID NO: 853483 - DNA, 405 bp, Homo sapiens
caatcctcccacctcaaccccccaaaatgctgggtttataggtgtgagcgactgtacccagctggaagagttttgagcacatactttgccatcttatgctatttgtaacctcatcttttatgctactttscccccttttcaatctcttttaggttgtaattccactaacaccagttcagattcatggggccttttacttaagttctggatttcagtatacatgaaactaatcctgcccctactacctcataattgtgaatcttgggcaaatgactttctgttcatatttttcctttgaaaaatggtgatacttatcatacttacccatctcatgagtttgtgcaagaaggaaatgtggtaatgtgagcaacttcttaacacaatgccttgtacgtgggaagtgct

SEQ ID NO: 853484 - DNA, 656 bp, Homo sapiens
agagtcttttaaacctcctttagaagacaggtagcagagaagcaagctcaggtgtcagctgcaaatggcctttttcttcaaagagttgtttagacttgagttcttttctgaaaytggagtgcaaaagttcagagttctactatgattctccaatcgttcattagtattcctggcctgtcctataattacgagagtctttgacttttcacctgtaataacgcattgtcctggggacatggatgccctcacactcttacttccttcgatcaacacatgtatatgtgacacagaccagcagaaaaaggactgggccaatgtaacgatctcaaacaggttcaaacctgcccccagggctgtgtcagcgccatgctctagcttaaagagcaaaattaagtcataagctaagacaaagggcataaagtagacagggtctctctgacttctcagactttgcaattcaggatagacaatcaaatgaggctttttctcacaactccctcaaacacacacacacacacacaaacctgtgagttccaaagtgcaaaggaatccgtctggaatagcctaaggaagaatgttcattccactcctctccctggcataactactgcccaacgggggaagcagccctgcccaatgatcaggcctcaggctct

SEQ ID NO: 853485 - DNA, 580 bp, Homo sapiens
acaggtttagccttttgggttgacattaacacgtcccatgaaattttaactkcctacgaagttgttcacatgtcattttaaaagaagtcataccactcagtttccctctcaaaccaattttctgaaatgcaaatgaaacacttccaaaactgtagatctgaagactgaatggcaaaagaaaaaaaaatctcagatttcaaactttatgcagtgcacttacagggttcaattcacactctgatttaatgtaatttgaataaaaactacaaatggaatttactgtactacacttcactgaaaagtaaattttacaatgatgttagaaaagcagaattttacaaatagctcaagagtagttactttaacaatgaaaatcactgtgcaagaatctatccacattaaaatacctatatttgtgaacagctggttttcattatgaaaccgcagaaaactacatgtcactgactgttaaaggtttaaggatgaattctggtttacacagaacacacaatctgacattgtcacgttcggacaaaaaagtaaaaaggaactgtcatgtttctatatcctagtcaaaagc

SEQ ID NO: 853486 - DNA, 624 bp, Homo sapiens
tattagtatcatcgttattttagaactaggagcgatcacacatcatgggagttaatgrcttgtgacaagaagggaattgctcagaagttatgtgaactgaccccaaacacaggttagctagatatgacacttagaatgtacaatatgaatggtggtctatcaggttctgtgtaatacacactctttattcttggtatttgcattcttctgagaacattttttgggaaatgtccctagggacgagagtacccatgaccctatacattagggggaaatctgcaggtgacgatgcagagtgacgttgctaataaaggtatgtaaatgtaggaaatatcaacatatccctgttatcattgatttctgtaatatggctttttacacaaaatcacattacagtctttttcacaataatcaaagctgagaactcaaaaccaaatgtgtgaggttttctgttgaagaggtcactatgagtatcaattttcttacttgcttgggatatttacccgattttaaatatataagaaaaaaatggaaattgatgatgtcagccatcccttatagacacatcaacatgaacgagcatccacacgtgaaaatactttcacaagggcttaataattcaga

SEQ ID NO: 853487 - DNA, 363 bp, Homo sapiens
aaaataaataaatggtagaaggagctgcctctcttgcagtgctgaagtggcctctccctgcataaattatcttccagcctttgactgacctwtgaacactttaccccacaaagaactgctgagggtaacttcctttgagaaagtgataccaggtcagatgtgaatgctcagagagaaaagggacaaatccaaaacatggggaagaagcttctgtatgagggcatccagaagcttagggaaagggtcttggatattgatggctccacctttactgttattattattattgggctgtagaaagagttggggtaattttatgcatattttcaagtataaacttttcaatgttacatgactttttat

SEQ ID NO: 853488 - DNA, 666 bp, Homo sapiens
aatattggacattttgatggtcyttctatccccaatgctttatttttttcaactttgatgaaaagatttgatctaggtaatgccaatactggtattgatgtttgaaaagctggtattacaagcacagtaattttcaatatctttttttaaaaatgtaggcttaatctcagatgtttctacttttgtatcctgaaactgtaatgttttctattttgaacttctgtatttcttaaggattcaagaaggtgaatgttgaaactccaatttctttttttagctcttcgaagcttgattcaaattccacggtttacttcggggatcccatctcttactgatataacccttgtgttttaacatgaattaccttgtttccggtgttgtcactttgagaatcctaagaaaatcagtaactcggactagtgaactctgtgtgtttatgtgtgtgtgtgtctgcgtgtgtgcctgcgtgtgcctgtgtgtgtgtggtacctttaccttgtaaagatgaggaaaggaattattcatttctttgtgaatatttgataaacacactttttcatgaaactgtgattctgaagcatttggctttagagtccttttacgctagtaccatttattgcctggaagtaaccaatattctaaactgtttttagaaactcttcttat

SEQ ID NO: 853489 - DNA, 666 bp, Homo sapiens
aatattggacattttgatggtccttctatmcccaatgctttatttttttcaactttgatgaaaagatttgatctaggtaatgccaatactggtattgatgtttgaaaagctggtattacaagcacagtaattttcaatatctttttttaaaaatgtaggcttaatctcagatgtttctacttttgtatcctgaaactgtaatgttttctattttgaacttctgtatttcttaaggattcaagaaggtgaatgttgaaactccaatttctttttttagctcttcgaagcttgattcaaattccacggtttacttcggggatcccatctcttactgatataacccttgtgttttaacatgaattaccttgtttccggtgttgtcactttgagaatcctaagaaaatcagtaactcggactagtgaactctgtgtgtttatgtgtgtgtgtgtctgcgtgtgtgcctgcgtgtgcctgtgtgtgtgtggtacctttaccttgtaaagatgaggaaaggaattattcatttctttgtgaatatttgataaacacactttttcatgaaactgtgattctgaagcatttggctttagagtccttttacgctagtaccatttattgcctggaagtaaccaatattctaaactgtttttagaaactcttcttat

SEQ ID NO: 853490 - DNA, 666 bp, Homo sapiens
aatattggacattttgatggtccttctatccccaatgstttatttttttcaactttgatgaaaagatttgatctaggtaatgccaatactggtattgatgtttgaaaagctggtattacaagcacagtaattttcaatatctttttttaaaaatgtaggcttaatctcagatgtttctacttttgtatcctgaaactgtaatgttttctattttgaacttctgtatttcttaaggattcaagaaggtgaatgttgaaactccaatttctttttttagctcttcgaagcttgattcaaattccacggtttacttcggggatcccatctcttactgatataacccttgtgttttaacatgaattaccttgtttccggtgttgtcactttgagaatcctaagaaaatcagtaactcggactagtgaactctgtgtgtttatgtgtgtgtgtgtctgcgtgtgtgcctgcgtgtgcctgtgtgtgtgtggtacctttaccttgtaaagatgaggaaaggaattattcatttctttgtgaatatttgataaacacactttttcatgaaactgtgattctgaagcatttggctttagagtccttttacgctagtaccatttattgcctggaagtaaccaatattctaaactgtttttagaaactcttcttat

SEQ ID NO: 853491 - DNA, 608 bp, Homo sapiens
atctctgaaacgatccagggtacgcttctaaaaatgagtgaacatggtgacttaccaaagtgtgatttgagtttcctggaccctctgcatgaaatgtgaacatgagctatgctgagatcacaagttaaatttacttttgaaaccaggtatacagttgatggatgtcaaatgataaacgtatgcatagtgatgaaacggtcttttaagttttaggtgtgcatgtttgcttttttcctgaacctgattcaaatagttgtaatttgtactttgtgctgataaagaaaactggacgttatttttggtataaattctttttctgtcttatgtccctgagaactcgtcaagtcttgagtgggccttgattttatcctattacacgtgggaacattagattacttaaggcaattatattttcctatacatttctgatgtttctccaaggtgtcacaagctgactctgaagatattgttgcattagggaagaagtgtgtcattgtaaatgaagcagttcttaatttatacgcaataaaagttttttaagcttatcttcctaaagcttatacacaygcaaaacacacccaatacactgtcatagcatactgaaatgt

SEQ ID NO: 853492 - DNA, 488 bp, Homo sapiens
ttctgggattacaggcgtgagccaccgcgcctggccacagagasctttttgtagattgattctgatgttggaaggaagagagcccagctcttgagagcctagtgctgttgaggcattgagggtcctctttgccacgtagagagtgttggtttaaagaaaacccatggaaaaaagcagggggaaacagagggcaaagggaaaataaatccccctgacattgtttgaatccccagattcagccattcctgaagccagccattaccttgaatttcccgaataaatgaactccaaaattccccttttaggcttaagatagtctgaatcgagcttccgtcaccacaatgaaaagaagattcataaaatgctgaatctgaatttgtgtcactacaggatggaatctcataatcatggtgacacactgtcttaccgaatgtcttcgtatgcaaacgtcagtccagggaaagtgtagctttggaaggtaatgtgca

SEQ ID NO: 853493 - DNA, 637 bp, Homo sapiens
ataaagaggacccgtgtataagaataagcatttatgacccaatttatttctttgtctgttcttagtacactgttaatatagagaaatacttaataagcaatggactccagcttttacttgggagtaaactccatacctagcaatgtaaaagttttgatctcttaggccagtggttttcaagccatatccaggtcttcaattcacagccctgagtggagtgagtgggtgagaggaaaggccaggtgggcaaggcatcaggccccttacccagtgtgcctcagaaagggtaaggtacagtttacacttcagtggttttcagtgaattcataaagttaaaaaaaatcaccactatctaattacaggtcattttcatcaccccaaagagaaactctgtacccatgacccttcgcctcccacaacccatggcaagcattaatctattttctctatgaatctgcttattctggacatttcatataaacaaattaatataatatatggtcttttatgacttgcttcttttactyagcatcagttcttctagtttatctatatttgagttccaacatgaactcttgcttgtgaaaaaaatgacaaattattcaaaagtgccagttcaattccacagcatacattc

SEQ ID NO: 853494 - DNA, 384 bp, Homo sapiens
ttgaattccgtacttctcaaaaagcaactctacaatgaaagtaagagtgccatcagctgctgtttktcaggcttcagcttgactcagcctgggctgacagaggggttagcactccgggtaatcccttccagcttacctgatttccagtgctaaaaggaatcactacaggcctttggtatactctgcctcaaataaaagtaaacatttgcttcctgaactaagtctttttgatttggtccttgatgtctcgggtggatgccagggccagagacagaacagaccatgctagggaagctcaggtgctttgctcagcagtctttcctcatcagcactgtctgtgttgtgattctagaatgtgtatttgacagtttttacaggcatggc

SEQ ID NO: 853495 - DNA, 619 bp, Homo sapiens
tagtttatctcttccactacaatgtaagtttygtgagagaaaggcttttttacttctggtttactgttgtatccttagtgcctggaacagtatctggcgtacagtaagtgctcagtaagtactgactgaattaatgaattaattatataatggataaatgaatagaaatgctatggctagaccactacaatctcaagaaataattcatatacattataaaaatgggaaataacaaaagttgtttgatgttatggaaaattgagcatacttactagtttgcaattttttgtgtgtgttgtttttgtttttaacttttaagttcagggttacaagtgcagatttgttacataggtaaacttgcatcattggggtttgttgtatagattatgtcattacccaggtattaagcttggtacccattagttatttttcctgaccctctccctcctcccaccctccactctcctaaaggccctagtgtgtgttgttcctctctatgtgttcatattttcattatttagctcccacttataagtgagaacatgcagtatttggttttctgttcctatgttagtttgctaaggataatttcctccccctgcaaaggacgtgatctcat

SEQ ID NO: 853496 - DNA, 550 bp, Homo sapiens
tattatttattcattcattcacaaaatagttatgatataacctcaaaaaatatttataatgtgccaatcactgtgctgggtgatggagaaatagcagtgaccaagatagacatagtctcaacatttcagtctagcgagggatacagacaaaaacactgataaaccgtattgtaatcagagctatgagggaggaagcagagtagtctgagagcatgaggagagggtactaaacacatacgggagaaaagggaaggcttcctagaggaagggatgtttaagcagaaacaatgaaagactagtagaagttagccaaatgaaaaggagaggtaagaaaatgcaagcagagggaagagcatgaaccaaagccaagaggcaagagagaagaagaaaatggaaaatgttcggaatagctggaacatcgaatatatgagaagactggatgagagtagattgtcrcagaaatcagaagtaagatcattgtaaactatgccaaggaattgagagcagtgggacactaaagaaagattttaaggaggcaagtgacaaggag

SEQ ID NO: 853497 - DNA, 646 bp, Homo sapiens
gagtaagagaaatgagtgccccgcttgctccatctcacgagaacaaatggaagctgaacgagcttagggcagggaatttggcgggatgcagggsgagtcaggccagctgagttcccctacctgagcggcctggccaggcggcaagtgaagaaacaaaggaggcccaggatcagccccaggaggaggaggctgagggccaccgtgaggaccacatccaggatgggggacaggagggccatcttggggcaaagagggcccctgggagcagccaccacgccctgcacacactcggtcacactagctccaaagccctgggtcagtggccgtgacccgctttatccctgggttaatctttgtggattagtcagaagggatgaaacggggtgctggggtgggagggggagcaggctacgaagctcctctctcccatttgagccccgggggagggcccgatgcttgttcattcaactttgttcattcattcctcactcccaaacacctacagagcacctgctgagtatctctgtgctaggttctatggaaacagtcgggaacgggacagagtttctgtcagcttggaggtaactgaccagccagtgtggacaaagcacctactgtatgctagacattgtgccaggtgccctgt

SEQ ID NO: 853498 - DNA, 385 bp, Homo sapiens
cctatgtctctaagatccagctgatyttgactaaacaccttctatgcctagggctttccctatatgttattcaaccaacattcgctggaacactgtttattgagcagccacaatatgccaggggctgttctaggtgctgaacataacagcccaaatccctgtcagtgtggcaggcagacaacaaggaagtaagtaaaagcaatagaacgccaggtggcggtaagtacagcggggaaaaagaaggcagggaggaggacagggaggtttgcagttttaaatagaaagatcagagaaggtctcaccaagaaatcatttcactgtggccttgcaatgatcccacacaggccagaacgtgattcccaaatcacagataaggagggatagg

SEQ ID NO: 853499 - DNA, 615 bp, Homo sapiens
tggagtttaccgtggtgccacccatgttttcgttctccagcctttttggatgccagatttttaaagccagctttcatttctcagtgatmgggagcacagagatggtggctgggtcgcaatgtattaagtgtctgagacaaggcttgtgcccagaggcagccatgcgtgagtggtcagtcctgagtggtttggattgaaataggacagggaaagcaaagctccggggcctttgtccaatcttccccctcagtagctaggctgcatgccaagctctgtgcccagccccctacggcacgtgctgcctcctcgccaggggccctgacagtctcagaatggtgccccccaggacacatgggagattataagcctcttgcattgagggaggttttctgtaaaggggaaaatgctgtaattgaaaagctccttgattataaagaagaaatagagacgcctggcatagaagagacttcgttctttggtctgctcagccagggtcggggacattcagtacccccaggctaataggctcttgagctcttaaggaccttggagtctgcaggtccagactccagaaggttatgggaccatgaagaggtcacacagctgtaccccttg

SEQ ID NO: 853500 - DNA, 397 bp, Homo sapiens
atgtgggcatactgtctttctgtgtgtatgggaatgccttggtatgggaatttgtgtttgtacatgtgtatctcatgcatgtgcaagtctctgaatatatttacagaccagtggctgtggctgtgtgttttgtgtctgtgactctgtccccatatgtaggtgtgggtaggctgtgtatgtacgtgtgtgcaggtttctgaatccccgagtggagaaacccctgtagggaggagggaaggagggtcctgggtagctcgatgcctgtacaaatgtggggcctgaagggaggagaatgtcccttytgggtgccctgtccagccctgggaatgtaatgacgctgataagagctcagcttcctaatttctactttccaaagtactttcacccaattgcaagc

SEQ ID NO: 853501 - DNA, 628 bp, Homo sapiens
caagctctgtgcccagccccctacggcacgtgctgcctcctcgccaggggccctgacagtctcagaatggtgccccccaggacacatgggagattataagcctcttgcattgagggaggttttctgtaaaggggaaaatgctgtaattgaaaagctccttgattataaagaagaaatagagacgcctggcatagaagagacttcgttctttggtctgctcagccagggtcggggacattcagtacccccaggctaataggctcttgagctcttaaggaccttggagtctgcaggtccagactccagaaggttatgggaccatgaagaggtcacacagctgtaccccttggcttgctgcatttctgcatctccagtgcctccatctgccccctccctccagctcaggtgggacacctttgtctccactcagcactctgggatgtaccatcagcaatgcctggccagaattgagggtctctgtcttaaagcgtggaggagaaaggggcccttttggaacaggagttagggaagcaagaagcatgaagattgtgctcagaattgaattcagggagcaatgcataaaaaagcgagaggatgggtagagakatggtgcttaaaaggatcctgg

SEQ ID NO: 853502 - DNA, 494 bp, Homo sapiens
actcagaccacagcatgataaaaatataaatcaatatcaagaagatctctcaaaactacagaaatacatggcaataaaacaacttgctctggaacaacttctgggacagcattaaaattaaggcagaaatttaaaaaatttttgaaattaacaaaaatagggaaacaacatattaaaatctttgggatacagccaaagcagtgttaagaggaaagtttgtagttctaaacaccttcatcaagaatttagagagatctcaaattcacaatttgactttgcacctaaagaaagcagaaaaatgtgaacaaaccaaccccaaagctaggagaaaaaaactaactaaaattagagaagagcttaatgaaattgagctacaaaartccatacaaaagatcactgaagttaggtttcttgaaaaaataaataaaattgatagactactagctatattaaccaagaaaaaggagaggatccaaatacgtgcaatcagaaat

SEQ ID NO: 853503 - DNA, 549 bp, Homo sapiens
taaaattgatagactactagctatattaaccaagaaaaaggagaggatccaaatacgtgcaatcagaaatgataaaggagatattacagttgaccccacagaaatacaaagatcatcagaaactattataaacagctctatgcatgcacattagaaaatctagagaaaatggataaattcctggaagcacacaatttcccaggaatgaatcaggaagagaatgaacccctgaatagaccaatatctagttctgaaattgaatcagtaataaagatactaccaaccaaaataaaacccaggaccaggtacattcacagccaaatcctaccagatgtgcaaataactgataccaatcatactgaaactattccaaaatatcaaggaagaggagctcctctctaactcaatctatgaagccagaattagcctgatacctgaatctggtaatgaaaaaagaaarctttaggctgacgtccctgatgaacatagatgcaaaattcctcaacaaaatattagcaaaccaaatccagcagcacatcaaaaaattaa

SEQ ID NO: 853504 - DNA, 549 bp, Homo sapiens
taaaattgatagactactagctatattaaccaagaaaaaggagaggatccaaatacgtgcaatcagaaatgataaaggagatattacagttgaccccacagaaatacaaagatcatcagaaactattataaacagctctatgcatgcacattagaaaatctagagaaaatggataaattcctggaagcacacaatttcccaggaatgaatcaggaagagaatgaacccctgaatagaccaatatctagttctgaaattgaatcagtaataaagatactaccaaccaaaataaaacccaggaccaggtacattcacagccaaatcctaccagatgtgcaaataactgataccaatcatactgaaactattccaaaatatcaaggaagaggagctcctctctaactcaatctatgaagccagaattagcctgatacctgaatctggtaatgaaaaaagaaaactttaggctgaygtccctgatgaacatagatgcaaaattcctcaacaaaatattagcaaaccaaatccagcagcacatcaaaaaattaa

SEQ ID NO: 853505 - DNA, 696 bp, Homo sapiens
ttctgaggtttggggtatggatcctgtcacctaggtagtgagcatagtaccagataggtggtttttcaacccatgycccctcggttatctgcagtgtctattgttcttatatttatgtccatgtatgctcaatgtttagctcccacttataagtgagaataggtggtatttgattttctgttcctgcattaatttgcgtaggattatggcctccagatgtatcatgttgttgtaaaggacataattttattcaattttatgactgcctagtatttcctggtttatatgtaccacattttctttatccagtttaccattgatgggtacctgggttgattccctgtcttcactattgtgaatagtgcaatgatgaacatataagtgcatgtacctttttgttgaatgatttattttcctttggttatatacccaataatgggattgttacgttgaatggtagctctgttttaagttcgtcgagaaatcttcagactgctttccacggtggctggactcatttacattcccaccaacagtgtataagttttcccttttctctgcaacctcatcagcatctattgtttattgactttttaataatagccattctgactagtgtgagatggtatcccattgcagtttttattcacatttctgttatgattagggatactgcacatttcttcatacgtttac

SEQ ID NO: 853506 - DNA, 454 bp, Homo sapiens
tggagaagtttatggtgggttgggaaactctctggaaggagaggaggttatcttggrgcagacatatttccggcccagagaggggttatctcgaggctaccatgtctctggtcagggaggagtttggaatgtttctggttggaggagttatttgtggtttatggttattctgaccttagccattaggctgatgccctttggatttaggtggtttttattaaggtgaactttagaatgagtggcttgtccaggatggcaatgctcctgctctgtcagatggtagtcattatcttgttttaattttcaatttgtttctaataagtttgcatctttccactttgttaatatttgtcatttatcctttgtgaattgtatattatgaataatatgcccatttatctataaaatatttatctttttgtataaatttttatgacacgttatgaaaagaaaa

SEQ ID NO: 853507 - DNA, 516 bp, Homo sapiens
ctctctggaagtgtctgtcttatgcagtttttgataagggatgaaatatgccctggtctcccacagtgcccccaggcttgctaggattcggaaattccagccaggcaaaattctagtcagaccggttgtctgctctcaaaccctgtttcctgttaagatgtttatcaatgacaatgtgtgcccagcaggacatggaccttcatcagtaattctagttttgccctggccttgtgatctcattctgcctctctgcccttgtgatattttattgcctttgaagcaagtgatctctgtgacccactccctattcatacacccctccccttttgaaacccttaataaaaacttgctggttttgtggttcaaggggcgtcatggaacctgctgatatgtgatgtcacccccggagtcccagctgtaaaatttctctcttttgtactctactctttatttctcagactgaccracacttagggaaaatagaaaagaaactacattgaaatattgggggctgat

SEQ ID NO: 853508 - DNA, 627 bp, Homo sapiens
aatttgcaaactgagaaaggtcacatactgcttttcaagactctttagggcctttaatacagtgctaaaatagaagaactttgtcaaaaataaacaaaagtatgaactccttggtaggagtagattctctttgttttaaaaaagttaaatacattgggttaaaatgagcaaaatatgagctccttttcgtaaagttaataaaggaggaatagagattaggaaaaattcagaaatttccaatcactgcttttcaaatctaatcacatgatccaggacttcatttcccagaaaactctgcatctgcccgagggaacattagttatgagacagtgcagagatttctaaggcccatttcttcacttaaagtttatgtgctctcaaagcttcctgtggtaccaggatagagcattaaatagcgttattctctttgagttatagctgttttttatttttgtgttgttagatccaatgtagcatggtaataaaacatatttgaagcatcccttcctgcatacacagcgctcttacctgtgttctcrtatgacactcaccctgaggaaggtcttattgtatccccattttcagatatgaaactgagattcgggaaagataaccgatttgtccaag

SEQ ID NO: 853509 - DNA, 600 bp, Homo sapiens
tgcagatttggatatttaactctcactgagtacccacattcaggcatcttgttgcaagtctctgtgcaccaagagttactagaatcccacgtgggtttttayagctgtcataagaaagacacaagcaaagttcagaggctgcagagatagagttcaaggacatgagggaaaacgagatcatgagagatttggaggcctggtaaagaagaatgggtggaagtttgagaggttggaaaatgaggtaaggcaatggacagcattaagaaatataccaaattagaaataggtcacaccattcagtgttgtttgggtaggacaaatatgagagttctagttggttagaacatttgatttgagtaagtgggttgagtaggataaacttccaaaagtagtgtggtcagggccaaattttggagaggtttttaatgttagattaaggaatctgactttatttggcaggcaagaaggaaccattggaaactgctcaatggaagaatagcatgcacaaaatggcttataaatccctaaataccattttatagttgtctaattctttgcagttatagaccactttcttatgcattatctcttttaatcctc

SEQ ID NO: 853510 - DNA, 598 bp, Homo sapiens
aaatggatgttcccttagagtctctagaaagaaacgcagccttgccaaaaccttggtttgtgtcrttttaagccactaagtttgtgtaatatttattgcagtaataggaaactaataccaacacccatgtgagccaaaccttctaaacattctggagaaacccaagcctccagaattaagaatggaggctcaacatccacctaaagctctcatttagatgaaaagagtaggttaaagaaatgtggatttagatgtgaggaaatcaggtaatgctttcagggagtgtttaaaaggagctgcttttactattgaaaaagctttatagatccctgatgaagaataagaggcactgaggtgaatttctctatatccgtgtttctctagaggttcccagacctatacatttggggatttatacgtaaggaaggagaagctctgtatgaaggtaaagataaaggtctcagagcagatccctatatgcggtgctcagagcggggaagtggcggtcaggaatcagccctgactttctcttccactggcattagggcaccctctgtctccactctctgccactgtaccatttacatcatggggaata

SEQ ID NO: 853511 - DNA, 450 bp, Homo sapiens
agagtccataaattactcactgtcacaggagttcttccacttgtctgatcataggaatcgtcagaccctccacctgtaagttacatgaccttcctggagattttagtgcattaatgacagggtgtggtacagaatacagagaagagcgtaaaggcccagggggatctgctcaggcaaatgtgagaaacactcctgaagcctttttctgtgttttatagttttcacctgttttactctgaaactgaaaataagagactctcttttactattatggtgaaatagctggaaaaaatgccaaaatccacataatatatttttcacataaactgattaaaagtaactagagacatgctgacatttaggagaaagtmggttaattaaaagataagttttcaagagaagagattcatttttaaaaaatattcagaggtcatgaagatcccactactg

SEQ ID NO: 853512 - DNA, 495 bp, Homo sapiens
ggccctaacccttattattccccttaatagctcttaaggtacaatccctaaaaagtcttaggaggccaggccctgtgtgtgtggatcctgctcccacttccagattcttgtcccatcactcactyacctttcagcaatctgacctccatccccacagagcatcgcaggtcatcgcagcagagccctgtgtggcatcccacccagctcccctttcaagcccaaggcactcatttcccccagctgctaggaatttaagctgcttagctcacacctgagtcccactttgggaattgccctcacctggttctcctaaggtcatgcccccacctcgggacagaagattggtccataagtagcctcagaggcctgaattttaggcagctccaaaggacactccaactccagagcctcctcctttccttacaggtgttattcgtgaaagcacacccgataaacacctggccacaaatctctgtttcagagtctgtttccagg

SEQ ID NO: 853513 - DNA, 527 bp, Homo sapiens
atctcaataggatgtattaacttaataggaggtaawtaacttggagtcctactccagccaatgttcacaaatgaattccaggtggaccaaaggcagaaatatggaaagtaaacattttatatttatagatgtcagagaatacttctgttaccttaacatggaaaatgggttcttaaaaatacccaaatataaagacaaataaatattaaaatttaaaacttcttcacaacaaaagacaacatagacagctcaaaggcaaagcataaattggcagagggtattttcacacattaggccccacaaaggagtaattaccagaccataaactctttaaaatttctaaaactcaatatgaaataaatgtaagtaacccactaaaaatgagcagcaaataccagtggccaattcaaaaaagaagaaaacactaaaggccaataaatgtgaaaagttggttatcctttctgttgtcaactccaaaacagccaatccttcaaggtggatcctgagcgactaattgggcttaaatt

SEQ ID NO: 853514 - DNA, 596 bp, Homo sapiens
ttttaaatttagtttgtggcaaaaactttggttattaatttatttatttatttatttatttatttatttatttgagacagagtctcactctgtcacccaggctggagtacagtggcgccatctcggctcayggcaacctccgcctgctgggttcaagtgattctcctgcctcagcctccagagtagtcccagctaccaccacacccagctaatttttgtatttttagtagagacgggttttcaccatgttggccaggctagtcttaaactcctgacctcaagtgatccacctgcctcggcctcccaaagtgctgtgattacaagcgtgagccactgcgcctggccgcagttatttattaaagctgggaactatcttgcctcttcactggcaaaagagctatccagaaaagttctaaaatttgggacaaggaaagatgagaattttacaatagtcagtgtcccatgattctgaacctaaaaagactgtctttcttctataaaactcagttaccttgaagtcacattcttatttacttccccatgtaaatttactgagtaatcagtttctcacaagtatgacccatgagaacacatta

SEQ ID NO: 853515 - DNA, 518 bp, Homo sapiens
cacaaaaagagaaataagaatttcagatgggataggacatctcaaaatgtccaagtatagcaagcaatayagttccaattttcaatatatttaccagacttagtatctacttaaacagactgtgtgtttaaccttttcctgaaggctttaactctgctaagcagagctcagagactgtctaactggccttaaaaagtcatttgaagtaaatggattcttggtgataaatactaatgacttttaaaagtcagttttttttgttttttttttttctggctagaagtacagttttacatctcatgttaagtccagtgaatttttctcctttaagaagaagggaaaacatttcaaaattgggtctaacttatttagtctttctgtctctgcttctttcttgtaattgtgccaatagaatactccaatttttggtatttaaaaaactaatctttgtttccatactttttagtaaaaactgctttggatattttgaatatttttacttctaaaacatgggcttc

SEQ ID NO: 853516 - DNA, 573 bp, Homo sapiens
aagcccccatctaaggggagcctcctggaatttatttatttattttcaacgaactagccrggcatagagagagtagaatatgatgccacattctagcctgcaggggtggtagggacagaataagtctcaatgcagttaacagccatactgacggagcagcacatatggtaaggcaagaatcagtaattagccccacccacttctagataatgaaactgaggcttatgggttttaaggacactgccttgtcagatttgaacttaaacagtcagactacagagcacgtgttcctgaccactgggatacactggctctttcacagagcctctgtgagaaaatttgagcaacttactttgggctggcagaggaagaaattgcaagtttcactgtattttcatgcctacgtacaatttgttcaaacattctggtatgtgctaggcaccgaggatatggagacaaacctcccatgtctgggcctcctggaactcactattttatcccaacctgggaagttgggaggagtagctgtgagtcaagtattatggaaagtcagaaaagggcacaagtaattgt

SEQ ID NO: 853517 - DNA, 406 bp, Homo sapiens
cttaccctgcacatctcttcatctgtatcctttaaaatatccttcctggctgggcgtggtggctcacacctgtaatcccagcactttgggacrccaaggtgggtggatcacctgaggtcaggagtttgagaccagcctggccaacatgatgaaaccctgtctctacttaaaaaacaaacaaacaaaaaaaggccaggcatggtggcaggtgcctgtaatcccagctatgtgggaggctgagggaggagaatcaattgaacccaggaggcagaggttgcagtgagccaagattacgccattacactccagcctgggcaacaagagggagactctgtatgaaaaaaataataattaaaaaaaaagtaaaaaaattagatatccttcctaataaactggtaaatgtgtt

SEQ ID NO: 853518 - DNA, 406 bp, Homo sapiens
cttaccctgcacatctcttcatctgtatcctttaaaatatccttcctggctgggcgtggtggctcacacctgtaatcccagcactttgggacgccaaggtgggtggatcacctgaggtcaggagtttgagaccagcctggccaacatgatgaaaccctgtctctacttaaaaaacaaacaaacaaaaaaaggccaggcatggtggcaggtgcctgtaatcccagctatgtgggaggctgagggaggagaatcaattgaacccaggaggcagaggttgcagtgagccragattacgccattacactccagcctgggcaacaagagggagactctgtatgaaaaaaataataattaaaaaaaaagtaaaaaaattagatatccttcctaataaactggtaaatgtgtt

SEQ ID NO: 853519 - DNA, 434 bp, Homo sapiens
actgtgttagggtgagttctccagaaacagaccctgaggcaagggcaattttcttatcccatgttatgggttgaattgtgacccccaaatgatactgtgaagtcttaactccrggtatctgttagtgtgaccttatttggaaattgcatctttgcaaatgtaatcaagctaatgtgaggttattaaggtaggtcttaatacaatacgactagtgtctttataagacgacaatgtgaagacacgcagggagaaaaccatatgacaatagaagcagagattgcaatgacaaacctgtgagccaaggcccatcatggactgacagcgaccaccaaaagctagaaaggggcaaaggattctcccctataggtttcagagggagcatggcttttctgacaccttattttaagtttctagcttccagaactgtaagacaa

SEQ ID NO: 853520 - DNA, 611 bp, Homo sapiens
agtattctgtgtctcacagcaaaaggattagtcaattatagtgtatctacccccagaaatagtgattactctaacgtgtgagaaactgaacaaagcggratcagtcagcatccttccctggaattcatacatggacactggaataaagaaattattttccctctgggttagctaagctgagatgacatcagccttgagccattagcaatcatcttcttaaatctcatagaagtaaactatctgcagtagaaaaaggatgatatggggaatgagagtagtgataaagatgctctctttgaccaaactctacctgggctactataagccttcttctcaactaagcctccaactggcctataaagacttgaacgaaacactaacattgtttctaactgctcaaagccacatccctaggatgaccttagcctctcataaagtgccagcctaagaaaactcaggctgccaaaaaaaatttactgtttattccacttaacacctaaaaatagggtccctgtctcctatcctctgtgggagaataggagcctaactttggtaagtgccagttagcaaacccagattttttgttgttgttcttttgagatggagtcttg

SEQ ID NO: 853521 - DNA, 458 bp, Homo sapiens
tccaggcaagcggtaaaatattggatcctgtgcatacrcccctattcattctgacaatgagaagaccactggtgtaaaaactggctctctacccactggaccttaaatcattcctatccctcattcatgtatctgaagggtcaaccaagaatcataaaacatacagcataattaagaaagaccagatgggcgcggtggctcacgcctgtaatcccagcattttgggaggctgaggcggctggattgcctaagatcaggagttcaagaccagcctggccaacatagtgaaaccccatctctactaaaaatacaaaaaaattagctgggtgtggtggcgggcgcttataatcccagctactagggaagctgaggcaggagaatcacttgaacccgggaggcggaggttgcagtgggctgaggttgtgccactgcactccagactgggcaacaagagtgaa

SEQ ID NO: 853522 - DNA, 528 bp, Homo sapiens; identical to SEQ ID NO: 831480

SEQ ID NO: 853523 - DNA, 547 bp, Homo sapiens
ttataaaattataattaaaatattkaaataagaaaaagctttaataacattgcacattaaagaataatatattttagtccagacttagtggcttacacctgtaatcccaacactttgggaggccgaggtgggcagatcacctgcggtcaggcgttcaagaccagcctggtcaacatggcgaaacccagtctctactaaaaaatacaaaaattagctgggagtggtggcaggtgcctgtaatcccagctactcgggtggctgaggcagggagaattacttggactgggaggcggaggttgcagtgagctgagatcgtgccactgcactccagcctgggtgacagagcgagactgtctcaaaacaaatttctttttaaaaaggataatgtattttaaacaactttccaatagttgcttctgtatttgttagcataacattagctgctaaaatagactccaaaatttcagagatctaacacagcactatttctatttcttgcctacatgacattccaatgcagcattactcataatttggggtagaactg

SEQ ID NO: 853524 - DNA, 696 bp, Homo sapiens
acagtagtctcccctctggatcaggaatagaaatagtttcacagaacaccatgagcaataygcactattttatctcaaagtatctaatctgagttagttgtagctaagttttctatacctctgtggttgtcccagaggtatagaaaaattaaaagacatgattccttatgtcaacaacatggaatatgactgagggacaaatcattttaattcattatgtgaatctatgtgatataagcctgggcaataaagcactgtatttgctggaggaatagagaagtttcaaaatgtagatggagctttagttaagaattgagtgttgaagaataactaattttccaggtgaacaggtgggagagtgcattccaggcagaggaaagagaatactggaaggcataaagcataagatgacatggcgttctggactacatgaaattcattggtactagtcattactatataagacataatcccctaatgctcactatatggcttcttggatttatagactcaaagattaaattctgatgacagtaggaagcttcagtttggactcattcttagtaatacctaaaaagtaatataactcaatgtaacatttagaaagtaaatttgggcttataggttgctagcataatagataataatactatgatctcatttggctagctaactttgaacttattctctatcaga

SEQ ID NO: 853525 - DNA, 696 bp, Homo sapiens
acagtagtctcccctctggatcaggaatagaaatagtttcacagaacaccatgagcaatatgcactattttatctcaaagtatctaatctgagttagttgtagctaagttttctatacctctgtggttgtcycagaggtatagaaaaattaaaagacatgattccttatgtcaacaacatggaatatgactgagggacaaatcattttaattcattatgtgaatctatgtgatataagcctgggcaataaagcactgtatttgctggaggaatagagaagtttcaaaatgtagatggagctttagttaagaattgagtgttgaagaataactaattttccaggtgaacaggtgggagagtgcattccaggcagaggaaagagaatactggaaggcataaagcataagatgacatggcgttctggactacatgaaattcattggtactagtcattactatataagacataatcccctaatgctcactatatggcttcttggatttatagactcaaagattaaattctgatgacagtaggaagcttcagtttggactcattcttagtaatacctaaaaagtaatataactcaatgtaacatttagaaagtaaatttgggcttataggttgctagcataatagataataatactatgatctcatttggctagctaactttgaacttattctctatcaga

SEQ ID NO: 853526 - DNA, 489 bp, Homo sapiens
gacagggctgtttcagggtttgtagctggggccataattagtgaggctgccactaaggcatgggcctgtgttctcaaaatggtccttcctggtcttgggctctactggggtttcataagttataactggattccgaagttcccatgaagaaaatttttccatgaatcactgccaaattattgttactatggagggaatatgagtggaaaaactatttgccatcttgctgaccccaaactcaatgtcataatgatttatattgccttttttattttacctttgtgattatttagaagtatattattaaatcggtataaaattggaatgttcctagatatatgatatttatttcaaatttaattatactatgttcacagaacatactctgtatgatttgggtcttcytaaaatttattgagacctttattatggtctacaatatagtctatctatcttggtaaataaactgtgcatctgaaaaaaaaaact

SEQ ID NO: 853527 - DNA, 598 bp, Homo sapiens
tatttttcattcatttttggttgcttattgatagatcaattgattttttgctggtgtatttttatgaatattcttgagcttcccccccatcctttgtgtttcaaattccaataaatacattgctccaatatagtactggtattttgctaatttccaaatattcatttaaagtcacttgttccagtattatattttcaatgttctactttgttttttaaataatattaaacatttattttatatttgctttttagtagtgccaatgttttcaattttacaaaattgcttcatttggagttgtttctgttgaatcttgaacatggtatcatacttcctcataataaaagcccatgttccttggaagattgataaggggaaaaaattgagactgattttaaggtatattcctctagaatgttggaatttgcttctgctagttgtctggcatgctgtcaacctggaaacrtggttattaatatcttctacatgaagggtttaagaatgagattgggatcatgatttcaattttaaaactacatgaagtatagcctgtgcctaagaattctgagagagtatccagcaacaaaactaagttgat

SEQ ID NO: 853528 - DNA, 583 bp, Homo sapiens
tcacaatagcagcaagatggaggagctgccttcgaaactgccttaaatcctcattttatgccttcaygaatgtgtgataaattacttcattcccaactctctgtgggtctttcattcaaagtgtgcacctaatgtctccagacaggtggccttaatgctacccgttgacctcttccccatcaacttattaattggtactttctgaatttggttcagggaagcatgaaatatgtgtttaatgtgttgctgtatgaaaagaaatcactgcagcccaaggattaaagattaccagctgaggatgctgcacttccaagaaagagagagagaggggaatagaatcatatcttaaaagagcagagtgccaggcaaacacatggagctttctcaagcatttggaggcaatcatattaaagcctctgaacagttagtgtcatctttgaaagtggtgtcctgtcactgtaaatggcacaaaaggattgcatgccagacactctgcccaaactctgtttatgctatccaggacgaatttaaggttccttgctgttctttcaacctccccttcttgaagaggagaaaagggatg

SEQ ID NO: 853529 - DNA, 576 bp, Homo sapiens
aggtgttcacaaatcaaactcgcccacagtcatatattggccctcccttcccaaccggctctagttccgtaagtctaatcttccaagcttcagagtaccaccctcaactgtagggcatttgacagacttcagtgacagctggggaatgggcagtgacaaatttgataaatccagctgtaggagagattggtggaaccagcaataggccatcattcctgcccagccttcatcagcaaagcctgactgttcagctttgatactcttatcttttgaccttaatgacatttggatccagtctacatcagctccccacaagtattggtaagattgcacctacccagcctggttccaggctctctttgtagccccagcttccacttcactctattatgtatcccagccaaactgggtctcttgctattgaccaaagaaatgtgagaacatcaccytgagttttgctgctctgtttatttgcacagactgacccattcccctagaacactttttctgcatgtcttcattctaagacatattaattgtattacaaagcccgctgtgaattcttttgcaaattcc

SEQ ID NO: 853530 - DNA, 567 bp, Homo sapiens
gcaggatctggttggatgagagaacctggctgaggaagaagattcagaaaktaatgccatgcccccaacggtgtgctgaatgcccccgcttttgaggcgcttagtgtgtggtgagggaaagggagtgagtgacataaagcagctctgcagggcgggacccagtgagcctggcatcatttttagggtgttcctctccttcatagagcctaaaggatgcaccaagctgtgcatcagtaattattgctctgctgtctccattgttagacgccattttgggttactatccttttggcatttctttaatgatatcgggaatcaagttctgggataccattgtattactttgaatactagttcagcagctgaaacaaaggacagaaaaaaaaagtagttaaaataagagagaggtttctctctctctcaggaacagtctgagagtaagcagccagtctggacatggaggtcccgtggtggcaaggacccaggctatttccatctttgttgctcttcctcctcaacatacagcttctatctcatggtcaaaggtggctgctctagttccctgcc

SEQ ID NO: 853531 - DNA, 516 bp, Homo sapiens
ctgaatccagcagcacatcaaaaagtcaatgcaccatgattaagtaggcttcattcctggcatgcaagkttggttcactatacacaaatcaataaatgccactcaccacataaacagaattaaaaacaaaaaccatatgatcatctcaatagatgcagaaaggcttacagtaaaatccaacaccccttcatgattaaaaaaccctcaagaaactaggcatcaaagaaacatacctcaaaataataagagccatctatgacaaaaccacggacaacatcatactgaatgggcaaaaactggaagcattcccctggaaaactagaacaagacaaggatgcccactctcactgttcctattcaacatagtaccgaaagtccttgccagagcaatcagtccagagaaagaaataaaaagcatccaaataggaaaagaagaagccaaactatctctcttagatgatatgactctatacctagaaaatcctaaagactgccaaaaggctcctagaactgaac

SEQ ID NO: 853532 - DNA, 516 bp, Homo sapiens
ctgaatccagcagcacatcaaaaagtcaatgcaccatgattaagtaggcttcattcctggcatgcaaggttggttcactatacacaaatcaataaatgccactcaccacataaacagaattaaaaacaaaaaccatatgatcatctcaatagatgcagaaaggcttacagtaaaatccaacaccccttcatgattaaaaaaccctcaagaaactaggcatcaaagaaacatacctcaaaataataagagccatctatgacaaaaccacggacaacatcatactgaatgggcaaaaactggaagcattcccctggaaaactagaacaagacaaggatgcccactctcactgttcctattcaacatagtaccgaaagtccttgccagagsaatcagtccagagaaagaaataaaaagcatccaaataggaaaagaagaagccaaactatctctcttagatgatatgactctatacctagaaaatcctaaagactgccaaaaggctcctagaactgaac

SEQ ID NO: 853533 - DNA, 575 bp, Homo sapiens
ataatctattttctctcctttttcttgtagtttgtttaaaaggcaaacaaaaatctttcactttttcaatattccataaagatcctgttcaagagagaaagccaaatttcacctttgcattagtatacaattaatatcaaacccaattttaaacaagaccttatacacaaatctacccaatcttgatcagtttgaccataaggtaagagtctcataaacctgttataatcttttataattttctgttaaaaagcagatcaacagtgtaagaaaaccctgttgtgcttttatttcaatgtttgatttatagaaaagctgaataattaaataatatccctttaattttgaccaataagttcacacacagaatttttacaagattaatctttcacaaaccttccataacttggccaaaacttcagctttattctgcctaacataaagccatcctttaatcctctaaaccagaacaaaaaacccyacattcccatgccttcttataattttttaccggaaacatattctactttccttacacaccttgcatgtaaaaccgtttcttcagtagtcttgat

SEQ ID NO: 853534 - DNA, 410 bp, Homo sapiens
tgggaccaggggtgcacaccaccacacccagctttttttttgtatctttagtagaracaggggtcttgccatgttgcccaggctggtctagaactcttgagctcaaccagtctgcctgcctcggcctcccaaagtgctggaattacaggcgtgaccgaccacacccagcctatcatggatgttttcaaacaaaaaaaaaaaggttaaaagaattagtgaacacccatatgccctctacttaaattctatcatatacactttactatatattcacctatccatctgttcatctctctctccatcactatatcaattcattttatttctgatgtatttaaagttgcagacatcagtatacatgacccttaaacacttcagcatgcacagcattatttagagttaaatatttg

SEQ ID NO: 853535 - DNA, 410 bp, Homo sapiens
tgggaccaggggtgcacaccaccacacccagctttttttttgtatctttagtagagacaggggtcttgccatgttgcccaggctggtctagaactcttgagctcaaccagtctgcctgcctcggcctcccaaagtgctggaattacaggcgtgaccgaccacacccagcctatcatggatgttttcaaacaaaaaaaaaaaggttaaaagaattagtgaacacccatatgccctctacttaaattctatcatatacactttactatatattcacctatccatctgttcatctctctmtccatcactatatcaattcattttatttctgatgtatttaaagttgcagacatcagtatacatgacccttaaacacttcagcatgcacagcattatttagagttaaatatttg

SEQ ID NO: 853536 - DNA, 642 bp, Homo sapiens
gctccaaaacacaaatgtttaataagtgggagagttttgaaagcagcaccattattctgaggttgataatatccaggtttgtgctgtctcctatgggttaaaatgaaaaggatgtatcctacaggtgacgrtagggacagaggccctcccagtagtcacgttaagctagtactgacagaaaaaggaaaagcctgtccaggtggctgggcaaccctgcagcgaggcatagatgagcttgtaaatcaaaggaaatgaccaaggtgagtctcaatccttttagaggtttattttgccaaggttgaggacacatctgagaaaaaggaacacaaaatcacaggaacatctgtgatctgtgctctttccaaagagggcttgaggacttcaatatttaaagggaaagagcaggcagtaggggaaagtggaaagtaaaaagggaaggtagataaaaggggagagtagttgcattctttggggcctttgatcagcattcactgaatgcgcatgttacattcgtgaaaggaggtcgtagaggaatagtcagttatgcattcgtctagtgcttggtgaatctgcatttttacaagattaaatatagggtagaggaagcggtcaaattgcatttttctccagcgagaggaagga

SEQ ID NO: 853537 - DNA, 456 bp, Homo sapiens
tatctgtggagtatagctttatgactaaattttgtgtcccaagatgcttcctttactcttgatgctgaaataactacactaggttaaatacagaaagggtttgtaggtcaacattcaggaaaatagcacactgaacatgtggttttaaataatgttttaatgaagaagaatgagaaggttattttgcaagacagaggggattgtcacattacgcttacctagaattctaaggcaagaatattaatggagactcataaatcatttgttcaattattttcaaattagttcttaaaatttaaaagtcaaatacaaattataagattgaaaattaaaaattcaaatcaaaaatttttaaagcaaatatttttaatttaaatgaaatttattacayatttttatataaatttgcaattctaatatttattatttatctagttgtcaaataattggtatcaa

SEQ ID NO: 853538 - DNA, 456 bp, Homo sapiens
tatctgtggagtatagctttatgactaaattttgtgtcccaagatgcttcctttactcttgatgctgaaataactacactaggttaaatacagaaagggtttgtaggtcaacattcaggaaaatagcacactgaacatgtggttttaaataatgttttaatgaagaagaatgagaaggttattttgcaagacagaggggattgtcacattacgcttacctagaattctaaggcaagaatattaatggagactcataaatcatttgttcaattattttcaaattagttcttaaaatttaaaagtcaaatacaaattataagattgaaaattaaaaattcaaatcaaaaatttttaaagcaaatatttttaatttaaatgaaatttattacatatttttatataaatttgcaattctaatrtttattatttatctagttgtcaaataattggtatcaa

SEQ ID NO: 853539 - DNA, 581 bp, Homo sapiens
gtgaaaagaatgagttcacttcataaattattcaaattgatggttttaatttttgaactacagctagttactgctaagttgctgcattgtaatcacacactgaaaaaaatagataataatttcaagcaatttattgtattttgtcaggttcaatattagacagtaatatttaactattaaaacttttaaaactggctacaccaatagtcattctgtatgtctctctgtctttctataatgcacacactatcttaggttcttcttacatgcgtaagtgagaagatgtgttatgcttgaggaaatgcaactctgaaccaacagggtgttctctgtaaagtagacaaaacatttcttcccaaaggtcaaatactgtgaaaatatgaaatgctgaaatgtgcaattattgcatcttgtaaattattttaaagtcttctgtttttaaatttataaaaatgtaattrttctatttggtgtttcttccttcactcaataagccatcatcaagcgcccaatgtgtcctggcattacaataggtgctctgggaataaagagaaaaaacagtcggcttcttccaatttctg

SEQ ID NO: 853540 - DNA, 603 bp, Homo sapiens
caaaagtcatcatattaaagcaatttttcccatttgtcattttataaactttcaataatgaaacagaagtttyacaagaggaaattgtttccaacttggagtgttttatcaaatactcagttccagcccttctgctaattgtctctatggagcagcagaatgtcttttccaaaagactatcaggagaactaaaaactatgcaacctgttaggtggcctctgaataaaaatgctctttaattgggagagtaaatcaagaacagagtaacagaaccaaatgatattgttgttaaactaatcaaatgagtaatcttcttaagatcatcttatgatcttgactagtttatggcctatggtgaaagtaaacaaacaaacaaaaaaaacatagtatgtaaacatcattttgggcagacctggtcttcaggagttggttttttttctattccctctagattaaagacattgcacttaactttaaatcctcacagaactttagattctcctgaggtcaatccaactcaaagctcaattgatgaatctttaccgtatctgctttaaagcatacatattatgaaataatttacatttcaatattcctgaaata

SEQ ID NO: 853541 - DNA, 638 bp, Homo sapiens
cattaacatcaaacaagactcttctgctccagctggattgattcataattccaggagratacattgtcattcactctgcagctttctttccctttcccctttgtggctctacaccttatctctcctttagttttttttttttttttctttttgagttggagtctcgctccgttacccaggctggagtgcagtggcgtgatcttggctcactgcaacctccacctcccgggttcaagcaattctcctgcctcagccttcctagtagctggaattacaggtgagcacccccacacccagctaatttttgtatttttagtagagatggggtttcaccatgttggccagtaggctgtctcgaactcctgacctcaggtgatccacctaccttggtgtcccaaagtgctgggattataggcatgaggcactacacccggcctcctttaaatcttgtctatatcctgcctccttaaaaattgccaatctctaaaactcagagtaccatacactttatttagcattttttcacacagcattcctaagcaaactgtgggtggaactaattcttatgtttaggtaatatagatgccttattcccagtaagcactcatgcaataaatacagaagagtaagtgacaaac

SEQ ID NO: 853542 - DNA, 614 bp, Homo sapiens
atacatttatcttgaatagcttccatagacttcatataatcagaaagcaactctcatgagggtatggcaagtccaggaactgtgtgcttccataattaagcctaggctcgctctcatttcttctctcattgtagcctaattctgtatgctgcctgcagtctactcatgcatgcagcaaacctgtctttgttaattctgagcttctgtctctagagatataaccaataactcctttaagaaatctttacacaggtctatttgcaatgtttagaaatctgtcatcttttaaaataacaagattatttctacaaatgaataaaaattgctgctctgggatgatcatcaaattttttttcattgaaataaatattctacaccctgaacttaattcaacaaacatatcaggtttctggcaaggtatgaggcagtggagatttaaagacaaatatttattgaaggtatatataagcagcagaaaaagatgttctagggagrgaataataatgctacgtgaatattaaatcagaaagctattagaaatgggtagaaaatcacaattctgctatatatgggaaccaccatccacaccaaacacttaaataatgcttattatg

SEQ ID NO: 853543 - DNA, 632 bp, Homo sapiens
ttcatgtatcgctagtataaagccaacactggttccatcatactttatagtaatttccttgtctcagctgctcttacacagttgactcttgaacaacacaggtttgaactggtcagrttcacctatacatagttttttttcaataaatacattgaaaattttggggaggtttgcaacaatttgaaaaaacacacatgaactgtgttgtgtaaaaatataaaaaaataaagaggtatatcataactgcataaaatatatgtaggtactagtctgttttgtcatttgttaccataaaatatacaaatatataaatcgattataaaaagataaaatttgtctaaacttccactataaacacttccagatcatacaaggtgccatgcacagtcaagagaaaggtaaacaaatgtaaagatgcaatattaaaggataactgaatgaaattaactatagtacatatggtactactgtagtgattttgtagcctctcttgctactattgtgatgaactgaagttttgtgggtagctgcttaaaatgctgtgtgacattaatctctgcataagcagttcatctgtccagtaaatcgcatatttcagtaaaaggtgatttttttgtagttcttatttatca

SEQ ID NO: 853544 - DNA, 600 bp, Homo sapiens
ttagtattgtttccttccccttggtccaacttttaatattatagttcaattttgcagtcttctgttgtgttgttttattttattactagctaaattctatgaggactgttacacctttaagtgccacatatttggattaagattcaagttatttattaaataaataaatcttataaaacctaagaatcgtaatgtacctaaatgtctaatctaaatgtttactgttaaatgttgtcatagaacctgagaattcaccaggaaaattttactgatatccacaaacatatatcatctctatcattagttgcacatccagtgaaaatgataaaatatctacctcaatataaattaatatataaataaagagaaattggcaattcattagagtatgttgggaaagaaataaagtatccctatgccctatagtaaatcactgtgatgatttttttcaacatattttaaaagtcctaagtaccaaaattacaacaaagtttaatggaattgtatctcatttactcaggaaatttataagaaaatatgcaattgaatcagaattgctcrggtattgaaacagaaattgcctatcagtggctttctggt

SEQ ID NO: 853545 - DNA, 628 bp, Homo sapiens
aagattttgtgaatttagtcttgggcttactcatagtgtgtctttcagccatctcccacctccytctggtctccttttacctgtcttcgattttgagttgatcattgtatgtttataatggaattccctagtgccatattgtcccaacagcacattatggaacaagtacttttaaaatcatttttaaacctggaattaaaatagatgtttctctttgaatgaaccctgcattgccttagttagtgtcattatgtgtaatttaaaaattgttaacatctaaagctaaaattcatttttttcacattaagtctgattatgttctgaaacgtaggtttggacatttaaaaaatgttcagttacagttttaatatgattttttgtcactgaagtttgattgttttattcattgctctctttgtaatactgtttcttccaaatgtcatgttttcatgggtttttatggacagatttatacttgagggtttgatcaagggtgttctgttaaataagtgggaaaaatgaccatctctaatgtagattgtcatgtggaagtgaatagcgtatttccatttgtagtactctacccaattttctctccattctttatttgatacatgagcaaaaatac

SEQ ID NO: 853546 - DNA, 628 bp, Homo sapiens
aagattttgtgaatttagtcttgggcttactcatagtgtgtctttcagccatctcccacctccttctggtctccttttacctgtcttygattttgagttgatcattgtatgtttataatggaattccctagtgccatattgtcccaacagcacattatggaacaagtacttttaaaatcatttttaaacctggaattaaaatagatgtttctctttgaatgaaccctgcattgccttagttagtgtcattatgtgtaatttaaaaattgttaacatctaaagctaaaattcatttttttcacattaagtctgattatgttctgaaacgtaggtttggacatttaaaaaatgttcagttacagttttaatatgattttttgtcactgaagtttgattgttttattcattgctctctttgtaatactgtttcttccaaatgtcatgttttcatgggtttttatggacagatttatacttgagggtttgatcaagggtgttctgttaaataagtgggaaaaatgaccatctctaatgtagattgtcatgtggaagtgaatagcgtatttccatttgtagtactctacccaattttctctccattctttatttgatacatgagcaaaaatac

SEQ ID NO: 853547 - DNA, 625 bp, Homo sapiens
agttaatacattgatatggtttggctgtgtcttcacccaaatctcatcttgaattgtggatcccayaatccccacgtgtcatgggagggacctggtaggaggtaattgaatcataggggtgggtttttcctgtgctgttctcatgatagtgaataaatctcatgagagctgatggttttataaagggcagttcccctgcacattgtctcctgcctgccgccacgtaagacttgcctttactcctccttcgccttctgccataattgtgaggcctccccagccatgtgcaactgtgagaccattaaacctctttttctataaaattacccagtctcgtgtatttcttcatagcagtatgaaaatgggcaactacacacaccaaaataacaaatttatacactctagtctatgaagttgaaatgatcctggtctttaagtgttatatcaatgtttttctccctacaaagataattaagaagcctttctatcctcctttactctatatattctacttcccattctgggctttgttcttcaaggttataagagctgagataatttaatggtgaatgatcctgaataacaaaaaagtaaacaaacaaaccctaacaacttgcaaaacaaa

SEQ ID NO: 853548 - DNA, 608 bp, Homo sapiens
gaggctttctagacatgacttttgtatttaatttttctttatcgttttcaaaactcttcttttrtgttgattcaggtccttatcatctcttgcacagattattctaatatcctcttttttacttttgtcagtatacctagagttcatcaaatgggcttactcaagccagaatctcagaaatgaaggtagggaagaatgtcatttaatcatctatgatttaaaaataataactgccaagaatgccaaatgttgcttatcttattcttccttacggtaatcttcttgggaaaacaaattataattggaaagtgcttgcttagtgaatcggacatcagaataaaggcagttcgatcatgtttaaatattatcatcatcttgataatacttttttttctctctgtgtaatgtatttcactactttgcagcttcctttcacattaacttctggtcctgcatttgcagaaactatgtcccaatcaccttcattaaacctggagttgtagaccatgtccttggtgggctgtttctatagatgactgatatacttgtttcacactcagagggtcattttatttcaggatctcttgatatatacatatggatatata

SEQ ID NO: 853549 - DNA, 575 bp, Homo sapiens
agtattttgttgagttgattttccatattattggtcactgtrttttgactgggttatttcaaaagactggcttcaagttgtgaatttcttctgcttgatctagtctattgttgaaacttctgaatacattttggatttcgattgttttttgtttttttttttttttttttttttgatggagtgttgctctgttgcccaggctaaagtgaccccagtttactgcagcctctgccccctaggttcaagtgattctcctgcttcagcctcctaagtagctgtgattacaggcaggtaccaccacacctggctgacttttgtatttttgtagagatgaggttttgccgtgttggccaggctgatgttgcagtcctgtactcaagtgatctgccagccttggcctcccaaagtgctgggattacaggcatgagccactgtgcccagcctctgttttgttctttttaaattctctctctctctctctctctctctctctatatatatatatatatatatatataattattactgaattacagaataaaaataaataattaatttattattcatattattca

SEQ ID NO: 853550 - DNA, 575 bp, Homo sapiens
agtattttgttgagttgattttccatattattggtcactgtgttttgactgggttatttcaaaagactggcttcaagttgtgaatttcttctgcttgatctagtctattgttgaaacttctgaatacattttggatttcgattgttttttgtttttttttttttttttttttttgatggagtgttgctctgttgcccaggctaaagtgaccccagtttactgcagcctctgccccctaggttcaagtgattctcctgcttcagcctcctaagtagctgtgattacaggcaggtaccaccacacctggctgacttttgtatttttgtagagatgaggttttgccgtgttggccaggctgatgttgcagtcctgtactcaagtgatctgccagccttggcctcccaaagtgctgggattacaggcatgagccactgtgcccagcctctgttttgttctttttaaattctctctctctctctctctctctctctctmtatatatatatatatatatatataattattactgaattacagaataaaaataaataattaatttattattcatattattca

SEQ ID NO: 853551 - DNA, 325 bp, Homo sapiens
taattcaatgaatgtcaccttgattttagttaaaaacagcatatgacttaagatgaaaatagagtgaagttaaatagaaagcagatacagaagaatttaaggtggatgttgtaccagtcctacstgaggagcaaggaagttgaagggaatacattattttcattttcaaagaaagatttagaattttaagctttcctgccttgataggaaaggaacattttgctctgttttttttgtgtgtgtgttttttttttaccagtaaactgagtaccagatattgtttcaaagtgtgattactggattgcacatttagctgcgtaatttc

SEQ ID NO: 853552 - DNA, 535 bp, Homo sapiens
aagtatccactggcctcctcactctcctgcacatacacatgcagacaccaaacacccacaacttttaccttcaggaagcaaaacatgcctcacctggcctgatgtaatgtcccagaaactttctgctccccraagctggaaattcttaacctcaccctcagccctggcttggctcaaccctgaccctaggggttctagaatgcccactttagagcacaaggtgtcctactccaggcggctctggctcctgctctgaccctcatcccagttccaggagttggactcctaaacaggtggtgtcacttggtcatggttttgttctcttgagtgcatgaatatcctcttcataggctgcccaaatctctgtttctttcttacgtcagcctttctctctgtccccctactggactggagaccagctcacccagaaggcaaggatagagtattttatccctgtaccatctcaccagtactctgcacagtgtaggtggttatatacaatacatacatacataattatatgtataataaatat

SEQ ID NO: 853553 - DNA, 476 bp, Homo sapiens
gttttcctttataggtcacctggtgcttttgtctcacagctcttaagattctttcctttgtcttaactttggataacctgattgttgcrggacaatcaaagactggagagactgaaaaaggttcgggagaatttattaaattgaagtgataactggctcagccggacatacgtccagaaagtctgagccccaaacaaagggcttttcctacttttaaacatcttaaggtgggaactacgtgagacaggaagcgagttacagaagcaagaaacaaaggcagcattacaacatttctttacatcttgagagaaatatgtcttgcaaccaaaacttttcagtcttgtgaccctgcaggcacgctagggaggtaagcagaaactcgctgggcctgtaataaactttgaggaatgtggagttggggagtatagataaggtctactgaccgcagagagaagataggctgttaatattctctt

SEQ ID NO: 853554 - DNA, 459 bp, Homo sapiens
gctttcctgatgtccccttgacttggatccctctgtgagtcaaggactttcttcttgagaaaagaatcataactcatctgatcctagyagcatagaaatacccattatgaggctacacccacaaatgaggacagactcctaaatcttaaaaaaaaaaaaaaaaaagacaatgcatccttgttttcaagcacttatttcccctcccccccacccaatcaatttccagttaaaagcatgtggcgttttttttttggtggtggttaaatggaaactatgtgtgttaaagataggaatagaagtgaaaatgagaaaaatcagtccttaaaacatcttcctgactggaaggctcccacagcattcagaagccgttcagtggtcctgacaagttaaatcagtggcataattattcttgcagaggaaagataagtcgtgatttcaaaagaatatgaagaatgctta

SEQ ID NO: 853555 - DNA, 486 bp, Homo sapiens
gtttgtgaaaccagcccaattatcccatagaaatgatatttagatttttgaataaacatagtgattgaccctcctggtctcaaagtttgaaattcatgtgtgtgacatctgagttcctccmtcaggaaactgatcctcaggccagggactaaacctcaccagatcaccacatccagacaatgatacaccagacctcattccctatgattgcttccttacccctccttaattcttattttacattccttcctcactatataaactccccaattttagttggttggggtgatggatttgagactgatttgttctcctcagctgcagcacctggttaaagtcttctttcctggcaatacttattgtctcagtgattggctttttgtgaggcaagcaatgggccctaaaccaaatccctgacatttgggtaacatttgggattttttttaagttgctataaaatagacagaaataattctgacaaatatc

SEQ ID NO: 853556 - DNA, 674 bp, Homo sapiens
ataactcaagatgatattcgagtggggacacagccagaccatgtatcagtatatttrtatattcattcagcagttttaagaacagtttttctttgagttgattattctcttttaatagaaatttccctgatgaaaagaaaaattcactattgtcagctttaaataggagaatcatagacagggctgtgatggaaggagagccttctgaggaagagctgtctctgcagacttcactgtttctgggggcagtccagtggtgagcacatggtcttcctacaatagggtttttgtaaaggttgggtattgttaaagaaattctggcttcctcagaaaagaatgatacagactttggcttgtcacttctcctagaaattgaagctttctggaataagcccatccatcagtccatgcaaagcaaatggccttctcctgccatatgggcctcatgatagttattgcttctcctatctaggtgccaagaacaaactgagtgtaaaaactgagagtctaaaaaaattcagtggctggggaatttccatcaaatgttttgactgccatgcaaaaagggcatgatgatgcaataatccctttgtggggaggagggagtgcaaagagccctggtaatagaattttaatagcccagtgttcatttttgtaaagacgtttgatgattg

SEQ ID NO: 853557 - DNA, 545 bp, Homo sapiens
aaatttgtattagtcagatggtgccccatggagaatactccaatactgtgttgtctaaawttttggcctagcaaggaaaatagaactaggacagaattaacattcacattatttttctttcgttaaatgtctttagagcaagaagtccatgagaataaaaaagatgcttcattttccctactgagccattttacaaatgggcaagatggggagtaaggggcagagagggaataagaatgaaatcatactaatgccatttaatatgaaaaaatgtatagttagaattctgataaatttgtcacttctgatttcaaaaattagtcttcatagaaaaaatgttagtgatatttgaggaagggtattgcatcatttcaaaaataaataagggaagttattttagatgttgtgccaccatttaaaagtccattcttgcagacagggagcagtggcattctgcatgattcagtgtgcccagaaactgccacataggtagggatgacaggaaggaaggagtttatcaatgaaccagtggttttcaaagtgaa

SEQ ID NO: 853558 - DNA, 599 bp, Homo sapiens
gagccaggtctgtagattctgggagctagagtggagtatatgattcccagatgaagggccaggggacctttgtgtacttgagggrtcatctccaacccccaggaggacacgtataatacaggccttcttggaggcagagggatgagtaaaatgtcagctcatgggcatctctgggtaagagaatcagagcctgtgtctgcagtgggtcggtttaggaactcaaggcaaggctcctcttcctaccttcccccagctctccaggactcatgctgatggaagagtgtagcctggaaggtttgaatgtagagcaacatctacaaccacatttttgtgcacttacacacatggtcagatacactgagtggggacgctgagctgtcatcactcctacagtggtcatggtctgatggtcccaatctatttatccatccatccaacatttatggaaggcctactatgtgccaaggaggggtaaggcagctagctctcacagacacaccccacagtgaaaatcacacacacacacacacaccccggcatctgtgctcactcacaggcagactgctcactttcttgcacctttcttgccatcacctcgg

SEQ ID NO: 853559 - DNA, 595 bp, Homo sapiens
catggagctgtcctctcctataagaacaatgccctcttctggaacaactcctgagagacctgcctgaggctgttttacaattgacttagtattttttatacgtagaaggagcasactctaaataatacagtaaatacataaaccagtaatagtcatttactatcaagcattatgtactgtacatagttttatgcactatacctttttattttttgagatagggtcttgctctgtggcccaggccggagtgcagcagtgtgatcccagctcactgtagcctcaacctcccgggctcaagtgatcctcccaccttagcctcctgagtagctgggactacaggcgtgcaccaccacgctcagttaatttttaaattttttttgtagagacaaggtctcgctatgctgtccaggctggttttgaacttctaaactcaagggatccacctgcctcggccttccaaagtgctgggattacaggcgtgagccaccgtacccggcccctgtacactatacttttataccctatacccctatacactatgctggtgtagtagatttacaccagcatcaccacaaacacataatgcattgtgcta

SEQ ID NO: 853560 - DNA, 577 bp, Homo sapiens
catatctaactacagcaggtcttcaagcttattatcctgtcatgagttcataaagatgacaaactcatcatttgggagctataasgtcaaagtggccagaatgcaactgcgctgttacactgtgcaaaatcaagtcaactgtcttgtaggtccttggctgtctcttgttataacctcgaacacttaaaaaaggaaacctcaagtatgctgagataattatcagaatgttcaggtacctttgttcctgaatatcaagtaatagggctcatctctgtgactgcttgcgacaagcacatagggcaactcattaccaactgctcattataaatgctgagctcttgagttcctgaggagggggtgggctctagactatcgagggctgagtcaactaggtgaagggccaacctgtacagttctaagtcttattttggttctgggcacatttcagttctgctccaagtccgctttgctccaattcagcgatgacagacatatatttgaactcatttggtctgaggttaaaggtctccactaacccgtaggtctctttccgatcagtagcgtagaagagctgaac

SEQ ID NO: 853561 - DNA, 594 bp, Homo sapiens
agcacagcttttttcccttcttgcctgtaagtgacctatacctgagctgacttggagcctcttcctagtctatctctggtgaatattccccttagcaagtggcattttcttggtctttcccttcttgaaattattcttagagatggtcaccatctactgcttgaccattaaggtctgtgacagagaagggatgctgctggcttctctggtttaatgttttgctggccttcactataataaagcatctgaagtactggattatcagctagttctttgtttttccctgaaggaggggtgggagcttaggttaagtttctatcaagcacacaaatatatattgagattacatgagtaagtgtaagattaaggaggaaaacatatagatggaaggataaagccaggccttttggtggttatgatggtatcgctatctttttttttaatctctcatatatatatacccttatcctacatgaattcaacagccagaagaagagtctgcrctttttgtgatgttttagatctctgatactgactcattgtttaaacaggccttcttacctctccctcaaactgacttggtgacttgatgtc

SEQ ID NO: 853562 - DNA, 594 bp, Homo sapiens
agcacagcttttttcccttcttgcctgtaagtgacctatacctgagctgacttggagcctcttcctagtctatctctggtgaatattccccttagcaagtggcattttcttggtctttcccttcttgaaattattcttagagatggtcaccatctactgcttgaccattaaggtctgtgacagagaagggatgctgctggcttctctggtttaatgttttgctggccttcactataataaagcatctgaagtactggattatcagctagttctttgtttttccctgaaggaggggtgggagcttaggttaagtttctatcaagcacacaaatatatattgagattacatgagtaagtgtaagattaaggaggaaaacatatagatggaaggataaagccaggccttttggtggttatgatggtatcgctatctttttttttaatctctcatatatatatacccttatcctacatgaattcaacagccagaagaagagtctgcgctttttgtgatgttttagatctctgatactgactcattgtttraacaggccttcttacctctccctcaaactgacttggtgacttgatgtc

SEQ ID NO: 853563 - DNA, 563 bp, Homo sapiens
ggtttttattcaggggtcccaataagagataccttctccccacctggctgsacttagacccagtttagaaggccagtctcctcctcaggtctgcaggtaaaaaaaaaaaggaccaccaaataggccacacatagaatttcagttttattaaaataagcacaatgtataaaagcaccgtggtgttgtataaacgtctgcctgacaaatgcaaatctattttctttatgtaactcaatagttccacttatctgaatggctgtaccttcatgcacacgggcagcaggcactgcattgctcaaacagggaagtgaggcttcaccctagtgtggcttcaccttaggcacagagcactatctaactgcccagatctgtgccacccacacaagacctggggacacagcagcagacaccgatgctgtctctaagttcatcacaggaacagcttaaaatcagaataatagggaactgctgattaaaacccaagtgcatggacattctagaaagaagagcaagccgttccactctctgggaagttcatgggcttgcagtgggagtttaaggta

SEQ ID NO: 853564 - DNA, 580 bp, Homo sapiens
gcataagggggacaaagtagaggatccataaagaggctcatacacctgatacaagacaaaggtgttactgtgacacagtgggacaagagtgctytatttcttaaaagatgatgaaacaaatcaaggtccaaataaaaaaaattacttcatccatacagaaaaataatttctaatggattaatacctacatatgaaagataaaaaataaagcctttagaaacaacatagacaacatcttcagtaccaatgggaaagacaggatttcttaaacaggacttagaaagcactaaccataaagaaaataatcaaagtggacttcatttaaattaagaattctgatgtttagaatacaccataaaactttgagtgaaaaggctgggagcagaaaagatgcttgcaattcatgtatctcccacacatttcaaattatatatatatatatatatatatataaacatatattaatatatattaacatttaaactacatatctattatataatatataataatggataatatataatgtaattctataattatataacaaatatttaataattatatattaaatatatat

SEQ ID NO: 853565 - DNA, 554 bp, Homo sapiens
cttctgtctttgtcatggtgttgccagaggatgctctaccaattaggagtagtgtgaatcacatccaaacacttactctctggatttgggtagttctagaccctgatcttggtcttctaaacaastccagctagacttgttaaatcaggaataactcaataaaccagagttgcagcttcttgtgcttttattccatgaataataggttctggaaagagccaaacttggagattgtgaatggcatgggttgggtgagccctttcaaaaaattctgtgagataaagtaacctggatttttcccgctaatattttagttatatttcctagatttctactgagttctacacatttacaatccatagtcagatcttcactgactcccccaagtccctgaaaacataatctagcccagctctttgacagcttataagtgaatttacttaatgctcccctaagttggcaacttattctaaacatagctttcatgttattgcaaagcttaaaagcaaatccagaaataattactcttccacgaatttttcctaaactggtca

SEQ ID NO: 853566 - DNA, 715 bp, Homo sapiens
tatatattttatactatgcctatatatacaaatatataaaacacatgctgtatataaaaatataatattttaggtatgtaggaattttaatctctttcaagttactgatatacaaatgaataaaatgacataagtgcacaaacatataatgtagaaataacatgcaaaggcagatataagtaagtacgtattaaaattttaaatagaaaaagaacaagtaagacaaaaccagactaaatctaaagatttaaagatttaaaagaataaagagttaaaccaaaacagaaataaagggagaaatatttacacaaagagaatgttaaatattttcacaaagtgaaaattaagttcttgtaaaaagtttttaaaagttactgacaaatgtaaagaaaagactaaaaatatattaatgaaaaacatgctgaaaagtactaaaattatgaaatcacataaaggagaatgattagttaaacttaaaaaatatatagaaaagatgttgagaattacatttatgttgattgataaagttaactgaaagtgaacagcattccaaaatgcccagagctcacaggtttggataataaacatgctagatatttgcttttcatactgataatgaataaggacaaattcaacttttacactttatttstgtgtcacagttgctcaaacaaacaaacaaacaaagaaacaaacaaacccaaaatgccaaaaa

SEQ ID NO: 853567 - DNA, 512 bp, Homo sapiens
atcaatttggggactcaggaaccccagtaaragggagcgttccaccactctttcaccttctccgtgacaatgtccccctcacatgtctgtccccaaggctgcttgtcagggtgtgggtgtgcctgtgtatttgagaatgagcgtctgtgtaattttgtgtctgagactgcgtgtacttccgatgatgtaatgcaataggcttggaagtactggcctacattggggttgtgtgtgtgcgtgcatgcacctgtgtgaacgggtgtatgcatacacacccacgggtgcttggaaggtgtttaagggtactgtgatgtgcctgtactgtgagcacaatgtgctgtgagtgtgcatgacagagagtgcttctgtctgtaagtgtggctgtggcgaaggagtgtgtgtcaggagaatgtggatgtgtgcgtgcaagtactgaagtgtctgcatttgggactgtacacacgtgtgctagtgtgagagatatgtggacgtggattatggtgtaagtgtga

SEQ ID NO: 853568 - DNA, 587 bp, Homo sapiens
ggccccaaagccacttgtctcctaggatccaggcctctgggcttctgccaagaactcagggtggccctatgacttggaggagcaagatcagacmgctcaaaggtccccgtgttcactgttacccagaggctgttgttactacccacttcattccccaccgctgccagtgccactgccaaccctgttcacaggcgcttccagcccactccagccaggggagcagggaagaagaaggggctccctcctcttcacattccccccgaccccaaagccagagaaagccagatggcaccagctgctccggatgtgcctgcccacattgggggacagggccgggcctgggctcggttcccaggtttgagctctgcagcctctctcctggagtgagggggctgaagtcagaccaaaggaagaactcagaaatgtcttgtttatttgtgtttgtgaccaagcagcctctcccttcacccaggtttatggcctcgttttcacttgtatatttttcacactgtaaatttcttgtacaaacccaaagaaaaaattaaaaaaaatttttttgtttaaaaataatgtgaatgtgctggata

SEQ ID NO: 853569 - DNA, 587 bp, Homo sapiens
ggccccaaagccacttgtctcctaggatccaggcctctgggcttctgccaagaactcagggtggccctatgacttggaggagcaagatcagacagctcaaaggtccccgtgttcactgttacccagaggctsttgttactacccacttcattccccaccgctgccagtgccactgccaaccctgttcacaggcgcttccagcccactccagccaggggagcagggaagaagaaggggctccctcctcttcacattccccccgaccccaaagccagagaaagccagatggcaccagctgctccggatgtgcctgcccacattgggggacagggccgggcctgggctcggttcccaggtttgagctctgcagcctctctcctggagtgagggggctgaagtcagaccaaaggaagaactcagaaatgtcttgtttatttgtgtttgtgaccaagcagcctctcccttcacccaggtttatggcctcgttttcacttgtatatttttcacactgtaaatttcttgtacaaacccaaagaaaaaattaaaaaaaatttttttgtttaaaaataatgtgaatgtgctggata

SEQ ID NO: 853570 - DNA, 541 bp, Homo sapiens
ttggaagagggcaggtgcagaaggagaggggayctggcatcagaggagcagtgccaggaacacggaaaatagcaggacataaaacactgggattggtgaggcctgtggcatgtggacagtgcattctaaaatgtcttatcaatgctctgggaaaaagaaaagccaaaacagcctatcagaaggggatattatttgtgtccctatttttcatttctttaaataaaatggaaaaatgctcttaagcaaataaaacaagattacaagtcatgtttggcaggcaactttaaaaccctaggattagatcttagatgtggggaagtagtttaagaccttgatgcctgaagcagtgtcaacattaccaaaagattattctaaatgtgcaatctcatcaagattcatctcatcaggccccatcaagatctaatgaatgagaatccacattttaacaagatccttggatgatttttgcacacacaaaagtttaagacactggcaggggctatttgtatataaatgaatacaccttatatagtatacaaaa

SEQ ID NO: 853571 - DNA, 632 bp, Homo sapiens; identical to SEQ ID NO: 844924

SEQ ID NO: 853572 - DNA, 660 bp, Homo sapiens
aagtaccaactatcaaagaggagtaagatcccttcccaagacccctttatagtcagtctaatacctttcggtttatttgcctagaatgctggacttctataccacataacaagattccacacactgaaacagaaccaacatcattagcttcttaccagtgttctgccatcgagatgcagtctgtcaagagaagcagcacagagtctcatgtcaagagaagtctgcagcagcagaaagacaactaaaaagagagacttcagtggaatttgagtcacctgacattagtcttaaaaaagatatttaaaatacagagaatcccactgatggaggagagaaaaataaccctctttttttctttaaagacaggcattgatatgagcgaaaggaaaagaactggggaagtctttgtatattgagagctcagtttatttttactctctgccaatagaggcaaggtaattctataagcaccatttaactttctcactacaaacaaaatagagtaagtcgtattaacgacttacttgcgctctaaacttccagctccagaacactttttttcccctgaaaattaaattgattcttacagaatggtacccaaatgtgtgatttcaaaggcagaycccaaaactgatgggatcctcaatgagaggatgagga

SEQ ID NO: 853573 - DNA, 495 bp, Homo sapiens
aagttgaaactgaaaatgcctcctcatcctctcattgaggatcccatcagttttgggrtctgcctttgaaatcacacatttgggtaccattctgtaagaatcaatttaattttcagggggaaaaaagtgttctggagctggaagtttagaacgcaagtaagtcgttaatacgacttactctattttgtttgtagtgagaaagttaaatggtgcttatagaattaccttgcctctattggcagagagtaaaaataaactgagctctcaatatacaaagacttccccagttcttttcctttcgctcatatcaatgcctgtctttaaagaaaaaaagagggttatttttctctcctccatcagtgggattctctgtattttaaatatcttttttaagactaatgtcaggtgactcaaattccactgaagtctctctttttagttgtctttctgccgctgcagacttctcttgacatgagactctgtgctgcttctctt

SEQ ID NO: 853574 - DNA, 629 bp, Homo sapiens
ctgtctcgtcaggttggtgtcagcccagctaggattaagcagaatggggtkgggggttgtagtgcacttttgacacagcgtgtacctggctgactacttctctgtcttttttttcctattgcaattcatgagtctcagcatcttctgaatggtgtttagtaggtcatcatgttgagttcctgctctagggagtagcatactctggctctgtatcattggcaaagggatttaaggttagatgataggctgcagttttgttaaatggaacaatatgaagagatggcattataaagaggcttggcagcagggcccatttgaatggttggttcttgattcccatgttgatataggcagatccttgacaggaattttgaatggtcccaaatgtggtaaatcgctggtacatcaagtcatcctcaaagttgtctgtgtaactgtgttgaatgcagttttgtgaatctctggtgattgtctgtatagggcttcatcatttagttattttagttgagcctgtagagcttcttcatgaagataagatatgagaaagagatgcagacagtagagaaaaagctaggagctttgctcccccatcctctacttgggttctggaactggactcataggtgagt

SEQ ID NO: 853575 - DNA, 329 bp, Homo sapiens
catgtattactttggtaaaaaaataaatgtatgaatgggatttcagtraacagggttttatcgtgggtttttttttttttttttgtcttctgaaaacatgacgtcaaattgttggatattttcctacagttggtttagtccccaagaaggttttagtaaaagagcatgaatacagagcgtaactgaatcatttaccttgttcctaaggtaaatgacataaggaatacaagtatttccttttgattgggcaattaagactttttttttttcctataaaggttctcctgatagtgccacttgattactgattttgaaaagcctcttggtat

SEQ ID NO: 853576 - DNA, 621 bp, Homo sapiens
tagtttgctcagaatgatggtttcatccatgtccctacaaaggacwtgaactcatccttttttatggctgtatagtattcaaacatggaatatattttaagatagatataagactaaagcaaaggtaaggaaaggatggaagaataacgtgtgtaaatgatatatgttctgaaaaatagaaataaagccaataaaaatgggagcagaatggaggaaggcagataaaaaggggagaatagaatcagactgtcacaaagttaataaataattgggagtcaaagaattcattattgaaagctgacaaaccagatagtaggagagtaagaacaaaagggggctaaggacattataaaaagtattagtgtaaagataaccactagaacaaaaatgcggactcccctaaatagaaaaacaggcaaagaaaacaaatcacagagtgaatttaacataatagaaacagtaaaaataatataaaataatatgacaggcttaagactaaatatatcagtaatataaatatataaatgagctgaaaatcacctaataaaaggaaaatattttcagattgactttcaagcaaaaccaattcattgctctgtagaagagacatacctaaaacaa

SEQ ID NO: 853577 - DNA, 492 bp, Homo sapiens
tccctagatttgtttttgccatctccaaattaaaaatagagtctagaaaaacagggtagagaatgcagaagtacagccgaatacacaaaggcatttggcatagagtaaaccatggtatttcaaattggtgggatgggagagaggaatggatttttcaataactggttttgagacaactgggtagccatttgggaaaaaattaaattggatccctgtcttcctccttatatggaagtaaattttatattgattaaaatatacatgtacaaaatgaaaccataaaaatattaaaagaaaatatagaggtatatatttttaaaccatggaatataatgtaagcctgactgaaaattcaggagctatgtaagaaaagattgacaaattttaaaagttctacatggttaaaaataatatcataaaaccaaaagatgractgggaaaaatatttgcaacacatgagaaggggctaatttcctttataaagtgttcaca

SEQ ID NO: 853578 - DNA, 562 bp, Homo sapiens
gtttccttttttaatttttaaaggaataactcttgcttatttttttaaaaaagtaaatactcrttataaaaaattcaagcaaaactgtaaagtaaaaagaagccagcaataaattgttccaaatcccatcacccaaaaaacagctcttgattcattcattcaatgtgcctttattgagtgcttactctatgtgaggcactgtggcatcggggatcagcagggaacaaagtgaagtccctaccatcatggaacttacactctagtgggaggagaaaatgataaacacctaaatagatttacaagtggcatgaagaaaaattaaaatgaggtaagagcatagagagtgtcggggcactttcagatggagtggtcacaaaggctgctgtgagcagagagctcaatgaagtgagagagctaaccacgtgactgtggggaagtgtgcttctagcgaagggaagcatatgcaaaggccctgaggtgggtgtttgcttgccatgttctatgaccagagaggccagtgtagctgggggccagtgagtaagggtgaactgggccatgtaag

SEQ ID NO: 853579 - DNA, 573 bp, Homo sapiens
cttgccatgttctatgaccagagaggccagtgtagctgggggccagtgagtaagggtgaactgggccatgtaaggttttggaaagccgttascttttctccactgggaagccattgaaagatgatgagcagggctgcagtgtggagagtagactgcagggaagcaagggaggaggcagcaagaccagttaggagctaccacagcaattcagaacaaaatgaggctgagttgcactgttcaaaaggtggaagggataggaagggttgaattctagactcattttgaaggtagagctgataggatttgctcatgaattggattgggaatttgtaagagaagagtcaataataactctgaagatttgtggcctggcaggtgaatggtggtaccgttactggggtagggaacgtgctggggtgtggtcaggatggggtgtcaagagttcaggttcaggcatgttaagttctaggtacctgttagatggctatgagggaatggtaagtcagttggaggctggagttgactgagagatctagactgtagatacagatttgggaatcaccagacatagaa

SEQ ID NO: 853580 - DNA, 599 bp, Homo sapiens
atgaccagagaggccagtgtagctgggggccagtgagtaagggtgaactgggccatgtaaggttttggaaagccgttagcttttctccactgggaagccattgaaagatgatgagcagggctgcagtgtggagagtagactgcagggaagcaagggaggaggcagcaagaccagttaggagctaccacagcaattcagaacaaaatgaggctgagttgcactgttcaaaaggtggaagggataggaagggttgaattctagactcattttgaaggtagagctgataggatttgctcatgaattggattgggaatttgtaagagaagagtcaataataactctgaagatttgtggcctggcaggtgaatggtggtaccgttactggggtagggaacgtgctggggtgtggtcaggatggggtgtcaagagttcaggttcaggcatgttaagttctaggtacctgttagatggctatgaggraatggtaagtcagttggaggctggagttgactgagagatctagactgtagatacagatttgggaatcaccagacatagaatggaatgggatctgataggaagcaaggagagatagaaaa

SEQ ID NO: 853581 - DNA, 584 bp, Homo sapiens
aattccatttatctaatacactcctctgctgagatatttaacacatcttcatctgtactctcttctatctctggcaagttgccccaaagtaggatgtttacacctgaaaataaaaartcataaaattctttaatgcttactactgttataactcagaacacaaattacgaaactttatatgttaatattcttatgtaaaccatagtgttagcagtaaaaagagtagctattgaagaatgtactgcaaataaaattacctaatattatccatctaggacataaattttatttatttattttgagagaaattctctctgtgttgcccaggctggagtgcctggcaggatcacggttcacaatcacagatcactgcagcctgaacctccagggctcaagtgatcctcctacctcagcctcccaagtcacttggactacaggcgtgtactaccacacatggctaattttattttgtagatacaggttcccactatgttgcccaggctagtctcaaactcctgggctcaagcaatcctctctccttgacctcccaaactgttgggattacaggcatgagccaccatgcc

SEQ ID NO: 853582 - DNA, 587 bp, Homo sapiens
acattattagttaaaagcactaaatggaaaataactgacctctaggatagccaattaacttcacaagaaaagcaaatctttttttttttctttttgagtcggagtctcgctctattgcccaggctggagwcgagtggtgtaatcttggctcactgcaacctctgcctcccaggttcaagtgattctcatgcctcagcctcccgagtagctgggactacaggcaaatgccaccatgcctgggtaatttttgtatttttagtagagatggggtttcaccacgttggtcagggtggtcttgaactcctgacctcaggtgatccccctcgcctcggcctcccaaagtgctgggattacagatgtgagccaccacacttggccagaaaaacaaatcttaagctgtccagttatcagtgtggacacaaagaggatccagcaattcaggatacccaccccatatacactgagatagcagccacatggcggaatggaatgagccaggatttggagatttggtttgaatccagtgttcaccactgctagtacaccatgcatggttttactacaaatgcatgcaacatagacaatat

SEQ ID NO: 853583 - DNA, 562 bp, Homo sapiens
acatactttatactttggtgtcaaatatttcccttgactaaaattctgtcataacgtattaacatagatgtcgaaatgtctgtttttattctgaagcatcacyaaatacagaggttacttagtcctcctcctctcaactcccattgccctaggcttggcctctccctttcttacacacacacacagacacacacatgcattagactatcaaatctaaaatcttcaaaaattctctggagtcagaatacgtatcaaggcagcagttaagagcaattataatattcattttaaaagaccaagaaattcagccaagtttgaggccttaagtacaaggatgaacatagaaatgacaatgaattttgcctaatagttttcataagtgaatgtctgggaaaaaagaattgaagtttcactctagctaatccagctaagaagatctaaaaggaatcctgaaatgatctattgggaattttactcaggtattgatagagaaatgttacaggaatgtccaagtcaattgtttcttacctgtggagtctagtctgttaatatcataaactgc

SEQ ID NO: 853584 - DNA, 541 bp, Homo sapiens
tgaatctcaacttcctgttgcttcctgaatctacttgtgacacagtcacaactggagtggcagtagctaatccyggactgtccctgctgcttgagatcatctaatcagtcactcctccacctcatctttgtctgtttgatgttgaaattgtattacatgcttgaactgatcaacaattagatggctagagaccattttgactggctgcctcccagtcctgcaataaaacacaacaaaactgtaaaactaacccaacccaagaaaccagagaactaacccaacccaagaaaccagaggactccctgcgcaagaaatccacactggccctagagtgtcccacgcaggtttgaacagcaaccctggacctgtgccacaaactcaagtgcaaggggactccggtggaccctgtaatggcctatctgatttggcttctcatttacagagaatggagactttacacaccacaatgtattatttgcttaaaggtgcttagaaagaacaacctgaaaccttttaatcttatttgttcatgtagaaatga

SEQ ID NO: 853585 - DNA, 515 bp, Homo sapiens
aaaagaaagtaaatgttactagataccatgtaataactagccagataagtcttttcatattgcttatataaatagaccatataatttagatctcatttcctaacaactttcattgctgagatctttgggatgggatgggggtgcagttctaccatcaagtgggaaagcagtctttaagtgaataatagtaaaatattctcacatttctttgctattattattattattattattattattattattattattgagactgagttttgctcttgtcacccaggctggagtgcctgcaacctccgcctcccaggttcaagtgattctcctgcctcagcctccagaatagctgggattacaggcgtgtgccaccatgcccagctaacttttgtgttattagtagagatgcggttttaccatgttggccaggctggtctcgaactcctgacctcaggtgatccacctgccttggcytcccaaagtgctgggattacaggcatgagccaccatgcttgtcc

SEQ ID NO: 853586 - DNA, 515 bp, Homo sapiens
aaaagaaagtaaatgttactagataccatgtaataactagccagataagtcttttcatattgcttatataaatagaccatataatttagatctcatttcctaacaactttcattgctgagatctttgggatgggatgggggtgcagttctaccatcaagtgggaaagcagtctttaagtgaataatagtaaaatattctcacatttctttgctattattattattattattattattattattattattattgagactgagttttgctcttgtcacccaggctggagtgcctgcaacctccgcctcccaggttcaagtgattctcctgcctcagcctccagaatagctgggattacaggcgtgtgccaccatgcccagctaacttttgtgttattagtagagatgcggttttaccatgttggccaggctggtctcgaactcctgacctcaggtgatccacctgccttggcctcccaaagtkctgggattacaggcatgagccaccatgcttgtcc

SEQ ID NO: 853587 - DNA, 598 bp, Homo sapiens
ttcacaattttttttttttttttaactagctagtcacatattaaatagagtgaacctacagggaatgttttagctagtactttaaaaaaaatagcaacatgaactgtttataccttgagttgtaaaaattcttattcaagcttagtcttactctgtgagatttgtgagtcagtcatttttatgagacccaataaagattactgtaaaaggtaccattccacctaaaatatgtcttctaattataacttgcttgaaaggcaaacaaatgaaaacaaaagttgtgtttggactaggagtgccagttatttgtaagactatattgcaaaagtaaattccatgactttaattaccgcctatattcattcattcatccattgattcatcacttaaactaacatttattgagtatctgctatctttcaggcactgctctaggtgctaggaatacactggtaaacaaaacaaagcccttgttstcacagagctaacagtctagcgaggctacatcagatcattctgctccctggttaaaacctcttcaatagccaaaaatgaaaataaaaacctttccataccaaggtccagatctatgctgtca

SEQ ID NO: 853588 - DNA, 658 bp, Homo sapiens
taaacacagaagattattaaatttctatcttaataagacagaatggctgggtggggtggctcatgcctgtaatcccagcactttggcaggcygaggcaggcggatcacctgaggttgggagttcaagagcagcctgaccaacatggagaaatcctgtctctactaaaaaaaaaaaaaaaaaaaattagctgggcatggtggtgcgtgcatgtaatcccagctactcaggaggctgaggcaggagaatcacttgaacctgggaggtggaggttgtggtgagcttagatcgcgccattgcactccagccttggcaacaagagcaaaaactccttctcaaaaaaagaaagaaagaaagaaattaaggtaggatgcagtggctcatacctgtaatcccagccttttgggaagctgaggagagaggatcacttgaggccaggagtttgagatcagcctgggcaacagagcaagaccctattgctacaaaaataaaaaacttagccaggcctggtggtgcctgcctgtagtcccagctactcaggaggctgaggtaggagaatcacttgagcccaggagttcaaggctacagtgagctatgatcatgccactgcactccagcctgagcaacagtatgagacccctctaaaaacaaagaaaggga

SEQ ID NO: 853589 - DNA, 631 bp, Homo sapiens
ggctcattgcatgctttataccagtccttgttgcagcccactgaacctttctctatgctttggtgtcaatatccatcttccaaacccagagctatccagaatagtgccacaaattaccattttaaacatgcgatgtccttcagtttacatttgcagattttggtgaaatagcatcttccagtgaagtccactgcgctggagagagaaaggtataaaaagacagtcagatgtactttacaaaaaatttaattgtggcaaaaaattaacaaaatttaccaacttaacaagttttatgtgtgcagagcagatgtgttaaatataatcacattgctgtgtaatgaatctcctgggtttaagtgaccctcctaccagagtttcctgagtaggtggaactataggcgccctataccacattttgtttatctgttcatctgtagaatcaatggacatttggattgcttccacctcttggctattgtgaataatgctgttaatgaacatgggtgtgcaaatatctcttccaagatccagttttgaattmttttggatatgtacccagaactgctggatcagatagtaattctacgcttgatttagcacaaattttgtcaatccaaagagctgaaagcta

SEQ ID NO: 853590 - DNA, 541 bp, Homo sapiens
tgaatctcaacttcctgttgcttcctgaatctacttgtgacacagtcacaactggagtggcagtagctaatcctggactgtccctgctgcttgagatcatctaatcagtcactcctccacctcatctttgtctgtttgatgttgaaattgtattacatgcttgaactgatcaacaattagatggctagagaccattttgactggctgcctcccagtcctgcaataaaacacaacaaaactgtaaaactaacccaacccaagaaaccagagaactaacccaacccaagaaaccagaggactccctgcgcaagaaatccacactggccctagagtgtcccacgcaggtttgaacagcaaccctggacctgtgccacaaactcaagtgcaaggggactccggtggaccctgtaatggcctatctgatttggcttctcatttacagagaatggagactttacacaccacaatgtattrtttgcttaaaggtgcttagaaagaacaacctgaaaccttttaatcttatttgttcatgtagaaatga

SEQ ID NO: 853591 - DNA, 264 bp, Homo sapiens
gggtgatcggattacacaagtacagtgatagggtcatagtagagagatatcgaaggctmtgtggataaggaatagtctaacagtgagtaatgctgatgagactggttgatagaggaagatgatgatgttacctagtatttacagggcacaaggcagtcaaagtgccttgccatactttatctcatttaacctcagaattgtacaacacagggcaggatgatatccggcctttttttttttcttttttttaatattttattttga

SEQ ID NO: 853592 - DNA, 393 bp, Homo sapiens
ggactgatccatccatcagtctgatgggaaaagcttgatttcccattaagcttttttgcctaatggtttttaacagccatcggtgattattgcctagatacattatttccktacattaactttttcccatatgttttttcctgaagtaatttaaattatgaaacatcacatttcagccctaacttttttgttatgtatttgtaaaaaacatggacagtttcccgtttaaccagcacactattatatcagttgacagtagttctctaatattttctaatatctgtgctatgttaaagtctctccagtcattcccgtgatgtcttgtatagtgtgtttggcaaactgggatcctgccaaggattgcatttaattatggttatgtcacttaagtca

SEQ ID NO: 853593 - DNA, 619 bp, Homo sapiens
gaaacaaacaaaaagaaaacccaacatttaatgatgaaactctgcttgattcrctatttaagcatttatatgtagtcacaaataaatatttattatcagttgagttatccattcttaactgcattaatctatacaaaagatatttagtagttcccatcaaactgagtaattcaacagtaaagatagtctttaaattgtcatactcttagcacttaataaacatcggtaaacaaagtacttgccttgggaaagcgctgtaaaaaccacagaggatcttttggtagattctgttcttgctcaggaaagactgttggcctttatcattgtttaccacagggtgtcacttcagagcaaggtttcaaaaaatgccttaacttaggggagcttggctgttaaccataggtctggcattaaacattgtttttaacagaagttttgtaagttgaaaaatacaacacagatgccaaacatacgttcactgaaacttgtgcccagtcggctacccaagataagttcagaagctcctcagattgtacctgtcttcacttttcttggaaatgaagaaagccgggttcttgtgagagcaggagcacaccccctctgcagccaccaacacata

SEQ ID NO: 853594 - DNA, 670 bp, Homo sapiens
tcaggaaaatctttaaggaagaggtgggtgggacttgaattaacctttggaaaaaagaatagaatgtgaagaggagaaagggaagcattcttaggtaggtaaaactacaagggcatgcatggtggctcacgcctctaatcctggcactttgggaggccgaggtgggagggttgtttgagcccaggagtttgagaccagcctaggcaatgtggtgagaccacacctctagaaaattaaaacattagctgggcatggtggtgtgcgcctgtggtcccagctactggggaggctgaggcaggaggattgcttgagcccaggaggtcaaggctgcagcgagcagtgatcgtgccactgcactgcagctcaggcgacagagtgagaccctgtctcaaacgaaacaaactacaaggacacaacaagcatgtgagggtgacattcagggacaaagtctagagcagagaattcatgctgagtggtgaggaactgagtggtgaggaacaaggttgaataatcaggaaaggatcttaagagtagacatttctggaagctgtaggaagtgggaattgcttttagygttagcatattgggagacggagtagagaatttttatgcctcatgagttaatgtatatgttgtgcacttgttttctttcaatttagtcttgccagtt

SEQ ID NO: 853595 - DNA, 635 bp, Homo sapiens
aggtggggcctggtgggaggtgttggatcatgggggcagatccccggatcccttgtgaatggctttgcatcatccgcttggtgatgagtgagttcctactcagttcatgagagatctagttgttgacaagagtctaggacytcttccttctctctttcttgctccatctcactgtgtgatgtgcctgttcccacttggcctttcaccatgagtaaaagccccctgaggcctcaccagaagccgagcggatattggtgctgggcttgtgcagcctgcagaagcctgagccaattagacctcttttctttataaattatccagtctcaggtaatcctttatagcaatggaagaatgaactaacacactgacacagatattgatgatggggacaatgactattatttattgaggctttctgaaggccatgcactgaactaagaactttatatgcagtgtcttatttaaccccatagcagccccaaggtatagataatattatctcctgtgataggcagaattttaagatggccccaagagttctgccccctggtgtgcataccctatataatcaatgcgctcctctcaaatgtgtgggcagggcctatgtataagatggaatttcactccagtcatta

SEQ ID NO: 853596 - DNA, 432 bp, Homo sapiens
cacactttatttccagctcttgtccaaatttaaaattccaccttagtgaagttctgtcatctctcagtaagcctgtgggtctttattctccaaccaggtctttacttcttcccacagtgtcccaaggaggaccccagccagcagctggctccattgcctggagtttgctgccaatgtggccagaatcatgcatttggcctgctgtggtccaccaaagcccacaggccccatcctgtgtacctggcccaaggcaggcactatggtgcacttggtctcagaaggtggggcgaagttagaaaggctcactgcagaggcagtgtttmtacatcgtgggctttggcaccacacttcacctgattcaaatcctggctctagccctttctaagtgtgtggccttggtcaattccgttagtctctgataccatctccttt

SEQ ID NO: 853597 - DNA, 604 bp, Homo sapiens
ttgttctctacctttgtctctgtggtttttgtcctcaaccgttggaatggcaggaatttggcttttggacaagccatgggggccgctgcaagggctgtgtgtgaattgccccctgtagatctggggagtgtggatggacagcacgccagctgcagactcaagagcttccggattgtttcaagggctaatttgattaagaataactttaattcctggaacctgctttgaaaacttgcatctgtgtaaatgtcaagtttcttagtgtcaaattgaaaaccacaaaaggacagatgttttgcttaagctggaggacgactagcccagttggaagaaggacacacagggaggccaaatggggccaccaggacagagcccgggcccggggaagtgcttctcctctgatgcgtgacgtttcccgcaggtgtgccctgtctacaaggcaggtcaacacgaggacccagctgaaggcagtagcgcacccactaggaaaatacctgtatttgtgagtggcacgggcacaggagccaccttgagaaaaatgtgaacattccaaccacccagttacaggaaatacagagctcacagraacatgttagattgcacc

SEQ ID NO: 853598 - DNA, 431 bp, Homo sapiens
gggatccccaacgcgggagactcctttcccctgtgaccagaagctggggtctaaggactcctcctgctcaaccacatccactggtcggggtccacccaggccaagcacagagctgcggaggggcygaggtggcctctgccggggaatggaaaacggctctcttggaggaactgaaggaacccccacttccgtcttctgtccctggtgcctgcatggcaggaccctgggaccatgagctcacaactcctccccgggtcactgtggtggacatcaggatcacccctcggtgctcagtgtttggatagggcaccctcacgtagcatctcccccacaggccacccaaccatagctaggacacctctctttggctggccatcacctccacccactctatttgacagtcggtggacgctgtgccccctcagaaatca

SEQ ID NO: 853599 - DNA, 543 bp, Homo sapiens
tggcttccagggggatggggatccccaacgcgggagactcctttcccctgtgaccagaagctggggtctaaggactcctcctgctcaaccacatccactggtcggggtccacccaggccaagcacagagctgcggaggggctgaggtggcctctgccggggaatggaaaacggctctcttggaggaactgaaggaacccccacttccgtcttctgtccctggtgcctgcatggcaggaccctgggaccatgagctcacaactcctccccgggtcactgtggtggacatcaggatcacccctcggtgctcagtgtttggatagggcaccctcacgtagcatctcccccacaggccacccaaccatagctaggacacctctctttggctggccatcacctccacccactctatttgacagtcggtggacgctgtgycccctcagaaatcagaccgaggggagctcagcgttcggccagactcgggcgccacctggtgtctgcgggcgtccctgcgggtagactcgagccccagttgtttgcttct

SEQ ID NO: 853600 - DNA, 631 bp, Homo sapiens
cttacaatcatggtggaaggkgaaggggaagcaaggcacgtcttacatgttcacaggcaagagagagtgaaggaagaacttccaaacacttataaaatcatcattatcttgtgagaactcactatcatgagaacagcatggggaaactgcccacatgatccaaacacctacctccctcaacacatgggaattacaatttgagatgagttttgggtggggacatagagccaaaccatatcattcctccactcaccctttccaaatctgatgtctttttacatttcaaaaacattcatcccttcccaacagtttcccaaactccatttcagcattaattcaaaaatacacagtctgaagtctcatctgagacaaggcaagtcccttccacttatgagcctctaaaatcaaaagcaagttagttacttcctagatagaatggcagtacaagcattgggtaaatgctcccattccaaatagcagcaatttgccaaaacaaagggcctacaggtcccatgcaagtccagaatccactggggtggtcattacatcttaaagctctgaaataatctcctttgattccatgtctcacatctggggcacactgttgagtaggctcccactgccttgggca

SEQ ID NO: 853601 - DNA, 669 bp, Homo sapiens
agaccaggtaagtctgactgtttacaaatactccaatctagcctgatcttcaggcctccagctgctagacggctccagtgaagggatcttgactatkttagggtacccccggtcacttgaaaagctatctttctctggaagcagatggctcagagtctgttgtgtgagtgagggtgaaggcggcctccaaacttaatgccagatctggctagttttagcatcagaacaccaatggagagtaggtcctgtgcctttaaaaagttggcttccaaggggtaaggaagacagatgtcttcgtcatctggatttagtaaatcaagtgcctaccattttaggtgatccccttcttgagcatgcacttttggagcatatcaaaacctggggttcattgtgagggcagatagatgaggaaattggatgcacacctgttcagtctttcaacatgggggtatatcctctgtgtgagggggttctgaaggcctgtgagattgagactggcctttactggtgctgatggaggctcctgctactgcaaactgggctgctccgtggagtcattgttaagtggagctgtacagactgcagggctaagcacagggtttggtgtagatgatgcggtgccggctctgcgtgcaaccaggtttgctatagttcagctgcaatgagtgc

SEQ ID NO: 853602 - DNA, 605 bp, Homo sapiens
tcaaactttcaccctatcatggtatttgagagaaaaagacaaataaaattagaatgtctatgaattagaaaattctgaatagaagtrgtaaaacagtctattacactggacctcagatttgacatgcagtaaactactcagcagacaactggtgattttcagttaagtatgaggcacaggtattaatgtatccctatggctacaaaagtcagagatgattatgtgtgctctgtgagattccattcatttgaacgggtattcagtgggtggtctcagcaaattccataactatcaagcattggaatgagaagtgttttggtgatatgatttactttatcaatcaatttaatcaaattagtcaaagttacttttgaccaggctttggagaaatataaacagtgacccttctgtatgggattgttagttgatacaggactgaagttttaccctgataaacagaccttcagaaacttattccatgaacaaaaatctatgtgagtgagcacagttcctgaaaatgttcccatcatcatcattggctatgtcccatccttgggtactgaataaatgatgttcttggagttcagtagatacaagatttctga

SEQ ID NO: 853603 - DNA, 605 bp, Homo sapiens
tcaaactttcaccctatcatggtatttgagagaaaaagacaaataaaattagaatgtctatgaattagaaaattctgaatagaagtggtaaaacagtctattacactggacctcagatttgacatgcagtaaactactcagcagacaactggtgattttcagttaagtatgaggcacaggtattaatgtatccctatggctacaaaagtcagagatgattatgtgtgctctgtgagattccattcatttgaacgggtattcagtgggtggtctcagcaaattccataactatcaagcattggaatgagaagtgttttggtgatatgatttactttatcaatcaatttaatcaaattagtcaaagttacttttgaccaggctttggagaaatataaacagtgacccttctgtatgggattgttagttgatacaggactgaagttttaccctgataaacagaccttcagaaacttattccatsaacaaaaatctatgtgagtgagcacagttcctgaaaatgttcccatcatcatcattggctatgtcccatccttgggtactgaataaatgatgttcttggagttcagtagatacaagatttctga

SEQ ID NO: 853604 - DNA, 651 bp, Homo sapiens
atgcatagccagtttcctgaggcttgcatggatatattgaattcctctctccccacttcagccttaaaatattactagtgtctttgtaatttggcccaaatrtcaggaattaggaaggaagctcatgaaataaacgaatccagattttatgcagccgggcctgtcagcacacaaacccgattgtgggcccaggcttttgtcattgtttcctctctttagactcgaagagtgaagtattttgatgatgctatttttaggggaaatctacatgggaaattgcttcatagtgataataaaaccttacatgtgcgaggaaagcttggtgtcaagtcccgtggcactcagatggttaacgccgtcgtgacgctcggatttggcggaatgcggttgctgagctagaaatctggaggattttcactgggatgggacaaaaaagtgtcaaactccggcattttgaatatgttgccaacaagcatacctttggatcttagggaaggagaaaggaagatgaaaacaatgctaaggccttttctcatctattctaaaaaaaacactacttttgttgagtaaagagtaagtatatagatttggttcctctcaaaaatgaagctatagtttgactaattaaaggggaaaacttctaggagcgtt

SEQ ID NO: 853605 - DNA, 509 bp, Homo sapiens
gcaatcgcatgagtcaattccttaaaataaatgtcttaaaacacacacatatgcacatatatgtgtgtgtgtggatgtatatatatatatatrtgtatatatagaatgtgtatgtacaaacatgtatgtgtatgcatatgtatatgtgtgtgtggtgtgtgtctatcccattgcttctgtgtctctggagagccctgacccaaacaccaggtgactctcaagagctgccagggtggagaaccaaagctttaaaatgaggagtcctggtcatcaaggtaaaggctttccacatagggacagcttgagcctgggcgtggagatgagacgcgtgaggtgcacagggtagcgtggttgttgcatagcccagtgtgagacctagggactggccagggagagagacctttattcaccctgtaaagaaagctggaattcaaaagacaccaaagtgtgaagcctctgagggttgtcccaagtcactcacctcctggctatgtggccttgggctacac

SEQ ID NO: 853606 - DNA, 586 bp, Homo sapiens
ctacagtatttttaatagatacaagcaggaaggttggtggcctgacacaattaacaacaatgcctggctcccccacatcctcttcttaacagttgttcttttgggtgtctcaggtcaccactggaattacatttaccaagctttagcttctatatacgtgttgagagaaaaagtagaaaggaagagggcattgtgaaaatagtgatattctctccaagcagaactccctagaaaccacctttttgattattctgtagacttggcccttaaatacttgtacttctgtatgcttagaattctatggccattaatttaaagaaaagcctaggtttagtcaaattgagcaaccagcatcaattcaaaactaaaaacaaattgaactccacactgagaataagaggattcagtactactcacttgattcaaaaatgccacatgtggttttggggagctttaaagaaatttctacyatgataaagaaaacataaggactagatacataaatataaaaatttaattttccagaaacctaattgaagtcattacagtcattactaggaataataaacaatgactagaggttccc

SEQ ID NO: 853607 - DNA, 604 bp, Homo sapiens
ataactatcattaatgctaaatcaagaatacacatccacatctgttagtgttacaccaactcctcaaaggcagaatgatgtcccagagggccatatttctgctcataataagtacaactgaaagggacttttcttgaaaatctttttgacaataaacagaaaataggggattctcaagcatcagatattttcagtttcctaaaacaagattcctgagaacaatacatcagatcacttagaaaataaccagaatgtggatacaatgtcaaaaatgcccttgcaacttcttaagtatttcataaaaaataagtgctgctatttttaatgaatcttattttatatatgatttgaaatattgttatgtaaaatattaatttattaaatattgccaatagatattaagtactatttatatctctaaaattatacatttagtttgtctgtttttaagcaatttctaatttgaaaaatgmagtattttcttatattgtgccatataggattctgtagtcttatgactaatggaagagtttattacttaaacatttctatttttggttcaagagaaacttacatgctatttgcttgttactttaacccctac

SEQ ID NO: 853608 - DNA, 613 bp, Homo sapiens
agtctattcacttattcacttttttttttttttttttttttttgagacggagtttcactcttgttgcccaggctggagtgcaatggcgtgatctcggctcactgcaacctccgcctcccaggttcaagckattctcctgcctcaccctcccaagtagctgggattacaggagtgtgccaccatgcccagctaattttctatttttagtagagacggggtttctccattttggtcaggctggtcttgaactcccgacctcaggtgatctgcccacctcggcctcccaaagtgctgggattacaggcgtgagccaccgcgcccggcccacttattcacttttcagataatgcctgtgaaatttaaatattacaggcctggttccttcttcctgaagttctaggattttgggacagttcattgataagggctatttactgcagaaactcccataaacacggaattgaaagactgactttttcaccaaattgtctcaggaaacccatttgccaggaaaacatacttacctttctatatgttgcttttaggcttcttaaccttaaaatgtccctggaacaattagttcatggcatagctgttaggcttatctgttcag

SEQ ID NO: 853609 - DNA, 488 bp, Homo sapiens
agggtaaggatgggccagaaccctgctgagagtcagcgctggcccaaagccctgatgagggcattgccctgcaatccccaagtctacttcccagccctgagtggaggacatctggggggtagttctagcaagcccagggcaatggttcactgcagtaaagactgagagaattctatcttggctggatgacctctcccctaccaaatggaagtgtacaaggcagggaagaggcagcaagacagtggcattgggctagcagaaaagtatggcaagtagaggcagcctgtgctgtgccttctgcatctgcccttctctagcctgaagacctgaagctttccaggctcagtctcatcgtctgtaaaatgggaatcatgcatttaccttataaagawacaaggatcagaaatgcacatccaaaatacccagcataggacccggggatccataactgggaacccttagcagacaatatgggtgcaatggttaat

SEQ ID NO: 853610 - DNA, 529 bp, Homo sapiens
agttggccgggcacagtggctcaggcctgtaattccagcactttgggaggccaaagtgggcagatcacttgagcccaggagttcgagaccagcctgggcgacatggtgaaaccccgtctctacaaaaaaatacaaaaattagctgagcatggtggcgcacctgtagtattcccaaagctaccagcatacactaccatgcccagcccaggaggctgaggtgggagcattgcctgagcctgagaaggtcgaggctggagtgagccatgattgcaccactgcactccagcctgggcaacaaagtgagaccctgtctctaaaaaaaaaaaaaaagagagagagaaataaagagagaaagagaaagaagaaagaaagaaagagaaagaaggaaagaaagaaaacaaaagaaaaaagaaaagaagaaaaagttrctggttaaacccactcggagatcccccagctcacaggcaggccacagctcaatgagatggaacccctactgcctcacccttctttccttctgaggatcccc

SEQ ID NO: 853611 - DNA, 568 bp, Homo sapiens; identical to SEQ ID NO: 853005

SEQ ID NO: 853612 - DNA, 614 bp, Homo sapiens
tcttgtttatccattcatgcactgataaacatgggtttcttggccaggcgcggtagctcacgcctgtaatcccagcactttgggaggccgaggcgggcggatcacgaggtcaggagmtcgagaccatcctggctaacatggtgaaaccccgtctctactaaattagctgggcgaggtggcgggcgcctgtagtcccagctactcgggaggctgaggcaggagaatggcgtgaacctgggaggcggagctcgcagtgagccgagatcgcgccactgcactccagcctgggcgacagtgagactccgttccaaaaaaaaacaaaaacaaaacaaaacaaaaacttgggtttctttcacgttgttgctattgtgaataatgctcctatgaacatggatgcacaaatatttcttcaagagtctattttcaattattttgtgtatatacccaaaggtggattactagatcatatcctaattttatttttaattatttgaggatctgccatactgtttttcacagtagctgtgccattttacattctaccaacagtgcacagaagttccagttactctatgccacatccttaccaacacttgtcattttctgggtttttt

SEQ ID NO: 853613 - DNA, 554 bp, Homo sapiens
atagaacttgtttagatccatgtttctcagagtgtgcttggcaaaatacgtcaatccccaaaatagttctgtgatcaaacaaattgggaagatcacatatttcatatcccctatattttcacctgggaagtaaccataaatattctaaaggccttaaagagttctgtgatgcagaaacctgctttatttcagagttgatctcaggttaatttattgagataattttttatccttggctgacagccattaataatgatccctcagatgaaatgatctaatcaactttcttggggatccttcaaacttgataatctctgatatggtttggctgtgaccccacccaaatcttatcttgaattatagttcccataatccccatgtttcgtggaagggaccaggtagagacaattgaattatgggagcactttcccccatcctgttctcatgrtagtgagttagttcttaccagatctgatggttttataaggggccttccctttcactgggcactaattctctctcctgccaccctgtgaggagttgccttccgccac

SEQ ID NO: 853614 - DNA, 632 bp, Homo sapiens
tgctgaaggatttaaagggaaccatttgtgtcttcagaaacaactgccagtggaggtacagatccctgtctagggagaatgtggttatgtttcatgtagggattcgggagccaagtggaaggaaaaagctagggaacctggccacttccattttgaagtctgatattattagacctcttctcatggactgagattgctctgaccaagacacattggaattagagatcagtggtgcctaaattgaatccatcatgatgggaggaggatctgtcaggggttccaggctcaacattacagcgtagccagttgtgaaagggagagttggttctgacacatgtggctgctgctcaaagctccttctaattcagccaccttgacattggagaactgtactttgagaacaatggcttagtatgagaatataagctaaaaactacccttagccaagaagatggactcatatctacctcccttgaagaaaccatgttgtccgcagcagsgtaagttttcaccatagcagtcgacacctaaataaggctcacattcaattatgaggacctactttcaaaagctaccctgtaatagcagcaaaggcaatggaatttaagttaagggattgacaagatcagatt

SEQ ID NO: 853615 - DNA, 555 bp, Homo sapiens
tgcagtgagtttaccacactttgcctgaatctttaaggtagtagaattctcatgtggtgttacctatcagataatgttagtatttctataatcaagtaaaggtttttatcttgtaaacaaataacgatactcaggaaaacatgaaatgctcttccaaaactttccatttttcattaatcaaggagaaaggcctctagcaaacagaccccattgcctcttggttgtagcattaacatgattacataggaatgcacagaaacatgaaatctatgacgtgtaaacttgtcaacaaggcatgtttatcaaatgctataaagcatccatgtggccaaatatattgccaggatgctgaatggctccattcttttctttaggtagaaagcattaggaggcatttctgtggatgacaagatttcctgtagtggatttttgcctggtgatcatctgttaccccttcccctttcattatggtagttaaatgttcatccaggagtctarttcttgcccatggggcaccgaagctttaggggaattctatcccttccttagttttat

SEQ ID NO: 853616 - DNA, 589 bp, Homo sapiens
catgagaaatgcaggaatttttgccctgggaaagaagtattcctggatccaggtttgactagggcagggtatagtgagagtgacactttaggragatgaaggaagacaatttgatgttttggctctctcagggagtggaaatgggtcaaataacaagggactgtattaggatagtggtcataaaatgagttaagaaagtacattcttttggctgggcgcaatggttcacacctgtaatcccagcactttgggaggccgaggcgggtggatcatgaggtcaggagttcaagaccagcctgaccaatatggtgaaacccccgtctctactaaaaatacaaaaattagccaggcgcggtggcaggtgcctgtaatctcagctactcgggaggctgaggcaggagaatcgtctgaacctgggtggcagaggctgcagtgagccaagatcatgctactgcaactccagcctgggctacagaatgagactgtgtctcaaaagaaaaaaaaataagaaagtacattattttaataaaaaagttgagggaactaaatgactaattaaatatgatgattaatttccaaatcagtattt

SEQ ID NO: 853617 - DNA, 634 bp, Homo sapiens
tgaatggacagaaagttctgatcagaaaatgtgatttctaagcttgagctttcaggaccatgtggttcaatacaatagccactrgtcacatatggctactccaaactgggatgagctgtaagtgtaaaatatagcccagattttgaaaacttagaatgaaaaaaagaatgcaaaatgtgttactattttaaatatttattccatattgaaatgataatatatgggatatattgggctaaataaaatgttattaaaattaatttcacctgctgctttttaaaatgtggctactggaaaagttaaaattatacatgaggcttgcattacacttatattggatagcactgttttagcagttgtatagttacaaatcaaaacagagcttttcaaaatgtgatcttcaatcatttaattgatatttagggcataaacgaccaatattttaaaatagctagaaaaattatcatggtataaaaattaaagagtaaacaacattttaatatgtgttaatgaaagtgatcatggcttaatttaagaggaagaaattttcctagtttttcactgaattcatgatacaaaactcatttgcagatagattaatacattgattaggaaacacattcaatagttttct

SEQ ID NO: 853618 - DNA, 649 bp, Homo sapiens
aatcattagagcttagacaaagagaattaagtctgataatggggtttgctaaatttgtagtttggtttgccaagctaggaaatggaaatgagattccatcaaatgagctcaattttcccaattgtggttgtcaagtgggcaagtcatctgtagagaagcaagtggaagaggatctttttgttaacttggaggaaaacagtgaaagtttaaagtagacattgaggggaatagaatgggatattgaagtaggaaaagtgaaaatgttggtaagcatctccagctccagagacccgactgctgttgaggtcatgattttatagggacatcattttaggctgatgtagctttttcagtcattttcactgattggctaaagtagagaaaagtaaacagtaccactaatccagggttgggaatttttctggcaagtacggagaaagagaaattaatagtaataataataataataataataatagtaggccaggcgtggtggctcacacctctaatcccagaactttgggaggccaaggtgggyggatcatgaggtcaggagattgagaccatcctggctaacatggtgaaacctcgtctctactaaaaaaaaaaaaaaaaaaaaatacaaaaaattagccaggcatggtagtgg

SEQ ID NO: 853619 - DNA, 593 bp, Homo sapiens
tctatctccttcagttctgctctgatcttagttatttcttgccttctgatagcttttgaatgtgtttgctcttgcttctccagttcttttacttgtgatgttagggtgttgttttagatctttcgcgctttctcctgtgaacatttagtgctataaatttctccgtaaacattgctttacctctgtcacagagattctggtacattgtgtctttgttttcattggtttcagagaacttatttatttctgccttaattttgttatttacctagtagtcattcaggagcaggtttttcagtttccatgtagttgtgcggttttgaatgagtttcttaatcttgagttgtaatatgcttgcactgtggtctgagagactgtttgttacaatttctgttcttttgcattttctgaggagtgttttatttccaattacgtggttgattttagaataagtgtgatgtggcrctgagaagaatgtatattctattaatttggggtggagggttctgtagatgtctattaggtctgctaggtccagagctgagttcaagtcttgaatatcctcattaattttctgtctcattgatctgtct

SEQ ID NO: 853620 - DNA, 591 bp, Homo sapiens
aggcaggcggatcacgaggtcaggagatcgagactatcctggcttacatggtgaaaccccgtctctgctaaaaatacaaaaaattagctgggcatggtggcaggcgcttgtagtcccagctgcttgggaggctgaggcaggagaatggcatgaacccgggaggcagagcttgcagtgagccaggatcgcgccactgcactccagcctagatgacagagagagactctgtctcaaaaaaaaaaaaaagaaaagaaaatgtggcacatatacaccatggaatactatgcagccataaaaaatgatgagttcatgtcctttgtagggacatggatgaagctataaaccatcattctgagcaaactattgcaaggacagaaaaccaaacaccacatgttctcactcataggagggaattgaacaatgagaacacttggacacaggatggggaatatcacacaccggggcctgtcctggggtgagatkggggggaaggctagcattaggagatatacctaatgtaaatgacaagttaacgggtgcagcacaccaacatggcatatgtatacatatgtaacaaacctgcacgttgtg

SEQ ID NO: 853621 - DNA, 621 bp, Homo sapiens
tggagtgtgcagtggcatgatctcagctcactgcaacctctgcctcctgggttcaagcaatcctcctgcctcagcctcctgagtagctaggattacaggcatagaccaccatgcccagctaattttttttgtatttttagtagagaacagggtttcaccatgttggccaggcctgtctcaaaactcctgaccttggcctcccaaagtgctgggattacaggcgttagccaccacgcccagccttgaactaagaatttgacctcctgaactgtaagataataaattgatgttgttttaagccactagtttgtggtgatttgttacagcaatagtggaaaataatacagttcccaaatgggagcatgaaataagagtacaaaataaaatttttcatacatgatagtaaaagagatcttattttgcatctgagaaaactagaacctctactattttcaccttcttattaatgatacacaagtatggccgggctccgtggatcacacctgtaatcccagcactttggaaggctgagggaggtggatytcctaagctcaggagttcaaaaccagcctgagcaacatggtgcaaccccatctccaccaaaaaatacaaaaaattagc

SEQ ID NO: 853622 - DNA, 563 bp, Homo sapiens
caaagtaaccaaactggtaaatatcatttggagccttcactgattgtgactgttgcctgatcaccaggggtagttatgcgttgtgtaggagcttacacaatttggcagaggctttctttaagaaaaagaaygcaaagttaggaataaaaaattggttgtagaaaatagaaaaaataaatagaaaaaataaaaaataaaaaaagaaataaaaaattaaaacaaaaacaaagataaaaaattgggtatgtaaacaactatttacttggaatgagaaaaatccacaaattacaaattttaaaatgccaatccttttgtagttcataaatgtgatgattgggttctcacatgtgaggtgtgtgagacgtgcttcattcaaaccctgttacaacatccgcacataccctgtctgtcatgaaagaaaaaaaattaaaaaagaataaaatgttgacaaatataccacaaacatcaaaagtccaggacaaattatgcaattcttttattaatgaattaccttatatatacctttataattcttttgaattttaatataatcaataattctg

SEQ ID NO: 853623 - DNA, 577 bp, Homo sapiens
ctgttaagttatcttctgattactgtgcttggtacatgaatatcaataaatgttagtttttactattaggttgctggggatggggtgcggggaataacagaaatcacagggaaggctccagctcctccagagcactgctagtggtgcctttgctaaacactcttcactgttttcggtctcagttgaaacagaagtttctccacaaggcgttcctctctacctcccagccttcagactctgagtcaggcatctgtctctatgcttcccagaaccctgtgctcacagacactcacccttttcacctcagtttaacttgacctctgtaaagaccctgtttccaaataaactcatatttggaggtactgggggtccaacatatctttttgagggactacaatgtaaccataacactgaccaagcagaataactggttgaggaggaataraagtggaatggattgtcatccgagagtttgaaatggctaaggatatctggacttctgacatgccctcaaaactctcatggaaacatttggatatttcagaaaaagagaaagaaaaactcacaggtataatct

SEQ ID NO: 853624 - DNA, 621 bp, Homo sapiens
tatctcttgatattagcaaggttcagtataatatgcttatcagtaaagttaggagatactgtccagcacacataactttctagttagtgcactgctatgtggacaactgtgaccagaaagtgattatcaactgaggaagtagcagctggaggtatgtccagggtttggatctgagttgggtgttttagaattttatctgaggatctggatggcataatagaaaacatgcaggtgatatttatataagtgactttgtggtgtatagagtgccttgattttgaagcaagaatttgaaaagagtttggcaaaataaaatatataaaattaaagtgaaaggaaataatcaaagataagcaattaaattcatttaaggaaagcacagggtggtacattgaataaaaccaagcaaatgacataaatatactacatttgtatttgttttgttaaatttgtttctgtagtttccagtatttagaatagtatatgacatgaagcaaacatttaatacacatttgctgaataaatatatgaataaaatataagatggaggaagacaacatgygattagagcaaaattaagattattcctaaggggatggaaatgcgtaagtactaaactgt

SEQ ID NO: 853625 - DNA, 615 bp, Homo sapiens
ctttgttccttctcccaactctctaaataagatagaattgtccttttccagctccatgcagatctctcaggtggcctctttgacttctttgcttcctctttgcccctaaacagggtgcaggtatcatgagaaaatgcagagtagtacaaaagaaatctggtgttctcttccccaaaaccaagtgcaccttactctaatttctgttagtcacataaacatttctgttattcattttaataactggaagaatttcaggttaagtagatgctcatttctcatttcattggttcagcaattacttattgagtaccttttatgtgccagatactgttctaggctctgggagacaggagtgaacaaaacaaagtccccatttcttagggagcttaccttatgatgcagcagagagatagaagtataactaaatgagtaatacccgtatagtacatctgataaagataatgctattgaggaaagcaacttagggaatgaaaaagggagtgctgggatggcatgctcttgcttttggtgagttggtaytaatattttcaatagggtagccagaaaaggtgtctccaataatgatatatgtgcagagacctgaaggaagtgaga

SEQ ID NO: 853626 - DNA, 655 bp, Homo sapiens
cttttgccaatggatatcaagtctgaatttcccgtaaaggagattgttagagactaaaataatttccctctttaaatgaaatgagcttggacattggaatctgaaagccctgaggtggaatttttgctatgcccttcacaggctttccaatcttggagaaattatttaatctctctttgtgtgtttcctcttctgtacagaaaagataatacctacctcgtggatttaatatggaggttcaacagataacatgtttaatgtctggcagttagtaagcatgataacattatatgtcaattatataccttttatttcctatttaaccaacacaatttttttgtttcttctgtttttataaataattctattttagtgtggtacctcaaattaggacagaagtctccaaacaccgataaattcttattctcaaaagtaaacttcattattcacaataaccaagatgtaaaaataaccaaaatgtccattgacagatgaatagaaaaagaaaatgtagtatatacacacaatggaatactactcagcctttaaaaaacaggaaattctgcaatatgtgacaacayggatgaatgaggacgttctgataagtgaaataagccagtcacagaaagatatgtgattccatatgtgaagtatc

SEQ ID NO: 853627 - DNA, 558 bp, Homo sapiens
gattcatgaagacggggattatgtctctcttactcatcactttattcacattaaygagctcaataccttgcagatagagctattctaatacttatagaaagaataaataaagttccaggcatcgtggtaagtgctaggaatataaagctttcaaagacaccgcatctgtcctttggaaacgttgtactccagtagctatctccattgataatctattcagcctctagaaacagaaagaccaaggatacattaagatcctagaactttctccacccccattcccctacatcccatgtctttctcacgataatcccaagactggccgtgcttgtgtccaaggatgtggaatagaaatgaaccaacttatctttccaccaatttccatttcttcgttgactggatatttatttatttatttatttatttatttttatagaaacaattttaatttatatctgtgttacctaatgttttaggtttctaaaacattaggctgtgttaagtttttaagatgggtcattggaaaagaagatcaaacattacaagaacaagtaaaaa

SEQ ID NO: 853628 - DNA, 574 bp, Homo sapiens
catgattcatgaagacggggattatgtctctcttactcatcactttattcacattaacgagctcaataccttgcagatagagctattctaatacttatagaaagaataaataaagttccaggcatygtggtaagtgctaggaatataaagctttcaaagacaccgcatctgtcctttggaaacgttgtactccagtagctatctccattgataatctattcagcctctagaaacagaaagaccaaggatacattaagatcctagaactttctccacccccattcccctacatcccatgtctttctcacgataatcccaagactggccgtgcttgtgtccaaggatgtggaatagaaatgaaccaacttatctttccaccaatttccatttcttcgttgactggatatttatttatttatttatttatttatttttatagaaacaattttaatttatatctgtgttacctaatgttttaggtttctaaaacattaggctgtgttaagtttttaagatgggtcattggaaaagaagatcaaacattacaagaacaagtaaaaacaaacatccccac

SEQ ID NO: 853629 - DNA, 603 bp, Homo sapiens
ttgatacattactagacttccataggttttcaaccgtttaaaaaaatatatctgcaaggtctagatatctttgagatggttttctcaggaagacctcatctggctccaagccasctttcttactaataatagcaactccaagtgatttcaaaatactgtaccgtttgtcaatgaagatggcactgtttttggtcttgttccaagttagctgatgagctttatatttcttcctctacttttttttctgacataggatgcaaattaataaatccaagatattacacttagaccattcttgtaactttctttttaattgctcatctatttacccaataaatatatattgagcacctactatatgccaaatactgtgaagtgttgggaaaacagtggtgaacaaaacaaattatttctgccttcatggaccttatagcctagggaagaccaatgtaaatccaagagcacaaatgaatggaaagtactctctgacagaggtcatcagggggtatcctcaatgagagcctgaaactctggatgtgacggagtcagagagattggggacagcttccctgagcaagtggtgctagaacctgggtctgcggt

SEQ ID NO: 853630 - DNA, 603 bp, Homo sapiens; identical to SEQ ID NO: 839655

SEQ ID NO: 853631 - DNA, 597 bp, Homo sapiens
aatcactccagttgccgaataccaaaaggcccctyttcagtgtcattgtcagaaggaaatatccttgagggacagaactcacgtaattaaggacaaccacaaggagattatagtttataattttctgcatgttcttagaataaacagaccccccatagcaataactacttattaatgaagtcaggtgtgcatgctcattcctagcctggttagtctatggcatgcacataacacagaatttttgatggatgaatatttatttatgcatgagtagcacagatattacacttgcagatgaagccagagttccaggttgctatcatcattgtatgaatagaatggagttgtttttccttattattttccttgtctttctcccttcacctcccccaaccttgccacttcccatctaaacacaggaatatactaatcagggaaatatgcactgctgtttagcaaaggggtcaaacccatttggatggaattccaggctcagcaggctaacaatggcaggaaactgggccctcaagccggctgcaccggggggctgttgagcgatagcttgttgaaagaggcggccctggggtatgctacttt

SEQ ID NO: 853632 - DNA, 505 bp, Homo sapiens
gtgatttcttgctgaatgtttctcaatatatttcctttagctcccccgctttttttttttttttttttttttttgagacrgatctcgccctgtggcccatgctggagtgcaatggcatgatcttggctcactgcaacctccgcctcctgggttcaagcgattctcctgcctcagcctcctgagtagctgggattacaggtgcccaccaccacatccagctaattttttgtatctttagtagagacaggtttcactatgttggccaggctggtcttgaactcctgaccacgtgatccacccgcctcagcctcccaaagtgctgagattacaggcatgagccactgcacctggccttagctcccctctttatggatatgtttacatctagatataggtttgttgagagacatagtaaagtgaagagtggagaaagaagacaaagaggaagatgctaggcaaaatatcaatgaaaatagaaagcaaagccctaaaaaacacaccaaat

SEQ ID NO: 853633 - DNA, 545 bp, Homo sapiens
agagatactctgatggcttatatgaatacaaagagtatttaaacacattccacgattcctagtagcctagcatctaatggagataaaaagtaatatagattatgtagtctagtgtgaagataaaggacctcaagtgggtaacaaaacagcaaaaacaagcaaaaaccacaggaatgtactatggtaagatctatcaaatccgattagtagttataaaatagaaagggacttgaagataaatggacttgccaattataatgattggcaattggttttaagaattagaacaaaatagttgttaatggaactgcttatgtaacaactccggataaaaactgtgtagaattctaaggttgagagacaatatctttctggagcagggtagaggaaggaaagaaggatcacagtaaagtctattttytcatgccaccttattgaagtaggatccagaaaacggagacagttggaaatggagagaggaggaggaaagagtagcctatagctaccaaggaagagtttacaataacttatccttactggtatca

SEQ ID NO: 853634 - DNA, 596 bp, Homo sapiens
aatatcatcatttattatgtgtggacatgttatagaaacatgcttatgaagagaagatgcttatgaaacaatacaaaagtgtacagttcatggratgtaacacaaaagatatttagagagagcatctaaccagaatatgattgttgttgacaattctggaatctaataataagatatgtaatattttccttaaagctgtatttggtgtatttcacaggaacatgggaatggccttctttgctcactgccattcttagaacaattgtgaaggagtaaaaaacacgaagcaccagggtatggaatggtgaaaatgcctgtcgtgggagagacaaaacgtgagaaaaaggaatttatccaccaggtttcaccttctattagtgttaacgtctctgctgggctgcacaagtgtggctgcgtggcataatcagaaacgttcccaggtgacataaatagagacaggaggcaaagcaagcaaacaatacgcacagagctggaacaaaaaggcagtgaggatctgaaatggtacacagaaaaaggggatacacaagaggtacacaaggacagtggataccaacagaattgaaagccatgataca

SEQ ID NO: 853635 - DNA, 544 bp, Homo sapiens
aaaaatgactgtggtagcatttgattgagatctcaaaaaataaatgtctcagtgataaaggaaatacatttcaaacaggaagaagtgtcatgtgcagaagtacaaaactggaaaataygatacaagtttaggaagtgacaaataattattttagctggactatggaattgattaaaataaagctaaatataaaggcattgctttctggcatgcaatatttattctggggacttagattggagtcaatgatctattgcatcagagaccactgaatagcctagaatttgttccttttgcttttggaaatcttttaggctgttttcaagacgaagactagctgcataaccggctctcagatcacatcagcactcattggcatgcctgcaatgtccttctagctcatctccccaccccagtgtctatgtttgtcccaccagctacactgcattcctgtccacaaactggtcagaagaatcctttttcctaaactgaaaaataatgattgtatatattagatataatgtaatttttcaatatatatagt

SEQ ID NO: 853636 - DNA, 535 bp, Homo sapiens
tgcagatcaatgaaaccaggaagagagactgctttgttacrcagcattactgtggcagtagctgactgatacacttgtctatccaatatccatctcctcttttcttttatatacaggaacctgattttattctgggcagtcatgtgcctgggtagaaaactacattcctcagctttccttgggatgcacacaaaggtctttgggggcagggggtgcttctagcaaagctcctcaagttgggggtctcaaagggcaggctatgttgtggagctccttggcctcatgcactcagcacctcatgtcttgtgttgctttcccagcacttgtgatggacacctccaagtgatgcaggcactctctgagctgcctgcatgacaacaaacctttggcttaggttatcatcacggtgacctggaagatccttaggtgtcagcaagcctgtttttttaaaatatatgaaaatagggtccaagaagggaagaaaattgtctgaggacccatagtgagttagctgcagagctgactctcccccaca

SEQ ID NO: 853637 - DNA, 570 bp, Homo sapiens
agccgggcgtggtggcttgcacttgtagtcccagctgcttgggaggctgaggtgggakgatcacttgagcctaggaggcagaggctgcagtcagccgagattgtgccactgcaccacagcctgggcgacacagccagaccctgtctcaaaaaaacaaaaacaaatcacagattgctgcccaccacccctctccatgcacccagagtttctgattcagtaggcatggcatggggcctgagaagttgcatttctatcaagttcccaagtgaggctgatgctgctggtccatggcccacactttgagatcactgttttgtgctcttgatgctgtttggatgattcaggcaaaagagtgaaaaacaattatattaacctgggagcagaatcccatggcagttgggcacagaactcaaagtcaagcagacgtggctgggactggaggtctgctgtagactgcaggagtccagcctggtcgctgctgttccctggtgcttggctccagggctggcacactgtgggcgtccaataaatgtgtgtttctggatgctgtcttagcttttaggtggaggt

SEQ ID NO: 853638 - DNA, 543 bp, Homo sapiens
cctgcccattctatgggcccccagcccagccctgtcgcaggagagcctttctttctcgggactgcaaatacgccaaagatgaacgccgcccgcagctggctggctgcagccctgaacaatggcaagacctaggaagtgaagaaattgcccgaggagcacagcagcccagtccagagaggcagttcacagagtctgcctgctggctctggctcgaatgcagtgagccctccccccacccgccagctccacactcctggctgaaaggataaacagtctgcaaagaaattttccctagaaagaacacttcgctcaagtgcaagtccaccaccttagaccagtgattaggggagagttaaagaaggggaggggtgtcccctctcagggggaaatatgcaataaataatcacaggtgggagagcgtgaagtggaggggctggaatcccagctgcatgctgaacccagctccaacaccgttctccagaatggatgacaaaatgcaacacagtwaaacaaatctggtgctcatgtgcaatgccttcctcc

SEQ ID NO: 853639 - DNA, 620 bp, Homo sapiens
caacatgcaaaattttgctcgcactctcgggaacttcagtagcccctggaagcccattaacatgctgttyaggttcagaaacctgatccaaaataaacttctggaacatagcctattcataagttgaagtatcctgtatgggaaaaacaggcacgtgtggagatacagagtaaagcctataaaacttgacttcccctacattgtcaactattcaccagaaaaaagaaaaaaaaatctatttctgctgattgaagccgaaaaaggcacagctcaaacctgtggaaatgaatacaatgtgaaaatgcaccatccaaagagccagacatgcccaagaccccttcccgtgcaaggatactaaggaaggcctgctactccccccagccccacccttcagggcactctggtgtcctagttatctgacctaagtttaaaaagaaaaaaatctttccccctgtacttggcaatattcaaatttttccaaggtgcgcttgcttacacactctctctctttctctctctctttctttctttctctctctctctctcacacacacacacacacaattagatgagggaaatgtccaaagcacaaaaatagatttcttaccctaaatctgatc

SEQ ID NO: 853640 - DNA, 588 bp, Homo sapiens
actcaaagggaagggcatccctcccataaatccgacgtggcccagtgaagcagggtttcttgagatctatctgtaagtgtgttggtaatcaggcccacttctaccttggtggaaataaaattcawtagggtctagagttgaattggaaatcttttttttttttgagatggagttttgctcttgttgcccaacctggggtgcaatggcgccatcgcggctcactgcaacctccaccttctgggtttaagtgattctcctggctcagccttccgagtagctgggattacaggcatgcaccaccatgcccggctaattttgtatttttagtagagatggggtttcaccatgttggtcaggctggtctcagactcctgacctcaggtgatctgcccacctcggcctcccaaagtgctgggattacaggcatgagccactgtgcccggccagaattggaaatcttaattgctaatccacaataaatcacagccaaacaaaggaaaagggtttctgatatttgatcctttgttttgaaaagctgtttcacctctctctgtatttgctcacacatgtgctctgaaacatcaacca

SEQ ID NO: 853641 - DNA, 636 bp, Homo sapiens
ttccaggtttgtaaatcaaatcaaggacctgagtcagactccggacttactgaagttcaaccttcctgaagacgaaaacaggctgagcagcatggatggcaaggccgtctctgccccaaggcaccagctggcggacaggatctcggttccatctaccagccactgcaaagcagggacatgtgtgtcaaccgggccctgggacaggtggtctgggcctcccctctcttccctgtggtgatggggacagggaactttgtaggagaaacctacgaaatggaaactgtgaagggaaatgctttttttttttttttttttttaatgagatggagtttcactcttgttgaccagcctggagggcagtggggcgatctcggctcactgtaacctccacctcctgggttcaagtgattctcttgccccagcctcctgagtatctgggattacaggtgcctgccaccatgcctggctaatttttgtatttttagtagagatggggttttgccatgttggccaggctggtctcgaactcctggcctygggtgatcagcccaccttggcctcccaaagcgctgggactacaggcatgggccaccgtgtccagctgggaaatgctttccttgactcagtgctaggagt

SEQ ID NO: 853642 - DNA, 390 bp, Homo sapiens
tggctggacctggaaggatggggaccaagagaacagcaagcagtccccacaagggaaaaatgaatatgytgaactccagcaagttaagagccccacgttcctccttggaaacacctggagctcataagcacacagcattagcacatctgctgctgggacctggtgcaggaagtcatgaaacggatgggataacagctcccttatgaggcagacatgctacagtgcagaaggaaagagtgtaagtatcagtagagccctcatttaattttagctggaaaatttataaccaactctaggatggctttaacttcaggtgttatgaaagttccaggataacatgtgtctgctttgcagctgctaagctgcattcactgaagctaggagagatgt

SEQ ID NO: 853643 - DNA, 574 bp, Homo sapiens
aaaacaaactcttgactctcagttttgattggaagagtgctggatgaaatctttcccaaggctacttgacttgacctcatgtaattgtcttcattgttagcaacagaaatgtggatagaactacctagaattgcttttggttttgttttgttttgttttgttttttacaataaactcaatgtgatctaacaattaaacaagtgaaatataaataagaaactggaggagaactttttagatgtgaaatatgaagtgagccttggtacctggcagtgcgggatgtacgcttgctccgtgaagaagagcacaagcagagtttcacattacctgctggtcaaacaaggcccagaacattgggagtggaatatacaggaacatcaccctcgtaaccatcttaatttgggagatgagccgctcctgtagttggagtggggaagggacaaatcagccacaccctgtgtcctgtgccactcacggcttacaggtgctgctgatttcagtggagacacagatayttgcatctagaggcaagctgggaggtgattaatccaaaacatactgccgcagttttctt

SEQ ID NO: 853644 - DNA, 649 bp, Homo sapiens
ccatgagtattaaatattctggaacatggttttaataacttcataatctattccatgtatatatcatcatttatttaactaatctccttattcctaggcattaagtttattttcagtttttcttgttcttttaaaaaaaacttaaattagttcttataaaacaaatctcgtagataatacattcccatttgaccatactctaaattgctattttttccccagagataaccactgatattagttggtgtgtgtcgtcccagattcctttgttaggcattttcatatatgtgtatgtgtgtatacgtgagtgaatatatatatgtagaaaactcatagtactctgtgtatgtttttttaatttaatggtgtcatgctttacgtatcattctatttttttttttacttaacaatactttgcagaatctttccatgtcagtatttgtagatatacacagtttttttgctgtcacatggcatgtaataaagtggatatattttagtttatttagctgtttccctatgggtagatatttmggatgtttgttattgttactataaatgtgcgtatcttggtttttatctcccagtgcttctgcaaccattgtccatcgacttaagaggggttgggtttattcagtattggaaaatc

SEQ ID NO: 853645 - DNA, 396 bp, Homo sapiens
gccaccacgcccagccaaggtgttttcttagtaggtgaaattactgagttagaagcatttattcaggacctactccttcttaaacaaagtcattgttttgtttcttcattcgcctatgtctgcaatattatagagctagttcaaagtaagcagtttgattttggctccaacattgagcaatcataatgtaatactaggttcaaatgtgagtagatttgagtgcatgtcgatgttgaaaataaactcactattggagtgttttaggatgctctggctttccaggatggatattacttaggagtaggttggctctgggttttttcctgggttcttgatttgcttgatttsgttcttatataatctattctttctttccctttccttttcccagaaaca

SEQ ID NO: 853646 - DNA, 498 bp, Homo sapiens
cggtcactatttgcatatcaggcagaatcctttcccatctttgcacctcctgttctgagcatggcatgtgtgcagaagctttccaraaaagtctgttgatttgaaccatgatggccaaaataactctggacagggtggcaccgttttgagctgcgtgtaagcacacatgtgtgcaggtgcacatacccacaccgatacacgggcatgcacaccacggcctgaggtcctctgccgctggaagaaaaggcaggttggcatctgtcatcgttgcatttctttgacaaaacatcaaccttcttctcacaacttttctttgccaagtgacttttcaaggaccttcccaaactgacatctctgaaatctttctttttctgtactctaaggggtgggcgaactttctgcaaaggctagggtggtaaatattttaaactatatggtctctgtccaacttctcaactcctgcatcgtatcacaaaagcagccacagacagcctgtaa

SEQ ID NO: 853647 - DNA, 636 bp, Homo sapiens
tagttgcctgtttcatgagattcctgtagttcttttcaatgatgtcataagcctacaaagctggcttttgggcaattgccgcgataaaacrcaagtatttatgtacatctatcatgcatcaatagaaatatttgttttataaaaaagcaagtatctcttaaatcagtgtggaactggaaatggaattggtggcgtccagtctgattccagggtttgggaagttgggcagtgcccagcagacactgagttgacaggacataagtaatgattaagttgtttggccctaactacgtacttaattggaactgtgaggtatttattttggcctaagtaccatgaaaaaaattactgaaaccctaaggaccgtgtggcctgagaaagtttgggaccctctaaccttgaattctgctgctgccttttgtaccctggtttttctttcttttttttgttgttgtttcttgttttttgttttgagacagagtttcactcttgttacccaggctggagcgcaatggtgtgatctcggctcactgcaacctccaccctcccgggttcaagcgattcccctgtctcagcctcctgagtagtcgggattacaggtgccccccactatgccaggctaatttttgttatttt

SEQ ID NO: 853648 - DNA, 640 bp, Homo sapiens
ttgacacgtacctccaaggcctcaaagtgcccacagtgtgtgctcccacagcattaaaatgcacccccttaacattttatttatcaccccccaccactattccaggcctgaaacagtcttatgaactgtccgtgaggcacttgtttgctgaaacagtaactgagctgaattcttgtggtggttcctatgaacacccgggaagaaacagccagcagaggccgcctgagcctgaaccgagtttctcttccaggtgctgcggtgtgtcgcggggtgcccaggcctggaggaactctaccttgagtctaacaacattttcatttccgaaaggtaactagcacttacttaaatgcatctatccccatttaatcatcattctgagtaaataaatggtctcaattatatctaaccttaatttttagaaggatttgcaaacaagaattaggaaaaatgcttattattcattgccttcacaaattagaatttcactaattggttctaatcaaaggaaactcatcagaattaaatatttgtgaagacatgagttatattagttttgcatcagtgtattaacttgctgtttcttttttttctttttytttttttgagacagagtctcactctgtcgcccaggctggagtgc

SEQ ID NO: 853649 - DNA, 583 bp, Homo sapiens
tcacgtgagcacacacctcccccctccacacacacccatgtgcatgtactctcacacacacacagacctgtgggcgcacacctacctacacacacccacacgcctacccacatgcagccacactcatgcatgcacacacacctgcctgtgcacactcatacattctaagatacacctacctgtaagccgacttgcacatgcacatacatacacactcagccatgtgtgaacacacacaaatgcaaacctgtataaaaaggacacaggtactttgtacactgaatttattgtgagaattaaaatgcaatggttagatgcccaggagtccttgctctgtcacttactagctgggtagtcttgggcaggtcacttccactctctctgcctgcgtttctgcatctgtgaaatggaactattagtagcacctccctcagagattgttgttgaagatcgcytggcacagggcatggtacacagcgagtgcccagtaaatgtcagctattagtagtgccctgtgtcagccaaaactttttggtctctggaagctttcttttcaaatttgcaatgactacatttcctcaaa

SEQ ID NO: 853650 - DNA, 472 bp, Homo sapiens
gtgtatttttgttattttcctgtcaggcactcaggagccctgggatctgccatcttatyattcatcattagtgaagggaagtcccaaccacagaggagaattccgaataatatcttccctttgtaaacatttctgccaatttctaaggactttactcatctatcctgagctttgtaaccactctgtgaggcaggaagaaagaaaaggttttgtcatcttcactttatgagtaagaaaataagattggagaggttaattgacttgcccaaggccaaacagcctgtaggtggttgagcagaaatttaatcctgggtcatctgactccagggctcagtgcggagaacattgacctgggaatctggggatctggttaatgttttagatctgcaggtaactctcctgcatcccatggtaaccacttgtcactggaaagtaggaagttggggtcacctgggggatccctaggctctgt

SEQ ID NO: 853651 - DNA, 530 bp, Homo sapiens
tgtgtcatattcaagataaaattgtctacaccaaggtcatgaaaagttaattttcttctataagttttatagttttatcacttacatctgggtctatgatccattttgagttaatctgtaaattgtttaaggtaggcctccagcttcattcttttacatgtaaatatccagttatcccagtaatatcttttaaaaggaatattatttctcctttttaaagtcattatacctttgttgaaaataactgaccttgtattctagggtttatttctagactctcaattctattccattgatctacctgtctatccttatgtcagtacctctctgtcttcattattgcatcattgaaactagttttaaaagtggaaaatatgagtcccccaaagtttcatttttttttctttttttttttttatgttattttggctaacttggatcctttgcatttttatatacatttaaatttaatttgtcaattactgcacaaaawgtatttggtattttgacatgaattgtgttaaatctgc

SEQ ID NO: 853652 - DNA, 596 bp, Homo sapiens
cagttttgaagtgaatgctggaaaaaacctgtactgctgttaatggagagttsagcataattttggtgagggataagaggaagagaaatactgtagtgagtctgagacttcttagaggatacttaagtggttataatcacaatgttggtagaaatatgaacagtaaagaaaattttgatgacgtgttacacaaaaatgagggacaaggtattaaaaactaaattaaatattactcttgttataaattggtaaataacttggctaaattttgtttacacactaggcctttatgtgaggcagaatttaagaataacaaactaggaaatacaggggagaaatttctaagcagaatgttgtgggaactacatggttttttttaacttcttacagcaaaatgagaggaaaaaatatttaaatatatagtttaaaagagaagcaaagtgaaaagatttggaaaatttgcagcctggccatgtaaaaaataaaaaatcatgttctggaaagaatattaagggtgtagcgtagctaagccaccatttgctataaagattaatatggatagaaggaagccatattctaatcaccaagacaataga

SEQ ID NO: 853653 - DNA, 591 bp, Homo sapiens
aagatagcaaggtctgtggggttagagcccagagcaagatggagagggtatctatgcagggaagggggcagcagtggcaatggaagactggttacatggaggggattgatcaaataagtatrtatattaagaataattgtagtcaggattattactgtagttgaaaggagttaaaaatttggaaagagagaaaactaggacgaaccctgggatgtcatcttggaattgggtatatcagtatgaactcatgcatttcaacaaacacatagatagacataaaaataaatttagctttgtccaccaaaatggtggacagcaacaccaactagcaaatctactcctcagatctttacttctaactaccttccttcaacaaaaggagccttcgagaagtggttaacttcatgtctggggcagggaaaatacagaatgttatgccagaagatttaagaacaaacatattgttggagtagattaaaaaaaaaataggcctttcttttgtataaacagcattaaatatacacagtgcaaaatgttttcagggaataatgagcaaatatatttcctaatcaggtaatcaagacattttat

SEQ ID NO: 853654 - DNA, 612 bp, Homo sapiens
caaatcattaagtccaactttcttgtgcttaacagttcttctcacagtctgtctctttcctctcacattttactatatttgcagcaaagagaaactgggttggactgtcaacgttttgcctggaaatctcctgaactaaatatacatgctcatccactacaagttctgctttccacatcactgtaggaaataaatcgactaatttttttctgccacaatatagcaaggttcaaataacatgttctttattttcttctcagacttcaccagcagtgcttttaatattcatatttttaccaacagatggcttatgatgattttattattttctgggctaatacaggttttctctaccatactcctcacttcactctgagccctcaccagcagtgcctttaatccacattatgctccaagcaacctagtttttctatcatgttccttagaattctcctagcccattacccagtttcaaagccttgtctacgtatwtaaatatttgttacagcagtaccccactcacagtgccagaacctgtaccaattcccttttgctctggcaacaaattacgacaaacattggattattaaaaaaaaaacaggttatgatctg

SEQ ID NO: 853655 - DNA, 612 bp, Homo sapiens
caaatcattaagtccaactttcttgtgcttaacagttcttctcacagtctgtctctttcctctcacattttactatatttgcagcaaagagaaactgggttggactgtcaacgttttgcctggaaatctcctgaactaaatatacatgctcatccactacaagttctgctttccacatcactgtaggaaataaatcgactaatttttttctgccacaatatagcaaggttcaaataacatgttctttattttcttctcagacttcaccagcagtgcttttaatattcatatttttaccaacagatggcttatgatgattttattattttctgggctaatacaggttttctctaccatactcctcacttcactctgagccctcaccagcagtgcctttaatccacattatgctccaagcaacctagtttttctatcatgttccttagaattctcctagcccattacccagtttcaaagccttgtctacgtatataaatatttgttacagcagtaccccactcacagtgccagaacctgtaccaattcccttttgctctggcaacaaattacgacaaacattggattattwaaaaaaaaacaggttatgatctg

SEQ ID NO: 853656 - DNA, 620 bp, Homo sapiens
ctttcttcattccatcccttctccctccagaattttcagctgtgggttctctagctcagaacactttcccttcccaggggatttcttctcctgaacaactacttcctgmgtcctcttcttcaccccaacacgggtcatttcctatcttcccccacacgctgtccatccccactatagctgtctcctggaataatctcttgcacctggctacacccgagcactgctgagacgatcccacttctgctcccgtgctcacagcctgctcaccacaacgtctgtgttgacagggtgtttctgcccggagcccccacccagcctccaacactgtttggtacacagaagccatggcaacggcccccacctcatcccctcctcccacgcaagctttggagcttcctgtttgtgtagcctcagctttctcttctgctcctgactctcggtggtgaggggctgccctacggtggttcccttaattgtgggccgccccccatccttgctgctggctgtggcacctcgctctgtgggctggtgccctcactgtgctgctctttgagaacactccctgtcccaaatctgagttgggaagttctcctgtgttccatctgcacggtggatggaga

SEQ ID NO: 853657 - DNA, 613 bp, Homo sapiens
ccatctgctccaaaatgtttatccaacagtttgccatggtgcttgaacttctatcatttgggtgcctctttggaacaggaaatttaactctgtctggtgaccgtgcacaggatttatagctgttgagcctcaggagccatcaggaactgagcttgctttctttccttctctggccctgcccattcactttctgtccaagagtggccctaaaccagaagaaacctcccaactcccttctcctgatagtccctaaagaccacacacatggtctgcttccttatgaaaggctccactgccaatcactgcagtgatactgatgacaaaggatggcaacaataacaaagctaggcaagctttaagggctccagaatcttactcaggtatctcagccacgagcccgggtctagggggactgaaagggactttggccactaccattattcttgagagtggagctctccacccagtgcctgaaagtaaaggagatrcgggttcagcccattctccactttgtaggcgtgaagatgcagcagaggcagaagaacagctgctgccctcagggacaagtgtgcaatttctacctaagaggcctctaggctgcgtgatgtgcatt

SEQ ID NO: 853658 - DNA, 639 bp, Homo sapiens
aggggaccctgccaagagtcacctcattagcacaaacacagattgctgaaaggggtgcataatgaataacaaaagatgctcctattgctcaggaaatttcaaaggtttcaggagctttgcgccaaggacaaaraacaaattttttttcctattatatattccaatgaatccagacaagttcatcagaaagtcaaacatattggttgtcacagtatatctaaataagttatatttttctatgaaatgacaaagatcatcatatttgatctaaccatatactgtccacaagaggcacatctaaaacaaaaataaataaataaaaataaaaaataaaaagatagaaaaagatatagtatacaaaaagaattaaagtcctaaactattaaaataaaggataagtagtaaaaatcaagatctgcaatgaagatgtgtttgtcataaatctttagtttctgaataagaggaaaatgaccaaaacacaattgctgtggagatttcatcagttcttaacagatcaagtaaacaaacaaaagatgtagaatgtcagaaaaaagtcattgctgggatccactttgtaaatattgaaaaaaaaaacaaaaaaaatctttttcagggtctatggaacaattttttaaaatt

SEQ ID NO: 853659 - DNA, 510 bp, Homo sapiens
cccacaacactttgaattattctttcagctaacaatttatcagagcaaccgacatcataaggtcaagtattcatgaattcccactccattaaagccttcacttagcagcctatacatgtattcggtgaatatgaatgttcccaatgaaaatatttgcctaataaatgaatcgactaaatcaaaacattaaaactgtgtggttgaaaagttatgaaaacatccatatttaattattaaattatattttaactacatcaatcaaatcattacttaaacacatcatttgctgaaattttgcacacttattctagaatacttttataaacagaaaaaaataaagataaaagtttcaaataaactggattatttagcctgctaaattacaaagtgaagggttrttttgtatttcatcagtttgataaatttgaatagggacatatcacatttccccaagtggggagggacacacctgtaaaagatttagaacaggcatgtcttgttttacataaa

SEQ ID NO: 853660 - DNA, 630 bp, Homo sapiens
cggacctggtcagcccatgtcaacatttactgtaccccgcacattttagggtcctgtactaaatctattcttgtttagttttgttttgttttacagacagggtctcactctgtcgcccaggctggagtgcaatggcacgatcacagctcattgcagcctcaaactcctgggctcaagcaatcttcccactttgacctcccaagtagctaggattacaggcatgagccaccaggtcagtccgatgtactgaatctttgtaatctacaaaaataggaatctagctcccttccctttaagaacttacaatttagttgtggaataaaacaaacacatcatctactcattctttaactaagcatttttgtcaaatcaattggaagattttcttccatgagatcatatctctgattttataaaacaagtcaatgagagagagaaaattctttttatagtcaatcttgctggaaggcatctttaccataaaataaatgtttcaggagtctcttgggaagaattcatgatgcagttgagatccactgtcatcactatgtaacagtgytccttctcatgggaattggatgagattaagagactttgtgaatattctctgttgtgcttaagcaaagttta

SEQ ID NO: 853661 - DNA, 549 bp, Homo sapiens
attagaacacttccccaaggcaaacactttataatttcctagattactagtttaatgcacaagttacgttttaaatgcttttctttacagggaggcattcttggaccctggctgagattaggaaacagccaaggcttagcagcacacttaccaagaatttcttaggtgggttattttctgggaagattatcacagtgaataatctcatctattttactgtcaatttcagagggtgacatttttggccctgttctcagttctagagatattgtcaagttgaaacttgcagcttcttatatgctaactctatcttctaattagaaaagaggttagaaaatgctggagctttctgggttgccttccccaagctaaattagagtctactgaagaaaaggaaaggtggagaagagacagaaggaccgggtggatgcagtagagtaagaaccatacgatcaaaggcaggtcagggactagacagaatagtctttctatcctaccaatgccagtggctcatgaayggccccaagcccctaggacttctcttaagcc

SEQ ID NO: 853662 - DNA, 592 bp, Homo sapiens
tgaacatttccagttttaccacaaatgcttgccccgtgggaaaatacttccctacattttatgacaattgattctgattttgaggaactaatttgtatygaatgcaaaatgtccagcctcacatggaaactggaaagtccccttgtccagacaggtccaaaactgtgtttttattgtaaagacaggggaaacaatgaaagattgtgttttttgttttagaaaatccttccttcattgttctgcatacttctgtattttattttttttaacagtcctgtgggtttaatgaccacaggcaattttgtggatatctggggctcatgggaaacttcaccatgtctggattctaagctcttagatgccagagcctactggatcttttactgtatgtgaagtcacccgtactgccaaggatcctgaagtgaacatgctgacccctttgagagattcttggaaatatgactgacattttctactgtgcaatgaaagtcagcatttccctccccacattatagttctggccacaaaggaagcaatgcccctagaactctctgatgtatctgagaaccctggaggcttctgacttcatttg

SEQ ID NO: 853663 - DNA, 602 bp, Homo sapiens
tgcaattttctggaacttgtctgatgaaaatggatgtggacactttaccacatcatgatgtctgcccaagcaaatgcattataatcataagtgatccaktatttcttctctgcctagttgagtgtagatttagttctgcacatgccccaaatgtctgggtggcagtttaaatgagctgcttgccttccttcccaaaccaaattcagaaccttttaactgacaaccacatcttaaaatgtgcttctaatggtagctgatggcttcaaaacagcctgcaggtaaggtttctgaatgatcttctcagcaagccaagtctttctgtttcagttctttgagaatgccacagcacctccaagagagcccattcactatttgtcagtggatcgtgtgcttcccaggaggttatccattccatgataaattctttccaacttgcagtgctgggtagagaacatgtcctccccttgtagttcagatgtttttgtggacttccgtctgcttcattgtggtgttagtggcacctggtctcttccctcagcacagtcagtgcttctagatacttatcagagagtgagaagccatggtaatattgtacatgggtg

SEQ ID NO: 853664 - DNA, 584 bp, Homo sapiens
tactcaagataagctgaggagcaaggtcaacacattgcatcagacctcaaatgaagactggaacatatcaccctaaccgcatgggactaggatggggtgagcaytggggcaggagcagtggtgtgtgatggaggggtggaggaatctttctccactccaagatgggatcagaaatgtaggaggaagccaaaaagagcaagctcaccactcttggcatattttttccaccttgacattgatagctagacctcactcctggttgggaaattttctaagctaccaagaataggaaaaaaatcaaccataactaaagccctttgagatattcttccttgtcttcatgaacaggacaatattaaaacattacagaaagtctggaaaacaaagggaaaaaaaagctgatagccctgcccttcaaatatacaactcattgcatttttagtaatgccccctttcagtttttaatctatttgcatatataatatattagctagctaaaattggaacataaacaatatatatcttgcttattcatcttacaacttaatacagaaattttctgttactttattactttttataat

SEQ ID NO: 853665 - DNA, 607 bp, Homo sapiens
tgattcttccacaccgtcctcaccgtctacagtgactgccagttttcaggctctacacacaggtctgtgttcccagtgtctgtcttaggatatgggggagactagttctggggtctaagtcttcagtctgtctgtgttcctgaagatgacttgtaaaaagcgaggtaggatagtagaatctttcatcccttgaccttcagctatcattggcttcaaaaatatctttctcacctttagcaatctcatttttaaagttctttccaaaatgaaattttactccctccttcaataattcatttcaagtataaagtatccaagatttaggaaattctatttgtccctaaccaaagtcgatgtattgctttacattatcattattgttaagactgaaaggtggaagagaaaatctattcattctctcctcattatcttgaagatgactattaaccataaccccagaactaaacatcttaaaaatattcaactcaaggattctttamgtatgtcagtaaacattcaccaggcagtgtatatgaaggaggtgtatacagggttagatagtactactattactggctgtcagttaccttgaatacacttttgcata

SEQ ID NO: 853666 - DNA, 637 bp, Homo sapiens
ccctccggtcttcacaatgaatgctggcccagtcgccagcagccttcacgccaatgttctcccgtcagtgaggccaggcccccaggtgccactggagtcagaggagggcagctggcgtgcgccaagcagccactaggagccacttcatgccaatgctccacttcctgcacgccacagtcacgttcagctgcaaaagtagttatgctttgggtttttttggtttttttttttttaagaaaaaaaaaaaggaaaggaagaaagcaattaaaggggcgggggggacttaaagtttgcacctcagcatgagtcaccgaatcaaagttcagcaaccacatgcaaaacaaaccctccgtgagggcagcaagtctccgtgaggacggctgggattggctgcacagcaaagccaggagaggctccatgaggagaacagcattcagagtccaagggggagaacccctgttccaagtgggaacttggaacagaagttctcctgcctccagctgagaagatgatcagattctagctgctcctggggaaagtcggtactcacagctggacacaaacatagcttgcaggaggaagagtgtcagrgcaagagacagagcagagatggctacggagatatgggtgcatatgg

SEQ ID NO: 853667 - DNA, 433 bp, Homo sapiens
tgcgtccagaagttaaagaccagcctgagcaacatggtgaaaccccatctctacaaaaaacaaaaactagctagggcagggtgcggtggctcacacatgtaatcccagcactttgggaggcagaggygggtggatcacctgaggtcaggagttcaagaccagccaacatgatgaaaccccatctctaataaaaatacaaaaattagctgggcgtggtggcacgcgcctgtagtcccagctactcaggaggctaaagcaggagaatcgcttgaacctgagaggcagaggttgcagtgagctgagattgtgccgttgtactatggcctgggcgacaagagtgaaactccatgtcaaaaaaaaaaaaagaaagaaagaaactagctgggtgtggtgatgtgcacctatagtcccagctactgaagaagctaaggta

SEQ ID NO: 853668 - DNA, 433 bp, Homo sapiens
tgcgtccagaagttaaagaccagcctgagcaacatggtgaaaccccatctctacaaaaaacaaaaactagctagggcagggtgcggtggctcacacatgtaatcccagcactttgggaggcagaggtrggtggatcacctgaggtcaggagttcaagaccagccaacatgatgaaaccccatctctaataaaaatacaaaaattagctgggcgtggtggcacgcgcctgtagtcccagctactcaggaggctaaagcaggagaatcgcttgaacctgagaggcagaggttgcagtgagctgagattgtgccgttgtactatggcctgggcgacaagagtgaaactccatgtcaaaaaaaaaaaaagaaagaaagaaactagctgggtgtggtgatgtgcacctatagtcccagctactgaagaagctaaggta

SEQ ID NO: 853669 - DNA, 689 bp, Homo sapiens
tgaatattttctccctttctgaaggatgccttttcactgctgatgatttcctttgccgtgtagatgcattttagtttaatgtaatcccacttgcccatttttgcttttgttacctgtgcttttggtgtcatatccaaactatcattgcccagaccaggtcaagaagcttttcacctatgttttcttctaggagttttatggtttcaggtcttatgtttacatttttaatccattttgagtttatttttgtatacagtgtgaagtaatggttcaatttcattcatctgcatgtgaatatccatttactgaagagactaccctttccccattgtgttcttggcacgcttgtcaaagataagttgaccacagacacatggatttatttctgggctctctattctgttccattggtcaatatgtctgtttttatgtcagtaccatactgttttactataactttgtaatatttttaaaaatcagggaatgtgatgtctccagctctgttttgcttactcaagattgctttggctattcagggtcttttctggttccatayaattttagatttttttctgtttctgtaaaggatgtcactggtattttgacagggattacattgaatctgtagactaatttgggtagtaaggatgttttaataatattaattcttccaatccataaacacaggc

SEQ ID NO: 853670 - DNA, 617 bp, Homo sapiens
taatgaatcatcaggactaatgatattaataccataacatgccttattttacatcatggaagtcatccaaatgggctgtgtgacagatagagaagtaaatatactttattatttatgcaaataagtactatttgctcatgccaaaatactgcctttattaaagaggataaaataacttctttagatggactttttaaaaatttcttccatatatctatatccttcatgatgtcttgggtaggagtctacaggcaatatagtggaattaaggccataggatgcactaccttggctcctcacttccttctagccttgaaaagtggaacagtcactaatttacaaaatgtatgctctgttcttactcttaacaagagggagggagagagtcccacaggcagctcatgtaagttctagctaaaaggagaatgcaggtgggagcagtataaacaggtgcctcaaaagttgtctctttctgggcattgttgttgttataggtgcccatccatcttgtaccaagagtactaccctgagtactagattaccaattgtagctcagggggctrcatgcagtttttttccctttaattttaagacgctctccccacttagtggaaaag

SEQ ID NO: 853671 - DNA, 514 bp, Homo sapiens
aaagcttttatttttgcattttataactggtcaccttcctaaacctttattatttctaataacttctcaattaactgagwtttctcattaattttatttccacgtattgataattttgtccctgttttgtcattctttctatatctcctttgtatcaactgtattgactagcatattggtaaaatcttaaataggcaccctaattatctcaatgtttcaccactgctgatgctttatgtttttcatgttaaggaagcatcctatttctgttttagtaagagctttagtcaaggataaatgttgaattgtattagttttttaatacctttactgcttgatttcttaatattgactatatttctataataaaatccaatgtcatgttttatactttcaatgtaatgttagactgcatttggtaataattcatttacaatgtttgcattaatattcaaaagtgagactgtttttagtgttccctttgctagatttttctgtgttatcatggcttcat

SEQ ID NO: 853672 - DNA, 588 bp, Homo sapiens
tcagatccttagtctcactggccacatttcaagtgctcagtagccacatgtggtatggctgtcacactggtaaatacttcttactgaatacctatgatgtataaaaaggccttaggtagagataagttaaagacatactgcccctcccctcttcaagaatggaggagttgagagaggtacaaaatatagcaatggtgtgagagtagttatttgtctcttcctatagactaatgtgactttatggctaaaagacctctttttgtgattcattttgagttagtgtctataactgagatcactgaggttgctgacagtctgacttctccataggtgaggcattattttgtttttgtcacatattagggttgtgcatgattgttgtaatgcttttcatgatcaaataaagcactttgcatttaaactgtggctttgatcaaatagctccatatttccccatgtggaatcagattttctaatgttaaaatgtacacctttctcaawtattcgagctccctgtccatattattgttaacctcagatttctgtctcatttcatcccttcaagtaactagctttttctcattattt

SEQ ID NO: 853673 - DNA, 469 bp, Homo sapiens
tacgggaagtgtgactcagctcaagactgtgaggctacctgttcaggacagttgtggcgtgcttttacctggggtttcttcgggtgatcggcgtcgtggtcttttgtcattcactgtatatcttgagtggatttaatattatgaggagaggagagagtctggcttgtttctgcctactaaccgcttcttgcgcgtactttatgtctagatggagttttatattgataaggtatagggcaggtgccctctaaatttatccatttcattagcctgtgctttatattttgttttaaaggcctatttttccagtgactttgtttacctgtttctttaacctttttcatgaataagttcttgtttctgtcagtgaccatgtgagagctagaataatattaaaaacatttatccctaaayacatttgtttaagcaggcaggaaggtgcgttatggggtaaattgaacatttgagt

SEQ ID NO: 853674 - DNA, 641 bp, Homo sapiens
atgctggatgtggctccagctcatctcatgtccctgccctctctcattccttccaacactcccttcccttcactcgaatcacccagctcttcctgcctcatagcccatgctgtccctttgctgggaacattctcattgcccctccacttccaattatttggcgaattcctatcattcttccagtctcttcttcagggaggccttccctgatctcccgaaccaagtaagctccccctcctcttcctgagtgcccctcacctcctctgggacagccagtgcacctggcagtagactcatgtaggcaaaggctgtgtctgtttctttcggcagcctctagcacagtgcttggcatccaaaaggccacataacaagctatgtgtcaaacaaatgaacacatgaacacatgaatacctgtagacacagctccgggttctgggagaattcctaactggaacccgccagttgggccccagggtggcatagagacgtcccctgcttcagaggaaaagggttaaattttagcaacagctttgaaagaccagatgctcctgaaggaggcaagagcamcccgacaacatagtcaattagctcaggaagtcccgcagagcaacctccctccctccccaactcctccccagcct

SEQ ID NO: 853675 - DNA, 600 bp, Homo sapiens
agaggaaagcggccctgaagtgtgggaacccccaccctgcctgrggatgctgtggaggggctggtgagcagggctcttgctttggtgaacccaccctggcttccctgtgacattcccaaacggaggctgtggattttctcacaccctacgcacagcaagtgaggctaggctccttcctaccacccttctttggtgcttccggacttttactcctctgccctcttgtgaaagccttgctccccagaggcaggtgcctagagccccaccccccatgcaccacacccccttcacggctgacttccgctgactaaccgcctgctcatcagtgctaattcccagaagacttgagcacctggctcatagtcaagctccacaccccaagtctgccatcttctcgggtgaaatcaatccccacatggatggcccatccagcattctgacatcatctccaatgattttctccatccctcttacacaccccaccatcatgggcacactgtggatttggccacgtgcagcagagtgtggccagtcgcttaccacatcatttcccttctcccaggcccacagctagattatatctcctagcccctgtcagca

SEQ ID NO: 853676 - DNA, 569 bp, Homo sapiens
aaggaagagtggtaggaaatgaggaggrttgattacccaggggttgaattaactaggcaaatacaaggagagttccatgttatttttagcaggaagtcaccggtggaatttcagctgagaagcaatgtgatccaatatatacttttaggaaatggctttggttgctgagtgtagaatatatcttgagctaggttatgaaggaatgggtgatagggtaggagggagtgaaaccagggaaccagttaaaacactgatatttctgacttcaagtcttcacatatagaacaataaaacagcatccatactctatgttcactgacttttcttcttggcctttgatctgggttcatagtttgtgctccccttatgtcatgaagtcccttacatttgctgcatttgctcagagctcatcctctcaacccttgtgcagaagaatttgcagaattttcctctgataaaggcacagagcagttacctggaattaccagactcctttgtccagagggatgacagtattcaaagaagctatgcactgttttccagaacttgctaaatattatctataagtc

SEQ ID NO: 853677 - DNA, 484 bp, Homo sapiens
ggaatagtctaggataatttctttcatgactgtgtctctgcttctttggactttacagagaaggcaaagaggaaaaaagaggaaagagttagataagatgatatgytacattttaaaaggagagtataaaaagtgtacatgcagaggactggaagtagaaatggtaagtactaaaggaaaacaaggaatggaaatgggaaaaatggatagggtaaggggatgagaggaggaaaaacagagaagaagataggtaacagtatagataaatcagaggagaaaaaaagtgaaaaataacaggcaaaaagaaggaaagggagaaatggaatatagtaatttatgcatactgggggccttattttgaaagttaaataagtaaatgaataagttaaggtgagaaataaaggtgagaaagagtcaaggagtagccaaaaaaggtaaaaatatttacaatctgattctagtctaccacgttgtatattcataa

SEQ ID NO: 853678 - DNA, 484 bp, Homo sapiens
ggaatagtctaggataatttctttcatgactgtgtctctgcttctttggactttacagagaaggcaaagaggaaaaaagaggaaagagttagataagatgatatgttayattttaaaaggagagtataaaaagtgtacatgcagaggactggaagtagaaatggtaagtactaaaggaaaacaaggaatggaaatgggaaaaatggatagggtaaggggatgagaggaggaaaaacagagaagaagataggtaacagtatagataaatcagaggagaaaaaaagtgaaaaataacaggcaaaaagaaggaaagggagaaatggaatatagtaatttatgcatactgggggccttattttgaaagttaaataagtaaatgaataagttaaggtgagaaataaaggtgagaaagagtcaaggagtagccaaaaaaggtaaaaatatttacaatctgattctagtctaccacgttgtatattcataa

SEQ ID NO: 853679 - DNA, 497 bp, Homo sapiens
ctgctatggatacactgggattcaagcccatcccaggtctatcggactccaaatttctcatttttcttcctagttcaagaggtatgtgacatggatttaaaaaactaaaaaagatccagtattttaccaacaccctggctgaaaaatctgtagattcgcttgttcgttcagcaaacattggttgagtagttactctgtgatgattcatagtttgtgagaagaaatgtatttttgtttttgtttttgctttttaaaaaagggtggtttagaatctcagattgattctgagataaactgataagcctccttcttagcttctgtgttctgaccatggcaaaccactcaacccttgcatcttcaatgtgaaaagattagacatgactattcccatgtttgtttctaaaaggggaaactctttatgcttctgttccaattctcaaacrgtatctactattattctgtagcagatacaccagtatcaagctattgttaattaa

SEQ ID NO: 853680 - DNA, 586 bp, Homo sapiens
ctaaagttatatgggcttagattttattccctactcattaaaattaaggagttgattctgacagttatctataaaattacacatatacagtatattaatactgtaggartcagccttcatggtcatctaggatgatctttgcccctgatattcacatctttacagtgaataaacagtaaatcacagctggccagtatgaccaatacaatatggcagaagtgatggtgtgtgactttcaaggctaggtcataaaaggcattatagcttttaccttgttctcttgaatcacttgctctaggagaaacagccattgtgccataaggagagggacacatggagaggaaccaatttgccagccatatgagcaagtcaccttggaagtggaacctccagccccacgcaggctttcatttgactgcagctccagccaacaactggtgactgcaaccccctggtgacatgcagccccatgagtgaccatgagccagaattgcccaaccaagctgcttctaaatttccaatcaacagaaatcatgataaataaagtcctcagtattattttaagccatgaaagcttttgttactc

SEQ ID NO: 853681 - DNA, 592 bp, Homo sapiens
aagcagtgctggacccatatgcagatgttaaaggatggctttaacatcttaacatgagcaatggctcatgcctgtaatcccagcactttgggaggccgaggcgggtggatcacctgaggtygggagttcgagaccagcctgactaacatggagaaaccccatctccactaaaaatacaaaattagctgggtgtggcggtacatggttttaatcccagctactcgggaggctgaggcgcaagaattgcttgaacctgggaggcagaggttgcggtgagctgagatagtgccattgcactccagtctgggcaacaagagtgaaactctgtctcaaaaaaaaaaaaaaaagaataaaaggatgaatgaatgaatagatgaatcccaaatctagctactataacagcattcttgattcttaaaaacccataagcgtatccctggtttttaacaaactatatgttcgggccactttcaaaaactgtgttatcctaattgtcccaaccccactagttataacacagtaactcagtcacaaaccccggtgtaacttttgagcttacaattacaatagaaaaagattattatcatagtag

SEQ ID NO: 853682 - DNA, 658 bp, Homo sapiens
gctggctttcagataagtaagggaacattctcccgtgctacctgacacatttaacatggtcttttgttaaactgtcagttctgatttctggcctttgaartaaaaagcacaatagtgaaaaataccatataatataccataacctggacttgtcatagagacagaagagaaaggaaggacagtgaggaactcacagttaatgaagtggttaaccaatgacttgaattaaatttgttactgccactagcagccgcccttaccttctgtctctgtctctctctttttctctgtctcttactctgtcttaactttcactactacagttggtaaggtctagaattttcactctcttctatgttaaggatgataataaagaaggtgattccactgctaaacagtggaatatttcatgttcttcattgcttgtctgttcctaacatctctatagctcattacaacagttggttctgttggagtgaagttttgcagccatccccagtttctaaagaacaatactaaaatggcccctgacaacacagtaatgttaaaactccagcctctgcattgggagacagaatgcagaggttgataccagactacccgatcttacattattttgtcctcagtttatttctgaggaaaaacagaggaaccttac

SEQ ID NO: 853683 - DNA, 555 bp, Homo sapiens
agtgtaggaaggctaagagaactttcttgagaaaataacatttaaactgagcccctaatacaagctgactagccaaagggcgagtcagggatgaagaagatatgttccatcttggtaaaagtgtaaaataatcatagagactggagtgttaaaggaacttaagacagtatagctggagaatacaagttacaaaaggtgaggtgggagatgagaaaaatgggaagagttgaggctggagaggtgaggaaggtgtggtttgctaaaaccacaaaaagctcactaatgtttaaggttatcaatctaagggaagttggccaaaccagatgggcaggagaaaatccgtgcatcaagttgaagccacttctctgagagttggctgtataactggggaagaaaggcaataagaacacctaaagttgtccagtatatgattctaaagcaaattaagatccctgggcattccactgaacrttcttttcaatgaaagcccagtgtttttctgctcacccatccaccactcttcatattggtcatctttggttatatatgtgtttt

SEQ ID NO: 853684 - DNA, 466 bp, Homo sapiens
taaatacttatttgcttctaagatactagtggcaaatgaaatcagtagaatgcttgcaagcaccactgtgatgaaaaaggctctcaatcttytggatttcaaagactggaatattgtttttcaacttgggaatcaaagtgagattcatcactttcattgctaagtaaggatagcatcatttcatacaagtaagaaaatgtcatgcaaaaacagtatatataatcagaatgagtcactttaaaattattttttaaaattaaaaaatatacctttgttttaaaaataacctacattgccattgttattcacctttgcctggtgacccctgaacactctcactgaatagcatctctacaggccagatggtttctgggcaaccttccaatgttacgattcctcagacaaactgataacaattgctttatattccaggtatgggatcccaaatgcttgagaattttagcac

SEQ ID NO: 853685 - DNA, 454 bp, Homo sapiens
actagtggcaaatgaaatcagtagaatgcttgcaagcaccactgtgatgaaaaaggctctcaatcttttggatttcaaagrctggaatattgtttttcaacttgggaatcaaagtgagattcatcactttcattgctaagtaaggatagcatcatttcatacaagtaagaaaatgtcatgcaaaaacagtatatataatcagaatgagtcactttaaaattattttttaaaattaaaaaatatacctttgttttaaaaataacctacattgccattgttattcacctttgcctggtgacccctgaacactctcactgaatagcatctctacaggccagatggtttctgggcaaccttccaatgttacgattcctcagacaaactgataacaattgctttatattccaggtatgggatcccaaatgcttgagaattttagcacaatgaaaattat

SEQ ID NO: 853686 - DNA, 596 bp, Homo sapiens
attatataatgaccttctgtaagggttactcagcaacatgagatttagaacaataaaaattttatggtattttgcatgattagtcagtattttgtttttattacctttgcccattttaaatagtgataatgactaagattcataacgtatttagagactttacattgttacaggagctctgctgaatattttacaggaattaatcatataatccttacaacattactataaagcatttactagcatttagctccattttaatatagaaacaaactgatcctcagagaggctaattaacctgaacatgacacaaaagtactggaattcatatttccaaatccagggtctgggtactttaaccaccatactacaccatgtatgtttataacatttctagaatattaagcaaaaataataccagtgtgatccttaagtaaattatctcagtacatgcatcaaattggcatggaagtcatttataaattcattcactcattcatcctttcttcactaaacccctgctgagtgccagatactattgtgggtacttgggtacaagcatsgaagagacaatgagatcagtagaaataatcaat

SEQ ID NO: 853687 - DNA, 571 bp, Homo sapiens
acgaagaatttttttctttgcctcttttctttagctctttcatatgcattgtgcttaataaatagcagatgctccccgctaattaattactgcttaacaaactatcatactcataagaattcagggkgagaaaaaggaaagaaagaggtcaaatgcactatggaccaatattcaaggtagtttcagaaagccttttcttagttctattattgtataccttaaatatttcatgttagggaatctctatatttatattcctatcctagaaagaattgtcatttttattttttagttctaacactatttcccacttgaaaacaaataatgcattggaaacaaggaggtcaatctggttccaggagcttcattcatcttatgacgctcttaggagacccctagggaataccttcaggcataatgataaaatcatgaggatccatagaatctattacaatattttcttcccatttgtgtgtggctgtggcaccaggctgttgcttacaaagatgattacaaatgggaaagttaagagtttgcttttatcaatgcttaaatttatactgctttggct

SEQ ID NO: 853688 - DNA, 633 bp, Homo sapiens
atggggtagctgagaatctaaaaggaggaatgcttattccatttccatttccatggaaaccaatcaccaactggtgaaaacaaggtagatcaaatttttgaataagaatgttgaaataatcactgttttaaaacttttctcttgcatcaggatgaagagcatagtctaatctccgaaaacacacagagatgtctgtgtggataaataattcactgctgctttattgttgcaactcttcttcataatcacgataattactgtattctagtgaggttttctgatcattcactgaaggacaaattgttataaatccaataaataacttacatttgaaaatgggaaaattccaaagccaacaaatccattcaaaatgtattatcatgttcctcttctacatcctcttagcaaatgtatgaggaaagaaacatggtgattttcagagaaggaatagactgtgatctgtttttgcgagaagatttggaggagtattcaattttttggaactctaccatgaaaatcagactttaaatagactatttaaatgaccaattattacaaagcagaaatartcttcatagctcttaaaaccattcagcctttccaagagaatttgaatagtccccttcacaaaaa

SEQ ID NO: 853689 - DNA, 560 bp, Homo sapiens
tctatggtattttgttgtgtcaggccaagctgacaatatagtcattgcgttaggaaaatctattataataatttctagaactcatagttaagcctactctaataaaataatagcagattaaaacaaaatccttctataattgaaaataacacttttaatttaatcttaagtattcttcttaaggttcttgtaagttttttacagcattttgttttaacacgtttttctcagtttatgaggcaaaacattgttcacattatacaaatacctctgtacaccctatttcctgtaataccagatgtcccctgatttttttctaccatcagggtgatatttgaaaatgaaatttactgaacctgttttactttgtatgaccaggctgtttcgtctttaattttctgtaagttaattggcataatgcctttcagcccatgtataagtttcgtgagtactgkacagtttgaaatgactaaaaaggtgagtggtttttacaaatggatctagaataatgccaaacttcttaaagtaatatttgttttttgtttgtttgtttgtttttg

SEQ ID NO: 853690 - DNA, 560 bp, Homo sapiens
tctatggtattttgttgtgtcaggccaagctgacaatatagtcattgcgttaggaaaatctattataataatttctagaactcatagttaagcctactctaataaaataatagcagattaaaacaaaatccttctataattgaaaataacacttttaatttaatcttaagtattcttcttaaggttcttgtaagttttttacagcattttgttttaacacgtttttctcagtttatgaggcaaaacattgttcacattatacaaatacctctgtacaccctatttcctgtaataccagatgtcccctgatttttttctaccatcagggtgatatttgaaaatgaaatttactgaacctgttttactttgtatgaccaggctgtttcgtctttaattttctgtaagttaattggcataatgcctttcagcccatgtataagtttcgtgagtactgtacagtttgaaatgactaaaaaggtgagtggtttttacaaatggatctagaataatgccaaacttcttaaagtaatatttgktttttgtttgtttgtttgtttttg

SEQ ID NO: 853691 - DNA, 537 bp, Homo sapiens
atgcacctgatttttctgttgatttcraattcggcaagtttaatgaatttattagttttaacagttttttgttggtgtctgtaaggtttttaataagactatgtcatctataaacagagaaaatcataattcttcctttctgatttgaatggcttttatttctttttcttgcttaattgctttgtttaggacttctagttctatgttgcatagaagtggtgagtaggggcatctttgtcttgttcttgaccttagaggaaaagccttcagctttttaccattgagtatgatgacagctgtgggcttgtcatatatggcctttattatgttggagtacattcctcttacactcaaattgttgagtgttttttttcctaatcatgaaagaatggttaattttgtcagatgctttttctgcatatattcagatgatcataagattttcatccttcattttgttaatgtggtatatcagatttattgatttccatatgttgaaccatccttgaattccaggtgtaaatccctccatccttc

SEQ ID NO: 853692 - DNA, 496 bp, Homo sapiens
catgcaaaaaatctagaacatttactacctggccctttatagaaaaayactgctgagccccagtctatttatataaagcccaatgttaccctgaatgtgaactccctcatttcatacaataactctcaaattatgaatctttgtcaacacacacagacatatacgcatccacttgagatgtttccatggaaacatggatttattctcacaatgccatgcccttctgtaagcatagtctttgctgtgtttgcatccctccccaacctgatagattggaagaaaatggtgccctctgatgtcagcctcccttaaaggggccccaaggtagcatgtcttgggcctcaagtatttcaggccataagtggaatggagtaatccctacaaccctgtactcagaagcctattaccttactttgacttggctttatctggtcagtctcattttgtttggctctttctctcttagaataatagtttaagtttcctttaagtacag

SEQ ID NO: 853693 - DNA, 515 bp, Homo sapiens
atatattaatcagtttgggaacaataaaagaaaaaataatgtagtaaactgtccataggcaatcagagcagaagatgttggaagatataagtactagagaaattttaaggaaaggaatgtggaacataattgttgggaagcataattttttaaagctctgtgactttttgttctgcaaaatatagtaaatatctgctatcaaatatatatatatatagatatatatttttttaagatggaatctcgctgtctcgcccaggctggagtgcagtggcgtgatctcggctcgctgcaagctccgcctcctgggttcatgccattctcccacctcagcctcccaagtagctgggactacaggtgtcccccaccaggcctggctaatttgttttttttgtatttttagtagagacggggtttcaccgtgttagccaggatggtctcgatctcctgacctcgtgatccacacgccttggcctcccamagtgctgggattgcaggggtgagccaccgtgccc

SEQ ID NO: 853694 - DNA, 630 bp, Homo sapiens
acaggaatgtttagtgtaattggatttcgctatcagttcccatccttaagttttgatattcaatatctgatagatacactgcatctttggtcatctaagatttgtttacaaatgtrcaaattatttagagcatagactttataagcattaaaaaaaactaatggaggtaaaacctaaatgcgatgtgaaataattttagtgttgatactgtatgtgtatttttattctaataaacttttgtgttccagattgaatttggcattggtctagtcattttagtataagtaaattataggaatgtggctcttggtacagaattctaattctctaaaataatcaacatattcatcacaaaagtaaacctaatacattcagaaatgtttagcaaagtcagatttttgtttgttaattaattcactcattcaaaaatatctgaatatcttctgagtataaggagtaatcctaggccccggaagggaagagtctctgttcttaagttgctgcatgtttttttcttgaaaaatctgcatagaatgtgtactttgaaatgaatcacaggtttcaactgtacccttactaacgccttgaactcctttgcatcctggtgttccttttacatccattacagaa

SEQ ID NO: 853695 - DNA, 466 bp, Homo sapiens
ccccaggggtgtgtgcacagcgtgtaattatggtcccatatatgagccgttgtttttcctccttaagtttgagggcttcagccctctcagtttgagacccctttccttggtcattgcacaccttcttcccctgatagaagaggcccagactgtctgtccctgtctcagggtcacctcagtgagggacgcgacctccaggtcccctctgagcctctgaacagcccagctttgctcctggcgttccgacacataggagggttagaggaatccaaggaggagctttctccaagaattggtggtcagcattgggctacctggagagagtgactgccaagccccatggctgcactgtctgggttggatggggtggtcctgcactgggtgactcatgaccctgaaggtcccccatccacctccatgtcctgggatccmccagtccagacagccttagaggcaggccttcctg

SEQ ID NO: 853696 - DNA, 528 bp, Homo sapiens
attactcactggaactggaattccaaatgggactggagcatattgagtataaaggtgaagaggtatgggaacaaacactggtacgggaactggcaccacaataatctggggctgacttggagtgtcttctaacagtaacaacaacaaaatcacaaaaagcaaagagggttagaaatgctttcataagatttcaaaataaaaaagcttatggaggtttatagttcaaaataagagtaacctatgacactacaggacttcttacaaaggagaaataactaaagtagccaaaaaaataaatcttgagtatagcactgacaaaaagtgggtaacaaatatcagtgatgtgaggagaaaatgaatgcaggatataatttagatggataaattgaaaggattgaaacagggaacctagaagacaggcatggaaaaccrcttgctaaagaggaggctgaatagggaggggccatttccatcatgctataatgcacatttcaaaatcatttgtagctactgaagatttttttaaca

SEQ ID NO: 853697 - DNA, 518 bp, Homo sapiens
caaaatcatttgtagctactgaagatttttttaacacaaagtagtgatgaaaatgacatcaaaaaagattaatttggcaacaatttcagcactgaataaaaaatatatcaactgttaaaataggaggcaattataatatgtagagctaagatgatgggagactactctaggttatgatacctacaaaaaagaataaatatatatagcagatgttctaagtattaaaaggatgaaacagaacttggaaaaaaacttggagaaagtagcaagatggatgatttattccattatttaaccagacggtccccaacttaacgatggttcaatacaggattttccaactttatgatggtgcaaaaacaagtatataccatacttctgtatagcactgaatgaattacatggtattcaaaactttattataaaataaactttgtgttagatgactttgcccaactgtrggctaatgtaaatgttctgggcatgtttaaaatagcctaggcccagttatgatgatg

SEQ ID NO: 853698 - DNA, 503 bp, Homo sapiens
ttaaagagtgaaaggcatgagatcttctaatccttccytgtcacttagtcgcctccactcctccacagaaggcgggacatggagccattaggaactgttgtggtggttttaggaaggtgagggctaaaggctttgatgtgagaagtcaggatttccttgaagccatattggctattttctagaagggaggcatgcagagaaatcatgtggcttcactgacagggaaggactgagctctggcaagacacagatgtttgataatcttcctcaacatgtgggctttctatgcttctgcatttataccctcttatctgagagccaagggacaaaagccacccagggttccctgatacagtaatcaggccctcaaacctgtgctctttggctttggatattttgaattcagatatctgagataaatctccctttttcaggggctgcttttagctggcaaaacaaattcatgaagatggtttaatagcttaaccttttacctgtccaag

SEQ ID NO: 853699 - DNA, 656 bp, Homo sapiens
ggaccttacatttcacagatgctctcctttaatcctgcctttgcaaaaacggttctccgggccatttcttatccaccctcctcctttatttagggaaggaatgastcagatggagcagaagggtgcagcaaactggatgctttaaactatgtgtgttttcccctggcaaagtggtcatggagccagccctggctgatcccagagggagcatggttctgggggaggaaagcactttgatgccccatattctgccataataaacacttcacatcacccttttatgttggctatgatgaaaaacagtatacccttgtagaaacaaagggaaatgttgccactttgagggtcatccaaaatgctgtttggaaagtaaacttcacaagcacattctcagatgaggtttatttacagctctggagctatcaataacaaagacaattaaattagctaggtcaaaagcccatttgaactgaagaactctactatcaaattaaagtttgtggagagcgtcccacaccagccattctcacatgaaattgatggagaggcttttggggtttgttaaaattcaaaaaggatgaatagctttcatgttgcataatattactgagaaagagtgcaaagagtttagaatacttctcccatgtaaacgagga

SEQ ID NO: 853700 - DNA, 612 bp, Homo sapiens
ataattcttttctatgttttcatctagaagtttacaacttcatttcctacatttaagtctttgatcaattttgagtttattttttgcatatgttttgaaataagggtcccattgtgttcttctgtgtagattccacatctttgctattgtgaatagtgctatgatgaacacagtgtgcatgcgtctttttggtggaattgtttattttcttttgggcatatacccaaagatatatggtatatatatttgggattgctaggtcaaatgatcattctcttttaagttcttttggaaatctccaaactgcttcccacagtggctgaactaatttcattcccaccagcagtatacgtgttcccttttctatgcaacctctggcatctcttgttttttgtctttttaataacagccattctgactggtatgagatggtatctcattgtggttttgatttgcgtttctctaataagtgatgatgaacattgtttcagatgcttgtgggccrcatgtatgctttcttttaagaagtctctgttcatgtcctttgccagtttttaatggggttatttgctttttgcttcctgatttaagttccttatagattccagatat

SEQ ID NO: 853701 - DNA, 646 bp, Homo sapiens
caaaaactcatacggatgttcatagcaacattattcatgatagctaaaaaatgcaaacaacccaaatgtccctcaattgtcgaataaatgaataaaatgtgggccaggtgtggtggctcacacctgtaatcccagcactttgggaggctgaggcgggtggatcaagaagtcagaagttcaaggaccagcctgaccaacatggtgaaaccctgtctctactgaaaatacaaaaattagccaggcgtggtggtgtgcacctgtaattccagctacccaggaagctgaggcaggagaattgcctgaacccgggaggcagaggttgcagtgagctgagatcatgccactgcactacagcatgggtgacagagcgagactctgtctaaaaaaataaaagaataaaatgtggtatattcatacaatgaaacattattcatccgtaagaaggaattaagtaccgatacatgctacaatacagatggcccttgaaaacattatgctcagagaaagaagccagatmcagctagactacgtattgtgtgattctacctacagtactacccccttaccttcaggggataaatttcaatacccctagcagatgcctgaaaccacaatagtatctaatcctattatactatgttttttc

SEQ ID NO: 853702 - DNA, 563 bp, Homo sapiens
actgtgaatacacagccctgagcctctggtctaacccttgacaygaagcgtgtggccttcctgtgaacgcccctgtggtgaaaagtgtgttatctcggcatgacctgtatttcccacatccagagccgaaggaatgggcattaaagttccagctctcatgtcctctctctccatggtccattccagagtccacaccaaggaatgtagggaacagaggctaggttagtgtaactcggcctccaggggctgacgtgccctgggtcagcaaccgaccctcacaacgatgctctggacagtgctgaggttctgcaggtgctccggcttgattttcagagtgctgtgtcagggggagacagcagaaaacacactgttttccttaaaatctcaaaggaccggtggccccagacactctgaggccaccaggaggcttcatgcacgtctccaggagtgtgacatgttttcacgccacatctccgtgctccagcggattcatgaagttgggagcccactgccgccgcctctggggctgcctggggagatggggctgaagaaagtgacctgcg

SEQ ID NO: 853703 - DNA, 541 bp, Homo sapiens
attccctttaagaactagaataagacaaggataccctttctcaccactcctatttaacctagtaccggaagtgctagccagatcaattgggcaagacaaagacataaaaggcatccaaataggaaaagaagtcaatctctctttgtggacaacatgattctatacctaagaaacactaaagactccaccaagtcttctgcaactgataaacgaccagtaaaatttaagatacaaaatcaacgtacaaaagtcagtagcatttctatacaccagtgacattcaactgaaagccaaatcaagaacacaatctcatttacaatagccacgcacacacacacacacacacaaaactaaaatctaggtgtgcatctaaccaaggaggtaaaattctctacaagggaaactacaaaacactgcagaaataaattgtagatgacacaaacaaatggaaaaacataccatgctcayggatgggaagaactaatatgaaaaaggccatactacccaaagcaatgtacacattcaatagtattcccatcaa

SEQ ID NO: 853704 - DNA, 617 bp, Homo sapiens
tgtaaagcttctgagtacattaaggactctataagcccgtgcacttgccygggaatggatggatactcaaagaagacctgagaagaccttgatctttcacctatggctgacatttaagctctgcacaagcatatagtgtaggctaggtcagaaatgtaatacagagtcaatctactatttttatttttgtctcctagcatgcaaggaaatctcggtcttattattagtggaccactaagctaacagaacaaagactttagtgaacacacataacaaagaatagagtctttaaaaatgtttctaaaagtcaccaaacaaaagaacaaacaaacctacaacccacaataagcagtaacaacaagccctggagagagataatctgattccctgagttactgcattataatgttttagacgttcaattttcatcaaaaatatgtaatgcctgcaaagaaattaaaactatgactcaagcacaggaagaaaaagaacaggtactgtccctgaggaagtctgaatgtgcttcttactagacaaaagacattaaatcttactagacaaaagaccaggtgcctcacctggggatcctgaggcctttatgtccccactactattaa

SEQ ID NO: 853705 - DNA, 667 bp, Homo sapiens
tagaaccagactacctggactcaaatacttgctgtactgcttgatagctttgttgtcttaggaaatttaattaacctctctgtttcttggtttccacatctctaaaatgacaataaaaatagyacctccttcataggattgttgtgagaattaaatgagataatccctatgctaccatgtattattatgtttttatgtacatgtactgttttcgtaactagattgtagcacataccattgagagaaggaactgtgccctatttatctttggagtcaatgtccatggacatatgctgttgagtatgaggaaacttaaagtaatatttttctttaatacatagattttcaaaggctaccaaaggtggttttagttgacattttctatttagactaaaagtaggtccgtgaaatgggtcatctgccactctagctttataaagcaaaaccagacagttctcatataataatgggtgtcttaactacacttataatccaatgtgcagcataaagtttttgcctttattttgaagaaatcccaaaagatgaaagtgatttttgcaaagtaaaggatttctgctgtagctatggtattgtatgggacttttaggcttgctttctaaagagtctttttctggagagcatgtaattggccacatttggatccatc

SEQ ID NO: 853706 - DNA, 576 bp, Homo sapiens
aatatgtggaaagcccaaatgcacctctgatattaacttttttaaaatcagaacatagacttaagataaaaggaaactataagcaatagcagtattagtttgttgaactcctttcctgacattttctttcactgttttttaaaaggagggtggcagtaatcattaatatggactttaaaaataccctttgatggttttctcttgccatgtctcataaattccaaccttctttgataagaaaagtgtctgacattacagaccaggcaaaactctctgaacattaattgaaagcatccaattgaattgtcatatctttgcaaagaagtaatcataagcactagtgtgtagtttgaaactttcgatacaggaatacaagaaacatgtttatgtatgcgtaggaagttctaatgacaggtactactctgtgtgtgtgtgtgtgtgtgtatcaatatatagatatatggtcctttgcctttggttatcatttgcccatgttaattggtaatgcttataggttacaaagacagcaaagccacacatattatttmcattaatagaagtgagacatcatcctca

SEQ ID NO: 853707 - DNA, 259 bp, Homo sapiens
tcccaaggaaagatgttttaaaatacaatattcaaaatgatttatactattgagggcctcttatgtatttgcagtttgacagatattttcagctccttgtcatttcttaccgcgcagagttagaggcaaaattgcacatttactaattctccttcagagaacaatttaaaagctagccctatgcaattctgagctagaataatgttatttgyatggttagcgttaagtcagcacttaactgacaaatcagtccattaag

SEQ ID NO: 853708 - DNA, 621 bp, Homo sapiens
attaagctttaataaaatagccttttttacattgttccatccagccygtcgcaaagaaggagtaattgatttcctacttgcagatggtgacttggagtatttgcttcctgaggggttattaaatagatagaaagggggtatgtaattttgggaaagaagaacattaaaacctggcttcagatatagaatacctcacataactaaaaatattttgacaattttaatatgttgatacattcttaaagctacacactaccctctcagactcctagaaaggttcagcttccaagaatatggtttacaaaagtatttaaatagaataggaaatatattacagccccctacctcacatatctcattttcttcatgatgtctactgtgatgttggcaaatacttggcttccaaaataatacccaatcccaccatcaccctttagatgagaggctcccagctgagaaggaagcagagcaactttgcttccctcccacaccaggtgacatctggcaatgtctggagatattttcagttgtcctgactggcagggggtgagtgtgctgctagcatccagtaggtagaagccaaggatgttgctaaactctctacaatgcacaggagagctg

SEQ ID NO: 853709 - DNA, 624 bp, Homo sapiens
aatacaaaaactcagccctacattatgccaaaagtagtgtagttttcaaatatgtggtcagaataaggctcacagcccatggtcatgaacaataataagggctcatgctccctgaatgtggaccttgaggtaggcaccaggcaggaactgagctcgtcacagtgtgggcagtaacaggcccatgagaaatgtactgaggctggcagagattaagtcacttgccacaaggctagaaagtgtagacgtggggtttaggcccagacaggctgatgcagaagcctaatctcttacccactggggcctttctacggaggagctgaaataattacattgtcacgtctgtaacagcaagaaaaggccctaacccaccactgcagcatttgcctgaaaagttgacccacatgcagtgatggtagtaataacagtagtagcagctaccatttattgtgtcttctttatgctagacattcattcattcaataatgatagcttacactcacatggtatgtcctctaagcttggcactactttcagtgctgtccctatacaaagtcatttaatccttayggcaaccctatgaggtaggtactatgattttatggaaaactgaggcacagagaggtg

SEQ ID NO: 853710 - DNA, 599 bp, Homo sapiens
aacatccctcagagtgagcatttcaagagagaaaacactatggctttgtgtgtgtgtgtgtgtgtgtgtgtgtttgtaaatctagcctcaaaagtgatactccatttctgcaatgtgagtttcctctttttttttttttttttttttttgagatggagttttgctcttgttgcccagactggagtgcaatggcacgatctcggctcaccacaacctccgctccctgggttcaagcgattctcctgcctcagcctccgaagtagccaggattataggcatgcaccaccacgcctggctcattttgtacttttagtacagatggggtttctccatgttggtcaggctggtcccaaatcctaacctcaggtgatccgcctgcctcggcctcccaaagtgctgggattacaggcatgagccaccgtgcccggccaagtttcctcttaaaggaggcggactcattgttgggaatgatttcacctctgagcatattcattgtaatttgggggagaagtagctgtggctaaaataaaatactgacrtggaaagttgcggatcctcttttccagggtgtcggtctttctatgaggcaattcaattga

SEQ ID NO: 853711 - DNA, 501 bp, Homo sapiens
gaaatgacttgcccaagaccactcagtgaataaataacagaattaagatgagactcaggaatcctaacttttgatcttttttcttggtcagttaagaatataatgagagtagaccyagcatgggggctcacacctgtaatcccagcactttgggaggctgaggcaggtggatcatgaggtcaagagattgagaacatcctggccaacatggtgaaaccctgtctttactgaaaatacaaaaattagctgggtgtggtggcacgctcctgtaatcccagctacttgggaggctgaggcaggagaattacttgaacccaggaggcggaggttgcagtgagccgagatcgtgccactgcactccagcctgggcgacaaagcgagagtctgtcttaaaaaaaaaaaatgagagtaaactgtacatatgacaccacagagaacattactaagagcgtatctcaggctcctttcctgggagtgactttttctacatcaagacaagtg

SEQ ID NO: 853712 - DNA, 624 bp, Homo sapiens
tgcatgcatgcatgtatgtatgtatgtgtgtgtgtggagagaaaggtttcccagccctcctcttgaaagctgcgaggatccttgcatgttctccatcataaacttacagtagctgtaggggtgtctcctcctattaagcctttgtttctagatctgactcccccatccctgacccatactagaagcttcattagaaatgcccaaaaaggaaggatgagatctgcttcttgacaaaatagcataaatggcattagcccaagccttggcttttccccatctctgcaccatagcccaaatgtatgcaatgagcttgtctaatgcttgtgcttccgcatgttcccccctttatccccccccgcaccgcccccctctcccttttggaaagacaaagccaaccctcagaagccagggcccaaatgtgctgatcggtatcctagcatctctgccctgcccctcccccagctccctgagccatacctctgtcaggagccttgagctggacccctgatgcgtctgtcccttttgcactccgaccaagctctaccgcgacagttccagctgagacactgttccacgggaycacacaggggaactgggccgatttcctaagatctgatttctgct

SEQ ID NO: 853713 - DNA, 491 bp, Homo sapiens
tttttcttagcttagctaaaagtttgttaattttgtttatttttcaaaaaacaactttttatttgttratattttgtagttttttagtctcaatttcatttatttctgttcccttctttactttttccctccttctaataatttgggttgaatttgtctttgtttttctagttccttggggtaattagagattatttgtttgagatttttcttcccttttttgatgtaagcatttattactataaatatcccatttagaactgtttctgctatatccctaggttttggtatgttacattttaatttgcatttttcttaagaaatttttaaatttgtcttttaatttcttcattgactcattggttatttaggaacatgttgtttcttttccatgtatttgtaatgtttctgaagttttatctgttattgatttctggttttatattatgtggtcaaaaaaggtacctgatatggtttcagtgttcttaaat

SEQ ID NO: 853714 - DNA, 543 bp, Homo sapiens; identical to SEQ ID NO: 825921

SEQ ID NO: 853715 - DNA, 543 bp, Homo sapiens; identical to SEQ ID NO: 825922

SEQ ID NO: 853716 - DNA, 602 bp, Homo sapiens
aagtctgacacttaagcatgggtttctcctctcaaaacagccctcctagtttttgggctccactagagtttcacaacctcctgccttaatcctaargcttgcccaaaggcacttttttggtccacaaatggctgcaaaattattgttgctatgattaccaaaaacatgaactataggctaattctttagacattctaaacagagaacctgattatatgtgtactgttattacaggcatgttactaaatctttcttggctatttacccattgcctttccaccactctcttattaagactttagagttcgattccaactcaagcctaccttctccccatctatgagaaatatgttacagagttatatacagcaccattcaggatgatttttataatgtattcctctcaattcaaaagaacatccactatttatattacttttaaaatcacaattggatgaaattttactttagaacattacaaaagtggtataaagtttcataaattaaaattttcccagttttttctctctgcttgtgacaattatgttttacaatttcaaatttaaccacttttttttcaaaatgccattcaacgatggtga

SEQ ID NO: 853717 - DNA, 588 bp, Homo sapiens
gacagcgtgtcctaggggaagaaatgtgaagcctcctataccggctccaccactgagacatggtctccagccagtttcagtagaaagatgcctggctagtatgaggttggtgcaaaaggaatcacagtttttacactgttggaatttgtcatttgatattcgagtacattcttaaataaatgtggttatgttatacattattttaatgggcatttctcactttacatttttttgctaatgacttattccttgctgtttatgtttactttagactgtgaaaatgatgttagacaaaaagcaaattcgagcaattttcttattcaaggtcaaaatggattgtaaagcactggagacaactcgcaacatcaacaacgcatttggccaaggagctgctaatgaaacgtacagtgcagtggtggttcaagaagttttacaaaggagacgagagccttgaagatgargagtgcaatgaccggccatcagaagttgacaacgaccagttgggagatcaatcacagaagctgatcctcttacaaccataaaagaagttgctgaaaaactcaatgttgaccattctatgatcatttg

SEQ ID NO: 853718 - DNA, 469 bp, Homo sapiens
ccatctctgccacaatgtggtgttgtcacagcaagttggattattttgtacactgcctcttgttgagcattatgtcactaagactgattgctgggtagagatttttytaaggtagaagcctagtgaagaaggcgatttctttacttcacttccccgctttggagcctagattatatgaaagaagaaatgttttagactctttggaataatacttctctgtcctatgccttaatgtccttgtctataaaatggagttaagatttgcttctacctacagaaagtacggtgtgagggtaaatgagagagttgcagtgcaatatagcgggcttcagagtcagacgcatttgggttgcaatcccagctctgtcatttcctagctctgtgaccttgggcaaagaccctcactcacctttctgcgtctcattttccttatttatgatatcagtctaataattcccaccttgtaagg

SEQ ID NO: 853719 - DNA, 469 bp, Homo sapiens
ccatctctgccacaatgtggtgttgtcacagcaagttggattattttgtacactgcctcttgttgagcattatgtcactaagactgattgctgggtagagatttttctaaggtagaagcctagtgaagaaggcgatttctttacttcacttccccgctttggagcctagattatatgaaagaagaaatgttttagactctttggaataatacttctctgtcctatgccttaatgtccttgtctataaaatggagttaagatttgcttctacctacagaaagtacggtgtgagggtaaatgagagagttgcagtgcaatatagcgggcttcagagtcagacgcatttgggttgcaatcccagctctgtcatttcctagctctgtgaccttgggcaaagaccctcactcacctttytgcgtctcattttccttatttatgatatcagtctaataattcccaccttgtaagg

SEQ ID NO: 853720 - DNA, 621 bp, Homo sapiens
gttgaaaaagatgttttcaactatggattctgaaggcatctatctaataggtctaaagaaaagaaaaagtgggtctatagtggatctgcctttgagtaatggagcaggatgatgagccctgataccagggagaaagcatgaaggagaagaatgggacaagagattcattaaaggggcagactctctaacgggaatatatgagagtatagaatgcagtgccatttaccagagctccaaactaactatgagggctgtgctaggacatcccagagatattggaagggtgcttaagagaaggtgagactgaagtctcctccttgacaggatttttgctgagctacagaaaacttttaggtccatcacgcaagatagagaatgagataatagtggaagtggtcttgggaaatcttgacatgtatttccctagagtgtagggacattagaaactagcgcttgcctcttctctggagaattctaaagcagcctttaataacagggcaaggaagaagtgcaggaatacatggttatcttagaccagtgattttcaaccagcggtaatttttttacctctgggagwcatttcacaaagtctggaaacatttttacttgtcacaactgagg

SEQ ID NO: 853721 - DNA, 635 bp, Homo sapiens
gaaaacaaattttaaaaatggcaagcataagtccttacttatgaatgataacactgaatgtaaatggaccaaactctccaataggacataaagtggctgaayagattaaaaaaaaagactcaacaatctgctcccaataagaaacacacttcacctataaaggcacacatagactgaaactaaaagggtggaaaaagatattccatgcaaatggaaaccaaaaaagagcaagaatagctctatttatatcacacaaattagatttcatgacaaaaaccataaaaagacaaagaaagtcattacataatgataaaagggtcaattcagcaagaggataagaagggtcaattcagcaaggtgcatataaatataaatgcacccaaccctgaagggcccagatatataaagcaaatattattcaagctaaagagagagatagaccacaatccaatagttggagacttcaatactccactttcagcactggacagatcatccagacagaaaatcaacaaagaaacattggaattaatctgcacaatagaccaaatggacctaatagatatttacagaacatttcatccaatggttgcaggatgcacattctactcagcccatggatcattttcaaagaa

SEQ ID NO: 853722 - DNA, 665 bp, Homo sapiens; identical to SEQ ID NO: 850561

SEQ ID NO: 853723 - DNA, 375 bp, Homo sapiens
ctggtgttgtaccagtttccaagaggaatacttccatatttctttgcccagttagtatgatgttggctatggatttgtcctaaatggctgttactattttaaagtatgttctttcaatgcctagtttgttgaggatttttaacagaaaaggatgttgaattgtatcagaagaattttatgcacctattgagatgctcatgtggttttgtctttagttctgtttatgtgatgaatcacatttgttgatttgtatatgttgaaacaaccttgcatctcagagataaagcctacttgattgtggtggatgagcttttgatgtgctgctrgattcgctttgccagtattttgttgaggatttttgcatcaatgttcatc

SEQ ID NO: 853724 - DNA, 509 bp, Homo sapiens
ttgtcatcatgttaatttatggatgccttactctatttagtttccaagactgataatggtggaagaataataagagtcggggractaaagtttcctttcattttcagaaggaacattggccatagtaattttgcctctatttggtggtagtaaaagtttattgttattttaaaaggaatagtagctcttcccttctaccatttatgattgggaattcgaaacataccaaaaaaagatattaaatatcaacttaatataattaaaatttgcttagccttaaagcctcatcctatacttgtggatttgttacatttagtggaggcattatacaaatagcaaaatatcatttaaaggtgagtaaatcaaagaaatattgccttctggggtatagtggtcacataaaggagatacacctctggattggctagattgcacatcacaggcaggctccatctgacccctttactgtgtaagaactggctagacccaggaggggcagtctcctcagc

SEQ ID NO: 853725 - DNA, 583 bp, Homo sapiens
aaaatgagatttataaactaaaatgcaaattattaggctttctgtaattgacaaaaggctttagggctcstgggtaagtttcagtggttctatgttgcagtaaatgttttaattcaaatgttgatatttccaccttgctcatttacaatgatttcaaaatgtcaaaaatacaaaggtcaatccttagttgacccctaatattattaagattgttttcaagtggtaaacctaaggtatagcatcctacttctatacagctacaactatacaggtccatgaacaccaaacaccatttaaaagtacacatacagatgtacatctacacgcacacacacatgcacacacacaaatttatagagaggcagcaaagtctgctgtcagtaattatggatttcaaaaaaatagcaaaccatttcaaagttgacttatgctgatttttagtttttatttgttatttatcaatgtggcaagggtattcaaggaaaatatatatttccaaagaaaattcagtacattaaggaaaacagtagtattatttataaaccaaacaaaaatcaaccagataaatgaagctttgttgaaa

SEQ ID NO: 853726 - DNA, 602 bp, Homo sapiens
tacaccatatggtaattactatactatagagaacagtttggaggtttctcaaaaaacttaagatagagctaccataagatccagcaatccttctgcagggtatatacccaaaataagggaaataagtatattaaagagatatctgtattctcatgtttcttgcagtgctgtacacagtacccaagatatggaagcaacctaagtgaccatcaacagatgaatggataaagaaaatgtggggccaggcgcaatggctcacgcctgtaatcccagcactttggcaggcccaggcgggaggatcacgaggtcaggagatcgaggccatcctgactaacgtggtgaaaccccgtctctactaaaattataaaaaaattagccggccgtggtggcgggcccctgtagtcccagctactctactcgggaggctgaggcagaagaatggcgtgaacccggggggcggagcttgcagtgagccgagatagtgcaactgcactccagcctgggcgacagagygagactctgtctcaaaaaaaaaaagtggtacctatacacaatggagtactattccaccataaaaattaatgaaatcctgtcatttggaa

SEQ ID NO: 853727 - DNA, 608 bp, Homo sapiens
tgccgggtgtgggccagtggaggcccctgctccctcacctgcgctcccaggcaggcgtcgcattgcaaggcggcagacctgtggtcaccgttcctctccaagcacgccctcctgcctctgtgctcaccatcctcctgggcttctccaaggccggctcgagcacccttcccatgacggcctcctgccccgttggctctgtccccggggagcctggcaccagccagtgtggagtaggtggtccctgagctttacttatgagagttcttcttccctcagggaggctgcagctcctctctgggttcgggactcctgcgttccacaaagggtattacagagtcaggcagacaaagcgccacatgccggggctgggggaggaaagagcctggcctggatactgggcacctcccttttctgtgccagtcagcagggcgttcactgactcctagtgaacaggaaaagaatgcactttacttcccgttttctccgcagataagtccttgatcccctggcttgggaaataattggcggccrctattaagcggagacatgatttgggggagaggctttgaggagccactttcatgactcctcccatgcatgtgggagtc

SEQ ID NO: 853728 - DNA, 630 bp, Homo sapiens
cttgatttctctttgaagtctctgtacaagtaaggttaaattctgaggtcctggggattakcacccctatgtatcttttttgaggggacacagttcaacccgaaacactccctcatttttcttttgagcagatgtgtgtcttcccctgcaccaaatgtgggaacctgtctgcagcctgcaccccagcacccctggcctctggataccctggggggtttgtgggtgaacattttctctactggagctctgggagaacagaaacatctcaatgtgggagtctccccgcttccagtgctggccgcatttcaggctccgcaaatctggggatgtggtagccccaaggccgcagctgtgtctgcatggaggaggtttggtcaaattcagagggctctgccttcgtggggccaggtgtcctgtgtcctgcagcagaggcttctgacatgtcccaggccctgtgcatgttgtgtggattgtcctgcgtggtcctcacacgtccgaagcagatgcccgttcctatcccagtgtatagacaatgaagttggggctcagggaggccaattgcagggggagctgatgggcctggccttaaattgggtcttcctgggtccaagtctgtgatctccatggtcc

SEQ ID NO: 853729 - DNA, 630 bp, Homo sapiens
cttgatttctctttgaagtctctgtacaagtaaggttaaattctgaggtcctggggattatcacccctatgtatcttttttgaggggacacagttcaacccgaaacactccctcatttttcttttgagcagatgtgtgtcttcccctgcaccaaatgtgggaacctgtctgcagcctgcaccccagcacccctggcctctggataccctggggggtttgtgggtgaacattttctctactggagctctgggagaacagaaacatctcaatgtgggagtctccccgcttccagtgctggccgcatttcaggctccgcaaatctggggatgtggtagccccaaggccgcagctgtgtctgcatggaggaggtttggtcaaattcagagggctctgccttcgtggggccaggtgtcctgtgtcctgcagcagaggcttctgacatgtcccaggccctgtgcatgttgtgtggattgtcctgcgtggtcctcacacgtccgamgcagatgcccgttcctatcccagtgtatagacaatgaagttggggctcagggaggccaattgcagggggagctgatgggcctggccttaaattgggtcttcctgggtccaagtctgtgatctccatggtcc

SEQ ID NO: 853730 - DNA, 630 bp, Homo sapiens
cttgatttctctttgaagtctctgtacaagtaaggttaaattctgaggtcctggggattatcacccctatgtatcttttttgaggggacacagttcaacccgaaacactccctcatttttcttttgagcagatgtgtgtcttcccctgcaccaaatgtgggaacctgtctgcagcctgcaccccagcacccctggcctctggataccctggggggtttgtgggtgaacattttctctactggagctctgggagaacagaaacatctcaatgtgggagtctccccgcttccagtgctggccgcatttcaggctccgcaaatctggggatgtggtagccccaaggccgcagctgtgtctgcatggaggaggtttggtcaaattcagagggctctgccttcgtggggccaggtgtcctgtgtcctgcagcagaggcttctgacatgtcccaggccctgtgcatgttgtgtggattgtcctgcgtggtcctcacacgtccgaagcagatgcccgttcctatcccagtgtatagacaatgaagttgggkctcagggaggccaattgcagggggagctgatgggcctggccttaaattgggtcttcctgggtccaagtctgtgatctccatggtcc

SEQ ID NO: 853731 - DNA, 597 bp, Homo sapiens
atatgaatgctagtcatagcattatttataaccagaaaaacttgaaaacaactaaaatgtgcaacaatagagaattatgttaagtactatatttatatgataatatgttcctttcaaattaaatgtttttgaagaatgtttaattacatggataatgctcacaaaattttaagtaaaaatgatcaaattattaagtaaaaataaaactaaatacaaactatgaccaaaaatttccaaatacagtatatatgaaggtgaatggatacatagaaaaaaattaaaatattaattaaactataattatttctgtgtagtaacattaggaatattttctctttgctatattattctgtagttcctaattattttaaatctttatcatgtattcattgatgtccaggaaagccatctaataacaaataacattaacaataaaaatgtatacaataaggattttgtaacaataatcattctttacmggatcaaatgaataatctatacgtacataatgaaatttaggaggaaacatagaacttacaaatttttactgctaatttttatagctgtaacccttaagttaagcaagtttacagttaa

SEQ ID NO: 853732 - DNA, 597 bp, Homo sapiens
atatgaatgctagtcatagcattatttataaccagaaaaacttgaaaacaactaaaatgtgcaacaatagagaattatgttaagtactatatttatatgataatatgttcctttcaaattaaatgtttttgaagaatgtttaattacatggataatgctcacaaaattttaagtaaaaatgatcaaattattaagtaaaaataaaactaaatacaaactatgaccaaaaatttccaaatacagtatatatgaaggtgaatggatacatagaaaaaaattaaaatattaattaaactataattatttctgtgtagtaacattaggaatattttctctttgctatattattctgtagttcctaattattttaaatctttatcatgtattcattgatgtccaggaaagccatctaataacaaataacattaacaataaaaatgtatacaataaggattttgtaacaataatcattctttacaggatcaaatgaataatctataygtacataatgaaatttaggaggaaacatagaacttacaaatttttactgctaatttttatagctgtaacccttaagttaagcaagtttacagttaa

SEQ ID NO: 853733 - DNA, 637 bp, Homo sapiens
taaccaccattctactttctgtttatatgaatttgattattctaggtaccttacataggtagaatcatacagtatttgtacttttgtgactggcttaattctcatagtattcaaggtttatagcatgcatcagattctccttccgtttaaaggctgaataatattccattgtatgtatatgtatatgctacattttatttatccattcatctgtcaatggacacttggatttcttttacattttggctattgtgaatccaagtccctgttttcatttttaggggtatatacccaaaaatggaattgctggaacttatggtaattctatgtttaattctttgaaaaatgatcatagtgactgcaccattttatattcccaccattggaccaagggtcccagtttctacaaatccttgtcaacacttatttcctgtttttttgttttgttttgttttgtttttttaaataaaagctatcctaatgggagtgaagtggtatttcattgtggttttgatttgcttagtgattttgaacatttttttatggtgaaaaattggccattcrtatatcttctttggaaaaatgtctattcaactcctttgcccattttttaattgggttggtttttttcctgttg

SEQ ID NO: 853734 - DNA, 355 bp, Homo sapiens
tattgcctgtctcctaggacggcatctgtgtacagcagggttcacgtcctggtgctgtcctctgggtcctaccagctttgatctgcataaactcttgatctttgtaaggtgatctctagtccttccgcacctgctgcagatctccttggtcccacctagtcttccagaggggacagtgcgcctattgctgatatcattttttctctgtcaggtgtgggaccacaaagcctgcacactctgcagcattctcttgccggcctcaggcctcttccaatccaccaatmccctctacattccttcgaccctcactagacttgcggaaacacctgcctctctcctcattcaggcaggccag

SEQ ID NO: 853735 - DNA, 514 bp, Homo sapiens
tacagaatgcttcccttcccccacaccttaccaccatgcctctaaaggcctattttaactgttctttttttcttttcttttcttttcttttcttttcttttcttttcttttctttctttattctcttctcttctcttttctttctttttggacagagtcttgctctggagtgcaatagtgcagtggcgtgatctttgttcactgaaacctctgcctccagggttcaagcaattctgtctcagcctcccgagtagctgggaatacaggcacaggctgccatgcctggctaattttttgtattttagtagagatggggtttcaccatgttgcccaggctgctctcgaactcctgagctcagacaatccacccacctcggcctcccaaagtgctgggattacaggtgtgarccactgtgcctggcctcaacagttccttttacctggcacatcatgtccagctatcaagaaaaaattacaaagcacactaaaaggttacaaaaaaaaaagaaagaga

SEQ ID NO: 853736 - DNA, 510 bp, Homo sapiens
aactttgctctatctcagagcgggtacagggagctaggagaggccagcgagtagaagcaggcacttttgagcctgtggaactggggggtgcttcctgggcacccaagagcacaggaatgtctgggtctggagccacagctgggcacctgcagcctgggagcacggggcttctgtcccactgacccagtagggggaggggctcctgcctattccctcccctctggctttgcagagcacccagccccagccatgcctttgctgatgcagctggcatttacacagcagctgctctggacgggctggtgctactgtcactgggataactggctagccatttgcagaagattgaaactggacccattccttacatcatacacaaaaatcaactcaagatggatwaaagacttacatgtaaaacccaaaactataaaatccctgaaagataacctaagaaatatcattcttgacataggacctggcaaagattttgaagcaggatatttccctgac

SEQ ID NO: 853737 - DNA, 583 bp, Homo sapiens
atcttctctgttaaagctttcttgtgcatcaagaccaaaccttttctttctctcaaatcccagtaattaagatcagtatttttatcttctattacacctgttcacctatagtgtgccccagctatcttgagctaatcaaccaaacaaactttatctttgctcaggctgtccttgtgacctgaaatgagttccttctttccctattgggaatgttacatgtctttccacacacagctcaaagatttcttcattttaagccctgtttcattcttagcttaagattcccagctcttcccttacagcttgtccactataataattgtttttttaatttcttatctagttgctatttgtttacatgatttttccccacaaaggcttacaactattaagacccaatagagcagctcctgcgtcctcaattcataattcatcaaatcatagctttctctctgaaaagaagtttcactgattatctcatcgaatcctccatttaataagagaaataataagcctgcaggcaggtggctactygcatagtcacaacattccattcctgggtcagggcccaatcctgtgaatg

SEQ ID NO: 853738 - DNA, 574 bp, Homo sapiens
accatatttttaatagcctttcagatttatttacttagtgaaccaytgcatttttgacagtttttgtgattgatgaaaatggccaagggaataactgccttacaaaaatcaagagactcttcaatccccccttttaagaaaatctattttcttaactgatgaatatcagaatttgcttccacagcctcagatgggaacatgttcagaatcttaaaagcaactcggaagaaaacctttctggaaacctatttctgtcagaatgttgtaatttcctttagaaactccagctgttccacagcacgcagttaaattaagtgtaagcgctgttaaataggaggtaaccattagaatattttaaaaaatatgactagcatccaatgttttaatcaaataatttgctaatccctcgctgttgtgcagcctcccaatcagcagctctgttactccatcctcctggctgcctgagcccggtgctcctgctcctccccctcccctcctcctcctcctccctcctccctcctccctcaacagctcactaggcccttatttttctttggaatgttcctcggagccc

SEQ ID NO: 853739 - DNA, 606 bp, Homo sapiens
aatgggagatactaggagaaggctggaagacatcactggatttagggaaagggtagtagcatgcttacagtctgagaggaaagtttcagtagaaaaraataattgcacaaagaggtaagaaagggcacaactgaagaaagatgatgtaagagaagaaaggacaagttttaggtgtgctgtgataacagtatctaaagcaagaacatctttcacaaccacaatgtaaagttgtttagaaaaatcatgctttgtcaatttattcactgaggtcagaatttgtctcagttcaaaatacacctagaatacacaatcaaagggatgcttactttttctaatctagccattctctagcgcttattttatgctagtgtctctaattaatatccaaatgccttgatggatgtattggaattgttttaattcagttctttgtagtcattcagtccattttattcttataattatggggggcaggattaactagaaaatcctctccttctatcaggattaagccccagctaaatgaaaacacaaacaccacaggactaactaagaggcagctattttcagcaaatgtggtgacttttgtaatgcaagccaagctct

SEQ ID NO: 853740 - DNA, 639 bp, Homo sapiens
tgggagaaaatcttggtaaattatgcatccaacaaagaactaatatctggaatctataaggaactcaaatcagcaagaaaaaaacaaacaatcctattwaaaactgggctagggacatgaatagacaattctcaaaagaagacatacaaatggcaaaaaaaaatgaaaaaatgcttgacatcactaatgatcaggcaaatgcatatcaaaaccacaatgcgataccactttactcttgcaagaatggccttaatcaaaatctaaaaaaattatagctgttgctgtggatgtggtgaaaatagaacacttttacactgctggtgggaatgtaaactagtacaccactatgaaaaacagcatggagattccttaaagaactaaaagtagatccatcattttatccagcaatcccattcctgggtacctacccagagggaaagaagtcattatatgaaaaagactcttgcacacacgtttatagcagcacaatttgcaattacaaaaatatggaaccagcctaacttcccatcaatcaatgagtgaataaagaaagtgtggtatatatatcccatggaatactactcagccataaaaagaaacaaaataatggcactcacagcaacctagaaggagttgaag

SEQ ID NO: 853741 - DNA, 507 bp, Homo sapiens
aaaagtgtcttttaaaaaacatggcatcatttgctagaaagaaatttaagttgctgtaattcggtctataatgtcattatcaggcatttccagcaaagcrtgtcaattccttgattattttggttgtcattatctattgggaatgaatagaggccctgcacgtctattaaatgctggggacgccagcctggccctcaggaaggcacacaggtggggtgctgggctggcttccctaattccactctctgaaccttctaaaagccacacctgcagattcaatgctcttccagcctccggggcaggaagagctgccaaatacgcagaattttgccaggttatgtggtcattttattaggcgaataaaagtctacagattttagtgcaaaaccactgggcccaacccagttttgtacaaacattttcgaaggtaaaagtggaatacattatcagtcactaattctcaccattatagtgtttttggctaacaatcattttccttctgtctat

SEQ ID NO: 853742 - DNA, 629 bp, Homo sapiens
taatatgaagtgtgagtggtgcccgctctgcctcattcggccatggggtttattggggaaatggcgtctgctgcatgcctgtggctccagcttaataccaccagagacaagaatgctgggcgcagctgaaaggcagtaacccatctggagagctcctaaaaaggatccaagtttgcttaataatgtgctcagtagtctaatgttttgggcacaaatagcaaaaagctcttccaataacacgtgctttggatatcagattaatctggggcaggaaacacttgcaaagtggaatccacccaagagaaaaaggccaatatgccagcatcaaaggcttagtgttttgttttgctttacaaagtgagcacatagtgagcacacattgctgaaacaatcaatgtctcaactgtatgccaaattctgtaagttgataagtaccattttttttattaggggtgtaactaatagagcactgcttttataatctagtcctactttcagattcagagagatttaggcattctgaagttaagtcccagggcagggtctttactcaaagtgtggatgtgtggacaggctttctggctataagcagtagcattagctatytggggctcagaaacccgtgcatt

SEQ ID NO: 853743 - DNA, 555 bp, Homo sapiens
tttccaagcaggcaccctcagagataaattacctatggttatgtctccaaaccagtaattccattagtaaatgcatcaaaaatcaaaatgaacaacgtgaccacgcaggaagttttactaccaaaaacaagcacttgcaggtggtgtgtcgaggataaacagtagataaagaggcaggattcaatttccttttatactgaggtttgaggacagacagaccattattcactcatacctgccactgactaacagaagcacagggtttatgaactgcgagtcatttacctttaaaattcaatttcattccttcaatcgttgtgagcttgaatatctaattacaaggtttatacactgagatcctagtgtaataatctataaagcgtgtactagttggagttaattcattgaacaaatatttatcgagcacttatatatgtgtcagcccctgtgttagacatgaaggaacaaggcagacttgggytttctgtcatgtttgagacaaacctggagttccagactcttattttattgttcttgttgctactgcggttcaca

SEQ ID NO: 853744 - DNA, 559 bp, Homo sapiens
ggaggccctgaaactggtatggcgcagacacagagctgtgtctgaagatgtggctcccgggactggagggtctgcagctgccctgagcccacaggtgacggtgttcaaaagaggagcrgcatcagcagtggctctgtcccacggctgattaacgcaacggaatgtacagtcagcaagggggtgctgcctgtcaggctgtggacttactgtctgtcccagactggctttgttcaagtttaagggcattgtaatatttaatatggcctgtagcaatttcataccatttgtaaaaatcatgagactatttaatatagaaaaaatatgttcaagcttccacctagaaaaataactgtgtatagaacagaataaaaatgagttcagaagaatattagctgattaacacattctattgagttaagaaactagaacccagatatacgggcacaaccaggaaggaaagtgggaatcttaaaggaagaagaagcttcagattagagaagagatgacctttgactaagaagtccctagtagtcgtacttaaagcttatcaccaaactcg

SEQ ID NO: 853745 - DNA, 607 bp, Homo sapiens
acacccatcattttgatttagaataaaactgatttgcctgtcggctatcaagacagatgragtaaggtttgccaaaaaacagagaatttggccgtggctatttcttatatagacctttccagctgcaagattgatatcagagtgtaacatgcggctgcaaatgtaaagagagttaggtttgatcacagccctccctgtttccctcctgcaggcaaatgacaggcaggtttttaaggaaaaagctaaggctctgggtttgagagtcggacattaagttagggacaaaatgatttaacctcctccttgggatatgctgagatactattccaaatattaatttgctcagaattcaaattgaactctgcagctacctcatctgagaggaaaatagagctctgagaacaaaggcttttcccagcatctccttaggaaaaccccctggactgtctgtcaggagacccgggctcgaaaccatggctttattgttcatcttttatgcctcagtttcccaataggaatatatgactaatactagtgttttcttttgacaagactatggtaaagaaagaccaaagaaaactatacatttgagaaagttcatagcact

SEQ ID NO: 853746 - DNA, 582 bp, Homo sapiens
cccatatatgctgtctttcctcctgttacatgaatgaatkgattatggtcacatttgaactcaatcccatgatctgtgcagcaggtcccttcctcccttgcctacttaaggactatactctagcaatgcccgtgcttggtcctgcatcataaagttttcctctaatctggatcattcctaacagcacaggaatatgttataatgtcttttgcatttgaaaagatatttttctaggaggttgtgggcagattaaaaataaataaataaaaagatatttttctcttgatctcacatccctctccagctacaactccatttattcactttatttttacagcaacatccctccaaagagatttatattctcactagctccagttcttcttttctggtcttgatttaatgcatggcaattagtcttttaacccaggacttcactgaaatagctcctgacaaggtcaccaatgatgttgctgaaccaatacacatttctcagttctcatcctaccagcagcatttgacacaactgatcattttctccaacttgaaacacttcttcatgctcttcttggtctttcctct

SEQ ID NO: 853747 - DNA, 629 bp, Homo sapiens
cttggtgatctctggggattttggatatgtgtttaaatgtctttcattaatttagaaaaattcttrgcctttattatttcaatatttcttttgcttcatttttcttcttttatgattcatgttgtacatatattagatcatttaatattatctcacaaatcttgaatgctgtattatcttttcatctcagttttcagtttgtatttcagtattgtacctattgaaataatgttgtataattttatctttgttttttacttactgaaactcaagttcacttttcactcagttttctttatacatgttaccaaggtttttttagttattgcattgccattatattttttctcataatattcattctttactgaaactcctcttctgtttctgtatgctgtccacctttccattagtctttaatatactagtcatagttatttgaaaccccctatctgagagtttcaatatctgtcatatctgcatattgttttgctgactattttgtctgttaacaatgtattgtttttcttacattatttttcttgcttataatttttgtttgaaaatgaaatatcttatgtaggacaagagagactgagttaaatagtatttatttctggaaatacgca

SEQ ID NO: 853748 - DNA, 568 bp, Homo sapiens
ccagaattttggatagtatggactgtacaaamcacaaacaaaaaaactgagggtggaacagaattgtgttcaaaaagtcaggcagagttctgggtgggaaactccacttctctctctctcctgggagtcactgtgccctgagttactcagggcctgggcttggtgcttgggactcacagaaaagtgccccagggcagagttctagctctgtattcaaaattattcttctgcactggagttagagcactaatcttgctctggctccagcattgtgctagaggagttagttgagaaaggatcaagtgggggctgtggtgctgaaagcagtacagcaataatattagcagtacaaccatgttacctaagtggaggcaccagcgtattgtcattttcaccccaagaagacttaggtgtttgaaggccttctcatcctatggtcactcaagaaactaacaaagcagataacagtgttggtgcactcaccaggatgaaaaaatttcatttttctaagttaagacctggcttcctaaaggaaagatgattcatgtatatttctggaaggttatat

SEQ ID NO: 853749 - DNA, 586 bp, Homo sapiens
ttttaaagaggctgggtaaaaaggagttgctgaagtcatagtatgttgtggaaatgaagtaaatcttttccactctrctctgatagcaaagtagtttttcaaagagatgaattggccaaacacatcttaccctagcaaagcacatgctgctttgccatatgccatttcatccattttggtttctgctccaaaatgacgtgagaatttcagtaaagactgaaagccttcttgtttcactttgatgttgagtgggtcctttgaggcctggatgctgatcttttatgtgaactggagaatgtaaacgtgttatagcacagtatttacctaggatggtctactcacgtgtttcctttgcttttcttattctaaggattagtccttacataactttttcaacttgcccttgttccctttcacctgacccaaatgatttatgcttattttatccttttgcttttccatttgcttttattgtgttgattccccagtggattctgtcctgttagcacctattgcttcctgtttaaccaactattcctctctccctggctgtgttaattggcgtcttacctggtgtctagctccc

SEQ ID NO: 853750 - DNA, 633 bp, Homo sapiens
aaatgttaaaaaatatatataaaatatttctcatagactcagctatccaartagccaaatttgtctctattaccacacaggacaaaacagagaagaaagtgaacagttttgcaagactgcaatggactcaggttttataaagcaataaacccttcatgcttttgacggagagaagacagataaagaggaaaacagaaaacaaaacctgagattctgtatgaaatgaagggagaaacattctactttgtaatgtagaagaggaaaacttgaaagagtctaagaataaaactgacaagtttagcaaatggaatgaaaaaataatttgaaactctaaaaatcatttaagaagctatacgcttcttagggtacagaacagggtctactctatcctaggtacagtaggtttacatggggaggggactacaaaattaaaatggcaaagcaacataagacagaaagcattctgataaactagaatcctacgtgcaaaaaagcaaacagacaatacctaggaatatccttatcaagaaagagcctgcaaaaacatagaaaaggctttagttagtgcagcaaaaaaacaaaagaaataagggagagaatcagaaaaaatatatatataaagaagacaaaatt

SEQ ID NO: 853751 - DNA, 481 bp, Homo sapiens
ctgtaaagtacataatagatatagcatgttagatagtgataaatgccaaggagaaaatgcaaagaaagggaatagcaagggatascaaggttaggtgaataaattacatttttaaatagggtggacagggaaggactcaccaaggtgatatttgagtaaagatctaaagcaaataagggagtgactgacccatatgtatatctgtgggaagaggattcttcatagaggaagtagtctagtgccctagcaggggtggagagcaatgaggccagaatggctgagtttttggagtaaggggagtgttgtaggagatgagatcagagagaatgcgaggtgagcgttttgccttccaggttattgtaaggatttctttctttcttttttttttttttttgagatggagtctcagtctgtcacccaggctggagtgtggtggctagatcatagccccttgcatttgctggagcttctgctccagcag

SEQ ID NO: 853752 - DNA, 563 bp, Homo sapiens
ttaagttaattttaattaatttcaatttaaatagctacatatggctagtggctaccagtttgcacactgtaggcatataccaatgatatttaagaccaccatctaatttaaagacttgttaacatcatggagaaaggtgagagccaaaaaaataaacatgtgtgatatctattcatattctcttcttccatcaatacaaagcttgatactcaaagctgggagggaatttctacttcagtgctctgggatgtgtggccagacgtttctcctgtttcataaaatggcaaaaagtaaaccaccttcaaaccgtatctttggaaataaaacttatacccctaacccatgccacattatgttgtctatttatcacagaatcacaaactgactataattaaagaggacatttgactcagtgctagttaagcaaataagagactatgatgtaggtgatatcyggcagtgccatgagccccaaatattggactgcatctaaatgatagaggtggttgtgaggagggtgaagcatcaatagcttttgaaccattgtgagtactatagtttac

SEQ ID NO: 853753 - DNA, 374 bp, Homo sapiens
ctccttgtaaagctaaatcttttcatcatcctcattgagtctttcagctatagctttcacttagcacaaaacaactytaataatatttgttacagaaaacatgtattattttacactagagattattgttagccctgttataaacactatagaacagagaaggtatgtaacttatcacaatacacagagttaattagtggctgaccggggaaccaaaattacacagtttgcctacagtacctgtactctgaaccactgtaagtcagttcctttcaacatctagtatctggtgaaatgaaataaaatccattcatgtgaatattattggtcttttcttggcactttgaagagccaagtggagaaatccctgcaat

SEQ ID NO: 853754 - DNA, 614 bp, Homo sapiens
tttgcagttttcatcttactttactgcaacaacttttcatatcattgcccacacctgttttttgggagacacattcctttcttggctaacacgacgcattatcctttyctctccttctcttcttttttctccatttttacttcaaatgaatactcttctacctggtcaataaatattggagtacatcatgacttggttctaagctcacttatttcatcattcccaggtgaagtcacccacactcatggcttaaatcaccacctatatacagatggttccaagcagaccatgtagaccacttttctaagtatcagctctgtatttccaattgtttatttgaaatttcttcaatgtttcaaaggcacctcaggaccaaaatgtctaaaattgagctaataaacttcctacccaaaaggatttcatttttcccccactgttcactctctcattaagagtaccactgtctatcttgctatataagccagaaatacaggagttgtcactgttgcttctaccaccctcattatcatctccaatcatcataattcttatgtattttacctacaaatgggatccacccacctctcctcttattcactactacttcactagtc

SEQ ID NO: 853755 - DNA, 614 bp, Homo sapiens
tttgcagttttcatcttactttactgcaacaacttttcatatcattgcccacacctgttttttgggagacacattcctttcttggctaacacgacgcattatccttttctctccttctcttcttttttctccatttttacttcaaatgaatactcttctacctggtcaataaatattggagtacatcatgacttggttctaagctcacttatttcatcattcccaggtgaagtcacccacactcatggcttaaatcaccacctatatacagatggttccaagcagaccatgtagaccacttttctaagtatcagctctgtatttccaattgtttatttgaaatttcttcaatgtttcaaaggcacctcaggaccaaaatgtctaaaattgagctaataaacttcctacccaaaaggatttcatttttcccccactgttcactctctcattaagagtaccactgtctatcttgctatataagccagaaatmcaggagttgtcactgttgcttctaccaccctcattatcatctccaatcatcataattcttatgtattttacctacaaatgggatccacccacctctcctcttattcactactacttcactagtc

SEQ ID NO: 853756 - DNA, 620 bp, Homo sapiens
cattttcaaacatatgatctctagtgtttgaattagaggtcacctccctttccctcagaactctttttgtacttctgacttctttctacaccttgctttcttacctattaatgggaacctgcaaacagaatagcagagacagaattttggatcctgggtatctagaattgtggttatcaaacatccgtgggcatgagagtaatatgggaagtttaactggcagatttctaagcccatttccacagattctatttctgtagtgtgcagagactactggcttcttagcaaagtctatccatttcctctttttcatgggcacacagttagaccatacatcccagcctgccttgtggtgaggcacagaatgtgactgtgttctagctaatggagttctaatatggtgcccctgccccaggatgggcacctcaatttttccatgcattcctgcatgttcttttcctttgcagttgcttggaatggttaactgcagaacaacatttttctttttctttataataaggcaattttcacataacataaagtycacaattttaaccattttaaagtatacaatgcagtaaacttttgttcattcacaatgttgtacaatcatcaccaca

SEQ ID NO: 853757 - DNA, 608 bp, Homo sapiens
tagaaataaatacacaatcctaactggccaacaaaatttacaggacrtttccaagtttgttttttatgactagaatttgtttgcaaaaatgggaatttttattaacctgcagaaaacataaaatatgtgttttttatactacactaccaaatattgctactattacctttaaaatttcacttaattctctcttggcttagacactttaaattacagcagaactatgctatgacatagttggcaaaattagaaattaacccaatctgggattccactgcttttttcacccaccattgctgtacatccatacttcacttcttgggactacttttggctttgtctgtctgttccatcctctccaagcttgctacatatgacctagtcttatatgaaacctctggcatttctcattccaagctcttatattaacactattaatagcgacaccaccttacacccctgggactctccctaatggtcaggtacttgagaattgggatagtcttggtccactccattggcaagagccacagccgggagaaagctagaggtgaggccctccaccgtagcagcttttgaactgactgggtttttgtgtctatattgag

SEQ ID NO: 853758 - DNA, 646 bp, Homo sapiens
tgctgtaatttgtcacctggattccttaactcttgtgaasgtatttttaagcatggatgtttgttcaaattaatgcttctgtgaggagataagccctggatactcctgtgctaccatcttggtgacatcactctccaaatgtaaattattttaattagttacattatttatagcaataaaatttaaattttttcctcagggcacaatgctgataaagaaattgaaaaatatcagactatataaactaaatgaggggtgcttaatccccttcaaggaggtagtagagaatttagtactagtttatctctccagatagtgattcaattttttttcaattacagttattctagatataagaaaagggacaggtttggaagattacattattatttggagacattgatcttagtcactattactgataaaattcagcctagtttatgtctatagacacataataagactgcatgaaagctattaggatctaagttttctacattggataacctctccctttcacccttaccctagcctaagttttcccatatcattatcaaatcctcaccatttgtagaactgtctaccccctctcactagccatctactgcaaacacacactaatacacagacacacacacacacacac

SEQ ID NO: 853759 - DNA, 634 bp, Homo sapiens
aatcagttgttgtggcattatttattgagtcccacctttccccattggtttgtcatgctcgcttggtcatatatcaaatttccctatgtttgtgctgctcttcctggacttttctgtttcaattgtttatttggtttttcctgtgctaatatcacactattttaattactttaaatgtaaagcaatttctggtaactgataaatcatgctccttcaacctccttttctcttttcttttcttttttttttttttctgagacggagtcccactctgttgcccaggctggagtgcagcagcgtgatcttggctcactgcaacatccgcctctgcaacatcaagtgattctcgtgcctcagcctcctgagtagctgggattacaggcatgcaccactacacctggctaatttttgtatttttagtagagatggggtttcgccatgttggccaggctgatcttgaactcctgacctcaagttatccactcaccttggcctcccagagtgctgggattacagacatgaaccactgtgccaggcctcaacctcctttttgttatttgtgagtgtcttgtatrttcttaacctattgccctgctacacaatggctgatttttttttttttttgtatttttag

SEQ ID NO: 853760 - DNA, 604 bp, Homo sapiens
aagttccttcaacaacccatgtctctaatttcagatttccctcttctaaactccccyctccccgtcccaccggccgccagcctttttctctagtcctactagcacctgagtctcattgctagcctgctcctgcctttcatgtaattgttctattccatttttctgattctttcccctcaatacactcaaagattcactacactcagaaacgactggtggtctgagtgtttgtagaaccactgggtagaaagcagatccactaggcttctcagaagaaagtggattgcagttacaaatttggataaaatgtagttttttaaaaagtctacctctacaaagctattgttaacccaaggtccatggtatccatgagggatccatgaatgatattcaaggtgtctataaactccctgaaactgtatttaaacttgtatgagtatgtgcacttttctagaaagtgagcagtgggtccactgcttttatcactttcacataggaaactacactaaaaacagatttcctgcactacagctttctggagtaccacaagcatagatacctgtgaatggtggtatgaacagatattaactattacatggaagaa

SEQ ID NO: 853761 - DNA, 415 bp, Homo sapiens
caatgctggatgccaaatagtcagtgaagtttggatttggatgtggcagctcactgatgctggggggawattttgtttaatcattgtcttttaaaatgaacttggtaaaagctgtcagttttttcccttttagaaagatgaaatgttttttgtcttttttctcttttcctgtttccataattttatttttaggctttcaaaaagctgaagatttaattaaaataaatgttttccccttggttagcttgattagtctttttttcctaagcattattctgcatctaagattatatcctaacatccaagatagttctaattcacttcattttttgttcctctaaaataaaatagatttgtgaattttaggaagtatatattatcacattattttgttttattttgtattttgaacctt

SEQ ID NO: 853762 - DNA, 612 bp, Homo sapiens
aacgtttgtagaaaaccaaggttttctaatattgctggacgaagtgatgaaagaaaagggtgagctcagggttttgatttcctggccccagctctgccataaatagcccaagarcttctaaatatgccctaagtcagaatcttctcttctgttgccaaaggtctgaaattgcacaaaatcaaacacatactctcatcatgtgattagctgaattacaatcaaaggtgaaatatcagccttgtaaggtatctgctgttaaaatgagggcattggttgggaaagatggaattctatacgtttggatggggatgtgtgggaagaccctgatgaggctggggacgttgagctcctaaattctgatgagtcttgtttgccagcagaaatggcctcccacccccagtaacagcatcccccctacactggcctttccacctttgtctgaggggattgactctgcattgcctgaggaaaccataatggccttcctctaggcagctgctaagccagaggatgctgagtcttctcaggacccacccccaccacacctctttgcttctagacctatagctagacttgagtcccagcagcccctaaagatgaggtacaaagttt

SEQ ID NO: 853763 - DNA, 659 bp, Homo sapiens
agggagtccctaacccacccagagagaaagttcagaagctgctgggatctctgtccctccttcccagcatcccctgcccctgtyggtgatcatcccagcatctctcatccctgacagctccttcccaccatctcccacccccacctgtgctgtcatccaatctctgtatttgtgtcaccacactctcttgcccaactcctgctctcatctctactactgctgggcgtacctgctgagaccaccacagcccaccctctgcctgagcctcccctccctgcctactttcagaaacaaagagaaggtaggagaggccacaaacccagtgacttgtattagttcagactgagttcagccacagtgaaaagggaatccatagtattggtgagtgtaacacacccacttttagtctctcactcaggttcagaggggtcagtcctctgcttcgaccatgtcacaaagccatcaggagcccaagtccctttttatcatctgctgtcatccttagcacctggattccatcttcaaactcatctcatggcccagtatggctgcctgagtaccagcctttatgtctgcattccaaccaacaggaagaagaaaggagaaagggaaaacacaagcacatctcccaggtcgactgtttaacagccttcccatga

SEQ ID NO: 853764 - DNA, 614 bp, Homo sapiens
ttcttcacagcttgtagttttcatttaagaagcctttccctattccaaaaccattaaggatatgttccaatattttcttccaaaacttacaaaattttgcattttataygtttgatttttacccatatttgccgcgtgtatgtgcttttcacaaaaagaaatttacctgggatttactttgtatgtaggctaaggcagagagctaatttccttttcatcttccttgggaatgaccaattgtcacagctccatttttttaaccatccagtctcttcccactaatgcacagggccctcctttaacgtgtgcagtccccagctctccctgggccctctgcactgaccaaaagccccctgcctccatcttcattatcaggctttatccacagtctcaaaagttggagaggaacttgtcctgcattgtcttctccagaatcatctcaccaccatttctctttaaaaatattaggatcagccaggtatggtagctcacacctgtaatcccagcactttgggaggccgaggcgagcagatcatgaggtcaggagatcaagaccatcctggctaacacggtgaaaccccgtctctactaaaaatacaaaaaattagcccagg

SEQ ID NO: 853765 - DNA, 614 bp, Homo sapiens
ttcttcacagcttgtagttttcatttaagaagcctttccctattccaaaaccattaaggatatgttccaatattttcttccaaaacttacaaaattttgcattttatatgtttgatttttacccatatttgcsgcgtgtatgtgcttttcacaaaaagaaatttacctgggatttactttgtatgtaggctaaggcagagagctaatttccttttcatcttccttgggaatgaccaattgtcacagctccatttttttaaccatccagtctcttcccactaatgcacagggccctcctttaacgtgtgcagtccccagctctccctgggccctctgcactgaccaaaagccccctgcctccatcttcattatcaggctttatccacagtctcaaaagttggagaggaacttgtcctgcattgtcttctccagaatcatctcaccaccatttctctttaaaaatattaggatcagccaggtatggtagctcacacctgtaatcccagcactttgggaggccgaggcgagcagatcatgaggtcaggagatcaagaccatcctggctaacacggtgaaaccccgtctctactaaaaatacaaaaaattagcccagg

SEQ ID NO: 853766 - DNA, 513 bp, Homo sapiens
cacagcttgtagttttcatttaagaagcctttccctattccaaaaccattaaggatatgttccaatattttcttccaaaacttacaaaattttgcattttatatgtttgatttttacccatatttgccgcgtgtatgtgcttttcacaaaaagaaatttacctgggatttactttgtatgtaggctaaggcagagagctaatttccttttcatcttccttgggaatgaccaattgtcacagctccatttttttaaccatccagtctcttcccactaatgcacagggccctcctttaacgtgtgcagtccccagctctccctgggccctctgcactgaccaaaagccccctgcctccatcttcattatcaggctttatccacagtctcaaaagttggagaggracttgtcctgcattgtcttctccagaatcatctcaccaccatttctctttaaaaatattaggatcagccaggtatggtagctcacacctgtaatcccagcactttgggagg

SEQ ID NO: 853767 - DNA, 513 bp, Homo sapiens
cacagcttgtagttttcatttaagaagcctttccctattccaaaaccattaaggatatgttccaatattttcttccaaaacttacaaaattttgcattttatatgtttgatttttacccatatttgccgcgtgtatgtgcttttcacaaaaagaaatttacctgggatttactttgtatgtaggctaaggcagagagctaatttccttttcatcttccttgggaatgaccaattgtcacagctccatttttttaaccatccagtctcttcccactaatgcacagggccctcctttaacgtgtgcagtccccagctctccctgggccctctgcactgaccaaaagccccctgcctccatcttcattatcaggctttatccacagtctcaaaagttggagaggaacttgtcctgcrttgtcttctccagaatcatctcaccaccatttctctttaaaaatattaggatcagccaggtatggtagctcacacctgtaatcccagcactttgggagg

SEQ ID NO: 853768 - DNA, 507 bp, Homo sapiens
ttcctggtttctggagcacctggcccccttggaataggggtcaatcccttacaacagatggcatcagctttcgcagccctggccggcaggaccagcggaaagaggcagctgctctccttctccccttccctctctcattctggacaaagaccattatgcaaattagggccacaggtccagggcagcccatggttgcatctgcaaaacaactgtgagtgatgttcagccccagaaacctggctgcagctcttctgcaatcacccgagctgacaccagtgtgccagcaacagacagctgggaggacctacacctccatggatccatctggagaacaggtctggagccagttgcctgaattcaaccatgtgagatggggctgctccaaagactgtgagcaccctgtccctgcaaccttacccgctcacccatcagatcaaggacaatakagggatggtttgacacagaagcgagacatgcgccctggcctcctgtccttcagggtcctct

SEQ ID NO: 853769 - DNA, 617 bp, Homo sapiens
caaacagcatcatatgctacagagaaatattttgtgaaaggaggagtcaatcaatgggcaaacttcattgtggtcttagtttaaagatactaaaacagccatgccaacctgcagcaaccaacaccctgttcggtcagcagccgtcaacattgaggcaagacctcctaccagcaaaaagattacaacttgatgaaggctcagatgactgttagcattttttggaaataaagtactttcaaattaaggaatgtacattgtttttctagacataatgctatggcacacaacagactagtgtaagataaacaaaagttttatatgcattgggaaaccaaaaaatcatgctttactgtgatgcttgtttcattgtggtgctctgaaactgaactcacagtttctcttaggtatacatgtaaccttcttataattttgttagtgatggaagaaactaagtgaaataaataatacatcaaagatcaaaacttygtactttattcctctagaagcctaatttttaagtaatttaatctcacaaaaagacaatttctggaaaaacaacaactgcagaacctttaggaacatgtaatataaataaaacacacctggttcattggtca

SEQ ID NO: 853770 - DNA, 617 bp, Homo sapiens
caaacagcatcatatgctacagagaaatattttgtgaaaggaggagtcaatcaatgggcaaacttcattgtggtcttagtttaaagatactaaaacagccatgccaacctgcagcaaccaacaccctgttcggtcagcagccgtcaacattgaggcaagacctcctaccagcaaaaagattacaacttgatgaaggctcagatgactgttagcattttttggaaataaagtactttcaaattaaggaatgtacattgtttttctagacataatgctatggcacacaacagactagtgtaagataaacaaaagttttatatgcattgggaaaccaaaaaatcatgctttactgtgatgcttgtttcattgtggtgctctgaaactgaactcacagtttctcttaggtatacatgtaaccttcttataattttgttagtgatggaagaaactaagtgaaataaataatacatcaaagatcaaaacttcgtactttattcctctagaagcctawtttttaagtaatttaatctcacaaaaagacaatttctggaaaaacaacaactgcagaacctttaggaacatgtaatataaataaaacacacctggttcattggtca

SEQ ID NO: 853771 - DNA, 592 bp, Homo sapiens
tgttaacaaattttcagaagactgaaagtaggtgatgaactagtaactattaaartaaggcaaaggaagatgctgtacaggacatacacggaaagggaagaagaggaaagctaatctgtccactagaaaccagaggactggggagtttgaagtgccactatggtggagagttgaagtgaggcatggcataaaaacagagataattcgaaagatttcagataaaacatgttacttccccccacagccacctccctccttcaacctctgctttctcagaaggtccaactgtcttgcacttatccccatcctaaccccaggtgaaagtcagagagagaaagtgctcacacaaaagtgggacagaaaggaagaagaaaggaaggaaagaaggaaggaaggacggaaggaaggaaggaaggaaagaaggaaggagccacccttctctgtataaaactctgaatatactttggaagaaccagggcagtttgcatgggaatggaaactcagatatttaggagtctcaaattatagtgtttagtgccccacccacaatgataatgtttagtgccctactcacataccttaaaacaaagct

SEQ ID NO: 853772 - DNA, 592 bp, Homo sapiens
tgttaacaaattttcagaagactgaaagtaggtgatgaactagtaactattaaagtaaggcaaaggaagatgctgtacaggacatacacggaaagggaagaagaggaaagctaatctgtccactagaaaccagaggactggggagtttgaagtgccactatggtggagagttgaagtgaggcatggcataaaaacagagataattcgaaagatttcagataaaacatgttacttccccccacagccacctccctccttcaacctctgctttctcagaaggtccaactgtcttgcacttatccccatcctaaccccaggtgaaagtcagagagagaaagtgctcacacaaaagtgggacagaaaggaagaagaaaggaaggaaagaaggaaggaaggacggaaggaaggaaggaaggaaagaaggaaggagccacccttctctgtataaaactctgaatatactttggaagaaccagggcagtttgcatgggaatggaaactcagatatttaggagtctcaaattatagtgtttagtgccccacccrcaatgataatgtttagtgccctactcacataccttaaaacaaagct

SEQ ID NO: 853773 - DNA, 526 bp, Homo sapiens; identical to SEQ ID NO: 845407

SEQ ID NO: 853774 - DNA, 551 bp, Homo sapiens
ataaaataaccagttaacaagcctttatgtattgcatatttagtatgtgtccaacataaatgtaagtgctttgtgaaaaacaattttttgtcaagttctttttcttcaaagagctttaaacttactaggaagtcaagtctggctaatggcaaacattattatatgcctggcatactctatggcctttacattcattaacttatttaatatccacaaaaaccctatgaagtaggaatttttatggtctctatttcatgtatgaagagactgagtcaccagaggctaagggacatgcttgagatcatgaggtggcttgtgagtggcagagtgcagtctaactatagatgatactgcattatctctacgctgttcaccatactacaggcctcctgcttcccatcgatcatatggaagaattgtagaaaaacagcaaatggaatgaaaaaatatttctatccaagaatgccacrtgcttatttcataaatttcaaatacaaaggacaaataacaagaaaacagaagaatattgataatagttgaggatgtttagc

SEQ ID NO: 853775 - DNA, 654 bp, Homo sapiens
gggtctggtgggaggtgattggatcctgggggtggayttcccccttactgttcttgtgatagtgaataagttctcatctgactgtgtagcacttcccccttctctctctctctctctctctctctctctctctcttactgccatgcaaagatgggcttgcttccccttcaccctttcaatacaattgtaaatttccacaggccttcccagccatgcctgctgtacagcctgtggaattgtgagtcaattaaacctcttttctttataaattacccagtcttgggtagttctttatagcactctgagaacagactaatacactccttaactgaattggtaccatatctcatctaatttaagacaccattatttggggtatcactaagaaagactaactggtgtcaattaactgtgaggtgccattgagtataagatacatccctatttcagaggtataaaaatgtgagagaaaaataaggtacatcttaggataaataaaattacattggtgagtgaacatcttttaaccctaggaaaatttagaatcaagtcttctgagatccctggagttctactagtattccttactggatacaggttttaattttgggaatattaaaaattaggtattaaaaagttcaagggaatcaaaac

SEQ ID NO: 853776 - DNA, 594 bp, Homo sapiens
gattcatcttcagtattggaggaagggtctggtgggaggtgattggatcctgggggtggatttcccccttactgttcttgtgatagtgaataagttctcatctgactgtgtagcacttcccccttctctctytctctctctctctctctctctctctcttactgccatgcaaagatgggcttgcttccccttcaccctttcaatacaattgtaaatttccacaggccttcccagccatgcctgctgtacagcctgtggaattgtgagtcaattaaacctcttttctttataaattacccagtcttgggtagttctttatagcactctgagaacagactaatacactccttaactgaattggtaccatatctcatctaatttaagacaccattatttggggtatcactaagaaagactaactggtgtcaattaactgtgaggtgccattgagtataagatacatccctatttcagaggtataaaaatgtgagagaaaaataaggtacatcttaggataaataaaattacattggtgagtgaacatcttttaaccctaggaaaatttagaatcaagtcttctgagatccctggagt

SEQ ID NO: 853777 - DNA, 609 bp, Homo sapiens
gttactgtgtgttctagaatgctccrtaagctatcatcgaaacagcacaaaatacaagtgcatccatacatacaccatcacttagatcatataataattagcaacaggatgttgttgcttaaaatacatttatgcttgtggttttatacatatataaaatcccctaggccaacttctttatttgatggccaaaactagtctttttcacaccttctagattttatttgaatcttggttccttggatagctaatcagccaacgctgtagactacttacataccctctctgagacttgaattttcatgtacaatgaagcagttgtaaagattaaatgagtcattacaaataaattgcttagaacagtttttgggacatagtgactaataaatgttagctattaaaactattaacatttgaaaagtaaaatattaaataattttgatattttaaatatacttatgtcttattcataaatgatatttctactctaccacccgtcagtgtaaaaaccttagcttatgtttcatttcttctcttattatgttcaaattaattgagaaacacaagtgtggatgataaactttattcatgaattttacatcagagaaa

SEQ ID NO: 853778 - DNA, 553 bp, Homo sapiens
tatttcacatctaatgaatttctaagtactgtctattttcctctgcaaggtctttcatatgtatctcccatttgccatccccacctctaccattcaraagactttgtggcttgctaaatgcaaaatggtcatcaatgccttcccaaatacaaaatacaacaagtattatggtttgttgctaatttgactgtgaaatttaaaacctttgagtactaactctttagtacaactgggagttacctacaatctctaggttgttcccctatgtttctatctggacccctgtctccagtttctctgcttccagttcacaccatgtaattattagcataacttttttttataatgcaaacctgcttttgtccttaattagtttgaagtttttaaatggctccttattgtatatgagatataactaccatcatgtttaaaacattcttagttatttgctctaagttttcagtgttacctcccaaaatggcttccttgtatatttaggcaacactatgccaaattcctaagctcatccaagaatgggttatacacatctctc

SEQ ID NO: 853779 - DNA, 533 bp, Homo sapiens
ctggagaaagaaatcaaatacagtgcctaattttgattttccaatgcaacttacacgacttcagaatgttcgtggcctctcctgccacagcagacaggttcttgaatgaagattctaaacatgcacactcwtatccacacaataaaacaaacagaaaattgctcctaggtgctatttttaaatctccactaagtattgaacttaaaaaaaatatttttacaagagtatcccattattagacttcctaggattactataagtcccctgcaagatgactttagttccaggcttatttattcatttatttttaaatcactgctcaaagcttggagacactaagaattaactccaacaagtggatatgaagtccaacttcaccactgactgggttttgaactccagaaaaattaatgcaacattagaacctgagttaactcatctctacaatgggaataataatgagaataatgactaccttttataaattgaattatgtcaccctcaaaaaaggtgtgtctgaagtcctaaccacc

SEQ ID NO: 853780 - DNA, 584 bp, Homo sapiens
ctcgatctcttgacctcgtgatccactcgcctcggcctcccaaagtgctgggattacaggcgtgagccgccgcgcccggcccgagatgcacatgtatttttaaagagttccattgataactgagtttctsctgaccagaaggtggactgtggcctaggcatggcagtgcctcctgattggctttggaagctcagctccatctgtggtccgttattcttaaaagtggccactagagggtgagaatgagccacagcacagcaaagtcctgttttaaccttcagaacagctggaggacggtcaattcaaacacactagagagcacctatcatgtgccaggtactgtgccaagccctccctgccttccaggacctcataaatggccagtggcccctcacatatagacacaactcttgtacaaggcagaatggaatgtgcacaaagaggtacaatcccaactcctagatctagggggtctcaacaaggaggaactgtgggtggctttcctgtagaactcagattggtcagtctgtgagaaggaaacttacaggacctgcaccatccaccctctcagtctcagtctcacc

SEQ ID NO: 853781 - DNA, 550 bp, Homo sapiens
gggagcttgtatgtttaggtctgactcatctgtgctaacccagtgcccagtgtcatggttggtgtttttaagcgtctgccaaactgaattaagtagtactccctttactggtttcctgtagcagtcattctctkgtgtcatggttagctgtttacacctctagattccaggatcctgcagtgtcagttatccctcttgtgtccccagtctcgtgcacagggagggcttcagtctgattgttgaaagtatgctaaataccaagtaaatgctacagtcataaagtgttgtcgcaggtggagaggagtcagaaagtgttaatgactatgctaaagcttttcttgctaaagtcaccagtaatcacctagtctctaaatcccgttggagctgtagattctttaccttgacttttctgtaacacttgacagtgcccttgtcctctgggaaacttttcttggtttcactgctcttggctggttggctttcttcactctcaccattcttctcagtcatctctgggcccttttctgcctatggctgtgtcatgcctcag

SEQ ID NO: 853782 - DNA, 607 bp, Homo sapiens
actaccatcagagtgaacaggcaacctacaaattgggagaaaattttcacaacctactcatctgacaatgggctaatatccagaatctacaatgaactcaaacaaatttacaagaaaaaaagaaacaaccccatcagaaagtgggcaaagacctgaacagacacttctcaaaagaagatatttatgcagccaaaaatcaaatgaaaaagtgctcaccatcactggcgatcagagaaatgcaaatcaaaatcacaatgagataccatttcacaccatttagaatggcaatcattaaaaagtcaggaaacaacaggtgctggagaggatgtggagaaataggaacacttttacactattggtgggactgtaaactaattcaaccattgtggcagtctgtgtggcgattcgtcagggatctagaactagaaataccaattgacccagccatcccaatactgggtatataaccaaaggactataaatcatgctgctataaagacacatgtacacgtatgtttattgtggcattattcacrgtagcaaggacttggtacctacccaaaggtccaacaacgacagactggattaagaaaatgtggtagatata

SEQ ID NO: 853783 - DNA, 567 bp, Homo sapiens
aaacttctttgtgttgtttgctttcaactctcagagttgaatattccttttcatagagaaattttgaaacactctttttgtagaatttgaaagtggatatttctaccgcttygaggcctttgttggaaacggaatatcttcacaaaaactagacagaagcattctcagaaacttctttgtgatgtgtaaattcaactcacagggtggaacatttctcttgatagagcagttttgaatcgcactttttgtaggatctgcaagtggacaattggaactctattgggcctatggtgaaaaggaagtatcttcacataaaaactacacagaagcattctcagaaacttctttgtgatgtgtgcattcaactcacagagttgaacatttcttttgatagagcagttttgaaacactccttttgtagaatctgcaagtggacatttggagcgctttgagacctgtggagaaaaaggaaatatcttcccataaaaactaaacagaagctctctcagaaactactctgtgatgtttgctttgaactcacagaggtgaacctgtcttttgatacag

SEQ ID NO: 853784 - DNA, 567 bp, Homo sapiens
aaacttctttgtgttgtttgctttcaactctcagagttgaatattccttttcatagagaaattttgaaacactctttttgtagaatttgaaagtggatatttctaccgcttcgaggcctttgttggaaacggaatatcttcacaaaaactagacagaagcattctcagaaacttctttgtgatgtgtaaattcaactcacagggtggaacatttctcttgatagagcagttttgaatcgcactttttgtaggatctgcaagtggacaattggaactctattgggcctatggtgaaaaggaagtatcttcacataaaaactacacagaagcattctcagaaacttctttgtgatgtgtgcattcaactcacagagttgaacatttcttttgatagagcagttttgaaacactccttttgtagaatctgcaagtggacatttggagcgctttgagacctgtggagaaaaaggaaatatmttcccataaaaactaaacagaagctctctcagaaactactctgtgatgtttgctttgaactcacagaggtgaacctgtcttttgatacag

SEQ ID NO: 853785 - DNA, 624 bp, Homo sapiens
gggaacccagggctgcgcgtggcgcttgtgggccagcacgagttctgggtgggtgtggtctcagcgggcccgcaattggakcggccagcaggccagcaagccccggacagtgaggggcttagcacctgggccagcagctgctgtgctccttctcgatttctctaggggccttagctgcctcctagccgggcagagcttgggacttgcagcctgccatgcctgagcccaccccgcccctccaatgggctcctgtgcagccggagcctccctgacgagcaccactcccagctccatggagcccagtcccgcagggtgcgggactggcaggcagctccacctgcagcccagtgcgggatccaatgggtgaagccagctgggctcctgagtctggtggggacttggagagtctttatgtctaggtaagggattgtaaatacaccaatcagcactttgtatctaactcaagttttgtaaacacaccaatcagcaccttgtgtctagctcagcgtttgtgagtgcaccaatcagcactctgtatctagttaatctggtggggacttggagaacctttaagtatagctaagggattgtaaatacaccaatcagcactctgtatctagctca

SEQ ID NO: 853786 - DNA, 597 bp, Homo sapiens
aatttcccctccagatcctactgctaaattacttctggatttactaatcagggctttcttgctactttccacatcgccaatcttcgaatctggtacattttctttttttttttttttttgagacgaagtcttgctctgtccccaggctggagtgcagtggcgcgatcttggctcactgcaagctccgcctcccgggttcacgcccttctcctgcctcagcctcctgagtagctgggactacaggtgcctgccaccacgcccggctaattttttgtatttttaatagagacgggatttcaccgtgttaggatggtctcgatctcctgacctcgtgatccacccacctcggcctcccatagtgctgagattataggcctgagacacctcgcccggccccaatctggtagactttcgaaatccttctttccttgttgtatcatacagctcgtgaccttggttccacaatggcccatgctctactttcctgttttcctccatgcttctctgctgccyacagcagcaagaaaaccaaacccctccctgaatcagggtacctgctccatatcttctggaccagttctccaaactggctgggca

SEQ ID NO: 853787 - DNA, 634 bp, Homo sapiens
ttcaaataatttgtctttttttataagcattgcacctctccaatcctccccgtcttctgaagctgagtccctctctgatgttggtrgtggtacaaccttcaaaccttcatggtatttggacacagtcaccttttctttcaaagacatagggtaagagatgtatagaagcatgtcccttgggcctgaatgacattagtccctggccaggggttagagggcgggcagatatttatggtttcatgctgggcagagtcagtgctacatgagagcaccagtttctctatgtgacatgcccagctgtattccaagcctagaataatgtcaggtacataatagatgcatttcattccagaaaataaacatttattcctggaggtatgactagtgtagggtagtggtagccattcggctggcagtatctttcaatgctatgagtcttcattttttaaagtaatagttgttaaataactatccttccaggaatcctcttgatcatattaagacaacaaaaatgaatagtttgagcactttcgtttaactcatttcttaactgtgaaactttctcttttttttttttttttttttgagatagggtctcactctgtcaccaaggctggaatgcagtggcatagtc

SEQ ID NO: 853788 - DNA, 605 bp, Homo sapiens
atggggcaaaggcacagaaaagtggggtgaatggatatcgaatgtcagtccatcgaatgcattgctgtgtgcaagtatgctcatgtccatgtgtgtacacatgctatgtgcaygtgtgtgcatatgtgcatgcatgcatgtgtgtgtgaatctgtgtgtgtgtgtgtgtgtgtgtgtggtgggagggcacttgggccagtagtaggccattgagaccagagggaaagaggcattctcaaagagaccaccacagactcttcttctgtgaggacctggaccagagctcctaagggccattgggccaagacaggaaacagacgttagctgtcaaattgcctaaaactaccccttattttactaatgagaaaagccaggccagaagagttctaccccttgcccagggccacactgcaagtcagtggcactgacttaaaccccagccagctctccaggattaaggtccatgttttccacttgaggtgtgactagggtcctaggtttcacccggcgtggggcgggggggcgggtcctcccactttgggcacccagccctgaggacacccaacagtgccaggcctccatccaccgccctctggctgctcagc

SEQ ID NO: 853789 - DNA, 508 bp, Homo sapiens
aaaaaagagtaacagtagaagtagctataatcatatcagataaaatagactacacatcaaaaattgaaaaagagacaaagaaggtcacaatataatgataaaggagtcaattcagcaagaggatataaattataaatattcatgcacccaacactggaggtccaaatatataaagcaaacagtaatagatataaagagagagatagactgcaatacattaaactacacattagctctaatggggctgacaattatagaacattccacccagtagctacaaagtacacattattttcatcagcacatggagcattttttagaatagaccatatgttagatggcaaaataaataacaaaatcaaaaaagtagaaatcctatcaagtaaattttctgaccgctctggcataaaactagaaaccaataacaagaggaacctcaaaamgtacataaacaaatgacaattaaacagcttgctcctgaatgagtaatggatcaatgaagaaatag

SEQ ID NO: 853790 - DNA, 482 bp, Homo sapiens
ttctctcacccagcagtaaactagaggtttccccccagaaaaggtaaagcagacgactggactggcaggtgccaggaactttgcgaatgggaagatggtacctaaaacaaggttaagaaaaaaataatgtgtctaccaagttctctcttcttcaagttatgtgcccaggacagttcatcacattctgattaggcatacttttaaaatccaaccaaacttaaaaaaaaaaaattggtagaatccaataaccggagagaaacaactttaaaactttacaggtcatcctaaaaagaaactagatccatagaaataattagtaagttttgttacacattaagctcagtctcatgctatataaataaactattccaaactgttggatttttttaagcatgcagctttttragtttatcttaccatgctggtgtaaactaaataacaacacctataaaatacaaaataaaaataaagctacagttcat

SEQ ID NO: 853791 - DNA, 621 bp, Homo sapiens
atttcttccccaaggaacagaggcaggcatagaggaaggtaccctattagtagttgtggccaagggtcttttgtctgccttctgggggctccaccccagagagacgcaggtccacaattgctcagtgcaatcaccccagaatggagggcctttgctatgggcccaaaccaagggcttcctgtctaataacaagcagtgaggtatgtgggagtcccatgggagatggactggcctcctctccttgggtaaattgccgcttgttggcaatgtggataagacccttagggtctttgcttcttcattagtccgaggggtggcaagggcaatgccactacagaggcagtgatagacaagctttcagctgaccctgggggctctgtctagagagttgccgagctgctactagctcaatagctctgggagggcggtgactacaggcccagggcgggagaacctgcccagtaaggagataggggaacaggcatccatttaacagtyggttcacttttctgcaggcctgctgtggtatgctggggccccactccagtccctaatcacctcaagttttccagtacctggaagtatcaatggtgaaggctgtgaaacaacaaagatggcagc

SEQ ID NO: 853792 - DNA, 552 bp, Homo sapiens
gaagctccctcctggctttgagttgtcttgtctttccagagttaaccaatgttcatcttatatatgttgattgatgtctcatgtctccctaaaatgtatgaaaccaaactgtgctctgaccaccttgggcaaatgttgtcaggacctcctgaggctgtgtcacgggtctgcatcctcaaccttggcaaaattaactttttctaaatcaactgagacctgtctcagatattgtgggttcacagcatgtataagccagaaggtactcagttcttccaaaactaagggttctatctttacctgaaatattggctttggatatcagtttcccttaatcaacttggctaataatttttttcctatataagcatgcaagaaaaatgaaacaaagaggagaacagaaaaatccccatgaattttcaaaagtcatattttacaccccctgcaatattgccatttactaccagtttctttctgaccgagtcagacataagmggcctataactggatccaagccagttaattatcagattcaatctcatcctggacctagtc

SEQ ID NO: 853793 - DNA, 587 bp, Homo sapiens
gcttcagggggtgcttctaccaattgtttttatctttgactrctgcaccttacagatattgcctgtgtattccaaggcaagttcttctctgttagaacagatggtcttttatctgtcaccttgtcctctgtgcactttccatgttttgttttccccaatgtcctaaggcttcttcctatcctcattgtttccagatctcaaatggtattgagagagggagacttttttttggtgggggtgggttgggggtcgtttttgcggatgttttgtgattttctcaataggataactcagaattcctagttcttttgttgttgtgattttgtctgctcccttgctacccctttgagctttcccatgacatttctgctgctttttgttgtttaccattaatttgcacataaagttttttctatctagtttcattgaatttattatatataggtagatatttattaagttcccatagttttctgtacagatttgctttctcccccacccccgccctccggccagttttgctttgagaaatcatctattggcctaatcattgtcctacttcctttttgttttggtcatatttaagt

SEQ ID NO: 853794 - DNA, 628 bp, Homo sapiens
gttgaatggcagctctattttaagttcttcgagaaatctccaaactgctttccagaataactgaactaagcattttaaacagtttctaagtgttttcctttgctgtggaattggtcttacgacagagccraggaggggggaaactgataactactatgggcatccttgaaagcagattcttaagatctgtgacttctgttttgggggatcattagaggatgcccttacacagccacttacttttgggaattggaactttggaattgctgctgcacgtttcctggtcttgtcttgttcaggaggtgaaggagtccatggaatagaatagagcaaagggagctaagcttggaagaaatggttcaacttcctgcacttcaactgcacaggatgaagaggtttcatttgtctcacttggctggaagtacaggaagtggtgcctgacaactcatccaggtctacagttggagctctctggcaaccagagtacagaaaccagatatattgacaggtaaaacagtatgagctcctgatcatggtaaaagcttgggatatgcctgcttctgatatggctcttttgcctacagccatcaataataatttagcaaatcttgtctctgtttatactcat

SEQ ID NO: 853795 - DNA, 587 bp, Homo sapiens
gaaaggttaattgagacagcagtgataagagagtccttgaaggatggagtaagggagggtttcaaggtgcaggtattgaagccactgaaaggaaacaggttaggagtgatagcttggtcccagtgaagatgggaaagaggttcagaggacaggtcatggggtggagtcagagaatctaaaccgtttcccctgagatcagatgaaagaattagagcagttgttcaccaagtttggtccttgcgtgggcatcaccatggaatcggttagaaatgaatatttctggcctgcaccccagacacaatgcatcagaaactctggaggagagtccagcaaaaagggcttgttttaacaagcccttcaggtgtttctgatgcacctaaactttgagaactactaaatcaggaaatagttgtagaggcaggatctttgagacaaaattatgtagtgccctaggyaaggccatctgctgaatgttagggtagcaggggagcctgaggctggggacaccggctgtaaaggagtgcctaagaattagctagggacacaaggaggatcgccaaactacagcatgacataaaaaataagaa

SEQ ID NO: 853796 - DNA, 658 bp, Homo sapiens
agtattcccagaaatttagtagcttaaaataacacatttattagctcatactttctttttctttttttttttcaacttttattttaggatcaggggcacatgtccaagtttgttacgtggatatatggtgtgatgctgaggtttggggtacaaacagccccatcacccaggtactgagcacactacccaatagtttttcagcacttccctgtttccctgcctcctccctctggtagtccccagtgtctgttgttgccatctttatggtaaacatgccttccatgtgtacccaatgtttagctcccacttatacgtgagaacatgcagtattttgtttcctgttcctgcattaacttgcttaggataatggccttcagctgcatccacgttgctgtgaagttcattgtttctttctttttttatagatatgtagtattccatggtgtgtatacaccacattttccttatccaatccatccttgatgggcacctggattgattccacgtttttgctgttgtatgacacaacttctgtaggtcaggaatccaggcatggcttagtgtcagggtctcacaaggctgaaatcaaaggtgttggtcaggttggtttgacygcgaaagatctgttccaaactcagatggttggtagcagaagtca

SEQ ID NO: 853797 - DNA, 573 bp, Homo sapiens
gggcatgcaccaccatatccagctagtttttaatttttttttttttttagagatggggtcttgctatgttgcccaggctggtcttgaattcctgggctcgagyaatcctcctgccttggcctcctaaagtgctggaattacaggcatgagccaccacgcccggtcagtttctggtgtagaaatgtcaaggtgaagttgcctttggggtattttggaggagatgctgagtaggaagttggactgctggatccgagcacagagaggagtttggctggagacagattgtggaatcatcacacagagccgctttcgagtccttgggtgtggctgcccagtctccctctgcttcagacaaccccacacctccttggtgaccctaagggacagggaaagcaggtggcatcaggaaggatagcaggatccctacgatcactcccaggggggtgaattcttttgttttccagctgaagaagcagatcttacagcaaaactgccctgatttatttaccctgtgtggtgaccaggtcagtgggacaaacagcagatctatggtgttcctgaggttctcaaata

SEQ ID NO: 853798 - DNA, 624 bp, Homo sapiens
gtatttttgctttgccttgtttgggcacatagtttgatttaagaaaggagttgaattaagctcargttttgatcttagcctgagaaggttagagttcagatggaacagccactgttatttgaaaggattatgttgcaattttagtaccactacaggattcatatgcagaaaagttctgataattttgaagtagtatacatagtttcatattttaaagagtgatacacactgaattgtgttattttgtgaggaatctggacttttagtcaaatatttctaatatttctaatttcattttttgtgtatacatatttattaaattgaaaattttgtcatatacatgaatttgaaattatatatatatgaacatatacatacatatgtatgtgcatttgtgtatgacttgaaatgaatttgtgtattttagggcaatctcatgtgctttccatgccatgagggcattactgttctgttctttgaaattttctgaatattcttttctgcagacaaaatgggattgaggaaaatactctagacaaagtacaataaagcattttagagactaattataatttagtccagtaaaaggtagaaaatagataactacaaataatcctaaaacct

SEQ ID NO: 853799 - DNA, 614 bp, Homo sapiens
cacaacataccaatatctatgggatatagtaaaagcagtgctaagagagaagtttatagctataaatgcctacatcaaaaaagaggaaaaacttcaaataaacaatctaatgccgtatcttaaagaactrgaaaagcaagagaaaaccaagtccaaaatcagtgaagaaaagaaataataaagatctgagcagaaataaataaaattgaaaaccataaaaaagatcaatgtaacaaaaagttggtttttttataaagttaaacaaaattggcaaacctttagttagactaagaaaaaaagggagagcattcaaataaataaaaccagaaattgaaaaaagagacattacaactgaatctgcagaaattcaaaggatcattagtggctattatgagcaattatatgccaataaattggaaaatctagaagagatagtcaaattcctagatacatacaacctaccaaaattgaaccaagaagaaatctaaaacctgaacagaccaataacaaataacaaggtcaaagctgtcataaaatatctcccagtaaagaaaatcccaggacccaatgactttactgctgaattctaccaaacatttaaagaaaaactaaca

SEQ ID NO: 853800 - DNA, 601 bp, Homo sapiens
aacataaaacaatgacgccagaccaattcttgtgctccatcggyttggtgcgttataccagaagcgtattgtgacgcctaagtgcttgctcttttcattattttttgaacttctcaccactgatcatctcaggactgagactcccttagtgtgattcaccagccaaagacgactattcagactctgctgatagaggttcctggatgaaaattttttatctgtatgtgtcaatagagataaacctttggccccttggcagggaaagggcccaagaaaaatctgagatcttacaaacttggctggggaaattcagaataaaataaagtttcagtgtgtcttataaaacagaccctcccttagacttttccccaaaatcaatttcactggtgcttatggaaattttaatgacagttattcttgacaagaagccattgcttctgaaatctctgagctctgttttgatttttgacttgaattttttttttgcagtgttatcccttttgtatgctatttggtatttgatattctagttccaactcaactcacagcacattgggttgcaaattcacaggaaataacaattagttcttgaaatatacta

SEQ ID NO: 853801 - DNA, 588 bp, Homo sapiens
cggccttgaactaaattatcttaattgtcccttccatctctataaatctatgagtctctaacttgatgacaatttcccaaagttaaccaaagttatgcaattggttttcactcttgcaatcatttctaactaaaagactaatcaatataaaaagtacaatttaaagcaatctgccagatttaaggaagaaatagaagtgacatttactgagggccaatcttatgtcaagtactggaataaccactttatataagagatatatatagatagatagatagatagatagatagatagatagatagatagatatatggcaagaaccacctcaggtaagaatcatcatcatcatcaccatcaccatttcatagagaagaaatacttagagaagttaagtctctatctaaatatagttaattagtaaatagccaagataggagtcaaacccagtttatttcccaaagtcatgcacagaacctgggcactttactggctatagcattctgctttgaagtgtacactgttttgcttcacactcytcatactcttcaagtcatttaagttttctgagctttatttatattcattatt

SEQ ID NO: 853802 - DNA, 562 bp, Homo sapiens
atccgcccgcctcggtctcccaaagtgctgggattacaggcgtgagccactgcgcccggtcacctttctcttctaagaacctgaagagtttgtcctcatcccagttcattctcatgctagctcttctctctcctcacacatctgggtatcatccttgcttgttattcaggtctcacgttgcatgccatagggaagccccctaaccattcaacctaattatgtcctaccccacaccattctctctactaccatcatctctttttatgtccttcatagaacttcctgctatctgaaaatattttataacatttactagtgtattatctgtatatcctctctagaatgtaaattctaggaaagacaggatcatatctgctgtattcctagtacccaccactgcacctggcacatagtaggctcacaataagtatgtgttgagaatgattaatttacatctccttgaaagtgccaaagtagtgttgtctaatggagagttcaggaacaggaattgggattatagaggatattaaatttctactamtatcagggccataactttaat

SEQ ID NO: 853803 - DNA, 530 bp, Homo sapiens
ggatatggagtgctgactatactcaaacttatcaaatgttagagttcaagatctgttagtragaaactaatgctacttctagatacctaacttataataataatccaaaattaatatgtacactagtgttcaaaacagtattacttgtaaaactgaaaactggaaacaacctaaatagaagaataattaactactttgaacacatatacgtgttagattagatagtcattgaaagttacttgtagttgtcattaatgttttctaaattctccaaaatttctacaaatagcaaataatttttgtaaccaaaataaaattaatttaaagacaaaaggattacgttttttaaaaagaaaagctggttaccttggttcatacctaatgccactttctacttaatgcagacgtctcttttttgtctcctggaagcataatcacaaaaccttcacttacgtattttcttagagaaaaagagaacaatatttgattttttattaatttaaatgttaaccacagactgaatttgttca

SEQ ID NO: 853804 - DNA, 593 bp, Homo sapiens
tcatactcttaactcagtgttctttaaaccaaggattggccttcctgggccaagtaggttaccatcatgtctccactgtgaccttttgaggggccctccacctggttggaactttctttctctttttttttttttttttttttttttttgagatggagtctctctctgtcacctaggctgtaatacagtggcatgacctcggctcactgaaacctccgcctcccaggttcaagcgattctcctgcctcagcctcctgagtagctgggattacaggcgcccgccaccacgcctggctaatttttgtgtgtatagtagagatggggtttcaccgtgttggccaagctggtctcgaactccagacctcaagtgatcctcccaccttgtcctcccaaagtgctaagattacaggggtgagccaccgtgcccagtcagaactttatttctttaatcccgagactgcagtctgtgttaagtacatccccgtcagagaaattagggtatttaatctatttaatgccarattttaacccttggtcacagctgagttgcagatgaccataacagtcacaggtggcagtcctcacagggccct

SEQ ID NO: 853805 - DNA, 537 bp, Homo sapiens
cacgacaacgacacttgccaagagtcctacgatgctactcagcaatttctctccctgcttamcagaaaggaagaaagaaattccagaaaacaaattaagaaagaaaatgtgggtggaggacggatgacttactggtatctcctccacccatcctgtctcctgtccctactccgatcaccagtgagacgcctgaggtgtgggaggggctgtcaacaaaagcgtgagtgcctgcagatgtgggtgtgtgcctttgaaagtgagactgttggagaatggccctgtgctcaaaggagagagaatttgtcccccgggacagagagcatctgtaggaaattacaaacttgaggtcacgtgtatttaagagtgagaaactcagtgtggaagagacttcgacagagtgagtgatagagatgtgaatgtacccaggacagtgagcgtgtgagacagtgaagaaggcagggatgaatatgtgtcccagaaagacaccacatgtgtgactgtgtgtgtgaacaaacagagaaggaaaataaatgaaat

SEQ ID NO: 853806 - DNA, 537 bp, Homo sapiens
cacgacaacgacacttgccaagagtcctacgatgctactcagcaatttctctccctgcttaccagaaaggaagaaagaaattcmagaaaacaaattaagaaagaaaatgtgggtggaggacggatgacttactggtatctcctccacccatcctgtctcctgtccctactccgatcaccagtgagacgcctgaggtgtgggaggggctgtcaacaaaagcgtgagtgcctgcagatgtgggtgtgtgcctttgaaagtgagactgttggagaatggccctgtgctcaaaggagagagaatttgtcccccgggacagagagcatctgtaggaaattacaaacttgaggtcacgtgtatttaagagtgagaaactcagtgtggaagagacttcgacagagtgagtgatagagatgtgaatgtacccaggacagtgagcgtgtgagacagtgaagaaggcagggatgaatatgtgtcccagaaagacaccacatgtgtgactgtgtgtgtgaacaaacagagaaggaaaataaatgaaat

SEQ ID NO: 853807 - DNA, 602 bp, Homo sapiens
gcccacattgacaagaaatgccccttcactgggaatgtctccattcgagggtgggtcctctctggcgtggtgaccaagacgaagatgcrgaggatcattgtcatctgccgagactgcactacatctgcaagtacaaccgcttcaagaagggccacaagaacatgtccgtacaactgtccccctgcttcagggacgtccagatcagtgacatcgtcacagtgggcgagtgccagcccctgagcaagacggtgcgcttcgatgtgctcaaggtcaccaaggccgccagcaccaagaagcagttccaggagctctgaggctggacatcagcctgctccccacaacgaaataaatttattttctcattcccaggcaaaaaaccacaaaaaacaaaaaacgaaaaacaaaaccatcagatctcatgagacttactcactaccacgagatcagtatgggggaaaccgtccctatgattcaattatctcccactggagccctcctataacacgagggtattacgtgagctgtaattcaagatgagatttgggtggggacacagccaaaccatatcaaagtgatacactgtttaacttaatccattgtaa

SEQ ID NO: 853808 - DNA, 602 bp, Homo sapiens
gcccacattgacaagaaatgccccttcactgggaatgtctccattcgagggtgggtcctctctggcgtggtgaccaagacgaagatgcagaggatcattgtcatctgccgagactgcactacrtctgcaagtacaaccgcttcaagaagggccacaagaacatgtccgtacaactgtccccctgcttcagggacgtccagatcagtgacatcgtcacagtgggcgagtgccagcccctgagcaagacggtgcgcttcgatgtgctcaaggtcaccaaggccgccagcaccaagaagcagttccaggagctctgaggctggacatcagcctgctccccacaacgaaataaatttattttctcattcccaggcaaaaaaccacaaaaaacaaaaaacgaaaaacaaaaccatcagatctcatgagacttactcactaccacgagatcagtatgggggaaaccgtccctatgattcaattatctcccactggagccctcctataacacgagggtattacgtgagctgtaattcaagatgagatttgggtggggacacagccaaaccatatcaaagtgatacactgtttaacttaatccattgtaa

SEQ ID NO: 853809 - DNA, 662 bp, Homo sapiens
ttaaacatatgtacaggctgttgaagaaagggaaatgtcgttcattttggtcacaattttgtgaatgtagagtaaggactgtcgatttcttgcaaggctctcatttgaaaaaatggatgctgaaacccatctatattaggcaatcaatttcttcttttatttcaatgcaataggtgtttgtgaaagtcatctctattattatgatgtcaatatttgaccatgtttgacctgtgaaagagtggaaggttgaagtggttcagtgtcatattaacgtataaagaagaacgacatttgttccaaactaaaatggcttttaagctcccactttgctgagagtgggtgcttctggatgttgaagacagtaggtgacttaggggaagttgtgagaaatttcctgtgtgtttgctcttcagtcttgagtgatgggacaccatttccttagatttagccacaagatttcctggagtttcagagaaaatagaatttttttcatccttctctactttataggctcaagaatgtcaacccacccaggtggtgaaggaataaaytctgtaaatgatcatcacagactttttccagcttgacagacatttatcgagagtctcctaaaagcctcaccttaagaatataagcatcatgaatgtcataaggattatgat

SEQ ID NO: 853810 - DNA, 529 bp, Homo sapiens
gaggtcagttactttagaaggccaggaattacgggcagagcagacgccccaaggatccttctctcatgggccataaaattgtcagaaacacaaaaatactaaagcacaatattaacatgatcatraataaagattcaaagatgattgtgataaagaacagaatgccttataggaacttttgcagtctctataaaccagagcatcataaaatcataatctggcaataaacgtgagaggccacattcactctgaggttagaagtcacatgtcccttgtgatatcaaacctgcctataatttttatttttaaaatgttactataaatcagagcatcataaacctggcaataaacttgaggagccagttttcatgtgcgactaggagtcagaattccccagcaatagaaaaaagttatttttttataatttatattttttaaacataatacccaagtaattattatactgaatgtatttgacaaatgtctacatgaaacattagagttaaattactcatcagccttacattat

SEQ ID NO: 853811 - DNA, 640 bp, Homo sapiens
aagctacatggattaccaacttacttcctcatcatcaaaggctggctgacctctgacctggtaacttgggtttaaggacaaatctactctacaacaatgatatataatactttgccttttcctagatgattcagaaagtcttgctaaaggaaatttctttaactctaaagcccagatatctatatatgaatcaagaacccaaaaggtaaactgctacagatacttccatttttaatataaccttcctttaccccagattccaaactcagaatattaaccacagccaaaatgttctaactaatagcagattcctttggtctaatcgtccagatctgtattaattcttcacattaccatctgcctagatgtttataatactttctgtcagatatttatatgttctaactcagttatttgtttctttaaaaagatctaaagatactcatcatcactgcccacaaaacttattcatcaacttatttagaaaatgcttttaagggatggaggacacaaaggtaaggcagaaaaaaaggcatcactgttcggtaatatgcattttataacaactagaataatttgctgataattttttctakcaatttctttgtgtgttctcacttgtatcaactaagctgattca

SEQ ID NO: 853812 - DNA, 620 bp, Homo sapiens
tatatgcacctaacactggagctctttagtttataagacaattagtaataggcctaagaaatgagatagtaagacaataatagtgggggacttcaatactccactgacagcattagacaggtcatcaagacaaagtcaacaaagaaacagtgaatttaaactataccctggaacaaatggagttaacaaatacttatacaacattctacacaaccaccacagaatatacattctattcaacagtgcatgttctttctccaagatagaccatatgataggccacaaagtgaacctcagtaaatttaagaaaattgaaattatatcaagcactctctcacaccacagcgaaataaaactggaaatcaactccaaaaggagccttgaaaaccatgcaaatacgtggaaattaaataacttactcctgaatgatcattgggtcagaaatgaaatcaagatggaaattaaaaaattcttcttactgaacgacaatagtgacacacctttcaaaacctctgggatagcaaaggcagtgctaagaggaaagttaataacctaacttttaacttaaaagtcaacttaaragttaaaagttgatgcctacatcaaagactgtgaaagag

SEQ ID NO: 853813 - DNA, 619 bp, Homo sapiens
ttaattccttggggttggtctatctatatttgtatctgcaacattaagcataatgctttgcacaaaataagtaataaatgtagtgtctcttcatttgagtgtatgtatgtgtttaatttctttattatgcaacctgcacttttatagttatgtagcatgactataaacatgactttataaacatgtaacagggaaatactccactaggatcactttttgtcggtccatgccaccttagagaaagttatgtcaaatatctttcagaagatttggataaaaaaattggccataaagtttagtatctggttgagaagggaagagagaatatacctaacaaacaattcaccagtagcagcttctttgcacttcttttagtaggtaaagcacagtttggacaggtaaatctcaaggtgttctcccaggttttggtatatgtgctttattttttttcccacaaaaacagctatgagggagtcccaaaaactcacccagcccacaattattctcagtaaatacaagagtaggatgccaaccagaagttatggatgaacaaggcggytaatcgaggcagcaactgacaccataataaaacctctatagtaaaggggatggttgagct

SEQ ID NO: 853814 - DNA, 614 bp, Homo sapiens; identical to SEQ ID NO: 828972

SEQ ID NO: 853815 - DNA, 620 bp, Homo sapiens
tatatgcacctaacactggagctctttagtttataagacaattagtaataggcctaagaaatgagatagtaagacaataatagtgggggacttcaatactccactgacagcattagacaggtcatcaagacaaagtcaacaaagaaacagtgaatttaaactataccctggaacaaatggagttaacaaatacttatacaacattctacacaaccaccacagaatatacattctattcaacagtgcatgttctttctccaagatagaccatatgataggccacaaagtgaacctcagtaaatttaagaaaattgaaattatatcaagcactctctcacaccacagcgaaataaaactggaaatcaactccaaaaggagccttgaaaaccatgcaaatacgtggaaattaaataacttactcctgaatgatcattgggtcagaaatgaaatcaagatggaaattaaaaaattcttcttactgaacgacratagtgacacacctttcaaaacctctgggatagcaaaggcagtgctaagaggaaagttaataacctaacttttaacttaaaagtcaacttaaaagttaaaagttgatgcctacatcaaagactgtgaaagag

SEQ ID NO: 853816 - DNA, 628 bp, Homo sapiens
acataaatcaaagcatcacattgtacctcataaatatacacaattatttgtcaattaaaattwaaaaaattgatcaaaaaagtgttttaaaaagatgcctcaaagctgtgaaatgtggaataaagttaatagctccttttattttcctgtttccttttatagtttagtgacttagatgaattgactcaactattctgtgtttcatttttgcattgcatcacattgtattaagagaagaaatttacgtttgtactagaatgtaactttcttgccagtagccatttctatctgttattccgtgttctattctcagaataggcatatagtaggtgtttaataaacatttgttgaatgaacaaaacaaaaaggaagaaatactctgctgtagtctattaagttcattatcctggactatgaaattactgtcaatgcacaatttaaattgtctacttcattaaaatttatttgctattatacactgttatcaggcctgctaaataacatatgaaactaatcagtgaaaatactacattatgaagtctcttgccagagggaaactgatcattttaaaagggattttgtagtgttgctatggccacaaatagatgtatagatgatagatgataga

SEQ ID NO: 853817 - DNA, 635 bp, Homo sapiens
tctcaacaccttcacctgtcagcatctccacagtccctgattctccaaacagactggtccaacagcagttctgatcatgcaatatgctactctatgtagagggcctcactacattctgctgcctcttctccagagccagaatgcaagagtgaatatcctggctctagtactctgtagctatgtggccttgagcaatctactcaactactcttcatctcaatttcctcatcctataaaaattactgaggacaataatagtgcctatgccatagggttgatgggggatcaaatgaacaaatataggtaatctgtttacagcacctggcacatagtaagcactttttacctacgattgttcttattattacttagaatgtcactttcactacatccttccctcttcaggaaagagtaggggctttagagtcggacaaaccttagtccaaatgttggttctcctacttattagtggtgttatttctgactagtagtcacctaatgtctatgagtctcactttgttcattggtagcaacatttaactcayaggattgttagccgaattcaattcagtgagattatacatgttcatgtgcccattcttgtacactcctagtaaacattagtttcctccaca

SEQ ID NO: 853818 - DNA, 548 bp, Homo sapiens
gtaggatgatcacaaagaaagcaagtaaaattaaatgaaactacaaggtatttaattttaaaaggaaactaagccacatgtcatcataaaaatggctggattcaaataagactgtaggagccacagtgaatcacaagttaaaaatgagttgaaaatgaaatttcctgttgttataagatgctgtgtaagaatggcagagtataattgtccttttatagtcataattgtaaaactattataaaattctgtggcatttttgaggtccatttttattttaagagcaccagaatatatagggttttaagaagaacgctattaaaatgctgcaaatggaacccatgaggaaatcttattccctttttcccttttgctttttttgtttttctggaagaacaaggtgcatatacagaaaactgtcatgttttaacaaagaaaacattcaaaccaaaaagaacaaccattgccttaaattgaaacaaaarccttggtattgggagttcataaatgaaaaacatggcaaatggttattaacattcactagattttca

SEQ ID NO: 853819 - DNA, 560 bp, Homo sapiens
ttttgtagtgtcaaatctgctgttaatcctatccgtgtattttttacttcagaaattgtgtttttatttttaaatttttttatttgcattttttgtattttcagtatctctaattgacatgtttaatagttcctcttattttttcgatgtatggaatattttaagttttaatgtcaaatgttactaatgctatcatttgttttggttctagggctagaaccaaaaaaaattccatacgttgaaaaaatttatatatatatatatatatttatatatatatatataactcctttgtgagtcatattttcctgattctttgacatcctggtaattttttattgaatgccattcattgccattattaacttgatgggtgctagatatttttgtcttcatagaagctttgttgtggaatacaggtcagttcattggaagcagtctgatctttttgagttttacttttaagcattgttaggtgggaccacagcaacatttaktgtggagctaactcaggccctctactaagcaaaagccttctgagtattctccttatgtcgtat

SEQ ID NO: 853820 - DNA, 653 bp, Homo sapiens
gaggggactaattggcattggagaatcctaaaagtaggaaggtgagaaagggatgtttgctgaaaaattacctattacatacaatattcactattgccgcaattcacacactgaaagcacaaaaytcaaacatatgcaaacataaaatgcaattataaaatgaaaaagagcaggagcctctatttcttcatatcagataaaacaaactgtaaaccaacaacgatcagaaaggagaaagaagggacttacacaatgatgaagggtttaattaaataagatgactgagctattcataatatatacacacacaacattagagcacctagattcataaaacaagtccttcttgatctacaaaaagacttaaacagccacacaacaataatgggagactttaacaccccactaacaatgttagacaaaacatcaaggcaaaaaacaaaaattctggacttaaacttgaaactcaaccggttggacctaatagaatactccacccaataaccgcagaatatacattcttctcatctgcacatggaacatattttaagattgaccacatgctcactcatacagcaaatcttaatgaattcaaaaaaattaaaattccaagtatactttcagaccacagtgcattaaaaatagaaatcaac

SEQ ID NO: 853821 - DNA, 550 bp, Homo sapiens
tgatcagaaactcaaaagaatgcgatcgtttgtctcttatctacctatgacctggaagccccctccctgcttcaagttgtcccgcctttccggaccgaaccaatgtacatmttacatatattggttgatgtctcatgtcaccctaaaatgtataaaaccaagctgtgcccctaccaccttgggcacatgttgtcaggacctcctgaggctgtgtcacaggtgcgtccttaaccttggcaaaatcaactttctaaattgaccgggacctgtctcagacatttgaggttcacaccctttaggaccagcaggaaggcagactgtcctggaaggaggaagaaagaccacttctccagccctgctccccacaccctaaagagagggccacccgcccacctgtcacccccctgtcagatctgcctcatgcctgagttgtttctaagtcacctctgggcccagggtaggagcagaagagctagtcatcttcagattcacctgtttcttccttggcacctagtggatgcttgataaatgatcatttataaaggaaggg

SEQ ID NO: 853822 - DNA, 469 bp, Homo sapiens
agggtgactgcgtctgttgtatgtgtggttcaggatcaatgggttatgaggaaaggtggagtctgaggacygcttctctggctttttcacttacgggatttccctgccttggcattcaaatcctgttcccagcctttcccgtcgtttcccttcccaacaaaggctgcaggctcttccccatgggttctctacctgcctgtccctgtgctcactgtgtggactgtgcttggtctaaactaaaagcccggacatgggaactcacttgcgtagctcctatgcagctcctccagagggtggcctgaccaggatcctgtctgcttgattgtgccacatttgcttcgggtggaggatgctcaccttctgtggtaggtgcaggtgttattattttctgcagtgggggagggggtcacctggtagagtcttagtccagaactaagaccagaagtagaaaacatcaagatctaaacat

SEQ ID NO: 853823 - DNA, 588 bp, Homo sapiens
taaagcaattattaatagacctaacctaatggaatgtgcagaatacacattattctgcacatggctcattctcaagcatataccatatgttaggtcacaaaacaagtcttaaaaaattaaaaaattgaaataatatcaagcatcttctctgactagaaaggaataaaactagatacctatggctgggcgtggtggctcatgcctgtaatctcagcactttgggaggccaaggcaggcggatcacgaggtcaggagattgagaccatcctggctaacacggtgcaatgaagtccatacgaatttagaagtcaaaattgtgtcaattatcttttctaaccacagtggaataaaactagaaatcagtaacaggaggaatttggaaactgtacaaatacgtgaaaattaaacaacatgttcctgaataacaaatgggtcaatgaagaaatttaaaaagaaatttaaaactttattgagaaaatgtaaaaataaatttaaaactaaaaatgtttccatatgaaaatggmaacacaacattccaaaacccatgagatacagcaaaagttgttaaaaagcagggggacaaagtta

SEQ ID NO: 853824 - DNA, 582 bp, Homo sapiens
gccgagaccagcggatcacctgaggttagaagtttgagaccagcctggccaacatggtgaaaccccgtctgtactgaaaatgcaaaaattagccaggtgtggtggcaggcgcatctaatcccagctactcaggacgctggggcaggagaatcacttgaacctgggaggcagaagctgcagtgagcgaagaccatgccactgcacttcagcctgggcaacagagcaagattccgtctcaaaaaactaaactaaaataaaataaaaaacctttatcagaattatgatttgcaaatatttactcccagcctgtcgcttatctttctcatttacttaatagtgactttgaaagtataaaagtgtgtaatttttattaactccaatttattgatttttttcatttatgagttatgcttttaatgttgtatctgagaactctgcttaactggagatcacgaagagtttstcctatgctttcttctaaaagctttatagttttatcacttaagtttaggtctacaatccattttgaattaatttttgtgtgttgtataagttaaggatccaaattcacctttgtggttg

SEQ ID NO: 853825 - DNA, 627 bp, Homo sapiens
ggcactttgtaattcaatcttttaaaactgagacttgtggactaacatgttttattctgaagaatgttccatgtgaacctgagatatcttggaatgtctttttccacttgctatggtttgaatgtgtgccctccaaaattcagatatttaaacttaatggccaacatgatggtattaagaggtgggacttttaagaggtggttaagtcttttttttttttttttttttgaggcggagtcttgctctgtcgcccaggctggagtgcagtggcgcaatctcggcttactgcaagctccgcctcccaggttcacgccattctcccatctcagcctcccaagtagctgggactacaggcgcccgccagcacggccggctaatcttgtttttgtatttttagtaaagaccgcgtttcaccgtgtctctactaggaccaggatggtctctatctcctgaccttgtgatccacccgcctcggccttccaaagtgctgggattacaggcgtgagccactgcgcccagccagtaagargtggttaagtcttgagggctcctcccctcatgaatgagattaggtgcccttaacttagggcctgatgaggaatttcattcctttttgcccttttacct

SEQ ID NO: 853826 - DNA, 527 bp, Homo sapiens
agaggttgcagtgaaccaaaatagtgccattgcactccagcctgggcgacagagtgaaactccatctcaaataataaaaataaaaagtaaatacagatacatactacaacatagatcaacctttgyttaacaggttgctatgaaaaaactatatagatgaaccttaaaaacatgctaagtgaaagcagccagtcacaaaataccgcatattggctgggcacagtgactaatgcctataatcccagcactttgggaggaggctgaggtgggcggaacactcgagcccaggagttcgagaccagcctgggcaacatggtgaaacctgtctttgcaaagaaaaaaaaaaaaaatccctccaaaattagccaggcttggtggcacatgcctgtagtcccagctactccagaggctgaggtgggaggattacttaagctcaggaggcagaggctgcagtgagccaagattgcaccactgcactccagcctgggcaccagaccaagactgtgtcagaaaaaaaaaatcacata

SEQ ID NO: 853827 - DNA, 511 bp, Homo sapiens
tgaaagacaccattcttaggcygggtgtggtggctcacgcctgtaatcccagcactttgggaggccaaggtgggtggatcatttgaggtcgggggtttgagaccagcctggccaatatagtgaaaccccatctctactaaaaatacaaaaattagccaggtgtggtggcaggtgcctgtagtcccagctacttgggggctgaggcaggataattgcttgaacccgggaggcggaggttgcagtgagccgagatcacgccactgcactccagcctgggtgacagagtataagactcagtcaaaaaaaaaaaaaatttgtccaggggagattcctattaaagatctatataggtggtcacggagtttgtccagggaatgaatcatttaaggatctctttattagttggggtttttgacattcagaatctttgaagacacaggtagtagggagggattgaattcctcatcagttaggtccctcatgaggcccattgctggtaaaatctttgtaa

SEQ ID NO: 853828 - DNA, 629 bp, Homo sapiens
acccctcgctggatgtgttgaagaaaagatgctgtttttctgctggggttgctaagtacaaggatcatctttctgaaaacaaagtcagtacagaagaaagccaagccaaaagatggagaaaaaggctccttgaaacagtgtttgagtgcctggttccagacaagcctaaagctacactgattcatggaactttcaattaggtgctatacatctttttaattttttcctaagttggtttgagtttaattttgttacccacaaccaaagaatttttttttgtttttgtttttgttgttttttgagatggagtcttgctttgtcacctaggctggagtgcagtggtatgatctcggctcactgcaacctccacctcccaggttcaagagattctcctgcctcagccccctgagcagctgggattacaggcacccgccaccacgcccagctaatttttgtatttttagtagagattgggcttcatcatgttggccaggctggccttgaactcctgacctcaagtgatctgcccactttgggctcccgaagtgctgggattacaggcatgagccactgtgccyggccaagaaattttaaaataccaatcatgagatgaagtaatatatgaaaag

SEQ ID NO: 853829 - DNA, 601 bp, Homo sapiens
ccagtcatcgattgatggacatttgggtggtttgtactaggaatactacgtataggttttaacagtagaattgctgagtcgtaagaacctatcttgagaaaatgtcaataggttttccaaagcagctgcctcattttataatcacagcagccaagtaaatagtttcaacttctccacatccgtgccaacacttgttacattcttttttattttagccatcttagtgtgaagtggtatctcactcaaaataatgtatttcctttgtgatttctgccccaacctatggcttacatagaagtgcattctttaatttccaaatcttcagggtttttctagggttattttgatattagttaacattactttctaatttagttccattgtgatcagagaacattgtaagatctaattcttttgaaacttacatattttgaaaaattttatatcagtggaataatttagtatgtagtgttktgaaactggcttctttcacttagcataatgcattttaaattcttccatgttttgtatatatcagtagttcctttgtattgctgaatagttttccatcatgtaaatatactggaattcgtttctccat

SEQ ID NO: 853830 - DNA, 613 bp, Homo sapiens
atgaatctcattttctagccaccataggtttttccctgtgtgtgtggaaagatgcaaagccaactggagcaaaccatccatgctgtactggggctggaagagttcttcatggcaatcagtagattcagggcaggggaccctggccctacacaaagcatttcttcagaaacaacctccctctgagtgtctttctcaaaggcaaaggttggaagggcaagaacccacgtacttactacatcccctttttgcctctaaacattcatgaggacttttatttaaaagaatttggaattgaaggcaggtattcaacccaaaatgtgtgcatgaatgctcataataacactattcacaagacccaaaaggtgggaaccaaagggttcatcacctgatgaagggatcaacagtgtggtgtgtcggtaggacagaataatggccatgaacaggaataacgtcccagtgcatgcacatcatgggtaagcctcggaaacatcatgctgagtgcagtaagctggaggcaaggggccacataatgcacgatttcatttatagcaaatgtccagaataggcaaagctttagagtcagagagtarattagtagttgccaatggctaag

SEQ ID NO: 853831 - DNA, 641 bp, Homo sapiens
ccacgttcaaatataggtcagaaaattattgaggctttatttactctctcttttcagggctgctggctgacatacacccccttctgctgaaaggtgttaaagaaatatgcccagagcatagtaggccctcattgcattctcattgacttgatgtcagagaaaaaaaaaattagcattttcaaaatttgctgttgaaaatttgagacccaaaaaagtgtatatagatcaagttgttgttttacagagcaatggtgaggggagggcagaatgctgtaagcatcaaaccacatgcggtcaattcatctataatgatggttaccaatttttacggacttccttctgcctccacaggcactgcttcatgtgatatgcacaaaactctgtgagttgttcactttcccttcccctcgttcattcatccatccaacaaatatttactgagcatctgctatgtgcccatgcgtgggaacagcacattgatggagacaaactgacccacggccacacggagcattatcttggctcaaagagctgcaggctgtgatcttaggcctcttccagctccctgttggtggttatatgatcygcaagctaagaatggtttttacattttttgatggttgaagaaagatcaaagaaga

SEQ ID NO: 853832 - DNA, 556 bp, Homo sapiens
cacagggctttttatttaaccaggttaaacagaaaattaaactggttcttatggacattgccagtctacatggggaagcaccttttcagattacatggccctttgacattaaaactatgataattctttgaaaattttcaacgaccagtggcatagaatggatggtaatgcaccgaggttatggggatggggatgggacgaggttatggggatggggatgggatgaggttatgggaatggggatgggatgaggttatgggaatggggatgggatgagttatggggatgaggatgggatgaggttatggggatggggattcactgaggttatggggatgggatgaggtgatggggatgggatgaggttatggaaatggaaatagaatgaggttatggggtgggcatgtgcagaggttatgcggatgagttgaggttatggggatggggatgagataaggttatggggatgagataaggttatggtgatggggaagtgctgaggytatgggaatggagatgtgctgaggttatgcaggtggggacaggttgaggttat

SEQ ID NO: 853833 - DNA, 630 bp, Homo sapiens
gattcagacaacggtaatttctgtgakgggaaaggcatctcatgtgaggttcttggggcgccttcctggatttctaagggatgagctcctggatagatcaagaagacctaaagggccgggcacagtagctcatgcctgtaatcccagcactttgggaggccgaggcaggcagatcacttgaggcctggagttcatgaccagcctgggcaacatggtgaaaccccgtctctactaaaaatacagaaaaattagctggatgtgatggtgcatgcctgtgatcccagctactctggaggctgaggcaggaggatcacttgagtttgggaggtcgaggctgcagtgagttgtgattgcaccactgcactacagcctgggcaatgggagttagaccttgtcttaaaaaaaaaaaaagagagacctgggcagcaggaccttgtcacctcattcctctgcagatgggggttgggggagattctcaagtgtttctcctgtctgagggtcttctcatttggagatttgaagaaagtgctaatgagaaaggttgccttgcatttgtgaagcttggggaagtcatcctaagggggccacagcgtgcttaatttattccaattccgtaatatataaattata

SEQ ID NO: 853834 - DNA, 635 bp, Homo sapiens
ccagcatctgagcttctacacgtgatgggcgggctcaggagaggacagggagtcgtggtggaagttccacagctggccgcgtgggggggcccttgcaccgcactgccgcctcctgactgcccckatccccgcagcccctgtgccggatttcatttccctcctctctcccagggtacctggccccagcactctcccatctgttcttcaggaaccgactcctctccagttgcaacaccagggagaaaggggcctccacatgcccaagtacccctgcaggatgaagggcaggccggcccttgatgtgccatttctgaataatagtcactgccgccgagtctaggatgtcctgttctaactcagccctgcctcggatgcaccaccgatctgtgcagagtgggtgtgggagtgtgggtgagggtcgaaatgccaaaggtctactttccagaatcaagtgccttctgcaaatcatgttggaaaagtccaaacctggagatgtccctgtgcctccgcccctacccaccccttttccttcagctgtgttaggaaggagaagttttcagaaccctctaggctggtggctttcaaacttcagaccatgatctgcagcaagaaacgtgccttccatcataaatcag

SEQ ID NO: 853835 - DNA, 521 bp, Homo sapiens
aagtggggggaccaggggggtggcacagggagggcaccaaggcaggcagcactgtgggctgcgggtcagcgtgtggacatgtgtgcgctgccctggccgtggcatgttgctcaccaaggcggggaacacacccagcccccacaggtcaggtgctttgcttctcctccctcctccctcctccttcctccctcctcttcctccttctcctccctctaggatctcaaagtacaggggtgggaggagaggctccgaggccctgctgtccccatgccttccttgtgggactcctgggccactgtgctccccgctgaagtcgagtggaggaggtggggagcgcttgggtcaggccctctggcctgcgcatgctgtgtctcacggtggctgatgttccgtaccgggctgatattccgttccggctggtgcagaggatgctgcgggaggccaagcctgmtcgtctggcccggccagatctgcagtgcagagcagcccccaaaggtccgctgtagtgaagggagggtact

SEQ ID NO: 853836 - DNA, 594 bp, Homo sapiens
cgtaccagaacacagggctgctgcactctctgccagggttcctggggcaggatgcccccaagggcctccaaggcattttgagtgaactggtcaacggacatgtgtcacccaggaggttaacccatgctcctgcccaggacttaaggtcctactgctccctggtttaagctcttgttgccaaccttctggctcaaaacagaactcaggaagaaaaacattttgaaaaaaggtagatggggcagggtgcggtggctcacgcctgtaatcccagcactttgggaggccgaagtgagcggatcacttgaagtcaggattttgagaccagcctggccaacatggtgaaaacccatttctactaaaaatgcaaaaaattagccgggcatggtgatgcgcgcctgtactccgagctacttgggaggctgaggcgggagaattgctggaacccaggaggcggaggttgcagtgagccgagatcatgccactgcacyccagcctggtgacagagcagactctgtctaaaaaaaaaaaaaaggtggatgggtgcaggagaagagagctcattctgattcccacagcacacccaacaggaagcca

SEQ ID NO: 853837 - DNA, 628 bp, Homo sapiens
atgctaaatgacaagttaatgggtgcagcacaccagcatgtcacatgtatacayacgtaactaacctgcagattgtgcacatgtaccctaatacttaaagtataataataataaaataaaaaataaataaacaaataataataataaaaataaaatattggttgatggaccgatggccctttagtacaaagaaaagaactacatttttttctaagtatataataaaaatatttatttgacaaaaaaaagaaaagaaatctctctacagttatttattaatttcaaagggggaaaacagtaactttaagtggataatctggaagacaccagcttaagccatgtgccttctgacacaatgcactgagacagatacaatattgcttctgtaatgttcctactactgaaaataaatgaccctaatcattaggtgacaccaacctaacttaaatttaaggactttctacaaaataacaggctgtactcttttaaatatgccagcatccttcaagacaaagaaaggtaaccccagattaagagaaattgaaaagacatgacagcaaaatgcgatgtgtgatctcagtttggatggtggaaaggatggactattgtttagataacaataacatgt

SEQ ID NO: 853838 - DNA, 381 bp, Homo sapiens
accaggctggccaacatggtgaaaccctgtctccaataaaaatacaaaaattagccagkcatgacggcacactcctgtaatcccagccagtcaggtggctgagccaggagagtcgcttgaacccaggaggcggaggttgcagtgagccaagatcatgccactgcactccagcctgggagacagagtgagagtcagtctccaaaaaaaaaaaaaaagtgaactcataaatagacagtgagcaatctggatcccattcctttgggaaatgttcttcatcctattgcaattgtgattttgtctcaagttttcctatgaacatccagacagccatataatcaacagggcaagagaaaatgggcattaaatccaactggaggcatt

SEQ ID NO: 853839 - DNA, 682 bp, Homo sapiens
actgtgcaaggagctgaggactagaagaaggaaaaatggggatcctgatttcaatgaggtaataggagaagcagaaaattaaggaattccatagtacagtgatgagtgttacatacttayaagagtgctatggggatctaaagaacgagcaacttcctgaaggagggtagaacaaatggggaatattctaggtgagctttgacagatgagtaggtaaacaagggggaaggacatcccaggcaggggaaatagcttgtacaagggaccaagagggcattggcatggcatgctcaggttactgtaagtttctcgtatgtcaagctataggattaacatggggtaaggtgctgttttactcagggcatgatggtaccagggtcaggggcttccagcctggctaagaacctcagtttgtactggttaagagacatcatcagtggatgccatccctgagaggttctgacagcagttagagttaattgtagcatttagtcacaaacaccagatttgtcacaaacaccagtcaattttctgtggtcacagaccacatttcagagaccctgaaatcttcctttcatctcacaattgagcttcttgcgaaagtaatctacacttaaaatcttcttcgtctccatttaatcctctaccacttatgttgataacatagtggttgttcctgcta

SEQ ID NO: 853840 - DNA, 488 bp, Homo sapiens
gagtatgtgcacataagttgtagtttattgttatatatatatatatttagctgtgttccatatagaggacaatcaataaatataatttctcatgcctgtgttcctcagatgtctggagtgtggtaaggacatgtcacaaggttaaaattcagaatggaaacctcagaacctgtcattctctgcagatctgtaacatctcagggaagcagaaaatccagcatttagagctctgtttctttgttcttttgatgaaacacttattgttcatggaaaaacatctatttttgttttcatttcgctcttgtctgtctacagagatactttcaggcagaggcaagatttcgttatttcagaracctgtgagattctcagtaggcaaacacatctttaaaagacaatatttcagttttgcgtgttaatatattgcagaaaaagaaaattcaatgataaatatatttcattgaactcaaaggtttgtaaatcagatt

SEQ ID NO: 853841 - DNA, 648 bp, Homo sapiens
gaagtctatttgaccttccccagctcaaggcacgtcgtctccatggagcaacaaagctagcatttaatgaactgtactatgtccaggcactgtgctgcatgctttacacagacaatattcagtttttctttatacaaatgaggaaaacagtaggctcagagaggcagggtaatttgtttaaggttaccagctaatcgggcccaggaacagaattggagtctataactgtttgactgtaaagtataagtcacagttgagggagtactggtcggaagtataccagtgccatttaggaagatgagtctccaaaagtgatttttgtcttagttattcacacacacacacacacacatatgtatatatgtatttcagttttcttactcttgtcagacttgcaacagaatcaacatttaggttttaagacaggttgtcaatttagtctgtaacatttttaattttctatactcctctggggtgtcagtcatctgtcttgccataggagagctttgtctttcacttcagaatctattggatttcctatggtgatgttataaacaatatcagtaattcataactacaaagcacttcaaaacaccttgytacttttggttagacttagaacatctcaaagtgcatgcagagaatttt

SEQ ID NO: 853842 - DNA, 595 bp, Homo sapiens
ttccccctaattctagccccaagagcctaggcctggccttaatcaaaataaaatagctacagttggaagcagaagggatatttttgagtctctggacttaaatttcagggttcaaaatacatatgataaaagacaacacagagagtggtatcacatattttgatccaattctcattttttgtgttctcctgatttttctctctgctttacaataaatttaaaaagataaatttttaccttgaggaattatattatactgagtacttcataaaaactttgtcagccctaaacaattaaaaaaatgcctctcctcagctttcatttttcctccctcccatcaaagaaacaggagttaggcatagcatgctgttcttcctattaaactgccaacttttggttaaaaagcagatgaagacttccatcaggctgctaatcttttttcttgagttatttataccttgaacaagttccacataataaattatctattatgccttcactgtgggcttgaattttattattctcattragatgtcatttttagagctcttcattcatttaaattttttttttaaaaattgcataaaagcctagg

SEQ ID NO: 853843 - DNA, 517 bp, Homo sapiens
ccttccttccatcctgggcttttgaacacttccatatcctgaattccttttctcaaaatgcttccaggaaaatgtatcggtcctttatgatttggcttccagctccttcttcagcctcatttcttgctgtgactccctctgaccacattggcctttttcagttccttagctagcccccctctttcctgcctcagggcctttgcacacatgccatttgttcatttgttttctgcctgtcatgactctaccagcaactctcttaatgacctcaaattcatcctgcagatctccgttttcctggcttcctggaatactgctaatttctagacataaatacagtttccaaatctatayttgtgattatattattgtatatcttccccactagacaggaacctccatgttggtgcctgtcttggttcacaattacatacatagggcttatcatagcttccgccccacgctgggtactaaatatttattcattgttgaatgaatccatgaatgaatggatcaa

SEQ ID NO: 853844 - DNA, 517 bp, Homo sapiens
ccttccttccatcctgggcttttgaacacttccatatcctgaattccttttctcaaaatgcttccaggaaaatgtatcggtcctttatgatttggcttccagctccttcttcagcctcatttcttgctgtgactccctctgaccacattggcctttttcagttccttagctagcccccctctttcctgcctcagggcctttgcacacatgccatttgttcatttgttttctgcctgtcatgactctaccagcaactctcttaatgacctcaaattcatcctgcagatctccgttttcctggcttcctggaatactgctaatttctagacataaatacagtttccaaatctatattkgtgattatattattgtatatcttccccactagacaggaacctccatgttggtgcctgtcttggttcacaattacatacatagggcttatcatagcttccgccccacgctgggtactaaatatttattcattgttgaatgaatccatgaatgaatggatcaa

SEQ ID NO: 853845 - DNA, 602 bp, Homo sapiens
gagggtgcgggcaggtgtgtgtagggtagatgtctataccaacaggcrtggactagcttggagataaagggtatggaataatcttgagcccccccaagtttgcatttgaagagggtagggcagggaaggaacaggaagatatccaactgtggatagcctcagggggttcacagcggggccagacacagagagccggactcactccatggcgctggctaagatgaagaatgaatttgtcaacaaaacaaaacaaaacaggagccttccaagtgcctccccactccgtccccactcctcttctttttagtgcttctcatttccagaaattagattttacaggccaaaagctttgttctttcatggaggaccaggaactcacactaatacgaagatttgcttatggaccaagagctcgccacatgccaggaactgggccaagggctttaacgcattatcttgtttcattctcacaactcaagggaagtgagcgatgcatcccttgttgaaggaaattgaggcttagattaggtcagcacattcgtcagaagggtgtttcggctgcagtctccccagggaaagattttctttcagttcttctcaat

SEQ ID NO: 853846 - DNA, 556 bp, Homo sapiens
ctgttccctttcctgtcattcatgggttcaatccatcatttcagacactcttcgggagcaaaggaatcatcactttctttgaaatcaacatccaacttttggaagagttattcttttctcctcagttagggatccacattattctacatatagaataatctttttaagtgaagcttattgccagaacaccctcagatttcaacaaaggagaagaaatatgtgaaggcatgcctacagagttaaaaacagagccctgtccttcattcccccatggggctgaaatgctctcaatctcctgaaaaaaaaatatgtaagcagagccactgacctgtgttctgcactgccatgaagataaacaataattgggttcccatcacgaagggctgcttcataccagcaacagtccttccccttggcatcttccccccggcagctggggactgtgtgcctgaagagcaagggaggtttaaacaaatgtagaaagaggaattctccatcctttccaaaggcygaaagtctccttatgatatatatacatatattttaattttttatc

SEQ ID NO: 853847 - DNA, 570 bp, Homo sapiens
ctcctttaacatttctttgaatggcaaaacaataattacaacattattcatctacctaacattgttgttagccactaaaaaaacrctttgtttcttgattaaaggaaaaacattacctacaaatatatggtctgagttataacctcacagagtggaatagtacacagttggtagctgctgctgctctccgttgattccagtttctacacattcctctttctgtcacgggatccttggggtgtcacttctccagccaaaaacctctgtggctggcagcgccttctgcctgagtactgcctgcacctactgggctcattctgcccactcggcctggcaggctgcactcggctcacactaccagcctggatcccacacctgctaagggtgagtcaggtgtggagtggcaaggggtgtgtgggcaagtgagctctgggtctggccactgcacacagccaggcaggccagctgctgtggcagggcaggcagctccaggcaccagcaaagttgttggctctgtaagaggctatggctggaccagatgtactgcacacagcttccactacaggaaca

SEQ ID NO: 853848 - DNA, 636 bp, Homo sapiens
ggctcaagggatcctcctgactcagcctcttgagcagctgggactacaggcacataccaccactactggctaattttaaaattttttgtagggatggaatcttgctatgttgcccagtctggtcttgaactcctggtctcaagggatcttcctgcctcgggcttccaaaatgctgggattaaaggcgtgaaccaccagacccagctggtttttttgttttgttttttacaccttaacatctctcaaatcaagacacatcttacaacacatgtcaaaagaaactctttaggctgggagcggtggtggctcacgcctgtaatctcagcactttgggaggccaaggcgggtggatcacttgaggtcaggagttcgagaccagcctagccaacatggtgaaaccccccgtctctactaaaaatacaaaaattagccgagtgtgatggtgcatgcctgtaatcccagctactcagaaggctgaggcgggagaatcgcttgaatccgggaggtggagattgcagtgagctgagaytgtgccactgcactccagcctggtgacaaagcgagactctgtcgcagaaaaaaaaaaaaagaaagaaagacactcttcagccattgatagagtggtggttctcagcc

SEQ ID NO: 853849 - DNA, 644 bp, Homo sapiens
tcaagtgctacagcagctccccaagggagatagggaaaaagtaaaccatcaggagaaaatcaaaacactggttaatatrtcaaaatataatcccaacccagaagtttccatcttaataatgcttttaccatttcctggcacttctccactcatatctcttttgagcttagccatctttttttttttttttttttttgagacagagtctcactttgttgcctgggttggagtaagtggtgcgatctcagctcactgcaacctccgtctccagggtacaagcgattctcctgcctcagcctcccgagtagctgggattacaggcgcccgccactatgcccagcgaattttttgtatttttagtagagatggggtttcaccatgttggccaagctggtctcgaactcctgacctcgtgattcacctgctttggcctcccaaagtgctgggataacaggcgtgagccaccgcacccagccgaacttagccattttatggactgagaaggacagagatctttgtccttactttgcagaagttgaaatcaaggcactaagtgattctgcaatctcagcatattccacaataggcatatgaaggctgtcagtgatttgagggagaggaagaagacaggctggaagtatttc

SEQ ID NO: 853850 - DNA, 538 bp, Homo sapiens
taacttacttggtaatatccagtgttgtagtggagcaggttcatatggattttcaagagcccattacgtacatttctctcccctttcacaatcagtgaccttacatttatagcttgacattggccgtggtgggaatatttacaccacagaaatcagcaaatgcttcaaatcagagttttaccacccctggagaactgggttgttaaatgtactattatgtccctagtaatattctaagaagtgaagattagaacatataactttgtaaattacattttgaagcaagcacattcttctaggtgtgtttccagagatcctacttctactcttttacagtattaaaaactggagctgatgatcctcctgagttctatttcgaaacttctgtcttttctaaatcaatttcaggatatactggacaacaaagaaagcccaagcaatttgtcttcattcaggcctrtaaggatcacacctctctagcagtgaaagctacctcttcctgtagtttcatcgaatcctttttatttaaatagtttgt

SEQ ID NO: 853851 - DNA, 654 bp, Homo sapiens
acaaggttgctggatagaatcaatgcttttagaagactgattccttgatgaagaggttatagtgtaatggttccatggcagtatcactgggaaaatttttgcatttgttcagccacagtgtttaactttgaagtgaacatggatttttatgcttactttaagtcttgtttcaagttataataccaaagaacagatatctctggattctaagttatttgtattttttctccacagccctgggagtgtatcttatgaagttcagaataagttagctttttcagtaatttctttctaaggttgtctctggcttttagattccctttagatttacatttcactctccttagcccccagcccaacttggtataattccttcctttacgtttccttgtcatggacatgagataaaataaatgacctcttcaccctccttcacttccattttctttcttggcttctatcattctaattccactatctcattcttctatatattcgtgatgacagagttcaaataatgggaagacaggtatttggccatgtaaaggctctctttcttgtattagaagtgcctttgaggttgacamttcaagtcaaagctctgtagtcttttgatattgaataacaaattgaaaagaggtcaaaggataaaaa

SEQ ID NO: 853852 - DNA, 567 bp, Homo sapiens
ccttttacttcttttgaaattaatacattttattatartgtagtagtatcttttaaaacttcagttaacaatatgtttatcaaattgtttaactttttttcttacatttgtcatttacaatttgcacgatagctaatgcttttacgtttttgttttaaaaactatcttgacttgtggctactaaaattcttggagttatggacctgatatgagccatgatgtcctttgtttgatgcttgaaactttctgcaatattccagacaagtggttattcaggtttgccagtataccttaaaggtgggtggattattacctcaacaatgcagtctaagttatatggattaatttcattcattgtacatacatattcattgaaaaaatactttctgtcagcttgtcccaattgtcttcaatgatagataaagtttaaaacctcatccatggctggtggagccaagacggccgaataggaacagctccagtgtacagttcccagtgtgagcgatgcagaagacaggtgatttctgcatttccaactgaggtaccgcattcatctcactggggagt

SEQ ID NO: 853853 - DNA, 609 bp, Homo sapiens
cgagagatcagctgttagtctgatgggcttccctttgtaggtaatcgatctttctctctggctgaccttaagattttttgctttgtttcaactttggtgtatctgacaattatgtgtcttgcagttgctcttcttgagaagtgtttttgtggcattctctgtatttcctgaatttgaatgttggcctgcctcgctaggttggggaagttcttctggatgttatcctgaagagtgttttccaacttagttgcattctccctgtcactttcaggtacaccaatcaggcgtagatttggtcttttcacatagtcccatatttcttggaggctttgtttgtgtctttttactcttttttctctaaactaaacttctcttctcacttcatttcgttcattttatcttccatcactgataccctttcttccatttgatcaaatctgctactgaagcttgtgtatgcatcacgtagttctcatgccatggttttcagctccatcaggtcatttaaggacttctctacactgtttattctagttagccattcatctactstgttttccaggtttttagcttctttgcgatgggttcgaacatcctcctttagctcgg

SEQ ID NO: 853854 - DNA, 469 bp, Homo sapiens
aatatattacaaagttaataaagcgtatttttcttttccaaggccaaagtagtggagaggtgctgacagtccctcctcagcttcaggctttgacagtaagagccttggctacaacaaaaccaaagcgtgtttgaatggaagagcagaagagtgatgaagccatgttggtcgctgacagatatatattcctaagtacatgagtcagttctcagagccttctaggaacaactgggtacgtgagccacatttgccaccagccatcctagcttacaaatctcaggaaagccagtgttacttgtcatatgttctcgaatagttaaccagtgctgttactaaggctttatgcttacataaggtaacgaccagcattaaatatttagattgccattctaatatgtaagaatagaaaatctttttgttgttgttaacaaggatgcaggctatartagagaaagccttcatgtaggag

SEQ ID NO: 853855 - DNA, 642 bp, Homo sapiens
agctgctttgaagtcattgctatatctaatgtctgggcatactaagacattcagattccttcctattggccctttttccrcctctgttattggtgatcattttctctcattacacatctagtaataatttgtgaaaaactatatattttaaataatataatgtagcaactcctgattctattttgttttttttgagagtttctgtatttttatttgtttgtttaattaagtaattaacttttctggacacacaatgcgaaatctgtttttctgttgtatgctgtctctatgttttcatttactgttgagatctccaatgttgagggcatattttaaggccaaggttttaaatgtagctatgctcagatactttaaacaattaaggtttccaccctctgctttctgaattgtgtgtgtggtttgaggaacacattcaaagagagaaaattcttaagttgcctgaggctttcaattttcactgggcttctagggagtccggcagacatatgctatgtattgtaaaattcatctgtgatcctggtgctttttgcattcccaacatcagtgtataagaatacctgttttcttacagccaaactgacagagtacttcgttaaattttaaatgtcggcatgtttatta

SEQ ID NO: 853856 - DNA, 372 bp, Homo sapiens
tgttggtggagtgtaaattagttcaaccattgtggaaagcagtatggtgattcctcayagagctaaaagcagaactaccattcgacccagcaatcccattattgggtatatacccagaggaattctaccctaaagacacatgcacacgaatgttcattgcagcactgcgcacaatagcaaagacatggaatcaaactaaatgcccatcaatgacagattggataaagaaaatgtacgtatacaccatggaatactatgcagccataaaaaagaacaagatcatgtcttttgcaggtacatggatggagctggaggctattatccttagcaaactaatgcaggaacagaaagccaaatactgcatgttctcac

SEQ ID NO: 853857 - DNA, 615 bp, Homo sapiens
cacattccttgtattcagaattattatctctgtgatggtgrggtcttgctgtgaggttgctggaaggccacaacattttggattgattgtacaggtgtttaaaaaatgaaacaaaacaaaacaaggcctttcttctctgtaagatgccctttgccaatattatggtgagaaagaaaaaggaaccttatagaaatatgcagaaaatgaattggtttgagaactagaatgctgctccaactgatggtttctctcttggagaggggtagagttggccttaacttcacagaagctactggagatggacttagcacttttttggtaaaagatatgctaaccttcccatcatactctgaggaaataatctgagcagagttctcaactttaggttttccaaattggataacttgatgaaataacaatgaaaattaatttccttgttcccacattgtccaaactgattgctgcagacatctcatctctcttgctagaatggttactgcaaaatatatttcccttgtaaatgttttggttcttcctcttcctaaatcaacattccttaaatatattttctgtaaactaagattcttttcagattctaaaagttataatgattgc

SEQ ID NO: 853858 - DNA, 561 bp, Homo sapiens
cttaggaggtgttattgggaggatcaaatgaggtatctaaggaaaagcaaatagtggctgacacacagtaagggcccaataaacaactagtatggctatattaaacacttcatttgacaggcctatgattaaacattaagagtaacgtatattgtaataacatagctatcaaagaaaggataaagcaaagttagctcactaagcaataaagagaaaatcacaaaatgcaagagaaacaaaagtctgctatcccaaaataatggtcaagaggaatttcacatgaattggggcataaagaacatgtaatcatgcataaacttttcagatatattcacatggaagtattaaaactgaataactagcagaatgactacagatttacaaaaatgtatctctgaatgaatgaatacctagctatacagctccttgaagacttgttttggaatatgatcttaataccctctggggatggttracagggctgtggaaatatggaaaggggccagtgagaacatatcctctgagaatagtgattcatggtgattttcttttttttttttt

SEQ ID NO: 853859 - DNA, 567 bp, Homo sapiens
atccagtctggcttgttaggcaataagacttyattttcttaaggtgctgagactctgcaagaataatagaggcagaaaccgcttttcctgttcctcttctttgggctacaccctttctcctcacttcccctctcttcccatcgccaccaccacctcttccatcctcaacacacatgcctttgcctgcatatcacgatccaaggacaacttcctccaggactgtactttgaaaatcgggggttgacagcagaatggaaaacaatcaaacaaacaaaaacaaaacaaaacaaacaaacaaaaacttaataaagtaactgtgggagaaaatcaagttgttgcctctgtgctttcgatggtgcggagatctttgcttaccctgagttgatgccaatgatgtgagtgaagtaaaattagaaggaaaattcagcactaaaccaagaggaagtgtgtgattgtaggtggtggcaggaatgacttcattataaaagtaactttaccaccctaataactgacatacttaaggtcgaatacttcaagttttggtgttaatttgttcaatttgttaat

SEQ ID NO: 853860 - DNA, 567 bp, Homo sapiens
atccagtctggcttgttaggcaataagacttcattttcttaaggtgctgagactctgcaagaataatagaggcagaaaccgcttttcctgttcctcttstttgggctacaccctttctcctcacttcccctctcttcccatcgccaccaccacctcttccatcctcaacacacatgcctttgcctgcatatcacgatccaaggacaacttcctccaggactgtactttgaaaatcgggggttgacagcagaatggaaaacaatcaaacaaacaaaaacaaaacaaaacaaacaaacaaaaacttaataaagtaactgtgggagaaaatcaagttgttgcctctgtgctttcgatggtgcggagatctttgcttaccctgagttgatgccaatgatgtgagtgaagtaaaattagaaggaaaattcagcactaaaccaagaggaagtgtgtgattgtaggtggtggcaggaatgacttcattataaaagtaactttaccaccctaataactgacatacttaaggtcgaatacttcaagttttggtgttaatttgttcaatttgttaat

SEQ ID NO: 853861 - DNA, 604 bp, Homo sapiens
tctcacctgcgactcctccctcgctttagcagaatcggcagtagaattgaagctaaagccatcacgtggcaggcagtccacaagagtcygctgggatgccattgtttgctgggagtgttgtgtcttgatgtacatcatcttgtgtgcttatcccagtcaccagaggaggttggcaaggagggaaacttttttgttatcccaactttgcagaaggagaagctgctgaggatagcatggctggcaaatggcaagctgacctttgaatgaggagagattttcctacttctggtctaggcctgctttcatgagacgatgttgcctcttagaaactggtgttaggagatgtgaaaggatgtatggttgatatgaaattaaaagacccaggtttgcatgcagctctgaccacttactactcatatgacctgaacatttgttgtttgtttgagacagagtctcactctgttgcataggctggagtgtgcagtggcatgattatagctcactgcagcttcaaactcctggactcaagtgatcctcctgccatagcctccaagaactaggactacaggttcatgccaaatgtctggctaattttaaacatttt

SEQ ID NO: 853862 - DNA, 597 bp, Homo sapiens
  misc_feature 239, 256: n = A,T,C or G
gcaactgttatcctgtgcctgtcccacattttatgttgggagcagaaaactttagttttgctgggccccagatagagagaaactgtaccccgagaggtgtactgactggactatgcccacagtctatttgactctgacttagaactgtttatttgggaatttgagttgatgctgtattgagatgagactttgggggacattgggatggagtgaatggattttttactcgattgagcagngggttgttttgtgtganggcacactttttttcctagcactttgggaggccgaggcaggcagatcacctgaggtcggcagttcgagaccagcctgaccaccatggagaaaccccatctctactaaaaatacaaaattagccaagcatggtagcacatgcctataatcccagctactcgggaggctgaggcagtagaatcgcttgaacccgggaggcagaggttgcggtgagccgagatcacgccattgcactccagcctgggcaacaagagtgaaactccatctaaaaaaaaaaaraaaaaagaaagagatgtggattttgggtgggggacagagggaagaccatggtaggcagaatga

SEQ ID NO: 853863 - DNA, 507 bp, Homo sapiens
gatattttaaaaggtgtttctatattacacaattttacactgttaacacaagaccactagatttgtagtccaaagctctgggccacaatttagtcttctctcttagtgtctgttgtgtggccttagacataaactctaaaaagttaaaattaaaatataaatggccttatgtgccagtgaagctgagaatatgtcagatgtgaatggactctgaaggtgctttatgaatttccaaaccatcttgggcagttctgggtgaaggggaatcaccagagcatagatcattctttactgttcaaactgaaaaacgtgtaactttgggaaaaatatgtatttattataaatcatccatttcattgggtggtttcaaatttagaarccaatatatgcttgtcataagaagaccaatgaatgcaaatgtatataaccccaaagctctcttttcctaccctattctgtctctggtctcccagctagtgaagtcaacagattagtgtggatccttcc

SEQ ID NO: 853864 - DNA, 591 bp, Homo sapiens
ttccaggtgagtcctattacccccattttaaagacgagaaagctaaagtagagagtgaagtgacttgcccaaagagagctaagaggcagggccaggattcaaaaccaaaggtgactccaaattccacccgtatgccttggttccctgcctactttccatgcagctgcaggccttgagctgtaagaacctcatatggccactttctacatgaggcagctcagaggttaagatgcctcctcaaggtcagccagctggtaaggggcagagctgaggattcaaactcctgtgattctgactttggagcccgaaccttatccacatgctggactagaaagaaggatggggctggggcagggggatccagctgacatttaagtttgaggatcttttaggtgactgaaaacacattacacttattccttctcctgggttcgtgtactctgtatagaggtttcggwcactcacagattaaatctcataaagatagtagcagttaatcagttttactgggtcttggcttccttatctgtaaaataagagatgagcttgaagatcttttcaactctaatattctataaggttatattagta

SEQ ID NO: 853865 - DNA, 678 bp, Homo sapiens
aaatattaatcctaaatagactgtttaaagtgaagtatgtatattataatccctgaagcaaccattaaaaataactgtagaaacagatacaagaaaaaatacaactgatacattaaaatacaaaaaatattaaaatactccccccccaaaaaaaaaagggaaaatgaacagaaaacatatggaaaagcaaaaaaataataataataacaaaatggtagatctaaatccaaacataacaatcattacattaaacataaatgacctatctaaacataccaattaaaagatggactgtcacaatgagttttttaaatgtccaactatatatgttgcctgcaagaaactcacttcaaacataatataaagtgaagtttaaaagtaaaatgatggaaaaagatacaccatgcaaatactaatcaaaaggaagatgaaactattaatatcaaagtaagcatcaaagtaaacaaaattaccaaggatagagatatcacatctcataaaagagtcaattcatcaaaaaaaatcattactttgaaagtgtggatgcacctacaacagagcttcaagatrtatgaatcaaacactgacagaaatgaaaggagaaagagataaatatacaattatagctggagacttcaacataactcttagtaatcaataaaatgaatataagtagac

SEQ ID NO: 853866 - DNA, 455 bp, Homo sapiens
ccacatttctggaaggaaactatcagctggaactggcttcccctttagacagatcatgccctaaaaatctgacccggtccccattttcctggtcccaatagacaggtgatgtttatccctgctttatatgataatacaaaatattttgccctaaacaaaatacaccaaagataaattatattgtaattttgaaaaatcacagtttttgtatttgaaaaatacctcacttaaattatttatacaatcctcagaaaagcacaatgagatagaaaccagcccatagtaacttaccaaaaattatagaaagtaccagttcccaaactcaaacttaggactcaggcatcaaattttctatttctcatgcgtttagacttaacagtcattaacactttaacaagaaggatttaaarggatccttctcatcttgactgctcagtctaaaatagaaggcaaaa

SEQ ID NO: 853867 - DNA, 565 bp, Homo sapiens
gggttattataagtatgtgtgtaaatcaaatttttgatattatttcacagatattaatcttcactggacatccaatggcatttaatctttaatttccctgattgcccagcctcagatttcttatttagtaacctgtaagcaaatacttgaaatacatgtctccttatttgaatgtgtcctttagtgaatccttttgcggagcataatacaagcttaattgtaatgactaccttctaacttaatctttttgaaaaaaaattgatttatatacatcagagtgccctaaagctagaaatctgtaaaattagtagggcagataatgtttagataagcattaccaattttgtcagcttcttggtagaatcactttatttttctttattcttttgttgctgagaaatgaccatagtttgaaagcgagtctctttataattcataattagtaacracaacaataataataatatttggtattgtttccaaagctgaaaataagatggtaaattgttcatccgtttgtatcaagttgaggctgggaaaagaaatcttagtgctttcacattat

SEQ ID NO: 853868 - DNA, 446 bp, Homo sapiens
aaatgttaaattaaatggaccatgtttaacattgttgttgatcctgaggaacagtttttccagtatatggagcatttcgattccatccagcatatgttctccacagttttctctgctctaattcatmtgtgtttttcgacagctccagatggcgtgctgcctcccaggctttcatctgccactccaaccagtcttcaggttgtctggtctacaccagctcgtaataacgctcctggctctcccagataccaactccagatgaggtctggcgactccacccatggatttctagagtgagcattctactttgtccattctatcagctgggttatacaatatagacataacatttttgaagagtaggtcagttctcatttgcaaaaaatataggttaccttttaaaagtacaaaaaaaccccaaacaattagaggataatcatttgctt

SEQ ID NO: 853869 - DNA, 574 bp, Homo sapiens
tcaataaatgtatcaaatggatctccatggaggaggatgtcatgagtatgatgtcatacctgtgcttctgagtaaagttggatgcaattaagatcttacctacaargattgtgtatgatcacaagaatgttgatgtagcccatagatagctaggtaagcaccttcttttgtgtcacttaaaaagtgaaagcaaacgacatccaagattctattgaaataaacactaaatggaatgtaatagacaaatctacaactacagaagagtcaaagtatttatctgttgctggttggatggatttggtaatttaaataatcgtaggtatgggcaccttaattggtatgactagagcattagccttatagcaatccactatgaggtgccatttattttttcaggtttagaagtaggtcaaattgggctgttaattagagaagcagtagggataaccaactcttctttaaatgtcttgtataataggttttaatccttgaaggttctgttttactttatatacagcttgataacctgttttatctgcagtaagatccatagggtgccattttatcaaaccaa

SEQ ID NO: 853870 - DNA, 614 bp, Homo sapiens
atattgtcctcaatatctcttaaaaatcaaagtaagttcacctggttcatcaaatgaccacaaacaaaagtcaaataaagtactcagcmacttgtcttggtttgtttcttcacataaactttttggtggattatagttcatgtttttgtaagtttatcagtgcatttaagctcatttataatttatgtggaggtttgattatttcttcagtgaagtagccaatcactaaacttagttttctttttatttttatatgtattttaattattatttgaagttctcatgaacatcaagaagataccttttagagtgaatgagatttttttttaaacctgactatataaatttgggccttctttttgggtagaaactattccttagaaaagaaaagatactgtgtaattttatgtgtctgaaaaaatgattcttacataatgcacatatggtaattggttttgttatttttaaaaatgcaatttaacatttgattttagacatatttccctggctttattagaaatgacaaacaattgttcctttaaaaattaaatactcatcacttgcaatatttcttatttatgaaactgcttttgtttgagatgttaaaaacaggg

SEQ ID NO: 853871 - DNA, 510 bp, Homo sapiens
agacagtacaagaaaaaagagaaagaataaatgaatgaaagaaaaaactacagaccaaatatctcccatgaaaaaaatcctcaaccaaataracacaaaagtcctcaacaaaatattagcaaatcgaatccagcaatatgttaaaaagataatacatcacaaccaaatggggtttatcctgggaatgcaagactgcctccacagtcaaaaatgcaatttattatattaacagaatacaaaagaaaaaccacacaattatctcaatagatgtagttaaaacatttgtgataatctccattagtggtaaacactcgcaacaaactagaaatagaaggaaactttcttaacttgataaaggacatctaacatcaacaacaacaaaaccctaccatctagcaccatacttaatggtgaaagactgaaagtttttcctctaagattgggaataaagcaaagatgtccactgtcatcacccatactcagcattatgctaggagtcccagccagtgt

SEQ ID NO: 853872 - DNA, 636 bp, Homo sapiens
actcttgttgcccaggctggagtgcaatggcctgatctcagctcactgcaacctcctcttcctgggttcaagagattctcctgcctcagcctcccgagtagctgggattacaggtgcccaccaccacgcccagctaatttttttgtatttttagtagagacggggtttcaccatgttggccaggctggtcacaaacacctgacctcaagtgatccacccgcctcggcctcccaaagtgctgggattacaggcgtgagccactgcacctggccttgtcaaggtctttttataagatgcctgggcaatcttgtctccttctttgtagtcacacctaatgctttatgcaaaattttattaccgtaattgattaccatcgtgttcatgaaagtcggtttcaagtgattcttggctgtttccccaactcaactaccctcaggagataacaatttgtcataactaagaatatttgaaacgctctgaagctctaaagacagttaaagaagtacaatgagtctctggtggggaytacattaagggatataagagtagcctctggttaagcactgaggtcttctttatcacagagcaatggcagatgctgcaaaaggggaaaatactttgaagattaaagtctgg

SEQ ID NO: 853873 - DNA, 636 bp, Homo sapiens
actcttgttgcccaggctggagtgcaatggcctgatctcagctcactgcaacctcctcttcctgggttcaagagattctcctgcctcagcctcccgagtagctgggattacaggtgcccaccaccacgcccagctaatttttttgtatttttagtagagacggggtttcaccatgttggccaggctggtcacaaacacctgacctcaagtgatccacccgcctcggcctcccaaagtgctgggattacaggcgtgagccactgcacctggccttgtcaaggtctttttataagatgcctgggcaatcttgtctccttctttgtagtcacacctaatgctttatgcaaaattttattaccgtaattgattaccatcgtgttcatgaaagtcggtttcaagtgattcttggctgtttccccaactcaactaccctcaggagataacaatttgtcataactaagaatatttgaaacgctctgaagctctaaagacagttaaagaagtacaatgagtctctggtggggattacattaagggatataagagtagcctstggttaagcactgaggtcttctttatcacagagcaatggcagatgctgcaaaaggggaaaatactttgaagattaaagtctgg

SEQ ID NO: 853874 - DNA, 570 bp, Homo sapiens
gtttgaatgggatgaaacctcacrggccttgctgtctggccccagcaaattctttgatctctctgggcctgccctgcctcaggagagccagctggctggttctaggttgcagcttggacgggggtgtgaagaggtcaaaggggggtacctgagccctcaagcagatgggtaaccctgggcattgctccatgggcctccccgatgcatgcctgctgtgcccgtggggccgagccacagcctgtgggaccagtctctgggtggggaacttctcagcaggtgagtcatcacccctggggtgcagccagtgacccagatggggcaagatcatgacatatatttatctctgtcatctcccagtgcctccccttccccttcctcttcctgtcctcatcccctcctccagccattgggtgggccaggatgacactgactactcagcccctgatctcacctatcctagacaaagtctatggttcttctaggccgcctgtctcttcctctgtaagtttgacaatggtaacagccgccattaattgagccattagcaattaccagcagctttgcatacac

SEQ ID NO: 853875 - DNA, 654 bp, Homo sapiens
atccacacagagctggggttccaggatcccccacagtcttagaaggctctgaggcctgggagggatgtctttctggagtccctttatcctgggcggagaacccctggctctggctgacttctctctggtcctggaccttcccaggcacaggtgggaggagggagctgcagggggtgcctcagctcccctatccttgctcctgtaccgctgcctctaaagttggcccagcatggcttccagaagacactgaaccttacagagagccagctctcctctttgtagtctaaaacagggacgatgcccaggaagggaagaaagaggtttctttcctagactgtgccaggctgggtcccatatctcccctccgggggtcctaccacgggcctcagggccaggaaagggtggcctgctggctgcagagcccctgccttgtctctcagactcacaggtccaggtgacagtgcttagcagccatcagggtctccctccctccaccaggcagcttctataagcaagggagcaactggggcagrgtctggccttccaatttgatggacccagtaactcattatttgcctagaagcctgtctccccattttcactatgagccagtaagggctgggactgcctgcttcttctctgtgacccagcaca

SEQ ID NO: 853876 - DNA, 590 bp, Homo sapiens
agaggtcttttgacctctaactcaaagtcattctaccagccattgaacttgtctaacaggctgtacatttattgaagatctaatgtgtgatagatacttcaacgtgaagctctctttgggtagactttgaaaaagtttaattcaaaaggagtcaactaggatcacatgcatcctcttcatggaaattgtgaagatcagttacagtgcaggctaaactgccttaaaaaaaaaaagaggacccaaagcacagtggcttaaataatactttatttatcttccatataacagccctgaggtaaggtatccagactggtgggcagctgtgctccatagttatttgtggactcagttttcttccatctttttggcataccatcccttaggtattgtcctcatctgcatgatctctatgagatcacagacacttctgctcatatttctttggagaaaacctagtcacatggccacatctcttacttcaaaaggttagacaaattgtaaagcatacttttaaaaaaaaaaaaaaatcaaagcttatsaaagccaagtctttaaaaatgtttcatattgttcatgaactttaaaaaaaa

SEQ ID NO: 853877 - DNA, 474 bp, Homo sapiens
taggtagcagctttctgggtggcctgggcaccagcatgggtctgggtgaggtctatgctggggctggtgatatgggaggcatcacaattttcactgtgacccagagtctgctgagctccctaaargtggaggtggatcccaacatccatgctgtgaacacccaggagaagaagcagatcaagaccctgaacaagtttgcctccttcattgacaaagtgtggttcctggagcagcagaacaagatgctggagaccatgtggagcctgcagcagcagaagacagctgggagaacgtggacaacatggagagctgcatcaacaactttctgcggcagctggacacatgggaccagaagctgaaggtggaggtggagcttgacaacatgcaggggctggtggaggacttcaagagtaagtaccaggatgagatcaacaagcatatagagatggagaatgaattttcctcatcaagaag

SEQ ID NO: 853878 - DNA, 547 bp, Homo sapiens
tcaggagggaagtcagaattctatttttttaaattaatcactactattgatttcaatgccattagttttaccatttattaatgcactaaatattaattgagcacctactataacctaagcattagtatcggcactgcagatacagtgtgaactaaaaggatttttttttttttttttttttttttttgagacggagtctcgctctgtcgcccaggctggagtgcagtggcgggatctcggctcactgcaagctccgcctcccgggttcacgccattctcccgcctcagcctcccaagtagctgggactacaggcgcccgccactacgcctggctaattttttgtatttttagtagagacggggtttcaccgttttagccgggatggtctcgatctcctgacctcgtgatccgcccgcctcggcctcccaaagtgctgggattacaggcgtgagccaccgcgcccggccctaaaaggattttagttgcctttttgaggcttacgttctaraaacactgacttaaaatatctaatttttctgctgaatc

SEQ ID NO: 853879 - DNA, 566 bp, Homo sapiens
ttaatatggtttgtatagaggtaatcttattgtttatcatttaaaatattacatgcacttatatgagaggactgtcatataggaatatttycttctgacattggaaatgctataaatatcatatgaagtaccttgcattcaatcataccattacattttttgacacgatgtatattaaaacaattgctgaaaagtgtgtcctattaaggaatcccgaagttctattgtagtgagctattcctggaagattaatattgatcactacttgacagggtttacagtttattttttactcacagggaagacatcaaggaaacaataacacatgatacaaagattaggaccatgtttcatatagtaaagaaataaaggaaaaaagtcagaatgttttagtgttggatatagaatatctactggatttttcttcaatctcatagctttactttgggtaaacagggtgcatgattcaaagaaaaacacctcagtttctatgtgatgtagttggaatgggatgtaaatcacatctttgtttatgtttaacataaaaaacaaaaaattgagaaatt

SEQ ID NO: 853880 - DNA, 366 bp, Homo sapiens
ttcctttcacccttttcctactccacagtgagtcaccggtagaaggttttcatagaatacacatgcrttaagaagtaaaatgtaaacagatgaatttattttgtgcagaatatccactattgtggtgagaataaaatatgtatgtatatatgagctacaaaatataaattatataattttggtgagtctgtatattaaatgcttttatatttgcatctaaaactgacatttttcataatgatgaatgataattatgctaataatttaaaattttaattttcctatatgtagaataatagataataaccataactacttaaatcttatttatattctttcatttatatgtttgaaattatagaaaac

SEQ ID NO: 853881 - DNA, 533 bp, Homo sapiens
cctctttctccaccttgggggataaagaaaaagtcattttgccctaaaataaaatgtcagcttgttttcagaataagaaaggctattgcacaggacaaaatttaagttggtaatacaatctgtaacttgtttgaaggaagtgaatttttttttgtcttgttttataatttattatgaattgagctttgtcttaaaaatatatatatattaaagctgggcacagtggctcacacctgtaatcgcagaactttgggaggccgaggcaggtggatcatgaggtcaggagttcaagaccagcctggccaacacgtctttactaaaaatacaaaaattagccgggtgtggtgtcgtgtgtctgtaatcccagctactccagaggctgaggcaggacaattgcttgaacctgggaggtggagattgcgtgacccgaggttgtgccattatactccagagcaagactccrtctcgggcagggggctgggggaagttataaatatatatgagaatcatggtccacagtacctgtgaatgtc

SEQ ID NO: 853882 - DNA, 331 bp, Homo sapiens
taaaccacagtttatgcctctatccctttttttyccttagtttttatgttgaagaacccagggagagttaaccaaagtttgaattttactgattgtacactcatgttgcatctttcttcattccttgtatattttgcaaattggttactgaactcagagacttggtcagactctggttcggtctctttagcaatactgtaggcagtgttgtgttctttcatggggaggcagaagtctggttttctcttttttttaaatcatgtccgcagttgttgggctcagtgcccagatccattaatttatcaatggtttaaaaatagtgacattctaa

SEQ ID NO: 853883 - DNA, 570 bp, Homo sapiens
taaattatagaatattaccattatctccaagttttctcatacctttagttttccycactgctaaccccttagaggcaaccagagttctgatttcattataaattattcttttctagaattttctataaatggaataacatcatacactcttctatgcaaagtttctttcactcagaataacgtttttaagatttgttcaagttgtgtgtattagtacttcattcccttttgtggcagtggaatatgtcaccatgtggatatactaccctttgtttagccacttcctgtagatggacgttcaagatgtctccaggttttcgcaatgatgaaatcactttctgtaaacattctgctttaagtctttttttgtagatgtatgctcttatttctcttaagtaaatacttaggagtataattgctggctcatggggtagatgatcataggggtttagttttataagaaactattattttcccaaattggttgtattatccactttcaccaacaatatatgtaagttctgggactccaaatttttgccagcatttggtgttgccaggtggtttaat

SEQ ID NO: 853884 - DNA, 426 bp, Homo sapiens
cccctgctagtgtcagggccaccaacccatccagggacaccctgggaaaacgtcttttttctaaaggggatttttttctgggagggagggaggatattcagcaaaattcattcccaaaacccgtgactctgacgacaaccattactctccccttccttccccatcctgtctgggaaaaggacagatcaccccgagcctccccgggacataaaaggacagatcaccctgagcctccccaaagagaaaaagacagatcacccccaggcaaccccaggacagaaaaggacagatcactctgagcctccccagagagaaaaagatagatcacccccgggcatccccaggacagaaaaggacagatcaccccgagcatccccaggagagaaaaggacagawcaccctgagcctccccagagagaaaaacac

SEQ ID NO: 853885 - DNA, 563 bp, Homo sapiens
agaaaacacacataaagcatttggcacctgcctggagtacatagtgggccctcaatacatcagagcagttattttcgtcactgaagtgaaacaacggaagcccccctctctgagcctggagcrtccatttggaaagtggctcttttagctaaacctttcaagcctggttttcgtaagcttctctcatgctgctctgctccttttggggttcaaagcgttgatgaatttggccaaggtcacacagctggtgagtagcagatgtaacatttgaacccagatcttccgaccccgcagaaaggcccatgaacgtgctaagaagggcagcgtgcagatgtgtgggcctgcagataacgggtagagccagcgcctgtacatgttggatgattctgtttcctctctgatccggatttaccaacatggtcagctgcagaggagatttaaacaaccttgaggccgcattggccacacacagtgggtggaaagactgtcagcttaggggtcaggagagctggggttcaggcataggtcagtcacaaccaactgtggtaccttaaccaagttgt

SEQ ID NO: 853886 - DNA, 535 bp, Homo sapiens
cagccttaagaacatgaaaggaatcacactgtgagtctgctactccactgcaattgtgractgccaaagggaagaaggaacaattctgtgccatctaagtaactcagcagcccagttcctcactcctgccctgtttctcctgacccctcacaaatatacaagtccgcaaaggctttatattcccttctgtgtacatgttatcctccagggcagtagcattaaagggttaatagctgaacaaacagaaagctcacattcattctaacttatcttctttctatcattccatgtttcctttcctcaaggcaggcctgatattactaactagatgtaagtataaaaacagaacaaccaataatgcatgacacatgaaagtagtatttatgtctataaaaaccactttgatgaccgaaaatgtgcatttgagaggctttatgactatttactgaattttcgtgctttgaaataccacctgtaattggcagtctttagtctcctgaaaaggatataatttcaaagagaaaaattgctataa

SEQ ID NO: 853887 - DNA, 622 bp, Homo sapiens
accacactcttttcaatataaattaatattccatattagcccatgaaattcacttgtctggccacactcacaactttcacctttattcacatcaccaatccactgatctttaactttctttaagcccatcagccctcttaatttttcactccctactcatttctccttcctcaggatagactctaagccttgtattattgtgacgtctttacaaaggccctaaacactcttgttcctccctttttccatcatattctcctggagggtgaaaacaactctggttaaatactacatcttcttcacatctgtgcccataactgagaaaaccatacaaccatgttgactagtttcacttaaaattcaggataacacattgacaagtaaactctcaactctgcccagcaaccctactgcacttctgttgtttgtatattccctgttctctggaattactatttcaaagtgatatctttcctcaaatttgtctctctacaaattgttccctctttgctgtttaccttctcctaccaaattttacaagtgatgcctgtacttcataatttattgaaaaaaatggaaggaawaataaatccttaatattctgacctcaaaagctacaaac

SEQ ID NO: 853888 - DNA, 455 bp, Homo sapiens
ctgaatatttggatttgtggattactgacccttctttattgcaatctgagccctgccakattgagtaaggaagggagtgggtaaggaagggggtttcttgtgggtaaagtacaggtcatggataaggaaagggttcttttgtgggtgagtgaggaaggggataaggaagggagtcttttgtgggaaaagtacaggtgatggggaccagcttccagtagaactggtctgtccacctcgggttgcccaggtttccctgcaccagcagaggtgtggcccaagcagggcatgggtctccaggtgccagctactatctctgggggctccatgcaccatctctgagcttcacaccaaactgcagaggaagaaactgaggccaacagccaaagtctgtgctctcacctctccatcgcgctggtgctcacctttagggtactccagggttaaagctacatttc

SEQ ID NO: 853889 - DNA, 328 bp, Homo sapiens
agctccagtgttgcagatttctggtcacagaactcacacatgaaagattagaattttccctccactggaccctggagttactcattaattatttacccctccgcaggagacttcctagctcattttagatagcagtcgtccaaaaatgtctacctttcaagcttccaatatctattttccctcttcttcaatggragctaatacaaactcactcaagttccttcccttttatctcaaaatgttagtatattttcatctatcttctcctcatattccctcacccccatacacacttctttttcactttccagggtggaagtgccacctt

SEQ ID NO: 853890 - DNA, 628 bp, Homo sapiens
aaaaatataattatcaaatatgactgggtaaatatttgttaatgcaaacgaggcaaaacatggcatgtcttccaaaagtaattatttctgatgatattcatagatctttgaatcctatcatagtagtcattccatcatgaaatcacatgattgtcagttgaaggtagccatcctaggagcagtattatgcaggagaactttacctaaaagagtttttataatattttaaacctctagttgaaatgcaaaacctgtttaaaaaaataatttatctttgggaggccaaggcgggcggatcacaaggtcagatcgagaccatcctggctaacatggtgaaactctgtctctactaaaaacacaaaaaattagccaggcgtggtggtgggcacctgtagtcccagctacttgggaggctgaggcaggagaatggtgtgaacccaggaggcagagcttgcagtgagccgagattgcgccagccctggccacagagtgagactctgtctcaaaaaaaaaaaamattaatttacactaaaagtgatgtagttttgtgagtcagctgtgtaatgcagaggctaaacatttaaaaaggccatttttaagaaaacaatttaggccatcagtaaagttc

SEQ ID NO: 853891 - DNA, 515 bp, Homo sapiens
tttctacttccaaccaagaaagagtaatggaaaccagatttacctccatgcctgaaacaaccaaaaagaatggacaaaatatatgaaacggtmgtttccaggacacttggtaacaggcaacaaaggacagtgatccctgcgtgataaggaacaaatgacgggaagcctatgaccgccccagcttacggacttgaaagagtttccaggccacagcacatggaggagtaattcaagcagaatccagcagacccctcaatcgaggagacacagctaagagtctggaaagacccagacagtaagaggaatatagtaactataggaatataaaatatcttattaaacaaaaaaacaagatgtaactcagaatgtctggcatccaattaaaaattaccaggtaaaataaagaagctaaaaaatgtgatccaaaatgaggagaaaaattaccagtttaaaccaacccagaactaatgcagatgtcagaattagcagagatagacattgtaacagttattata

SEQ ID NO: 853892 - DNA, 490 bp, Homo sapiens
tttgagatgggtttttttgttttgttttgtttttgaggcttgaggcagcccatctcccatctcctagcaattgaaaaataaaactgctttcctgtcactccatcctacytcttttgcagtttgcttctaggtggtgagcagctggacttgcatacagttccagaaatagaggaggtctaaatgtactttctacaacattaagtctataatttagtgaagagaattctcagcaaagaaaaacaaaagaactaaataaaaatgtaaaagccaaaaaaggcagaccaaatagtaataataaaaaaaaaatcctcactgtagttcagtgtaataacaaaataaagaagacaggtggaagtgttggcaaacttaaagataaacaaataggaattacataatctaaatataatgaggaaaaaagattgaaagggtaatgaaaagagcttcagggtcctgtgggacaataacaagacaatttttgtcatcccatgta

SEQ ID NO: 853893 - DNA, 565 bp, Homo sapiens
tttcttctgtagagttggactgcctagtcttattttctttggtaaatttagactagtaaatgcatgattctactgagggatattaatcaacccataacagatatggagatatgtaaaaggtaatttaacaaactaggcattggtttacttatattttgttataggtaaactgtctaataaagttggaatttaggaagtattcaataatagagagacttatgtgtacaaattctttgagactgagtgccacactaacacacatgaattgtggtgtctaaaataatcccagatccagttggtaaaaaaagttataggataatgtgataacagtttaaagcagtcatatattaaatatatatctatatgcacacatacacatgtatgtgggtatttctaaaattgtatcagacaaccaagacaaatatattcgatataatattcatatgatttgaatgtaaaattatgcaaatgtgtaatagaaattctgatckttctgggaaaataatgatcaatgtgaaaattccactttgaaagtctcaaaatctgctgaaaaaattcatgtgca

SEQ ID NO: 853894 - DNA, 578 bp, Homo sapiens
tgggaaggagaatgagaatcctttaagttctttgaaatgacctcaaatctgaggttgtcaggcttttaaagagagccagtaggtagtcactccacatattgtagataatactgkgtcaacagctcaagttatctgaagctctctttgtgaaatgggacccaacttttgctctctgggaacactatcacatttctctctggcatgcaaacttaggtgtgtttgatgaagggagcctgcctctccactcctgtgggtatttcttgcaaggtggagatgagagactgagaaaagaaataagacacagagacaaagtacagaggaagaaaagtgggccctgggggaccggcgcttagtaagtgaggaccaacaccggtgctcacttactctgagtctctgagttctctcagtatttattgatcactatttttcctatcttggcgaggggaatgtggtggggctatagggtgaaggtggggagagggtcagcagaaaaacatgtgagtaaaggaatctgtgtcataaataagtttaaggaaaagtgctgggcctaaatgtacacgtaggctagatttatattt

SEQ ID NO: 853895 - DNA, 470 bp, Homo sapiens
aaagttggccaggaaaagcaccgttaaagaagcataatatttgataactagatttaagttgatgccttctctagggaattagttcttcttttctttctgatgcagaaaggagacacccttacaatggaggttttctttacagatgtaaatttatcttatgaaatcataactgttttcaaaactaatttgttttcaaagcttctctgtgtttgctatttcccaaaatagctcaaaataatccttaggccaaaaaggcatatttggggtagtatgtcctgagccccatcattagtcatctttattaccctggccaaaggtctccttgctcatgacagtcaaagactaaaggacagagggaactttttaataatgagagtttgctgacatgcacacacgtgtcatccactttctgatwaaaaaaaacagagaatacattactgtggcccaaacctgacattttaagccatttg

SEQ ID NO: 853896 - DNA, 630 bp, Homo sapiens
gataaacaagaaagctttacacagaagctagtcctatccactgttttcccctcatccggttacactacaaatctcaccctagactcagactgcagaagaaagttgctagatgccaaatgttcacctccttgtagctaatttccatgtgcacaggaacttgagctatctcaccaggccatcagaaccagcaggtccagtgttcaggtaagggttcctagcagaggtttgcaaataaaatcattcacacagactaatcctggttggagggaaatgcacaaagtctaaggaaaatcaaggtgtagaaagggggtgcccaatttacacatatttagccctgttagctttcgcgggcttactcagctttctggctcttcattgagtgtcatctcttcatgatcaggatgacaacttacaaatatatgcacgaagagccagtgcttcaatactgaacaggagaaaacgacaatactgctgttccaaaaccgaaatactccatttggaactgaattgctttcagagtcatatgctcacaaccaaaaaaggaaacactcttaacactcaaatatttgaaaraaaaaaaaaccaccataattactagctcatgagaaaaaaatacaaatttcatatagt

SEQ ID NO: 853897 - DNA, 555 bp, Homo sapiens
ggcagcacctccagaccaaaggggatggccaagccctgggtatgctgtggagaatcgggtctgcaggtgctcagcaccagggtgcatggtggtgcttctcttccctcttacccccacaggtctgggattctacagaagtataaattgaagggtgagaggtcttcttgggtttttggcagggagcttctagttgtggtttgtttagtttttaaagataaaaatagtagtgatatatgtatatagggtgtgtatttgtgtgtaatggtagtgaaagatggtgttgaatcactttgaaagctttgctaaactaaacatagttgacctttcctctacccattcctaaaacacgaaggttctaattcaataattctgttgagaggtctggatgtaagtctttggaaaaagagttcaattctttgagactttgattcatgagactccccaggcagcagagagaaccagtaaaagaatatcagcaaagccatctytacctacccccagtttgtttagaagcagaaagttaaagtaatccagaactcttccatgcagggcagg

SEQ ID NO: 853898 - DNA, 695 bp, Homo sapiens
gaataatatggatcctcgtgttggacatgaaaaggaagragaaagagagcagcatcctccaaaaactctgaccatccaggcagcaccttgctccccaggaggagctggctctcttcttacccatcattggctccctatcccctcaggagcccccactccaagctagacacatcctccttgggcaggtctttcctgacctccatccagaaggcagggctggaggctcccccaccatccctccttgctggagcagaccttgactgaggccctttgctgtaggaatagtgaacttgccttttctcctgggtattccctatcagaccaagaaggccaggacctgtgctcagctgcctcatgtccccagcagtgacacgttcctggctcagcacaggtgctcagccaatgtttgcataacccaatgcagcagaaggctcagaaagagaatagatactctgggcaaattggtaatagaaggtaagtcaccgtcaccagcctaatgtgatccttgccaatctagtccttcaggaatccccagtgaactccagattcctggtgatacgggaactagaaagaaattactcaggcagatagtgagggtaaaagagtcctcggcagaatttcccttttaacaaaaagcagcctcaaaatcctttcttttctaacaaagagcagcctgaaaaattgagctccagaca

SEQ ID NO: 853899 - DNA, 635 bp, Homo sapiens
aaacaggaagcaaaaaaatgtcaaaatgttagtaattggtaaatcaaagtraagggtatatgtgtgttcattgaactcttacaacttttatgtaggtttcaacgtttcaaagtattttttaaaagttaccttttcaaatgaagtttgtggttcttagagaacatatgaatattaccagttctagaatactcagatggtcactgtgacctcttaaaagcaaagtggagaaggacatcagtttgacttatagaaaccttagggagtggttgattttaagttctgcatttttatgcacatctaccctgtaagtaacgtctggcctttctgacatttacatgtatgcacattcttaccttgtctgcacccccttcctccatcctaattaaaacgttgctggggtactttttatgtcattcactttaggtacctctaactgggtactgaaaacatcattcctcatctataataatctaaccagctcttacttagattttcaccactaatgagaacctttcttagataaatgccgataattcatctacataggcccaaaacctattaataaaatgcatccttggatagtagtattttgcttttttaaaatgtattctactagtgttatttttctcttgtgt

SEQ ID NO: 853900 - DNA, 613 bp, Homo sapiens
ttccctttacttttctgtttgcttttctgaagcagaaggagtctcttyttgtagttgctatagctgataatgggctgggttacatctaaaccagcatgtctcagattctcacccaaggttcatggtgattgctgcctgggtatcactgctgattattcaaggtgcaagggccttttaggcagcaggtgatacatcctgccaggactaggtccttccattcaagagggcaggttcctttgtggcccagggtttatctagaaatgacatctgggagctagggcctgaagtgggggcctcaggactctgcctggtaccctgttttattgtgactgagctggtttccaagtggcaagacaaagtcctgtttcctcttccctctctcccctcaagtggaaagaagaaatctgtctcggagctgtgaggtacactatctgggttgggggaagggtagcacaagcactcccttggctgccccagctgctgtctcactaggctgtgtgccctccaagtccactggctctgagcccagcacagcaccatgatttgtccaagaattgcagtccttgtggtctagagtgcctttcaagtttatttaggatgccagggcacttta

SEQ ID NO: 853901 - DNA, 631 bp, Homo sapiens
tgatcattcaagaactcatcaggctttactgggcaccttctctgctccaggtcttgtctgacctagctggtaccgggaggaggagaaggctgagggctgagggagtccagaggagaatgcctaggargtccctgggaggaggtaatgacaaagtttgccaggtaaggaggggcggggagacgcattctgtcactgtccacacggtgaagtgcaaatccccgtcaaccatggcaaggccctttcttaacagaagtgagaattttgtgagttgaggtgagacccacattacatcctgggggtctggagtagggagcctcacctatcctggaggtaaaaatgctccagtagactccaaaggagagtcccagctagaaggggcctcaatgcacagagggcagagagacaaggacttgtcagggtcaggaagctgatgagtggcagagatgggcagtgggtatcctctcccttaccagggcccttccagtgcccggtgctgccccaggggtttcatccaactccaaccctagaaagccagggagcagtggtaggcgggaaaggcacgttgtgatggccactcaggtccctggccactgggcacagctcagaaacagagggagaggcacttctcatt

SEQ ID NO: 853902 - DNA, 606 bp, Homo sapiens
gatgcactgcttacccaaggggttcatcccaggtgaggtggcccaggtgggctggtggggagggcccaggtatccaaccaaaggaagagctgtgtcatgacaagtgaggaggcccaagggggatggtggtggtgaggaagccgagaggacttggccattcaccagctcctcagggaaagcactgctcaccacgcaaggtccatggaggtaacaggaacctctcctctaatggcactgaaaggcaccatgaaaagtgagaactgggccgggcacggtggctcacaatgtaatcccagcacattgggaggctgaggccaagagttggaggccagcctgtccaacatggtaaaccccaactctactaaaaatacaaaaattagctgggcatggtggtgggttcctgtaatcccagctacttgtgaggttgaggcaggagaatcatttgaacccgggaagcagaggttgcagtgaggtgacatcacaccactgcactccagcctgggygacagagggagacttggtctcaaaagaaaaacaaaaaaatgtggaagtgggcaggatccaaggggaaaacagggtgaagaaaagtcagagagagggacaaga

SEQ ID NO: 853903 - DNA, 571 bp, Homo sapiens
aacctaggggttcgtcccaggtgaggtggcccaggtgggctggtggggagggcccaggtgtccaactgaaggaacagctgcgtcgtgagaagtgaggaggcccaagggggatggtggtggtgaggaagccgagaggacttggccattcaccagctcctcagggaaagcactgctcaccacgcaaggtccatggaggtaacaggaacctctcctctaatggcactgaaaggcaccatgaaaagtgagaactgggccgggcacggtggctcacaatgtattcccagcacattgggaggctgaggtcaagagttggaggccagcctgtccaacatggtaaaccccaactctactaaaaatactaaaattagctgggcatggtggtgggctcctgtaatcccagctacttgtgaggttgaggcaggagaatcatttgaatctgggaagcagaggttgcagtgaggtgacatcacaccactgcactctagcctgggcgacacagggagacttggtctcaaaaaaaaaamaaaacaatgtggaagtgggtaggatccaaggggaaaacagagtgaag

SEQ ID NO: 853904 - DNA, 504 bp, Homo sapiens
gcaactgtaatctaaggtctacatgattttgggacagcaggctgccagcaaccatgaggaagcaggtcagagagcaagctgacctcatgatgaatgctgaatgcactgcaagcttggtttatgtytgtttctccccctcccttcttcactgattaaatttataaagtttataagtatggttgcaatttcttccagagtagccttaacctaagccctgagaccactcaggtcctcagtggcacctctcttccaccagcaggagtgaaaaaattgctaccttaggtgatataaaacccacaagaccattgaatacatggagatttttattttgattttgtagggacgactcctctgtttttataaagctattttaactataaaacatttttgtgattttgatgtggccaaagatctcccaacaatactactttcagattttagttttctgtctaatatctgggaaagattagacccttccctgcttcagactcaggactatgcagg

SEQ ID NO: 853905 - DNA, 425 bp, Homo sapiens
agagaagtaacccaagtgcggcccagagtcttctgatggtgttggcgaggaagctcagggaggctttggccattgtccagatcctcagagaaaggactgctcaccatacagggtccactgtgggaacagaaacckgcctttactcagtggaaggtaaagggaatagaagtggggaccactcagaatccaaagggaaaagggattgataaaagacatagagaacagggagcactgaggacaggagcagctgatttatgggatgagaatgaaagcaaaggtcagggatgagtccctctaaattgctgagcctctcccttactttacccacaggaggtggaaacttcaagtgctggatttgcgggatgttgatgagaatttctgggccagatggcctggagcctgggccctgtcctgcttcccagagg

SEQ ID NO: 853906 - DNA, 696 bp, Homo sapiens
cagggtttctctgtgttgctctgggatcctcctgcctcagcttcctaaagtgctgggattactggcatgagtgactgtgtccaggccacatgcaacttaaaggaagcacaggcaagtgctcagtgtgagagagaaaacataacagcagggggcaaggctggaggaaaatgttgaggtgacatcaatgagaacttcagggacccgtgtcctacagagtcggaaagagaagaaaagttctacagtgatgagaatgttatccctgcaaggatggttaccaaggaatatcagaaataaagagcacctgaatgaaaacttttaacgtgttgtagcaatttatccaccagaaatatctagttattgagttactgatggaaaaataatgaaatactactttgtctgtgattgagtttcagctgtagaacatcaaagcaaccaaataaaatttgatcattttaagtatttcccacccattcttgttctttgttttgttttggagacaaaatctcagtttgtcatttaggctggagtgcagtggtgcaatctgggctcattgcaatcctttccttcagggctcaagtgattcttgtgcctcaaccactcaattagctgggackgcaggcacgtttcaccaagactggctgatttttgtatttttaatggagatgaggtttttccatgttgatcagcctggtctca

SEQ ID NO: 853907 - DNA, 522 bp, Homo sapiens
gtcctgcgtttgcaacctctgtctgcagaaatgtgtaacagtcaattaatgtgtctctcgtttctgcagcacacaaaagatcatcaacataatgaaagaattagtctgaaaacttgtctctgactggttgaagagcttcagctacaaaaatctgacaaatagttggactattaagcattccctgggcaacactttccactgaaacctggtggctggttctttattatttatggctggtatagtaaaagcaaatttttcaaaatcctgttttgctagaggaatggtaaaaaagcaatccttcagatcaattataattaaaggccaatctttggggatcatggccagagagggcaacccaggttggagagcccccataggttgaattacagcattgacggctcttaagtcggtcaacatgtgccatctgcyggattttttctgagttacaaacacaggagaattcaaggcgaaaatgaaggctcaatatgtccctttgctaattgttcttttgcccgtaagtgt

SEQ ID NO: 853908 - DNA, 470 bp, Homo sapiens
acagagagagggcataactgaggctacatacactttgaacctgatgggatcctgggacaagagggagtcctggccctyccgagttggcaggacagtagctccaaaggcacaactgaagctgcccaggtcgcagttccaaccaaggtcccccagtgctcttgagggctcaggaggtctccccttctcctgcagcatgggggtgtctgctcccactgtgtggtccctcctggcacctgctgtaattttggagcggagttggggtcaagcatgtatgctgtggcagcccagatgagcgtgtgcatgctcaggttcgtgctgatgcaccgtctgcctgctgtcttgaacactctgggctttgggccctgatgagcatgggagggaggctgagagggggctgaggacagatcagtgctggcctttggatgctccttgatgcaagtgacctgggcgccatgggtggtggtgggagg

SEQ ID NO: 853909 - DNA, 470 bp, Homo sapiens
acagagagagggcataactgaggctacatacactttgaacctgatgggatcctgggacaagagggagtcctggccctcccgagttggcaggacagtagctccaaaggcacaactgaagctgcccaggtcgcagttccaaccaaggtcccccagtgctcttgagggctcaggaggtctccccttctcctgcagcatgggggtgtctgctcccactgtgtggtccctcctggcacctgctgtaattttggagcggagttggggtcaagcatgtatgctgtggcagcccagatgagcgtgtgcatgctcaggttcgtgctgatgcaccgtctgcctgctgtcttgaacaytctgggctttgggccctgatgagcatgggagggaggctgagagggggctgaggacagatcagtgctggcctttggatgctccttgatgcaagtgacctgggcgccatgggtggtggtgggagg

SEQ ID NO: 853910 - DNA, 640 bp, Homo sapiens
gtctttcaatccttttgtctagatgcccacaaaatacctgccatgttttttgttgtcttggttccctcctagggycccattagaacagtcagtactgtccagcccaacctccacctcactttgtaatttaggcctgatttctttcagtgatgccttgaccttaaccttgagataaattacaccctcagtagttcctgtcttccacctgaatgggcatatgatctaccatgttaggtagcgcaaaacccaggtgaccagtggatacactgagatttttattgtgtttttagggatgacatcactgtcttcttaaagctgttttaactctgaaaagttttgatacttttgatgtggccaaaggttctccaataaagataccatatataaatatatgtatttctaatgtctgaaacagattaaaaccttccctgtatcactatgaaggtcacatattggtaaaactttaccaatatttatggaataagtgaataaatgagttttagtccttcaccctattattaattctttcactttcataaatccatatctaatttaatcacttaataagaagaaagttgaaaactcaatcaccgttaactgggtggaagttcatgatccagttggatgtcatttttggatt

SEQ ID NO: 853911 - DNA, 506 bp, Homo sapiens
tctggacacatttggcttttgggatcctaccctctcctctgagataggagaacagtgcagtgtgccctgtggccagacccagaatgatcctgatggaattagaaaagaaactgcacctctttcctcttccagatctgatgttgaccttagttgaaggtctgggatttgaaaactgctgggattggaatcctggctctcaccttactcccacctacaccagtaggatatatagtccatgggaagcatctgggaacatctatcgtgtgagtcctaagaatgaataaattgtatacacctttacaattttattgaacagggttatttcatgagtgttatattgttcttgggtttttttctcttaataacataaatgycttgaatttaaaatgtcctacaaagaccttgagtcgttgtcttcatgctggcttttcacttactcttcccaacttcgctgagtcaagaccaaactctaggaggtgctgtcaacccatcgcttttcctcaggc

SEQ ID NO: 853912 - DNA, 573 bp, Homo sapiens
tcaaatttatttaaaaaactagaagacttaatgcagttggaaaaatagtacagagaatttctgtatagacttgacttagattgaccaatttttaacattttgccacttttgctttattattctctctatatatgtaaatttatatgtctaaccatatattctgaaccatttaagaacaagttgcatgcatcatacccctttacttgttaatacttcagaatatatttcctaggaagaagactattctgttgtataactctagtattgttaactaatttcaggagatttaacactgacataatactttaatctacagtgcatattttgacaattgtctcaataaggttccttccagctttttttctctctagtccagtaatctagaacaggatcacatattacattgtaatgtctctttttagttttctgtgatctggaacagtttcccagttttgtcttccttgacaatgatattgattgaagaatataggtcttatttaatagaatattcctcaacttagatttgattaatrttttctcatggttagattcaggttatgcatccctggctgg

SEQ ID NO: 853913 - DNA, 520 bp, Homo sapiens
cagactttaaagcaataactgttaaaaaaaatacaaagagagacattatataatgatgaaaggctttgtccaataggaaaataccacaatcctaaatatatatgcacctaacactagagctcccaaatttgtaaaacaattattactagacctaagaaatgagatagacagcaacacaataatagtgggggactttaatactctgctgacagcactagacaggtcattaagacagaaagtcaacaaagaaacaatggacttaaatcataccttagaacaaatggtcctaacagatatttacagaacattctacctaacaattgtagaacatacattcttttcatcagcatatgtaaccttctgcaagacagatgatatactaggccttaaaacaagtctcagtaaattcaagaatatcaaaattacatcaartactctctcagaccacagtgaaataaaattggaaattaactccaaaagggaaccacagaactatgcaaatgcatggacactaaataat

SEQ ID NO: 853914 - DNA, 624 bp, Homo sapiens
aagacagggtaagactttataacttcaggactgacaaggatttggggcaagacagagtactgggaaacaagcttaaagttgagagagctcattatagaaacaatgcattagttttgaagttgagaatasagacaatcctagataattctggcttaaaaccactttacctaaagtatacaaatattagtttcaactacttggttcattacctcaaatatccactttactcaactatgtaataatcacaaatgattgacctgtaaccaataggatttctggagaaggtaacttccattcctttgtggactccggctggaaaagtcccttgggttaataaagttagattccatactaagacttattgaagtgtgtattttcatcattgagtggagtaaatcttttctgatggacatggcacactagactgtgatagaattctataaatattgatcattgacctcaagaaactgaggttacatgacatttggctgtctataatttatgtaacataattatcatgcctctgttctgcttatttatatgcttgagaatctaatgctatttgcggacacaatgagatgagagtaaagacagccagaaggtttttaggcatcttggagagtg

SEQ ID NO: 853915 - DNA, 585 bp, Homo sapiens
gtctatatgcctgggttctaatcttagctttgccatgaacaggctgggtatccttgagcaatttaacctctatgactgtcagcttcctcatttgtaaaatggggattaggactgggtgtggtggctcacacctgtaatcccagcactatgggaggccaaggctagaggactgcttgaaaccaggagttcaagattagcctgggcaatctcttaaaaaaaaaaaaaaaaaaaggccaggtgttgtggtgtgcacctgcattcccagctacttgggaggctgaggtgtgaggatcccttgagcccagaggatcccttgaatcccattgaggttacaatgagctataatcacaccattttactccagcctgggtgacagagtgagaccctgtctctaaaaataaataaataaataaaatggggataataatagtgcctatcttgtgggacttttgtgaggattccattagtaagtatgtgtaaagcacttagcactgttaaaacastattagttcacagtgtgccagtctccaatataagtagtttacaggcacactttttacacgagacaactacttgtgaggtaga

SEQ ID NO: 853916 - DNA, 574 bp, Homo sapiens
tgtcacatggcattctccctatgtctctcttcattgtcttctgtctgtgcatttctgtcatatccacatcttccctttgtacaaagacactaatcatattgtattaagttccctttaatgaacttattttaacttgattacctatgtgaagaccttattttcaagtaatatcacattctgaagtactaggggttaggacatcaacttttttttttttttgtggggacacaattcaactcatgacagtgttgtgactaaaatacttttgcctaactcaagatcataaacatttgttttgatgttttctttctagaagctttatagttttatgttttaaatgtaggcctacagcctatttgattattgtatatgatgggaggtatgaactacagtttttcattttttttttttttttttttttttagtttttgttgttacttttgcatgtggttatctgaytgttttatcagcaatttctgaaaatccacttaaagatgcttttggctctttgtccaaaatcagttgtccatatttgtgtgggtctatttatgaactttattttgcctatcttcat

SEQ ID NO: 853917 - DNA, 503 bp, Homo sapiens
agctcccagtatgggaaaagtaaaggcaatataaggaagcttctctgggctcagcttgagacaactcactgtttgctcaattccctgccttacagcttttgaaacacctactaygtgtaaaatcaggatgataagaacagctaatgtttcaggagcacttactctgtgccaggcaatgttctacgagctttacatacgttaacttgtttaatcctcccaacaaccctgtgacatggataccattattcttctcattttacagatgaagaaactgaaacccagagaggttaagtcacttgcctaaggtcacacagcttactaaagcaccatgagaaataccaagaagagcaagctatgggtctaccctcaaggaactgaccgtcaaaaggacacatgtaagagcctcacgttaattcattcaacaaacatttcgctctgcagggctcccataaatacactctctcaacccagcctcagtggatgttcatttatgtagtcaccca

SEQ ID NO: 853918 - DNA, 525 bp, Homo sapiens
agggcataattgcacacagtatatagttatggggtacaatgtgatgttttgatatatgtttgcaattttccttggcttggggagggaaggcctcattgaggtgcgcaattgagagctgaaggagtgagtaaaccgagagggtatgtacgtgggtctccaggcagagggaacagcaaaggccagaggcaaaaatatgcgtgtgagctcccaggaactgcctggagggcagtgcagctttgcaggttggagccaagggactggagtagatgaggtcctagagataaggcaggaccttggctttggctgagtgaggtgggagctgtccatcaccttgttttgtttcgagttctgtgaggcagtgtcttgctgaacaaactgagaagatttctttgtagtattttaaattgggaagttctattgagrgccatgatgtaaacaatacaaagtaactgaaagtacattctatatgctataacctctgatcaaagttataaaaggtcatatgtggtttttacttgactattt

SEQ ID NO: 853919 - DNA, 584 bp, Homo sapiens
tggttctttttcctttcaggaaaaaggtttcagttcaaacatgtttcgcacygtgaaagccattccctaactatctttcctaaggtggactccccctctgtattagtctgttctcatgctgctaataaagacatacgcaataatttataaaggaaagaggtttaattgacttacagttctgcagggctgtggaggcctcaggaaacttacaatcatggtggaaggggaagcaaacacatccttctttacatggtggcaggaaggagaagtgcagagcaaagtgagaaaagcctcctataaaaccatcagatctcatgagaactcacccattatcacaagaacagcagcatgggggtaactgcccccatgatttaattacctcctactgggtccctctcacaacatgtggggattatggaaactacaattcaagatgagatttggttggggacacagacaaaccatatcaccctcttagttattcttgttcactttatcttcatagtacttctcacactgtgaaattaccttgtatatatttttacttactgttatctcccccactagaatgtgagctccatgaa

SEQ ID NO: 853920 - DNA, 562 bp, Homo sapiens
gctatcctaggtgttagggatacagcagtgaacaaaataggcaaaaccccttgtgcaagctcacattctaggggaagacagaacaaataaacaaataaaggaggaaaatataaytagtattttaagaactactaaggagaaaaataaggtaagaaaaggaactggacattggaacaaagatctgaaaaaggagaaagcaagaaacacagatatctgggagaggaagagtattttcaggtggagggaacagtatgtttaaaggttctggggaaggatcatgcctggcatatttaagaaaacagcaagaaggtcatgatggctggagcagagtcagggaaagactacaggcaaagctggtcagaaaggtgacagggatatattagtcagctttgctgcagtaacaaatgacccctacatctcagtgacatacggtaacaaacatttatttcttctcatgctatgcactgtggtgtggatgagctgctgcaagtcttcttattccgggatccaggctgaagaagcaggccttatttcacacataccactttcacagcagagaaaa

SEQ ID NO: 853921 - DNA, 439 bp, Homo sapiens
ctgcagcacaatattttgtacagaaccgtgttttagccagtcttgttctccgagtgcctcacagactccctgycaccaccccgctctaaattccccgtgggcaggactgatgtcagtctcacaagcatacctaccctggccaaaaacccttcacaaagtcctgaacctagcgaccgctgagtcaagtaaccataggagctggtcatccctcgtgcctcttagctacatggtacaagcagcagcatgaaggggtccttcaaagcctaaggcaaggctgtgggggtgtgattttcacatgaccagtgcgagaatgaaccgtggctctctggctgtggctctctcatcctggtttacagtaacccagcacaagccgagcctggcccatgaatctggaaccttacacagagacgcaggaatgactgtatgttctatttgtgct

SEQ ID NO: 853922 - DNA, 621 bp, Homo sapiens
tttcctttaagaatcacaattagaggcactgcctgcgcactcagctgagttgttagaacagtgaaggtgcactgctttgccagccctctcccagccgccaaccatgtgagtttaaagccagcctggatcatgatcaaggtaatccaactaggcttcttaccagacctgagaacttggacaaatcactggcactgtcccaggctgtttcctcatttatgaaatgggagtaagaacaccttctcagccagggctgctgtgatgtatgcatattctgacatacagcagttctcagtaaatgctcatctcctttttctttcttcaaaatgttgtgcaattggttttctttggacccatgagcagaacttttcattatgttgagtttcagttccttaaattcagcccatcatagaatgggtcagctctccctgattctcgttgagattcatgtttgcctgaaggtctttttaatttaaagtgggagcactccacaataagaagtgaaaaagaaatccaatattaagtatttggacattgaagaacttcagagagtaaaacctccaggcacataagtataggctcccctgactacacaaaaytgtgggcagatggtagtcataatag

SEQ ID NO: 853923 - DNA, 633 bp, Homo sapiens
gaatatgaagcatgtgctaccaaggctgacttacccatcaggtacagtgtccagggctcatagtcctttcaggagccaacagaaatgttttaatttttcttaaaactacatgcaaatttaaaaatgtatttttaagtcaaaagaatttttaatataaatatgaatataaacatctttgacacaattttacaatattttaaattaatcataataatttcgtaatgtttttattaaggaaggatccacaaaggtaaaggtgcctaggcttgcaaaagtcacacagtgaacctgcattatgactttgagattatcaccgtggccactgagtgtggagcacaaatgaactaatgaggattcacagagttgaggaagagtgttttcagctatgttctgatgaacatttgaatggagtttccatgggcacagcaggttcagagtgttaccaagagaattggaaatactcctggatgcaggtgagcatttctcccttagccaggccaagcagagaaggyggaattaaagtcacctttagtgttatcattttctctatctcaagagtttattatggatccttggaaccacaggagattggaattaatgtctagtcttgagttaagaatgttatatcatgcc

SEQ ID NO: 853924 - DNA, 571 bp, Homo sapiens
taactgttgagtgtaaattttatctataccaatctctaggacccttctcactcctctaaacctcagcttcctcatatataaaaaatagtacctatctaggttgttttgaggatttaaawatatatatattgcatatcaagttcttaatatgatacccagcagataacatgtacacagtgaatgatggctaagatttaggatcaccctgcattttgtttgattcctatcacatgcttggttttgtttgtttgttttgttttgctttgagatggagtttcattcttgtcacccaaggctggagtgcagtagcgcaatctctgctcactgcaacctccacctcctgggttcaggtgattctcctgccttagcctcccaagtggctggtattacaggcatgcaccaacaggtccagctaattttgaagttttaatagagacggggttttgccatgttggccaggctggtctcaaactcctgatctcaggtgatataactaccttggcctcccaaagtgctgggattacgagcgtgagccactgtgcccagcctttttgtgtgtgtgctttgagac

SEQ ID NO: 853925 - DNA, 565 bp, Homo sapiens
cagccccacacaaagaactatttaaccccaaaagtcaacagtgctaagtctgggcaaccttaatttattagactgggattttcaaagragtccatcacttgcaaaatgtgaagaaccacagccgtagtgtggagactttgaaatttggtgagatctgccccatggctcagcatgtaggccattttcgtaagtgctctgtatgttctgaaaataactattctcagcccagcgcggtggctcacgcctataatcccagcactttgggaggccgaggcgggcggatcacgagggcaggagattgagaccatcctggctaacgcggtgaaaccccgtctctaataaaaatacaaaaaattggccaggcacggtggctcacgcctgcaatgccagcactttgggaggccgaggtgggcggatcacgaggtcaggagatcgagaccatcctggctaacacagtggaaaccccatctctactaaacatacaaaaaaaaaaaaaattagccaggcgttgtggcgggcgcctgtagtcccagctactcagaaggctgaggcaggacgcctgtag

SEQ ID NO: 853926 - DNA, 616 bp, Homo sapiens
caccctccactccaatgtcagcttccttagggcagccactgttgtcttgttcatggctatatctgcagagccctgtgcagtgtatggtacatagaaggtgctcagtaagtatttgttgagagctgtaactctaaccccactgcctcttcctaacagcccactgagggtctcctctctctcacctacctatccactcttgtcctagggacaggctgggaggccgtagggacaagatgtcacctaccctgatgatttgtgatatgtgtcctggacattggtgtatccattccggtccttgggagtggctgattaaaggcatcatcttcctgcttcctccttttcctcctctttctaggctgccaggatcttattagccctgtttacacagccgggatgtcgagcgattaatttttaatggcttggtttattgcatgtttgaatggtttattgagtaattctcacatttaagtgattaattctccagagttcagaacgactggttagttttacattaatgggggtttctgaatgccaagagacaatcaatcaakccttcctgccagggagagtaatgttaagatacctcaaggtacaatgaggttaagaagaggcataa

SEQ ID NO: 853927 - DNA, 625 bp, Homo sapiens
caggccaaattcattgccatgaatgcattaagcggagattctggatccagtgtgttggctcaagcagctcagactggccctaactatttgcttggttgattgactaaaacctggatgcagaggtggcttacactaagtaaagttctaatgccagcatctccttgataggttgtaaagaaaggtaaccaaaggcttgggggtgttggaatgctgaagtggatttatcatgcaagacctgtgcatccatcccccaacaggtgcaggctgccatgcaagctgctctgccacatgggctgtgtgaccagcagacaaagtctgtggctgagagggatgctgtacggagaccttggcagacccctttgggtgactcacagcacaggcccttatgatttggggggaaagtacgacattctctgaaaataattattctccttctgagaaacaacgtctggaaggctactgggcattaatagagattgaaagcttgactatgagccactcgttatggtgtcttctgagctgcctstcatggactggattttgcctaaccaaccaaaccataaaatcaggcacgcacgacagcaattttatcataaaatggaagtggcatatacaatatcagttc

SEQ ID NO: 853928 - DNA, 551 bp, Homo sapiens
aatcttgagtctactgataacattattgatcgagcaattattaaatctaggcacatcctgcaaatgcgatattattaccatcctcatattacagttgaaaaaatattgaggtacaaatagcttgtcaatagcccaaaggcacaaagagaagcaagatttcacccagaacccgtgaacagatcacacaaaatttctcttgttccctggtccaaggaacttctgtaccttccaactacatttctttccaacagagaccttcttggaggatgagaagcagccactagttgacaggaggggaagtgaggcatgtagtcttcaagggagcagaccaccgtgggagttataaaagatcagcgacgcctctgggtgggttcaaaccaccaaccttttagttaacagccaaaagcgctagccgattgcgccacagagacatggctgagctcctratttcgttctaaaagagggtaagctgtcactaaacgctagctagcaccatccgccttttgcaaaatgactgggtaatctccaaagcctcggaaagccggagcagt

SEQ ID NO: 853929 - DNA, 293 bp, Homo sapiens
agttcagggcccttcacaaaaaccagctgcccctgttccttctgtctttctgccaattagtttcagaggaataccatcatccctggttatgcctcctgccctaacagtcatattccatgagggatggaggtgctggtgatcatcatggcatcctcaacccttcttcttggagctcctctccagccagtcctgactctgtcatggtcttaaggtggtgattacaaagcaggacaccaggttgaaaagtgacatgtgaatgggggtggsatcctgtgaacttaggaccttgggag

SEQ ID NO: 853930 - DNA, 607 bp, Homo sapiens
actgtgaacaaaggttgttttattattcagataaagcctctcaggtactctctctgagctgcccttggaggaatacatgaaaagtctgtcagggcaaggtgaggactmctagtttcttctcttgtggttaatctttcctggttatttcatgagattcctagggagggagttttaaggcaattgcatttctattttattttattttattattttattttattttattttattttattttattttattttattttattttattttattttattttattttattttattttttgagatggagtcttgctctatcacccaggctggagtgcagtggcacaatctcaactcactgcaacctctgcctcccgtgtttaagcaattctcctgcctcagcttcctgagtagctgggactacaggtgcatgccaccacactcagctaattttttgtatttctaatagagatgaggtttcgtcatgttggccaggctggtcttgaactcctggcctcaagtgatcctcctgcctcagcctcccaaagtgctaggattacaggcattagccaccgtgcccagcaattcttttggaaagaatctttcttagtcagctga

SEQ ID NO: 853931 - DNA, 644 bp, Homo sapiens
acaacataaagaaagtcaggaaatgagttgccaatcagaaaaaaataatttcaacagaagtaagccatgagggtttgtatcagactaaatttttaaacctttataaaccaataagaaatagacaaaagtgcmcactatgaacaaaataaaagccacaaacagatatttcatggaagaaactgcataaatggtaaattaacatatgaaaaaggactcaacctcatcagtaatcagggaaatctaaattaagtctaccatagagtactattttataactacaaaaatggaaatggggactaagaagtcttcttacattatataaaccaaaaataaaattgtaagaccccccaagcatcttaatggacccctcctcttggccaagggcattccaaagtgaacctgaaaaactagttcaggccatgatgggaagggggagctgaacatgcctcatcataccctcctcccttttggaattactggtagaacagactctaagtctgataaaaaaaaataaaataaaaaacatttacaatctattctctctgaagtctgctgcctggatacctggaggcttcatctgaatgacaaaaccttggtctccacaaccccttatcacaagccagatattcctttctattgataat

SEQ ID NO: 853932 - DNA, 644 bp, Homo sapiens
acaacataaagaaagtcaggaaatgagttgccaatcagaaaaaaataatttcaacagaagtaagccatgagggtttgtatcagactaaatttttaaacctttataaaccaataagaaatagacaaaagtgcacactatgaacaaaataaaagccacaaacagatatttcatggaagaaactgcataaatggtaaattaacatatgaaaaaggactcaacctcatcagtaatcagggaaatctaaattaagtctaccatagagtactattttataactacaaaaatggaaatggggactaagaagtcttcttacattatataaaccaaaaataaaattgtaagaccccccaagcatcttaatggacccctcctcttggccaagggcattccaaagtgaacctgaaaaactagttcaggccatgatgggaagggggagctgaacatgcctcatcataccctcctcccttttggaattactggtagaacagactctaagtctgataaaaaaaaataaaataaaaaacatttacaatctattctctctgaagtctgctgcctggatacctggaggcttcatctgaatgacaaaaccttsgtctccacaaccccttatcacaagccagatattcctttctattgataat

SEQ ID NO: 853933 - DNA, 645 bp, Homo sapiens
attattttgtgacatgtcttagattttgaggaaaaccagaattgtaacttaggttttayttattttatgaccttgcagcagtatggcaaaggaaacaatcttacaggactttataaagtatgtttacaaggaattggaattgggagtatagataaagttcgctggtcatagaaaaacaggcatttaatattccttttagttttaggggagggggaagggagagagggagagaggacacagggaagcttacagcaaaatttttgctgtttatagctttttttgggaagaaaacacatgcacaaatcctggtgttaggaatattttaagcatatatctttaatattattcattcaggaccgaagtaagttctgatgcagaaaatgagtgagttttacagctttctgagcccctgtttgactcaggaagcccagctggccccctcctttcaaaattacacatatattaggccacttgaagttgtcccacacctcactgattctcttttcattttttttaaccctctgtttcattttggattgtttctattgctctgtctttgcattcattaatcttgttttctgtggtctaatgtgctctcaatcccatccagcatactggttttcatctctagaagttggattttag

SEQ ID NO: 853934 - DNA, 645 bp, Homo sapiens
attattttgtgacatgtcttagattttgaggaaaaccagaattgtaacttaggttttacttattttatgaccttgcagcagyatggcaaaggaaacaatcttacaggactttataaagtatgtttacaaggaattggaattgggagtatagataaagttcgctggtcatagaaaaacaggcatttaatattccttttagttttaggggagggggaagggagagagggagagaggacacagggaagcttacagcaaaatttttgctgtttatagctttttttgggaagaaaacacatgcacaaatcctggtgttaggaatattttaagcatatatctttaatattattcattcaggaccgaagtaagttctgatgcagaaaatgagtgagttttacagctttctgagcccctgtttgactcaggaagcccagctggccccctcctttcaaaattacacatatattaggccacttgaagttgtcccacacctcactgattctcttttcattttttttaaccctctgtttcattttggattgtttctattgctctgtctttgcattcattaatcttgttttctgtggtctaatgtgctctcaatcccatccagcatactggttttcatctctagaagttggattttag

SEQ ID NO: 853935 - DNA, 668 bp, Homo sapiens
aaatgccttgaggggaaaacctttaccaagtgttcagttcacatctcaattcattctagaatcttggcttttcaagtcaaaatacctggacagctccacaygtctacccactccccacccccatgaggttacttaaagtgctgctgttttctctggtttttaaccactgccctctccccagcttctcagcctcttgtcccttgccaagaactagcaaataccctgagggggaaaaattgtttcattccaatgatcttctttctctctctctctctctccacccgctttctgtagctggccctgtgggtcctagcttttcaaagacttcaaacagaattcctttaaaccagattttatctacttcttttcgaagggagtgctggtttgccacaaaactccatcgtaactgaaagaggaaatcttctacaaattccaggtaaatcaaattttcctaccttgatttctgaagaaaacaaaaaaaagagaagaggccattggtagtatatacttgcatttttcttgtaatacttgcataagtctgaatgggtattaaaggctcttgctagaatcatgtgccaaagattgtctaccatgacctaaacaatcaggcctgtccaaggtccaagaatttgatcaggttggatccagtcctctggtgcactaacaga

SEQ ID NO: 853936 - DNA, 504 bp, Homo sapiens
atttagtcatgtataaaaagtggttaaagacatccacctctctagctcacagagcagatgaaggaacgagttagattatacatggaaattatttagcgtaatgcctagcatgatgggtacccaatcaacagtaatataactggcttctccagttacagcatttccctctctgtgtctatccttcaaaatgtggatatttgttattcatttaaaaatattttcagagttctacttttaataccatcccattccacaactagtaaaatcagaacagaaaacactttttgagtcatagctatctaataaaaggtaggagtggtcaccaagaaaactctgtcctaaaggaaatacatttaaaaagaaacacatgagcttggcctggatcttccagaaccttagaagttgggagctggtccttcagtggtttggagccaatatctgaycaactggagttaagaagctgaggctaggttcgtatagcaagctgaaacggtaactaaaagt

SEQ ID NO: 853937 - DNA, 599 bp, Homo sapiens
cccatatatgctgtctttcctcctgttacatgaatgaatkgattatggtcacatttgaactcaatcccatgatctgtgcagcaggtcccttcctcccttgcctacttaaggactatactctagcaatgcccgtgcttggtcctgcatcataaagttttcctctaatctggatcattcctaacagcacaggaatatgttataatgtcttttgcatttgaaaagatatttttctaggaggttgtgggcagattaaaaataaataaataaaaagatatttttctcttgatctcacatccctctccagctacaactccatttattcactttatttttacagcaacatccctccaaagagatttatattctcactagctccagttcttcttttctggtcttgatttaatgcatggcaattagtcttttaacccaggacttcactgaaatagctcctgacaaggtcaccaatgatgttgctgaaccaatacacatttctcagttctcatcctaccagcagcatttgacacaactgatcattttctccaacttgaaacacttcttcatgctcttcttggtctttcctctctgcctggctgcttttt

SEQ ID NO: 853938 - DNA, 628 bp, Homo sapiens
aaaatttgtatggaaaggcaaaggaactagaatatccaagacactcttaaaaaaacaaagctggaagtcttataccacttatatagacatcaagatgtatttaaagytacagtaattaagagaatatagtgttggtgcattggtagacagaaagtccagagacagacccacacatatacggatacttgaattttgttaaagatggtactgcagagataaggacaatgttttaagtaatggtactgggtcgaatggatatttatatggaaaaaatatatataaattttgacccctatcttacaccaaacacaaaaatcaattccgtattgattgtagatctaaacatgaacagcaaaacagtaaatcttcagaaaataataatgagaattatcttcataaccttgggtaggcaaaaatctcttaaaacacaaaacccactaaccattaaggacaaaattgataaactgggttatgttaaaattaggaattctctttatcaaaagactgcatatagacacagacaagcaagacacaaaggagagaatatatttgcaacacaaataactaaagatttatctgatcattaatttctccatctataggattacatgaggtaatatatctaaga

SEQ ID NO: 853939 - DNA, 628 bp, Homo sapiens
aaaatttgtatggaaaggcaaaggaactagaatatccaagacactcttaaaaaaacaaagctggaagtcttataccacttatatagacatcaagatgtatttaaagttacagtaattaagagaatatagtgttggtgcattggtagacagaaagtccagagacagacccacacatatacggatacttgaattttgttaaagatggtactgcagagataaggacaatgttttaagtaatggtactgggtcgaatggatatttatatggaaaaaatatatataaattttgacccctatcttacaccaaacacaaaaatcaattccgtattgattgtagatctaaacatgaacagcaaaacagtaaatcttcagaaaataataatgagaattatcttcataaccttgggtaggcaaaaatctcttaaaacacaaaacccactaaccattaaggacaaaattgataaactgggttatgttaaaattaggaattctctttatcaaaagactgcatatagacacagacaagcaagacacaaaggagagaatatatttgcaacacaaataactaragatttatctgatcattaatttctccatctataggattacatgaggtaatatatctaaga

SEQ ID NO: 853940 - DNA, 582 bp, Homo sapiens
catatagacacagacaagcaagacacaaaggagagaatatatttgcaacacaaataactaaagatttatctgatcattaatttctccatctataggattacatgaggtaatatatctaagaggttggcacagtgcctggcacatagaaagtgttccatgaagtttctattgcctctgttatgactgagtcatccaggccaaggactgtacctcaaatcactctcaggctgacagatctctctacagtttttgacactccacaaaggagtcagaagagtttcctcagttcttcttttacaaaccagtgttgaagacatttcctgaggaaccccttcatccccccagctgcagtccctatgcagacccccatgctcgattgtaaataacatagttgaagcattacaaggcaccagtggggaggatgagagtgggttttcatctcagctgagtcagctcrcgtggtgggaaatgccacaagagtgctgaaagcaggagggaggagtggcttgtcacggggaagaaagcctctcttctcccaaatgctatatcatctatcttcacagctgccaggatgcccagaag

SEQ ID NO: 853941 - DNA, 582 bp, Homo sapiens
catatagacacagacaagcaagacacaaaggagagaatatatttgcaacacaaataactaaagatttatctgatcattaatttctccatctataggattacatgaggtaatatatctaagaggttggcacagtgcctggcacatagaaagtgttccatgaagtttctattgcctctgttatgactgagtcatccaggccaaggactgtacctcaaatcactctcaggctgacagatctctctacagtttttgacactccacaaaggagtcagaagagtttcctcagttcttcttttacaaaccagtgttgaagacatttcctgaggaaccccttcatccccccagctgcagtccctatgcagacccccatgctcgattgtaaataacatagttgaagcattacaaggcaccagtggggaggatgagagtgggttttcatctcagctgagtcagctcgcgtggtgggaaatgccacaagagtgctgaaagcaggagggaggagtggcttgtsacggggaagaaagcctctcttctcccaaatgctatatcatctatcttcacagctgccaggatgcccagaag

SEQ ID NO: 853942 - DNA, 603 bp, Homo sapiens
tttttttttttagatagagttttgctcttgttgcccaggctggagtgcaatggtgcaatctaagctcaccacaacctccacctcccaggttcaagtgattctcctgcctcagcctcctgrgtagctgagattacaggcgtgctccatgcctggctaattttgtatttttagtagagatagagtttctccatgttggtcaggctggtcttgaactcccgacctcaggtgatttgcccacttcggcctcccaaagtactaggattacaggcatgagccaccatgcccggccttctcgcttgattcttcccttggggtgagctgcccgcgtgcacggtggcctgctagccctttggggggtagcatgtgcagtgtgtttactggagttgtacacatgctcacccgaggagttcttcccttttactggtggaatgctcctggaaggtcaactccgccatttcgtgtcttaatgcacgtgcttgagcccactcgcccagctcctgagatcttataggaaactgatgatcaccagttttaggtgttttctatctacaggcagaatgccttttcctggtgctggttgagacctattactattttagagag

SEQ ID NO: 853943 - DNA, 603 bp, Homo sapiens
tttttttttttagatagagttttgctcttgttgcccaggctggagtgcaatggtgcaatctaagctcaccacaacctccacctcccaggttcaagtgattctcctgcctcagcctcctgagtagctgagattacaggcgtgctccatgcctggctaattttgtatttttagtagagatagagtttctccatgttggtcaggctggtcttgaactcccgacctcaggtgatttgcccacttcggcctcccaaagtactaggattacaggcatgagccaccatgcccggccttctcgcttgattcttcccttggggtgagctgcccgcgtgcacggtggcctgctagccctttggggggtagcatgtgcagtgtgtttactggagttgtacacatgctcacccgaggagttcttcccttttactggtggaatgctcctggaaggtcaactccgccatttcgtgtcttaatgcacgtgcttgagcccactcgcccagctcytgagatcttataggaaactgatgatcaccagttttaggtgttttctatctacaggcagaatgccttttcctggtgctggttgagacctattactattttagagag

SEQ ID NO: 853944 - DNA, 561 bp, Homo sapiens
tctctatctgggctgcatattggaatcatcctggtagttttaaaacccctcctatagaacaagaagtgactgcagatgagcacggagaatatttttgaggtgataaaaatattctcaaattggattgtggtgacgattggacaactttgcgaatttatgaaaagtcatcgcattgcatacttgaaatgagtgaattctatagtacgtaaattacacctcattatagtgcctccaaaagttcctacccctagtgattctgactcagttggtctggggtgaagatcaggcatctgaagttgtaaaatctccccaggtgattccaaggttgagagccactgagttcatctcttgggagatgaactttgcccagagagctttgtgcatttttttcatgctaccctgtaggaaaagggaagggagttgcctctagttgagccctcccttattgcctggccctgtgytaaggcctgtatagatatgagagcagtcccacctaacaggtgggtaaactgaggctcagcaagctaaagtagccacacgtagctagtattgctgagctgg

SEQ ID NO: 853945 - DNA, 555 bp, Homo sapiens
cccagctgctctggaggctagggtaggaagattgcttgagcccacgaggtcaaggctccagtgagctatgaccataccatgccactgcactccagcctgagtgacagagcaagagcttgtctcacaaaaaaaaaaaaaaaaagaaaagaaataagccagacatccagacatgtaaggacaaacactccatgagggcactttgctggtgatttccaggggctgctggagggtgaatgaggggttagtgtttaataggcgaggagtttcagttgggaaagaagaaaatgttctggaaacagatggtggtaatgattgtacaacaatgggaatgtgcttaatgccactgaaccatagacttaaaaatagttaagatgggctgggcgcggtggctcacgcctgtaatcccaccactttgggaagccaaggcaggcagattgcctggggtcasgagttcaagaccagtctggccaacatggtgaaaccccgtctctactaaaaatgcaaaaattagccgggtgtggtggctggcgtatgcctgtaatctcagctactcgg

SEQ ID NO: 853946 - DNA, 578 bp, Homo sapiens
aataaagaaataaagaaataataaataaataaataaaaaatagtacatctacatgatgaaattcaatatcggtatttaaaggaataaggttgaactatcatactttatcaattctgaaataccactaaatctaagataagccatctatttagtagcaattttttagcaggaagaaagtaaacataaagcttttattaataatagcatacatttattcattcaattgtataccattttcgtctgtcacaataaagtttgagtctcagccttattcacattcagaatctaggatccttctgaattacttcggttagttaatgcaacatcatgataacaggctgcttttcataatgctagttaattatcttaacctatattgtctttatgattgtgtgtataattttaaggtatattgaagaatactggggttttgcttgcctttcmtttttgcttacttagtttttttttcttcttcttaattgaattacctattgctggaaattaaacagcttcttctgaagataactccaaaagttttggcagacttttgagtctgtcttacctttgaaaattctgtg

SEQ ID NO: 853947 - DNA, 590 bp, Homo sapiens
tcacaaattatcaggaaaacgaaagttaaaaccacaatgagataccactttactcctgtgagaatggccacaatcaaaaaaaaaatkgatgttggatggatggtgtggaaagggagcacttctacactgctgatgggaatgtaaacaagtacaaccacaggcaggcacggtggctcatgcctgcaatcccagcactgtgggaggctaagatgggcagatcacttgaggtcaggagttcgagactagcctggccaatatggcaaaacctcatctctaccaaaaatacaaaaattagccaggcgtggtgatgggtgtctgtaatcccagctactcaggaagctgaggcaggaaaatcacttgaacccaggaggcagaggttgcagtaagccaagatcatgctactgcactctagcctgggcaacagagtgaggctcaaaacaaaaacaacaaaaccaaaaacaaagaaacaagaaacctagtgcaactactgtgaaaaacagtatggagattccttaaataaccaaaagtagaactaccatttgatccagcaatcttgcttctgggtaactacccagaggaaaataagttat

SEQ ID NO: 853948 - DNA, 527 bp, Homo sapiens
acgcttagtcttttacaagatccactagtaatattttctccctaatttccagtctcaagacaaaycttgtcactgtgaaacaaatgtattaaaacaatgactctcccttctacccgtctcaaatatttaatctactatcctaaaaagaaaggataggacacaagactaaatacctttttctttctgcatctctcttattgaaaaaacataaaagtgttcacattttcgtattttattcaatcaaaatgctcagaataaagttttacattctttttgagtagtgaccgaataatcttggcattttggggagcaattttgtactctgtcctaggagataattctgtgcagtggtcctccaaagtcatagcagattcatattaaatattggctctttttcaaaatatgttatgttgagtgtgttttcaggatccaggtcatttagcattatttggataaatactttgataaatttccacaccttgttcatgagtcatcaactattggtgacaattttacaatctctttta

SEQ ID NO: 853949 - DNA, 601 bp, Homo sapiens
aaaatttaaaagtgtaataaagcatttgacattttggtatctgtttttaagyattaagagagcaaggccataatgtaaacatgaaaacaaagaagtagaaaaagaactcacctaaaacgtttttgcttggctataaaatttataattgcataagaatgtgtctattggcaatcagagggaactgagagaaatgtctccgtagaatacaccttatataggagcaagaatttttttccacaaaaaaaagttgtggttgttttgtttttataattgtaaaggttaattcaatttttcaagctggagctcataccaggtagtacatgggtagactaaatttctttcttcactcaatttgtcttcatgaattgagcttgtgaattggacctgcattcacattggagtaaactctggctatgtgaacagaaataaaatctttacagttttatcaaggaaaaaataaagcacaactctgtatgtttgttttttttactttgttaccttttccaaaaaataatactaataacctgtattcattcattttatgctgctgataaaaacgtgcccaaaactgggtactaaaagaggtttaattggacttatg

SEQ ID NO: 853950 - DNA, 616 bp, Homo sapiens
gcatcctgcacatgcacgcccaaagttgaaataaaagttaaaataatcctccaaataatattgtattatatacatttatgtttcacttaggaatatrtttcagttttaaaacattttgtttatacaatacaattttataaaacctttccctatgtaccaagttaatttttagatgatatacatatttatggtagatgtgagtgaaagctttgtatttgtatgcttcttagttattattgctagtttttgaaaaatcttgaatatatttctattagtcttaatacacattaattgtattcccttggcttatttatatagtaaataacatttgcaaagataatttttaataaaatgttgaaacgtttccatgttctgttatttcagctaaaaaataactacaataaaaacagtgacccatgtgtcccaagcactcttctaagagccagaaagacagctctaaaatatcacctctgctattataaagtttatagtcttactttataccatatttatttctattttgatagttctgatttattcttttattctttaatatattgttatatattacttttcaaaggatgagcttcagtatttataatgtctttttttctgt

SEQ ID NO: 853951 - DNA, 359 bp, Homo sapiens; identical to SEQ ID NO: 836935

SEQ ID NO: 853952 - DNA, 519 bp, Homo sapiens
ctggtactttaaaatatatattttaacaagaaaatatctggccgtgtgcggtggctcacgcctgtaatcccagcactttgggaggccgagtggggcaratcccgaggtcagcagatcgagaccatcctggctaacacggttaaaccctgtctcctctaaaaatacaaaaaaaaaattaaaattagctgggcctggtggcaggtgcctgtagtcctagctactcgggaggctgaggcaggagaatggcgtaaacccgggaggcagagcttgcagtgagccaagatcgcgccactgaactccacctgggcaagactccttctaaagaaaaaaaaaaatccatgaggcaatggattatagtatggtaaatatcgaaagaacacttcattttcaaaattactgatattttgaaaataactagaatagaaagtttccctaggatgaaggtttgggatcagtagaatattatatgagaagtattgagtctttacacatcccagtccctgaacaaagacctgcaaa

SEQ ID NO: 853953 - DNA, 509 bp, Homo sapiens
tccccaggccagcacagggatagggaaagaccctggaggtgacagcagaaaacagcagccccaattatagtctgacccaggctattgagcccacctgacccaatgaaagccaccaccaaaatstgggggctccaacagataggcagaactgatgacaactgaagagagaggaagagaacagagagagacaacagccaagaaaacaggccctatcccagagcaggccaagcctcaccatgttgtcacttagtcatgctcaaaggatgctacaggaaggaaggggcacctgctgggtgcttctgtagaagaggcaggcctcatggggtacgatgaaagggagcctgactcaacagatgaggcagggcacccatgggcaagagacccagtggagccgctgctaatgaaagaaaagggtacttgcactatccatggttctgaggctaaagctgctccaccaagtgggtctcaaacatattagtgacaatagctgtcgctttgtactgagtgca

SEQ ID NO: 853954 - DNA, 419 bp, Homo sapiens
ccataggctgctcccagccagaagcgagcatgctaggtamtagtgccacctgttcctgcaggcaagagagtcctctaatagtcaacagtccaccagagactcccaactgatctggccaaatgttcctagagctgtgtgttgtgtctcagactcctcctgcccaacttcttccttcacctctccccttcatcagctggcttactgttcacttcaaggtcaagacattggctgtctgatgcagggacatccctggcacggcctccatggtcatctagcaaggggagggtggagcaaaggcttggtcccatagcatatattcacccatctccttgtccatttgttgtcttccagcagaatgtaagctctgagaaggtaagcagtttcctctcctttcctacaactgctgtcttccttgtatc

SEQ ID NO: 853955 - DNA, 261 bp, Homo sapiens
gggggtgacatcggcctcctcctgccatgaggatcaagataggcagcaatggccaagggcacagtctggcgggccatagccctgtgccacccaccgcgggtgtgcagcggtgcagaagcagatgcgtcygtctcagcgagttctccccaggtaggctgtgtgggcgctgggccaagcacttccctaccacgagctggtcgcagttcagaccaagcagtgcaaggcacacccgctgggtgtgaggcacagtggtggccccac

SEQ ID NO: 853956 - DNA, 528 bp, Homo sapiens
ctggatgccttggggtgggaggggagacccctgccctgggatcctgcagctcctggctgctgtgggtggggtgaggggcctaaraacatagctgctgggggacctccactggtcagacgtcaggttcaggtagctgctaaccgtgtacttgtgtttctctgtttggagggtgtggcagtcttcatgcccagggtgatggtggtgccctctgccttccaggccaccatcacggcatcagggtagaagtcactaatgagaggcatcttgttggcttggagttcctcagagtgtccaaaggggcggccttgggcagacctgtgtggacagaggagggggcaagagaggcagagggagtactggggtgttgtagagccccctctctgtctaaagtctctgtgaggttcacggcatggctgtccagtccacccggggctgcctcttccctcctcattcccctccttttcactcaagacctctgcagagcagccagccccgcaccttcctaggagctcttcccaagtcaccttt

SEQ ID NO: 853957 - DNA, 588 bp, Homo sapiens
tgattttaattaatttattcaacaaatatytattgggctttactgaattcttgttcttgaggaaagcagatgaggttccctggagtcaaacactttcactgcagccaatcatggagaaacagaaacttcaggtcagttgttttagaatgcaaaaggacaagaagatcaaaattttggataactcaaaattatttttagttaaattaagagttttaagatgacgcttgacagaacacaggatgagtcagtccagaatagttgtccaggactcaaaatgcttattgattaaaatagaatacatcctactagaatcattttaagattgagagcaagatgaaaaggacgttaaagggagagggaaggaggaagagtggagagagtagtagacacacaagaactgttctccacttgggaaaataagccacttgtccacagcctcaaaaccaaaagaaaggctaatcagagataacaggggaatagaacccagagggccaactgacaccaagaaaatagctttaacttacatcaaagagggctttaaaatggagaagcaatccttctccttccaggaccaacaagagctgaaag

SEQ ID NO: 853958 - DNA, 584 bp, Homo sapiens
cactcctggatttctgaccctcataaactgtgagacaataattgttgttttaagcagctaagtttcaggatactttgttatacaacaataaataaatagtactctctgagagtgattttaaggcatggccctatcaaaggagtagccttactttaacacctaatccagtggatctcagaggtattaatatctaccatttgtgattgtcttatattacccaaaagacttaagcttttaatgggaaggaagattatatgaacttttttgatgtcctaaaacagcacagtgccaagtgcatgtaagtactctataaatatttcctgaattgattttttaaactacattttttaaactagaattcatgggactgaatcaaactgcattttaacagagcatactattgcatgttcgttcatcttgatgcagttagaaattattccaggtactggctgggcgcagtggctcacgcctgtaattctaccactttgggaggccgaggctggtgatygcctgaggtcaggagttcaagaccagcctggccaacaggtgaaacccagtctctactaaagtacaaaaattagcca

SEQ ID NO: 853959 - DNA, 693 bp, Homo sapiens
ctggcagaggaaatttctaagtggcaaagtgttcaagggaagcagagaataaaagtttagaaaatttgcagcctgatgacgcaatagaaaagaaaaacccttttctgggaagaaattcaagccagctgcagaaatttgcataagtaatgaagaaccaattgctagtcactaagataatggggaaaatgtctccagagcacatcagggaccttcatggaagcccctcccatcacaggctgggaagcctaggagggaaaaatggtttcacgggccaagtccagggtcccactgctgagtgcagcctagggacttggtgccctgcatcccagctgttccagctgtggctaaaacggaccatggtacagctcaagttgtagcctcagagggtgcaagccccaagccttggcagcttccatgtggtgttgagcctgcagatacacagaagtcaagaattgaggtttgggaacttctgcctagatttcacaagatgtatggaaacatatggatccccaggcagaagtttgctgcaggagcagggctgtcatggagaacctctgctagggtagtgtggaagggaaatgtgaaatgggagcccccacagagagtctccactggggcactacctcatgtatctgtgagaagagggccaccatcctcyggaccttagaatagtagatccaacaacaacttgca

SEQ ID NO: 853960 - DNA, 622 bp, Homo sapiens
aattcctttgcttgtctatttagttttctatatgtcattaatcttcctcatgctgaygtctttgctacatgaatatatacatatatatggtacacatacatatatattttatgcacacacacatacatatttatgctcaaggacctcctgccctgctatcagcctagagcttttcatatacctctacatcctcatttcctgaatcccatgccttccattcttgttgctgttgtctgtttactttctttttgctggaactatattactcaatagcttcctgatataggaagttaaagttttgaatccttgcaaatccagaaaatgtttgtattctttctttacaggcaaccgataatataacttagcatagaattctggattagaaataactttactcataatttggaaggtaccattcttagctttttagtttactataatgttgcagaatactgcagtgatattctgtattttctatgtgacttatttcattggtctctggaaatttttgtttcctttttatttttggaatttgaatgcttcatgagattgcaccttgatctgggtttttccaccagcatgtggtgagcctttttttttaactttttaatattttattttt

SEQ ID NO: 853961 - DNA, 527 bp, Homo sapiens
ttatgatctggagtcaagtaagtgattgtctatcagcatcttaaaaaagtttctataatttgtttgctgagttggtgaatggatttatttttaactatgtttttctgtttctttataatgtgatgcaaacctaacaaaatttatttttatatacaactgtcacactggtttatttcacttattccagggtagcttcgtcctgataagggttagtaaagcgccatgaagatgttcaggttacatggggtagtgtaaccattagtccagttgacaaaatcatttttcttctttttttcttccctgtttcccttcttctgtctcttggtttcctgttctgttttctttttgatgtcagagaagagtgattagtgaacagggggattccacagagcttttagggttactgatcttttagacattaaggaaggtagaaggaacagatgactcagtctctgtggcagtgtgaagcatcattcttctcygaaactaccatgtaggtagccaccttcttgtgatgacttaaaaag

SEQ ID NO: 853962 - DNA, 602 bp, Homo sapiens
gagaggacaggcctcacacattcaccattcccaggtgtgcagtagtgtaaaaataattcacactgattccaaggtatcacttatcaattgggaattgtattgtcagaggcgtgtgaaccagaacaactccatcttgaacaggagctgggtaaaatgaagctgaggcctactgggctgcattcccagacaattaacgcattctaagtcacagcatgagatgggaggtcggcacaagataaaggtcataaagaccttgctgataaaacaggttgtaaagaagccggacaaatcagaccaaaagcaagatgtccatgagagtgacctctggtcgtcctcactgctacactcccaccagccccatgacagtttacaaatgccatggcaacatcaggaagttaccctatatgatctaaaaaggggaggcatgaataatccaccccttgtttagcatatcattaggaaataaccggccrggcgcagtggctcacgcctgtaaacccagcactttgggaggccaaggcaggcagatcacaaggtcaggagatccagaccatcctgaccaatatggtgaccccgtctctactaaaatacacaaaaaaaag

SEQ ID NO: 853963 - DNA, 564 bp, Homo sapiens
aagtatacactttagtgttactaaatccattcataatgttgtgcaccatcaccaccatccatctctgtaactcttttcatcttgcagaactgaaactctaaattcattaaacagtaactccagttccctccttctttctagcctctggcaatcaccattctactttctggctctaagattttgactcctctaagtatctcataaaagtggagtcatatagtatttgtctttaatgtggctggcttatttcacttagcataatgtcctcaaggttcaaccatgttgtagcatgtgtcttcatttccctcctttttaatgctgaatgacattttatgatatgtatgtatgtaccacattttgttttcagataaatgacatgagggttgcttctacattttagtcattgtgaatagtgctgctatgaacactggcatacaaacatctctttgagatcctgctttcaattcttttggrtacatacacataaatggaattgctggatcatacagtaattctatttttaaatttttgagttgccgccatactgtttgccacagtggctat

SEQ ID NO: 853964 - DNA, 628 bp, Homo sapiens
atgtagaacacagaaagcactaagcctccaagaaaaattgataaattgattttcatcaaaattaaacccttcagctccttggaaagacaaactacagacatggagaaaatatttgagacctctctttccccctgtttccctccttttctctttctctccctccttctctctctctcaccccaaccaagaagttgtttccagaatttataaagaatacttataattcagtagtaagaaaactgagtaaaacaggtaaaagatttgaatagatactttaagaagatatacattaaaagataatcattgtcactggtcaccagataaatgaaaattaaaaccataatgagatattactacacacccactagaaagactaaaattaaaaggactgactttgtcaagtgctggcaaggtgatggagcaactggaactcttgttcactggtggtgagaaagtaaagcgttatcattgttttgggaaagtttagtagtttgtaataatgttaaaggtgtacttactgtatgacccagcagttctrctcctagttatttacctaagagttatgaaaacttacatctacaaaaacaacttgtacataaatgttcaatgttccaaacctggaaacaag

SEQ ID NO: 853965 - DNA, 565 bp, Homo sapiens
tcatccattgatggctgttccagttcactttgggagtaaaaaatttgataattacttgttttgaggaaataaaatacatgtgctcacctaccgtattcagctagaagctggtgttgatattttgattaatstaggatagatgctttttccaaataagattggaagtctgtggaagtgcatgatttattttgctttccagccaaactatcaattaagtcatttcgtcttcatatgatctctcattagatcaagcattggctaatttctgtaaagaactatatagtaaatattttaggctttgtggccatatgatttttgtcgtatgtgttcaactctgatgtagcatgaaatgaatgaatgtaactaataagtgtggctctatccctgtaatgtacaattttactaaaaatgtagcacgaattagaacgtacatgaatttgaattttacataaatgtaaaaatgtaaaatgaattttacctatgagccatatatttttggaaccctgcagtagatgatgattgacttactttgggggcactgttgttattattgtctcatattata

SEQ ID NO: 853966 - DNA, 507 bp, Homo sapiens
aagcttacatttgaggttaatttgatgaggttgacattccagactcaaaactgatattaacttttttsgggaaaatgtcatttaaagaaaatgtgaggtttgttcttttgaactgaaataaaagtctgtcccttatgacaccctcttaaatatttataatattgactcataaggaactccagaatcttgttagatacccctaaatcaagtggatttaagagactataatatgggtatcatgctgtgctagttgttatgcaaaattaagcagatcttgtacctgaaatgaacaattatacaaaaggtaaagggatgattaaagagtgagtcttagtagttatagaaaataaatacagtttataggcattgtataaaagcaagtgtgtcaggctctactcctttttggttttcctagagtatagttctacaatgtgtctgcctgcttcttcagatatccattgtcatcatagtagcttaagcaaatatcttttctctcttaaactatct

SEQ ID NO: 853967 - DNA, 595 bp, Homo sapiens
tccaacctgtgacagtttctcagtctttccttgtttttcatgaccttgacagtcttaagcagtactggccaaatatcctgtaaatgtcccctgtttgggccttttctgttatttttaccatggttagattgaggttatgggcttttgaaaaggaatcaacagaggttaagtgcccttttgtcatgtcacatcaagggtacatgttctccacatgacaacatgattaatggtaactttcatcacttggttaagataatgttttccagtattctccactgtaaagttactgttttccttttgctcactctatgcttaggaaatgattcactacgtctagcttacactcaaggggaaagagtggagggcaaggggagtagggggcagaactgaactccacctcctgtagaagggaatatctacacatatgtaataattttattgaatagaaaatttttgagaaaaggagaacaggagacttaaggattgagaattatactcctagaaaacgtcytatgacctgtggaaacaatagtacttcctatttttgggataaatgcacatgcacattccaaatgtcaaaacagtctcttccata

SEQ ID NO: 853968 - DNA, 622 bp, Homo sapiens
  misc_feature 38, 39, 40, 127, 128, 129, 135, 137: n = A,T,C or G
ttaagaacgttgcacagttcttgttacaataagctacnnnttttacggtttaaaattgctgatacaaatgcgcacattgtatcaggatacatacaggatacaggatagtagaattgcatgagcaacnnncattcngnatctgacattttatattttcatttagggagatattgatcattcaaaaaaaaaaactggcatcattgatccccccatttttttgcaggtgtggggaaactgtcaacaccctcgcctctgcaggaggtatggccatgtaacgcattgggccaaatgactgggacaggcagcaaaaccagtgtgcacttttccgtgttctcttcatttgggtaaccagttcctgcctgtggaaatttaccttccaatactcaaaataaatgaatatcattttctgaaagttaaaactcctttatgacttcctttgttttcaaatgtacattaggatttcatttcacctgagtgctttatcctttaaytgtgatgacccttgaagtcataatgtatattcaaatctttatttcaaatatatattttacattactcattattaactcttattgtcaaaatgaagacttgggttgctttttaaatattatcaattgttcat

SEQ ID NO: 853969 - DNA, 482 bp, Homo sapiens
tgaaggagagaggacatgatcagagacaatgtaaataatgtcaaaaggctcgcaaatgggaattagcaggcactaggggtggaagagagaggggagagtccagtctaactacagctgaagagcccgtggagagctgaggtgtgtggggtggagtgcggctggaaagtgaaggcagggagaccagaactcagcgtcgagaaataaggtgcaaatgggagttgtttcagtcagaaagttacatgctgaaataaggtacttatgaaagatccacctggcagttttagtcttgaaagcaagattaatattaattgctactcataagtgttcatagccacagtgggctttggccaggaactccttttcttcttctacctacacaagctactcctgtactccgtctgcttttatgaatgaaygcatttggaccttgcttcctacattaatcagattttatccccttctctccacagcaacgtagtatc

SEQ ID NO: 853970 - DNA, 488 bp, Homo sapiens
gagactttttaaaatacagtgataggtgaatcctttgaagatckagaaatagaacagcctgaatctgtaaatgcctaatgtcagttgacagcagctgcattatgcaggctgttaagatagagatccagtgacaaatagagcttgcatcatggtgatggctagtactcccattcaggagatacattgacatcactgtctctggggtccttgtccctagcctgcaattacagttcatataaaatgtgacagactccttaagaaaaatgtaacctctcaatttacaaagtaaacacccaagataagtcaggttgctggcagctgcaacttaaattgcttttttctcttttactttgttcacgacattgttttgaaagtttctctttttacacttccaactttcaggcatctctcttgaaatagaaatcaatgtttctaaggaagtattgtcttgcaaaagatacattttgggccattccccatcactcaag

SEQ ID NO: 853971 - DNA, 616 bp, Homo sapiens
agtcaccatatgctacatacactgaacctaaagtaataagtagttctgaaagagaacagaggagaagagggactccctacagggataaatggtccaracttaaggtatggcttatttatgctttcaacaccccagggactacaatcccagctgaccaattaaacttcgagagtttcagtggagatttaaggtcctgggattacttctggaaaaaaattaaaaagcttaccgtgcaattggcccaatactcaaaccaaaatctaatggacagaaaatatacaatttacaaacttgtgctttttttaaatgttaattaaaaatatgtttattaaacccacagatttttttagttggaaattttaaaattaaatttgattaatgaaaaaataaaatataaggaaaaatgacatttggaagcaaaatgaagaatttcagaagaaagaaaacattcaactaaatgatcttttgaacatattgaattcagtttgctagtgttgagaatctttacatccatgatcataaaataaattggcctgtaattttcttataccgtccttgtctgacattggtgttagggtaatgcatgaaaaaatgtgttggaaagtgcacccttttt

SEQ ID NO: 853972 - DNA, 682 bp, Homo sapiens
tgatagtgatctgatgctcatagatttacagaagttacstttgtagcatgatatacatctggcaaactaaaggttagtgacaagtttataaccattttgctggttttcccagtttcagaagaaacatgctgagggggttaagctttcctaagtctccattatcgcacgcgactgttatgatatttattgtaaacatagtagaccattgtctggaatagactaaatcctaaagaaactaaatctggaactacttttatttacatactatgaaatagatgaacctattctttgaattttgaaatggattcatttttggtttaggtggttccaatggccaatgctaaaactactggtgtttacactacaaagttcacttcagcctttggagaaaatgcgtttctttgtacttactgagatacaatagcagaaacactgaccccagtggctgccaatgtgaaccgaggtttacaatgtattgcaaagggagggagcagccaatactcctcctctagggctctgctaggattctaagtctttacaatgagtctcttcgaggggtaaagtgtttaagaccaagtctcatactaaaatgctcaatgaacctgggatgggagataagataaaaggcactctataaggtctttcataggtcagatactgcagtgcagttaaagacactcta

SEQ ID NO: 853973 - DNA, 580 bp, Homo sapiens
tctaatttaaaaaacagaaaaacatatttctaaaataatataaaacggttctcatctataaaatactgatatatgacagacaattcaagatttactacttcctaggttttcacaaaaawttaaggttactaagaataaaaattcttgttaatatataattctgtattcaaagagtgccaaagtaagtttttttatgaaaaagaaattataataaagacataaaaatatgttcttattaaaaggaaaataatctttgtcaaattcaaaggctattatacaaatccaaagatgtatttattttaaaaattgggtaaaaagaataattttgtatgagaaagagtcttgtatagtaaatttagtcctaaaaaaaaaaaaaactcgttatttaagaaagagggaaattttggacaaaacagaaagtccaagtatgtcataaatagtctgtgtaagatatgataaagtttataaagagaatttatgaaagaaatgttttggaggctaaagctactctttcttagatgggaggctcaagtaactccatcttgaatggtgatctgccctgttggcttctgattaactc

SEQ ID NO: 853974 - DNA, 654 bp, Homo sapiens
ttttccagacaaacaaaagctcaaagaatccaccaccaccaaatccagcttataataaatgataaagggagttctttaatctgaaagaaaaaaacactaatatgcaaaaagaaaatatgtgtgaaggcccaaaaccaacaagcaaaattaagtataaggaaaaacccagaaaactctaacactaaaattgtggtgtgcaatacaatcatagctctagcataaaatccaaaaagcaaatctatgaaaaacaaaagtagtaatgcctacagcaacctgttaaaaaaataggctatattaaaatatgtaaattgagagaacataaagtcaaaatgtaaggagggatagagttaaagtgtagacgctttttttttttttaattgttttttgagagacttgttgcccagactggagtgcaatggcactatctcagctcactgcaacctccacctcccgggttcaagtgattctcctgcctcagcctcctgagtagctgggattgcaggcatgcacaaccatgcccagctaatttctgtattttwgaagagagggggtttcgccatgttggccaggctggtctcaaactccttacctcaggtgatcctcctgcctcggcctcccaaagtgctgggattacaggcatgagccactgtgccc

SEQ ID NO: 853975 - DNA, 589 bp, Homo sapiens
cagaaactccttacagctgtattattccttcagtagcaagtgttccttgtccttaacccttgggcattgacattcttgggagctagctaatttttctctctctctctctcttttcattccttctcacctccatctgagtaattcttctcttattttctggcccagattcctaggagagagactctaatcaatgtagctaatcacttcccccttgttaggttacagttttttcatccagatcactgagcagtctatgggctgattgcccttttgtcatgtatctgctcttggttcaatcatctatggtaaagtcatacaagggtgaaaccacagagttctgtagtacagaacatgcaactgctgaaggaaaaaaaaaggtttatcttaggaatgactatgaatgatgctttgtccattgaaagaggattgtgtgtatagtaggcactgtgattaatctcttcaacaccttgtattcattcaaaaggtattgcttactatgtgcagtctggtactagagataggatatgacaatgaacaaaacatacaaataattstgcccttctggatcatgcattctatagggaagcca

SEQ ID NO: 853976 - DNA, 571 bp, Homo sapiens
gccatgtcatttggggcaaaactgatgattaaaagagaagcccaaggcygggcgcagtggctcacccctgtaatcccagcactttgggaggcaaaggtgggcagatcacctgaggtcaggagttcgaggccagcctgaccaacatggagaaaccccatctctactaaaaatacaaaaaattagccgggcgtggtagtgtgcccctgtaatcccagctactcgggaggctgaggcaggagaattgcttgaacctgggaggcggaggttgcagtgagccgagatcacgtcattacactccagcctgggcaacaagagcgaaactccatctcaaaaaaaaaaaaaaaaattagctgggcatagtggcgcctgtaatactagctactcaggaagcttagacaggagaatcgcttgaacccaggaggctgaggttgcagtgagctgagatcatgccattgcactccagcctgggcaagaagagtgaaacgccatctcaaaaaaaaaaaaaaaaaaaaaagggaaaccgaagtgaaactgatgctgtccccacccctgtccagacctccttggttcc

SEQ ID NO: 853977 - DNA, 504 bp, Homo sapiens
gatgccggctgtgtttgcagatgcaatgttactggagaactgccatgctcattcattacctgctgtccctggctgctgctcccgctgcctgcagacttgagtagttgcaacagggacctatggtccacaaagctgaaaatagacaccatctggcccacaactggctacagagttgtagtagctcagtgcaaaatgaaaatgcaggggcgttgtttataaactaaaaatgtggccgggcgaggtggctcatgcctgtaatcccggcactttgggaggccaaggtgggcggatcacctgagggtgggtgttcgagaccagtctggccaacatggtgaaaactgtctctgctaaaaatacaaaaattaaccgagtgtggtggcatgcrcctgtaatcccagctacttgggaggctgaggcaggagaatcacttgaacccaggaggcagaggttatagtgactgcactccagcctgggcaatggagtgagactctgtctcaaaaataa

SEQ ID NO: 853978 - DNA, 622 bp, Homo sapiens
tgcatgattttactttattttctgcttatgcaaacctgaaatatgaaaagtgtaagcaagggcagaatggtccctatagcttacagttctgctctataatttgcacttacaaatggcctgtcaagttggttatatgatcagctatttaaatattgatgagacatttttttttctcactgctgttctcagctaagccagcttggaactataagcaaatcatgttgtcagtcaatgtgtaatgcacattactttctctttctctccctcactgtatcctcctccagtaatttcctgtaaaacttgctgcttacctctgacaggaataacggcagctcaggtcatccatcaaaccagcactctgtgtcagcagcttcttaaatgatataaggagattcttatatggcatagccatcagaaagacacaaagaagaagtcacagttgtcagcttgggtcataaaccataggaagtctcaatgagccttctagtacctggccaaggctagtatgaaagagtcaggaggatagaaagatagcatggctacaaatggcaggtacatatgtctttcartattcaaatgcatacagtacagcaatcctcagggatcattcacatgtagaaaa

SEQ ID NO: 853979 - DNA, 632 bp, Homo sapiens; identical to SEQ ID NO: 827585

SEQ ID NO: 853980 - DNA, 628 bp, Homo sapiens
cagtgttattaactatagtcaccacattgtacaataggtctcttggacttattcctcctgtctacctgaaattttgtaccctttgaccaacatcttttcccctttcctaccccagcctctggtgcycaccagtctactctctgcatcgatgagttcagttttcagattccacacgtgagatcatgcaatattcatctttttgtgccttgcttattttaattaacataatgtcctccaggttcatccatgtttttgcaaatgatagtatttccttctttcttatggctgaatagtactccattgtgtatatatgccacattttctttattcatcctttaatggacacttaagttaattccatgtcttggctattgtgaatagtgctgaaataaacatgggagtccagatagctctttgacatactgatttatttcctttgggtttatactcagcagtgggattgccggatcatatggtggttctatttttaattttttagtgaaaatccatactgttttttatagtggctatgctaatttacatttctaccaacagtgtgcaagggttttcttttctctacatccttgccagcacttgttatctttcgaaaataggctttctaactggg

SEQ ID NO: 853981 - DNA, 642 bp, Homo sapiens
ggacatgacaaggatcctactacattttaaactaggctgccacccagtcactttgggctgcttgtgctacgagatcagaaggtgagaaaatgagtcctcgtcccagcaagagtcattgatcctgaaccttaggataagacagggctgcttttatacaatggaggcatgtcagagtgcctttggcatccaggtgctctaatgggatgtttcttggttctctcctatacaattttaatagtaaatggacaagtgcagcagctacagcctgaaaaggacatgtggaccaggggttcagacccttagggatgagggcctgtgtctccgattggtaaaccatcaaaccctgcagaggtgctagcagaaggtaaggggaatttagaatggatggtgcagaaaggatacagtgagtaccaggtgtacaccccatgaccatctacaatcgcagaagttctaatttgtctcaataactgccaacctgaaagtgtccacaggaatagacacaaaccagaaagatcccatgggagttgttttctgatgragtatactcactataggcagctattggttttgagtgacaaggtgtggtccctactaaatctgtgatgtacccaggtttgactttaggaatgaggtacttatttc

SEQ ID NO: 853982 - DNA, 518 bp, Homo sapiens
ctcaatttgttttctaataccttcaggatagaggcccaccctccctatgtagtrtacaagatgctcctgaatgtgatccagcctcattatccacacccatttccatccatatatggtccaggcacacacatacttttactttctctgatcaacatttggggaccctaggctttcatgcacatccttcgctcagtgacgtttcattcaaagaataaacatcctagtccttcttcacttacaaaataatttttcatctcttaaaccccaattcaaaatgccctttcccacaaaaaagccctttctaacctgactcttacagcactccatacatgcatacttgaaagtgcttgccccattttgctccaaaatgtacttgtttgtctctctccatcactatactgtgaatctcccagcaggagagatcaggtcttattcatctttatgtcccaggtgcctggcacaaaatctggtacatagtaggggtatttggtaaaagtttgttggataaatgaactcaa

SEQ ID NO: 853983 - DNA, 518 bp, Homo sapiens
ctcaatttgttttctaataccttcaggatagaggcccaccctccctatgtagtgtacaagatgctcctgaatgtgatccagcctcattatccacacccatttccatccatatatggtccaggcacacacatacttttactttctctgatcaacatttggggaccctaggctttcatgcacatccttcgctcagtgacgtttcattcaaagaataaacatcctagtccttcttcacttacaaaataatttttcatctcttaaaccccaattcaaaatgccctttcccacaaaaaagccctttctaacctgactcttacagcactccatacatgcatacttgaaagtgcttgccccattttgctccaaaatgtacttgtttgtctctctccatcactatactgtgaatctcccagcaggagagatcaggtcttattcatctttatgtcccaggtgcctggcacaaaatctggtacatagtaggggtatttggtaaawgtttgttggataaatgaactcaa

SEQ ID NO: 853984 - DNA, 611 bp, Homo sapiens
aaattatattttcttgttaatttcttagaccattagtaccaatagaacactaatttactaaagcctttattatatcaagattattattttgctgagatgacaagaaaatttgctgacaatgttatgtaaatactacagctaaatcaaatttttctgatattgtcattatgaagatatatttgtcaaagtagaaagataaaatactctgatttataaattgtcactatttagacataggatatttacacttctggtttttttgtttctaaagaattgtccatgtactctatgatttttaaaactgtcttcaaagccattttgaaaacaagtgctcaacgttttgggggagaatttttattgattagcggccatgaaatcactcatcatacttctggtaagctgccatctgaagaggcatgaaaaasttccgtggtgtctgctgagtgttctcggttaatccagtccaaattattaagccttcataatcctccaagacacgtaatcagataagactgcaactgatttgaagaaatccttaattgcagaaatcatcaagccttggtaagtctcaggatctccaaaaacaccagaatgtggattttggtgaaagg

SEQ ID NO: 853985 - DNA, 512 bp, Homo sapiens
tctctcgagtctaattctgatttttccataatcaagttctagttccttctttccctcctgcagcattctgcctcaactcctggtgctgctgatgttttcccctyggtagcagacaggtagaagagactaagggagaaaattaaataatcactgaagataatatcttaccttgacattttgcagaggttagtatttgcttcaataagcaagtgtgtttatggcccacatacttgactcataaacctcactgtggcccttggagaaatactaggtggaaatgctgaggagaacaggctggagaaatcagggaagagagaagggaatgtctaagcatgcctcctccaccagatggctcccttgcccactcttatggagaaacatggcatttcagaagcatctctttcaactccaagtttctggctttaacctctcgtgccagcctcaatgcatttctcgccatttccacactatgccagatattttcatgcttctagctgcattagttatctctt

SEQ ID NO: 853986 - DNA, 598 bp, Homo sapiens
ctggccacttcaactaggtgaaccagcaacacgccaggcaccaccaatattctcagctggaggaagagactcctgggaacctctcttggttatgtaaaggtgaggcaagtagacactcattgcccaggacctcctatggcctgacaaagatcaccacgcccaatctcccttggtacacagaagtaattccagaggagcaggtgggtaaatttgcaaatttccaggagaccaaaaagtttcctggaagaatgccttgcccaatcccagcaccctcgaagatggatgtggtgacatccacatttcaggacatagcatcgtggatctaagcctcatccctggcctggaagtcccagggaagggacatggcttgggatcgaagctcactacctcttaggactcagcccctcgggagcaaagtaagcatgaactaaaataactagaacttcaagaacatgagaatggggcaggctcacagcctascaggccaaggcatccctgcagcagcagatgaggaggcccaggagtgcccagggctgggtccgacagctaaaaaccctgagcgaaggggcggctctctccaaagtcttctgacacaaag

SEQ ID NO: 853987 - DNA, 616 bp, Homo sapiens
tatcttttcatagtttgacagtgtatcttatctcttttgctcactgaataacactccattgcatggatgtaccacaatttaccatttacttattgaagggcaccttgcttgtttcccacctgtgtatttstagggtaagttcctaacagttgagaatcattcaagctgggccgggcatggtggctcacgcctgtaatctgagcactatgggaggctgaggtgagtggatcacctgaagtcaagagttcgagaccagcctggccaacatggtgaaaccccatctctactaaaaataccaaaaaaattagccaggcatggtctacagactacagactacacctgtagtcccagctactcagggagggtgaggcaggagaatcgcttgaacctgggaggcggaggttgcattgagcggagatcgcaccactgcactccagcctaggtgacggagggagactccatctcaaaaaaaaaaaaaagaatcattccagctggcttcaagtgcagtttgtgtccccaaatcatacagtactacacattcctgcatttaaagggtattttatttatttagttcattttttattatttttattttattttattcaaaataaaaaat

SEQ ID NO: 853988 - DNA, 593 bp, Homo sapiens
ccataggtactagacaaccaatacatgcaggttgggttttctaatttttttaactttttaattaaatcaaagaaaacaataaytggtttggaccaggtggtttctttgtcagctggttcccaagaggtggggggagagggaggtttagaatggagcttcaaaaagaagcccttatcttaacccatggcctggccacatagacctccttggaatgcctaagaaaagcaaggcctgtgtttttgtagtacatagcaagggtcaccctgtcattctgaccgctaagtgagggatggagatggccgttcttttgtccctgaggaggaatggaggtgccaagttcccagcttctcccacagtcagaagactcccatggtcctgcagcagctccccgaggaggtcagggcctgatcagaggagtccaagaaggtggggccacagggaactatcgtgaaaagcctgaggccgaagacgtgtcactcctccccttcggctttcacacaccgcgggcactgctccttacctgtccctggtccagcagcatgagcatcacctgggagctggttagaaagacagcatctggccgggggtgcggt

SEQ ID NO: 853989 - DNA, 589 bp, Homo sapiens
gaaactaatgttggcaaatatgattggatccccttcgtaatagaaattttctcttttttttcccccactaagcaagwcacttctcaatgaaaaaagtaaaactaagcttctcatattcatagtatttagcttacaaaaattttgtcttctctccctttttacttctgccaaattgaaagataaaagatatagttaattcataaaattggataattaacaccaattaacttaatctgtgtccataccaaaaaatgaaacatttttactatttttggacccttaacaaaacacatacattgaaaagcggaatttttttcttgatgcttagtaagcatcccatgaagctgcaatttttttttttttttttttgagacggggtctcactctgtcgcccaggctggagtgcaatggcatgatctcagctcactaaaacctgcacctcccaggttcaagtgattctcgtgcctcagcctccggaatagctgggattacaggcacacaccaccatgccctgctaatttttgcatttttagtaaagatagggtttcaccatgttggccagattggtctcaaactcctggcctcaagt

SEQ ID NO: 853990 - DNA, 639 bp, Homo sapiens
gtacagtttaacatgattctgccatttgagcacctactatgtgcctggtttttggtagatgactgagggaagggtaacagaatgaattagacatgctttctgtcccaaaggtgttcacaggtgartggggtggtggttgtggggtgccaggttagctgcaatatagcatagaccggtcagagctgtgataattcagattgctctgagagcacacatgaggtcatgacaggttccaactggagaaatcttacagggtcctttcggacctggacctgaggaatagatgggtagaacatttcaggcagaggacaccttttgagcaaagacccagggtgagaaaatgcaaagtggaatggagactcccattagatgggtagtacggtttcatgcttactcagtttggtttgatgaagcaatctctctctctgtctttgtgggtttgtgtacagtacatgtgtgtctttctctgttaaatgccttttatgttttgttggggacgtgtgtgggagtgattcatttccagctgggtccagctgtaatgaaaatgtcctgtttgacaaattgaggaattagattacaactatctctccctgaaagctgtgacactagctgtaacatcaaacatccctccctttgtgg

SEQ ID NO: 853991 - DNA, 612 bp, Homo sapiens
taatatatgtgcaaccatgactacagtcaatttcagaagattttcatcatcatcagaagccctgcacccttcagctcttcaatcttattcttgaaagatgtcttttgggatgtagaattctaraggaggagtttgttttcctcagaacatggaagatgtcattccactggctttctttcagcttccactctgcaactgcttgtcagctctctgggactcttgcatgtaatctgtttccttctgttaccggcaatcatgtcttacttaccattccaaataagttgaacgaaaggaaggatttcctactagaccccatcctgctggggagacagtgggcttgctcttttgtcccccaagtcccacagagcagaggaggacagagactccagcagaccagcagttcagctattctgcttatttgtcaggagtccttcttcactcacattctggcctgacaatgccttcctatcttgccagcatcttactgctttttagaatatttcatcgagcgttctacattgttttcagtatgctcccattgaatcggtatagctaccatgcctgctgcatttctaggagtagaatataaaccaacttttataaacttgaact

SEQ ID NO: 853992 - DNA, 608 bp, Homo sapiens
gtgacactccagctgcaaagcccagaaggtggctggagctgagatgctggcggtgggaattgacttcctattcatgcgagcaagtctgctctgtgggtgcacagcatctgccagcaaatccctaggcagggggctgtccggagtgcaggggaggagttgggaccagcccccaccttgcaagcagcccagctctatgagattcccctgggcagaagattaaaaacaaatgtttgaggccattcatggagcacatgcctcgtgttttattctcttttctccacactgccctggatcctccgctgctctggacatcttgaggtctgaggcagagacctgtgtgacagcacgattgcggaaagagaaggtttctcagatcagagagccttcatgggaaattttcttacttgaaagcactcttagatgttctcttcccttttactcaacaaagagccagagtgcttgtgatctggcaaaggaagatgaatggggcagaatcactgcctggaaagatctttgcagagagggacgtaaccctccgtcctgaaraaggccagacctaacctgctcggcctcgcctccctccctgccctcacagaggccctcggctg

SEQ ID NO: 853993 - DNA, 616 bp, Homo sapiens
gcacagcggtttttgcagggtgtttgttattaagtgcagatgccaccttggagtggcttcaaagtgatgccaactgtttgcacattggtgtgaattccagtgctgcagcatgaggtgrgcagatggacaggtggacaggtgtgcctaggtcgggagatcctgcaggaagcttctctgccttactggttcattggtgtgaattccagcgctgcagcatgaggtgggcagatggacaggtggacaggtgtgccgaggtcgggagatcctgcaggaagcttctctgcctcactgattcattagcagataccacagagaagttaatccagggcagacagatgcctcctctaccagcgtcagcagccaaaatacaaagagaacaatgtgctgtacccagtttactcacatgactaacattcgttacactttataataaaacataaaaatgtttgtttgcataaactcacacattgcctagcttgcttcagagtaactaaatttacttcttgtcatgatatctcagacttcacgcattcgagtccatttagtgttcatttaattggaaaggagaagagagggactcttagagtagaaggtaggcaggagggactataacagc

SEQ ID NO: 853994 - DNA, 604 bp, Homo sapiens
gcataagccatgttcctaatactgtctcttattttgggggtttaaaataacatattttaatgtatttggttaagtacaggctggggtcactgttgctttataatcggaaaaaatgagacccagtggaaatctatgtcttcaaattgctccacctagtgtgtgcctgtgggttgtgtgagtttttgggttcatgtatgcccaaaactcaggtaacacagaagcaaacatgagctcttccttttgaaaaaggaatctctctaaagcatctttaatttcaaacagtttttaaacagaagctaacagagtaaataatttaaaatcgaattaacttaatctttagtccaatttaataaaggactgcatttatttatgactagatttaaagagaacacatctaggagtatgaagcaagaacaggtctttggaagttttaaaactccaaagcacaggcctggttacgagatagtttgttgatgtaaacagaattyacttcactgagatgcctcttctgtgcttttgcttctcaagtgtgttttcaggcagctcatctgtgaaaaataacgggtgcttccctcgctcctgtgcttgggagctctttagcctt

SEQ ID NO: 853995 - DNA, 613 bp, Homo sapiens
aacacatctaggagtatgaagcaagaacaggtctttggaagttttaaaactccaaagcacaggcctggttacgagatagtttgttgatgtaaacagaattcacttcactgagatgcctcttctgtgcttttgcttctcaagtgtgttttcaggcagctcatctgtgaaaaataacgggtgcttccctcrctcctgtgcttgggagctctttagccttttagagaatctaattttgtttgtttttttcttgatgaagacaatgaatccttaactaaggttaataacagagtgggagcaggttctggccatgtgccaggcaatcataagcagcaattctgaacggcttcccgatatcaacatctaccagctgaaggtgctcgactgcgccatggatgcctgcatcaacctcggcctgttggaggaagccttgttctatggtactcggaccatggagccatacaggcaagtcccagggagagggctgacataagggctaggacgtcttcacgttgggcaaaggatccatgttgtgaagtcattctgattactactttgcatggagcatttccagctgcttctcaaccattgtttaaaaccaagtcttattttattc

SEQ ID NO: 853996 - DNA, 543 bp, Homo sapiens
cccatttttatactcttccctggctatgccaggaccctggaaacccataccttttctctctgtcatcaagacagtgaataggccggacacagtggctcacgcttgcaatcccakcactttgggaggccaaggcaggcatattgcttgagtcctggagttcaagaccagcctgggcaacatggtgaaaccccatctctactaaaaatgtgaagattagctgggagaggtggcatgtgcctgtagtcccagccaccagggaggatgaggtgagaggatcgcttgagtctgggaggtcaaggctgcagtgagctgtgatcacgtcgttgcactctaacctgggtgactgagcgagaccctgtctcaaaataaaataaataatataaaataaaataaataaaataaagatggtaaatagcagagctcctaatttcaaatcagaagtgataatcctgcactattaccaccttagagaggcccaagttctggtaagaagtacactgatcaacactgggttctagagaactctcctaagtggcagtgcca

SEQ ID NO: 853997 - DNA, 551 bp, Homo sapiens
ggaggatccctcgaggcaagaagtttgagatcaacctggggtaacataggaagaccttgtcttacaaaaaattagaaaattagctgggcatggtagggtgcacctttagtcccagctcatcgggaggctgaggtggaatgatcacttttgaccccaggagttcgaggtaacagttagctttgattgtaccactgcactccagcctgggcaacagaacaagaccccatctctaaaaaaaagtaaaataaaaattaatataaaacgtggaacttttcaccagtggagatgagtgaatagaatatatagtctgccgatttatagaagtatggcatctggatataagttaagtttcttttctcattaattcccctgttagcagttgctaattattattatcaaagtcggcttgctgttccccagggcctgtagtacaagcatatgacttccttcctgttgagtagtggtttccagagtgtgttctgtcaggataattgttccattgacttgaaatgaaaagagaatcctggtmaaatgaatttgggaaaagctag

SEQ ID NO: 853998 - DNA, 538 bp, Homo sapiens
aagtattacagatttatagagtaattcaacatcatgtatttatataattatagtttgagatgtacatttatatacgtacctcttatttgagataggcaggtgtgcaaagttagattcaccatgacactaacgagacttaaactgtagggccttccacttgcaggagcccctttgaaaactctgttcccatttctgcatttgtcaacttggcattcttaaagaaggtatacaaaatgttaggcatcagaacacctaaacctagacctacatgtatctagatatagcagaaattatgagtccccatttagagctctgaaagctgtggctcagagagttgagcacctcacccaaagccacacatctaggaggtgggagaacatttcttacctgaatgatttctcccaccattagccctcctcatcccccgcagggtgaaggtgtggcttccractgatgcctattcccaggacaccagccactggaaacggtgcaggacctgggttacacccagagcagccctgatgctgactcttcatgg

SEQ ID NO: 853999 - DNA, 493 bp, Homo sapiens
ggttgctgggctctatggtaaatatatgtttaactttataagaaattgctgcactttttttcaaagcagcccctattgttttgaattcccaccagcaatgactcagagttccagttaccccaratcctcaccagcacttgtttttgtcagattttctttttgtttttcatcctcctaatacatttagtgtggtaacattgcattgtggttttaatttgcagtactgtaatgtgttttctcacgtgtttgtgtgccacatgtacatcttaattgttgatatatctgttcaaatcttttgcctattttaaaaattgggtgttttcttactgagttttgagagttctttatcctgtacacaggtcttttgttggacatatgttttatacatgtttttttcctcagtttgcagctggtcttttcattctcttcacagaatgaaaagcagaagttttaaattttgaaatagtttagtttatcagtatttttctttcat

SEQ ID NO: 854000 - DNA, 617 bp, Homo sapiens
caccacgccaggcctccattttttaaatgtatcttttacagagtagatgtttttaattttgatgaaatctaatttttccatttttttcttttatgaatcatatttttggtgtcatatttaagaactcttgcctaactcaaggtcatgaagattttcccctacgtcttctaaaatttttacgagtttgtatttaggtcaatgatctatttgagttcatggcctcatcattgaccttgatatgtaagttatgaagttcaggttgaagttcgtttttcttcctagactagactatacattttccaaagaagatatacaaatggctgataaacacatgaaaagatgttcaacattattaaccattagggaaatgcaaatcaaaaccacagtgagatagcacttcacacccactgggatggatataatagaaaaggtagataacaggtgttgttgaagatggttaaaaatgccatccttactccattgaattgttcttatgcctttgggaaaaaaaaartaattggctacatttgtgtgaatcaatttcttgaatttctattgtgctccattcattttgtgtctatctctttgccaatgccacactgtcttgattactgtgg

SEQ ID NO: 854001 - DNA, 630 bp, Homo sapiens
tttcccctttccccctgtttctatgggattttatttcccagtaaagtataagaacatgcttttgcttcaggcttattttctagggaagctagcctaagatattccctaatttgcatctctsttttactcctctcttctgaattccaaggtcatatatcccaaatatccaattacctacttggcttctctatttgaacctccagttgtgactcagatcaacagatccaaaatattcccatccccagagatccataacattattttttcactattcccatcttaataaattacatctttaaacaccaaattgtttaagcctagaggctgggagtcattattgttttgtccttttcttaactcccacgtatacttagttcttaattattatcaattatatttcttaaacatctttctaatctctccctgtatttttatctctactactgttgtagtagttcaaggaccagtaacctttacctagactcttataattgtttctgaattagtctctttgaatccatgcttgtccccttcaatttattctctaaataaggcctgaatgtttttacaaatgcaaatctcatcaggttatctcctacttacaagccttcattagcttcccattgcttc

SEQ ID NO: 854002 - DNA, 653 bp, Homo sapiens
aggattatatgtttccttgacccgtagaaaaacataagcattaacagtacatacttcagacaactgaattttcaaccatgggtccaggttatcctcaaattctctaataaacaacagtgatgkttctccacattttatggaagttttagaacctaaacacaaagatttcatcttgttgcttccttttatattattgtctctgcttttcacattggtcctttcctctgttttcaaagcctaagtctaaatcctaaaaacttcaaacaaaaaatggcatgagcttcctgaattacccaactgtaccttcacacagcactatgaagcattcttcaaacattattcgaaatagtgttcttgcccttctcagaagcctaccccagcttctaaatgttcactcaagtcatggtgaagatttcgatcatgacatttaagcttccaggccacaagtacaggcaggtggctggtctcaggctgcaccactgagaactttagttagctgagcagactatattgttcctcccactagacagggagactgttcaagttccatttatatggaaaaccaaagtactgatgctacaaacttgcaatcaccaaaggattatcattctccaaacaaattactgccaggaggagtgtatgtacagagtgtt

SEQ ID NO: 854003 - DNA, 661 bp, Homo sapiens
tgcttcttaacactgctgtcaaaccatctcttgagctgatgagaaattcctaaaatttgtaagtgttagtaggaattttataagagatagtaatcgatagagcaggtaatatataccatgcttatgacactttgctctgtcattctagatacttatcacagataagggaaaaatcctacctggggtctctaccatggctctatgcattgtgtgaacaccctctaaactgactgttgtgtattatctgaaccactcagtggttcctaacctcttcaatataaaagatacttttcttatttattctgtacatgaattccacatttggataaatattttctccagcaatgagaatttattaggttcctgatattctgaaaattgatttcaattctctacttttactcatataaatccctaaaatagatcacagaatgcaaacattgcgcttaggtttctactactggttccaaaattgattatagttaggtaagattctctacccataaaatgaaaattgcagataaaaaaaactattctrtcataacttaccattttgacaacagttctccccatgtttcaagaattttttctgcacattctttggatacatcaccagatccactcaggagaggttcatcattatctataataaacaaaacac

SEQ ID NO: 854004 - DNA, 481 bp, Homo sapiens
attatgatctaatctatgttataaaatagaaaacagataggtataaactataccaaacactaacaattgctccctctgagtgatgaagttatgattggtatttttctctgctcttttatgtttttatgactttctaaattttctaaaatgggaaatattaatttataaaagaaaacacaaacatactttaaaaggccaaattaaatcgtttctaatttaattcaattaaggaaagtaaattcaagtcagaagttagagattataagatatgaagacagtgaaataagtggcactgatcaaggcatgagaggaactaaaaagcataataaaagcagagaataaacatggactaagatatctacttaatcctcttgcttgayactcagagagtttttaactttttgctacaaacggaatcaggatgaatatatctcattgctttcatcgggtttatgtccagaaactgactttctcagtttta

SEQ ID NO: 854005 - DNA, 638 bp, Homo sapiens
aggagtctattctaagatgcactttcataaaatcaaaataacacatacataagattccacactgcaacattattttggaacagcaaacgactggaaaccagtccaagtgtccatcaatagcaaactggttgaaaagcccatagttcatccaaataggacagtactaaatagccattaaaacggaaatgaggaaatctctatgcactgatgtggaatgatccccaggatatattaagtttaaaaagcaatgtataggataagacatatggagtatgctaatttttatttcagaaggaagttaaaaatatacagaattttatcttcacaaaaatgaaatcaggataataaaccataaaccaataataattgttatctatgggtatgggggtaaggagatacaaatggaagcggacttccgagtatacatttctacataattatgacatttataagtattttatatattcaaaaaaaaaaggaaaaaaaaaatcccaagcccctaagctaaaataaatgsaaacaaatgaacctaactatatgtcaaacggtaacagaaccacaataaaaaattattcccagtgatttttaaacagcaaccattttataatcttactgaaacatattcaaaggacaaaaag

SEQ ID NO: 854006 - DNA, 595 bp, Homo sapiens
gctgccacacggtgataatgtaactgataatattcatacatcagtaaagccaaaaagtataaatttagaatgttcctgttatttagttttctcaaattagcatccttgartattttatagaggtgagccaaaacatgtgtctcacaaaactgataagaaacaaaggggaattttcatattgtctcagtgatgtgtatgtcagcttgaggtaggatcttttactgagtgagagactgagaagcaatttagggaatacattaaaatcacaaaattctgtcattcagcaaataatcaaatattgatgccatgcgaaattcaaaaataaacaattttgccacctagtaagttaaaggtctaggtgttagggctctattatgatactacaaaagatatcagttgtcttctacttataaagtattagaaaagtagaatgtaaatgctgaaattataaacatatagaagatatgtccctattttactttcaagtattaaaaatatatattcagtaatctcatacaaggctgaccaagaagcttaaaaaatggggcggaggttgactacccattctttaggaatttgaagaagaaaaaaagcc

SEQ ID NO: 854007 - DNA, 566 bp, Homo sapiens
tgttctgtattttaagatgacattcatcataaaggcacaccaaccccgaaaatagttaccaactctccactttagacaacatgagacagtatgagaacagcaggtctgaaaaaaggaaagcatttttttgcattatgctattaaatggaacacttaatcagcttttttgccaagagaaaacttcccattatgttaagttctaaatagggctgtgggaaaaaagtctgcaaatggaaaggctgtggagatgtgtctgttgactttggttgtttcataaagtgttaagagagtcagcatttgtcaaagattcttggaaaccttggtttaagcaattctctttacctttttgtctgagatttgatgtcccaacttggtaaatagtgcatttttcaggacagatctgtcagagtttcctcttgttctcccttcactcctgctyccccttgtccttaggctgttgccaggtgtttgagtattatgtcggatctccagcattatgtcatggaaaagcaacagtaagatctgtaaactgcctttcaaaacagttctccaggaagccagtctga

SEQ ID NO: 854008 - DNA, 639 bp, Homo sapiens
gcatgatcttgtccttgagtttcttctgaaattytactttctttatctaaagtttaataacatttattatgttacccaaaaatattttaaatcaatattcttatggtcttctacatatgttaactttgagggcctgttgtttttggttgggggagggcaggggttatagtgatatgtgagccttttatgtaaaaatatacttccaagaaatttctcaaattgagtgccccgtggaaggatcaatagaaaggaataatgatgaggttatagccttctgttccatcattttatggcttacaataaaataatgctataatctttataaggatgatgttacttatccttctctcatagaaacttctctcacaaatagaattctatctcatcacattctagtttctctgactctaaattaattcttttatttcaagtatctgtgataagtttatgcttttttaaagttattttatagaaacatttttatcttgtttccttcattcctcaatttattgggcatgattaactcctgaatactttaaggccttcttcatgatgtactaccaaacaatgatgtggaatcatggcagttggtcatcatgaaggattttatgaatatttgaatctaaaaagcctcattct

SEQ ID NO: 854009 - DNA, 608 bp, Homo sapiens
tttatatatgtaatatgtaatgcgtacaggcatacatcatttcattgtgcttcacagatattggggtttttacaaatttaaagtttgtggcaactacatcaagcaagtctatcagcaccatttttccaagagtatgtgcctactttgtgtttctacaccatatttttggaattctcacaacattgcaaactttttcattattattatatctgttatgatgatctgtgatcagtgttctttgatgttatcattgtaattgttttgtataggtgcaccacaaattacacctgtagaaaatggttcacttaatccataaatatgtgtgtcctaatgctccatctactgacaattctcctatctctctccctgtcttcaggcacccctattccctaagacataacaacattcaaatcaggccaatttatagccctacaatggcttctaagtgttcatgtgaaagagttgcatgtttctcactttaaatcaaaagctagggatgattaagctcagtaaggaaggcacgttgaaagccaggaggctgasagtgaagtctcttgcgccaaacagccacattgtgaatgcaaaggaaaagtttttgaaggaaatta

SEQ ID NO: 854010 - DNA, 550 bp, Homo sapiens
gtgcagccactacagaaaacagtatggtggttcaacaaataattaaaaatagaattatcatatgatccagctattccacgtctgggtaatacccaaaagtgaaagtgtccagctgtgtcaattgcaattgatggtcaagaaagatgagtaccaagaactgaccattgaatgtagcattgtggagggtattggtgaccatggccaagacagtggagtgaagcaggcagacagtcagtgttgatgcaagtataaattggcgtgactattctaaaatgcaatgtggcaacatgaaacaagactcttgcaattgaaagcaaggtctcaaagagagatacgttcacccagtgctcatagcagcattatttacaatagccaaaaggtgaaagcaacccaagtgtctatcaatgaatgaatggataaacmaaatgtggtatacactacaatggaatattattccgccttaggaaggaaggaaattctgacacatgctacatggatgaaccttgaagacattatgcaaagtgaaatatgccagtcataaagaaaaaaa

SEQ ID NO: 854011 - DNA, 341 bp, Homo sapiens
aaccacccaccccaatcaggagaaactatgttctgcattggtttaaggaacccgcttctttctttgatacctgacctacagatccaatctattcccaggaattttgataagaattctcaaatcctcagcaaggctatgccactgtcatgactctcctattcctggtagtgtcattctcagtgtaggctgtttgataggtagttttgtsaagtcttgttcatcataatggatcatatgatttttaaaagcaggacctgggtcatatgcccagattaatttcaacaaagttggtatgttttcttcctaaaattaattttttatgattatcaaagttttatatg

SEQ ID NO: 854012 - DNA, 485 bp, Homo sapiens
tcatttgaacagcattgtacataacttgggggtatgtgtgcaggattacccaagaataacttaagtagaagaaacaagaaagggaatcttgtatatttttgttgatagttcatgtttttcccccagccacaattttaccggaagggtgacaggaaggctttaccaacctgtctctccctccaaaagagcagaatcctcccaccgccctgccctccccaccgagtcctgtggccattcagagcggccacatgacttttgcatccattgtattatcagaaaatgtgaagaagaaaaaaatgccatgttttaaaaccactgcgaaaatttccccaaagcataggtggctttgtgtgtgtgcgatttgggggcttgagtctgrgtggtgttttgttgttggtttttgttgcttttttttttttttttttttttaatgtcaaaattgcacaaacatggtgctctaccaggaaggattcgaggtagatagg

SEQ ID NO: 854013 - DNA, 529 bp, Homo sapiens
ttgccacattcttttttttttttttttttttaactaagagtagcatttaaaaaccttgcttcttttcaaggcagtttactttatacggcttcttggctctttctcaactgtaccaagcactctgcatctgcttttaaagtcttcagactactgtattagtcatagcctctcagaaggagccacaggaacggcgggacaatggggattaaaggcctttcctttctcttccaggctgcccccaagtgtaactccagcactgtgaggtttcagggattggcagaggggaccaaggggaccatgaaaatggacatggaggatgcggatatgactctgtggacagaggctgagtttgaagagaagtgtacatacattgtgaacgaccacccctgggattctggtgctgatggcrgtacttcggttcaggcggaggcatccttaccaaggaatctgcttttcaagtatgccaccaacagtgaagaggtaagcctctggtttattgacaagaagattggggacctggtgccaaatc

SEQ ID NO: 854014 - DNA, 602 bp, Homo sapiens
ttgcatgactagatctctagcaaggccaaggaagttttccttgattattccaactatgttttccaagcttttagaattgtcttcttcctcaggtacaccgattattcttagatttggtggtttaacataatcyctggcctcttggaggctttgttcatattttcttattattttttctttgtctttgttggattgggttaattcaaagaccttgtcttcgaactctgaatttctttcttctacttgttcaattctattgctgagactttccagagaatttcacatttctaaaagtgtgtccaaagtttcctgaattttttattgttttttctttaagctatctatttccttgcatatttctcccttctcttcttgtatcattttttggatttccttgcattgggcttcacttttctctggcccctccctgattagcttagtaactaatctcctgaattctttttcaggtaaatcagggatttcttcttggtttggatccattgctagtgaactagtgtgatttttggggggtgttgatgagccttgttttgtcatattaccagggttggtttcctggttccttctcatttgcgtaggttctg

SEQ ID NO: 854015 - DNA, 518 bp, Homo sapiens
gggatacatgtgtagaatgtgcaggtttgttacataggtataaacgtgccatggtggtttgctgcacccatcaacccataatctacattaggtatttctcctaatgctacccctcccctagccccccaccccctgacaggccccagtgtgtgatgttcccttccctgtttctatatgttctctttgttcaattcccacttataagtgagaacatgtggtgtttgattttctgtttctgtgttagtttgctgagaataatggtttccagcttcatccatgtccctgcaaaggacaggaactcatccttttttatggctgcatagtattccatggtgtatatgtgccacattttctttatccagcctataattgttgggcatttgggttggttccaagtctttgctattgtgcacagtgttgcaataaacatacctgagcatgtgtctttatagtagaatgatttataatcctttgggtatatgmccagtaatggcattgctgggtcaaatcgtatttct

SEQ ID NO: 854016 - DNA, 559 bp, Homo sapiens
gtctttaccctctcttaatttaatactttacattctcctatgtagatagtcaggtgtagtrgtagttcactcttcctttttttcctttttttttctttttatttgtatatgtgtggttgggatgggttgagataagaggaatacagggaaatatttggatacaatatgaaatacttataaaattggttacatcttaaagaaaatttaagttatgctactgtaggttgctgagaccagctcattcggggagatgccaacccagtggcgctagaggaattaaagacacacacacagaaatatagaggtgtggagtgggaaatcaggggactcacagccttcagagccgagacccccaaacggagatttacctacatatttattgacagcaagccagtgataagcattgtttctatatattatagattaactaaaagtattccttacgggaaacaaagggatgggctctggctagttatctgcagcagggacatgtccttaaggcacagatctctcatgctattgtttgtggttcaggaacgcctttaagcggttttccgcc

SEQ ID NO: 854017 - DNA, 628 bp, Homo sapiens
tgatactcagctgatatctaggttaaaatggctaactttgtccaagattattgatattctggtactgtcccaaactgcacttcagattaaatccataccttgtaccaagaaatatttggacatttacctgggtccagacaaacaccttatttaccaatcaaacaagttacaattcaagggactatactctttctaccatgagcaggtctgtctttgggatattaccacaaaggtgcattgatgtgaaaagtactcagagatcaagctttagcttttttttttttttttttcattgccagaatatatatatattttattttttcatttaaaaaattcaagattttttacttctgttaattgacattgaattcagcacctgggctgaagtcattctttttattttattttatattatttttactttaagttatgggatacatgtgcagaacgtgcaggtttgttacataggtatacatgtaccatggtgttttgctgcacctatcaacccatcrtttaggttttaagccctgcatgtattaggtatttgtcctaattatctccctcccctttccccccacccaccgacaggccccagggtgtgatgttcccctccctgtgtccgtatgtt

SEQ ID NO: 854018 - DNA, 631 bp, Homo sapiens
agggcagctacagggaaggggcaggtaacttaaaaagggaaccccagcaggctaatagcagacctttaagcagaaaccttaraagccagaagagattgagaggcctattttcagtatcattaaacaaaaaaaaatttcaaccaagttttttttttatcttgccaaagtgagcttcgtaagtaaaggagaaagaaaatccttcttagagcagcaaacactaaaggaatttgttatcactagacctgacttacaaaaggtctataggctgtgctaaacatggaaataaaagaacagtacctgtcaatgcaaaaacacatttaagtacacagccattgacactagaaagcaactgtacaatcaagtctacacaacaatcagttaacaatatgacaggatcaagtccttgcaaattaatattgaccttgaatgcaaatgagctaaacaccccacttaaaaggcatagagaggcaagttatattaaaaaaaaaaagtaacactcaactgtctactgtcttcaagagacacatctcacgcattaacaacaaccacaggctcaaaataaaggaatggagaatgatctatcaggcaaacggaaaaagagagcaggcttgctatttatatcagataaaac

SEQ ID NO: 854019 - DNA, 635 bp, Homo sapiens
tgactgacttagtgaacttactatgtacttcataaggatgaaatataaaataagtttacaagattcttggacataaactcttgaaaattctaggggcacagtaggaagaggcaggatrcagtgatgatttcaacgtctctgaggcagtgagtcaaattacatttgttgatgaagagataaacaggtaagactgtttatgtgggtaaaatgcttactctcaggagagaagatggatttctgaaagctttccctactttctttttatgttactgtgagttcgatatgtggagaatattactgtaaatgtgagaaattttgcacatttttagacaagagtaacaagtgcaactcctttttattacagaattattagatcaaaatacggggaacttggattgtgttataggaaatatacaagtcaattttaagttgaattcatgctaaaatcaagaaatgtgcaaaatagtctaatccagtgtcaatgtttaaaatataaaggtattaacatcaaattgggaaaatacactatgagaaaaaagctattataaattttccattttacctggaaagctgatatcttcatacattttaaaaaatagccctacattcatctggaaaatacattattcagtttg

SEQ ID NO: 854020 - DNA, 601 bp, Homo sapiens
gaccacagctgagccaatctcgccctatgccagtccatgtggtaattttggaagggccctgggatatctgaccttatgatggtaagaaagttttgtgattaatggtgatttttatcktccgacttcaaagattgactcatgcagagaatgagcaatctataggtcagatatcttacatcccagttattttctttcttcagtcaagtattgggagaactaaacactgaccagctgtaaaagacatctatcctgtctgcagaaaagcctatttaatgggcctctgaggggaattgtttaaaataatgctatgcaatttctccaagagtttctgctggaaaaaaaaaaaaaatgaacaaatggaaaatttaacgcctgaatgatcgatactttcttcatgaagcaaggttattctcttgcctttttctcttgtggatgaggtattttgcaggtactttaagaagtcaacctaccttttattcagcaatgtatcaaatatttattgagggttttattacaagatacagtacaggtccatggggttataagggtagaaataagtggtgcccagcactgaaggattttaataataataatgttagca

SEQ ID NO: 854021 - DNA, 584 bp, Homo sapiens
gcattttatgaattgctttaaaaaaattcctctttgactgtatgaagttaaggctgcataaagacaagactgctggttaaaaaatgaaaaattcagtcaagtgtccagtggaatgatttgtgttgaaacwagattattttattaagtgactgagttgactcattgtttttctaatgtctaaatagtttaagttggttagcattttaaagattaaaacaaaaagtaaaatggtttaattttcaatttccagtttattgtttcgaaatcacacagagaggattgatttagtcccttttttcttattgaagtttaattaatagattgtttatttcatggatgaggttatgtgatgcttaatgggaggagcacggatgtgatagtggtcaataggtggggctctgtatctggcgcttgaggatttgggcttcagcccaagtccgacaacttaaccattggaataagctggagcatctgtaatatggatgtgatgacatctgtctgatcttgtttttctcctccccaatcagcaatgattttgcaaatacatttgaataaaatgaactttattagaaacaaaattcatg

SEQ ID NO: 854022 - DNA, 562 bp, Homo sapiens
tgaaccagtcaaatgtcaagcctggaatagcagaaatgtaccagccatgcccagtagagcagcaacaaccccaacttagaaacagctgtgtcccacawcataagctccaacttatctgtggccatatgagaatgtagggaaaaactgtccgtagggtaaaaacttccaggggttgaggggacctgtgtcagcgtaagaggacatgtaatagtgacattggagtctttaatgttagcatgcctcacagatatctgcaggaaggagagatcttgagaaatctgggctatacaattagtcatttctcaatgcaagtgtaggaaagacagcctttagctttggtgttcaatattaggtctataacaaagccaaaaataacattaggtatgtgtacagaaatagtgtctttatgcctcatgttgattatctgttatataaggagccttagagaatcacaatactaagatgctacaatgatagaactcaagtagaccagccctctgatgttcaaatatgagagtgaggctcagaagaaagaaagccaagcactgactggtggtggaac

SEQ ID NO: 854023 - DNA, 599 bp, Homo sapiens
ctctgctccagacctctttggataccatgtctctgagtcacacatgtatgtctcttagctagaaaatgcactagagccgagggtgggggaaattgggtgtagttgcaagttgcacttagagaagktaagggaatgccctttatcctagagtttccttgctttctggagcattgagccagaaattctgggtctgttacatgttactaataggggagatgtatcatgaaggacttgagtgtgcaggttctagaaccaatcagatctgaatttgaatcttagcccttctaccacctgtgtgaatgaccctccttaaactccaactacttcactcaatgcggataatactagctacaatgtgagtgactcccatgcatccctttttgaaggtgtcttaacccaaatgtgtagatactaatccaaaggccccagatgtagttcagatgttgacctcctgaaccctcatggggtctcttccagacaacctgaagccagtacctcagacacccgtaaggcaaatgagaacagaactggactcgcccaagctacttgttgtgttagagtaaatactgtgttatttagaggaaacaggctacttgatg

SEQ ID NO: 854024 - DNA, 599 bp, Homo sapiens
ctctgctccagacctctttggataccatgtctctgagtcacacatgtatgtctcttagctagaaaatgcactagagccgagggtgggggaaattgggtgtagttgcaagttgcacttagagaagtyaagggaatgccctttatcctagagtttccttgctttctggagcattgagccagaaattctgggtctgttacatgttactaataggggagatgtatcatgaaggacttgagtgtgcaggttctagaaccaatcagatctgaatttgaatcttagcccttctaccacctgtgtgaatgaccctccttaaactccaactacttcactcaatgcggataatactagctacaatgtgagtgactcccatgcatccctttttgaaggtgtcttaacccaaatgtgtagatactaatccaaaggccccagatgtagttcagatgttgacctcctgaaccctcatggggtctcttccagacaacctgaagccagtacctcagacacccgtaaggcaaatgagaacagaactggactcgcccaagctacttgttgtgttagagtaaatactgtgttatttagaggaaacaggctacttgatg

SEQ ID NO: 854025 - DNA, 511 bp, Homo sapiens
aaaaattaaaactccatgattaacacawctttgaagtccttctcacttgtctttagatgaagggtaagtactcttccacatctattccattatgtacatgtgagtaagggtgatggtgggggagagaagctcacagcatttcaacaaattatctctctataaaagtccttttcaatttcttttggcctctccaatctcttttatagactgaatgtacaggtaataaaaatatgttattttttccatgaaactgattcttggacagcttctatgcaaatcccacatatgtggtctagaacttctctttgctcttgagccatacttgacagagtcccatttttatatcctattaacacagctttactcttgatttccctatatcaggtatgctgttttccacttctttgaaaatcttgcctattttcaaagtttcaactaaaatgtcactatatttctgaagattccttcaactgctccagccaaatgtaatttcaccttcctgcaagttctc

SEQ ID NO: 854026 - DNA, 598 bp, Homo sapiens
agccaaaaagagcaaatggaacaaaataacaactagtgtctgtgtatcactgtgtaatttgcaaaccactttcccacaggctctcagaggcattacccctgccctttgagaatatgtagactatctccatcgtgtgggtgagaaaacaggccacaaaagtttaacttacttttccaaggttttctcattattaaatggcaaattcaggctttaatcccaggtttgcctcctatagattccacggaaatttcatggcgaggaaatgatgtccacagtagatgaatataggctgtaggacagactaagtatttttactgcatttaaaaaataagttgtgccaattttgttttattagtttcaaggtaaaacagcaattttttcaaacatcagaaaatatgtgttcttttctatatgcttagataaaggttcagctgaatcaccagatctgactgccaatttatgtggctatgaattttttatatacttttttttagatcagttttaggttcacagaaaaataagcaaaagatacagagattttccatgtgttcgccamccccacacaagcctagcctcctccattatcaacattccccac

SEQ ID NO: 854027 - DNA, 510 bp, Homo sapiens
aaaccctcttcatggaggtcctcaatttagatgaattgcttttgtaaccttaagatatttgtttccttatacttggtgtcttaattgtttgttattatttattccttaacaacactrgctaggaatattctgagatttgggcaattagtttttctgtagactcccttgataaattcttggtggagagcctcttttgtctgcataactagtatcaatatccacaaagaccctttatgcaatttgtcagctctgtaagtgtcaatttcgtagaatgggtgtctttagtgtcctacacttaggtttgaaaaaattttaacgaatgcctttacttctgaattctttcctgaaaaatatgtggcaaaaaaatcttgaaaataatattttgttctttaagagttgggctattgttccctctccttcaggaactgttttacaaaacttatatccaaggaagcacagtgaaaccttaaagtgtagaaaaaaccccagaggaatcagtgtgtcaaactg

SEQ ID NO: 854028 - DNA, 494 bp, Homo sapiens
agcacccatcttccaggaagagtgggctgccccaggcgctgacgttaggcatggacacctgcctccaggctgcaaatcaggatatcggctaacatgccaccctccaaaggagccacttttccacttttccaaagatttttttcgatcgggaataactcttcatttcataattagaaatgtcttcaaatcaatcccccgtggcaagataaaagtaacaaatataacaagttaagtattaagcatagtacttgctatgtgcaggatattattctaagtgcattacatacagcagttcatttaattctcacaacaaacctgtgagtaaagtactattttataaatcccattttatacatgagaaactgaagcacagagacaytgagcagctggcccaggttacacactagcagaaggaccttttgacccagtaatctcacttctgggaataaattaaccaaaaagagtgaaaatttatatacacaaatatatttgtg

SEQ ID NO: 854029 - DNA, 631 bp, Homo sapiens
acttaattgctattgaactgtacacttaaaaaatggttaggatggtaaattttatgtttacatgtatttcaccaccaaaaaaataggaagaaaagaaaaaagtatggacattttatttatatcaagtatcttttttgcatgtatcaaaatgataacattattttctctttatttatgtagtaagtcacattgatgaatgtcctaatgtggaatgattcttatattcctggaataaatcttatctggttatgaggtattgtccttttagtacattgctggattcaggttgtttgtatttatttaggacatctgcacttatatccagaagtgagcttggctttctatcccagtttgtggtatccttgtaatgttgttatatcatggttatgtataacatgaaacagaagccatcatcttcctttattctctgggacattttaagtgacataggtatgacaacatcttggtatttgaataaaattgcccatgaccatctaggccttggtctttttggagatggggggtaaatcttttgrttaacttttctgtttcttttatggtaatcttttaaaaacaagctttcttcctcagttttggcaatgtgtctttctttaaagagaaatatcaattt

SEQ ID NO: 854030 - DNA, 546 bp, Homo sapiens
gactagtctggaactcctaggcacaagcaatccatctgcctcgaccttcctaagtgctcggattacaggcgtgagccactacacctggccaaacattttttaaaaatcaaaaagacatgctcacttcagtgacatcaagtaggacaaaagacaattcaataagttgatgatattttcagctttgatggaacgcatccacagcccctggcagagctcatcatcagggtcaggtccctgaaatcatccatgtcaggtcccaaatatcccgcttgtaaaactgcattgcattccatttacccatctcagaaagatagatggcgccatcagcctggttaggattggtttcagtgaccaagcatttctaatgagaacacactgcagaaaccaaccacttccttgcataagacattcagctacaaaccctggtggttaagctgcgatgggttctgccagctttgagcttgggtcacagacctgttcaagggcaagtgttcttccagcactccgagaaagagatgsctgttgatgcagatggcatcatacgaa

SEQ ID NO: 854031 - DNA, 634 bp, Homo sapiens
tgaggcagaaggactgggaaaactggatttggcatgcaagcccttccctgggttttcttctagcccagctcacagtttgaggtttgcaaaggcatctgcctccctgggcaagaagtttgtctatrcagagcagataccgggttcctcttttccataaatatttctgcaaaatccattcatcttcctgaaatctccaattatgagtacactttgactttatttctcagtgcacctttctttcccttagcccgattctttcccccagatccccactttcctagggcaaaagaaagcggcttccactcacagcaaattttctgagtcctccccacagtgaagtgaaaaccaaagagagaacattatcagagaaaagcagcactattcatacatccttaactttacataataatttcataattgctttttatgaaatcaagtttaatcacatttctgctgcaaaaatgcttgaaatcgtgactttacgaaaggagaggttgccagcgtactgcatggcacgctgctagctatggaacccctcatggtgtacttttgtttgttaagatttccaatattttaaactccatttcctaactctacaggtgctctcctctttttcatatatgatccttccgcc

SEQ ID NO: 854032 - DNA, 266 bp, Homo sapiens
atggagccaccataggacttgacgaatgatggcatttgaatcaaccatctctgtgccctgtccataataagggacataggagtacacagaagggactgggtttctcttctagtcaggtaaattcctacccctctatcaagatccagctcaagagttacttcctcaaagagtttcctaactattcctatggccagaaaaggccttagattcatggttrtcatattcccactcttcctttaaggcttcttcccagcccagctttggcc

SEQ ID NO: 854033 - DNA, 584 bp, Homo sapiens
cggctaatttttgtatttttagtagagactgggtttcactatgttcgtcagcctggtctcgaactcctgacctcgtgatctgcccrcctcagcctcccaaagtgctgggattacaggtgtgagccaccgtgcctggccacattttaagttttttatggactgtcagggtgaaagggtgagaaagagatcaaaaatgtgcctacgcgttctgcaaaactgtaattttttaaatacatcgcgcatgttatttttctacagctcttctacagggactcatgggctaagttctacattctttgaatttattgtcggaaaaatgctcacctcacctggtgagctggtaagattccttgtatcaggcatcaggggctacacatctcattttagtgtctcttttgcccaggattcctgaaaactcagaggtgaattcactactcaaatacattattgtccttggcttctattcccgctacatcccacctagctaggagtggctccagagatattggaagtcagtgggaattttagctgtctcctttctaacagtaatcttaaacaaattagtttcctttctgagccctaac

SEQ ID NO: 854034 - DNA, 634 bp, Homo sapiens
tgtcattgaaacagccagaggactcaggacccagagaaagagcaaactccctctcctttcattcccttccgctcttgtaggaatgtgggaactttcacagttttgctgttttcaagaaaacggcaccttgacaacatgacctttgagacctacaagctgagggagctgtagggagaaggatgatctgagatgggcaacaaaaaccttccaagaggaggcaatgggtgaggacccttcatgttgccaataggagcgatctgggaatattttgaaatggacttttaaaaaagctgagtctgttttttggaggttctttgtcaaatacacaagagaatgaaacccatacctgtgaaaaatcatagatgaagttttaaaatacacatttcagtgatacagtatggataaatttggactgcatatggcttcttatgtaaaagaaaatttcttctccttttagtaacacattgtcggctgcctgtgctttgcaccttctgccataagckccttaaaacaagctgctgcaattcaagaactagccctagtaattaagatcaaatgagccagatgaagaaaatgagctgggtgaaacacatgccagtggaacccagccttttcatatttaaaaagagagcca

SEQ ID NO: 854035 - DNA, 544 bp, Homo sapiens
tgatggtgccactgcactccagcctggatgacaaaatgagaccttgtctctaaaaaaataagaaagaaagaaatggaaaaagaaattatacccaagccaatcatagtcaaacagctgaaaactaaaagtgatgagatcttcttaggcagtcagaaaagacattaaatcagagaacaatgaaattgacagttgacttctcatgagaaacaatagaagccagaataaatggactatctttaatgtattgggaagaaaagaaaaaactatcaacctagaattttattacagagaaaatactcttcacaaatgaggatgaacatgaagatattttaaaaccaaggaaaaaaagactgagacagtatatcatgcctggaaacacactacacaaaatactaaaataattttatgcagaaatgatcccacctaacatgaaaatggaaactaagatatcaagaaagaaraaagagtaataaaaatatatgtaggtggatatgagaagccttttttccctatttttaaaagtaaattggcaaatataaagcca

SEQ ID NO: 854036 - DNA, 602 bp, Homo sapiens
agctgtattagtcagggttctctagacggacagaactaatggaacagatatatataagggggagtttattaagtattaattcacataatccgaaggccycacaatatgcaatctgcagactgaggagtaaggagaaccagtccgagtttcaaaactgaagaacttagagtctgctgttccagggcaggaagcatccagtacacgagaaacatgtaggctgggaggctaagccagtctctcttttcacatttttctgcctgcttatattctagccatgctggcagcagattagactgtgcacacccagattaaggatgggtctgcccttcccagctcactgactcaaatgttaatatcctttggcaacaccctcatagacacacccaggattaatactttgtatccttcaatccagtcaagttgacactcagtattaaccatcacaagaccaccccttgtcaacttgaacccatacacatctcctgacatcatcataatcttcaaataaagacaataataaagtcataattatacctaacataatacagctatccttcatatgaccagaaacgcaccaatccccaacccaaatactattacat

SEQ ID NO: 854037 - DNA, 568 bp, Homo sapiens
tttggtatttttttctgatacagagtatgaacactcaacttgtttttactttgaagaaataggacttctacgtctgtgtgtgtgtacgcgcatgcatgtgtgcacacttgctcacgcgtgtgcrtctgtgtggtgcggttttgtaaaatcacccagataattctaaggcatttctgtctttcccctacctccccataatcattgatagaatgtctcattttcctttaaagacaagtttggaatattgcagagggtgaaaacataagcccacaatatgggcatgctagaatgaaaaagctcttttagtttactatatttgtaagtaaaaatttaaccgtgttatcagggttaaactataggcagtttctaactaaaaataaccaaactcaaataaaaaatagtaacatttatgtgtaataattaatatctatttcaattataaaatttctacctgtagaactctactataaagtaatatacacactactttccacagcaataaataaaatggattgcatatttcagtgtctcataagtgcataatatcaaaaatttcacttatagccct

SEQ ID NO: 854038 - DNA, 609 bp, Homo sapiens
taaacaggtatcaatgacctctgcctctgacaatcatacttacacatatacaatcatacattatgtgtgatgggggaaatcaatgtgggattccaagttctttggatgacaaaactgaggatccactaaagaaggcccggcctccattctccctctcctgtgcaacttctatagactcaaatagggttccactagttacaaccttttttcttccaagctcttttccataatgctgctaaagtgatcttcccccaaaatgtctttgatcatatcattcccttgtttataatctttctgtggttccctattgctcttgaaggaaacaggcttgcaagcctggatcacgctattctcatcaatggtccctcattgtcccctccccatccacccacaatctattctcagccacgtggaacaactttcaggttctcaaaagtaccgtattctctcatgtctctggcttttcacacataccatttcctccctcagaaacacctactccaatctctttttatccttygggtctcagcttacagtagaacatttttttccagaaagactgtaacccattctcccatcaaatttgggtgaggtgctgtgattttgggc

SEQ ID NO: 854039 - DNA, 635 bp, Homo sapiens
gctcagtagagtacacgcatcatgaawacgacttcttaatccataaagtcagtaaaatacacactttagaaattgcattagtctgttttcatgctgctgataaagacatacctgagactgggcaatttacaaaagaaagaggtttaattggacttacatttccacatggctggggaggcctcacaatcctggtggaagacaagcaggagcaagccacatcttgcatggatggcagcagacgaagagagcttgtgcaggaaaactccccctcataataaccatcagatctcgtgagacttactcagtatcacaagaacagcacaggaaattcctgcccccatgattcaattaccttccaccgggtccctcccacaacatgtgggaattcaaaatgagatttgggtggggacacagccaaaccatatcagaaatcattgcactaattcttataccttgcagaatattaaaacacctacaaataatactgctgacagaagaatttctaagacttcctgaggtatatggtaaaatacttatctatcttcttaagctcccttaagtccaaacagcaaaggcaaatgtagaaatgcagaaaggcaataagaaagagatgctgagtcaaataacaggggtgg

SEQ ID NO: 854040 - DNA, 635 bp, Homo sapiens
gctcagtagagtacacgcatcatgaaaacgacttcttaatccataaagtcagtaaaatacacactttagaaattgcattagtctgttttcatgctgctgataaagacatacctgagactgggcaatttrcaaaagaaagaggtttaattggacttacatttccacatggctggggaggcctcacaatcctggtggaagacaagcaggagcaagccacatcttgcatggatggcagcagacgaagagagcttgtgcaggaaaactccccctcataataaccatcagatctcgtgagacttactcagtatcacaagaacagcacaggaaattcctgcccccatgattcaattaccttccaccgggtccctcccacaacatgtgggaattcaaaatgagatttgggtggggacacagccaaaccatatcagaaatcattgcactaattcttataccttgcagaatattaaaacacctacaaataatactgctgacagaagaatttctaagacttcctgaggtatatggtaaaatacttatctatcttcttaagctcccttaagtccaaacagcaaaggcaaatgtagaaatgcagaaaggcaataagaaagagatgctgagtcaaataacaggggtgg

SEQ ID NO: 854041 - DNA, 618 bp, Homo sapiens
gactacagctattaaataaaatagttgctttgctaaactttatcaagctaaaaaggctctaatatttatgaagaccagcttcgttttacttgagtcacctccttatttttatgacttgatgtatcatttgtttttggatcctgcagtctgagtatagcaagagagtgccggaaacatggagagccagaactaactgatatgggctgattttgaaaatactattacttgtttgaagttgagattacctcagaccaattttctcaagcagctagtgtctatgttttctagagttaaatttatttcatattgcaagtattttaacctgggcatggtggctcacgcctctaatcccagcactttgggaggccgaggcaggcagattgcttgagctcaggagtttgagaccagcctgagcaacatggtgaaaccatatctccacaaaaaacacaaaaattagctgggcatggtggcctgtgtacttgtagttcagctacttgggaggctgtggtgggagatcacttragcctgggaggcagaggttgcagtgggctgagatcgtgccactgcactccagcctgagtgacagagagagaccctggcttaaaaaagccaaaacaa

SEQ ID NO: 854042 - DNA, 571 bp, Homo sapiens
gaacccaaggcctagccttcctcctactgaagagtcattccctccactccccaccagccctgctgacgctgcctgtcttgctagtgatgccaccctaataacatgaatgccttcaccactgccttctccagcctctcaaagttgccctctcagtctcctgagttgatcctgtggctctctcaaacagaagggaggattctctttccatcattgttgtaactttttaccagacctttaagtgtgaccgtgatctctccattttttaataaatctcccataaagggtagcttactcttttagtttccttcagaactatcttccaaataactcaagaaaagcaaccccctcagcaaagtcagaaaatatttgaatggcagcttaaataacctgctcaacaagtctcttcccactgattatgctactgttccaccgaggtagttaggcatcttgatctcrccctatacgtatcattatactttttgtacagtagtaccctcttatctgtagtttcaccttccagttacctgtgatccaaagacagatggctataggcaaacctcactttattttg

SEQ ID NO: 854043 - DNA, 629 bp, Homo sapiens
ccaatcacttccagaaacaacctcacagacatgcccagaaataatgctttaccagctatttggatatcccttaacccagtcaaactgatacctaacattaaccattacacatatattcatggaaaaaactatctttcaaacaaaaaaaattacaagagtggcattgctttgcatttttgtgatgctccttaatgtctggcttcatagaagacaactggtttcctatgtctgcttctatattcagtctgtttgtgatatcacatgtcaggtagcctctggaaaacttcactgtacatactttttttaatgagaaaatgacaaataacatcataacaaatcattttgacttggcagacacctaacagggtctcagagaccctcagggtcccccgattacactttgagaaccgctgaactagaatataagctcagtaagggcagagactatatatctcttatatcccagcacctagaccagtctggcacatagtaggcactcaataagtacttgttagttaaatgtatgaacctgaggctatagtrtgaaagatattgagtgccaggctagtaagtttggaattcacttagtagacactaggcaaccagtagaggtttctgagcaagtaaat

SEQ ID NO: 854044 - DNA, 633 bp, Homo sapiens
atgcagagataattaccccccaaaaaagagatacatgtgtcttaaacccatgaaaagatattcattctcactataataaaagaaatggaaattactatttttttttcttttactaacagcaaagatgaaaaagtttgataacatgctgttttaaagagggcagttatggggaaatagtcactctcatgcattgttggtaggagtgtaaattggtacaatatctacagaaggcagtttagcgagagctatcaaaatttaaaacatacataccttctaacttcgcaatttcactttttaaaatgtattctacaactatattttacagataggccatatgacacatgtaaagatattcactgcggtaacagtaaaatattggtagcaagctaagcgtctctcagtggacagctagataaataaattatgatatagccatgaaaggtaatacaattcaaccattttttaaaatgagacagctctataacaacaaataacatccaygatatattaagagaaaaatcaaaatgtagaacagtgctaatatttttgttgaaatggggagagtcatttgtactgaagagtacaaatacttttatatacttagaaaattttgtgaaaaggccaggcatggtg

SEQ ID NO: 854045 - DNA, 591 bp, Homo sapiens
atggcatcagttttttcttttctgtagcaagaagagggaaagtttgtatttgtccacctgccaggtacttttcttgtgtgtttttacacgtgtgtatactatgtgtgactttctgacatgggcatactttataagtgactgattagccattgtttttttcaaactgaaatataatccccatatattataatctaggtccaaattcagtgcagtgttagtatatggaaatgttatttcaaaatttaatgtataaaataacgtaatctgtatttggattttggtgaaagtcaataaaagatgcccaagataattatcaacataaagctactttgttagatttttcaaactataaatgaaccatatcttattgtgaatcctcttaatgtctggctgaaaaagatacagtctatttctattctgacttcaataaccatatttcagggaaagttatttagaaaggttagtatttatttacacagtaaaaaatttttgagtttatgtattctgttgtttgaagaactaaagcttcgattgtcttagatttttaagatkatcatagctatattatttagtgcttattaaatttcagga

SEQ ID NO: 854046 - DNA, 533 bp, Homo sapiens
gaactttcagaactttgttttgaaatatacatatgtttaccaataaaaaataaaaagtcaattttgacatcccaattttcttgcaaaaccagttaattaatattagcatgactcttactaatggcttaaaataatgtagaaatcctatgatgctaagaattcatttttaaataactctttttacaaaataaatgttaaggtaacaatctcaattctttaactttgatttataaggcctgtattaacttttaaaataacattacatatctctatcacgcaaagttgtcagaggaatatagtaaaaaaatcaaatagaagttcagaagacttactagacttttctgggacacagaaatgttaaagaaatcagatatgccaaagggacacatcacactttaaaacaaattctatttatggaaagtaacctatataccatttgttatttgctaatttctcacaaaactctagcatctcaawgtactctcagaaaatatatattaacacaggattttagttacatatttaaatctcaa

SEQ ID NO: 854047 - DNA, 607 bp, Homo sapiens
cagtgagccaatattgtaccactgcactccagcctggatgacagagggagatgctgtcaaaaaaaaaaaaaaaagctaaaaaaaggcaaattaacccaggttagtgtgacccaaagtgtcaacttccaacagatgccagcttagagaatatttgttagtacattgtaagtatagaaattgagagtagagggtgagatacatttaccacaatttgaatttactataatatcaaataacatagtcagtggatttgagtcattgaagaggatattggtcacttcaggtgttatcaaagtcgtggtatcacagtaagaccccacaaaaattcatggtattttggtttattatttaggatatttgggtttgtcacagttacatcaaagatgattgaaaatctgagaaaataatattactcatataagttactttcaagattattttgattttattcagcttacttttatttttaagtttaaatttatcctcaattatggaaatagaattaatatttttactttaataagataagcatcacttgattcacatagatttatgaaaatacactttttcataatgcttcagwagtcatcaatgataacaaaattaa

SEQ ID NO: 854048 - DNA, 654 bp, Homo sapiens
attttggccttgcctttgaccactctagtaacacagtgtcatctggtgtggagatgagaacctcagacagcgtgaagcagatagtgggcctcagtgttggagaccktcagggagagggagaaaggcagccatagccctgaagtgttaccagcatggagcctgttaactaacatggctaacacggattatttgaatgagcacatgatggcagccaatctacttcctgggattcacatgctgaacgacattcatcctcaaatcatccttaaatctaggtggagtggctggagaacacatgtgtgccctgtgcatgcctgtcaataactgatgtgtcctgcatggaatgtgtccaggctgagggctaggctcctttgttctgttatttgtcctagacattgcattgtaaggaattagcccatgagagctgtgactatgtttgttttactcactactaaatcccttaagtctaaaatggttcctggcatgtggcagaggcttaaaaaattgttgaatgaatgaattttgtagataaaaatttcttctcaccaatatggccacctctgtacaaacaaatcaatatcatccctttggtgtctcagctttcatttcttccagtaattccaacccctgttgggatgtgttggtttatgacag

SEQ ID NO: 854049 - DNA, 654 bp, Homo sapiens
attttggccttgcctttgaccactctagtaacacagtgtcatctggtgtggagatgagaacctcagacagcgtgaagcagatagtgggcctcagtgttggagacctycagggagagggagaaaggcagccatagccctgaagtgttaccagcatggagcctgttaactaacatggctaacacggattatttgaatgagcacatgatggcagccaatctacttcctgggattcacatgctgaacgacattcatcctcaaatcatccttaaatctaggtggagtggctggagaacacatgtgtgccctgtgcatgcctgtcaataactgatgtgtcctgcatggaatgtgtccaggctgagggctaggctcctttgttctgttatttgtcctagacattgcattgtaaggaattagcccatgagagctgtgactatgtttgttttactcactactaaatcccttaagtctaaaatggttcctggcatgtggcagaggcttaaaaaattgttgaatgaatgaattttgtagataaaaatttcttctcaccaatatggccacctctgtacaaacaaatcaatatcatccctttggtgtctcagctttcatttcttccagtaattccaacccctgttgggatgtgttggtttatgacag

SEQ ID NO: 854050 - DNA, 654 bp, Homo sapiens
attttggccttgcctttgaccactctagtaacacagtgtcatctggtgtggagatgagaacctcagacagcgtgaagcagatagtgggcctcagtgttggagaccttcagggrgagggagaaaggcagccatagccctgaagtgttaccagcatggagcctgttaactaacatggctaacacggattatttgaatgagcacatgatggcagccaatctacttcctgggattcacatgctgaacgacattcatcctcaaatcatccttaaatctaggtggagtggctggagaacacatgtgtgccctgtgcatgcctgtcaataactgatgtgtcctgcatggaatgtgtccaggctgagggctaggctcctttgttctgttatttgtcctagacattgcattgtaaggaattagcccatgagagctgtgactatgtttgttttactcactactaaatcccttaagtctaaaatggttcctggcatgtggcagaggcttaaaaaattgttgaatgaatgaattttgtagataaaaatttcttctcaccaatatggccacctctgtacaaacaaatcaatatcatccctttggtgtctcagctttcatttcttccagtaattccaacccctgttgggatgtgttggtttatgacag

SEQ ID NO: 854051 - DNA, 626 bp, Homo sapiens
taacaccagaacctttgcatgtgttatccccttcatctggaacactcacccactactaactcccactacctagttaactcctattcacccttttggtcttagtacaaatgtcacttcctccagaaggtctttcctactctcccacactaaattagatctcccacacaaataaataaaattgatgaaccagactggggacaaaacagggaagacataaactaatatgaggaatgaaagaggtaacatcattaaggattctaagataaggaaatattatgaacaattttatgttaatacatttgacaatttagacaaaatggacatattccttcaaagacacaaacaataaaagcacactcaagaagaaacaaataatctaaatagccctatatctattaaggaaattggatttgaagtgaattaccctccaacaaagaaaagtccgggtgtagatggcttatctgataaactgtaccaaatatataaggaagaaatagtactaattctacrcaaactcttccagaaagtggaaaaaaaatttataatgtatactacgaagtcagcatattctgaaaccaaagacataagaaaactaaaaaccaatattcctcatgaatataggtaca

SEQ ID NO: 854052 - DNA, 457 bp, Homo sapiens
ttgagaagaatctgtgtataaatgggcccaaacagttcaaatctgtgttgtttaagggtcaactataattaattagacagttatgaaattcttttgctaatatccatcttccctataaggatgtatactccattagagtgggaactatatctactttgctattttattccagcatgtggtagaaaatgtgacacacagcagcaatcaatcaatcaatcaatcaatgttgaatgaacgaaccattaatttgccacctgaccttcattcggcacgtttgtctttcttaggcttagttctccatctggaaatggagatgataaatgcagctactttcaaggttgcttcaaggtacataaggtrctatgtgtgagagcattctaggaactctaaagcaatacacaaatgtaagaaaataaatggaaagatgccccaggtgcacaggactggggcaaaggct

SEQ ID NO: 854053 - DNA, 554 bp, Homo sapiens
cagctattctcagaagaagagattgttatcaaagaagatgacagtytcatgggtgttattgcccctgaagatctactggaacaagacttgaaggtggaatacaatgatattgattatcttgaccttgtgtaggcctaggctaacatgtgaggttgtgttttagctcatgataacatttttaaaagtaaaaagaaaaagaacaaaaataggaaaaagtcttattacataaggatataaacaaaaaatatttttatacaggtatacaacgtatttgtgtttaaattgttattgaaaaatagttaaaaagttttaaaaactttaaaaatttatgaagtaaaaaagttatagtaagctaatgctaatttacttttgaagaaatttttaaataaatctactatatcctaagtgtgcagtatttataaagtctacataagggtacaatgtcttaggctttcacattcactcaccacccactcagtgactcatccagaggacctgccaggcctgcaaattccatttatggtaagtgccctacacagacacattatatcttt

SEQ ID NO: 854054 - DNA, 591 bp, Homo sapiens
agttcttaaaggcggcgtgtccagagtttgttccttctgatgtttggatgtgttcggagtttcttccttctggtgggttcgtggtctcgctggctcaggagtgaagctrgggaccttcgcggggagtgttacagctcttaacgcggcgcatctggagttgttgctcctcccggtgggttcgtggtctcgctggcgtcaggagtgaagttgcagaccttcgcggtgagtgttacagctcataaaggcagtgtggacccaaagagtgagcagcagcaagatttattgcaaagagagaaagaacaaagcttccacagtgtggaaggggatcccagcgggttgccactgctggggcagcctgcttttattctcttatctggctccacccacatcctgctgattagtagagccgagtggtctgttttgacagggcgctgattggtgcgtttacaatccctgagctagacacaaaggttctccaagtccccatcagattagctagatacagagtatcgatttgtgcattcacaaaccctgagctagacacagggtgctgattggtgtgtttacaaaccttgagctagacacatttat

SEQ ID NO: 854055 - DNA, 587 bp, Homo sapiens
tctaacagggcaggtgacatccttaaaaataccatagaaagaacttccatctaatctcacttaagacaaaatttcctaacctttaacaatctataaataatacttatgatgcaaatgttttgtattttggytaataaatgtcaatatcctggttgtaatatagaactacagttttaaaagattaccattagaaaaaaaactgagtaggagatgcatagaatcttggttatttctgacaacagcttgtgaattttaaattatctaacagtttaattaaaatgtttttctgggctgggtgatatggctcagtcctgtaataccagcactttgggaggctgaggcaggaggatcgcttgggtccaggagtttgaggtcagaccagcctggacaacataatgagaccccgtctttataaggaaagagagataaccatgagacaaacaagcctctttaaaattgtttttctgttttatcagcatttatagtacaataatttcatacacacactgccccactccctacagcctcacccattatcaaaatttcataccagagtggtacacttgttgcaactgataaacctacat

SEQ ID NO: 854056 - DNA, 604 bp, Homo sapiens
tcaaatcattctccctgaacatttggggatcagagttttaaagataattcggtggataggtgcttgggaagtgggtagcgtcaattgttgatggaatcatagggggtcaaagtaaatttttgttgctcttggtgtcttctgttcctgggtgggatggcagaactggttgagccagattaccagtttgggtggtgtcagctgatccactgaatgcaaggtctgctaaatatctcaagcagcctaaaaaattttaggttttgcagtaatgatattatccccaggagccattggggaggttcagactcttgcagccagaggttgcatgacccctcaatcataatttctaatcctgcagctagtttgttagtcctacaaggcatactggtccccagcaagcaggggtcttttcgggaaagggctattatcaattttgtttcagagtcaaaccatgaactgaattccttcccaaagttagttcagcctatgcccctgaatgaacaaggacaacttaaakgttagaagcaagatggaatcagttagagctgatctctttcactgtcataatttcctcagttatcatttttgcaaaggcagtttcagtttt

SEQ ID NO: 854057 - DNA, 610 bp, Homo sapiens
caaggttggtcaacactgttaggcaccaaacacccaggagtgatggggcaggaggtaattagcataatggcgtcattaacacatacaatatataactcatacaaagcagctttgcagagtgccacaactgaggcataaacagagaggctgaaggcaaggaagagattaattatgacttgggcactcctagaaagtgtacaggaaagaggtcaagcagccaagaccagaagacatggttggaggagttcgggcgtcaattgagttaaaaatcttggtaaacagcaaaggatggccatggcccatagagtgaataaaagccaaaacaaggaggtcatgcagctagattttccagtgtcatgacgctgatgctgagcagagctgacatgcactaacacaggaatagctcacatctgcagagcacttgccttccaacacattatctcccgcagctcacagggtgattacccgcactttataggtgaggaaaccgaggctcagagggtaaagcccytgctggtgactatacacaacctatcagaagctccaggcctagacctgattcctagtccagtactccttaagacagaaagtcaagcacagagcagcccag

SEQ ID NO: 854058 - DNA, 627 bp, Homo sapiens
attttagcttccctttctgagcttttccccatctagactctcatagagaatggtgatactggcagggtgcactasggtaaaaggcagaggctgcccacggttggaggccactgattcaggggctctggccacctcagagttcgtttgaccacccccagggctcaggggatcacattttggctcaccttgcctcagggcagtagactccatctgtccccaggctccctcctttgcctttcttattctgcctggtccctgctggggctataccctcccaggggggaggatactggtcctacagacatctgcctttcctctccctccagcaccagcctcggtggaaagcttccaggtgacatggtttggaagttcaaacttcaggaaagaaaaagcatgctctataacacaacaagtacgcagccaggactagattcagtccccagtgtgggcactcacttgggcaagtggcttacttctctgagcttcattttcctccctgcaatgcttctgaaatagctaattggatgattcattcctatggatgcgtctgccccattcagaaactgtttatggcagtgaacaaaactaactctctaatgtgtggagatttcattgtagcagaagaga

SEQ ID NO: 854059 - DNA, 471 bp, Homo sapiens
ttagaatataactttctaagattagtaatatgtcccagtaattgcgctcttcctgacttcctattccacaagagaactgccttatattctctccatattggggtctagaaatcaaaacaaatcgctgtctcctgttactagagagtgatttcttaaaacaaacaaacaaacaaacaaacaaaaaaccctcttaagctattaagttcttatttgccagtatataaatgggttggttgagttgttaaagattaagctcttaatgcttttaagctgtcaaagaggaaaaagctggataattaaaccacaagggaaagcaaaagccttaaataagcaggaacagttggcggaawggaatacaggaagaccatttcacggcagtgtaattagtaaacaatataaaccaaaagcagtacaaggtctcaatgtgttcaatgctacagatgatcttccaagtgaaagtgtaatgaatcc

SEQ ID NO: 854060 - DNA, 614 bp, Homo sapiens
cctgtgcattgtagagagtttagcaacatccttggcttctacctactggatgctagcagcacactcaccccctgccagtcaggacaactgaaaatatctccagacattgccagatgtcacctggtgtgggagggaagcaaagttgctctgcttccttctcagctgggagcctctcatctaaagggtgatggtgggattgggtattattttggaagccaagtatttgccaacatcacagtagacatcatgaagaaaatgagatatgtgaggtagggggctgtaatatatttcctattctatttaaatacttttgtaaaccatattcttggaagctgaacctttctaggagtctgagagggtagtgtgtagctttaagaatgtatcaacatattaaaattgtcaaaatatttttagttatgtgaggtattctatatctgaagccaggttttaatgttcttctttcccaaaattacataccccctttctatctatttaataacccctcaggaagcaaatactccaagtcaccatctgcaagtaggaaatcaattactccttctttgcgacrggctggatggaacaatgtaaaaaaggctattttattcaagcttaat

SEQ ID NO: 854061 - DNA, 503 bp, Homo sapiens
agaaagaccgacaccctggaaaagaggatccgcaactttccatgtcagtattttattttagccacagctacttctcccccaaattacaatgaatatgctcagagrtgaaatcattcccaacaatgagtccgcctcctttaagaggaaacttggccgggcacggtggctcatgcctgtaatcccagcactttgggaggccgaggcaggcggatcacctgaggttaggatttgggaccagcctgaccaacatggagaaaccccatctgtactaaaagtacaaaatgagccaggcgtggtggtgcatgcctataatcctggctacttcggaggctgaggcaggagaatcgcttgaacccagggagcggaggttgtggtgagccgagatcgtgccattgcactccagtctgggcaacaagagcaaaactccatctcaaaaaaaaaaaaaaaaaaaaaaagaggaaactcacattgcagaaatggagtatcacttttgaggctagatt

SEQ ID NO: 854062 - DNA, 670 bp, Homo sapiens
ccctgaatcttttggcctcctggatccaggtgttcttcaatattccttggcattgatgcaaaggtcacttgtgccccccttccacctggcacatgcctgaacaccatcttgtgtttcgccatcaccccatatgccttcagtgacacacattcacaccatctgctctgggatacgccagtgccacgcatgttggaattgactccactttggaattgcccttgtccctgtttgcatgtgccctggaaagaggtatcagcttgcaagcgccccagagcttttacaagtggggcaggcgactgctctttcaaaggaggagggaggcagagggctcatgggtcagtgatttttctgctgacaccacaccttgaggcccatgtgatcattctgccctgcaatgaggcccttcctttctcagcagatgtggtgagtccatccttcttcacccggaggggtccaaaatcagatcttaagaggggtcttsagatgccagcaggtgccctgaagctctccctccaccggtggaagtcagctcaaggaagtctttaagacaggactcctcgggatttggccctgggaccaccgcggccctctctcccctgccgccccctactggaacctgcatcctgccatcgccgcggctgcaacaggattctccctgccactgtgcagt

SEQ ID NO: 854063 - DNA, 592 bp, Homo sapiens
  misc_feature 74: n = A,T,C or G
catttattattgcctgtcttttagaataaggctttttaactggagtgacatgatatctcgttgtagttttgatntgcatttctctgatgatcagtggcrttgagcacctttcacatgcttgtttgccatttgtatgccttctttagagaaatgtctattcaaatcttttgcccatgttttgattgggttattagatgttttcctagagaattatttgagctccttatatattctgatgattaatccctcatcatatgggtggttttaaaatattttctctcattctgttgattgccttttcactttgttgattgtattctttgctgtacagaaaaacttgatgtgatcccattcatctatgtttgctttggttacctgggcttgtgaaatattgctcaagaaatttttgcctgggccaatgtcctggagagtttccctaatgttttattgtagtagtttcatggtttggggtcttagatttaagtctttaatccattttgatttgaattttgtatatggtgaaaggtaggggtctcatttctttcttctgcgtatggatatccagttttccaagcaccatttattgaaaaga

SEQ ID NO: 854064 - DNA, 600 bp, Homo sapiens
ttatatatttcaatatgatcaccaagacacaagagataaatgacccagagtgagatgagaggcagatgtgcagaaaattctacaaagagagccagtgaggtgactctctgcactgaggatgagagagggtggtgggtggagatgggaggtggtaaggcagatttctttgcagagagctgtgctgagactggcctccctaccccattgaaggaggggtggtgcttgccccttgcctcaagtctagtgagatgagcttcagttgactgcttagagagtgtgtgttccctgccgctaggacaatagctgactccccactatggtcattagggaggagatgaggcaggttacctagctgctttgggagtagagtgagccaaccagagttgctgttaccctgagattggcctgcatctcagattctatccaggcagagaaagtgagcttcctgtggaccagaagtggaggtgactgattcaggaaggggaaacacactggagccattttcaatcccaccccaaacaacttctgcagtaggcagaataatcgcccccaaagatgttyccatcccaattcctggaacctgttgatatgtcaccttac

SEQ ID NO: 854065 - DNA, 601 bp, Homo sapiens
tgcctgccgtggaggggccagtgggctaggcaggcacacacagcagctgtgrtaactttgggcagaccataaggcagtttacggtttgctgagtcattttacaaatctttattctgtgaggttggtagaaaaatgaagctcagagaggttaggtaacttgtcccaggacacagagccaggacttgggcctgtatatcccaagctctagcctgaactggctccttaggtagcctctgcccctcccactaccccaactccctgaagcagaaccttggttagagcggcagggcccgtcttgttttgacaggtctagaacttgtctttgttttatttttcaggacaccagaactggttaacatctacaggcctggctcacccaaccaaacatacgggaggtgggtggatggataaacaatgccactgtgaccgcttacaatgagcgccagttcgtttagaaggctgatgtcaggaattggctcaagtcattcattccctcctggtgatgccgggcaaatgcagaaccagggcaaatgcagaaccagagcaaatggagccagcctttctcgaaggatttctcagtctgtcagactgggctacagaa

SEQ ID NO: 854066 - DNA, 619 bp, Homo sapiens
cgtttgaggttagaaagtcagaatcgctgggagctgcccactctgatttctctgagttccttctttttttattttggtctttcctgtggggactctttcctcgaatrtctagtcaccaggcttttggttccatatgagtcaacagaagcccactggaagctctagaggcttggtgggcttcttatccaaggtccccaccttcgggtgatggagaagaacctggctgttctgctgggggccctcaaatgtcatttgagtttggtagtctgagttttggtaacttttctcttaggctggccagcttttccttgagaggaatttttcagtcctcttactggggctctgggagcctagcggggggaaagcctggaagttctgagcatcccatgtacagactttcatttaattcctcagtccttcttctcagtcttcagtctaacaccctccccacccactacagcccccacaccatcctctgctgggccaggtattactgagtcttcagtccctctggaccatccccatatttaatggggatgaagaagatccaggggtccaacaggtcacccacacttactgttgtcagctttagcccacttggcaactttctgctgactcc

SEQ ID NO: 854067 - DNA, 587 bp, Homo sapiens
ccactctcttattggagtttcctggacatttgacttaacataaaaactggcccacgcgtcctccatttgtgttttctcacttaaatgaccttggaaaaattttgtcactaaatcaatgaaaacagtcctgttgaaaattctagctggagaccatgcttatcctgcaataaattacttctgaagttcctcctgccctccctcttcaatgaggcgtaaaaccccgtggctgactctaatccgcaaagttgatgccagtggcaggtttggtaccaagaaggggatggagcctttctctgctaaaaattcaaaaaaattagccaggcatgctggcgggtgcctgtaatcccaactactgggaggatgaggcaggagaatcacttgaaccgggaaggtaccaaccgtttggtaccaacgagggccacacttggggaaacaatgtttaacctttaaatgtcacagtctgaaaatatactttgtctrtggaagatggttcacaaggtatttccttccatttagacacagcaaaactgaaagagttaaaacaacacaaaagtcaggctcccacgatgggaatctttaaatttcca

SEQ ID NO: 854068 - DNA, 394 bp, Homo sapiens
aaatttacatagccagatcacataatgaaatgtctcagagaagagtttctagtaggaaactggaaactccacaagcagaacgatcaggtccttacttttgttttgttttgttttsttttcttttctttttttttttgagatggagtctcgccccatcactctggcgtgatcttggctcactgcaacctccacctccccagttcaagcaattctcctgcctcagactcctgagtagctgggattacaggcacacagcaccacgcccaactaattttttgtatctttagtagagacagggtttcaccacactggccacgctggtctcgaactcctgacctcattatctgcctgcctcggcctcctaaagttctgggattagaggtgtgagccactg

SEQ ID NO: 854069 - DNA, 682 bp, Homo sapiens
aatgctgaggacagagaagtttaataccaacctcaatgaataattcagccactgcgtttccctaagtaatggaacttcgcaggaacaaatcatggtttcagaaaaatgattccctcaaatgagaatgtgggagtygatgcttagacgccatttggggcagctccatcttgtacacacctgacatgccacaatcccaagaaggggaaccgtggctggtgagaaatgaaaggcagacttcccatcagtcctggtgagtggcatcacatcggaatttccttgttgcctggcaacagctgctgctgagagcagggtgccctctccctcagtctggggaggggattactctgcagctggtgagacttaaggagcttgagggtgaaaggagggattgccactgaccccaccccccggggggatgtcctggtccacagtcccctttctccagggtcataagggttaagaaggattctgtggatgggcctcatcacctaaccgcagctcagagcattgctttgaatggggaaagatgagcaagttaagtaatgacttccgagcatgctttcggaacatgacccaattatgagatgatggcttcctgcaccatgagcactgcaacacatggcacctactgaaatgctaaagtgtggcccacctggagatgtcacctttgggttaaattagg

SEQ ID NO: 854070 - DNA, 564 bp, Homo sapiens
ttcaatcttttaatttgcaaagagggaataattctaatacctttcacttaccacccatgttgactattgttgagtatgtgcaaggcataaatgtcatctgtgcaaaatttaaatgtttggaatttactccaaaagcaatgggaccctatttcagggaatcagagaaggtaatgatgatacaagctgaaaccaaaccacagtagaatgtgagtgcaggaaaccctcctttagtatgaaatatcttgtttgcattaagctgttttaccttggaagagtttggttctatttagcagtttcctaaagaaggaaggctgtattttcagccaaagacctggaaaacatttgtttttaagaaaaggtagcttaatcatttttctgatgttgtggggtggggcgggggacagaggggaggcatttcaaagcacagacttctcttattctgatgatccartgccctctctgagttctaaagtagctaaacacattcatagtagtttcactgaaagaaaggacagcctggagccaaaactttcatgccaaactttaagctagggcagagtttta

SEQ ID NO: 854071 - DNA, 422 bp, Homo sapiens
gcaaggctctgtgggacttgaggggaaaaagagattaatctccacaggggttattcaagttcatggctctctctagttagtgaagttgttcatgatgctgaaagtccctcctgtgcacagtgccmggcacatgctgtagagcctgctcagcactgttttgacaagtggtacatttacatggtaaaaaaatctaaaactctccaaaaggacatacagtggaaagtccgtctcttaacacattccgtcatccttcctctctggagacacatgcttttcacaatttcctgtgtctgactgattgttaaagatttgttttctggaagatcctttttcaattttattgaattcaccccaatgtaataaacattctgcatatgtgccaggtgctgtgttaggtcgtgggaataccacgaataggatcc

SEQ ID NO: 854072 - DNA, 618 bp, Homo sapiens
atggcactgctgaccctgggatcttctctgtgtgggcagtaccaccctgggcactgatcgccattgctgtggttgctgggctcctgcttctcacctgctgcttctgcatctgcaagaaatgctgctgcaagaagaagaagaacaagaaggagaagggcaaaggcatgaagaatgccatgaacatgaaggacatgaaagggggtcaggtagggcacattggttgtgagggggactggaaggggctcagcccaggctttcctgatgctgaaaggggaagcaaaggctcctgggcttccacagccaaacctgctcccctccttaaaacttggctctctcagttacatctctagtataacaccgtctacctggaggcccctgggaggggggggccttattcctgtgttagcatgaactcatccctggaaagacagtgaaggagaacaatatattgactccccaatgaggctactgggacaaaatgttggaaagagacasccccacaccagcaagacaccatcagttaaccctgtgttttccagccagagagactgaaggacaatatctcatgggaggcatctaactgggcatggggcgggaatcaaatgaggcggaagagtg

SEQ ID NO: 854073 - DNA, 445 bp, Homo sapiens
agcatagcattaaccaagtccagggtccttctgagcatgagctctgtgtgaagccagccctgctgagaggacgcagagcccaaatctaggtgtcattccagctcctggagaccgagagtgaaagaaagtgcctcactgggcactacttctggactccagaatctactcagtgatcaacgaggatgatcaggtggctcacgcctgcggtcccagcactttgggaggccaaggcagatgcatcgcttgaggtcaggagttcaataccagcctggtcaacatggtgaaaccctgtctctactaaaaattaaaaaattagcaagacatggtggtgcacgcctgtaattccagytactcatgaggctgaggcaggagaatcacttgaacccagaaggcagaggttgcagtgagccgagactgtgccactgcactccagcctgggcgacaa

SEQ ID NO: 854074 - DNA, 602 bp, Homo sapiens
cccttaattcctatatgccatttgatctgtctgtggctgctgttccttctaatcttcaaatttatattctgcctccttgaatttcagctgcccttttccaacttgtcayggagaagttgtgtagttatcttgttattcatgccctgtacgtatccaatgtgggagtgctgttttgatttttaagaaacctgtgggagtgctgttttgatttttaagaaaccacctttttcagagaagataaactgactgatttcttccttccctctttccttccttcctgtatttatggatcattagttatgtgagtggtgctgtttcatgggacaaggaatatacaaagcaaacataaaacgtgatctctgcccacaggagcttatagtcttgttgtgaagacaagacaccctaatataaacagcatgaccatgtatcccgatctgcccgggaagttcaagtataaagcgcctgttttcccaatgagataattaacagcaccatactgaccctcaggagtgtcccagtgtgcgcagtaaatgacatgctcatcctccatagaagtcatcaatagcaaggcggagagttaagatgccctgctaagcagtcta

SEQ ID NO: 854075 - DNA, 614 bp, Homo sapiens
ggatcctcccaccctggcctcctgaaatgctgggattaaaggcatgagccactgagcctrgcagttttttcatttccacattattgtcttagtactctgaaactggtaaaaatgattactcttttcactgtattaccactgtcattggtctagtgcaaacactgtacattgctatttgtagtggctggaatattattaatatacctggtatgtttgcaagtctcttcgcttcccagtggcagcagaacatagtggagaagcatgctagcgcctccatccagctgtgtgacctcaaagaggtggtccaacctctctgatcttcctaatacctacaaaattgtactgatcattatagaatcagcttggtaagtttgttggtgagtgtaaaacaagtgtctggagcatagtggatgctcaataaacatttgacatagtattggcagctgggtgtttggttcccaatcaagaatatgacttgggggtattggattagatacctttcaaatctcaatttctatgattctctgggatacaatgaaatgataaaatgtactttcattttggttttgctaaaaccacttgcacagtggacagctgcatgaaggatgcttctg

SEQ ID NO: 854076 - DNA, 677 bp, Homo sapiens
gatcttaaaacattaagaataacacaaaaaacatgaagataaaatatggaaaacaaaatatgtaattataaaagaatagacacatatgtatgttcaacatttgccaaatgaatgaatgatattggaaagtcaaccaaaaaagtctgaaagtttttatcatggagtaattcactcacttactctatttatttattcaataaatattcattggatatttattatataatttaaagattgatgaaatgtttcgttttgtgaaggcacttagagtttaacacagcaggatcaataaaaatgaaatataatttggattcaaagcaatacataagtggcatttctgagatgaggaaaataaaacatttatttctgttcaataaatattattatttatgttcaataaataaaacgtttattggttatataaccagtatgttcagagatctcacatataaagcccgtaggatgtcctatattcaaaggccttggggtaaaaagatgagtatgccaaagtctccatccgtagggaattagtttttactagacagagataagtaaacagttaaaatataatatgatacttattgtagtaagtaaaagcataactaaattgctgtgtatggaagcrtaataaacgatcatccattactgcacagaggaggaattgttttacctatatt

SEQ ID NO: 854077 - DNA, 615 bp, Homo sapiens
aaacagaatataattagtaattgtcataattatagcatacttataaacacactatgttgmatactttttcatttaatcacactatgttgaatactttttcatttaatcttcactatagtttatgaagtagatactattatttcccatttacagatgggagaattgtgacacaaagaaataatgtacccgagtcacctgatgttaagtggtggacataggatcctggcagtcaaatacgctgtccataaaagctgggccattaacaacaaggctatgatggaaactgtgcaaggaatgtgtgtggaaagacaaatgacaggaaaaaataggaccacaatattaaccatgattgactctgggtgtattcataggatcaaagtttaaattgatcttcttcttatatcttctgcatattttataatctcatgacaattaatatgcattctttttctgaccacaagaagaaatcaaagagccaatcagaacataaaataaaaatgaataaaatcataattttctatagctccttatgacttttgaagcactttcatatttcttgtatctaattgaatccttataattagaatggccctataatttattacacaaatcatg

SEQ ID NO: 854078 - DNA, 545 bp, Homo sapiens
acacaaagtatttctgctgcacaccaaagtataatagttttcagaagaaaatgcacttgtgcaattgtttgagtggcaagttaaattaaccattttcttcacagagtaccatttttactttaaagaacaactaactgacaaactatagttgtaaggacttgggtatttggaagacattttctctcaatggaacaagctaacacagtcaattcgaagaaaacaactgacagtatttgttgccaatgataaaattttagcttcaagcaaaaaaaaaaatcagcttaggctaaggcaagaggatcgcttgagcccaggagtttgagtacagcctgggcaacacagcaagaccctgtctcttgaaaaataaaaaataaaaaaaaactagcttaacagcctcacactacttaaaagacttttctgggattgttttgttttgttttgtttttgtttgttttactttcagttttgggatacatgtgcagaatgtgcaggcttgttacataggtakacatgtgccatggtggtttgctgcacctatcaacccg

SEQ ID NO: 854079 - DNA, 589 bp, Homo sapiens
cttaaaaatggttgaaatttttttctaaaaatgtatgaagacctacgtttgtctttaaattacattattctgattttgaatggtgcaggtatgggagtagatttrttatttctcactgcataaaagagttttccgcttacttaaaataaaattcaatctttgggaaaaatagtcaatactttaagaattttttaaaaaattgtttttgctctttacatgtgacagcgtagagttgaagggtttgagtacaatgatcatctaataaaggctaattttttaccacattccgtgcctaataattttcagttttactttaattgtatttttacagttatgagaattttctcccactccccacatattttattgtaaagacatttagttaactaaaaataagtataataaatctaagtacatcaaaaactaaattgagtaaatagtaactataaataaatgggaagtaataaattatataaaaatattcatacataatttaaatatataattacagatgacaaatgtgttataacaagtacctatgacatgttaggaatttatctgttatgaataataaataattatgttttgc

SEQ ID NO: 854080 - DNA, 468 bp, Homo sapiens
gcattgaatctaaaaagagtttattttatttgacactgatacggttattagtcttctttaaaaattaagccattcagtctagtggctggggtgcaatccaaaatgtatgaagcaagagaggagcagctaatgtagagaactcttttaagaaacgtgtgggcagcataatagaaatgacgatgaaatgcagagaggattgtttgtttttaagctatagggatttatactacagggcaaaggaataatgaatgaaacaaggtacccaagcaaaaaaagcaacaagacccacagtacaaaggataagaattttctagtcacttggagagaaacattctttgttttcttattatgatagaaagaagaaattatyacaggatttctagaggtgtgctgatataaatatgagtgagttccggtttgaaggtttctatttctgtttaaaagatggcaaagaaaaagcccttctca

SEQ ID NO: 854081 - DNA, 655 bp, Homo sapiens; identical to SEQ ID NO: 830310

SEQ ID NO: 854082 - DNA, 607 bp, Homo sapiens
  misc_feature 519, 522, 529: n = A,T,C or G
atcaacaacaaaaatatataaataaatatatatatatgttctgttccttattccacaaatactagatttaatatccttgtaccttatagctttctcctgtaatgttgatcttattttcaataaattcagcawttttcagacatatcaaataatacatcattaaaatgtgcatttgaggtttgttcattagtggagtgtcagttatgcatgaagtctgatgatcccaaataatatgtatatattctatcagtatgtgtatattctatagtatgtgtataaatagtatatatgttatatagtataatatataactaaatattatatattatatacaatatatataatatatagtctatatatagtatataatataatatatatatattatggtaagttctcaatgtcattgatatgttcttggaaactgtgactttaagtgaaatgacatacagcaggtccttgaatgatgtttcattcaatgtagttttgttacaccattgctgagaaagaaattggctncgntacatgncattttgctcaaagtcagtttccaagaacctatcaatgacattaagtgatgacttactgtataatatatactgtatat

SEQ ID NO: 854083 - DNA, 468 bp, Homo sapiens
gaatagctttatatgaccactaaccctcatggtagtgaaatccaggggccctatatccctaaagatagagaaaattctggttccctcccttaggttcaatcccattgctctgtatttaaccaagagaaattagcagctgattataaatgccaaacaccatggacaggagagtagggaggaggtataattctcagaagaaaatatgttttcagcttggaagaaaaatagtagaaaaggattccttgaggagaggatttggctagcatgaagaagttgagctatgtgaataacaatgtcttaaaatctactatgaatagagggataaggaggagcacaccacagcgtcacaaaagaggggaagtgcccgggaatataactcttccagcatcactccttgagatgacaataagagatgcagggaactccaccaagcttcrttcaaagcctttgaaattcctcaggtcatga

SEQ ID NO: 854084 - DNA, 621 bp, Homo sapiens
ttttgtgtgtcttttttatttttaatttttttcactacatagtaggtatatatattcatgggtcgcataagatatttaatacaggcatgcaatgtgtaaaatcatatgagggtaaatggggtatctatccactcaagcatttaccctttctgttacgtacaatctaattatattcttttatattaaaatgtacaaattattttttagtatagtcagcctattgtgctagtaaacactaggtcttatttactctttctaactatttttatacctattagccatccccaggtcccctccacgcacccactacccttcccagcctctggtaaccatccttctactctctatctccatgagttcaattattttaatttttagctctcacaagtaagtgagaacatgggatatttgtctttccgtggctggcttatttcacttaacataatgacctccagttccatccatgttgttgcaaatgacaggatctcttttttttttaatggcggagtagtactccattgtgtatatgtaccacatttactttatccattcatctgttgacggacactacttcgtttgcttccaaatcttggctrttgtgattagtgctgcaatacacat

SEQ ID NO: 854085 - DNA, 614 bp, Homo sapiens
gtgctgttattttcatacaaattacagctatgtacattgttatgtccatcagcatgcatttatagttatttatgtaagcaaatgcctttttaaaatcagacttttataaaagagttacaaacacaaagtgtatttatactgtctattttatttactgatgtaggtaccttttctggcaatctatttttcttgtagattttacttactctttttttttttttttttttttttgagacggagtctcgctgtcgcccaggctggagtgcagtggcgcaatctcggctcactgcaggctccgccccctgggggttcacgccattctcctgcctcagcctcccgagtagctgggactacaggcgcccgccacctcgcccggctaattttttgtatttttagtagagatggggtttcaccgtgttagccaggatggtctcgaactcctgacctcgtgatccacccgcctcggcctcccaaagtgctgggattacaggcgtgagccaccgcgcccggccagattttatttactctttagcgtccttttattwcaaccttaaggaatcctttagtatttcttatggagtatacctggtagaaatgaattcttagagtttttt

SEQ ID NO: 854086 - DNA, 478 bp, Homo sapiens
tagggccccacagccagtaagtgctgggatcatatttgaatccaggcttcaagttccaaagtttgtatcttgttacttaattcctacattataagtccccactacacagatcagtggttcttctctcacatrccttacagacagctgggaagacagacaagtgggtcagacgttagcaaagagtaactctggaacacagagaaggtcatctatgtcgggggctgggggcggggaggaggataggccatggcttcccaggaaaagggtcactcaaattgagatctgaagggtaaatgggggtttggtcgatccagacaggagcatcatctggacagaggtacagcaagtacaaaaaccctggggagtgggatgcagcccaaaacattcaaggaactgtgtttctttgagtaaaaatcttagtcgttctgttttcaaatcattattattttttttatagctcacagtggctgtgtggctt

SEQ ID NO: 854087 - DNA, 532 bp, Homo sapiens
  misc_feature 151, 180: n = A,T,C or G
atattgtttatctatctatctatctatctatctatctatctatctatctatctatctatctatctatctatctaatctatgtatctatgtatctatgtatctatgtatstatgtatctatctatctatctatctatctatctatctatctntaaaatgcttagacacactgcactaaggntctgctaggcaaattcttcacttgataactgtcatcaataaatgtgctatcatcaagtgattgtgtaccagttcacttagtcaaccgtaatcacacgcacaaatggcttaactgtgtcaatgagccctaaaaaatcatacaagacaagctagtgaaacagaacggagacttgaggagaccaagtctaaagacagagaacactgatgaaatggaagacgaattgggaatgagatatgtaaaaataccctgggactaattatatagaaatgctgaggatatatcattcatgaacctgtaaaagcatacaagaaatatttttctaacaaagaacacctcagtgcatgatagttaa

SEQ ID NO: 854088 - DNA, 462 bp, Homo sapiens
taaattagtgccgggtactgaacaaggggagaggaagaaaacaccagagaggaaaaatatcctccctagaaagtcatratttttctccggagggtgggaggaatagggtgtttggaaggtgatgtctcaaaagagcctgtgcgtcaccccggcctgtgctgggcggctcttgctgctgctccccagggacggcttcaacgcaggcaggacattccggaaaagcaagagagactttgcttcctctcacccactccagggccaccccttgcaggggtgtgccctgtgtgtgtataggtgtgtgtctgagaaagggagagactgtgggtgtatgtgcccgtctgtgtgtgtgcatgtgcacacgtgtgtatgagcatgtgaagtgtgtccctgtttgcatgtgtatacacacatgttagtgtgcctctgcccacatatgtgaacgtgtatacctgcccatgtgtg

SEQ ID NO: 854089 - DNA, 597 bp, Homo sapiens
ttctccccatggcatcagccagcatagctcgacggggagcggaggatccagttccaggtggcacgccctcctggctggcgtgttgatagtggctgctggctggaagcttagccagggctgggctggggccagggacttccgttcctctctatgtggacctcaaatggcaactttgacttcctcatggcatggtgtctgggttgcaaaagccggcatttcaggagatccaggcagaagctttatttctgatttagcaaaagaagccacatagggtcagttctgccatagccataagctcacccagactcaagacagatggacccacctctgggagagtatgaaagtctcccaccgtgactgtgagaaggtaggcaggaggggagacagagtcgcagctatttttggataacatggtctgcctacaaaaggcaattcctgaaaccagccttcctccctttccttccctccttctcctattcctctyctatttttccttttccttatctttcttccccttcttgtctcctttccttccttctgtcttttcttcctttctgattttatagaggacctgctatgtcctggggatgcaaagat

SEQ ID NO: 854090 - DNA, 658 bp, Homo sapiens
ataaaatgtgagagagaaatgacttaaatatggaatggtgaagtgaaaaggtgggaggactcaagcaattctcccacctcggcctcccaaagtgctgggattacaggcatgagccaccatgcccaaccatttttctcctttattcagttaacaaagctacatgaggggactcttcaaccagtgggtgacagggatttctgagaacatgcttattcctacatgcataggagctgggggaaacttcaaccaggggtggtattatgagcaaagacccctcattcagctgccttccactcagtgctccagggagaagacttcggcctcttcatcagctcggaggtgatgtgggcgcttaacttctgagccagtgtcacgcttttatagagaactccacgtagaagaggaggcaaagcctgttgacatatttatagtacattccagtcgaatgtgaactgagagcccatgcatgtctccacttggtgggctttctgagtgggagtacctcgtgcctattctaccatcgtcacttccttggtggcagcattgtcagtgccagtatgcctctgggcctgagtcactgttgctcttcacccactcgctgaggctgcctggttccyggtctagctttgactccagcaggatcctagaaagaatttct

SEQ ID NO: 854091 - DNA, 601 bp, Homo sapiens
atgcttatccaaagattactattgtatcttcaaatgaatttaatattgtgagatggaactgccggggattaaaaagactacccaaaagatttttggcacttacaatttttaaaatagtttatgtcatctcttcattatttagggctggatggtcaactcagtcagtgattttttgatgcttctcttatcctccagaatagagacctaaggacacgtggaagtcagtttaattgccagagagaaggatgcaatcactaggtaaaatgaggtttttaggattatttattgattccaggttcccatgctttttgttagagcttattagtacaggttctcaagagatgaccacataaaagtgctctgtttataaataagcaggtttctgtagtactgactggttcatcacaaggcaagtcagaaaccagtatccttctagctctccagtcaggacttccttatgcctctarttttatgaccggttaaggagaagccagagttagagtaggagaggactaattctcagcagcagtggaggtgagttctttcttttgcggaagctttacatatgttttgtgtagtaggaataactagatattttagc

SEQ ID NO: 854092 - DNA, 545 bp, Homo sapiens
agtttaagaacatgatcttttgtragaaacccataaagaaggtggcagggacagaaggtaaacaagctaagctgaaggcagctgttcctaaacacctgccacgtaacttccacttcccatgtatgagctgaggagtgagagggaaggcgtatgaatttcttgaacatgtactcctccttcaacatctctgaaacctctcgtggggttccatattttatttcactcaaccggttaagagatggctgcgagaaacatgccacactcctgcagagaggtcacaggttgagtagaagtcactctctgtgataaagggctgcaagcccgcagattttgtctctgctcttacaccaactctgtcagagaagaaacctgtctggtgagcaattccagtctcaaacaaaaagcgttcaatcactcctaggtaaaatctcgggtagaaatgtcttgggttggcccagtgcagtggctcacgccagccctgtgggggcctggggtgagcagatcacttgaggtcaggagttcaagaccagcctggccaacatggt

SEQ ID NO: 854093 - DNA, 511 bp, Homo sapiens
ataaacccaacccctcttaagtcgatggacaatggttgcagaagcactgggagataaaaaccaagatacgcacatttatagtaacaataacaaacatcckaaatatctacccatagggaaacagctaaataaactaaaatatatccactttattacatgccatgtgacagcaaaaaaactgtgtatatctacaaatactgacatggaaagattctgcaaagtattgttaagtaaaaaaaaaaatagaatgatacgtaaagcatgacaccattaaattaaaaaaacatacacagagtactatgagttttctacatatatatattcactcacgtatacacacatacacatatatgaaaatgcctaacaaaggaatctgggacgacacacaccaactaatatcagtggttatctctggggaaaaaatagcaatttagagtatggtcaaatgggaatgtattatctacgagatttgttttataagaactaatttaagttttttttaaaagaacaa

SEQ ID NO: 854094 - DNA, 569 bp, Homo sapiens
gaggcagcagaatcgcttgaacctgggaggcagaggttgcagggagtcgagatcgcaccactgcaccccagcgtgggtgactgagcaagactgccaccrcaaaaagaaaaaaaaacaaaaaccttcctaatggctttcttatccacaaagccctgcagaaccagcctctgtgggttttctgactttatctcctaccatctcccctttgcccacttttcttcaaccgcaatgctcctcaggcactctcccacttaagggcctctgctctagctattccctttcccttgattgttctttccccaaggaccatatggcttgcttcctctgttccttcagatctttgcccaaatgtcaccttctcagtgaagacttctctgaacaccttaaccaacatttcaatacttgccttctcctgcccagatacttcctatcctccatcccagcattttttcccctctccttagctcaaatcatcatctaacttttatttttctttaaatttatcttgcttattgtctctcctctaacaaaatgtcacctccattgggcaggggtttttactttcatgg

SEQ ID NO: 854095 - DNA, 569 bp, Homo sapiens
gaggcagcagaatcgcttgaacctgggaggcagaggttgcagggagtcgagatcgcaccactgcaccccagcgtgggtgactgagcaagactgccaccgcaaaaagaaaaaaaaacaaaaaccttcctaatggctttcttatccacaaagccctgcagaaccagcctctgtgggttttctgactttatctcctaccatctcccctttgcccacttttcttcaaccgcaatgctcctcaggcactctcccacttaagggcctctgctctagctattccctttcccttgattgttctttccccaaggaccatatggcttgcttcctctgttccttcagatctttgcccaaatgtcaccttctcagtgaagacttctctgaacaccttaaccaacatttcaatacttgccttctcctgcccagatacttcctatcctccatcccagcattttttcccctctccttagctcaaatcatcatctaacttttatttttctttaaatttatcttgcttattgtctctcctctaacaaaatgtmacctccattgggcaggggtttttactttcatgg

SEQ ID NO: 854096 - DNA, 623 bp, Homo sapiens
gctccctgactcttcagggacagaaactcctgcacttgggactcttctrgacctcaccctgtatacttcttcatctggctcctcattagtatcctttaaaataaacagacaaacgtaagtaaaatgccttcctggatcctgtgagccattctagcaaactattagaactgaggaggggatagcaggaacccccaatttatagccagtttatcagcagtatagctgggtggccagagacttgtgactggtctgaagtaggggcagtcttgaagaactgagtccttaacctgtggggtctacactaacccctaatagctagggtcagaattgaactggattgctggccacccagttggtgtgaagaatttggctgatgtcagaaaatatcccagaggctgtaattagtgagcatgttcagtcctctaacttgaaagcagggaaattattatgtttaacaactcagctatcttataagtgaactttctcagaagcctttagtgttttaacccacagagagactaatggtggaagactgaaacactgacaagccttggttcagggcaggggagaaagttcttaaccctctagaaatctcatcacctcagcagaacccaccatgcttc

SEQ ID NO: 854097 - DNA, 613 bp, Homo sapiens
taatgcaaggccaggcatggtggctcacaccagtaatcccagcattttgagaggccaaagcagcagggtctcttgaggccaggagtttgagaccagcttggacaacatagtgagacccccgtctctacaaaaaatacaaaaattagctgggcatgttggcacacacttgtagccctagctacatgggaggctgaggcaagagaatcacttgagtccaggagttggaggctgcagtaagctatgactgtgctgccacactccaacctgggcaacagactaagaccctgtctctaaaacaaaaagtcaatgccgcggcacggtggctcatgcctgtaatcccagaactttgggaggccgaggtgggcggatcacttgaggccaggagttcaagaccagcctggccaacatggtaaaaccctgtctctactaaaaatacaaaaattacctgggcgtggtggcacacgcctgtaatcccagctacttgggaggttgaggcgggagaatcgcttgaaygcgggaggcggagtttgcagtgagccaagatcgcaccattgcactccagcctcggcaacacagacagcctccatctcacacacacacaaaaatacaaaaa

SEQ ID NO: 854098 - DNA, 532 bp, Homo sapiens
aaaaactggaaagtgagagcattaggagatatacctaatgttaaatggcgagtaaacggctgcagcacaccaacctggcacatgtatacatatgtaactgacckgcacgttgtgcacatgtaccctaaaacttaaagtataataaaaaaacatgagcaaaagacatgaatagacatttttccagtgttgcaattaagtgctaacagtttttttaaaaggtgcttaacatcattaattgtcagaaaaatgcaaaatgaaactactatgagataccacctcacaccaactagaatggctattaaaaatcaaacgataacaaacgttgccaaaggtgtggggaaaagggaactcataccctttgttgggaatgtacacacagtcattataaaaaacagcatggtggtttccacagaaattaaaaatagaactaccatgtgacccagaaattcctcttctgaacatgtaccaaaagaaaatgaaatcaccgcctcatcaagatacctgcactcccatgttctttgcaacattattt

SEQ ID NO: 854099 - DNA, 571 bp, Homo sapiens
acatactggggattgctctttccccaggtcccttgtttacaggaaagcagtaraagcaagcttgactctgctgcaggccaaaactatgtggtcacttaatatgacagtgttattccattagaaaggcaccttgatgaagattagccaattaaaatgcctcatttgaaaatttggctttggaatttacttgaatgaagaaaataagtcagcacctgtagatgagggctattttctttttttttttcttttgttgtgacagagtctcactctgttgcccaggctggagagcagtagcggaatctcggttcactgcaagctctgcctcccaggttcaagtgattctcctgcctcagcctcccaagcagctgggactacaggtgcgccaccacactcggctaattttttgtatttttaatagaggcagggtttcaccgtgttagccaggatggtctcgatctcctgccggcatgatccacgatgagggccattttcaaatgtagtctggaaagtataaaagctagctttcccaaagagagtagagctgaaatgtagagatatttcaaggaacact

SEQ ID NO: 854100 - DNA, 472 bp, Homo sapiens
gaaaaccaaagacatagaagagaactaagttcagagctgctttgtagagctcagtgctagaggtggagagagctggccatgcctgctgggaggggcggggcagcccaggaagtgggagtggggtcggcctggtgggggtcgggaggtggggccctgaagctgctgctgggctacttttcgcccaagggtgaagatggaacagccctgggttgtctatacaggtcgaggcctccacctcatcccaccccacttactctcccgaggagggcatggataccatgccagggggcctgaagagggttgcagagccctggaggaggccagggccaggggctgccacgggaagtggaaggcagygggccccactcctcccagagaggcttctgggaagcctgcacagagcctgggagtccagggctgcccctcctgctggagaatacactgttcagaactaaaggaacagcgggatccc

SEQ ID NO: 854101 - DNA, 600 bp, Homo sapiens
gtttatggaaagaggccatctccataacataaaagtgcagagtgaagcagcaagtgctgatrtagaagctgcagcaagctatccagaaaataattgaaaataattatcctgggataattgatgatggtggctacactaaacaacagattttcaatgtagatgaaatagccttctataagaagaagatgccgtccaagactttcatggctacggaggagaagtcaatgcctggcttcaaagcttcaaaggacaggctgactctcttgttagagtctaatgcatctggtgatgttaagttgaagccaacactcatttatcattctgaaaatcctaggggccttaagaatgatgctagatctactctgcctgtgtttatcagtggaacaacaaagcctggatagcacatctgtttatagcatggtttgctgaatgttttaagcccacttttgagacataccgctcagatgaaaagatttctttcttttttttctttttttgagactgagtttcactcttgttgcccaggctggagtgcaatggcaccatcctggctcactacaacctccgcctcccgggttcaaatgattctccttactcagt

SEQ ID NO: 854102 - DNA, 588 bp, Homo sapiens
atgtggggaaaataatggagttttaaaaaactgccatttcctcaccaccatagtataactgaatcaaagcaggatcatcaatgagtcaatgagtgctaaacctgggtgatcatttgacaaggaataagatatatgcatagtctcaaagtttcttctcacaaattaagtattaattccaaaggaaatacagaaattttacagtggcaaaacctggccaacaaaaccttaaccaagtaatcaaagtaaacatcaccaacaaaggaacaaagtgacatcaactgcctcctgatgtgatgcacttcttatggtacataaaacatttccgtggattcctgcctaaaatgcaatatttgaatgtaattgaagaaacatcaaataaatccaaagcaactaccctgtactcttaaaaatgttgagggtatgaaaaaaaaaagagtaactgttatagatcaaaggagattgaacagcyataataactacatgtaacacatgatcctagattgggcctggacaagaaaaaataattcagctgggcatggtggtgcacgcctataaatccagcactttgggaggctgaggcaggaggat

SEQ ID NO: 854103 - DNA, 605 bp, Homo sapiens
aaaacaaaaaaaaagaagaaagtttggccattcacggggaaaaaataaactagtagaagcctccctgagaaagcctaggcattggatatattagaaaaagacctaattagccaggcatggtggctcgtacctgtagtcccagctacttaggaggctgaggcaggagaatcacttcagcccaggaggcagagttgcaataagtcaagatggcgccactgcattccagcctgggtgactgaaggagggcctgtctcaaaaaaaaaaaaaaaaaaaaaaagactttaagtgaactatcttaaatatgctaaaagtctaaaagaacccatagggaaaagaactcatgaaaatcagggaacaatgtctcatcaaatagtaaatattaataaagtgattaaaaattatttttaaaaagaaccaaatagaaattttggagataaaaagtataatagaaaggcaatttcattagaggtgttcaccaacagatttggtcagacagaagaaagtatcagtattatmtgaagacaggcaaattaagattatttcatctgaggaataaaaacaaaaaaagtgaaaaagatagatatgcagagcctacgagaccagta

SEQ ID NO: 854104 - DNA, 610 bp, Homo sapiens
cctgtgatctcacttcttttattaagaagagttgttaatttttcaggttgtttagcttttcaccctttcttaggatgaagtggcaacttccaagcttcttacatcacaacagaaataaaaagaggatctataatttttatgattccctacttctttctccatctacaatatacaaatggtaaattacctgtttggcagtagcctcctaatcttcatggtgacacatctcaacattatttttgtgtacttgcttttcagagccttctctcatatatttagctaacttctgctaatatcatatattaagaaaattgactgttttttcccaggtttccaggtaggaaatgcataaaatcttctaagtgataggagtgtctttgttatttatggtgctattttccactgcacctacatttatgcttatgagatccctcaggatgaagcctggtcttaccagaaagaccatgtgtgagccaggtggtatcacctcaaatttctccagagagaagagcggagctggagattgaattcggtcacatgcccaatgtttcaattakgtcaatatttgtccaataaaacctccagagacatagctgaggtgtgcctcctg

SEQ ID NO: 854105 - DNA, 622 bp, Homo sapiens
atattttataggcctaacccctaatgtgactatatttgaagatagagttattttggaagtaattaagattaaataaggtttcaaggacacagtcatgatttcacaggatttttgtccttttaggaggaggaaaaaagacgagagctctttctacaaacacacatacacacacacacacacacacacacacacacaatgaggaaatgacatatgaggacatagcaagaaggcagccgtctgcaacccagaaagagagccttcaccagaacaccagacacaccaagtgtgctgtcaccctgttattggagtaccagcttcaagaactgtgagaaaatatttttttgctatttaagccacccagtctatggaattttattatgatggcctaagcagtcatagttataagacacagttataatcatagttttaattaatatccttgttatcatctacccaatttctgggtaagttttgattgaattattattcctttccccatcattayaggttgcatttttccacttattttcatgcctagttagtttttgattgactactagacatcgtgaattttaccaccagaatgctggatatttttaggttttttacatttgttctgaga

SEQ ID NO: 854106 - DNA, 583 bp, Homo sapiens
ctatgtttatcccttccaaccttaccactgctgaatagcgctagattaaaagccaaacctatgggaaattgcttgtatggtagtagtttctccttctcctagtaagtttcttctcctagcattctcactcttcctcatagtctttctacttctgtattgttgagtatttaccgggtaacagttcatagctttgttgagattttttttttttttttttttttggctaagctgctcagagaacattacgtgtttgtatatttgaaacataaatcagaggtgttactaggtaggactaaaaaactttggctttttatttaagcaatctgccaatttcttcaacattcataggcacctgacttcacttttttttggcttcctggaccagaaagattaaatgttttgctacatacttatccctcttgagtgagtataaactacccaccagagtttgtctccttcaggtcactcttcttatatttaggtggttgctttttatattatatctaggttttagattttttttcccccttcaggcagaggatktgcagaagaattatatactgtcaaactaagactgacacca

SEQ ID NO: 854107 - DNA, 590 bp, Homo sapiens
ttcatcgtatttttctccctttatttcagtcttatcactgccattatctcatttaggtggctcatkttctgtgattaaaataatttctgtcaaatgcataattttatcagtagacaaaattattgttagtagtgctaattcaagcagtgatctgactacacagaatttaaaaaaaacacacctgtatgaacatactttggtaatattaaacacatgtaactactctggtggaaaaaccaaaaaatattattaaattggtaggttatgtccatctgacaattattttccattcaaaagctagaaactccatgagctgaccacttttcagaattaaaaaatgtgtatttagtaaaaaccaattttaaacagttttatttacactttctcaaataccaatttgatgatattgcagcttataaatcatgatactatgttctctgttttaagttccacatttaagagatggagatctgctctgacagtgtagcttatgccaaaccaatcattatcccaagaactagaaatgctgaatattaattaaacatttttaaaaagttttttaaatgcagtagaaagtgactaggatagcc

SEQ ID NO: 854108 - DNA, 598 bp, Homo sapiens
tacagtgatagcactatagtattgtactcatgagactaacgtggaaataagactatttttgacaaaagatacaattaaatttcagactgtagagccacatttaccatacctcagctaattagtgttaattttggggttgaacttttttttttttttgacaacagcaagaatggactatttgattgtcattagaggaaggtctagatttcctgctcttaataaaattacattgaattcatttttagaggtgatgaaaacttcctttttgagaagttagtgttaaggtcttgaaatgtgaacacattgtttgtagtgctatccattcctctcctgagattttaacttactactggaaacccttaaccaattataatagctttttcctctttattttcaaaatgatttcctttgctttgattagatactctttgctccttttttgttgtttgtaaccatagttcatctaaatgcagctttttytgaactttaaagatagaatcccatttttaatgaagttgcaaaatcatctttttcattgttttaggaaatagctattgctaaagtgaaggtgtagatcatacctagtcttgctctataa

SEQ ID NO: 854109 - DNA, 517 bp, Homo sapiens
ggtgaagttccactaaattttcttagttttaatatgtgttctacagtcatttgagatgttaacaagaggagaggctggatgagggcaatgcaacaattctatattgtgtttgcaacagtgtataattttaaaacatctcaaaaataaacattaaagaaaagcttaacttgctattggttgctagcaccttgtattgaaagaagaggatggattctacagggcataagggaactttgactatgttatgtatatatcttgaagatgagggtgtttacatgactgtattcatttttaaaagctcattatactatacatttaattagattggatttttgtatgttataatataacattcaaaatgtagagatttaccttagagatattcctgctttggttctggaccatcataatgaaacaaatattgcaataaagcaagtcmtacaaattttttggtttcccagtgcatatgaaaattaaatttatactctactgtagtctattaactgtgcaatagcag

SEQ ID NO: 854110 - DNA, 612 bp, Homo sapiens
ttatatttcttatttttatgtaaccttaatatcttcaatctattttatttgtycctactttatagacattgctaatgtacagatgaatcttttttctaattaaaaagaagtttgatatttatcagttaatgctattttgactcaattttaaatattttactagatatatgtatgaacaaaatgcacacagtttatattgaccttgtatcttttaaccaaaatgattttcaaactaggtgagatcccctcataacttttatttctattttagttaacaaaaacgttacttgacaaactaagtaaatgttttctctctaacattttaaaatgcctactctcctaaatatctgtttttttttttttcaattttcataacattatgagagtggaaaacaagaagtagaagagaagaaagagctagagaagattttagccttagcatgccatggggaaaagtccatgattcctcatatgttcagaggttgaagtgaaccttcaaacacgggaaattttatgagattattttaggttttgtaattatatatcccatttatttttatcttgttggtttataataggaaacgttatcattatccataactgtttcattag

SEQ ID NO: 854111 - DNA, 531 bp, Homo sapiens
accaccattagtagttttatctggcaggagtttgttttcacagaagctgagttttatttagttttgactcattgagcctgaaatgcttagagacacttcagggaacttagctccctgctgttcaaatggcagggctcagtaaatgagttccttaggtagatgccagcacatgctgctttggattgtaagattacattttaaaatctaccaaaaaattataggaccaggttttaaaatgaaaaggagtattagtgactgccctgagttccttataattgatggagatttatcataaagacatttaggattcttaacccttccatattttcattcttaatgtttcaatattttgttaatatcaccacatctgtatatactatgacatactggtttattcaraattaacaaaaacaatgcaatatcataaaataattaatattttaacagctgatggtaacaaatgtcaccttcttgagaatgtctaaatcaatatgcaagttttagcattgtctacatttaaaaagaaaaaat

SEQ ID NO: 854112 - DNA, 621 bp, Homo sapiens
gtgtatattcagagttctattgacacttctttcacatttagtgagacagagaagtacaatgtcaaactaataaatacattttcttggcagcttatcgtaggaaatgtaatttgcaatgttattccgaaaacttgcaaggatttatctaaataagaattgctttttattgtatttttttcccacaatataacataatcctctcacttaaaaaaaaaagtattattgtacaagaaagtttcaagaacagcatcaaattacccataatgtccccacccagatataatcattgttttcatctgtttttcatctaatatttaattcatttttctatcttttacatactagtgaaataaatatctgaacgttttaaagccttttaaaacttgttttttaattgctttctaaaaaagataaactctctagcaatagagtgtatgtttctctgtacatggttcacagtatgatcaatgaaaatcagaattataatgttttatgtattttccattttgttgcatttaggtagttctatttatttttcttgtatttattttgawacattgcaatttttttatatttaaagtgatcaaatttgattttaatttttaaagttaattatattac

SEQ ID NO: 854113 - DNA, 586 bp, Homo sapiens
gataaatcgctaaccagattgatcagtacaaaggcagaaattataaatatcaggaatgagggaggacacatcattacagatattaataaataaggagcattatgaaaatctttatgccattaaattttacaacttagatgaaatggataaattcttttaagaaattagggaggatcgctcaagaaaaaataacttgaatagccccaaatttattaaagaaatgaaaactatcatttaaaaatctcccacaagcaaactctaagacgagatggcttcgctggtaaattctacctaatacttaaggaagaagtaatacaactgtacataaactgtcagaaatgtatgcatatcaaaacttataaaatggtataacattaaagatatgcaacttattctgtgtcaattatgtctcaataaagctgctttaaaaatatacaattgatcaaagaaagcacaggagggaaagacagactcataggaagctaaagagaagtagagaatgggagttagttaagtaaaaaatgagacaaaaatamggtgaagagacaagcaagagaattatatcaaagaaaaatgacagaaagaa

SEQ ID NO: 854114 - DNA, 626 bp, Homo sapiens
gtcaggaaacttcttagggaaccagtctttccatgggctttttattggctctctgcagtcaacttcaawtccccaagcagattgatcatgtctgaaaatagaccattccagtcaaagccttggtaaaataatgtgtctccaattgtgtcctattacaaaagaaaacattcatattgaacatatgtacataactatattgccataaaataacacaaatagttttcaaatttgggagaactcatatagagagaaggacaaattttgcttacaaaaatacacttaatcattataagttataaagagctcaaaacaaaaaagttttcttgactcttcttcaatcagagtaatgccttccaaacaggatgttgcctgatgaccttggaactgccatccacaagccaagcaactcttaggttagagctgtttgtcaggtactatggtatccagcaactcctcaccagttccaggatcgagtcctaggagagaaagaggctcgcagctcatgagtatatcctctttgcactcctcaggtagcaagatccattcccattttattatgtactcttctgggcactgctatccccgttagagtgtttctctgacatcactccagacagcatgtgtat

SEQ ID NO: 854115 - DNA, 384 bp, Homo sapiens
cttaccctgcacatctcttcatctgtatcctttaaaatatccttcctggctgggcgtggtggctcacacctgtaatcccagcactttgggacrccaaggtgggtggatcacctgaggtcaggagtttgagaccagcctggccaacatgatgaaaccctgtctctacttaaaaaacaaacaaacaaaaaaaggccaggcatggtggcaggtgcctgtaatcccagctatgtgggaggctgagggaggagaatcaattgaacccaggaggcagaggttgcagtgagccgagattacgccattacactccagcctgggcaacaagagggagactctgtatgaaaaaaataataattaaaaaaaaagtaaaaaaattagatatccttc

SEQ ID NO: 854116 - DNA, 586 bp, Homo sapiens
ggtagcagagtaatctagttcagttaacttgagtgacacctgaatcccctctacagaatccctgtcaaaagaccatctggctgacatgtttttatacctcaggtgcctgggaatcaacaccttctgaaacagcatcatttgcgagcatctgttatcattagaaaaatattttggattacataatgcttaagcacagaacctgtcatttttttttttataattttaccagttcatactgtaataggtgttcaataaatgttagagtgatttcactgtacttttctttggctatattgcccttcagatgtttgagtatagttatatttatttatttatttattttttgagatggagtctcgctctgttgcccaggtcggagtgcagtggtgtgatcttggcccactgcaacctctgcctcccaggttcaagcgattctcctgccttagcctcccaagcagctgggactacaggtgcgtgccaccacgcctgsctaattttttgtatgtttagtagagacaagatttcactgtgttagccaggatggtctctatctcctgacctcatgatctgcccaccttggcctccc

SEQ ID NO: 854117 - DNA, 586 bp, Homo sapiens
ggtagcagagtaatctagttcagttaacttgagtgacacctgaatcccctctacagaatccctgtcaaaagaccatctggctgacatgtttttatacctcaggtgcctgggaatcaacaccttctgaaacagcatcatttgcgagcatctgttatcattagaaaaatattttggattacataatgcttaagcacagaacctgtcatttttttttttataattttaccagttcatactgtaataggtgttcaataaatgttagagtgatttcactgtacttttctttggctatattgcccttcagatgtttgagtatagttatatttatttatttatttattttttgagatggagtctcgctctgttgcccaggtcggagtgcagtggtgtgatcttggcccactgcaacctctgcctcccaggttcaagcgattctcctgccttagcctcccaagcagctgggactacaggtgcgtgccaccacgcctgcctaattttttgtatgtttrgtagagacaagatttcactgtgttagccaggatggtctctatctcctgacctcatgatctgcccaccttggcctccc

SEQ ID NO: 854118 - DNA, 613 bp, Homo sapiens
aacctgggataaccgcatttggattatcccccaaaaaagtggggcctccacttttttaatgctcttcagtccagataattctcaagcttcaccagagagtcttttacattatctggatacccyggaccaattaaattagaatccttcggagggagaccctggcatgtgtattttttaaagctttccagttgactccaatgttcaccacggttaagaaccatcgatcctgaagaatgggtggacctcatgtaatgcttcttgaataccgcttcttttagctgagttttggaaaggtactaagcaataaaagattcttacattatgcttcccagctcatctatattgtcaaataaatagggacccaaatgtcttaatcaacagtgaagctggggtaggttggactttattttataaaaactgaggaatctccctgggtggaggccatcttgacacccaggggagttgagggaagcctggaagcagtgccaaatcttttcttttgatagtgcatttggatctgctctaatgatcagggaaaaaaaatggccaatcaagttctatatttttatttccaaagcacaatcttttagcaaaacaggttaaaccaacagcc

SEQ ID NO: 854119 - DNA, 620 bp, Homo sapiens
cttactgatggctgcgccatcagggcaaaactggaagttccggggctgtcctaaccccagcaggtcctttgctcaagagcctggggagtcactggytactgctgttttcccttcttctggacccaacccgagccccgctccgcgcgagtaaagctctgaagatgtgtgtcagggcgagactcctggcctggcacacggtcctcgccccaccagccccagcccgggccgacctctcacctgctcctccagcgggagcggcttgagaggactccgagccccgtgtcgaaacacgacctgcaccattttcaacttcagcaggctgcggtcgaccggacactggccatcggcctcctgcagctcggccagggccacccgccgctggtgcaggcagtacgccagcgaggtcaggacgcccactggggtccacaagcgcatgctgaacacaccagtgatcatggtggtaggccctcgctgccctccgggttgaggctgcaggaggcaaacacaagtcttctgcgggcgccggggctcagcgggcgcccccaagtccgcgggaacctgcggatgcgtacatccagcccttcagcaagcagggaccgctgtgcctcccggccctgagg

SEQ ID NO: 854120 - DNA, 620 bp, Homo sapiens
cttactgatggctgcgccatcagggcaaaactggaagttccggggctgtcctaaccccagcaggtcctttgctcaagagcctggggagtcactggctactgctgttttcccttcttctggacccaacccgagccccgctccgcgcgagtaaagctctgaagatgtgtgtcagggcgagactcctggcctggcacacggtcctcgccccaccagccccagcccgggccgacctctcacctgctcctccagcgggagcggcttgagaggactccgagccccgtgtcgaaacacgacctgcaccattttcaacttcagcaggctgcggtcgaccggacactggccatcggcctcctgcagctcggccagggccacccgccgctggtgcaggcagtacgccagcgaggtcaggacgcccactggggtccacaagcgcatgctgaacacaccagtgatcatggtggtaggccctcgctgccctccgggttgaggctgcaggaggcaaacacaagtcttctgcgggcgccggggctcagcgggcgcccccaagtccgcgggaacctgcggatgcgtacatccagcccytcagcaagcagggaccgctgtgcctcccggccctgagg

SEQ ID NO: 854121 - DNA, 551 bp, Homo sapiens
gctaggagaattagcactctttatatgatttcactggtaaaggacaattggaagcttgcacctggtctctcccagagtctgcactgtgcatttttttccgttgcagatttctttttttttttttttagrttctcgctctgttgcccaggctggagtgcagtggtgcaatcttggctcactgcaacctccgcctcctgggttcaagcgattctcctgcctcagcctcctgaagagctgggactacaggcacctaccaccaggcccagctaatttttgtatttttagtagagacgggattttaccatattggccaggctggtctcgaactcttgaccttgtgatccacccgccttggccttccaaagtgttgggattgtaggcgtgagccaccgcgcccagcctctgttgcagattttaagttgtatccatttattgtagtaaaatataactttcagaatataagatctctgctgagttctgtgattctatctagtgaatcattgactatgaaatggtcttagatatcccccgtcatagtgcctttaaaggaa

SEQ ID NO: 854122 - DNA, 551 bp, Homo sapiens
gctaggagaattagcactctttatatgatttcactggtaaaggacaattggaagcttgcacctggtctctcccagagtctgcactgtgcatttttttccgttgcagatttctttttttttttttttagattctcgctctgttgcccaggctggagtgcagtggtgcaatcttggctcactgcaacctccgcctcctgggttcaagcgattctcctgcctcagcctcctgaagagctgggactacaggcacctaccaccaggcccagctaatttttgtatttttagtagagacgggattttaccatattggccaggctggtctcgaactcttgaccttgtgatccacccgccttggccttccaaagtgttgggattgtaggcgtgagccaccgcgcccagcctctgttgcagattttaagttgtatccatttattgtagtaaaatataacttkcagaatataagatctctgctgagttctgtgattctatctagtgaatcattgactatgaaatggtcttagatatcccccgtcatagtgcctttaaaggaa

SEQ ID NO: 854123 - DNA, 610 bp, Homo sapiens
taaaaaattaacagagatgaatgtgcataatcaacaagattttattgtacatgtgttttgataagaaagtaggaaggcaaaggataataactgcaatggtttgtgtctcctccaaaattcagttgtttccaacgtggtagtattaatagtggaagcctttaaaagatgatttgactgtgagtgctcttccttcgtgaatgggatgaaagcccttagataagaagcttcatgtagcatttggtcctcttctctttccaacttctagcatgtgaatacacagcaagaaaaccctcaccagatgctgacactttatggacttctcagcaccagagcagcaataaagaaatttcttttccttataaattacctagtctcaggtattttattacagcagcacaagcagattaagataatgactaagtcatctgcatttaaatgatttctccattcactgagataaggaaaataagaggaatagtgttggagtaaatatgtggcaagttctatttgaacayctgagatgtgggtactcaagggacattgcaatgaagatttcctataggtaggtcacttaagtttaaagaatgagcagaagaagggaaaccattaa

SEQ ID NO: 854124 - DNA, 630 bp, Homo sapiens
gcccatgaaatcttcacaatttatgttcctctgccgcggctccagctggttcctccgttcagggtccctgacttcccacaacagtttggatttatttacattgaacakttaaattcttaaaatgtcacaagagctgaataagatcaatccatttattatatcttataatgaggcataatttagcctatgtatgattagattatgagttaattcctgggataaacacactgagcatgagcttaagatctccctgattggtctaactgcatttctttcatttttcacattttcaaatatttgttaaaatacattgtatcatattattgaattattttttatcaagctatttcagagaataaaataaaatggaagttattttttcctatattagtgtagtttttatatataaaatataacagaaatacatttataaacatttaatggttcacatcacttaaaatgaggttttattagaggaaatttcattttaagactgttatggcaaaaagcacctacagaaaaatatgagaattataataggtcataaaatatcttaagcatgaggtttagtaaaacatgttcttaaagaatatgtattattccttaaaacctttttttatgtactcaggg

SEQ ID NO: 854125 - DNA, 630 bp, Homo sapiens
gcccatgaaatcttcacaatttatgttcctctgccgcggctccagctggttcctccgttcagggtccctgacttcccacaacagtttggatttatttacattgaacatttaaattcttaaaatgtcacaagagctgaataagatcaatccatttattatatcttataatgaggcataatttagcctatgtatgattagattatgagttaattcctgggataaacacactgagcatgagcttaagatctccctgattggtctaactgcatttctttcatttttcacattttcaaatatttgttaaaatacattgtatcatattattgaattattttttatcaagctatttcagagaataaaataaaatggaagttattttttcctatattagtgtagtttttatatataaaatataacagaaatacatttataaacatttaatggttcacatcacttaaaatgaggttttattagaggaaatttcattttaagactgttatggcaaaaagcacctacagaaaaatatgagaattataataggtcataaaatatcttaagcatgaggtttagtaaaacatgttyttaaagaatatgtattattccttaaaacctttttttatgtactcaggg

SEQ ID NO: 854126 - DNA, 595 bp, Homo sapiens
accatctcatgccagtcagaatgaagattattaaaaagtcaagaaacaacrgatactggtgaggctgtggagaaataggaacacttttacactgttggtgggaatgtaagttagttcaaccattgtggaagacagtgtggtgattcctcaaagacctagaaccattaatagatttgacccagtaatcccattactgggtatatacccaaaggaatataaatcattctattataaagatacatgcaccagtatgtttactgcagcactattcacaatagcaaagacatagaatcaaccaaaatacccatcaatgatcgactggataaagaaaatgtgatacatacataccatggaatactatgccactataagaaggaaagagatcatgccctttgtagggccatagttggaacttggagccattatcctcagcaaactaacacaggaagagaaaaccaaacactgcatgttctcacttataagtgggagctcaacaatgagaacacatggacacagagagggaaacaacacacacagaggcctgtctgagtgggaagagtgggaggaaaggagagcatcaggaaaaatagctaat

SEQ ID NO: 854127 - DNA, 595 bp, Homo sapiens
accatctcatgccagtcagaatgaagattattaaaaagtcaagaaacaacggatactggtgaggctgtggagaaataggaacacttttacactgttggtgggaatgtaagttagtkcaaccattgtggaagacagtgtggtgattcctcaaagacctagaaccattaatagatttgacccagtaatcccattactgggtatatacccaaaggaatataaatcattctattataaagatacatgcaccagtatgtttactgcagcactattcacaatagcaaagacatagaatcaaccaaaatacccatcaatgatcgactggataaagaaaatgtgatacatacataccatggaatactatgccactataagaaggaaagagatcatgccctttgtagggccatagttggaacttggagccattatcctcagcaaactaacacaggaagagaaaaccaaacactgcatgttctcacttataagtgggagctcaacaatgagaacacatggacacagagagggaaacaacacacacagaggcctgtctgagtgggaagagtgggaggaaaggagagcatcaggaaaaatagctaat

SEQ ID NO: 854128 - DNA, 667 bp, Homo sapiens
tttcaaacaaacaaacaaaaaaaaacattgttagaagatttttatgtgagcaggatagagtccctcccasaatctcaaaatagcaaatattttaaaaatgtataaacactgcatttctagtgttagcaaggcatttcaaagtcacagagcacattaacgcaagttttatcatataaaaataatatatatttctatccttaccacagaaataagtataaataagtatatttatctataaaattatgtttcaggaaatcacatagaaaaaatgtggtctatgaatgaatagatttcaaaggaaaattaatgaaatattattatgacaaaaagaaaaaacagggcttggactatttcccaaacatttaaaaagaataacaataaattaaaattaaaatgaaaagtaggaaactatttccttcaagtagcaaacatccatgagctagctattttaaaatagtgataaaacctgaaagggtattaatagatacaaaacagttcatatcattacagagctttgtttccactgaaagagaacacaggcaaacacacaaagataatctcattaccgatatataagatataataagatacttgcttattatatgagatagaataagaaaattaaaaaggactttgaaatgctttgctatcactagaaatatcgtat

SEQ ID NO: 854129 - DNA, 607 bp, Homo sapiens
tgtattactgaaccctacttttaacatgtttaaatawttgtgacttctaaagggcaagaaggagcaggaaaagtaaactaaagcaagataatgccgaaaataaatagatgaggttaagtccaacctatcataaaaaattattctccataaacattagaattaacaatttacaatagcatatttaataggaaaaaacacaaataaatatctagtctccatggaaagaaatctgatcacttaagaagaattgtcattcacatacacttgcaatgccaaataaatgtatgttgaagagaagaggagaagtactgagggctagtaatcaggcaccagtcttcaggactcttatttctaaacgtgtaaactggagaatgaaatgaaataagtgagatattagtagtaaattcaatgattcaatgacagtgaaatgtatttaaataatatatatttttaaattcacaatttaattggcagaaagttatcaaagcataaggaatatagaaattgtttaataagttaatcccaagctgactttatgcaaaaatacacaaacaagtgaaaaaaaattgaatcctttaattatctccacactcaatccttatatata

SEQ ID NO: 854130 - DNA, 625 bp, Homo sapiens
aaactagtcactaaatgtgaatgatgacagaaactacatattcttactttctaatctctttctaattcttgtttagttatttatttttgttgcatttccctaaatctagtttgcaaatttcctctttatctttggtttatagaacattgtccttggcatgtttaaattttcttatgcataaagttgatctaattagagttttctgacatttttttatggacaattctcagcccttttgttttcctcaaatattgcttccgttcattatctttctcctttccctattatatttccatcactcataggttagatttttttttaattataccacacagctctctaacactgtttgtttttattttccttttttgccatagtttggaaatttctaatgtcttttctttgggtttactaatcccagtctttgttagttctactctgctattaaacccatccaatttgttttcagttgacgtattttgaagttttaaaatagacaattsatatatttaatagattgtaactcttgacattttcaacattttttacatttaccccatttttctctcactgtcattagtatgttaattttttattaattttaacttttgtctatgatctacaa

SEQ ID NO: 854131 - DNA, 579 bp, Homo sapiens
tcatgaatactgtttacttctcttttaaaatgatttataattcatttacctgaaatttatccttttaaagtgtacaattcagtaaattttatcatgttaacaaggttatgcagctatcaccactgtctawctctgaaacattttccacaaccccaaaagaaaccccataaccattagcatttacttcccattctccctaaatgcagcccttggataccattaaactattttctgactctttggaattgtctattcgggacatttctaataagtgatatgacataataataatgtgtctggcttccttaacttggcatattgtttttaagtttcatccatgttatgacatgtatcaatactgtattccctcttatagctatgtaatattccattgtaaggatatagaaattttgtttattcattcatcagttgatgggaatttgggttgtttccagttttgattgtcaatagtactgctgctgtgaacacttgtgtacaagtttttggataaacatcttatatctctgaaatgaaataaaaacctatgaacgctgactagaattggaatttctggggcat

SEQ ID NO: 854132 - DNA, 579 bp, Homo sapiens
tcatgaatactgtttacttctcttttaaaatgatttataattcatttacctgaaatttatccttttaaagtgtacaattcagtaaattttatcatgttaacaaggttatgcagctatcaccactgtctatctctraaacattttccacaaccccaaaagaaaccccataaccattagcatttacttcccattctccctaaatgcagcccttggataccattaaactattttctgactctttggaattgtctattcgggacatttctaataagtgatatgacataataataatgtgtctggcttccttaacttggcatattgtttttaagtttcatccatgttatgacatgtatcaatactgtattccctcttatagctatgtaatattccattgtaaggatatagaaattttgtttattcattcatcagttgatgggaatttgggttgtttccagttttgattgtcaatagtactgctgctgtgaacacttgtgtacaagtttttggataaacatcttatatctctgaaatgaaataaaaacctatgaacgctgactagaattggaatttctggggcat

SEQ ID NO: 854133 - DNA, 525 bp, Homo sapiens
ttatttttatttttctaatttaatatacttgttattagagaaaaatgcctatatatatatwtttttttcaacttttattttaggtttagtgggtacatgtacaggtttataacatgggtgaattgcatgtcaatgaggtttggtgtacaaatgatttcatcaccccggtagtgagtggagtattcaataggtagttgtttgaccctcattctcttcccaccctacactatcaagcaggccccagtatttattgtttccctctttgtatccatgtgtactcaatgtttatcttccacttgtaaatgagaatgtgcagtatttggttttctctttctgtattaattcacttaggtaatggcctccagctacatccatgttgcttcaaaggacagtatttcattctttttatggctgcattgtattccatagtgtatatgtaccactttttttttttaattcagtccactgctaatgggcatctaggttgattccatgtctttgctattgtgaacagtgcttcagtga

SEQ ID NO: 854134 - DNA, 543 bp, Homo sapiens
ataataacttgcaagttgaagttaaattttttcattattatttggatttatattttaatttaaaaacaccattggtttgtatacaaaatcartgtcatttttttctgattacaaacttagtatttatttgcttttagatgatttacacatcataaagagttctcagaaattagaactttaatcgagattatttattacaacatcttttaatatccattttaaaaacattgttgaggtataatttatatatcataaagttcactcattttacatgttcaattcaatggtttttagtgtatttacagagttgtacaactatcaccagtatctaactgtagaacaactttgattcaatagcaaattgagttcctttatgtttgtttcccgagttttccatctgattatttcaactttctgttcacttaatctttattaaaaagtatattaaatacaattatgttttagatttacaagcgaaatttttcagggacataaaaaggaaaagaatatcaataaaagtatagctctatgacctgtgatata

SEQ ID NO: 854135 - DNA, 570 bp, Homo sapiens
ctgtgaaattttgcttcagaaaagcctgcactgcaaaaccaaacagtacagagatgtataaaagatctcctcaaccttaayagagaagcaaaaagcaaaacatcttctttgctcctgatggaaatgattaccaatttaagatttcccacagagaagcctctctccatgatgcatggaaaaatttccagaacataatctaataatagcaaaataaatagaaatactaaataaatatgccgacaaacccatggctgatatcactaatggaaatccagagtgctgacagtatgtgggtttttcctgtgacccagagcatgtaagaggtatacactcaatctcagtgatatcatatcgaggtgtggaatgtcactgtgcttttccatatggaaaaagtgaggtacagaaaagggatacggcttgtccatggttatctcgcacacaggagagtttattacggaggtaagcaccctagtgtttggctgaggcttctaatatattgcctgttctagcacgtaaactctttttactgtgaagccttattatgcttttcttacatctcactgaacctag

SEQ ID NO: 854136 - DNA, 589 bp, Homo sapiens
tcagactatgattcttttgaattagagtgatgatgaatgttcagggttgagggaagcagtcagggctctggatagtctatcactgctatcaattttatgtttttatacatgtataatatatatawttttatatatcataatattttatatatatatacttaatcattatatgattctcctgttgataccttatccagttttaaatttttctgggcattcttttttttttttttttttttttgagatggaggctcactctgtcgcccaggctggagtgcagtggcacgatctcggctcactgcaagctctgcctcccaggttcacacgattctcctgcctcagcctcccgagtagctgggactagaagcacctgccaccacgcctggctaatttttttgtatttttagtagagacggggtttcactgtgttagcaaggatagtctcgatctcctgacctcatgatccgcccgcttcggcctcccaaactcctgggattacaggcgtgagccacctcatttctgggcattcttagagcccatcaataaataactttattctcactgaattttcatcagttgtgtgtaatta

SEQ ID NO: 854137 - DNA, 589 bp, Homo sapiens
tcagactatgattcttttgaattagagtgatgatgaatgttcagggttgagggaagcagtcagggctctggatagtctatcactgctatcaattttatgtttttatacatgtataatatatatattkttatatatcataatattttatatatatatacttaatcattatatgattctcctgttgataccttatccagttttaaatttttctgggcattcttttttttttttttttttttttgagatggaggctcactctgtcgcccaggctggagtgcagtggcacgatctcggctcactgcaagctctgcctcccaggttcacacgattctcctgcctcagcctcccgagtagctgggactagaagcacctgccaccacgcctggctaatttttttgtatttttagtagagacggggtttcactgtgttagcaaggatagtctcgatctcctgacctcatgatccgcccgcttcggcctcccaaactcctgggattacaggcgtgagccacctcatttctgggcattcttagagcccatcaataaataactttattctcactgaattttcatcagttgtgtgtaatta

SEQ ID NO: 854138 - DNA, 482 bp, Homo sapiens
tcttccagcacaaaagtagtttatttctaatcccaaacaggctctgatgactctgagatgacattgacttccaatgytccatttctactgtgctaatggctttttaatgcctaaatccaaagagctatattggatcctcttttgcttggcttccctgtacatttccttcttgaactgcctccctttgcttcctgagtacagcactctccagttctcctaccactcagtcctctgcctctgtgaatctcctgcctactcctctttctccacccgggccttaaatgctggtgttccacagggttccagctactactttttttttttttttttctcttctaacactataaaccctccctgagcgatttcacctgttcccttgattttaacctctatccacatggtaatgactcttatgactatcattagctctgcacacataactgaatgaccccaggcaccaaaactgaattcattgtctccac

SEQ ID NO: 854139 - DNA, 540 bp, Homo sapiens
tagctctgcacacataactgaatgaccccaggcaccaaaactgaattcattgtctccactggcctccagagcttgttctcagcctttttgtcttcctgtactctcccttctgtcaatgayaccactcaggctccaagctagaagacacagggtcatccttaataactccttttccctcacctcttactatgcagtttctcatctacacttactaacattattataaaaatatatttaaggttggttccttttctgcatctccactgcccctgcctaagtaggggttttcctcacgttttgcccagactgctacagcagcatcctaagcagtgtccctgataccaatctcttcctctacatcgtccattcctcactccactgcaaagctttataaaaaacaaatctgattacttgttaaaacttctgctggctgtttgatcaacagaagtgtttgaatgaatgaacaatggatttctttagtagaaagttcacattgtataataatgaagaattcatattctggagtcagacatggtttga

SEQ ID NO: 854140 - DNA, 578 bp, Homo sapiens
actgggcctgagaagggaggagttattcattcccttaagctttcaggctctggggagaatctttcagataccagtctacaaaatgaaacaattccttcacactaaaccctctggtttcaatagcttctttgttttgcccttaccacacactgactaccttcttggtaaacacaggtcttagaggtgctttctgtagtcctggcataattttttctgggagatggctctgaggctaatgactgaagttctaactcactgaagtctgcactgggggtagcatcaagatctgacccagcactgtcttttgatttcattttagctattacagatagcaataaccacacaattgtatattttacttttttgttgtttattataagtttgcatttctttatgcatccagcaaaccaactgtccaggagttgaatgcatctctaaatttcactggaggttttgccattagtaactgagtgcaacacagctactgcctcatatcatggtgatacggctccagtgactgtagaaacacsgtgggtcctttgtctcacactgataagattgacacggacacacgtgga

SEQ ID NO: 854141 - DNA, 578 bp, Homo sapiens
actgggcctgagaagggaggagttattcattcccttaagctttcaggctctggggagaatctttcagataccagtctacaaaatgaaacaattccttcacactaaaccctctggtttcaatagcttctttgttttgcccttaccacacactgactaccttcttggtaaacacaggtcttagaggtgctttctgtagtcctggcataattttttctgggagatggctctgaggctaatgactgaagttctaactcactgaagtctgcactgggggtagcatcaagatctgacccagcactgtcttttgatttcattttagctattacagatagcaataaccacacaattgtatattttacttttttgttgtttattataagtttgcatttctttatgcatccagcaaaccaactgtccaggagttgaatgcatctctaaatttcactggaggttttgccattagtaactgagtgcaacacagctactgcctcatatcatggtgatacggctccagtgactgtagaaacaccrtgggtcctttgtctcacactgataagattgacacggacacacgtgga

SEQ ID NO: 854142 - DNA, 614 bp, Homo sapiens
ggtggaagactgatatagatatacattgtcgtgttcctcagagttcactatgtaaggaaggttcagatctcatttctctcattttattacayatgttgtgatgtattaaaggatgcttggatcatgtaaactctttagtaccagtaaaataagaaacaagttcactctaaaattgttttttgtatcagtgttattaagaactcaaaggaaaagaaaaaaggcatttctagtccaaatactgctaaaatcacttcattttttcattttatctcccagactttatccatgtaaatatttaatttttaatagattgtaattaagatatacacacaattattctagttgtcaaattacctcattttggaatgagatgaagattgaaataaatattttctatgttccttaatggtgccataattcataggtctatcatatttaactattgttggacatgtaggttatatccagtttttcagtattccaaagtatatgatagtgaccatcttttctgcatataaccctttttaaaaaaaactatgtgtctccctttccccctaacgttttctttcagatttttttccttgggataaaattctaaaagtaggaaagggact

SEQ ID NO: 854143 - DNA, 625 bp, Homo sapiens
cagggcttcagcaacagcgtgtgtggctggagtttaaatgaatttcatcagcatgattaaatacttattacatgagtcaaacatacgggcttcattaagytagtgaactcccaggaacctcctcttctgtttatacaacccatctggactctcagattactttaaagaaatgggataaatggagttcgatatgacagccagctcatctttcagcgttgtactctcagaggaaactcatcttccattgctaaatctggcctccctacaattgggtgcagaggtttttttccatctgcttctggcctccgtgaaagcctgacatgatgctgaaattgagactttaagagtaacttgccaggacatgacagacatacttttctcattgaagcatggaacattgtctaaagtcatttgcaagcacaaaacttgggcttttacgaggaggcacaccttgaaagcaaaataaagggcaaggtttaattaacttaccaggccctctgttagtcgttattagaagctctttatcaaattaaaggcctgctgggaagccagctgagtgccgagaagcagtgacatgcgttaagtgccaaagtgggttttaattggctgtttaaatgaaggaaag

SEQ ID NO: 854144 - DNA, 625 bp, Homo sapiens
cagggcttcagcaacagcgtgtgtggctggagtttaaatgaatttcatcagcatgattaaatacttattacatgagtcaaacatacgggcttcattaagctagtgaactcccaggaacctcctcttctgtttatacaacccatctggactctcagattactttaaagaaatgggataaatggagttcgatatgacagccagctcatctttcagcgttgtactctcagaggaaactcatcttccattgctaaatctggcctccctacaattgggtgcagaggtttttttccatctgcttctggcctccgtgaaagcctgacatgatgctgaaattgagactttaagagtaacttgccaggacatgacagacatacttttctcattgaagcatggaacattgtctaaagtcatttgcaagcacaaaacttgggcttttacgaggaggcacaccttgaaagcaaaataaagggcaaggtttaattaacttaccrggccctctgttagtcgttattagaagctctttatcaaattaaaggcctgctgggaagccagctgagtgccgagaagcagtgacatgcgttaagtgccaaagtgggttttaattggctgtttaaatgaaggaaag

SEQ ID NO: 854145 - DNA, 522 bp, Homo sapiens
ctggctgttcacaaagagctggccaaggacattccggctatgccaggccaccgggccaagttcccagggacagcaatccaccgcctctctccccccatcacacccaagggaagcacacaaagtaggcctgggtccatggcctggcagacacctgtccccggctttctgggacagtgcactgcatcagctgccagcaaaacaaccagccccttttcaatgggccagtgggcagggctgccattggcggagccctggtgatttacgacaccccggctcagtgcaccatcagggagcttccaggtagaatctccaacttcaccaggcaagggctctcccttccagtgatttatggagccagagtgagccagttgttttttttccctttccctcctccctcctcctccaggayaaataggtttcacatcgctgtgggcactctggtctgcaatgacaagacaaagaggttccacttgtccctctgccccctgcacctgctgtcaggggatgatggttattggtcag

SEQ ID NO: 854146 - DNA, 594 bp, Homo sapiens
gaacatacctcaacacaataaaggccatatattatacaaacacacagctaacatctactgaatagggaaaagcagaaagcttttcctttaagacctgggaaagacaaggacrcccgctcttgccactcttattcatcataatatttgaagttctagctatagcaaatagccaagagaaagaaataaagggcatccaaattgaagagggggagataaaattgtccctgctttcaaattacatgattttatgtaccgaaaaccctaaacgtcccatcaaaaaactgttagaacttattaacatattcaacaatatggagaatacaaaatcaatatacaaaatcaatgaattagctgaaaaagaaatcaagaaagtaattccatttacagtagctaccaaaatatatacctaggaacaaatttaacaaaggaggtgacgaatctctacaaggaaaactataaaatactgatgaaagaaattgaccacacacaatacacacacacacacacacacacacacacacacacacacacacacagaaagacttttcatgttcgtggattggcagaatgaatattgtgaaaatgaacatacta

SEQ ID NO: 854147 - DNA, 647 bp, Homo sapiens
gataggaggagcagggaatgggaagttgttgtttgatgggtacagagtttcagttttgcaagatgaaaagagttctggagattggttgcacaacaatgtgaatgtactgaaatactactgaattatatttcactatactgaaatggttaagatcgtcaattttgttatgtgtattttgcccaaaatttttaaacagcaccaccacctaaccacctgctcaaggccaagagaggtctaggaattggaattgctcttgactcccatttcacacccaacccttcacccacccctgtgattctatacagctcctaaatctgcccacttctctccatcctcactgcctccatgttagttctattttctatattacttgtctccgttccaccactgtttgtactaattcaatgaccatacttgagccagccagagactgaaatcttctaaaacagaggctggatcacattacttgcttaggaaattccaaactcctttaaaaaggttcacagcgaagaactacatgatctggtcactgctatgcccccggccacatttctcaccaytccattggccctcacttctcattctggtcatgtcaccacagacctgggaaggggtctgggctccaggtgaatcagaagcgcatggtt

SEQ ID NO: 854148 - DNA, 617 bp, Homo sapiens
accacatatatgagtaacccagtttttcttcatccttatcagcatttggtgttattgctgttttttccattttagtacttctaaaaggtatgtaatttctatgatgtgaatgtttgcatcccttcaaaattcatgtgttgaaattctaactctcaaagtgatgatattaggtgggacctctgggaggttattagatcatgagagtgcagcctttgtgaatgggattggtgccctcattttttggcatgtgaatattcagttttcccaacacagtttattgaaaagattatcctttcatcattatgttttcttggttcatttgtcaaagattagtttaccatatatgtgtaagtttatttctggactttttattgtgttccattggtctatgtgtctatttgtaccataatgtttcaattattatagctttgtaatagaatttgaaatcaggaggtgtgatacttccagctttgttcttcttgctccagattgtttcagctattcaggatcttttgggattccatacaaattctaggattgttttttctacttctatgaaaaatctgtrattggaattttaatagggattgcattgactctgtagattgctttggata

SEQ ID NO: 854149 - DNA, 496 bp, Homo sapiens
gcctcctgagtagctgggattasaggtgcacaccaccacacctgggtaatttttggatttttagtagagatggggtttcaccattttagtcaggttggtctcaaattcctgacctcatgatccacccaccttggcctcccaaagtgctgggattacaggcatgagccactgcacccggcctgacagattttttttctttcagcactttgaaaatactgtcttgctctcacttggcctgcatggtttctgctgagaaatcgactgatagtcttatttaggttcctttgtatgtggtaagcctcttttatattgcttctgtcaaaattctttgattcttgacaatttgattacaatatgtgttcattaattcttctttggtttgaacctgatttgagacctttgagtgtctggtaactggtttcatctgtccccagatttgggacatttttaactgtttttactttaaataatctttctttccctttagctctcattc

SEQ ID NO: 854150 - DNA, 554 bp, Homo sapiens
tcaaatggaaatgatgcagaattaaagttatgagaggtatcaacaaaacgttattgagaattcaaaggacaaatgcctaaagytttgattaagaggaaattaggtaatatttcatggagtaaagactggccataaaagactgagtaggattttaggtggatggagttgggtggtgaaagggagggcatcgcaaaccagagaaagagaataagcagaagtatgaagggaagatcactctgagtgtgtccgatatagatagagtacaggcctagtatgggaagtagcaggtgataaggctttaaagcagtggttctcaatcaggggagattttgccacccaggggacatttggcaatgtctggagacatttttggttgttataactaggtgagggtatgttattgacatcgggtgagtagaagccagggatactgctaaataccctacaatgcacaggatggcttgccacaacaaaacttatccagccccaaatgtcaatagtgccaatattgggaaacccttttttcgggaagattggtcttggtcacagaagac

SEQ ID NO: 854151 - DNA, 588 bp, Homo sapiens
catgattttgttcttttatggctgtgtagtattccatggcgtataagtaccacattttctttatctaatccactgctgatgggcacctgggttgattctatgtctttgctattgtcttttcactttcttttttaattattatttcaataggttttgggagaacaagtggtacttgattacatggatgagttctttactggtggtttctgagattttggtgcactcattacctgagcagtgtacactgtaaccaatgtgtggtcttctatcatttgcccccctcccacccttcccctcgagtctccaaagtccatttgtatcattcttatgcctttgtatcctcatagcttagctcccacttatgagtgagaacatgtgatgcttggtttttcattcctgagttacttcgcttaggaatagtggtctccgattccatccaggttactgtgaatgtcattatttcattcctttttatggcttartagcagtccatagtgtatatgtgccacattttctttatccactcgttgattgatgggcctttgggctggttccatatttttgcagttgcaaattgtcctgatataa

SEQ ID NO: 854152 - DNA, 391 bp, Homo sapiens
ttttttgaaaacaggtaaatgaaaaattttaaatctgtaaaattcacctctgtctkagcttgctatgtctgtatgtttataaagtcaggtagaaataatatttcactaccaattagaagaaagagctctcattaattgacttttaaaaaataagcatttatcagaccaatagaagctaactcagaggcttttcagttcacatgacttcagtattttttggtaagattaatttggtatatttagtttcaaaattctccccagtaatttaaaatcttaaagtcatgttacttttttattttaatttttttgggtacatggtaggtatacacatatattcatgtgatattttggtataggcatgcattgtgtaataatcatatcatggaaaatg

SEQ ID NO: 854153 - DNA, 597 bp, Homo sapiens
tgagaaaatttggagattttgacttgccatcattccttttcttacaagtatatattcttctgattctgacaaatgtatttttcctaacaatcagttckatgaggttcttccccctttgtttttacatctgtgtttacatagttatgtttatgtatttatgtgcttccagcttgtaaagtaatctaaaaatccaatacatggccatattttaaaaagtgaaacagcagccagacatggtggctcatgtctgttatcccagcactttgggaggccgaggcgggaggactgcctgagtccaggagttggagaccagcctgggcagcattgcgagaccccatctctaccaaaaaatacaaaaattatttaggcaagatgatgtgtgcctgtagtttcagctactcaggagactgagacaggaggattgcttgaacccagaagttcaaggttgcagtgaggtgagattgtggcactgcattccagcctagatgatggagcgagatcctgtctctaaaaaaaaaaaaaaaaagcaaactataaacaacccatgcaattttagctaagtttccacaacaataaacacgcatctaaaataggaaa

SEQ ID NO: 854154 - DNA, 598 bp, Homo sapiens
ctttacaattgaccgtgaacctgaaagttttataaccaatttgattaggatcccatgtctaaggaaaatcatcaaggtattgcaaagcctcttctaggtggaaaagtgaatgcacaggctttttgrcaactattttactgatgctagggctgtcttcacactttttagtgtaaaatatgttgttctgacaagtgcacacggtcacatgatcaccagcaaaatcaaggtttaagacaattctgtcaccctagaagtttccctcgttcctctttgtggtcagtgccttccataacctccagcccctggaaccattaatctgtttctgttctcatagtatttccatttccagaatgtcatatccatggactccttacagtttgtggccttttgagtttactttttttcactaagcataatgcacttgaaattcttgctgctgcttgtattagtagttcatttctctttattcctgagtagtattgctttgggtgggtgaattcagtttgtttattcattcccaagttgaagaattgcctggctttggggtaaaattattgtcctaataaaaattgtggccaggagcagtggctcacgcctg

SEQ ID NO: 854155 - DNA, 631 bp, Homo sapiens
tattttttcatttaaatcaaactcaagggcttgagcacctaattcaggctgaactgggttccagccccagctagactgctcactggctgcatgactgagtaattaatggtttttggattctctttcatatccgtgcactggtactgaggagattacattggccaattgtaatgtaaatagagcccctgacagaggagctgggacatgactaaacagcaggcaaatgttgatcccctgctcagcctagtgattgagagcatgtggtttaggactagggaggcctggattctgttcccagctctgcctcttacagactaagcttacctggatcttctaacttctgtgagcccaatttcctcacctgtgaaatggaggttaggatacttacctctcgaggggttgtgaggattaaatgaaatgatattatatgagatatgacttagtacggtgagtaatctcttctaatgtattggttacataaatccagatttctatggatcagatgttattaaagcaaaatataattatactcctgggactcatgcagcacagttctgttcaagtcartaagcacttttgagggcctactatacgggaagtcctgtgctaggtgtagttgctacgaaagtga

SEQ ID NO: 854156 - DNA, 620 bp, Homo sapiens; identical to SEQ ID NO: 851749

SEQ ID NO: 854157 - DNA, 613 bp, Homo sapiens
tttctgtaatagttctttcaagakcctttctagatttgtttctttttcttttctttttttttgagatggagttttgctcttcttgcccaggctggagtgcaatggcatgatctcggctcagtgcaacctccacctcccgggttcaagtgattctcctgcctcaacctcttgagtagctgggattacaggcgctagtagagacagggtttcacgatgttggtcaggctggtctcgaactcctgacctcaggtgatccacccgccttagcctcccaaagtgctgggattacaggtgtgagccactgtgcggggccagatttgtttgtttgtttttctttgagacagagtctcactctgttgtccaggctggagtgcagtggtgtgatctcggctcactgcaacctctgcctcctgagttcaaatgattctcctgtctcagcctcctgagtaggtgggattacaggcgcccaccatagcgcccagctaatttttttgtatttttagtagagatggggttttgccatcttggccaggctggtctcgaactcctgaccttgtgattcacccacctcggcctcccaaagtgctgggattacaggtgtgagccactgcac

SEQ ID NO: 854158 - DNA, 618 bp, Homo sapiens
tggtgggcgcctgtaatcccagctacacggaaggctgaagcaggagaattgcttgaacctgggaggcagaggttgcagtgagccgagataatgccactgcactctagcctgggtgacagaatgagactctatctcaaaaaaaagaaaaaaattaaaaaaataaataaataattagctgggtgtggtgttgtgcacctatagttccagctactccagaggctgagacagaaggatcacttgagcccaggagttcaaggctgcagtgagctatgattgtgtcactgcactccagcctgcatgacagagcaagactctgtcaagaaagaaaggaaggagggaaggaaggaaaaagcgaaggaaggaaggaaggaaaatgagggaaggaaggaaggaaaaggaaggaagaagggaaggaaggagaaagagaaaatatatttatattcattacatggaagtggatcatcacttccacttcatccttatyatgttcatgttaagtaggcagactgagaaggaggaggaggaagaggagggtttggtcttcttgtctctggggtggcagaggcaaaagaaaattcacgtataagtggactgtgtagttcaaacctgtgttgttca

SEQ ID NO: 854159 - DNA, 639 bp, Homo sapiens
ttctttataaattacccattctcmggtagttctttacagcagtgtgaaaatggactaatacaatacccttcttcttcccttcattctgcagtatgaaataagattttgatggctggatattcagcggccatctgggaccatgagtattgaatctccatgctaggtggaaaagtaagctggatcataggtgatttcatagagttactatagcagcactggaattccacctataggcttcttttatgtaatagagaaacaaatttctgtttaagccattgttcttggaatctgtgttactcttggcagaatctaaatccggtatattttacttaaaaatatatacctatatttgaaataaattaatgtaagtattaaataaaatgatgtggtttgtttgtttgggttcaactattagcagcatctttcagagaactagattatgcagcatgctggtccaaatattaacactgactaatactgctggtggaaatgagataccacattaagaagcaatcaagagtcaaatatgtaaaagaagttgtacatgaaggtacacaagttggcccttgtattcaaaatattaaaacaccctattttgtttgtaactggaaatagttatttaaaaacagtagtgcattt

SEQ ID NO: 854160 - DNA, 669 bp, Homo sapiens
ggatttctttttgtactattctttagrgactctgttgaatagggcccccatgctgcagccatgtccttttgagttagtgctagtttcatatatcatgctatttgcttatccaacagctattttatactcttttcttgctaaaaagaaacctaatattgtttagatatgaacaccagaatgttcaagggatccaatacaagtgtaaggaccataattgatataattctacccatgtaagttattcctatattctagtgattgatttagggatggtctgatgacccagttctggccatgggacctggaaggaaatctaggacgtttagaaaagatcctcatttcctgataaatagaaaaacacaataacattgtgagactttatatttctttttggacattagagtgtaaagtggcaatacttggaattatggcagccatcttatagccaggaggggaaagacaaaagtatataggagaaagctagccagagcccagatatcaggaagctgctgcattaccaaacctacaactgccttccttctttatatatggcataataacatccaaattttaagtaaatttagccaggttgcacttgaatttataccagtttaaaaacagtattttacatctcctattaccttgtcatgaggatgttttgtaaacgta

SEQ ID NO: 854161 - DNA, 629 bp, Homo sapiens
tcttgtgaccttgtgtatcacccaggacctcctaatgcatctgtttcctcactgctaaaaataagtcagcaaaaccttttctgccttttccaccactctgcccccggtgcttatcacacaggttgatatataatatgcatgcatgtgtgttctggccaattttatgttgctatgaaaactaaacgaattatttcatgtaaaatcattttacacactctaaagccctttgcaaatgtaaggaagagcattatcattcccttcttgatttctaccctccactgttgttagtgaaaattgattacctattaagtgctgagtgagaaggttagccttaataatttcatttggcttgcatacagaagctcagatcctgccataccttgtataatcatagaaagatatttcagatgccagctcccttcttctgcctattctagttgagggtgccaaacccttcctataatatgttggatctgagatcctgcaatgtcagatctgatcaagaaaatgtcaaattgraggaaaggaaggtgactgtatctttctccacagctcctgaagattatggtgtcctgtattagcaaatatttattctgaaatataggtacatcagctgattacagcatcat

SEQ ID NO: 854162 - DNA, 517 bp, Homo sapiens
aataaatcaatctagtctaataagtgtttaaagaaatagaaaagataagttttctgattttaattttaaaatattaaaatgctttgaaatgttggactagtatccccatgagtgtttatcacacatgttcctcatgttcaggctggtgtttcttgccatgtactgctttctttgccattggttggaccgtttcctttcttgcactctctatcgaaacattttaataatgacccgaatccaattggtcttggctttctcctttaactcccatctttttttcttcctttcttgccagtttgggcacatgccacggtattccaaatcctaaatatcaccaggccatttattgagggattctcctcttagatttcaccttgttataaaatattagcatagcagagacactgaaggraaaaaaaagtaacataaaaatcaaaacttcattagagttagtttttctctggggattggcaatcacttcaaaattggtaatcactgcaaatcactgaaaatgtta

SEQ ID NO: 854163 - DNA, 568 bp, Homo sapiens
atctgatggttttataaatgtccagcagttcccctactggcacactttctctttcctgctgccctgtgaagaggagctttccaccatgattgtaagtttcctggggcctcctcagccatgcagaaatgtgagtcaatgaaacctcttttttttataaattacccagtcttggctagtatctttatagcagtgtgagaacagactaatacactgttttctcctcaaaataattttattgtttcttctattcaccaaaaaatttctcaagtaaataatcttctcaaactgtattcacttcctcttctctcatccatttctccttctctcgcagtttggatcattcctaccatatctagtctttccaaaatctgctttcagagttaccaattacttacagaaaccaaatctactggcttcttctgaaaactttttctggatattggttaatgctaagtttcacctccacccttcataacgagtcytcacaatccaagtgctgaatgcctgtaaactataccttcagactcccttgccagtaggattctggctcaattttgccaacgagagg

SEQ ID NO: 854164 - DNA, 648 bp, Homo sapiens
tcatttcctgcctccatgcataataagccaacccaaaggggctatgatagcttggaggagctataaaaatccatcaatgaagatgtctaactttcaccactgtagcatcatctcaggaattacagtttgaaactgagtgtctctatatatcttgggtctgccataggaatttataattatattagacccaagggcagctcctcctgctctaataacattcatgttattgaactaatgggactgtttaatacaggtttctcaaaatgcagcttcctttgcctgcgcctcccacatatcctctcctttagttaatttagatagttgtttaaccttctcagcttagcaaatacagtattcaataggcttaaatgagtttatacatggtgtatgtctctttgtttttaccctcttcctctcccctcctccaataagcagaaccccaccctccagcaaattcctatctctcttcctctccaataatttctattaattttcaggtggtctctccactgtgcttaaaatacctgactcctaaatccactgtgtcagttagactcagggrcactgtaatgccacatctgctaggtatctcttgcatccattggacacctccaatttgttggtcttggctgtcatttttgcttcaga

SEQ ID NO: 854165 - DNA, 620 bp, Homo sapiens
agaggggcagcaatatagggcttgggtaggcagtggaaagttacagttaaaggtggttatctattattagcagaggaggggtcacaaggttcatggtggggagatcataagacttattgtccagaagaatgtcacaaggttgattgatcagttggggcagggcaggaacaagtcacagtggtggaatgtcataaggttggtcaatcagttaaggcaggagctggctgtttcacttcttttgtggttttttggctgctccagacttcttggctcctgcaggccatctggacatatatgtgcaggtaacaggggttataatggctgagctttggctcagaggcctgacaatgggtactaggcttaatacctgaatgaccaaatagcctgtacaacaaactccctgacacagtttactaatgtaacaaacctgcacttgtacccctgaacttaaagtaaaagtttaaaaaaatcgattttacaaatataagaaaaaatggaacaaggaagcaatgggaaaatagaaaacaattagaaaaataatagaattaaattyaactatattaataattaattcaaatgtaaatggagtagctgctccaaatgaacaggaaagattgcca

SEQ ID NO: 854166 - DNA, 543 bp, Homo sapiens
taatgaccaaaatataaatggctgatagcgagcattcagtacgtactaggagatataataaacaacatacatttatggtttaatgtattctstattataaagtagatctcattcatgtagatatcgtggtagaaacaaagacacagagagattaagatcctcagtattacacagaaaataatgaagaaaggagccaaaatcaaaatccaaacaatgactccagagcctattgtcccttataccataaggtatactaatatggttataggcataggaagcagaggaaggaagtgttgattgtgaaaggcgctccagtgtgtaaatgggcttcatctgaagacagccttgggaaacacattatttgagctgtacttgagacacattgcttattccaaaatattagtgtaaatatttaggtgaataaaatccaatattctataattcaaactcatctctgccttcactaggttatccccaagataccagggtggccatgatgacatgagaagaggttttaccctagatgccataactgattctggc

SEQ ID NO: 854167 - DNA, 593 bp, Homo sapiens
tgcacagcaaaagaaactatcaacagagtaaacaggcaacttacagagtgggataaaatatttgcaaactatgcatccaacaaaggtcaaacatccagaatctataagaaacttaaattaacaagyaaaaaacgaccccattaaaaagtaggcaaagggcatgaacagataaaagaagacatacaagcaaccaacaaacatatgaaaaaatgcttaacatcacaaatcacaccagtcagaataactgttattaaaaattcaaaaaacataataaaggtgctagtgggcttgcagagaaaagagaatgcttatacactgctggtgggaatggaaattagccattgtggcaagcggtttggtgatacattagtctgttttcacactactataaagaactacctgaaactgggtaatttataaagaaaagaggtttaattgactcacagttctgcagacttaacaggaagtatgactgggaggcctcaggatacttgcaatcatggcaaaaggggaaggggaagcaaggacctttttcacatagagacaggagagagagagagaagaaagggggatgtgccacacacttttgaaac

SEQ ID NO: 854168 - DNA, 606 bp, Homo sapiens
atttattctgagtcatcagttacttttcttagctatagttgttattggtactgtaatgacttggcagcgtttcatcattttttcttatgtctggctcacatttgcgtgtgttaactccatctcacaaaaacccaaacaaacacaaatttcataggacctacttggcatctggcagtgtttgacacaactacctaattcctttattgaaattcatgattgagatggtccatcttgaactgattccagcgttcaggcacgaaccttttcgctgagtcgccttgggccaatcactgaacttctctgagcattggattcttggtacagggattggattagaactctaagttacatctagctctgaaggaaattagagatttttgaacttgatgaacattttctaattgttcctagggtaaatgtgccactctttaagacttgttactattttaagatgccactggaaacacagaggccctgcaaaaagatggacattgggtccaccaagtatccagacaggggyggggttggatggtccaggagtacacaggtgacctcctggggagccaaggtatttcccccaaggtgggtgagaaagcaggacatttt

SEQ ID NO: 854169 - DNA, 191 bp, Homo sapiens
ccgtcctcctttctgccgctccttcatgtcctccacttctgagagcagttttgagtcacatcccctgtgggagatgcctcagccctaccctgaagctgacccctgcccccacatagccccagcaccttgcgtttgagcacaccrcttcccaggttgtgcaggcctcagattttgagtacagtgtcgtaata

SEQ ID NO: 854170 - DNA, 560 bp, Homo sapiens
  misc_feature 465: n = A,T,C or G
cagataaaacacatatataaccaaagatgaccaatatgaagagtggtggatgggtgagcagaaaaacactgggttttcattgaaaagaatgttcagtggaatgcccagggatcttaatttgctttagaatcatatactggacaactttaggtgttcttattgcctttcttccccagttatacagccaactctcagagaagtggcttcaacttgatgcacggattttctcctgcccatctggtttggccaacttcccttagattgataaccttaaacattagtgagctttttgtggttttagcaaaccacaccttcctcacctctccagcctcaactcttcccatttttctcatctcccacctcaccttttgtaacttgtattctccagctatactgtcttaagttcctttaacactccagtctctatgattatttkacacttttaccaagatggaacatatcttnttcatccctgactcgccctttggctagtcagcttgtattaggggctcagttaaaatgttattttctcaagaaagttctattagcgcttcctacac

SEQ ID NO: 854171 - DNA, 616 bp, Homo sapiens
ctaaaaggaggaatgcttattccatttccatttccatggaaaccaatcaccaactggtgaaaacaaggtagatcaaatttttgaataagaatgttgaaataatcactgttttaaaacttttctcttgcatcaggatgaagagcatagtctaatctccgaaaacacacagagatgtctgtgtggataaataattcactgctgctttattgttgcaactcttcttcataatcacgataattactgtattctagtgaggttttctgatcattcactgaaggacaaattgttataaatccaataaataacttacatttgaaaatgggaaaattccaaagccaagaaatccattcaaaatgtattatcatgttcctcttctacatcctcttagcaaatgtatgaggaaagaaacatggtgattttcagagaaggaatagactgtgatctgtttttgcgagaagatttggaggagtattcaattttttggaactctaccatgaaaatcagactttaaatagactatttaaatgaccaattattacaaagcagaaatartcttcatagctcttaaaaccattcagcctttccaagagaatttgaatagtccccttcacaaaaa

SEQ ID NO: 854172 - DNA, 565 bp, Homo sapiens
atgcttgtgggtattgctcaagaaagatagatgtactttaaaaaatcattttctgattggaacagtacaagtttattgtggaaaacaataatataaataaaaatatttcataatctcccaaataacaaaactctactcaccatcttggtgtattttttttttaattctctttctctctgttggcattatacaaattatatctatctatatatttatatgtataaatacataaataaaaatataaaatatatacataaacatgcatacatatatacgtgtatgtctgtatgtacatacatatgcacatatatacatgcatatagttttattctattctaatattttagttatgctcacttatatatttcaaatatattatttctattttcctacttatttctaagtatgtgttttcatggctgcaaaagagtctatcatatgaatgtactatacacacatacaarttcattatatatacacacatatacagtcacgtatcacttaatgacagtgatacattctgagaaatgcatcattaggcaattttgtcattgtgtgaacatca

SEQ ID NO: 854173 - DNA, 532 bp, Homo sapiens
ctgtatgggccgccaccacaggccccctttccctctggcttctggtagagcccaggcaggaaattrcaagaggaggagagtgagggcccagggctgcagcgctctgttggacttgcctcacaccatcctctgttgctctgtccttagtttggggaattacactcttctctagtccttttaggactagattattgacacctcagttgttagctggcctggggcaccactctgtctatcctctggtttttctgtaccttgcccacgccaattcagtcccttaattagatcttctctgattattccaacgttgaatgttacacttgtgttctgctggggtaccgatgcataatgtgtcatcctgggaaactcctgtggattttgtctgaggagtttttattaaacacaaaaacttaaaatgtttaaagttattttccctgtatattcttttttttggtttctgcattccactttgctattaacatgaaaataagacaggctgtccactatatatttttttcaatgaatatttggg

SEQ ID NO: 854174 - DNA, 532 bp, Homo sapiens
ctgtatgggccgccaccacaggccccctttccctctggcttctggtagagcccaggcaggaaattacaagaggaggagagtgagggcccagggctgcagcgctctgttggacttgcctcacaccatcctctgttgctctgtccttagtttggggaattacactcttctctagtccttttaggactagattattgacacctcagttgttagctggcctggggcaccactctgtctatcctctggtttttctgtaccttgcccacgccaattcagtcccttaattagatcttctctgattattccaacgttgaatgttacacttgtgttctgctggggtaccgatgcataatgtgtcatcctgggaaactcctgtggattttgtctgaggagtttttattaaacacaaaaacttaaaatgtttaaagttattttccctgtatattcttttttttggtttctgcattccactttgctattaacatgaaaataagayaggctgtccactatatatttttttcaatgaatatttggg

SEQ ID NO: 854175 - DNA, 627 bp, Homo sapiens
cccttgagcccaggagcttgagactagcctgggcaacatagggagactctgtgtcaataatttwaaaaaaaaaaaatagccaggtatagaggcatatgcctgtggtcccaggtcctcaggaggctaaggtgggaggatcccttgagcccaggaggtggaggctgcaatgagccaagatcaagccactgcacaacagcctgggtgacagggcaagaccctgtcgccaaaaataaataagtaaatctaagattgcattctcataaaaatacaggactgtggctcttggtcacctctaagatgttcccatgttaacatttagcaaggaattttattttctatcctcacagagaagacaatactgcaacacttctttccattcagaaatgaatcaccacttctagatcacataaataacaattaaacaagaaaccaaaagtattctctttttttaatgatacattaatgccatgttgaaaccacttaaattttaccaatgatttttttgtcctgggatttacagactatatattcctttcccgggtagaaagtcatgtgtatccttacaccttccagctaggacccaccttttaagctctcttgctcgcacaacgcaaaatttttaaaggc

SEQ ID NO: 854176 - DNA, 262 bp, Homo sapiens
acacaaatagttattattgtattacaattgcttgaagtattcagtccaataacatgcttgtacaggtttgtagcctagtagcaacaggctataccacatagcctcggtgtgtagtaggctataccatctaggtttgtgtaagtacaccctmtgatgctcacgcaatgaagaaattgcctgatgacacatttctcagaacatatccccatcattaagaaatacatgactggctgggcatggtggctcatgcctgtaatcccag

SEQ ID NO: 854177 - DNA, 626 bp, Homo sapiens
caaagataggagcacagagcagttaaatggggcgttgcagaygctctccgtacccccgtgacagggtgatgccatttactctccagatttagtataggaaagagagcaatgctgacgtggtgtcgtggtggaagatagaatggaggctccacctaataaaaagaaagggcaaagttcagggtatatattctagaagaagatgggaaaacttggtttttggtgaaggggttggttttcttaattctctttggctcactttctagccagtccacacaagaaccagatatgtggcatactgcagatagggcaacatttttaagttccagaatgtgacctcccaccatgtgccaaagcaagttatttgttaccatgtcagtctgcagcactgtttgtttccaatggtacatgagctaataccttggctttatttatttatttatttaagttacaaccttttggatacttatgacatgctgggcatactactgaattattttatatgtattaatctaatcagattcttacaaatagccgacgaagaagcaaagttatcacatatattttatagatgaagtttgagaggctaaattcatgtccaaaattatgtaaccagtaagtggcatggt

SEQ ID NO: 854178 - DNA, 649 bp, Homo sapiens
tggctaccctgagccaggtaattccttgttaggctgtcttgcctcctgtaggatggttagcaacatccctggcctcaactcactaggatgcccactcaactagcccagttgtgacaaagttatttccaaatatttccagatgtcaacagagaggcaaatatcaccctcaattgagaaccactgatttaatgaattcatttattcatcaactttttttttttaaatagaaggggtcttgctctgtcacctaggctgaagtgcagtgacacaatcgtagctcactgtaacctcaaaatcctaggctgaagccatcctcttgcctcagcctcctggattttgatcctaaggggtaatagtaacccaatgagaatcacacttgtcagactagcctcaaaacagtttctaactcttttaaaaagtgtatctcctttagaaatactttatcacttttaaagatataaaaggttgcactgcactctggagaaaatgtcaagagcagcttcaaagaaattctgacgagtaatcmacacagttggggaggggagaagttgcatgtatttttaatgaaaaaaaaaaaaaacctcatttggatatatatgtcccattgcgctcattaaagtatttattatattagtttataattatagtt

SEQ ID NO: 854179 - DNA, 549 bp, Homo sapiens
aggatagggcaccactcagagttgcaaggctcctgttccaggccctacctcctggatsacatttctagacacacccttggccagaagagaatctgttgccttgaagggtaggactcggtcctggcagcattcatcacatgctaactgaagaacccctaggccctgaataaccagtagtgatacccaagaactatgtcaagagccttaggtaagcctatgagacttcaggtgagactgagtatattacaagctgtggtgggtacaaggcaaaactccttctgcttgaaaaaagcatagggaaaagtaaaggaaacttaggcaccggcatggccacagtgggggaagggggtagagcactaaatgggctctttaggcccctgattccaagacttgactcttggatggcatttcttgacctgctgtggaccagagctgacctgaaagatcaggcagcattcaccacaagtggacttaagagaccttgggccttaagagaaaactggcagtagtctggcagtatcccagtattccccatggcctgtagtggtg

SEQ ID NO: 854180 - DNA, 622 bp, Homo sapiens
ctcagccacaggaggatagggcaccactcagagttgcaaggctcctgttccaggccctacctcctggatgacatttctagacacacccttggccagaagagaatctgttgccttgaagggtaggactcggtcctggcagcattcatcacatgctaactgaagaacccctaggccctgaataaccagtagtgatacccaagaactatgtcaagagccttaggtaagcctatgagacttcaggtgagactgagtatattacaagctgtggtgggtacaaggcaaaactccttctgcttgaaaaaagcatagggaaaagtaaaggaaacttaggcaccggcatggccacagtgggggaagggggtagagcactaaatgggctctttaggcccctgattccaagacttgactcttggatggcatttcttgacctgctgtggaccagagctgacctgaaagatcaggcagcattcaccacaagtggacttaagagaccttgggccttaagagaaaactggcagtagtctggcagtatcccagtattccccayggcctgtagtggtggtggcctttggaaaggggagggaagagtgggaaagactgtatcttgtggtttcaccgcttt

SEQ ID NO: 854181 - DNA, 345 bp, Homo sapiens; identical to SEQ ID NO: 852603

SEQ ID NO: 854182 - DNA, 613 bp, Homo sapiens
tatgatgctggcctcataaaatgagttagagaagagtctctttttttccattgtttggaatagtttctgaaggaatggtaccagttcctcyttctacctctggtagagtttggctgtgaatccatctggttctgtgctattttttttttttagtttgtaggctattaattattgcctcaatttcagaacttgttattggtagtattcagggaatcgacttcttcctggcttagtcttgggagagagtatgtgtccaggaatttacccatttcttctagattttctagtttatttgcatagaggtgtttatagtattctcttaaggtagtttgtatttctgtgggatcagtggtaatgtcccctttatcatttttattgtgtctatttgatccttctctcttttcttcttttttagtctggctagcagtctattttgttaatcttctcaaaaaaccagctcctggattcattgatttttttaagggtttttcgtgtctctatctccttcagtcctgctctgatcttagttatttcttgtcttctgttagcgtttgaatttttttgctgttgcttctctggtttttttaattgtgaagttagggtgttgatttta

SEQ ID NO: 854183 - DNA, 609 bp, Homo sapiens
gtctggaggtgcattctcactaaatgtttgctgagggaatgaggctaatcttcatagtccactgactttctgctaaaattggaaagraaaccaataatctgagaaaatgtgaagtctactcattaaattgtaaaagtaggatcagctaaatattatttgttattatgattatcaagttgatagaagaatagctaccatcaaaacacaaaataaaattacatagaaagaagaaacggcagctactgatcacatcagttaaaaaataaacatagcactgccccatccctgcattctccagcaggattatctaatacacaaaaaggcaagaaagttcaacatcttcatctgaacttaaggaagtcagactgaatgacggctaaagtgcctaccagctttaaaattctataactctatgtgggttttctaagtatctctaataacaatccaatcacctatgagttagtataaaacaaaatcacctcattcaggaatacaatcagaaaaggccatcgtggcaggccaaaaataggttcctaaatagtgttcacaccacaaagtattccccagccttacattaaactcacctcaatggagtcctcgtttaggaaa

SEQ ID NO: 854184 - DNA, 510 bp, Homo sapiens
tggtctcaagcttctgacctcaagttatttgcccrcctcagcctcccaaagtgctgagattacaggtgtgagccactgtgcccggtcagtaacattttatttcttaagaatatgggtgttggttttattattttaatttccctttgatatttgcaatatagcataataaattttgaaaataaaactagcaaaaaataaaacaaattttctgtctataaatatttaatgaaaaaatagacaaataattttgaatctctccaaagaagatacacaaataatcaaaaagcacatgaaaacatgctcagtattagtagtcagtagaaaaatgcaaatccaaaccccaataagatatcacttcacattcactaggatgactagagtagaatagacagaaaacagcaagtgttgacaaggacatggacaaattgaagggcccatacattgatgattaagaatgtaaaatagtgcagccattttgaaaaccagttggaagttcctcaaaaagtcaac

SEQ ID NO: 854185 - DNA, 510 bp, Homo sapiens
tggtctcaagcttctgacctcaagttatttgcccgcctcagcctcccaaagtgctgagattacaggtgtgagccacygtgcccggtcagtaacattttatttcttaagaatatgggtgttggttttattattttaatttccctttgatatttgcaatatagcataataaattttgaaaataaaactagcaaaaaataaaacaaattttctgtctataaatatttaatgaaaaaatagacaaataattttgaatctctccaaagaagatacacaaataatcaaaaagcacatgaaaacatgctcagtattagtagtcagtagaaaaatgcaaatccaaaccccaataagatatcacttcacattcactaggatgactagagtagaatagacagaaaacagcaagtgttgacaaggacatggacaaattgaagggcccatacattgatgattaagaatgtaaaatagtgcagccattttgaaaaccagttggaagttcctcaaaaagtcaac

SEQ ID NO: 854186 - DNA, 540 bp, Homo sapiens
tggccagcatttgggagccaaaggctaactgaggaggagggcggtggctggccaggttcaaggtgtgcagctacctctctgtgctcaaagctctggcctttcttctcagtacatccactgctttgaggccaccttccttggaggctggtcagacctcagggagataggcatgccccaatctgtcccaggacaagaggcaccatgagaccacctgaaagtattcagtgaaaagcctccctacaagacagttgccgcacgggctcgccggcagccatagcccagtaggaaaacatgtaagtaaagaaacaaacggaggagagaaggtgacagaatctgtgaattggatcatgttgctatcctgcttaaagtccttcagcgccttaccattggccttgaactaaaaatacaaatgtctgtgcagaggccacaaagccctgcatgacccagcccttscatctacacccagccttgtctcccgctgcctctgctttgctctctatctcccagtctcaccaaacttcttgcatttcatcaaacact

SEQ ID NO: 854187 - DNA, 530 bp, Homo sapiens
taccttcatatactacctccttttgctctgattctctattttaccaaacaacattwtaattaattaatttacttaaatgatgaaatatgaaatacttacttatgaaattataaaactatgaaataagtaaattaatcaggacttacctgatttttaaaaattagtaatttggagaaaaatgatattatactgttgttttaatttgcactttttttgcttgctagagagcttgcaaattagtcacacatttactagtcatttctgctgcttttattacaaattctgtgttcatgccttatgctcatttttctatctagattttagtatcattcatactgatatatttcatagcattcatatattaaaaattaatcctttgccacattaacaccagtatttttgttgcttagtatttaacttgcattaaacttactgtttaactattttatatcaagtttttgaaattttaatataaatgagtatcatttttttcttttcattttaggattttaagcttagaaaaacaattt

SEQ ID NO: 854188 - DNA, 624 bp, Homo sapiens
cctcctcccggacacctcctgacacagcctcctcctgtgtcctattggggggtcctcctcactctgcacacacccaggaactgcctctgaaccgccccctctgccgaggctctccactgctccctcagcctcctgcacacacccctaccagcccaaggttgccatcttcaccaccttccctccctttccttcttttattcattccacaaacactgggtgtctaacatgtgccagacactgttagaggtgcgagggtgacagcagtgtgcaaacaagaccaagtccctgccctcaaggtgcttgtccctggtggggaggtggccaagcctgtgatgtgggcagctgccgtgcgctggcagcttacagtgctacagggaggaacacagcgaggtgaaggggacgggctggggcatctgtgtctgagaatgagagagggacaactgcgtttcactgcgggaagaccgaccattcttcccacagatctcagtgagcytccagggaggcctcactcatgaggtgaccctgaggggagacctgcgggggtgaggcagccggcgtgtgtttatgtggggaggggatcaggcggcggggaagggggaggcaagcatgggaggtaccctgcgt

SEQ ID NO: 854189 - DNA, 623 bp, Homo sapiens
atctcagcactattcacaaaagcaaagacatggaatcaatctaaatgcccatcaacagtagactggataaagaaaatgtggtatatatacaccayggagtactgtgcaaccaaaaaaaaggacaagatcatattctttgcagcaacatggatggagttggaggccattatcctacacaaactaatgcagaaacagaaaaccaagtaccacatgttctcacttataggtgcgagctaaacactgagaacatatggacacaaagaagggagcaacagacactggggcctacttgagggtggagggtgggaaaagggagaggataaaaaaaattcctattcggtgctatgcttattacttgggtgatgaaataatatgttcactaaacccactgacatgcaatttatctttataacaaacctgtacacatacctctgaacctaaaataaaagttaaaagaaagaaagaagaagaaagtaagagaagaagatggtcagaacagaacagaacagctaactggacagaaaacttacttagaggtgcttatattttgaaaattgaatatggtgcatgatttctaaggcattagtagtaaaatttgccttcaaataatttctcaggcattg

SEQ ID NO: 854190 - DNA, 628 bp, Homo sapiens
ataaacaaaacagaaacaaaatagattcaagtaggagttaatggaactgcaagcaacacaaaagaaaatgctgctaatttccctagtgattagaaagttgctaygtcaaaagtctgatgccactatatattggttagggtagtaagccgtgattaatgcaagagtctctaggctgaggctcactgtatttggaatacaacatcaaagcctgtacatattaccagtacttaaagagcaatgcttgggagagtatttaccttctgatgtggctacagtttagactcaacactaattgctaatatttgtcatttcacagtttattgattggctggtctttcttgcttattaagatatgagttgtcaagtacttgccaataccctcagttgctgaaagttaaaaagatattccctcagaaaattgcagaaaatgcagctcccaattataaatctgggtctcattatctgaaaagtgggtctgtgatttccaatgactttactctcctacactgtgctgtttttctcagggcttttgtttgcagtgtatcacaattgtacgtgaattaaatgaccgacttaaactttctcttattttccactcctgacatttcttcataattcagtctggcta

SEQ ID NO: 854191 - DNA, 628 bp, Homo sapiens
ataaacaaaacagaaacaaaatagattcaagtaggagttaatggaactgcaagcaacacaaaagaaaatgctgctaatttccctagtgattagaaagttgctacgtcaaaagtctgatgccactatatattggttagggtagtaagccgtgattaatgcaagagtctctaggctgaggctcactgtatttggaatacaacatcaaagcctgtacatattaccagtacttaaagagcaatgcttgggagagtatttaccttctgatgtggctacagtttagactcaacactaattgctaatatttgtcatttcacagtttattgattggctggtctttcttgcttattaagatatgagttgtcaagtacttgccaataccctcagttgctgaaagttaaaaagatattccctcagaaaattgcagaaaatgcagctcccaattataaatctgggtctcattatctgaaaagtgggtctgtgatttccaatgactttactctcctacactgtgctgtttttctcagggcttttgtttgcagtgtatcacaaytgtacgtgaattaaatgaccgacttaaactttctcttattttccactcctgacatttcttcataattcagtctggcta

SEQ ID NO: 854192 - DNA, 560 bp, Homo sapiens
gatatttgccagctttcagtagtggcaaaaataatgcaccctgtgttgtcatgatgggaaagaacctggggtaatcattatgggaaatgaatgagaagagtaatcaagagaacctaaatgaaagaaagagggaaatgaataaattgaagaaaccagctgggcatccacagagatgagaaatgggaaagaaagagagaaaaggaaacaataagcagactctgccctcgagagaacggcatcctcttctaatagctctccagttttctcctttggactcagtaaggtctggctgtatttttatttctgtcttggactcattttcttagaataaatccttcatttctagagcaagtagaagttagctcttatacctacagtaaaaaacaaacaaacaaacaaacaaaaaacacctaagacatacttcagrttacacaagccgctagcaccccctattaaacctactctgtagctgtcatgcttcttcttttccactttcactagctgtttctggcttctctcagaaccaaaatgacattatttccaatatttgatcaaagcct

SEQ ID NO: 854193 - DNA, 694 bp, Homo sapiens
gggcagcactagtaattgtttgtaagtagtgtttgcatttcccagtctatctcctgatggattattcaaagtgcctcatcagagacatgttaatgagttgataaattaccacagttggaaattgtcttctactgtagtctgtccataggtgaaggtcagaatcagagatggctttctattcgttttgccaagaaaggcatattcttaattctttctgagatttaaagtggggatgggaatcaatctatttagctcaagaaacagaaaatataatttaccatctgatgcttagaataagatacttaactagaagtctggaaagaaaagagagagacaactaggaacagtgggcaagacagatgagaagagtcaaacagagatgatgataccagcaacataaaacacaaaccaaagtgaataagtaggcatgtatcaatagagctacttccaagctcaagtaaccagcatatgtcatcaatcgtagagaactagatcaaccaattaatgaaagcttttaagacacccgtctaggcaagttggcaaaattttctaaagagagctgtatgaaataaataagctctttgaaaccaatgagaacaaagacccwacgtaccaggaacacagctaaagcagtgtttacagggaaatgtatagcactaaatgcccacaggagaaagcaggaaagacctaaaat

SEQ ID NO: 854194 - DNA, 576 bp, Homo sapiens
cctcagtcttctttaaatgtatgtatatttttaaaatgaaaccaaggtcataagtgtaattaaaggtaccctaaagaaatcacattagttttgaaatgatcatgaggaatctacagcattaactttaggaaacttcttataaagccccaagaggtttcacattggttgtgtctgttgttaatatgagctatttaagtgtatttaaggagtgtagtgacaaagagacacgtggaaatagcaagatgtttctagtgtgctccaccttaaagccttgttcactttcttttttttttttcagatggagttttgttcttgttgcccaggctggaatgcaatggcgcgatctcagctcactgcaacctctgcctcctgggttcaagcgattctcctggttcagcctcctgagtagctgggattacaggaatgcgccaccacacctggctacttttgtatttttagtagagatggggtttctccacgtgcatcaggctagtctcacactccygacttcagatgatccacccgcctcggcctcccaaagtgctgggattacaggcgtgagccaccgtgcctggc

SEQ ID NO: 854195 - DNA, 551 bp, Homo sapiens
ataaataaagagctgagaacaatgcatggcgtaaagtgataggtattattatatgcttttgttggctgttgattgaaggtgttcgctgttttgggggtgtcctttaatagagtaacttggtactgtggaaatagcatgattgtgagcaaaagaatcagatggtggtggctgcagactttgctgttcccttcttgactgttggttatagccaatgcagggtaagttataaagtcaagagcagagccgttttcacaatggacattgctttgtgatgtctgtgagcttgaatgtgagaatgattattttaattctctatgtaaggactttaaagtattggctattcggtagcttgaaaactctgtaatctcaatgctttaaactgagagtggaaaatcaataaagcaaaagcatgaggccacgcagtgtaraatgagtgtcttttcaccacgtagggaaatctgtagtcctaagaaaagagggagtgagaattctggcgaaaggattgtgcctctgcacaaagtgcaggatcccagggttcagtacaggcgcga

SEQ ID NO: 854196 - DNA, 573 bp, Homo sapiens
agccaagcgtataccaaaatctacaaacactcaagtcctgcagtccaccctacagagcccacatataggaaaattcagcccttgtgtacctgggtttcatatctggcgaataatgtattttccaaacacatttggttgaaaaaaaatccatgtataagtggacccttgcagttcaaacctgtgttgttcaagtatttgttgaatgtagtagactgccaaaatagctttttacttcttgtaaggacaagagtgatgccttccaagctctttacacttcagagttgaaaccagaaggtgaacaagtttttggacactttgcttacaagtaaagttttttaaaagtagaaagagccaggctgagtggtgcatgcttatagtttcagctactggggaggctaaggtagaaggactgcttgagtgcaggagttcaaagctgtatgtgttgcactatgattgcatctgtgaataggcactgcactctagcctgagcaacatagcaagactctctcttaaaaagacaaaaaagaaacccctaaaaactgaatttttttwtaaaaaaagtggaaagtgtgg

SEQ ID NO: 854197 - DNA, 573 bp, Homo sapiens
agccaagcgtataccaaaatctacaaacactcaagtcctgcagtccaccctacagagcccacatataggaaaattcagcccttgtgtacctgggtttcatatctggcgaataatgtattttccaaacacatttggttgaaaaaaaatccatgtataagtggacccttgcagttcaaacctgtgttgttcaagtatttgttgaatgtagtagactgccaaaatagctttttacttcttgtaaggacaagagtgatgccttccaagctctttacacttcagagttgaaaccagaaggtgaacaagtttttggacactttgcttacaagtaaagttttttaaaagtagaaagagccaggctgagtggtgcatgcttatagtttcagctactggggaggctaaggtagaaggactgcttgagtgcaggagttcaaagctgtatgtgttgcactatgattgcatctgtgaataggcactgcactctagcctgagcaacatagcaagactctctcttaaaaagacaaaaaagaaacccctaaaaactgaattttttttwaaaaaaagtggaaagtgtgg

SEQ ID NO: 854198 - DNA, 600 bp, Homo sapiens
tttgggctctgttcagaaccacatggacagaaaaataagaaagagcacagatcctcaaatgttaccagaagtaaggcaaatggatggtgggggccaaaacacaatcaatgtgcactatatagagcctagggtttgtctttctcatttaccgcaaaattttacacacatttatcatttgttttttttttttttttttttctgagacagggtcccactatgctgcccaggttggactcaaacttctggactcaagggatcctcctgcctcagtctcctgagtacctgggactaaagatgtgtaccactgcacctggcttggtttacctttttatgctggcctttgtctttgacatatgtgggtttaatttttattgttcttaatgttgctaaatatgtccttctttttcttactgattattttaggacatttagccaaattctccataattctcaccacaacattaattgcttgtgcattttcttctcatgaggaaaaaatggaaataaactgtgaytcaatattgttctcaagaaagtcccaccaagttctgtgtgtgtctttctgagaaagataccttttacattagtaaaacaaatgga

SEQ ID NO: 854199 - DNA, 503 bp, Homo sapiens
aaggtgatggatccttattatcaacgaaaaatagggttacttttgtacaatggaggcagwcagggagaattcttcatggaacccaggaaatctcagtgatgtttcctagtttttccttattcagtgataaagataaaactacagtaaacgtctacaggcaagattaccaatgacttgtatattctgagtaagatttggagaatcccaccacgtaaagaaccttgaccagctgaggtactggctgattagattgggaacatggaatagaggagaaagaaaatttaaaatactgtaactttgtcactaattcagagataagtactatcgttcttactcatattttcttccttactgtttcatgtatatatttacctattctaactttccctgctttcctgttgcctttcatactttatttgcagtgagcaaagtttacaaaatagtgcataactgaaagactgtccagatggaattgcaaaagatgtagaggaagaatagacctt

SEQ ID NO: 854200 - DNA, 574 bp, Homo sapiens
  misc_feature 449: n = A,T,C or G
ttaggataaaattgtccagtaattccaaaaattgactttcttaccatccagatggcacagggcttggggtcagatttaaaatatttaaagataaaaaagaatataattacgtattcccacctaagtttgtggtctgagatttattcttgctgtaatttgactatctggttgcttaattaccagtaatctaaagcagtgactggtttactaatcaccacagtgtttccaatactgacataaggacaaaatgcatacttaggtattctgggaacagttaatctttattaactgttggtctttgaggaccaattgtgttccagcaggtgtggaaaagattattgtccccaaccatcccttctctccttcttcctttaagtcttagagcacactgcccctctgcctattatttttcttagcctgccatacagctgtatgaccatgtgaccaanttttggctaataagatatgagcagagtgaygtgagcaacgtttgctacacatccttaaaaataaaggtgcttgaatttgctgctctcttttccacttcctgtgggctagaacaggggcatggcac

SEQ ID NO: 854201 - DNA, 538 bp, Homo sapiens
agtatgcaaggagggaagtgtgctggatttactggcaaccaaagattaattaggtctgtgtgggtaagtggttgatgggacaaggtcagcctttgctctgtgtcagcttgaaaggggatgttgggagtggagtcaggaggctgtgaagggcggcctcagggtcagaatgacagcagctcggggaaggctctgggctgtgaagtaaaacaaccacaagtgtaaatgacccgaggctctgatgatgtgcagcagtgatgtgcatgcttttagactgacattcaaatgactgaaatatcacccgcctcaccagcctgatctatactaagggagagtgaactcagatcatcaaccgagggtttaacgtttactaaacagagtgttaaaaggtttctcagtccctgaggtttgaagcctttgtgacaatgtcacagcaaggtgcagttaatgtaacgcatggktggcctgtttaaaatatttacctctaaatgagcctattaaatttctaaaaatattaagtctgtaacagatacaacccttt

SEQ ID NO: 854202 - DNA, 612 bp, Homo sapiens
gctatccaaaaatttaataggttccatgaccctggaatgctcgagcagaaggatatggtagaaaggattcctacagtgtgcataagggggagaggggaacagggatataaatttagtaatctcctgacctagagcaaagcactcacatcaagatttcacattagatcttttcaccctaattgtcctgtcagatgaagaaacagacttaaaaggattaagcaacttatgcagtacctcacagaaagtgagacttgatttgaagtctgcctccagaatgtaggtatttctatttaaccacaccatcatgagttggctcagaggttcttatacactccaaaactctatgcttttattaaatttctagcaattattatataacagcaaagagttatttactattttttccaaatggaaaagctgaagtgtccattaaagctgagaggaggccaagcttatcttagccagaaattcatgctgacccttatgtatgatggtcatacctaattttctactctccaattcctaaattagctagtggttttaggaacacacctagcttaaamataactttcaatacaccaggttgctcttgcccaaagttttatatatata

SEQ ID NO: 854203 - DNA, 309 bp, Homo sapiens
agcatagtacccaataggtagtttttcaacccttgaccttctctctctcttcccccatagtagttcccagtgtctattgttgccrtctttctgtccacgaatacccagtgtttagctcccacttataagtgagaacatggagtatttggttttctatacctgcattcatttgcttaggataatggcctctagcagcatctatgttgctgcaaagaatatgatttcattgttttttatagctgcgtgtattatcttcttattcacacagttaggtgaaatctgattaatagattaataacttttaattct

SEQ ID NO: 854204 - DNA, 633 bp, Homo sapiens
tagttccccttatccttaaaatagagaagctgtacccaaggtgctgtagggtctcatcagcccttacatggtgagaatctgggacaacasagctggattcagatccaccttcaagttggcctgcagtggccccaaagatagtcaggcaatctcaggaaagaaaacattattttattgtaatttgattttaaaaccttggttgttccatttattgtaagggtagcatatgcaaactttcagaaaacactagaagaatataatagtccttaaaaaaaaccttgagtttgcagaaaaatacaaagatgcatataaagttcatctagacctagacacttaacttgttggtgtatgtcactgtaaatttttgattagacaaaatcgatttatagaagtcaatatttaaaatcttgatactttccttttgtataatcttctttcattagttaaacacaagggatactgtctacatatagaaactgtcttttaaaaaattctgattggattcagttaactaatcaaaaatgttggaaaattagttgagcattttgatgtcactatcaattgtctaattgttactaaatctgccaaataaaagtgaaaagcctattagattatgtaaccaattattcttaa

SEQ ID NO: 854205 - DNA, 503 bp, Homo sapiens
aaaattggagaaacaatgatctggtcaaataccacaggcaagttaattaaaatgagaaatttagagtgccactgcaattgatggttaaaaataccactggcctttgttgttgcaatttccattgaattatgcatatggaagccctattgcaaagcacggaagaaagagtgagaggcaagaacgtggaggcagcatggattattcttccaaggagcttgctatgaagagaaaggagagattcagtaccaaatatcaagagatgaatgaagcttctcctgcccacagaaagcttcctcttccttctcaaaattcacattatactcagaatccaaccaattctttcctacaccaatttatcatatgcagcagcaacaaattgtccatagagtggtcagtccctgcgcacacagtaacctgcaatttagcacttcactttgagctaaatacttcatggactttatgtttccttagttaagtaygattagtctcataaagacagaaac

SEQ ID NO: 854206 - DNA, 628 bp, Homo sapiens
ttctttccttgttaatgtgtaattaacaaaatcagcaaaagactcattttatgaatccatgaaagagaagttttataaatacaaatttccagcaagtacactctataaataaaaatagatttggtcttggtgaagctttgtcttataaataaaaattatgttaaacatgtataattttaaaatatgaagtgaagaaagggttcctagttttggaaattggcagcatatgcagaagatatgaacaataggtcaatgaatattggatttacagcattctttcctaaaattgagagtttctgtaatttataaattggatatttcttggctcaattctttgtactattccatttgggtaaagctgtttttcagaagaatttagaactatttttttcttgataaaaaggcaatgaaatgatttaagatttgtctgcaaaataattgcatgacacaaggttttcatggctaaaaataaagggtattgttgatttgaggagttagcyagtgacagtgatgcttaatgtgtttgttcctcatgaactcacatttctgagtaaactttgaaatatgattaatagttcagtaggtctaaaaaatgagaaattaatgaaatgagtgacagattttgttc

SEQ ID NO: 854207 - DNA, 318 bp, Homo sapiens
aaactcctgacctccagtgatctgcccaccttggcctctcaaagtactgtgattacaggtgtgagccaccatgcccarcactaggtaaaattataagtgccacttataagtgaagaactgcctgttagggaatttaaatcacttgccgaaagttacatacttctgtgaatattaaatagtctatcacactataagtctttctgactctaaggcccatgctattaccatcctttctaaaaagactgagtaagcctgggctgtatggcgaaaccgtctctacaaaaattacaaaaattagccaggcatggtggcacgtgc

SEQ ID NO: 854208 - DNA, 570 bp, Homo sapiens
gtaaggaaaatttgtacagaagttatcatagyagactaatttgtaatagcaagatactcatctgacaaaggtctaatatccagaatccacaaggaatttaaacaattttacaagaaaaaaacaaccccatcgaaaagtgggcaaaggatatgaatagacactcctcaaaagaagacatctatgcagccaacaaacatgaaaaaaagctcatcatcatcactggtcgtcagagaaatgcaaatcaaaaccacaatgagataccatctcacaccagttacaatggcgatcattaaaaggtgaggaaacaacagatgctggagaggacgtggagaaataggaacgcttttacactgttggtgggaatgtaaattagttcaaccactgtgaaagacagtgtagcaattcctcaaggatctagaaccagaaataccagttgacccagcaattccattactgggtatatacccaaaggattataaatcattctactataaagacacatgcacatgtatgtttattgcagcactattcacaatagcagacttggaaccaacccaaatgcccatagac

SEQ ID NO: 854209 - DNA, 630 bp, Homo sapiens
cctctgtgtgcatgcagacttatgcccgtgattacaaaaaggtcaggtcttacaacagtcatggcacacttttatttggygtctcatttaacacttagcctctttcccattgatcttacctgcttagcaacctcataaaagcctctatgttcgactgcacaattcagtgaaaaactgacagagcctacatttctaataataatgggtaatgaaatggtggtatatcatccgtatattataaaaggattaaaataatttatgaggccgggcgcatggctcatgcctctaatcccagcactttcagaggccgaggtgggtggatcacttgaggccaggggttccaaactagcctggccaacatagcgaaaccccgtctctactaaaaatacaaaaattggctgggcatggtggcacatgcctgtaatcccagctactcaggaggctgacccaggagaatcacttgaacctgggaggctgaggttgcagtgagctgagattgtgccactgtactccaacctggggcacagaatgagatgccttctcaaaataataataataataataataataataataataataataataatttatgaatatataggtaaatgttcaaattatgtggaggga

SEQ ID NO: 854210 - DNA, 221 bp, Homo sapiens; identical to SEQ ID NO: 825453

SEQ ID NO: 854211 - DNA, 637 bp, Homo sapiens
tcaaaaatagctgggcatggtggtgcatgcctctagtacaagcttttcaagaggccgaggcagaaagattgcttgagcccaggagttcaaggctgcaatgagttataattgcaccactgaactccagcctggatgacagagtgagatcctgtcacttaaaaaaaaaaaaaaaatttcggctgggcacgtagtccactagaataaaggctccatttcctagccttctttgcaggtaccagtatgcatgtgactaagttctagccaatgagatgttagcagaattaatatatgtaactttcaggaagtgctttatagtaatactttagggcagggccacacagcaggagggaagcagtgagcgaacaaagcttcatttgtttttacagctgctccccatcactcacattgccacctgagctccacctcctgtcagatcagcggtggcattagatttttgtaggagtgtgaaccctaatgtgaactgtgcatgtgagggatctaggtgcggctccttatgagaatccaatgcctgatgatctgtcactatctcccatcacccccggatgyggccatctagttgcaagaaaacaagctcagggctcccactgattctacattatggtggtttgtataatta

SEQ ID NO: 854212 - DNA, 530 bp, Homo sapiens
ggtgagggaaaccagatgtggaaacagctagctctgaggaatattcgaatcgaggggtgaacaaagtgctgttgaggacgtatttacgtaagggagggctggttagttcmgcctgcctagaacacttgaagattttcaatggcagtttaaaaaggcatttattgccctcaacactctctgagcggggccccagagtggggatggcttgcagaggcacgtctccacgggcataaaccatcacttctaggttgctcgtgttaatgcacgatggatgatttcactgggctcttccagtggtttcagcaacagttttaaggagaaagctggtgatgatccaaaataacataacaagcgtaagccaagtggaagggtgtgcggggcaggagccagagggccaaagccagataacatttgacatgggaagatactggaggatagatttaagcagcaccattctctgctaggaatacaatatgtctccccaaggactgatattttgtccaaattgagacacttagctttagttattt

SEQ ID NO: 854213 - DNA, 523 bp, Homo sapiens
ggtaggaggatcctttgagccgaggtgtttgaggttacagtgagctatgatcacaccactgcactccagcttaggcaacagagcaagaccttgtctcaaaacagaaacaaaaacaaaccccctccaaaactagaatgacgtatttcacttaatgtaatgtcctccaggcttatacatgctgttgcacatgacaggatctcatccctttttatagctgaatagtattccactgtgtatatataccacattttctttatccattcttccattaatgggcatttaggttgattccacatcttggctattgtgaatagtactgcaataaacatgggagtgtagatgtctctttgatattctaatttcattttctttggatatatacctagtagtgggrttgctgaatcatacagtagagctacttttaattttttgagaaacttccatactgttttccataatagctgtactgatttacattcccaccaacagtgtgtaagagtttccctttctcctcatcatcacc

SEQ ID NO: 854214 - DNA, 622 bp, Homo sapiens; identical to SEQ ID NO: 835048

SEQ ID NO: 854215 - DNA, 582 bp, Homo sapiens; identical to SEQ ID NO: 835049

SEQ ID NO: 854216 - DNA, 501 bp, Homo sapiens
ttttccttgaccagactagctcttctcctctaagccctcttcttggtaaggtatcagtcttggcctataaagacttgtacaaaaactaacatactttcttttttttttttttttaagaactttctctcctccrccatttcaaggccacatcactaggttgacattagctccttttaaagtgcctcactaagaaagctcaagaatgccaaataacttactatttgtttgagccaacacctggcagtatgccctgaccaccctttcttagaacatttactaaaaagggcttgcaactgtgactccttcctctgtctctttgagatgtacatgtatctcctacaactcaggggtgtctttctcaaggacccaaaagccatttatttgaaatacaatcaagaagaatagggcccctgtctcccagtctgtaggaagatagaatcctagtgtttgtaactatcacctaccagaaacagctggcgttaccactttgtgatgtgaacc

SEQ ID NO: 854217 - DNA, 638 bp, Homo sapiens
aaaaaagtctcttttgtaaccacttttcccagttacagtgaaaacaaagcattacttaaatttcagatactccgtacgctctataattgaattaatttggaatgcatttttaaacccacctactatctataccacttcctgtgttttttttcactgtcatcttcagactttctgttctttcaagaaattatctccacaggggactgaattatgatattctctaaaataggaactcttaacttgaggaggaggaagagggaaattatgagtccaccaactctctgcaagttttgtatgtggaaatgtgagcttttgtctgcagagaaagtcaatagcttttattattagaatttcaaaaaaatcatgacccccactggcctacagcaaacaaaaaaatctttggctaaaataatacctaaaattggggatgagagaagaaatgagatctactcgaatgattcactttaaaaagaagataaatccacacatagatttgtataatttctacctctaaagtttttkccccaaaaaatgcttaattttctttccctggtttccaggagaccttaatccttaatcccaactgaagaagcaaccaaacagaaaagatcaaagatacactggcaataaactgaagc

SEQ ID NO: 854218 - DNA, 455 bp, Homo sapiens
  misc_feature 445, 446, 447, 448, 449, 450, 451, 452, 453, 454, 455: n = A,T,C or G
tctgggttgggtgtggctgggtgtgaccagggcttctgccaggcagcccacytccgccgctgttctctctccccatattcccgagccgctttcccctcttgctccttcaggcctaagatgggaaaggacctcaccaggtgccagatgggaaggcttcattagctatcgcttgaggtagaatgaagctttgtggggcatgaggcatatgttattttgagagttttctttaagacaaagaacacaaaattctggcttatagattttaaggagagggccttggaaggagccatgtgaatgaagaacccctgaagcctaaggatgtgtttagcccttcttggcttccttaaaacctcgcccacacttgtgtgaacaagaacttcactactttccttaatacacttacttgagtgtgctatatgcttcctgtgctgggatcctgactaannnnnnnnnnn

SEQ ID NO: 854219 - DNA, 595 bp, Homo sapiens
attcagtatatgcatcagtttctagattgtagctgtcatcagtctgagmccaaaccagagcttaactcgctttgattacaaacataattggaattaaggtttacaagaagagataagatagatctaatcttcaaacaaaaggataatacatacacactcattattttctttttaatttttgtgcaccctcattattgaacagctttgatgtggtgcgcggatataacccaacagggttgaaggatacgagggattatcctgaaatcttccaaacccaaaggagcagtggtggaaaccaacatccctcccctagctgatctcacccactcacatcccagcttaggggcacagtctggcacttgtactgacatttggctccttgccagggagaacaacagccgtgccctcctcctttgtacagggacaggaacttctgctgagcttttctctgccctgtggcaatggaactggcgccttggcacatgcctccaaagcagtcacagctccgtgctccagatctttccatggtgtgagatcctttacacaggaagaaaaccttcacacccacttctgatgaaccccacaaaaatggttc

SEQ ID NO: 854220 - DNA, 598 bp, Homo sapiens
actggagtaaaacagaattcacacatcagcaagtatatagtgatgcctgttaggtgcttggcactatgcgaaaccaccatcttagtccaatggcgtgcttcgtgayatctgagtaccagacgccagaggacacgggcttcaggttggttggagaagctgaagatcatctcattgtgtaatggaattcagagcaggttctttactctgtatgtcttcccatcatctagaaagggagagttgggctctagttaatccaaggtacctcccaaggtggattgttcaaaggacaggatcggcactctgcattaacaggaaggtagaaagtacacgctggagtggagctggtggacacgcgaatcagggagcataccagtccggcttgctgggagggctttgtactgggaggagaagcaaagctgagcacactgagtttagatggcttccacaggaaacacaagacccagggcaaaggcaatgggctcaattgtttcatgctgaaacaatccttgtacaaaagcttcatggagaggggagagcccaaggtcagggaaactcggtcaggaaagccttggagcaatctgtgcaagaggtgttgagg

SEQ ID NO: 854221 - DNA, 612 bp, Homo sapiens
ttaaacattattctagatgtttctgtgaaggtatattgtaaattagattaacgtttaaatcagtggactgtgagtgaagcaygttaccctctgtaaagtggattggcttcctccaatcagtcgaaggccttagaaatagaaaaagactgaccttcccaagcaagaaggaattccgccagcagactgcctttgggctttgcagggagccagggcagaaaaggaggaaagtgtctgtgatttagtgctactgaggaaacccatgcattgacagatatgaaacactcctgggagggggtagagagcatgtggactttctgccatttcaggtaaggtcagagtcccaatggatatattgtcttgtgacttttgagtttctggttttagcctgagactgttgtagggtgtatagaggaggataaagtagaaaatgcctaaggtggtgttagaaatgcaaaatgcttgttccccagtgcagcaaagaaatagcactccaacataaatttaattttctcagcaaggcaatttttactttctgcagaaagtgtgcccttcacagatggaacaatggtgagagcatacctggacaggggaagggaaggagttattcctgat

SEQ ID NO: 854222 - DNA, 564 bp, Homo sapiens
ttgtttttctgatttcatagagttgtrtatctgttctcttgtagctcactgaattttcttaaaacaatttaaatttattgtcaagcaattcatatatctcaatttctttggatttgttactgtaatattattgtgctccttaggtgatatcatgtttccattttttgttttcttgaagtcttccatttccatccttgcatttgaagaaaatcacttcctccagtctttattgactagcttcaggagagaaatgccttcatcaatctgcctggctaggaattctgaggctctctcctacctttcctgtggattcacctgctccacaacccctgttcccacttgcagcaggggattcttaaaagttatatgccttatctcaatcccacaaagccaggccaggtgctgacagcttcctgtttgtttcccctggggtggtgtcctgaagtactcaagtttgtgtaccttgcttcaattccacaatcaagccatctgtctctatatttgatgcttgcagttgccatccaatgtggcatgcttgggaagccagcctcagggagatggggg

SEQ ID NO: 854223 - DNA, 535 bp, Homo sapiens
cacaaagccaggccaggtgctgacagcttcctgtttgtttcccctggggtggtgtcctgaagtactcaagtttgtgtaccttgcttcaattccacaatcaagccatctgtctctatatttgatgcttgcagttgccatccaatgtggcatgcttgggaagccagcctcagggagatgggggtgaggtgcacagagaatttggggtggccatgggtcatgtgggaggtccatatgcaaggtatcccagtggctggtgaggcttcctgatggagtctgtggagtgctgagtaggtttcagagcctttcttccctgctcccagcctttcccaacgcttagctatgacagtcacctcaatattttaattggagcaagaaagaggtagggttcttaggcagcatcccacacagctaggggctgagcactctcactatgctatcaccttctcccatgggagaaattgtggactgaggggagtctctcttgccactaagcygtgccaacttcaaagagtgatgcagataaagtgaaaatctt

SEQ ID NO: 854224 - DNA, 566 bp, Homo sapiens
ggctgtgggatgggctttgagtctacatgaggattctggggttgctgcttggccacacagagtgagtagggtcagaggctgtgttccacagatatatgtggacttgggcttgcctccaraactaggataggctgaaacagagtactgaggtttgatgcagttatcacccagcagctgggaaatgggggcgggggggcagattctataatacttccaagagtactcactaacctgcagttgcctcttgacttggaagagacttaacaagaccactaagacttagttggatcatctctccactgcttgggaaggtttggacaggggtagatgctggaaaagagagaaaaagaccagaagttgccctttgacctggggaagacttagcaagattagccaggttgcataaggaagctggctaggaattcaagcttgttagatctatggaccttgtttcctccaacatgatgctgttggctgttttctctggtgtggtgcctccattggctggaatgcagagcaaccatcaaaatctgcatgctggtcatcatgagacccacccttgttct

SEQ ID NO: 854225 - DNA, 642 bp, Homo sapiens
gcagttcagatgcacctaggtcccactgcaatggcagccaggcctgtcttgggtgggtgatcatcccagtccccactctctcccagctggacagacagcaagagctgcagtcacccagggcaggatgcagagccttggagagtaggtgcccagactcaccttttgctgcagttgcctcgcaccctgaagccttttgggttctcaggggttcaagtaatacctctacatattctccaggtaattccctctgccagtccaaaggtctgcaggttgtgggaacacctgtaactaggatctcaggagtctgtggcaggaatgtggtatcctgaggttccttcacttgctcctttattgggtccagtctgggtctggggtctggtcctgatgccaggcagcaccaagcaggcagtgctgcttcctcctttttcaaccacagtgtctactgtctcctctctattacatttcagtgttctctctcaaaagatctattggaagtgtgaaggaactccatattttcctctccgtggaagaagcaaattccagctttatctaygcagctttaattctgatacatattatcaaattgcttgtagctgttttaaattaaggcattgctggaggtttttagaacttagaaaaaag

SEQ ID NO: 854226 - DNA, 613 bp, Homo sapiens
ttcttataactgattatctcacattattatgctttttggtgacattttgcaatatcattattgaactttgacaatggtatctgagctgaaagaaccttctgttaattatcarctagaactgttatgcttgcagttctcattttcaatgggtgtgaggattggccaacctaaaacaatgatacaaataataggttaaagaagcaaaaacagcaaaattcaggcaaagaacattgattaatgaattttttaaaattcttaaaggtcatgtactcaagtttgactaagcctcaggcagatttaatgaacatgaccagagcctgctgtatgcagtaggtaacccaggctgactccaaatttgctgacattacagggttgttatttctggaaggatatataattctggaataatttctttagtggttccattaagactatgatttccttcaatttagggttacagatttcatttttcacattatcccacaccacaaagaaaataaaatcatgtcttggatcgagtgcctatgtcagccaaaggaaaagaaatatttaattttgatggtacttaaccccatcttatttgataagtacatctgtttttttggatcacatg

SEQ ID NO: 854227 - DNA, 636 bp, Homo sapiens
gggcacgggactagctttagggtgctgctcatgcttctgcaggtcttttatttctgtgctgtaacagcaatttacccccgagctgctccgagatctttgggagcatggctttcttccmtggtggctgtgtttgtccttgctgcaggcagaggaaacccttggctctggaaatgccatttaaggtagaggtaggaggacactggtagaccagggccaggctgagttgcccacgggactgtctcactgtaatggaggaagcttctctgaggtcagaggggagcctatagccaagccttcattacagttacaagattgaagatttataccctgtctgcttcttgaggagaccttaagcaccttccccatgaacagcagagcaaagacacaggaggctaaacagacgtggaaaggagcagaggagccgagctttcagacatgagttaactgctgattatacttgggcagtaaattcagttcagttaatcagtgtgcttgcctggtacagtcaccgactgtgtgtagcccactctgaaaacggtgtcaagtggtttagtccctcttctctgaaatcttgtggtctttgacccgtacctgtctagcctccataatcactgtatactctgttatgttgatggt

SEQ ID NO: 854228 - DNA, 619 bp, Homo sapiens
ttcatcgaaaccactcacaatatatttttttttctggagtacttaatttctcataggtaatatattaatcaggttctaagaccaaggagtataagaagatatttctttcactctggaaagtcctatcccccatctgctcagttctcagttccctccaaccaccgttttgttcatggacccttccagaatttctttatgcatatcgttatcagtccattcttggattgctgtaaagaaatacctgacattaggtaatatataaagaaaagaggtttcactgactctcggttctgcaggctgtacaggaagcataaaagcttctgcttctggagaggcctcaggaaacttccaatcatgggagaaggtaaagggggtgtgagccacttcacatggccagtgtaggaggaagagaggaggaggaggaggtgctaaatacttaaacaaccagatctcatgagaactcactattatgagaacagcaccaagggggatggtgttaaactattcataagaaatctcccccatggtccaatcacctccctccaggccccatctccracactggggattacaattcaacatgagatttgggtgggaacgcagagccaaaccacatcac

SEQ ID NO: 854229 - DNA, 611 bp, Homo sapiens
tgccagcattgtgtcttacatactttatgtgctcgatctcaattaatccttgaaacagtttgttggtcggtactgtactcacccctattttacagctacaaaaactgaggctcagagaggttaagtaatttgcctcatgttaaacaggtagcaactgaaaaaactaaggtttgaacactcatctatgcaacttcaaaatctctagtcactcagctacaagttcagactagagacattcaggactggttaaagaaagcagcccctctctcaggaagagtcaggagggcagaggagttacagcctctcaacagcaacgttggggcctgccaatgccagttcctgatgcccccctctttctcagggctggtgagtgcccagcgcccttcacctgcattggcaggattctgttctagctgtgtgtggccctctctctgcccctggagggccctccctccttcagcttgtagatagggagtggartgggtaaggaggtgttgctggagaagtggcctatatcacaagaaggtgtgggaacccctctggcgggagtcatctcatagctcttccaacctgttggtagggaatgatagaacaattccaaatctctgcac

SEQ ID NO: 854230 - DNA, 610 bp, Homo sapiens
tgccaagttgttttctacaaagaaatgtaccttccacagctgtatgtgagggcgccctgacccattgttactggtttacatttgctcgtcattctgcctcagcaaggtcctgagcctccaggtgggatccaagatagctaaaatggatggggcctgaaggtgctaaagaacccaaagggaggggctggttagcccaatagcatctgctgcttggggtcagggatcagggctgataagaaatagggtagagatggcagagacttcacccagggaaagtcagctccaatcatgtgttgcagagaccatcctttctccattaaagtagcagtaagctgtacactaggcccatgtaatgcgttatatttagtaagcagccttacttaccataaagacagccattccaagaaggggagaggctacagaggaaaaagtctgaaaagattttttcccacttaaaaaataacaattacataaacatagtaacaaccgaaaggatggaaaatcacccataatcttcccatcctaacaaatcacagtttttagttttcagtatacccttcctgtcaaggtccgtaatttttacayaactgcaatcacaaagtgtatacaa

SEQ ID NO: 854231 - DNA, 606 bp, Homo sapiens
actgttaaatttatctctaaaagatttataccagtttatactcccactaataatgtattaaagagtacctagttccccacagcctatatcaaatattgtaaatcrttgctaaatattctattcagttgagagaacataatttatttactcttcttcctgctgttaacatttagattattttcaaattttcattcttacaaaaccatcatgaacatctttctgcctaatatttgtctataagttgaatcatgattaaaataggaatcctgggtgagagggcatatttacccttgtcacttatactttccaaaggttaaactgaaatcttctgggtagatgggagttttggggcaccctgccatgtctaggggaaggtaatggacagaatgaaatagaagaggccatgtgccaaaggataaaacactagaaacgtactgccagactgttttccaaaagggtactaatttaataaccattccggtggcttaaaaacaatttaatgcagtattcaaagatattaggtaaggaagaaaagcactatccaccattaacctgcaataatgtcattcctcacagaggaccctcaacctcaataaaacacacatc

SEQ ID NO: 854232 - DNA, 380 bp, Homo sapiens
attttctctgagaggcctggcgctctgttcagcacccaacctayactttaactaacatagttctcacaacaagcccctcaggtaggtgccaatattccaactgtatacctcagaaaacacattcagagaggcttagtaacttgactaaagtcacagattaaacaaatgacacagcaatgatgttaaccacatatctgctataccacactgcctaacccagtatcacagcgatgcccctttctggtcataaacaagaaaaatcaagtactttttcggttaaagtatcttaacgtgtcaaataaccatttctccacttgttgctgtcataatttcacttccaagcacagcaccttttctccttcctgattttctccggttta

SEQ ID NO: 854233 - DNA, 622 bp, Homo sapiens
atacccttcataaaaattaactcaagattgattataaatctaaatgtaaaaccaaaactataaaactcctagaagatagtaggagaaaacctagatgacaccaaatgctggtcatgatgtggaacaacacgcaatctcattcattgctggtaggattgcaaaatggtacagccacctttgaagatagtttggcagtttcatacaaaactaaacgtactcttatcacgcaatccagcaatcatgctccttggtatttaaccaaaggagttgaaacttgtatctacacaaagacctgtacatggatttattttacaacagctttatttacaattgccaaaacttagaagcaaccaagatgtccttcagtatgtaaatggataaatcaactgtagtacaaccagacaacagaaactttttcagtgataaaaagaaacgaaatatcaagcagtgaaaagacgtggagaaaccttaagtacacattaccaaatgaaaaaagccaatctgaaaaggctacatactgtatgacttcaactctatgatactctggaaaagacaaaatcatggagacaacaaaaagatcrctaattgccagggtatggaggcaggggttgaatatatggag

SEQ ID NO: 854234 - DNA, 656 bp, Homo sapiens
tttcctccatgcttttatcatgacagtgagtgggctytcaggacatctgaacagtttaaaagtgtgacacgtctcccactccctgccaccgtgtatagaggtatttgtttctccttcaccttccgccatgattgtaagttttttgaggcttccccagctatgcagaactgtgagtcaattaaactgcttttctttataaattacccagcctcaagaagttatttatagcagtgtttaaacagactaatacaccagcataccttgttattatcagcacacaggtgaaacaaatattctattaatctatattgtaatttacttttatctgcatgagaactttataaaactagaactgtttagtacaagttgggcctctcctgctgaatatgtctgtgatgtgcacataagctgttgttttcttgtatgattttgctaattttcattgctttcaaatattgtattatatgaatgtaccaaatgtggattagcctatggattgtttcagtatgaagttcatgagtaatagtactgtggacattttcgtatttccttttaagttttttactcatatattctgcttcttcttatgtccatctgaaaatctgtgtttttcaagaatttgtcttttttcaaacatttttgacatttacacaaca

SEQ ID NO: 854235 - DNA, 631 bp, Homo sapiens
tgtatgttgtagatcatagacaaaagttaaaattaataaaaaattaacatactaatgacagtgagagaaaaatggggtaaatgtaaaaaatgttgaaaatgtcaagagttacaatctattaaatatatsaattgtctattttaaaacttcaaaatacgtcaactgaaaacaaattggatgggtttaatagcagagtagaactaacaaagactgggattagtaaacccaaagaaaagacattagaaatttccaaactatggcaaaaaaggaaaataaaaacaaacagtgttagagagctgtgtggtataattaaaaaaaaatctaacctatgagtgatggaaatataatagggaaaggagaaagataatgaacggaagcaatatttgaggaaaacaaaagggctgagaattgtccataaaaaaatgtcagaaaactctaattagatcaactttatgcataagaaaatttaaacatgccaaggacaatgttctataaaccaaagataaagaggaaatttgcaaactagatttagggaaatgcaacaaaaataaataactaaacaagaattagaaagagattagaaagtaagaatatgtagtttctgtcatcattcacatttagtgactagttt

SEQ ID NO: 854236 - DNA, 410 bp, Homo sapiens
aagaaatccttttttctcaaaattcttgcttatttcctgttcttgaccrcacctattaaagttgtaaatgctccatgttagaaatgtatgaaggtgtcctatgtttatgtttttaagtagatttttattataatcaagatcaacagtgatatgtccagatttattatagtgaaaatgaaatgtcttccagctcttgatcttttttcttcctgttttctttccttcctttcttctgtttttctttgttttcctttctttcttctgtgtttctggctctctcagaatattagatacgtttattttatacgaatttaagaacaattgtaatgatgagccttgctttctttctaaagaatagggtttgggctgtgcgtggtagctcacatttgttaccctagcacattgggagc

SEQ ID NO: 854237 - DNA, 624 bp, Homo sapiens
gtggcttctattgtcatcattatgaacattctgcctataacgtgtagaacatcagacatgtaaaataatttaaggctcatttgctaggaaagtctgttgactctgactgctagttaatgtcatgactcatttataagtgagaattgcttatttatatcattgaaagaaggcaacactttgtatgaatcctttcccagagtgaagatagggaaagtgatatgagagacagcagaaaaataagagcattgcattatctatatttctttatttaatacaacttgaagagttaggtatgttgtaaaattgaagcaatatcatgctgtctgccaagctagtcttcaaaaagattcttagggaattggctggttctagtaaaattaaacttgggaaaccatatggtctctacacttcaatgcctcaactatcactattccttttacctataatctcattttcttcacacttctttcctagctgttggcagcctagtcttctttccatctttggcttcagtatgtgctccattgcaaagcctatcctggtayctttatggacaataaatatttgtgtatacacgtatgctaaaaacaatgaacttcattacccccgaagccccttttaaac

SEQ ID NO: 854238 - DNA, 519 bp, Homo sapiens
attagaatatgagcaccttgtaagcaaataatatgttttctatatttttctgtcttaatgcatggcactattgggacttaataaactgawttgaaagagtaaatacctattaaagtccagatgttcacaccaatcctgttgtttctaatactgtacataggaaaggggcccaaagcctctccaataagagcctaggctattggcctgattgagatgccatcttattcataattcaatccttcatgcttttttttcacttatatcattttggtgggtaggggctatgtttacacatcatggtataattttttattactttaccacttagcacagaatctagaactttatagtaataaagcaaatcatttgaggcactataaagcatgttaagatattaattttacataatccttctgccttttctcttgcaatggtctttttggtctctccctatcaaacatcaatatattttttgccagatattttttcttcatcatcaaccctcctaactagtagtca

SEQ ID NO: 854239 - DNA, 569 bp, Homo sapiens
cctgtaatgttgctgttgaggaggaagtgcccatgtgatggtcagagcatgaatttttctgattggaacaactaaacaaaaatatttccagaagaacagatgtaagtgtttctctatgacttttactacaagaatgtttaaaattcaatatatttatcctccaataaacaaggaaaggttaagtacaatgcagttattgtttcaacttgccaattttccaactcgaataatgcaatttttgtaaatttcttttttatttggtttcagaggtagagaaagcagggataaaagaactatgaggatatgaaatgctgctgtgtatggatctcttcttgcaagaaaggatacaaaactaggagtcaggagacccatggctgaaattcagtcctaccactatcttgctatatgtgcttacatgacctgagaaaatcacttgcatttaaatctttttgaatctgtttactcatagtaaaatgagtkagttgggttaaagtatctctaggattcttctcaatgctattattctatgaagaggaaacctaaaaccagaaagaatacaataaaaagta

SEQ ID NO: 854240 - DNA, 627 bp, Homo sapiens
gaagaaacagaccatagtcaacactctagaagcacccagctcctacccytacctcaagaaatatcctgaatgtatagcagtaatttctctccttttctttatagttttattacctatatacctatttctaacccaatgtttatcaaccctttttatttccattttcaacccttaggagccttttcggaaatgttctcctattcattcctttgtaaaattgtaatatcacagatagtctatttatgtaatgttatgtatatccatgtttttatagagtatataaagcttacttttttagttcaatgcaagtttacagatgactaaaaacgtttcagttaaaagttaaattagaattttaaagacttggtatttaagttaatcttataatttcatctgctttttaaattaatttttaattatataaactgtgatgtatcaaattacatatacaaattaccacttatataaatacataatagcaatgcaattaaattgttaaaaattattcaaagattggtgtattggtgtttttccagcaaaatagaatgatttaaaaaattaatttcctaaaatgtttagtaaacttttttttttttttttttggatatagtgtctcactctatcact

SEQ ID NO: 854241 - DNA, 636 bp, Homo sapiens
ctatactttcatactattttcagtctttttcaacctagtgcttgtcactatccctcctggtagggcctttgcacctgcgattgcctctgcctactgtttttcctctctgttgcctaaacgcctattcatcctaatcagttcaactttgcaaaaatttttgtctgggtaatatcatactcaggctctcatagcactgcataattcttcttcacagtgcctgctacagttgcaatgttacatttgactaatgcctgtttccatgaggacagggactgtgcctcacacatagaaggaactcagtaaatatttagtgaatgaatgaatgaatgaataatataccaataaacttgctcagtggtgttaagtggcagatctgggactgtgtcccaagaggaaatgtattaggggggaggtttgaaaaatgaactccaagatcccttccatttctgagatttgtgctttctaggtgaacttctattattttccttcccttccttttcttaggctggtttgcctggccttatctatacacctccactgggtaccataaagaattaaagaccctacggrttggaaggaattagttccttcagatgttggaaacctttcctttatcagatgattcaaagagactcc

SEQ ID NO: 854242 - DNA, 545 bp, Homo sapiens
aatgaggagcatcatggaaagcgaggggcacagtgcttggctatttcatgtctagttcatgatagtttttcttcccctctgaaaggaattcttagcctttacttttacaggtcagaaccagtgatgtggttgcatcaatctgaaatggccctgaggataccacatgtttctagctcaaggtgaaagggaacattgggagagggaagagaggccagagacaaatttgaaaaaaaggataggtgccagcttcttaagacagatatggtcacgtgcttttggcaagggaattttccaaaaagagattctcggtctgtgccaaaaaagatactgatgccaatgagacacaggtgctgggatcttgtcactgaggtatcagaagctgcttacaaaatcagatatggaagaggggactttgctctctccctcactrctctttccaattctaaccatcctttcattatacccgcccacccagaagctccagagagccaaatcgtgtcatgtgctgtcacaaacccggatccctaagaggactctcaaaggga

SEQ ID NO: 854243 - DNA, 564 bp, Homo sapiens
tttgatggcctacagttgttgatgaaggagtggggaaacagggtggggacgtgtggttggtaggcctataaggcagcagcagagtctctttggagggcctttcarcaatgtctgtctatgaaaaatttaaatacaaatatcctttgatgggattcaacttaagaatttatcctgcatatattgggttaagtacttaaagatgtatgttctttataatgttgtttgtaatgtgaaaaacaaacaatctaaatgtacattgataagaaattggtaaaataaataatgatatatctatgttatagaatactacatagtggttaaaaaaatgagttagagccgtaagtgcttatatgtaaaacaagatacagagagaaaaaaaaaaaaacctcatagaaaaaaagatacattcatgtctatctttatatatgcatataaaatgtcagagagatacatatgaaactgttaatgctagtttcccctgggaagtatgactaggtaggaagaagcgagtaagactttttcttgtatgctcttctgcggtatttgaatagttaacatgtgatg

SEQ ID NO: 854244 - DNA, 631 bp, Homo sapiens
ataaccagtcaataacccctcagatgcacgctaatggcagtcacccagaacgtacatctgctgtgtttatgagacttgctttgacatagaactgccaagtctagaattattcacttcagtgctatcacagactgctccatcccagggcaggagcattggggaagttccttatttgaagaagaaaaataaaagactactcatttgcattttttagtccagcttcttttattaaaacacaaactaccggaccatgtaaaggtgttaagttctattttgaactttattgggaaactgtatgacaggctcaggtagaagtgcagctacctacaattcagactctgaaacaatcaagacaagtcacagggaatttaatggggactgggcagccacagatgggcagaggatcactgcttaggccatcggggtctcagagaacagttcagcaagaacccagaatgtaaaggtacacctccctgttacttttaaaatttctttctaataaggattataaaacaagtacctcagataacaatgcattaaaaagascaagaaatgcatttagaatgaaaaaaaaaataccactataaaagtataagtgcacaatggaaatttattctcatgttcatttgaa

SEQ ID NO: 854245 - DNA, 562 bp, Homo sapiens
gttccatttcgtgtgcttgcctagactttgcagtatgctgcaatatgacaaaacctttgtcctcaggatggtatattttatcttgagaagcatgaatcagactgaaattaaatatctcctacactgcagtattccaaaaaagtcctttccaaaataaaaaaagtttttatttcagtagataagaattcggatattgaatcataaaattttaagaactggaaacgcacttcaggggttttcttattaaatgagtcaatttgttttattattagatggctctgcttttcagaaagaaaatatcttcagaggggaaggctggttaaggttactacttctaggacaatttggaggaaaacttaagagaaaccaagcatttaggaaacatgcatatcaccatcatatgatctgataaaagacaatcagtgaagggacactctgactgaggcaatggtattggcagtacttaattacatcatggatcatacacattagctctttgaaactaatacggtagctgagagaaaatgtattttcttggrtcgaagtcagggctaggatctca

SEQ ID NO: 854246 - DNA, 191 bp, Homo sapiens
aagcaaaactttcaatagtcaaaatccccctcccctcgcctctctttctctcttgtgtttctataataacttcaytggatctgggcatctggattataggtgttcattgaaaacctcaaaataacagggtctgtttcccttctcctgggaaggccccatgtgaactccacagcccgtcttctaggatccca

SEQ ID NO: 854247 - DNA, 647 bp, Homo sapiens
cagggcgggaaattgatagaggatgaaaacacacctgcccaaggcattactatgggcagacaggcaagctaacttgcttatggcctgcatagattatatatcatgtttggacctcatgaagacattctgcatatttagaaacatgtcaggaaatttggaggtgcaaatctgaagttattttgatgtcattagaagttctacacatttgcaaaattccataatcctttataaagtgaacataaaatagtggctttcctattttcttttaaaggaacgatgcggggatttttatcttctcagggttagattcgatccaggatcaaagtgtcatatttaaaatgtttacaatcatgagtacctgtcgtgacttcctttctaattatctgtaggagatgagaatctatttcatgccttgtatgaaaagatttctgttcatagctttaaatgaccaattatttctttctgcacattttggtaattttatttcatgacttttgaacaccttttattcttgaaatttctcaccaatatttgctttgaattaagtcacasggtgctcattgtacaccccaaatcttcatttatggacccgttgtcattgtgacaatcttacccgtcgtaaaaaaattctagcaagagtcagtgtg

SEQ ID NO: 854248 - DNA, 664 bp, Homo sapiens
tgacccaaaaggctgccagtttttagtgggstctagaacaggagaaggcctgcaacaggtccaagctgctgtgcgagctactgtgccacttgggccacatgacccagcagatccaatggtgcttgagatgtcagtggcagacagggatgctgtttggagcctttggcaggctcccatgggtgaatcacagcagaggcctctaggaacaaggccctgccatcttctgcagatgactactctccttttgagagacagctcttggcctgttacagggctttggtggaaactgaatgtttgactatgagtcatcaagtcaccatgcgacctgaactgcctatcaagaactgggtgctttctgacccatctagccatagagcaggtcgtgtacagcagtattccatcatcaaattgaagtggtatatatgtgattggatttgagcaggtcctgaaggcacgaggaagtggctcaaatgcccatggtctccactcctgccaccctgccttccctcctccagcctgcatcgatggcctcatggggagtttcctatgatcagttgacagaggaagaaaagactagggtctggttcacagatggttctgcagaatatgcaggcaccacccaaaagtgaacagcggcagcactacagcccctttctaggacgtc

SEQ ID NO: 854249 - DNA, 510 bp, Homo sapiens
cttcatgtcttcgaatgcaatttatatgctcattaactcccaaatctgtatttayagcacaaattactcattgattccagattcacatattccactgcctacttgacatctccatttggaggtgttttaggcaactcaaacttaacatgtacaaaactaaactgatgttgctactcattcattgttgcctacatttccattagtgctagctctgttcctccaactactgagtccagaaatcttggcatgattgtttttgcttctatttatttcataccctatatggtggtcttaaaatatgcccactattttttatactcctcccttcaaatagtggagcctaatttcactccccttgagtgagagttggtcttattaacttgtctctaataaaaaaataaaatggaagtgaagatgtacaactttgaagactaggttgtaaatgacactgtgacttcctttttgtttctcttttctcactctgactgtgttagtatgctctggctgcca

SEQ ID NO: 854250 - DNA, 510 bp, Homo sapiens
cttcatgtcttcgaatgcaatttatatgctcattaactcccaaatctgtatttatagcacaaattactcattgattccagattcacatattccactgcctacttgacatctccatytggaggtgttttaggcaactcaaacttaacatgtacaaaactaaactgatgttgctactcattcattgttgcctacatttccattagtgctagctctgttcctccaactactgagtccagaaatcttggcatgattgtttttgcttctatttatttcataccctatatggtggtcttaaaatatgcccactattttttatactcctcccttcaaatagtggagcctaatttcactccccttgagtgagagttggtcttattaacttgtctctaataaaaaaataaaatggaagtgaagatgtacaactttgaagactaggttgtaaatgacactgtgacttcctttttgtttctcttttctcactctgactgtgttagtatgctctggctgcca

SEQ ID NO: 854251 - DNA, 444 bp, Homo sapiens
ccttgtatcccatagcttagatgtatctcttaaactcaaaagcacctgtactcttagacttggctctctaggactgatatttgtcctgtgtactgtgtccagccaagtagaaaggaggaattgtcattctctgatagccactgtataggtaacagagttctacctctgtaatattatcacatgtgcctccaataaatctttcatgcaacgtagatgtgggaacacgtaaaaggacaggaactggagatttcatgaagcttatagacgttgtatgaattggtttgtgtcatatttttgtaactgtcagtatacgtggcaaagtatggactgtgatttacyttcattgtaatatagttaaggaggctgtgaagaagtaaataaccctcttcgaattcaaacatgtcagtgactcacatacattttttaccaatgtgaacatattgt

SEQ ID NO: 854252 - DNA, 548 bp, Homo sapiens
aatgaagtgttctcttaaaggatagacaaaaagaacaacaaatatgcttccttgtcaattccaatttcracttctggaatttgttttgagaactgaaatggtgttagaatacatgttttactctgttttcattataacctgggagctgtgcactgaaaaaagtgaatggtgtagttaatccccttagggaagtggttttctagttgagaaagaaacaactctagatgaaaaatgtaagtcaacaataggatgtggtatttgtttttaaataggctggacatacaataatgagcagacaaaaattcccttacactgatgtctagaaggtggtctttggaagaagaaattctaacatgccttaagtctttatctcttgggatggaagaggaaaggccaagaataaaaatagcataatttaggagttttccgtcatatttcagatctattacaaagatcaggacagaaaattcctatgttttcttattagtattcttagaattgagactccaatataacaatattaatgaccaatattcagtagtgagtgt

SEQ ID NO: 854253 - DNA, 626 bp, Homo sapiens
ctgttttaaatgagatcatttcagacatgttatttatatctctctgtaatgtaaggaatacacatctccaccgcccccccatccctatttttttggtccttggrgctctgaaacgttttagaaaatgtattagtcttcattctcactttatttgcttgtgagagtggaaacacttctcctttctctcttctggtgttcactagagcagctgctcaaaatgagtcagctttcccagtcagctatggttcctgcctcatggagggtaggaaaggacataccatctctgtaataacatgcccaaagttgcctgcttctggtgagaaacaaggagccctgtccttgtctggaccatcatgctttcctcaacccaggtgcatccgtctcatgtagtgtgtttcatctcattttcctcattctgttctgattgaacatcaacatttttgaatgggttgttatcatcatctctgtgagcaaatgggatgtgaataccctgaggattcctactcatgaatacaaatgatttttttattctacaaaaggaagaaatatgattgctgaatattaatagccctctgagaattagaatttaagattacacaagatctgtttaatgctcttattatcca

SEQ ID NO: 854254 - DNA, 608 bp, Homo sapiens
cccactgtcattgtgtacttatctaagtctcttcataggtctctaagaacttgtgttatgaatgtgagtgctcctgtgttaggtgtatacatatttatgatagttaggtcttcttattgaatggagccctttaccattatgtaatgcccttccttatgttttttgatttttgttggtttaaagtctgttctgtctgaaattaaagtaacaatctctgctgtttttctgttctccatttgcttggtagatttttctccatcccttcactttcagcctatgggtgtcagtgtatatgagagagactgttgaagacagcatacccatgggtcttgtttctctattcatcttgccactctgtgatttttaattggggcatttagcccatttacattgaaggttagtgttaatatatgtggatttgatcctattatgtcgttagttggttattatgcagatttgtatgggaggttgctttatagtgtcactggtctctgcatttcagtgtatttttgtagtggctggtaatagtctttcctttctatgtttagcaytcccttcaagacttcttgtaaggtaggtatggaggtaacaaatttccttagcatttg

SEQ ID NO: 854255 - DNA, 605 bp, Homo sapiens
atgcagcattcccagttctctcccttttaaactcagtgtctgtgttcaccccccatccattctcaaggccttccctccaaagatctgytcagagtgcaccagtctccccgatgtccccatccctcagtggcagatgttcctcctggctgcatgtagtcagccattttgcctggcacacatttttatgtagataaaatagtcatgttttgcaaaagattcctaattcctaattgaacatgtatcagcaaagaggagaagcttatgtttggttttaagtccttttagggtaaatgcatctggaggtcacatgccaaaacatgccaaaaaccttccaagtcccttcagactttgaaactcatcaatttaaaatcaaactttgggaaaatatttctttgcaagtaaaggagcttctgcatgattccagtactttctcatccattatgttatttaatcctcaaagcaactctctaagtttggtattatacttccaattttgatatttgagttaaccaagcttatatgaaaataactaatttgaccactgtcacacggctaggaagggatttcagtctgatttgatttgaatccaaagctaagaatcattc

SEQ ID NO: 854256 - DNA, 557 bp, Homo sapiens
ttgagagctgttttggtatctctccattgtagattctggacacaatgagatgatagttaaagctcaacataaaaaggccagttgacagtacatgccgtttcccaggtgttcagtggycccaaggttctatcttatctttccctttcatgccaggtcaatgaataaggccaggggacctttggaattcacttttaagtggtatgctaggcttctttcaattctgacagtgcattgtctgctattacttctcatgttccacattcaaatggggatacaaatgaggataaattggttgaaagaaaatatagataagattaggtctgtggtaacttaagatttgcaaaataggtcaaattttcagccaagtatttagaaataaatagatttatgttgtaatgtaaaaagagctttaaacttactttatagtcagaaaaagcaacgaaaagaaatggcaattatttttaatgacaagaattttctgcacttgaaaatggaatttatcatttcagtagacagtacatgtcgtaaattacaggtagattaactcaatactctac

SEQ ID NO: 854257 - DNA, 582 bp, Homo sapiens
taagggtagccctccccaggctcctgagcaagaaaagtcaacaaggacttttagatatctccccagcaaaatcatatatttcctcttgaaaagttactgttttttgaccaggtttgcattcttctgggtctcttggtttgtaaataatagttttcgtgcatttaagcagttaatctggcaaagctaatactaatttgacatagccagggactagagaaaatgcagtagacataactgttttcctgggtaaaattttataaaactaaacattttagaaagccctactcatgtgtagatgtgggagggatggactctccctgcaggagaaaaactgtccaagtggtgaattccacattggaacaatatgatgttggcttctgattttccactccaggctttggaggtaaagctcagcatttgaccgcagttatgttgtgctacaaagggccagtacacagtaaggcctgtggamttaggaactggcaaaggaagggagatgtggttagaacactcaggagaagggttattaaagggtaaaagcagtttttgcatttgagtttttcttttcttcataacctttcg

SEQ ID NO: 854258 - DNA, 614 bp, Homo sapiens
ctctctctccaactttctctctggcccttccaccatgctatgacagyaacaagaccctcaccggatctgggccccttgaccttggacttcccaacctctggaactgtgagaaatacatttctattctttatcaattatcccatctgaggttattctgttatagcagcagaaaatggactaagataagaaacaaggaccccctggccaattcacttactgaacagtgaaaggttttatctgcattttttttttttagcacagttcatgtgaaactcagaatgagaccatattgagttaccaatgaatggctcatctagagatgactgagctgtcagcctagagatagaatgatcaagacatatgacttgacatttctatctataatattcttccttgttccagcatatatttcatgcattctgtttatctttaacatgcctcagtatatactacattactctctatctatacttaatacatcctataagttttgcctatatcgcataaggtacctgcttacttaccaactatgcccagggtttatgatggatttcattattccattttttttgtcctctacagcagaattgaatattctcaagtaatgtcataaa

SEQ ID NO: 854259 - DNA, 614 bp, Homo sapiens
ctctctctccaactttctctctggcccttccaccatgctatgacagtaacaagacmctcaccggatctgggccccttgaccttggacttcccaacctctggaactgtgagaaatacatttctattctttatcaattatcccatctgaggttattctgttatagcagcagaaaatggactaagataagaaacaaggaccccctggccaattcacttactgaacagtgaaaggttttatctgcattttttttttttagcacagttcatgtgaaactcagaatgagaccatattgagttaccaatgaatggctcatctagagatgactgagctgtcagcctagagatagaatgatcaagacatatgacttgacatttctatctataatattcttccttgttccagcatatatttcatgcattctgtttatctttaacatgcctcagtatatactacattactctctatctatacttaatacatcctataagttttgcctatatcgcataaggtacctgcttacttaccaactatgcccagggtttatgatggatttcattattccattttttttgtcctctacagcagaattgaatattctcaagtaatgtcataaa

SEQ ID NO: 854260 - DNA, 588 bp, Homo sapiens; identical to SEQ ID NO: 847751

SEQ ID NO: 854261 - DNA, 653 bp, Homo sapiens
ctactacgtaccaggttctctgccaggaaaattataaatgctacgctatcaaaattgatattgtgttagatttataggtaagagaataacaaatataatttcctcttttckatctgtgaaatatttttagagcccattgtgtactctatttcctaaaagcagccccaaaactccattaaataaaaatggctgatgtatacagacagaaggcaaagtattagcgaaaaaaatacaaaaagaagtgaaaaatggaaaagtggtaagtttatggaaaatatgattaagagacagaatatatcttttttttctcctatctttagtgtgatcatctcagaaaagcagataaaaagatttataaatggcaaatgtatacggactgactatttgagattttgatgtagtcttacagctgactgaactctaatgagttatatttcataaaaacctatgtggttcttaaggtacaacaatatgatgaggcccggtgataagaaaactgtggcaatggcctactttaaggaaataaattgtacccctgagggactcttttgtatttaataagttacagaatttctacagattatggataattatttaactggaccctaaaccagacttgtcaaatgcaatgtttttatgggaaaattgctctc

SEQ ID NO: 854262 - DNA, 593 bp, Homo sapiens
atttatctgttggttttctttcttttcccctaggttactgccttcttggcactagatgttgccttaagcccaggtttgtcttgattgtagtaaacaatcagagtgccactcatctcaaatggtgggtgtctcagaggggatatcccagtagtgtgggaaggctggctagggttcatgcccaagggatgtatggaaaaaagccatctacagtgtggtgctgctgaacagccactctgatttggcttctcctttggctgagttacagagcagagtttccarggctggggatggtagtcctatcttccccctttgtcttcggcctctgccgcctttgtcctcagggatatttcttggggatattggcctttcccctttgtcctcggggatattgctcctttcaagaactcctgatgcctcctgtgggttgaggcagggacaggtctctttccagaaaacccaagatggtagggaagctggttgttaacctcaatctcactttccagtgtagaaactgtgagttggggaaaatttttcataatctgtgccagacagattgtggagagcaatgtctcagatacggaagtttgattctc

SEQ ID NO: 854263 - DNA, 507 bp, Homo sapiens
acttttttttccaatttagagaaccgcatcctattctatgctgcttactatcaatagtggcrcaagcatcaaattttaaggttacatttttgggacccctctttcttctgttctagctgttaccttacttgtgtcacctagaaaaggaccagtccttaattttattttaaaaactgtgatcatgggaggcttaaaatgggtcataacacacatcaggttggttatttcctgggctacataccttggatagaatagcattatacaaacaagtttcttttagagtcctggtacacttataataatcataaaataataggactgtggcaatcttttgtcttacctcagtgacttgatatatatactggaaacagttctcagtctgagaaaggtcagttgaagtccttactgtacaagtctaaattttaaggaaaatgagtcctgtgatgagtttcctcatgcttcggccgtgcgtggaccagtcagcttctgggtgtgactggagcaggg

SEQ ID NO: 854264 - DNA, 448 bp, Homo sapiens
caacatagcaagacctggtctctacaagaaaaattagccaggcatggtggtacatgcctgtagtcccagctactcaggggattgatggggaatcacctgagcccaggagtttgaggctacagtgagctatgaytgcaccactgcactccatcctgggtgacattttgaggccctgtctcttcaaaaattgcatgtacaaaacaaaaaacccaaggccaggcatggtggctgatgcctataagcccagcactttgggaggccagcactttgggaggccaaggcaagtggatcacctgaggtcaggagttcaagaccagcctggccgacatggtgaaacctcatctctaccaaaggttagctgggcgtggtggcgcatgcctgtagtcccagctactgggaaggtgtggaggctgcagtgagttgagatcgcgccactgcactccagcct

SEQ ID NO: 854265 - DNA, 572 bp, Homo sapiens
  misc_feature 312: n = A,T,C or G
gaagtccgaatcactaacatgatggtatttgaaggtagtgcctttgaaagttaattatggccaggtgcggtggctcaygcctataatcccagcactttgggaggccaaggcgggaggatcacgaggtcaggagttcaagatcagcctggccaacatggtgaaacccatctctactgaaaatacaaaaattagctgggcatggtggcaccacctgtaatcccagctactcagaaggctgaggcaggagaattgcttgaacctgggaggcagaagttgcagtgagctgagatcacacactgcactctagcctgngtgacagagcaagactctgtctcaaaaaaaaaaaaaaagttaattacatttacatgaggtcatgagggtgaggcccccacgatggatatgctcttacaaaaagagaaacagacactggaactttctctctctctctccatgcacacactccaaggaaagaccatgtgaagatacagcaagaagacagccttctgcaaactaggaagaaggccctcaccagaacctgaacatgctgacatcctgatcttggacttcacagc

SEQ ID NO: 854266 - DNA, 544 bp, Homo sapiens
cactgaacgaagttgaatgtgctcccattctacctcttttttctcatgaaacttgcaagactttggacaaacacacacacacatacacatacaaagttttttttaaaaaaaacttcaaaaataatctgtctcattgatctttcataaacgtttttactacctctgccttttatttcttatttcacacattgttactttatattctatttcagaatcaaaatttcttgagtgttttgttttagtttctgctggcattccctaacactagcttgtttgtctggatgttgataactgtagattgtgagctgatattttactagtgatcccatggtcaaaatcactctctcagaatctaattcagaaaatactactgcatgcccaggaaattaaaaattaataacactttttggtgtaaagcaggaataagttcaactgttattttttgttcaacatcaactctytgaatgatgatgtttaactctgaatcttgctgtgcatagtatgcagaaacagcagtctagtctccttttgattaatgaaaaag

SEQ ID NO: 854267 - DNA, 583 bp, Homo sapiens
gaaacatcttcttgcacaaatattgcagtggtgctgactgagtccctccctttcctctctgggccccacattctattcaggtgcgtggagaatcctgggarcctgcacacaggtgctgggcaacacctggcccgagaaacgtttcatttcacattgatatgtaacatggcctggctttaccatgtcaaattccatttagttttgtttaaagataaaatgtaaacatgcccagaagagttctcttttttcccttattggaaacagatgaaaggacttgatggcgtggggggaggcaagggaggcatcttttgtgattcaattatatagatgcagtgacaataggcttttctctagaggagtacattgtgtgcacaggcatttacttagtagtaaatgaatttaattaaattggactgcttgagctcccagagtttcaagagaaaatttgttggctcctttgcttcaaaattcttctgcagcaacattttggaaaaagcattttacttaagtagagtgttatgggataaactgcatctccccacaacaccccaaaattcatatgttgaagtcctaatctccaata

SEQ ID NO: 854268 - DNA, 619 bp, Homo sapiens
ttcatctctagtttctgccttgcttatttgtatggttttggggaagacaataaaggaaggaaattgagggttggttgctttcattttagattcaactaacatttattgaacatctagacgccatgccatgaactctcattattaacctgtaaagtgagtatttatattttaagatgactaaagtgaggctcacagacattaaaagccttgttcataacagaactgaaatgagttacagacatttttttacccaaagttgtagatttttatatccactgtatattgcaatgtgaaaatggtaacatcttgcatttatataaagctctgttatgtataaaacaacctttccttttgaaaatcttgccatttggaactcagatatagttcttttttttccttttttttttttaaaaagctaattattggttctcaaactaaagatgacaaaatctagtctgtgaaaatcagtcaaaaaccaaagaccmcttaagagacgtacccgggattcaaaccagttcatttggctgcaaaccattcccagcccaccacaccccagggtgagaacctttacctcttgtatccaacctcagccactttcctggtaaagtgtgtgcttggt

SEQ ID NO: 854269 - DNA, 563 bp, Homo sapiens
ttctgattttgttcatttcaaaccttgttttttcctgctgctgaacactcctaaagctggctgccatgttcataactcatttgacttatgccttacatcttcatatcacaatattgtggggtggrtcatcacagaggaagacaggcatttccttgaaaccatttctgttcctagacagctagtaatacatggaagcgactgcaagccacgtgactgtatctcactcacacaaatgacatatctttaaattaacttccccttctccaggtcttaaaaatgcccacggccaccccattgccttctgacaagaagaaagatgtaacagagggaaagtagaaatgaaaagagacagggatgtcaactgattgtggttaagatatttttcttttgcaaactttacaaactcttatgactttgtcaatgcattactgtccaagtaaggggcctacaccttaagcttcatgagctccatggcaatccacctctgggggaacaggaagatactcctgccctactgttaggtcattgagggaaaaggaggtctggagcataggatttgtttg

SEQ ID NO: 854270 - DNA, 647 bp, Homo sapiens
tgtttacacttttcatcattaagattctgtgtatatatacactatgtatgtatataaatacatatgtatttcctttttgttattgcagtgatagatatgtttatatattcatgctcttgtatatatacttaytatatttatatatttatattatatttctatgtatgtattaattctattgatatattttaaactgtaaattcatatttttcattgctaatatagagaaaacaactatattttgtatatactaaacttacttagcagttctacaaactttatttgatacagttttggggattttctacatagacaatcatgttacattcaaataaagacagttgtatttcttcctttccgatcagtgagattttgttttataaagcctttttcttgtagagtttatgtccgtaaagttgtccataatatttccttattatctttttaatgtttctaaaatcagtagtgatgtctcttttacttctgcttcagttaacgagagttttctatttatgtttcatacccctccctggaaaaccaaagggaaaaaaaaacaacatcattgccaaattttttccctgtgttttcaaccaaagattctttagtgctatagcagaagttaaatttgcttatacaataaaatattg

SEQ ID NO: 854271 - DNA, 598 bp, Homo sapiens
ttttatataacaatcctcttgaaacaattgttatagagctggcctatattctctcatgttttcaagatattcctaggacatttcaaggtatagataatgataatgtgattatttcaaaccatatttttcatgaataataattcttggtaatttattcatgataatgataataatatttattcatgataatgatgataattcatgataatgataattataataaaatcaattgaaataaattatgccctctcttagggctttcttttagtacataatccataattgcaaataaaataaagggctgcgtatttgtgtgttaaaggacctgaagcttttatatttgtgggactctttttaataaataaactcatctattaaaagttaggtaaaatgatgaatacatacttagaagataaaacaaagcacaaatgtttcaaggttaacaaataacacagcacccagaaaaacaaagaagccaatgtttagggtaactgcctgtccataccagtaatcctttctttctagacaagattcattagtttcaaactctaatcacaaaatatwctgtcataacagtaatcaggatatcgacacaaat

SEQ ID NO: 854272 - DNA, 654 bp, Homo sapiens
tgtgtgtgaatgtgtcttgctgtacaccagcatgcagaaagtgagactgtggccacctggattgctcacatgaaaaattccctcagagtgtggtggtggtggtggtatagttgttggtgtgtgtgtgtgtgtgtgtgacagagagagagagtgtgtgtttatggtagttctaaggggttggagaggcttgtaagtgcattgataggcttgccataataaagaagaagagtgtaacagctttaaaataattccctggtgtagagatgatgcgatttactaaaatcatcaaaatcttagtaatgtattaataatattgctttgtttttcttaaaatttgaatgtagaaatattctctatgcttttgaataaaatccaactttactgaacaatacattgtaatcaaaatattgacacattattattaaaaatgtcatctcgatgtaaaggtgatttcaatgactggttcaataaataatcaataaaatgtgctattgggggaacccacccccaatatttccatgtaggttctttctattktccataagtgtcagccagctgagaaataaagagagacagtataaagagaggaattttacagctgggccaccaagagtgacatcacatattggtaggactgtgatgtctgcctgagtc

SEQ ID NO: 854273 - DNA, 599 bp, Homo sapiens
ttgttggtgtgtgtgtgtgtgtgtgtgacagagagagagagtgtgtgtttatggtagttctaaggggttggagaggcttgtaagtgcattgataggcttgccataataaagaagaagagtgtaacagctttaaaataattccctggtgtagagatgatgcgatttactaaaatcatcaaaatcttagtaatgtattaataatattgctttgtttttcttaaaatttgaatgtagaaatattctctatgcttttgaataaaatccaactttactgaacaatacattgtaatcaaaatattgacacattattattaaaaatgtcatctcgatgtaaaggtgatttcaatgactggttcaataaataatcaataaaatgtgctattgggggaacccacccccaatatttccatgtaggttctttctattttccataagtgtcagccagctgagaaataaagagagacagtataaagagaggaattttacagctgggccaccaagagtgacatcacatattggtaggacygtgatgtctgcctgagtctcagaccagcaagtttttattaagggtttcaaaaggggagggggtgaaagaacag

SEQ ID NO: 854274 - DNA, 505 bp, Homo sapiens
cgcacacacacacacgtgctacatacacatgtgggtgaggatgtagcatgacaatatacaaaaataaactaggtaggtttttaaaaattatttccttctgtcttttccttcactattcaagcagaaagaagagcttaccatgtacagtgaacacgagaagagataatacaaaagaataaaggtccaatttgctggattttaaaatttcagatagattatgaaaatatctagtggaagtaatgaacttgaaagttggaacttttattttcaataaataagcatttaagaaaaaaaagtttgtttttattttcttattccaaacattcagttttaaatattaaaaatattgaaagttcaaggcataagtttataactaaaacsactatttttttttattatactccaaattctagggtacatgtgcacaccattccagtttgttacataggtatatatttgccatgttggtgcgctgcacccatcaactcgtcatttacatcaggta

SEQ ID NO: 854275 - DNA, 644 bp, Homo sapiens
tcgcagtgagcaggaataagaaatcaataacagaaacaggtaagaagaaaaggaggggtgttgttcagtccatcactgctgtaacaacagcatgtcaatcactccrggaagttctgagaaacatataaaatgtctctcaggattgtccgcttgaagactgacaaggagtaacatccatcagttctctattggttgaggattgtgtcagatgttaactcctgcactctcgggtcctgcatgtgtgcaggcttctcctggcatcccaggccacagaatcagaagagcctcatgcaacatttggtgtgtgtgactggggtgagatgctgccagaatgaagtgagtcaaagcctacaaagagcatttccctgcagtgacggctggagtcaggtaaatgagagaggatagaagtgcacaaggagcacctgatacagagggaagagaatatagagaagaaaagtcagaatgaaaaaaaggggagaatctagacctagatgcaggaaaatccataaaggtggacaaagaacgtgtctatgaacaatgatacctatcacatttaaagttccatgcgtgatcccagtgtaaaccacttttctatatgcttcaaaagcctccaatcaagtctgtgaagccaatgttaatgaaac

SEQ ID NO: 854276 - DNA, 644 bp, Homo sapiens
tcgcagtgagcaggaataagaaatcaataacagaaacaggtaagaagaaaaggaggggtgttgttcagtccatcactgctgtaacaacagcatgtcaatcactccgggaagttctgagaaacatataaaatgyctctcaggattgtccgcttgaagactgacaaggagtaacatccatcagttctctattggttgaggattgtgtcagatgttaactcctgcactctcgggtcctgcatgtgtgcaggcttctcctggcatcccaggccacagaatcagaagagcctcatgcaacatttggtgtgtgtgactggggtgagatgctgccagaatgaagtgagtcaaagcctacaaagagcatttccctgcagtgacggctggagtcaggtaaatgagagaggatagaagtgcacaaggagcacctgatacagagggaagagaatatagagaagaaaagtcagaatgaaaaaaaggggagaatctagacctagatgcaggaaaatccataaaggtggacaaagaacgtgtctatgaacaatgatacctatcacatttaaagttccatgcgtgatcccagtgtaaaccacttttctatatgcttcaaaagcctccaatcaagtctgtgaagccaatgttaatgaaac

SEQ ID NO: 854277 - DNA, 658 bp, Homo sapiens
gttatcagtgctcaaatgtaataagaattattaaaatgtttattactgaatttttttwaatctactcagaaagttctaccagctgacctcccacacagtatgagtattccacacgtcatgattcattcacctatttccatgtaactggaaagttttctctgttcaccaatgtttaagaaaatcctattcatgtactaagacctgagtcacatcccactttttccaaaaggcatttccagctcctccaacacaaaatgtaccttctatgtttctccggtctcctgttaaagttatcttcctttcaactctggttgaatcatgttttatttctcccttaatagcaggagcaatgacttgtacttctctcacatctcacctttctcacaaactcctaaaacatttagcatgttacccaatacgtgtttgaaattcctttatttggttgcgttcttagaacacaggaccaagagagattcaaattctttgattgattatgaagacaagagcatggcctttgaagaatttttaagagcacacagctcaggttttgactataacttcaggaccctcatattttgtaaaatgacaccatatttaaggcatacgtctaattagaagtaagccaatgagtagaccatttgtcattgactttataaac

SEQ ID NO: 854278 - DNA, 635 bp, Homo sapiens
tgtgcttgtctttactccttaaatttcttccttgacatgtatatttatagctgttcttttgcataataacatactctgcttgtttgagtttgatgtgtctcctttaaatatatgatgaatgtagcttctctgtgtgctacatgaagaatatgtctcaccagcacaggaataatacacttaagatgcattaatgaaactaggtttaaaagccattcttcatttcataccatccagcatcttcttttaaaaaagagtaagtttattattcaaagccatatttaaccagaagaatttccaccagttagccattctttcacagagcagaaatgcaaattgtatgctgcttatagtctaagtgcaactgtcttattgaacattttaacagattgtaacaatgctatgattatagagaatctattatgagaagttttctaagttacaggccaagaattgcattgaatttcagtcaaaaatggtacatgttgaattgtaattattaatrgagtcttcccaccatttcaaaaagagagaacacaacagctcaatggttctcttttctttgttttgcattcccttagacagtttaagtgaccacgatggaatctcttgttaatttttgtccaaacttattttgc

SEQ ID NO: 854279 - DNA, 617 bp, Homo sapiens
attatatttcataatatcaagtttttatacstctaaatttaacagtctccccaaaattaaatttcagtttcaaaattgtctctcctgatgcctagcttttggttgtgacagagggcctctggagcatccagaaaagaggtaaacaggattatttaacatgtttagatacaagggattgccacagtgatgtgtaatcttcttcagtttttatttcggtaaataatattaatatatgttccaaaatcatatgggatatctaatgttctaatgtctgaacatatgctgtcaatgataattaggtttattatgttaagctattgtaactacagaaataaccaaatgtcttcaccaatcatattcttgcctgtaacaaccctggaaattttgtcatttacagacaactgttgtcttgttttaattctcttcaaaagatggtttatgatcaactgtaggactttaacaagtgctctcaaatgcagttttctgataaaagaaaaatgtacacaactcacgaaaagctgaagtggttatgaatatcaagcagaataagagttaaagaaatagactgagctgataggaaactgaagtaattgttctaaattttttgcttaaaacat

SEQ ID NO: 854280 - DNA, 617 bp, Homo sapiens
attatatttcataatatcaagtttttatacgtctaaatttaacagtctccccaaaattaaatttcagtttcaaaattgtctctcctgatgcctagcttttggttgtgacagagggcctctggagcatccagaaaagaggtaaacaggattatttaacatgtttagatacaagggattgccacagtgatgtgtaatcttcttcagtttttatttcggtaaataatattaatatatgttccaaaatcatatgggatatctaatgttctaatgtctgaacatatgctgtcaatgataattaggtttattatgttaagctattgtaactacagaaataaccaaatgtcttcaccaatcatattcttgcctgtaacaaccctggaaattttgtcatttacagacaactgttgtcttgttttaattctcttcaaaagatggtttatgatcaactgtaggactttaacaagtgctctcaaatgcagttttctgataaaagaaaaatgtacacaactcacgaaaagctgaagtggttatgaatatcaagcagaataagagttaaagaaatagactgagctrataggaaactgaagtaattgttctaaattttttgcttaaaacat

SEQ ID NO: 854281 - DNA, 539 bp, Homo sapiens
atgtgaaacccaaaagtataaaaagcctggaagacaacctagacaataccattcaggatgtagacacgaacaaaaatttcatgatgaagacattaaaagcaattgcaacaaaagcaaaaattaacaaatgggatctggccgggcatggtggctcacgcctgtaatctcagcactttgggaggctgaggcgggtggatcacaagttcaggagattgagaccatccttgctaacagggtgaaaccccatctctactaaaaaatacaaaaaaaaaaattagccggatgtggtggtgggcgcctctagtcccagctattcgggaggctgaggcaggatagtggtgtgaaccagggaggtggagcttgcagtgagccgagatcgcaccactgcactccagcctgggtgacagagcgagactccatctcaaaaaacaaacaaaaaacaaaacaaaacaaaacaaatggcatctaattaaactaaagaacttctgcacaacaaaataaactaccaacmgagtaaatgcgcaacctacaaaatggga

SEQ ID NO: 854282 - DNA, 600 bp, Homo sapiens
ttctttcttcctcagcttgcagacggcctatcatgggacttcaccttgtgatcaagtaagccaattctccctaatagactccctttcatatatayatatatccttttagttctgtccctctggagaaccctaatacagtacgcatatgtttaactttattagaaattgccaagcagttttccaaaatattggtaccattttataattccaccagcaatgttacaggagtttcagtgtctccatatccttaccaacatttggtgttttcagctttttaaaatttagctatctatactagtgggtgggaaacaatattatcattgtagctttaatttgcattttcctgatgattaaagatgctgaacacttttaaatatgtgttttatgtattttttattatagtatgttcccaattttaaaaattagacttttattaactcgtatgattttttgtgttttctggatgtgtgttatatgtgcgtgtgtatgtttgtggcttgaattttccttttcttaacactttttttagaagcatggacatttttaattttgatgaggtctaatttattatttttttattttatgattagtgatatttat

SEQ ID NO: 854283 - DNA, 600 bp, Homo sapiens
ttctttcttcctcagcttgcagacggcctatcatgggacttcaccttgtgatcaagtaagccaattctccctaatagactccctttcatatatatatatatcctwttagttctgtccctctggagaaccctaatacagtacgcatatgtttaactttattagaaattgccaagcagttttccaaaatattggtaccattttataattccaccagcaatgttacaggagtttcagtgtctccatatccttaccaacatttggtgttttcagctttttaaaatttagctatctatactagtgggtgggaaacaatattatcattgtagctttaatttgcattttcctgatgattaaagatgctgaacacttttaaatatgtgttttatgtattttttattatagtatgttcccaattttaaaaattagacttttattaactcgtatgattttttgtgttttctggatgtgtgttatatgtgcgtgtgtatgtttgtggcttgaattttccttttcttaacactttttttagaagcatggacatttttaattttgatgaggtctaatttattatttttttattttatgattagtgatatttat

SEQ ID NO: 854284 - DNA, 566 bp, Homo sapiens
tcttccacaatggttgaactaatttacactcccaccaacagtgtaaaagcattcctatttctccacaacctctccagcatctgttgtttcctgactctttaatgattgccattctaactggcataagatggtatctcattgtggttttgatttgcatttctctaatgaccagtgatgttgagctttttttcatatgtttgttggctgtataaatgtcttcttttgagaagtgtctgttcatatcttttgcccactttttgatgcagttgtttgtttttttcttgtaaatttgtttaagttccttgtacattctggatattaacccatgtcagatggatagattgcaaaaattttctcccattctataggttggctgtttactatgatgataatttcttttgctgtgcagaatctctttagtttaactccatcccatttgtcaatattggcttttttttttgccattgcttttggtgttttaatcatgaagtctttgcccatgcctatatcctgaatggtrttccctaggttttcttctagggttttcatggttttaggtcttacac

SEQ ID NO: 854285 - DNA, 613 bp, Homo sapiens
tgcctgggctcaatcgcccaatacctgagattttattggaagccttttttgcttctccttggtkcctgcatttaattaacactttaacagctgtggatcaacaggagattgtctctgcctggcacagctgccaaattatcatttttagagaagcagtatgataattgtccagccaccacctgacattcctactgggtcggcgagaagagccctctcctgccttgctcatgccggtctaactacctgtaacatttccctcctcaagagcccaagaccacaaatctttgaggaaaaatggatgaagatcagtcttctgtaactgctttctgctgacagaggggtggtgttggttctgtgagtattggcctcttgctagctctcagggcaggagggtgactctttgggtggtaaaagcagtatctatccaggtccaagggagacaggggcaggattttgccttcttcctgtcccactgatggacattctaggggtcccctttagaagcctgcctcttgggtattgagagaacagtatctctcactgaggatttttatacttatattctttctgatagtcatagttactgaaagtataattggccaggcatggtggc

SEQ ID NO: 854286 - DNA, 628 bp, Homo sapiens
actgccattgaatctgtaaattgctttgagcagtatgaccatttaaatgatattgattcttcctatccatccataagcatggaatgtatttccatttgtttgtgtcatctctgatttctttgagcagtgttttgtagttttcattgtagagatctttcacctccctggtttgctatacttgtaggctttattctttttgtgtcagttatgaatgagattgtgttcctgatttggctctcggtttgactgttgttgctgtataggaatgctagcaatttctgtacattggttttgtatcctgaaatgttgctgaagttgtttatcagcgtaagaacttttagaccgagactatagggttttctagatgtagaatcatgtggtctgcaaacagggatagtttgactacctcttgttccattgggatgccctttgtttctttctcattcctgattgctctggtcaggacttccaatactaagttgaataggagtggtgagagagggcatcsttgtgccagttttcaaggggaatgcttccagcttttgcccattcaatatgaggttgtctaggggtttctcacaaatggcttttattattttgagctctatataaccttatttgaattgtt

SEQ ID NO: 854287 - DNA, 564 bp, Homo sapiens
cacctacactatgagcaacatgtggcagagtccatgtcctgacccctctgtggtcacagaacttrgtatgtaacatccctatgcaactaatgcaccagcctgtggattcattcattcattccccagacctgctatgcacatcttctcttttacaaggtggttttggcttatcaacattaaataacatggcagcaatacgttagaatgtcagtagatatcactgagtttcgttcctttgtcttcttttctgaaacctactgatgctgtagggctttgcagaagctaagctagcacgatggtgtggagacagtcatcaacaaatattaattggttgattgttagaaaaggaacaatagggaagacccacctgttttgttcctggggttcttggtgtggctattgattttagcccttaaattttccatcactgggaatgagtgagttatccttggtttgatgacaaatggagacaatatggcaaagcatgttaaataaagtcaactttttaaaaggtttagagcttgagcattgattttggtcattgtgatctcatcccagaatatt

SEQ ID NO: 854288 - DNA, 600 bp, Homo sapiens
acattttatttgacagtctatgatagatttcctatgagtggctaatcttcaattccttccatgtctaacttctaagatattgaagttccrttgtttccttcaaaatgaatcaaagtattttatattattctttactcatcagggtacaatagcaaacatcttttatgctgtgcaaaaaaatctgtgctttaatttattataaaaaaagtctgtagtgaaatgtacgggagaagaatgtatccataagatccagatttctgggggaaaaaaagcttttagagaaatttctgttggttgaaggaagattaactctaggtggaagaacaggtaaaaggagatcagcaatgttatggtaatgacaggaggaaacgggggttggggaagagggacagattaaagaacacagaggcagaaaacgtagttaagtaaaatgcctggctaagtaagaacatctctttggtagaagggaacttatcttgtgacttcttagagttcataactttagagaaatgaagagaataaaaaattcagaaattaaaatgaaattataatataaggtggtgccaaacttaatcatcataaatcataatgtcatttggt

SEQ ID NO: 854289 - DNA, 632 bp, Homo sapiens
tgttgaatcctctctgcatccttagaataaaacccacttgattgagatgaataatcattttgataygctgttggatttggtttgctagtatttcattgaggatttttgcttttctgttcgcagggatattgccctgtagttttttgtttttgttgtatcctcacctgattttggtgtcaagctgatgctaattttgtagaatgaattagggagaaatacttctccttaattttttgaaatagtttcagtaagattggcaccagctgttctttgtaaacttggtaagattcagctgtgaatccatccgatttggggcttttttgttttaattttttattattgattcaatttcattactcgttattggtctgttttgaatttctctttcttcctatttcaatcttgggatgttgtatgtttctagaaatttatccatttcctctaggttttctagtttgtgcacatagagatgaatctcaaataatcttttgcctttttgtggtatcagttatgtcacatttattatttctgattgtgcttatttgaatgttctctccctttttcttggttaacctagctaatggtttattgattttgtttatcctttcaaagaaaacatttttcattttgtt

SEQ ID NO: 854290 - DNA, 632 bp, Homo sapiens
tgttgaatcctctctgcatccttagaataaaacccacttgattgagatgaataatcattttgatacgctgttggatttggtttgctagtatttcattgaggatttttgcttttctgttcgcagggatattgccctgtagttttttgtttttgttgtatcctcacctgattttggtgtcaagctgatgctaattttgtagaatgaattagggagaaatacttctccttaattttttgaaatagtttcagtaagattggcaccagctgttctttgtaaacttggtaagattcagctgtgaatccatccgatttggggcttttttgttttaattttttattattgattcaatttcattactcgttattggtctgttttgaatttctctttcttcctatttcaatcttgggatgttgtatgtttctagaaatttatccatttcctctaggttttctagtttgtgcacatagagatgaatctcaaataatcttttgcctttttgtggtatcagttatgtcacatttattatttctgattgtgcttatttgartgttctctccctttttcttggttaacctagctaatggtttattgattttgtttatcctttcaaagaaaacatttttcattttgtt

SEQ ID NO: 854291 - DNA, 526 bp, Homo sapiens
atttatgaagcttagctgggcagggtatgcgtttcttggatgacatttattttttctttaagggggcaaaaaataggtccccattctcttccrgcttggaagatttattttgagatgtctgctgttactttgaagttatttcctgtatagataattttatgcttcactctagctgactttaagatttgttcttttacattgaacttggatagtctgctggctgtatgcattggtggtgttagtcttgtataatatcttacatgtattctctgaatttattttattgtattagttgtctacatctctagtaagtctgaaaaaatttcccctaattattccctcaaatatacttctaatctttttactttttctttttctccctcaggaatgccgataagtcttcagtttggttggctttacataatcctgtatttcttcaaggctttgttcatttttaaaaaatcttttttttttttttttttttttggtctgggatagttcaaaacgctagtcttttagctctgaa

SEQ ID NO: 854292 - DNA, 526 bp, Homo sapiens
atttatgaagcttagctgggcagggtatgcgtttcttggatgacatttattttttctttaagggggcaaaaaataggtccccattctcttccagcttggaagatttattttgagatgtctgctgttactttgaagttatttcctgtatagataattttatgcttcactctagctgactttaagatttgttcttttacattgaacttggatagtctgctggctgtatgcattggtggtgttagtcttgtataatatcttacatgtattctctgaatttattttattgtattagttgtctacatctctagtaagtctgaaaaaatttcccctaattattccctcaaatatacttctaatctttttactttttctttttctccctcaggaatgccrataagtcttcagtttggttggctttacataatcctgtatttcttcaaggctttgttcatttttaaaaaatcttttttttttttttttttttttggtctgggatagttcaaaacgctagtcttttagctctgaa

SEQ ID NO: 854293 - DNA, 639 bp, Homo sapiens
tcaaaaaaataaataaataacaactacaacaacaaaattcctaagtgctcactatgcaaaacttgttacaatttggtgctcaacaactgtcagggaacaatagtttctttaacaaaattgtagaaggatgaccaacaaggagaggcagccactcgaaagggagcagggaagcaagagattagatcacactcccttcccgggcttttgaacacagaaagaaggcagctggaggctttggagacggcggtgcagcaggagagggccagggagattttggaaggctgtgcactgctctattggaccttcctgcaagctttcacctcctcagggatgtacaatatccaaagtatggctggggaaagggcacaatgattgagacctgcttaggcagagcagaaatgcaacctgggcacacacatagaagcagagtgcatacaaaaataagattaaagggttcagagaaactctgggggtagcttaattttcaaagctatggaagaggcgcttaatgctaaatgtttccaaatcttgaagtagctgggaatcttaagtkttgtgtgtttttttcacataggattttcatactaaaatgcaatacctaaatatgtgttagattaaaccatgctttataattgaatt

SEQ ID NO: 854294 - DNA, 639 bp, Homo sapiens
tcaaaaaaataaataaataacaactacaacaacaaaattcctaagtgctcactatgcaaaacttgttacaatttggtgctcaacaactgtcagggaacaatagtttctttaacaaaattgtagaaggatgaccaacaaggagaggcagccactcgaaagggagcagggaagcaagagattagatcacactcccttcccgggcttttgaacacagaaagaaggcagctggaggctttggagacggcggtgcagcaggagagggccagggagattttggaaggctgtgcactgctctattggaccttcctgcaagctttcacctcctcagggatgtacaatatccaaagtatggctggggaaagggcacaatgattgagacctgcttaggcagagcagaaatgcaacctgggcacacacatagaagcagagtgcatacaaaaataagattaaagggttcagagaaactctgggggtagcttaattttcaaagctatggaagaggcgcttaatgctaaatgtttccaaatcttgaagtagctgggaatcttaagtgttgtgtgtttttttcacataggattttcatastaaaatgcaatacctaaatatgtgttagattaaaccatgctttataattgaatt

SEQ ID NO: 854295 - DNA, 577 bp, Homo sapiens
attaaatatgaggatataatctgatatttaattatattactttctaaaacataaataaaatatgagttttttagagttaatatttaaatataatgaaaataaaatatttatttagttatttagtaatttttagttaaaagatactttgacatcaaatctaactatttttatatgaggtggaaaaaactgaagactcaacaaggtcatgtgctttgtccaaggtgaacaaataaaaattgatttaatatgatctcattaattttgtaaatgaatctttttttaagcaaatgacatataagaaatactggatgaataatgagtttagagaattgttattctctctagaatgtgtttgtgtatgtatgtgtttctgcatatatacatttttaaattgtattcatacatatggatataatttaaaattgaattggatgttcatccaaagctgcrtgtatacaatgattatatggcatcagatatagctcttttaattgaattcattatttttaaactaactccatagcttattgaaacatgaacattatttatttatggtatttatagaaaattctacagg

SEQ ID NO: 854296 - DNA, 576 bp, Homo sapiens
cagaagagtgaaaatgctgcaggaaactaactcaactgtcttactttgtgctgtgcccacacactaccaacactccacagtctgcttactgatgaaataaaagggcccagagaaaaggactgtcctatctttgcctttccttctctatcgtattcagtgtaattcactggctaatacaggaaagtaacatgaataagaaagtttatgatatagtttcttattgtttgtgtttcttagaacatctttgccttctttctgcattcaaagaaagttgtggttcaaatagaaagtgtgccatctcagggctgttgggctgtcagcattcacattctccatgttcaggcatagacataactctgttattttgaataatactcattttgactctcactgaactcccaagcattgtggttccactggaattctgtgctcatggggcattgaaaacattgtaggtaaatgagtggtaattaataatggtagaacatcatattatgcttctctctctaccaacatgaattctccatcacccctttgggyttcacttacaaaatccaagttcaaagataaacgtat

SEQ ID NO: 854297 - DNA, 662 bp, Homo sapiens
aactgaattaattcacatcttacaatagcttccccactgatgtagtttcacccatcagattctgaatggggtagacagggagcctctggacaaaggtagatttgggcaacagaggaacrggatttataaaacaagaatagcaaacacttgggggcttgagaataaacctgacgggtactgcttgatgctccagtggtcaaagctgactatggaagaaggctctggaaatgacttcttataaccataccaggttatatatatgcactctttcagatgactaatgacttaatatgagataaaaacaacatcctctacttactctgtgcctaatacttcactaaatgttttagcggaattagctttacatgattgttgtggagattaaatgagatatctccattttacagatgaacaaactgacttttagacttgcctgaggtcacacaaacaatggcagagacaagtaaggagcctgggcagtgtgattctaaagtctttaccgttaaaccctgttccgtaattgcctccctcctcttcttgtcccatgggatggtcttattatcgtggtatggacacgccagtgaatgaaggtacagagaataaaccttaaatctcagattggactcccacttcagtgtatttttaaatcaaatgatggcagc

SEQ ID NO: 854298 - DNA, 622 bp, Homo sapiens
cctttggaacaaatgttttaatatgaactatgagtcaaagaaactgagatatcgagataaaataatgtgtcagaggtaaaactacaaataaataatgtgatggatttctatcttggtagatctactgaaagcatttccttaagtctttactacatcagaaagagaggctaatctgattgttattatcaaattttgaatttgtgaatttaacgaactatgttttattttttctaccataaataaaagagtaatttcattatttaaatttttagcttataagttgaggatattgctagatgtggttttaaaaaataacctagacttatcatggaaattttaataagatcatgagtttgatatttactcttcctctatagaactggagtaaagatgctgcgcaaaaggccaaaatgatgtcaaagcagtgtaaactgatacagatcaaagaacaggagtggaaaattgcaagcagggatatgtagcggctctgtatggcccaatgtgctcaaaactctccagaggttgttaatttcctggcaagatgargttacatcatacagtctgtatttgcatatgtacccatacttgacagtgaaatatggtctaatacacaggttttatt

SEQ ID NO: 854299 - DNA, 350 bp, Homo sapiens
tctcttaacctgtagcaaccactgatatgttttccatccctatagttttgccttttatcaaatgtcatacaaatggaattatacaataacyacaaaatttttttgcctggcgtctttcagttagtaaggcacatttaagttttatccagggcttttgtgtaagtaaatagcttgtttcttttctttttttaaaaaataatattccattgcatggatatatcacagtttatttatttattacttgaagaatatacaattttggtaattattaataaaactgctctaaacgtttgtttacagaagtttgagagaatacaggtttttgatgtccttggatgaatatctagaaa

SEQ ID NO: 854300 - DNA, 617 bp, Homo sapiens
cctctgagctctgaggaatccaagacaactaaggactggagcagttaccctggtaaagtgcagcagctacacagagaggtaaccagactgtttttccatgtgggtcccggatcctatttctcttcactcgtcagaatctctcaactgaggtctacaaccacccctgccagtgttttccagctggcagcagttccaaaccttcctgggatggagctcccagagggagggcaggcttccatctttgctgtttcgcagccttcactgttgataccttcaagtactggaaaattcaaggtgattagggactggactggatcccctgcatactacagcagccctgtggaaaagtagccagactgttttttacatgggtccctgatcccatatctcctcactggatgggtccacacagcctgggtcttcacccactccccactggggctatcaagtcagtatcagctctgcaattccacgggacagagctcccagtggggggtgggttgacgtctttgctgtctcatagccctcaccagtgctatctccaggctctggagagtctgtgaagaccagggtcttgtctgraccctcagtacagagcacttacctcatggaaaggt

SEQ ID NO: 854301 - DNA, 647 bp, Homo sapiens
tccacacaataatggtgggagacgttaacaccccacagacagtattagacagataattgaggcagaaaattaatgayaatattcaggacctgaactcaacattggaccaaatgaatctgctgaacctttaaaaaacactgcacccaaaaacaacagaatatacatttttctcatcaccataatgcacatactctaaaattcaccacacaataatacataaaacaatcctcagcaaatacaaaacaatcaaaattataccaaagactcttagaccacagtacaataaaaatagaaatcaagactaagaaaaatcaccaaacaagatgcaattacatggaaattaaacaacctgctcttgaattactcttggatgaataatgaaattaaggcacaaatcaagaagttctttgaaaataatgagaacaaagacacagcatactagaatctctgggacaaaccccaaggaagtattaggagggatatttataacactaaatgtccacatcaaaaagttagaaagctctcaatttaacaacctaacatgacaaccaaaagaaccacaggatgaagagcaaaccaaacaccaagctagtagaagacaagaaataaccaaaatcagagctggactgaatgagattgagacacag

SEQ ID NO: 854302 - DNA, 647 bp, Homo sapiens
tccacacaataatggtgggagacgttaacaccccacagacagtattagacagataattgaggcagaaaattaatgacaatattcaggacctgaactcaacattggaccaaatgaatctgctgaacctttaaaaaacactgcacccaaaaacaacagaatatacatttttctcatcaccataatgcacatactctaaaattcaccacacaataatacataaaacaatcctcagcaaatacaaaacaatcaaaattataccaaagactcttagaccacagtacaataaaaatagaaatcaagactaagaaaaatcaccaaacaagatgcaattacatggaaattaaacaacctgctcttgaattactcttggatgaataatgaaattaaggcacaaatcaagaagttctttgaaaataatgagaacaaagacacagcatactagaatctctgggacaaaccccaaggaagtattaggagggatatttataacactaaatgtccacatcaaaaagttagaaagctctcaatttaacaacctaacrtgacaaccaaaagaaccacaggatgaagagcaaaccaaacaccaagctagtagaagacaagaaataaccaaaatcagagctggactgaatgagattgagacacag

SEQ ID NO: 854303 - DNA, 482 bp, Homo sapiens
ttcatcatcattaaaaacttttcttcaagagacaccattaaataaaaagccacagactggtggaaaatattcacaacacatatctcacaaacgacttgcatctggactatattaagaattcctayaatcaataatggaaaggcaaacactcaattaaaaaatagacaaatgctttgaacagacacttcatgaacatatataaatggccaataaacacatgaaaaggtgttcagcatcattaccatcagggaaatgtaaattaaaaccacaatgagataccactacatacatacctactagaatggttaaaattaaaaagactgacaacaccaagtgttgatgaagacgtgaagcaaacgcaactcttacaaactgttgatgaaagtataaaatggtacaatcactttagaaaactgctagtttccaataaagtaaaccttacagcctatagaatattttcacaaaaagacctgcagaacaat

SEQ ID NO: 854304 - DNA, 658 bp, Homo sapiens
catcagtgccatcctagctagacatgttggaactcagttctatgtcttcttcttattcagtcctcactcatccaatacacttggatcttcagtccagtccattttatctctgtgatgtctccyctttttgtatcattgcttataccagtactggttacagaaatagatcaggaaagggcctgtagaatactatggaacctgttgtagaaagctaatataagtatgggataaacatgtatacagaagtagtagttcctggggaaggctgagaatcacatctcaagttgattgtggcagcctaatttcagacaaaaattaagatatgggaatgggaagtgtaatgaggaatgtaggtttcttcagcacagtagtaatgagggaagagggttgttttggtgacagttgtggtgaaaaagacaggccaatacaggtcctgaaccaaggcagccaattcaagaagaggcaagagagcttggaaataattctgggggaaaagatagtgggaatgaggcacaaaagcaggccatagcccagctgtcagggtacagagctattcttctctctggtgctacaggcctgggggatgggggcagaactcacgtctcaaaaaggaggtcagcgtagaacagcctctctgtgtgggataagaagagatatg

SEQ ID NO: 854305 - DNA, 562 bp, Homo sapiens
aaggaaacttggagttgttattcctaatgggaagccaaaaacaccagactgtgcaatcgtagatggttcaagggtgccttcacggttagcaatagggatgttacgtagcctaaggctatcatagaggccttggagcttttgatgctgaagatggcgttccataagtttctcagatgtcactgaactttttcttgtattcttctagcactttcttcatggaggcgacttcccctttcatagaggtcaattctacatcctcgctttgtatttgctgagtatatattttctccgtctgtttcagatggccctcagccttgatgaaattgtgttcttgatagagatgttcctgatgtacctgatatgtccagaaggccactgctcaggagctaacgtccaacacgatctcttgtcgcagtcctgccaataccatagctttatatttctctgatggattgagttctgtgcggacaatatctagctttccagaaagggtactgttycaggcagcacagatagctggtgagtgactaaactcaccactgccatgctgatcacagaatat

SEQ ID NO: 854306 - DNA, 523 bp, Homo sapiens
gtagatggttcaagggtgccttcacggttagcaatagggatgttacgtagcctaaggctatcatagaggccttggagcttttgatgctgaagatggcgttccataagtttctcagatgtcactgaactttttcttgtattcttctagcactttcttcatggaggcgacttcccctttcatagaggtcaattctacatcctcgctttgtatttgctgagtatatattttctccgtctgtttcagatggccctcagccttgatgaaattgtgttcttgatagagatgttcctgatgtacctgatatgtccagaaggccactgctcaggagctaacgtccaacacgatctcttgtcgcagtcctgccaataccatagctttatatttctctgatggattgagttctgtgcggacaatatctagctttccagaaagggtactgttccaggcagcacagatagctggtgagygactaaactcaccactgccatgctgatcacagaatatgtgagagcaggcagtgacc

SEQ ID NO: 854307 - DNA, 627 bp, Homo sapiens
agttctatcagatgtacaaagaagagctggtaccaatactactgaaacttttccaaaaatttgaggagraggcgctccttggtaactcattctatgaagccagcatcaccctgatacccaaatctggcaaagacacaacaaggaaagaaaactacagaccaatatccctaatgaacatagatgcaaaaatcctcaataaaatactagcaaaccgaattcaacagcacatcaaaaaattaatttgctgtgatcaagtaggtttcattcctgggaggcaaggttggttcaacatatgcaaatcaataaatttgactcactacataaacaaaactaaaaatgaaagcaatatgatcacttcaatagatgcagaaaaagcttttgatgaaatccaacatctcttcttgttaaaactgttgacggttaatattaagtgtcagcttaattggattgaaggatgcaaagtattatttctgggtgtgtctatgagggtattgccagagaagattagtatttgagtcagaggactgggagaggcagatccaccctcagtctgggtgggcaccatccaatcggctgccagggtggctagaaaaagcacgcagaagaaggtgagatgagctgaattgc

SEQ ID NO: 854308 - DNA, 555 bp, Homo sapiens
gcccctcctctcaatacttctatattaggggttacatttcagttttggaggagacaaaaattcaaaccatagcagcttacttgcctatctcacttccccagtaccctcttggtgcttcccaggctcacctctcaaatgaactacttggactcgaatcctagtaccagggtctgcttctgggagaagccaggctaaaacaatgtgcttggaatcttagaggttttctggttcaaccacctcatgaataaattaagttccagggaaagaggtgacctgcacaggatcaaaatctggaagagctgggctggagccacacctttgtccactcttagttcagttcccattccctcctgggagcccctcatggaatcccgtgaagccatatatcactgggaatgcaccagcaggaattggtggaactggttggggagtggagtaaggaaggyagaaaaagagtgagtgagtgcagaaagcccacagtccataaatttcattatcatttccccctatattttggctgtcaacaatttcacaccactctgcatatctggctag

SEQ ID NO: 854309 - DNA, 575 bp, Homo sapiens
caaccccggttctgctagctgataaaagaagccttgtttttgtcctctgtggaatggggacagcagtagcactcttgttgcagagattattgtgcaaattamgcagtcagcccataagcagtgctcagaactgtgccctgcacatagccgaggaaacactactgctattaaaccaggaaaatcttgagaacaggaaccttttctctctccctcttcccagcaccgatctcgtgccttcgtgttcagtgtgtatttgctaaagatggtgacgtgtagctggccctctgaggggggttcatttcagcacagaaatggaaaggagagaacttgggggaagactgtgtcttacgtggtcttgtgggcaaagttccagggccagaaaaaagcaagattgtccaggttgtaagagccagggctggtggttggaggcctggcagtgtgggagggctggagcagcgaggcttcctggaggaggtgagatgggtcaactgacctaaggggaaagtaagaagaaagtatggcaagaggaaggaggcaccacaggaactgaggggcaaagggtgggctcggagcat

SEQ ID NO: 854310 - DNA, 364 bp, Homo sapiens
agtgagggaaacagacactcagagagggtaagctgcctacctacccacagtcacacggcaaaatagagtgagggaaacagacactcagagagggtaagctgcctacctacccacagtcacacrgcaaaatagagtgagggaaacagacactcagagagggtaagctgcctacctacccacagtcacacggcaaaatagagtgagggaaacacactcagagagggtaagctgcctacctacccacagtcacacagcaaaatggagagagggaaacacactcagagagggtaagctgcctacctacccacagtcacacggcaaaatagagtgagggaaacacactcagagagggtaaactgcctac

SEQ ID NO: 854311 - DNA, 467 bp, Homo sapiens
gtggaaaacagtatgggagtttcttaacaactaaaaatagaattaccgtacaatccagcaatcccaccactgggtatttattcaaagaaaaggaaatcaatatattaaaggaatacctgcaccacccttgtctattcacaatagccaagatacggaatcaagctgaaagtccatcaacagatgaatgaattaaaaactgtggtatatatatacacaatggagtattagccataaaaagaataaaattctgttatttgcagcaacatggagggacctagagatcattgtgttagtgaaataaaccagacacagaactacaaatgtcctctcagtcatatgtgggagctaaagaagttgatctcatgtctcgtgsaggtagagagtagaatgatagttaccagaggctgagaaacgggtgggatgaagagaggttgagctgctgggtacaaacatacagttagacagaa

SEQ ID NO: 854312 - DNA, 556 bp, Homo sapiens
tcacaactcataaacgcaatgcagatgcagagtgagcagcagcaagacttactgcaaacagcaaaagaacaaagtttccamaaagtggaaagacacctgagcatcttgccactgctggcttgggcagcctgcttttattcccttatctggccccacccacatcctgctgattggtccattttacagagagctgattggtctgttttgacagggtgctgattggtatgtttacaatccctgagctagacacaaaagttctcaaagtccccactagattaactagacacagagcactgattggtgcattcacaaaccctgagctagacacagggtgctgattggtgcatttacaaaccttgagctggacacagagtgctgattggtgtatttacaatcccttagctagacataaaggttctccaagtccctgctagattagctagacacagagcactgattggtgcacttacaaaccttgagctagacacagggggctgattggtgtgttcacaaaccctgagcaagacacagagtgctgactggtgtatttacaatc

SEQ ID NO: 854313 - DNA, 642 bp, Homo sapiens
gttatcttctagaaactatattgctttacctttcattttctatgatctatatataattgaaggccaggcacggtggctcacacctgtaatcccagcactttgagaggtcaaggtgggcagctcacctgagatcargagttccagactagcctggccaacatggcaaaaccccatctctactaaaaatacaaaaaattagccaggttgggtggtgcgcatgtgtaatcccagctacttgggaggctgaggcaggagtattgcttgaacttgggaggcagaggttgcagtgagcagagatcgtgctactgcactccagcctgggtgacagagagagactctgtctaaaaaaaaaaaaaaaaaggagaattgagttgtgtatggcatgaggtgagatcaaagttcttttggttccatatgggtacccacctgactcagcaccattttttcattgaaatggccctttccctacttcaactttgtcatagatcaaataattctacatgcctgggcctgtttctattgaaataatcagatagtttttatcctttatctcattaacatggtggagtacatagaactatctggagtgtagttggttataaggtatgattcctatattaggaattttttaatgaagaatgg

SEQ ID NO: 854314 - DNA, 642 bp, Homo sapiens
gttatcttctagaaactatattgctttacctttcattttctatgatctatatataattgaaggccaggcacggtggctcacacctgtaatcccagcactttgagaggtcaaggtgggcagctcacctgagatcaggagttccagactagcctggccaacatggcaaaaccccatctctactaaaaatacaaaaaattagccaggttgggtggtgcgcatgtgtaatcccagctacttgggaggctgaggcaggagtattgcttgaacttgggaggcagaggttgcagtgagcagagatcgtgctactgcactccagcctgggtgacagagagagactctgtctaaaaaaaaaaaaaaaaaggagaattgagttgtgtatggcatgaggtgagatcaaagttcttttggttccatatgggtacccacctgactcagcaccattttttcattgaaatggccctttccctacttcaactttgtcatagatcaaataattctacatgcctgggcctgtttctattgaaataatcagatagtttttatcctttatctcattaacatggtggagtacatagaactatctggagtgtagttggttataaggtatgattcctrtattaggaattttttaatgaagaatgg

SEQ ID NO: 854315 - DNA, 622 bp, Homo sapiens
tttttttttttttagagacaggttctcgctctgtcacccaggctggagtacagtrgcatgataacggctcactgcagccgcgtcctccctgggctcaggtgatcctcccgcttcagtctcctgagtagctgggattacaggtgtgcaccaccatgcctggcctaaatttttaaatttttttgtagaaatgagtctccctgttacccaggctgatctcaaaacttctggcctcaagcaatcctcccgcctctgaccagtttaccgagctatttagatgtcctaactactaggaattatatgtctttaaaaactgaggaaaaagaacagcactactcaaatggtatattctttttactctcagccaccaactggggcccctaattttctccctctgcctagaattcctgtgtcctacaccagaagcgtctacgggccctgctctctgctctttatgagtatttaacatgcttcacagaacgggggtgcagctcagtgactgtgattctttggttcaaacacttaattggggcttcatctttgattttttctgcatgttaatctgcaaatactcaaggcctactatgtgctttaaatgatactaacacttccgtttagaaggttg

SEQ ID NO: 854316 - DNA, 603 bp, Homo sapiens
ttttaaggagactttttaagtttacaaatcagaaactttattcccttaattatcaatatcacccaaatgaatggctaggacatccttctcaatttgagaatgttctgaagcagactgtagtactaactaacatgctcactttatttttacctctagaaaaacaattatgaaaaatactcttgtcatctaatagtacattaatattttccttgttttagtaagtaacctcaagaaagtaacagcagcttccaggaggaaaaaagtgaatgctttcaggtgggaacaaagaactctggcattttagtgtccagtcacttggtccaaatatggggaaagggggaatttttaactggggagtattaatatttagagaaagtttataaaggttaaaatatttatcttgaacttaccaggtgtacttgttgaagaggccttagaagttacaggctctgaatcttcctaaatatacagatatatattaatatcacatctaccagtcccctgttgctatatacatttagtgttttacacgaacacttctaatattctttctgccactccccactttctctttcatcrgtcttctctccctttcatttcagc

SEQ ID NO: 854317 - DNA, 616 bp, Homo sapiens; identical to SEQ ID NO: 834028

SEQ ID NO: 854318 - DNA, 383 bp, Homo sapiens
atagaaaactgtcttgaaaactgctttgcacgtacatctgataaggtcctctggagggcgacctccactgtctagtgggcgaggattgttcagccgccttggctgagtcaccgagctgccaagggcagactgtaccctgggctcaccagcatgcaaagatattttattcatttatttattccataaatatatatttatattatttatatttagagccagtgtatctctctgtcgctcaggctggagtgcagtggcactatctcactgcagcctcaagctcccgggctcaaggaatcctcctactttgtccycccaaacaaaaatatttttaaggagcccactaggagagtgctgagtttaaaatctaagttcttgtttctttt

SEQ ID NO: 854319 - DNA, 603 bp, Homo sapiens
tgtgtgtgtgtgtgtatgtctgtgtgagtgtgtgtgcactcaaatcattgtagctgtggccactgggagctcttacattttgggttccatgcccttttgaaatgcccacagctttttaaaaattttayttttgagcattttcttacttcctgggactacaagatgctccaggttcatcttgtattttctctcccacatcccaattatcagccatttctccagggagacttggctccttttattgaagatgaaatttagaaactaacatctgggcatggaatgtgcttgctgctactggggtgtcccctctcaaaggacaaacccaggatctacagatgtgtgtgctaagccatgtatgtacacgcacgtgtgtgtgtatatatttaacctatctgtatatatgtattatgtaaacatgagttcctgctggcatatctgactataactgaccacctcagggtccattctgatctgtatatatgtatcatgtaaacacgacttcctactggcatatctgactgtaaccgaccacctcagggtccattccgatctgtatatatgtatcatgtaaacatgatttcctactggcatatctgactataa

SEQ ID NO: 854320 - DNA, 603 bp, Homo sapiens
tgtgtgtgtgtgtgtatgtctgtgtgagtgtgtgtgcactcaaatcattgtagctgtggccactgggagctcttacattttgggttccatgcccttttgaaatgcccacagctttttaaaaattttatttttgagcattttcttacttcctgggactacaagatgctccaggttcatcttgtattttctctcccacatcccaattatcagccatttctccagggagacttggctccttttattgaagatgaaatttagaaactaacatctgggcatggaatgtgcttgctgctactggggtgtcccctctcaaaggacaaacccaggatctacagatgtgtgtgctaagccatgtatgtacacgcacgtgtgtgtgtatatatttaacctatctgtatatatgtattatgtaaacatgagttcctgctggcatatctgactataactgaccacctcagggtccattctgatctgtatatatgtatcatgtaaacacgacttcctactggcatatctgactgtaaccgaccacctcagggtccattcygatctgtatatatgtatcatgtaaacatgatttcctactggcatatctgactataa

SEQ ID NO: 854321 - DNA, 622 bp, Homo sapiens
aaacatgagttcctgctggcatatctgactataactgaccacctcagggtccattccgatctgtatgtatgtatcatgtaaacacgagttcctactggcatatctgactataactgaccacctcagggtccattccgatctgtatataagtatcatgtaaacacgagttcctgctggcatatctgactgtaaccgaccacctcagggtccattctgatctgtatatatgtatcatgtaaacatgagttcctgctggcatatctgactataactgaccacctcagggtccattctgatctgtatatatgtataatatatattatatatggacctcagggtccattctgatctgcatatatgtataatatatattatatatggacctcagggtccattctgatctgtatatatgtatcatgtaaacatgagttcctgctggcatatctgtctataaccgaccaccttagggtccattctgatctgtatatatgtataatatatattatatatggtcctcagggtccattctgatctgtatatatgtatcatgtaaacaygagttcctgctggcatatctgtctataactgaccaccttagggtccattctgatctgtatacatg

SEQ ID NO: 854322 - DNA, 596 bp, Homo sapiens
actataataggtttatagtttttaaattaaaattttaaatatagtggtttataaaactttgagaagaaaacataaaatccctatgaatgctgcaaaagtcactgttgagagaatgaaaacacaagacatasagttggagaaaatatttgtgaatctcatatctggcaaaggaattgtatctagaatacataaagaactctcaaaatccaacagtaaaaacaccaaataatccagttacaaaccggggaaggatttgaacagatgcgtcaccaagcaagggatatggatgggaaataagcttccatcagccaccagggagatgcaaattacagccactaggaaacgcttttcattcattccgggatggctgaaatgtaagcacggaaaatgctgggtgcccgcaagaacgcggagcagcaggcactcattcccgattagcgggagcgcaaagcgaaggggcggcctgtggcgttttcctgtaaagttgggcacacgcttcccacatgactcagcaattgcacttctgggtatgtacccgagagaaacaaaagcttatgttcacacaaaaacctacaacgcaaatgcacaaacagctc

SEQ ID NO: 854323 - DNA, 406 bp, Homo sapiens
aatacccatcataatcggaggctttggcaactgactagttcccctaataatcggtgcccccgatatggcgtttccccgcataaacaacataagcttctgactcttaccyccctctctcctactcctgctcgcatctgctatagtggaggccggcgcaggaacaggttgaacagtctaccctcccttggcagggaactactcccaccctggagtctccgtagacctaaccatcttctccttacacctagcaggtatctcctctatcttaggagccatcaatttcatcacaacaattattaatataaaaccccctgccataacccaataccaaacgccccttttcgtctgatccgtcctaatcacagcagtcttacttctcctatctctcccagtcctagccgctggc

SEQ ID NO: 854324 - DNA, 406 bp, Homo sapiens
aatacccatcataatcggaggctttggcaactgactagttcccctaataatcggtgcccccgatatggcgtttccccgcataaacaacataagcttctgactcttacccccctctctcctactcctgctcgcatctgctatagtggaggccggmgcaggaacaggttgaacagtctaccctcccttggcagggaactactcccaccctggagtctccgtagacctaaccatcttctccttacacctagcaggtatctcctctatcttaggagccatcaatttcatcacaacaattattaatataaaaccccctgccataacccaataccaaacgccccttttcgtctgatccgtcctaatcacagcagtcttacttctcctatctctcccagtcctagccgctggc

SEQ ID NO: 854325 - DNA, 612 bp, Homo sapiens
agccccggcaggtttgaagctgcttcttcgaatttgcaattcaatatgaaaatcacctcagagctggtaaaaagaggcttaacccctgtctttagattaacagtccaatgcttcactcagccattttacctcacccccattgatgttctccgaccgttgactattctctacaaaccacaaagacattggaacactatacctattattcggcgcatgagctggagtcctaggcacagctctaagcctccttattcgagccgaactgggccagccaggcaaccttctaggtaacgaccacatctacaacgttatcgtcacagcccatgcatttgtaataatcttcttcatagtaatacccatcataatcggaggctttggcaactgactagttcccctaataatcggtgcccccgatatggcgtttccccgcataaacaacataagcttctgactcttacccccctctctcctactcctgctcgcatctgctatagtggaggccggcgcaggaacaggttgaacagtctaccctcccttrgcagggaactactcccaccctggagtctccgtagacctaaccatcttctccttacacctagcaggtatctcctc

SEQ ID NO: 854326 - DNA, 284 bp, Homo sapiens
tacccatcataatcggaggctttggcaactgactagttcccctaataatcggtgcccccgatatggcgtttccccgcataaacaacataagcttctgactcttacccccctctctcctactcctgctcgcatctgctatagtggaggccggcgcaggaacaggttgaacagtctaccctcccttggcagggaactactcccaccctggagyctccgtagacctaaccatcttctccttacacctagcaggtatctcctctatcttaggagccatcaatttcatc

SEQ ID NO: 854327 - DNA, 321 bp, Homo sapiens
atacccatcataatcggaggctttggcaactgactagttcccctaataatcggtgcccccgatatggcgtttccccgcataaacaacataagcttctgactcttacccccctctctcctactcctgctcgcatctgctatagtggaggccggcgcaggaacaggttgaacagtctaccctcccttggcagggaactactcccaccctggagtctccgtagacctaaccatcttctccttacacctagcaggtrtctcctctatcttaggagccatcaatttcatcacaacaattattaatataaaaccccctgccataacc

SEQ ID NO: 854328 - DNA, 406 bp, Homo sapiens
aatacccatcataatcggaggctttggcaactgactagttcccctaataatcggtgcccccgatatggcgtttccccgcataaacaacataagcttctgactcttacccccctctctcctactcctgctcgcatctgctatagtggaggccggcgcaggaacaggttgaacagtctaccctcccttggcagggaactactcccaccctggagtctccgtagacctaaccatcttctccttacacctagcaggtatctcctctatcttaggagccatcaatttcatcacaacaattatyaatataaaaccccctgccataacccaataccaaacgccccttttcgtctgatccgtcctaatcacagcagtcttacttctcctatctctcccagtcctagccgctggc

SEQ ID NO: 854329 - DNA, 646 bp, Homo sapiens
agccgctggcatcactatactactaacagaccgtaacctcaacaccaccttcttcgacccagccggaggaggagaccccattctataccaacacctattctgatttttcggtcaccctgaagtttatattctyatcctaccaggcttcggaataatctcccatattgtaacttactactccggaaaaaaagaaccatttggatacataggtatggtctgagctatgatatcaattggcttcctagggtttatcgtgtgagcacaccatatatttacagtaggaatagacgtagacacacgagcatatttcacctccactaccataatcatcgctatccccaccggcgtcaaagtatttagctgactcgccacactccacggaagcaatatgaaatgatctgctgcagtgctctgagccctaggatttatttttcttttcaccgtaggtggcctgactggcattgtattagcaaactcatcactagacatcgtactacacgacacgtactacgttgtagcccacttccactatgtcctatcaataggagctgtatttgccatcataggaggcttcattcactgatttcccctattctcaggctacaccctagaccaaacctacgccaaaatccatttcgctatcata

SEQ ID NO: 854330 - DNA, 611 bp, Homo sapiens
tcagggaatttttgctggatgaatggataaacagatggatggatggatggatgaatggatggttaagtaggtgctcagtamtgtttgtggaatggacccaaaggtatctcttctagacttcattatttgagttccttaaagaaatgcctccactgagttatgatttaatgttatgctgtcttcagagaaccctgatgcgagaaactgacgaacctaacagcatctctgtcttttatgaaaacagaattgcatatattgcccactatgtcactcagtgtcctttatacaaggactcatgataaattcatgcttggggttatttcctggaaacattttgtctctgcagatgaagatgtgtattttctgctgtcagaaaacaaaaactctgccacccgacgtgtttccatttttgctttagctgacaaataaggatacccagttttattgccttattacctccatgaggcctgaccagttcgggtgctggaaagtagcaactgtttctgttttccttagagtcagttcttcctttattctttgatgctgtagtttgtactttttaatctgaaagctgcctcaaatcatctcagcagtaaggtagaagaagtctt

SEQ ID NO: 854331 - DNA, 573 bp, Homo sapiens
attgagtttataaaccaaataatgaaggcagaaatatacttaaaggtataaaatgataaagaaatataatcaacaaaaatcaagtggttgggagtggtgaggaagaagggacaatcaatatcacawttttttttatttcaaaaacaaagtcattcaataacttctaaagaaatggctaattaaatatatcaatcacataaactttaatttcatatccttgtaaaacctctgtgcagggcatttaggtaatagttaccaaaactaaaactgggacactataggatttattccacagatatacctatatgtgttaggaaaatattcatggggacatgtattatagtgttgctagcaataaaaatatctgaaattatctaaatgcccatctatataagattcattaaataatcatattttggccccttagatgatggaatgctctatggttgttaaaaaaacaagagtcaactctgaaacaatctccaagatgtataagtgaaaaacctaagtatagaacagtgtgtatagtatgctgtcatgtgaaaaaatatttttaagaagtaaaacacttat

SEQ ID NO: 854332 - DNA, 613 bp, Homo sapiens
agggccagaggcaaaacccagggcccttaaactagccaatcattaactgctagaaaatgcctacagaggggtcacctctggtgatacaggagagagaagaggaacctaggaaaatatctgtctttgcatgagtgggaaagctgaaggactcaagaagacaaacagaaccatccaagcaacgctttccctcagttttcagctgaaatcagttccacagtactacatgtttttcatggaaagaaaatcatagcactccccttttccttccttggtttttcatttctaaaaccatttactttctcttcctcaatgtaatggcatactccacatgtaggatctgattacagatctggactaaaccttaggaattttaataaaagaacttatgatgaatgtctacactgcgttatgcttcattttggtttataaattgcatacagtgctgttttgttttgaccagggactaaaatgaaaccaaatctstacaaaatacctaggttgggccaatcttacagcactagtaaatttactccctagaaacattcacaacatgccgttcctacttgattaaagattaaaacatcaattttggtttgaaacagccttctgcctg

SEQ ID NO: 854333 - DNA, 641 bp, Homo sapiens
ttaaatattacggctccacaccaaagtgaacatgggatgcatgaaacatgcatgtttgtttatgtatcaggccccacttcaggaatatctgtagctcctcctataacctgttgaatatgtgtacygggccaacctgtttagcataaatcccagccccacactcccctccctcaaagtgcccccttcaagtccctgccagaggctacacttccaaatctgtcaggatgatggccaccctagaagctgtaaccctttttataataaataaagtctcctttccaaatttatagaacttgggatttttcaattgacaaaacttttgaaatctacataggttgataaaacaaggcaaacaaggacccatgcttattaattggcttcaatttacttcaatattatggaagttcttccacatattatttatattatcttccttttatataatacattttaaaaatcacaagatgaatgagcatttgaatcatgattaaggacatcagaaaaacttctttggggatatgccatatacaactttgatattatctgaagctttttggaaaactcattcaaaaaaattgttttgatgccctcttttttctaagtaaaatcaaaatactggtcattatggtgctcttaaaaat

SEQ ID NO: 854334 - DNA, 563 bp, Homo sapiens
tgatatttctggtggttgttttctagattctccacgcccccccaacaayggtaccagcgggtattgtgtaacactacagaaaaggaatgattaattcaaagttcaggtgcaagacagggtcagaaaagaaatactcctggatagagtgagcatttcaagatgaatttgtgacttgaaacatcattttatgacgcattttctattttgttatcatgggaagtgtgatggctgacacacgaatgatcacagcattttggtgccatgttctgtgataggcttttcataaaaattagctgacattgtcatgagcacacaagtaaatttatagctttcatactggactgccattcccagagcaatttccaatcacttgcgctttttattaagtttattgtacttttattgttcagtggaatgtaagcagtgagattacaaataaatgtaagttccactggatatgaagtggagcttgtagaattaggagagaagggggtgaaggaagccacacagtaatctgaatcactggtgataggaaacaccacccactgatgtttcttgtcacc

SEQ ID NO: 854335 - DNA, 443 bp, Homo sapiens
gtctttctccctcacacaacaacgcccccatctcagcattctggagggaggctgygaccagccgtggcgaggcggccggaagctctgagatctctctcggcatctccctcatggtcacaagatggctgcttcagctccagacaacatatctgtgaagcatgaggaagaaagaggtgaagccggcacaagacatgtttatctccttacattcaacacacaaaagcctccagaaatgcccgcaaacacctgcttgtgtcttattggtcgaaactggtcacatggctgccctaaaagaaacagaagctcggaagatggggtttcgcctgtgcagcccgcacatagaggccgccaccgacaggcgtcgggggggcacccaccacactcactcccacaccccagaaaagtgcgagaagacatcacgctactcaagaaaagcccttcac

SEQ ID NO: 854336 - DNA, 631 bp, Homo sapiens
agcaccttctggttaacttttctccacatycatgctcttagccttggattcttaactttcaggacccttgaaactaaactcagagttttgtgtgtatgtgtctatgtaaatatgtatccatccatacatacacttacatttccccgatggaaggatccccggatggtaccagactcacaacagggtctgctgagcaaaaaaagaagagacgaagctctcagagctacttggtggccatatgggatgtgtatatgttgctttcctcaaacacaagttaatcttctcatcctgtcctgcccccaccgttcaatgtaagcctggtaatttcctagagaggcaggcttgtcatctgagaaatgtttaagcatagccatggtcaggaggtagagcagggagctgtgagtggtctgcagaggctggggaggtaggtttccaggcaggccagaattttatgtaagccatcttgaagcaaaagcagctttaggaagtgcattccgatggactcaccaccaaagggaagcccatgaaagaaacgttgtcagaagcgaccgtgaatctggagggggtggtacccttcacgaaggacagagcgggaaggtgcggaaggtgcagagagcccaccagccagacc

SEQ ID NO: 854337 - DNA, 586 bp, Homo sapiens
aatgacaatgggggatggtgtctgggttgcagtatttcttcctgtcggcaggatgtcctctagtcctcttcactgaggctttcacagagcaaacgctgttaacattttgatgaggtccagttgattaaatttcccttttatggatcaagctttaggtgtcagctttaagaactctttgcctaggcctagattctgaccattttcttcttcttttttttttttcttgagatggagtctggctcttgtcacccaggctggagtacaacagcggcatgctcttggctcactgcaacctccgcctcccgggttcaagcgattctcctgcctcagcctcctgagtagttggaattaaacaggtgcccaccaccacagcccggcaatttttgtatttttagtagagatggggtttcaccatgttggacaggctagtctcgaactcctgacctcaggtgatctgcccgtctcggcctccccaaagtgccgggattacaggcgtgagccactgcacccagcctcttctrtgttttttctacaagctttgtagttttatattttccatttaagcctgtgatcctttttttttcag

SEQ ID NO: 854338 - DNA, 670 bp, Homo sapiens
tcaacctccgcctcctgggctgaagtgattcttctgcctcagcctcctgagtaactgggattacaggtacacaccaccacgcccagctaatttttgtatttttagtagagagtaggtttcaccatgttggtcaggctggtctcgaactcaacctcggtgatcctcctgccttggcctcccaaagtgctgggattacaggtgtgagccactgcaccccacccacaatcttttatcttaacccagacattcctttctgttaatcccaggtcttcaggtaaattcaaccaattgtcaaacagaaaatttttcaatctacctataagctggaagccagcacccttgacccctgcttcgagttgtcctgcctttctgaaccaaaccaatgtaggttttaaatgtatttgattgatgtctcatgcctccctaaaatgtataaaaccaagctgcaccccaaccaccttgggaacatgttctcaggacctctgtcctgagggctgtgtcacaggccatggttactcatatttggctcagaatatatctcttaaaatattttacaaagtttgactcttttcatcaacagcagcaagccaccagyattcccagtgagggaagggtaaagggaactttttatcagtgaaaagggaacttttatcagcgaaaagggagcggt

SEQ ID NO: 854339 - DNA, 588 bp, Homo sapiens
caaaaccaaaatgagataccgtctcacaccagtgagaacggygatcattaaacagccaggaaacaacagatgctggagaggatgtggagaaataggaatgcttttacactgttggtggttagtgtaaattagttcaaccattgtggaagatggtgtggcaattcctcaaggatctagaaccagaaataccatttgacccagcaatcccattactgggtatatacccaaaggattataaatcattctactctaaagatacatgcacacatatgtttatttctatttgcttatttaatgtctttctggactaattctataaagtctgtaatttctataatgtgccattgaatctgcttggttaacttaatagttagccaatgacagggcagaggttttcttaaagaccttgaatcaataaggctttttgtttttaccctttgctaaggggctctgttgtgtatatcgggacatatcctcaattctcaagcaggcagttttaaactctgctatggccttcacctcctgtttttaaagagacatcaagtcaactaaaggtgagcacttagggccttcttagatatttcctgg

SEQ ID NO: 854340 - DNA, 678 bp, Homo sapiens
tatttgctccttcacttttaaaggatattttcattgggtatagaatgctagatttttgtttgtttgttttgatttgttttttatttttagagayggggtcttgctatgtgggccaagctggtcttgaactcctgagctcaagagatcctcccacctcgacctcccaaagtgctgggattacaggcatgagccaccacacccagcatactttgtttttttaattaacaataatttaaatactgcatgccactctcttcttgctttcatgacttctgatgataaatgtgatgtaattcttatctttactcttctgttgatatggtggtatttttctctggcttcttttaagatttttcttctttgtctttgattttctgtgggttaaatatgatgcacctaaatgcagagctttggttttggggctttgtttttatttattctgcctgatgatctctgaacttcttggattgatgtaggccattaactttggaaagttctcagatattattagtttaaatctttcttctgttctgctgtctctttattcttctagtatttcagttacatatatattacatcttgtgaaattgccctatagttcttggatgttctgtttttattgttctttttttctctttgcaattcagtttggaaggttggtattgacctattttaaag

SEQ ID NO: 854341 - DNA, 465 bp, Homo sapiens
agaggacagtgcgggcagtgagggggatcccttcccattgcaagggggctctgttcctcctgccccaaggcaaggcagcggtgtgagcttctctcaagattcagggagatggcatcgcatgcctgagttgcagtctggtcgtgcagcagatctgtcacttacttactagagctgggaaagaacagaattggagagagatgagaggacagaagggcagtctccctcccactggttgctgtgtcagcaagaagcagatttcctatcagtcaagtggacagtaaagaaagtaactggtctacaagaaggctgccgcctgcagtgtacagctaccagtggcaagatctgagcaggtacagagaaactgagctgggcagggagccctgtgtgaaggacaacacagcaggggagacrtagaccatgtggtggacaacaagggccagtcagtactagcagcagaagtatttt

SEQ ID NO: 854342 - DNA, 636 bp, Homo sapiens
tctcaaataggttatttccgattttaagtatgaaatgacaggtacacagggatgtgaaagcaaagtgtctacggaaagacaawgataactgggccacatttctttattatgacccatgtataataaacaaggatattacagcaaaccttagctttattcatgctttaagaatggattcgtacatcaagtctaagataggacctcttggccaatagcataacaggaaatgttttctgtgaataaagactgtgctatacacagacttacctgttcccaattccagccgcctgttcttcaatgaacacaatttgggaaaggagaatggccatgcaacactcctaggaggaaatcaatagcttaaatgaaagactctaaacaacatccataacacttgtcagaaatccttgttttatagcattacagtgccatatgccttaataataaaaataatgaaaaacaataatgattttactccttaaatgaacttaaggaaaaattaaatgaaaacagtaatgtggtggcatttggctgcatggaagaacataagaagtttaaaagaagctgtaactagcttttgtttttacaatgggtgtattttctttattattattattttttaatttatttttttttgag

SEQ ID NO: 854343 - DNA, 559 bp, Homo sapiens
acagtatttaataaaccttatacgattccttgagtaagtgtgcatttttactcaaggaatcatagtatagcactaacagccactgcatccttcatagtttataaggaaaaacctctgaaaattataacctgacttttcttaaattgctgaaaagtatattaaatagaaaaatctatcagaaaggaataaaattaaagaatgcaaacagcaaatacaatcaatgatagcaagatctaatacaatgtgctttataaaccagttacatgattactttttattttagttaataagccatatttaaagagagttgattaaaaatgaaaattaggtgaattggttacttgacaaagtgacagcctgatgtaaatgaaaatttttccatttattccttgttgaagaaatctaaggcagacactgctttgtctttgttatgctgctttgytaaggttcctaaaaataaatgtagataaagaaacataagagaataacagaaaataatttgctccatgctcaacatgctgattaactttaacccatgttgtgagtacatgtataagtg

SEQ ID NO: 854344 - DNA, 421 bp, Homo sapiens
ggccatcctcatgttcccgctgcagaggttgttcttggagaatttggtcccctaaactccacagacagggaaagggaggtttcgcttaaaggggcctggatggaggtggctttctcatctccttacatggaaaatggggacgaggctgtcttcaagctaagtacctttttgggaatgactaaagaatcgtcactgtgcccaagggagtgagtgaccctggaatggatgtgagggaggcttgcgatctcctctctggaaatgcagaccccccagggaagctggctctgtgccaggggaaggttgtgcagggaccaagtgaagtgcccttccaagtctgagctccctggtcccatctgaagtctasccgagccaggaatggcggctcttgaagggctttttcaagtcaagctcattgctctgg

SEQ ID NO: 854345 - DNA, 558 bp, Homo sapiens
acatctaatgttcatggcttggaagagttaaatattgttgagatggcattgctccraaaactaatctacagattcaatataactcctattaaaatgccagctgaagccaggcatgctggtgagcgtctggacttccagctattcgggagcctgtggctggaggatcacttgagcccaggagattgagaccagtctgggcaatatagtgagaccttgtctctaaaaataaaaaggcaaaaaacgggcaggcgcaatggctcacacctgtaatctcagcactgtgggtggctgaagtggaaggactgcttgaccccaggagttcgagaccagcctgggcaacatagccagaccttgtctcaattttttttttgactccctagtagctgggacacaggcctacgccaccacgcccagctaatttttgtatttttagtagaaacggggtttcaccatgttggcttggctgctctcgaactcctgacctcaggtgatccgcccatctcagcttcacaaagtgctgggattacaggcatgagccactgtgccaggccagcaaga

SEQ ID NO: 854346 - DNA, 563 bp, Homo sapiens
gaggaggggtggcacagccagtcttttgttggtctttccttcagattgtggttctgagtgkcatccggtgtgaaggcacgtggctccacagctctggctgtggactgtgccacagcagtggcagtgctctcttctagtaagaggctgctggaagcccctgcggtgtcttcattagagaagtggagccatatttgctattagtggctttaagagacaaatctaaaaggagacattcatttcaaaatgcctggtgcactggtcattggagctgagtaagagtctgtagcatatttgatatgagagaaaaactaattgtcaaaacagagcaaacagaatttcctgaaattaactttgaaaacccttcctttgttacattaagaagtctcccattttctctgtgtctattccagaccatcttggaggagtccttcccttctgtttagcttcaaagatacagtcttgaattgactttaatcaagttctttcaaatgctttttaaaaccaggtggtacagacagcattgtcagaaacacgggatcctgaagagatttcggtcactgtca

SEQ ID NO: 854347 - DNA, 599 bp, Homo sapiens
ctagcctggtgctccacgtttccccactaaccaggatgctcggccagtgctggggagagccccaggaggtggctaagtgcacatcggaggagtggatggagactccaggtcaccatgtcctgctccagccagagccacggtgaccagttaaagtcacagtctggaatctgaaccttacggactgtgcccaggagagacaatggcctcagagaaaaggaaaagggagctggtgaggtcgtgaccacacctagggcagggcttggctaacctccagccttgtcctcactgctgtgggactgaggcctccaggcagctaccccgctccatcttcccgctccccagattccttgacgctccccagattccttgacattcccctcacacactgctgcgtgccacgtcccccagaccgggttttctgtccctgtgtagatgatgaatggcagtcagagcttagtattcaaaaaagccaatgactcctgtggatgggtctgtctcctcttcrccaacaaagagaatgctggtccgtctcagcactcacaacaaacactatcttggtcgaggatgcaagagtactattttcctcactttttatttcc

SEQ ID NO: 854348 - DNA, 519 bp, Homo sapiens
tgtgggtggcacccagggctgcactggctgtcagggtccacaagtggtctgggtcaggagggggcaggaacatccttctctgagttccctgattacccaggaaggctggcggggcagggggtccactcatccagacccgttggccagcccaccaaggtgtgcatctcccttttggctccaaggcccgccttggccgggtgacagctggggaaactgataccagctcgtagctctggactgctgggtggcaaggccctgtggtcgctgggagccaggcttcctcagtcccgcgcgttcgctgctgacaattgagcgaccaaagcagattaacttgggtgttaatccccacctaatggcttcagaatccccggctccaggagctaagccgtcctttctccgagcgcggccgagccctccgcggyttcagccccgcagcggcgccgatgctatctctgcctgcccggccgcggtaccgcgctaatccccggcgctcctttcttccccggcccgtccaaggtc

SEQ ID NO: 854349 - DNA, 622 bp, Homo sapiens
ccttggcctcccaaagtgctgggattacagatctgagctactgcacccagccataatttgtcattgatcacttttcaaaaacacgttttatcatgctattttctgtaactgaactcaacatgtttctacgttggtcactttttagagacccattttcttttttcttacttttctattacactttacgttctagggtacatgtgcacaacgtgcaggtttgatacataggtatacatgtgccatgtttgtttgctgcgcccatcaactcattatttgttggggtgatcaggcccaatcccagactgtgggggctacgaagtccagcggagtcaaatgaataagacaagataagttaacggtgcataaagtgggtccagggggctgacactagtatggaggctgtgaaggccccgagctctgggagcccacactatttattggtgatcaaacaaagaagcaggcggtgaggacatgggggtcgaaagaaagtgrtgcatcaagtgtttgatctatagctgtgtcagtttagcattttctttgaagcatatggaacgagttcagttacagaaaatagcacatcatctaattttttagcaaaaagctagcatttactttttagggc

SEQ ID NO: 854350 - DNA, 550 bp, Homo sapiens
attaaggaacagggccggacgctccggaacgtggtggggctggagtccgggaatccccgcccgcgcccgcgccgccccccagaagccgcacttgggaaaaacacccrcatgtggagtaggtaaccccgggccggagggcaccgcaccggaaccccgcgtctcttagcggacgccgcttaactggaagaatagcttccagggctaacaccgtcaaaaaaaaaaaaaaaaagcgctctaacggcatgaattgatagtgagtttgttttactcctttaaccccccattttttttgtaatgtatttgatgtctgtccctacccgcatcagcagtgctccatagttccgcttcacagacacacatagccagaaaaaccacctagaacttaggtgtaacgcatgaagcctgcatcatgtgaacataggaacacgaactacatggtatgtaccacatgagagtggccgtctcctgccaaacgtttttggtcccatccttaaggcccctatggaaacgtatgcaggtgtgcattatttatccacctaaacatatttcc

SEQ ID NO: 854351 - DNA, 622 bp, Homo sapiens
tctcagccaggccaaagtcagctaccactgcagagtaaccattctcatccctctttatcaggcagttctagggttcccaggaaggaagagaaaataatgtggctcagaagcggggatcagccatagagttaccacccattccccccttcctatcacagggcaccttgtcctctgctccttggtgaaccgcactcaagctgaccccactggtcaggtcaggggctctaagacagccaggtgagatgagttagtcctgggtcttgggtggctgtcctaggatacacttcacattccaaacacaattactcatctttgctttctaagtgctaggcataattttaagtgctagaaatagctagatgaaaacaaccaaaacccttgtcctcttggagcttgcaatataggggagaacaacagactatcaggcccctggcctcccttcctccttcctcagaaacacagacccaaagcccaggcctgaccttgccaacttgatayaagcacaagacaagtgtctaagccttcactaaccttcactgtccacaagatcacaaccaacctcttctctggcattaaaagtctatgatctggctttatccaactggcctagccgctgtccccc

SEQ ID NO: 854352 - DNA, 502 bp, Homo sapiens
ttagtagttttacagtttcaggttatactataccattttattatataacaagtatatctaaagattttgstgtaatggaataaaatttatttaaagtcaactttccatgcatttgctagttcagttcacagtgaagagagtaagaaaaggaatgataaaataaaaagattagcaggaaagatgccaaaatgctaatactagttttagccctacatgctgagattaagggcaagttttattttctttttcttactaattctattttctaaatgtttgcattgcaattatgtatcacttctgtaataataaaaaaattaaaatattacttcttaagctagatattacttaaaatatgatcatcttaaaaattcctaagcagaatatcaaagcctcatctacctcactctcaaacatggtggaagccccctaactgatctctttgctaccagtctctctaacactaaaccattctgcatcttgtcatcaattaccttatcattct

SEQ ID NO: 854353 - DNA, 562 bp, Homo sapiens
atgcaaaggaaggaagtgattggtccaagtatatatttcgagatattggagcatcgggaccagaatccagttctgtaaactttgaagccaacactttctccacattgctccctttttacctcttggttctgattccatttccttccgtacttttgtccctgaaaatatacatgcacttggaagcttcttgactttctctcagcccagatgcaagagaaaaccttcacccatggacagatggacacacacacacatacacacacacacacacacagagctctgattcacctaaggacccagctttgcttctttacccaataacagcacccacaaatctttatctaccctagcccacactttgcctccactacggaagctcttttcttaacccagtggcatccccctacccctgcatgaagtcacagatctagtgcccttttgcagtctcttcytccttttatcagatatttctaatagcaaaaatctggaagacctaaatgccaagcaaaagagttgttaaataaatcacaggacagccaaatagtaggatatagtgtagcca

SEQ ID NO: 854354 - DNA, 634 bp, Homo sapiens
cattgcagggcagtaggaagccaatgcaggtttgttgattaattttggatgcaaaggaaggaagtgattggtccaagtatatatttcgagatattggagcatcgggaccagaatccagttctgtaaactttgaagccaacactttctccacattgctccctttttacctcttggttctgattccatttccttccgtacttttgtccctgaaaatatacatgcacttggaagcttcttgactttctctcagcccagatgcaagagaaaaccttcacccatggacagatggacacacacacacatacacacacacacacacacagagctctgattcacctaaggacccagctttgcttctttacccaataacagcacccacaaatctttatctaccctagcccacactttgcctccactacggaagctcttttcttaacccagtggcatccccctacccctgcatgaagtcacagatctagtgcccttttgcagtctcttcttcctttyatcagatatttctaatagcaaaaatctggaagacctaaatgccaagcaaaagagttgttaaataaatcacaggacagccaaatagtaggatatagtgtagccatttaaaatgacaacatgggcgggg

SEQ ID NO: 854355 - DNA, 575 bp, Homo sapiens
cctacatggaggtctgagaaaggccacagcgcaaaattgggcactggagcaaagaggagtggtgtggaggcctggctaagtattgaccaatgagcaggagtaggggccagagcttggagccctcaggtgataggtgaccaggctgttgttccactttgaaatgcaggccccagactaaggacggcagcgaagcagagctccctcgttggtgcagaggttccctaagctcctgggcattcctaagaactgaggtttgcctttattcttctcatggctcatgttacagccattcactccagaaagcctggcacgtcatggaccgttcaaggctgtgctccatagagtaatgatgcctccagctatgcgaggctttgggcccacccttcccactgcccctgagggctaaggggagcccttccctctgttcctgcctgctcaccagtgtrcctttattagttcggtggagaaacctcggtaagcaggaggcataagtccagccacagaaaccctgtgcagatgaggctggggatgtagtgagtgctgcagaagtgagtgactcagacacagaagagctt

SEQ ID NO: 854356 - DNA, 575 bp, Homo sapiens
cctacatggaggtctgagaaaggccacagcgcaaaattgggcactggagcaaagaggagtggtgtggaggcctggctaagtattgaccaatgagcaggagtaggggccagagcttggagccctcaggtgataggtgaccaggctgttgttccactttgaaatgcaggccccagactaaggacggcagcgaagcagagctccctcgttggtgcagaggttccctaagctcctgggcattcctaagaactgaggtttgcctttattcttctcatggctcatgttacagccattcactccagaaagcctggcacgtcatggaccgttcaaggctgtgctccatagagtaatgatgcctccagctatgcgaggctttgggcccacccttcccactgcccctgagggctaaggggagcccttccctctgttcctgcctgctcaccagtgtgcctttattagttyggtggagaaacctcggtaagcaggaggcataagtccagccacagaaaccctgtgcagatgaggctggggatgtagtgagtgctgcagaagtgagtgactcagacacagaagagctt

SEQ ID NO: 854357 - DNA, 487 bp, Homo sapiens
gctttcaggacactggaaagataggcatgaccagatcataagggcaacgtatgccttgctaagaagttttaaatttttcctaaagatcgtgcaaatgctaaagaagtttaagcagcagaataatrccacttgatttgtattttagaaaacaaccctgactacagtgtgtggaataggctgggaggacaattctagaggcagagtctggttaagaattaaggcaataattgagtcaaggaatgaagggtgctggtagaggaaacacagaggaagggaatgtgtttaagagcgattaaaaaggcagaagggaggaggcttagagaccaaatggatatgagagaggaaagagggaggaataagagataactttatttctagtttgagtgattgagtggatgatgatttcattcaccaagatggggaacaaaggaggagggacagtttggagaaaagtaaatgtcatcattggctgggctggctggagact

SEQ ID NO: 854358 - DNA, 580 bp, Homo sapiens
caagggaaggaattcagggcactatactccataaattcttaaatattttatttgctgctagcagtcaggtagaaaaaatagcccaggacactgtcttccaggaatatgtgagttttctttacgaaaatgaggcccacctggcagtagaatgagcttcccataattccagtgacctgacggtaagggattggctttccttagaaactggggccactccctggtgcgtgggagatctggtgcatgggagaactcagagcatctttgtgtatgctttctgaatgtgtattctaaaagtttaacaggtgatgaaataggtacccagaaaggggcatgtcaattcatgtctagcttatgtggagacttccagcttctacctgaacaacctgaaactggttctgagtgaattctttctttctctttccctctccccttcctctctccatccctctctctgtgcttctcytaccttccttttttttttgttttgtttttttgagacggagtctcactttgtcgcccaggatgaagtgcagtggctctatcttggctcgctgcaacctctgcctcccgggttcaagcg

SEQ ID NO: 854359 - DNA, 580 bp, Homo sapiens
caagggaaggaattcagggcactatactccataaattcttaaatattttatttgctgctagcagtcaggtagaaaaaatagcccaggacactgtcttccaggaatatgtgagttttctttacgaaaatgaggcccacctggcagtagaatgagcttcccataattccagtgacctgacggtaagggattggctttccttagaaactggggccactccctggtgcgtgggagatctggtgcatgggagaactcagagcatctttgtgtatgctttctgaatgtgtattctaaaagtttaacaggtgatgaaataggtacccagaaaggggcatgtcaattcatgtctagcttatgtggagacttccagcttctacctgaacaacctgaaactggttctgagtgaattctttctttctctttccctctccccttcctctctccatccctctctctgtgcttctcttacyttccttttttttttgttttgtttttttgagacggagtctcactttgtcgcccaggatgaagtgcagtggctctatcttggctcgctgcaacctctgcctcccgggttcaagcg

SEQ ID NO: 854360 - DNA, 630 bp, Homo sapiens
acataaatgacctgatggagctgaaaaacacagcacgagaacttcgtgaagcatacacaagtatcagtagccaaattgatcaagtggaagaaaggatatcagagattgaagatcaacttactgaaataaggcrtgaagaaaatattagagaaaaaagaatgaaaaggaatgaacaaagcctccaagaaatatgggactgtgtgaacagaccaaacctataattgattggtgtacctgaaagtgacggggagaatggaaccaagttggaaaacacactttaggatattattctggagaacttccccaacctagcaagacaggccaacattcaacttcaggacatacagagaacaccactaagataatcctcaagaagagcaaccccaagacacgtaatcttcagattctccaaggtcaaaatgaaggaaaaaattttaagggcagccaatgagaaaggtcaggttatctataaagggaagcccctcagactaacagcagatctctcttcagaaaccctacaagctagaagagagtgggggccaatattcaacattcttaaaaaaagaactttcaacccagaatttcatatccagccaaactaaacttcataaatggagaaataaaatcctt

SEQ ID NO: 854361 - DNA, 630 bp, Homo sapiens
acataaatgacctgatggagctgaaaaacacagcacgagaacttcgtgaagcatacacaagtatcagtagccaaattgatcaagtggaagaaaggatatcagagattgaagatcaacttactgaaataaggcatgaagaaaatattagagaaaaaagaatgaaaaggaatgaacaaagcctccaagaaatatgggactgtgtgaacagaccaaacctataattgattggtgtacctgaaagtgacggggagaatggaaccaagttggaaaacacactttaggatattattctggagaacttccccaacctagcaagacaggccaacattcaacttcaggacatacagagaacaccactaagataatcctcaagaagagcaaccccaagacacgtaatcttcagattctccaaggtcaaaatgaaggaaaaaattttaagggcagccaatgagaaaggtcaggttatctataaagggaagcccctcagactaacagcagatctctcttcagaaaccctacaagctagaagagagtgggggccaayattcaacattcttaaaaaaagaactttcaacccagaatttcatatccagccaaactaaacttcataaatggagaaataaaatcctt

SEQ ID NO: 854362 - DNA, 467 bp, Homo sapiens
ccctcccaagactaaaccaggaagaagttgaatccctgaatagaccaataacaagttccgaaattgaggcagtagttaataacctaccaaccaaaaaaagcccaggaccagacagattcacagctgaattctaccagaggtataaagaggctggtaccattctttctgaaactattccaaataatagataaagagggactcatctctaactcattttatgcggccagcatcatcctgataccaaaacctggcagatacacaactaaaaaagaaaatgtcaggccaatatccctgatggacaccgatgagaaaatcctcaataaaatgctggcaaaccaaatccagcagcacatcaaaaagcttatccaccatggtcaagttggcttcatccctgggawgcaaggcttgttcaacatacacaaatcaataaaggtaatccatcacataaacagaaccaatgacaaaaa

SEQ ID NO: 854363 - DNA, 617 bp, Homo sapiens
agtcgggttgagggggcgacttctaggtaataggtggattcaaagattttctgactggcaattcgttgaaagagataagctatgcctgaagaattgaagtcagcttgagttaagggaagggagcggttctggaagccaaggttattctcatgtaggtgaaacctccagacttcagagagaatagatagtgaatatctcttatctgaccttaaaagatgtcagactcttagttacatctcttctggatcaggaaaagacctggagagggaagaggattctctacggaatgtaaatttcccccacaagagacaacgttgcagggccatttcaaaatatgtcaaagaaatatagtttggggtaaaatactttgattttcagagtcaggttggagttggtatcttattgctacatagtcagttctgtcagtcttaggatctctattttaatgttatgctggtcagttgtgctaaactccaaaagggggagggtataattaggcatgtccaatcccccacttcccttcgtggactaaactggtttttcaggtttctttgaaatcttyttggttgtgaggggggtccattcagtctattgggggggcttagaattttaatttt

SEQ ID NO: 854364 - DNA, 519 bp, Homo sapiens
cgtcaaaaggtctttcaggacatgaagccatgcaaatgtgcgacctctgtagaccagccagaaccagtccatggccagtggtcttcttayctggagaaagttactgaaatcaacaaaaagttgtccaatgaaagctgtagctatggctggtggaacggggactgggggtcagtaagtcagcatctcgtggagctgcacattattttaatattgtttatctttaggccagtacttgtttagctgctagagaagaatcttgtggcagttagaacacagtttattctttaagtataggggtgtgggactaaaaccttgcctggaatggctttaggtcttttttataatttggcatcttattgccagagtctgttctgtcagtcttatcatctctgttttaacattaatgctggccagttgttgtgttaaactacaaaagggagggagtataacaaggtgtgtctaacctgtcccatcgtggtctagaactcagttttaaggttttctaggatccccttggcc

SEQ ID NO: 854365 - DNA, 591 bp, Homo sapiens
tattacattaatagccgtcttccctccacatccacaaatgacacagatcacattggatttcaacagataagatcccttgccctttaagagatggctgcttattggaagcagaacaatgacaaatatrcaagtgacaggaaagttttatttgtgagaggaaaagtactttgttatttacaatctcttgctgctttcaaaggaagcggggagtctcaagagggccctcagtgcactaaaatctcagacttcaccactatacaactcatctatgtaaccaaaaacaatttgtacctcaaaaatgtttgaaataaaagaaaatagttaaaaaaaaaaactggccccaaaattaagagggctgtttgcagagtgaagtgctggggatgaagatgacagattggaggaatctctggggagagctctgcagaggagaggggggtatcggatggcagggtggtgaggggagaccctggaatcaggaaggacccacatagaggagctgtaaacgggaaagaaagggaatgagatgaggctccaggagggtgttcctggatgagcaggtctgtgcaaacctaccccaaaggcccagggagc

SEQ ID NO: 854366 - DNA, 570 bp, Homo sapiens
taaattccaagtaattttataattgacctaattgcaaagaggtagctgagcagcaaaatatatataattccctwtggctgtggaatcaagtgtctgaagatggagttatggatttaagaaacagaaatgctgccactctgcccacccctgccatctcccacccagttccctccatctaggattcccattggtggagggagaagtggttgccaattctcacttccctatttaggcagatcctcaagcagagagactcctgcctgttttgtttctgctgatatggggaagtgggtacctctaaccacttccctagggagcaggcgctactgctgcctgaagccaaatatctcttccccgaaaaggaagtatagattagagagaggccctattctgggtagcttgaataaaatataagccctgtttctcagtctttgacagttgttaaatagcaagagtttggaaatccctaagctcagtccaagggcaatcatctgtatggacagttagtccagagaattggagagagcacaggttatggagtggccaatcttcctctgccacctaccacct

SEQ ID NO: 854367 - DNA, 557 bp, Homo sapiens
tcacgtgagcacacacctcccccctccacacacacccatgtgcatgtactctcacacacacacagacctgtgggcgcacacctacctacacacacccacacgcctacccacatgcagccacactcatgcatgcacacacacctgcctgtgcacactcatacattctaagatacacctacctgtaagccgacttgcacatgcacatacatacacactcagccatgtgtgaacacacacaaatgcaaacctgtataaaaaggacacaggtactttgtacactgaatttattgtgagaattaaaatgcaatggttagatgcccaggagtccttgctctgtcacttactagctgggtagtcttgggcaggtcacttccactctctctgcctccgtttctgcatctgtgaaatggaactattagtagcacctccctcagagattgttgttgaagatcgcytggcacagggcatggtacacagcgagtgcccagtaaatgtcagctattagtagtgccctgtgtcagccaaaactttttggtctctggaagctttcttttcaa

SEQ ID NO: 854368 - DNA, 581 bp, Homo sapiens
gctttgaatgattatttagagcattagagcaagagaagcaaactcaagactggaggggccagtcctgtgataggaatgaggaagtgggccagggggagttcaacctgaaggtcaaagtgggactcaatgggcgcaaatgcttctcagctccaactgacttttgttttgttttgtttttggagacagggtctcactctgtcacccaggctggacagcggtgatgtgatcattgctcactgcagccttgaactcccagggtcaagggatcctcccactgcagtctcctaagtagctgtgactacaggcagacattgccatgcctggctaatttttttagttttttgtagagacgtggtcttgctatgttgcccaggctggtcttgaatttctggactcaagagatcctcccaccttggcctcccatagtgctgagattacagtcatgagccaccatgcctggctccartcaattttttccctgtaaaaatacaggcctgatgttgtcagatcttttagttaagtgaaaatggatatccaaattgggctggacacagtggctcatgcctgtaatcctagcactt

SEQ ID NO: 854369 - DNA, 580 bp, Homo sapiens
ttcaaagcatgaaaattcatgcaaaactcctgagctggaatccaggatgtgaattcctcgctggagggactccagagaactgctctcaagggggactgggaacgtccatctgagtggaaattcacaggggaccctgcaggtttccaagtacccacattttgggccccatcagaacgctattagctacataaaatattcaaagcaatagccaagagggaggcccctttgccaaggttccccaagcttgtcctctggaattgattacttgaatcctttcagaaacgcagaaataaaacgatgccagggcggatggacaagctgcagattggctcatgtttctaatccagcagcccccccttccccctcccaccccggaacaaagtcttctccagtttttagtaaacttaacttgacaatcgtcaaagggaatcaaatagcgcagaaacgaagcttctaaaagatgtcagaagaagtcagaatcagyagaaatctactatgtgtcccacccaccccctcccctgaattagtacttaaatcttttaggaacaggccctaggggctggacgatttaacttgctgg

SEQ ID NO: 854370 - DNA, 655 bp, Homo sapiens
aaacaaaacatgaaaagaatatagacattccataatgtcaaattttgtttttaagtttgaaaaatgctttgatatttatggcctgaaaccctcattaccacttgtttaataygtgtcaacttttattttgtatgaggaaaatcacttgtttagtttagaactgatttaatataagacgttgaagccctgtcatatgatagaacttgggaaaataatccattgaatattttttacagagcatataggtgttaaaatgcagaaccagaaacacattagatttgaaacttaacatgcaaaatgaggatatttgtttttctttcttaaagctacagttcagagcttgggaatgctaacagatgactcactcttagagccattggttctcgattttctcccccagattagatgtctcgaattatacttgcagttttatggctcccagtgtttcagtctttgttttagctgtattgtgcttggaatgtcaaattattaggaccctgaatagtaaatcatcggggggaaccttcgcctgatgcaccattgtctacagtttaattacctgccatacatggtagaaattagaatgagagctttacctgcttaagccttacattctagcatttaaaacttagttaagatggaacctaaaaagcac

SEQ ID NO: 854371 - DNA, 667 bp, Homo sapiens
gctcccacataccccaccaccaccttagagaaccttataaaattttacacttgtaccaacattgtcctccaagcaaaagggcctgatccaggttaacamactgtgtttaactgcgtttaatgaatctccagttcactttctcagtccctctccctccttgatctttatgaccttaacattttttgaagactgtaggatagttgtcttataaaatgtccctcaatgtatgtttggtgtttcctcattactacccttggtatgcgtgtttggaggaaacagaagtgctgttgtgcccttctagctgcaccccataaggtgacacagggtgtcaatttgtcccatcattggtggtggtcacttggaccctgaggcaggtggtgtcagccagtctcccctggaaagttactctttgtccctttgtattggataaatattttatagggagatattttgagccttcgtaaatatcctatttctcatcaaagtttggcccattctttttagtattattgtttcttgcctactgtaatggtttccaagtggtgattttcaaattccttctactttattagttaacattgtcctgtattcttactctttttccccccatttattagtcgtatctgtatggtctttgattcctattttattcgatggtacataatcc

SEQ ID NO: 854372 - DNA, 640 bp, Homo sapiens
ttcccaccagcagtgtagaagtgttccctgttcactgcatccacatgaacatctattattttttgattatggccattcttgtagcagtaaggaagtattgcattstaattttgatttgcatttccctaatcattagtgatgttgagcactttttcatatgtttgttggctatttgtatattttattttgagaattatctattcgtgtccttagctcactttttgatgagatttttttttttttttcttgttaatttgtttgagttcctcgtagattctggttgttagtcttttgtcagatgtatagattttgaaggttttcttctactctgtgggttgtctgtttactctgcagactgttcctctgccatacaaaagctccttagtttaattaagtgccagctatttatctttgtttttactgtatttgcttttgggttcgtggtcataaaatccttgcctaagccaatatctggaagggtttttcctatgttatattctagaatttttatagtttcaggtcttagaattaagtccttgatccatcttgagttgatttttatataaagtgagagatgatgatccagtttcattgtcctacatgtggctagccaattatcccagcagcattgttaaatata

SEQ ID NO: 854373 - DNA, 585 bp, Homo sapiens
gaaggtgccaaacgggaattaggggatcccaaggatttctttaagagagataaaatattagagagttctttattagcattcctaagttgtttgttcccctcctgtagggagatgaggtggtcttccccatttttgttactttctagataccactgaaaatagttctcccattccggttgcttggtttttgtgcctgcgtttccatcctggttcacaggtacactaatttgggcatctcaaaagattcccatttaggccattgtaacttagaatctgctttagttacagtggtccactcggttaaatatttgcacgatcatttgccataagtattttgcatatacctagctagagttcctaaagggggaactttatgttttgcagctgctgggatcttagaggccttgttcgccataatttagagctcctcttcaaatttgaccaagctgggacatgtgtcgggcgcaaaatgtgctgcttgcaggtctagcttttcagatccattaccccttgacccagtttggtccacctgtgtcatggytacctggcacaatgtgtcaggggctcaaggtgcaggagggatca

SEQ ID NO: 854374 - DNA, 585 bp, Homo sapiens
gaaggtgccaaacgggaattaggggatcccaaggatttctttaagagagataaaatattagagagttctttattagcattcctaagttgtttgttcccctcctgtagggagatgaggtggtcttccccatttttgttactttctagataccactgaaaatagttctcccattccggttgcttggtttttgtgcctgcgtttccatcctggttcacaggtacactaatttgggcatctcaaaagattcccatttaggccattgtaacttagaatctgctttagttacagtggtccactcggttaaatatttgcacgatcatttgccataagtattttgcatatacctagctagagttcctaaagggggaactttatgttttgcagctgctgggatcttagaggccttgttcgccataatttagagctcctcttcaaatttgaccaagctgggacatgtgtcgggcgcaaaatgtgctgcttgcaggtctagcttttcagatccattaccccttgacccagtttggtccacctgtgtcatggttacytggcacaatgtgtcaggggctcaaggtgcaggagggatca

SEQ ID NO: 854375 - DNA, 469 bp, Homo sapiens
gtagctctcagcagatggaggaagccagaatagaatggttttcccccggagtgtgctgctcagtggcctgacacttccctaactgcttggccwaactctgcatccttctgctggtcagtgcatccctctcaacatccagctgccctgtgtttcttcactgatgtgcttccctcaacatctagctgcttctgtcttcttcccctgatctgctcctcttgacatccagcagcttgtgtgtgtctgctagaatcttgggcctttttaacaggcacagaattaaacatgtgtattaaacaaggaaagaatttagtgccaaagattacagagacaagaagtaaaatatactaacaacattgtacgagctgtttcaccctggactggttaaactttagaagagacataactgttcttggcatatctttagcagttaacagatgcaccccaggaattctggggtttgtgggcttgc

SEQ ID NO: 854376 - DNA, 644 bp, Homo sapiens
ctttaggagtggaagttatttatttatgctgtgtcttcttgggggtgaagtatctacataaactatttggaattcttctgcacaggaaatttgcctaatctctcacacttacagccatgtgctgcrtaataacacttcggtcaacaacgatggtggtcccgtaagattataatggagctgagaaattcccattgcctagaccttccggtaggacaagatgtggaggtgataggtagtggtactgatgatcatgatccagtgtaggcctaggctaatatgtgtgtttgcattttttttttttttgacatggagttttgctcttgtcgcccaggctggagtgcagtggtacaatctcggctcactgcaaccttcgcctcctgggttcaagcgactctcctgcctcagcctcccaagcagctgggattacaggcctgtgccaccacacctggctaatttttgtatttttagtagagatggagtttccccatgttggccaggctggtcttgaactcctgacctcaggtaatccaccagccttggcctcccaaagtgctgggattacaggtgtgagccaccgcacccggcctgtgtttgcagtttagttatttttattttttgttttaatttttagcaacaaggtgtca

SEQ ID NO: 854377 - DNA, 518 bp, Homo sapiens; identical to SEQ ID NO: 836696

SEQ ID NO: 854378 - DNA, 612 bp, Homo sapiens
ttctgaattagctcttcaaactttcttcacattttaatgaatactttaacaatcatcttttaacatgtaaagaagatgtccagtgatcattaaggatgtgttttacagatgttttaaattccattgtgaatagaaaaaaatcacctaagttaatatgatatttttagaataacatgcacacaaactttttttttttttgccgtgactcatatggtttagaaaaatagtttttaaacatctccaaggaaaagaatgtaacttggcaatcacaattgacaacaacatcttccaggaacacgtgccatctaggtccacatggttttagaaaagcactgggtaattaaactatctttaagttttactcttaaatgtgatcattattctaatattcatttgtgaggaaatgaacacttataaagcatttgaggatatgtgtattcaagtttgtcctcatcataaatcagtctgattttgaactctraaggcttagagacacattatttcatgggaagatgctatagtttcaatgcctgatgcttgagagttttattctttccctcaaatagattactttttgttgatattatgttccgtcaagttgtagaatttgga

SEQ ID NO: 854379 - DNA, 579 bp, Homo sapiens
ggtgcctgtaatcccagctactcgggaggctgaggcaggggaattgcttgaacctgggcgacagaggtggaagtgagccgagatcacaccactgaactccaccctgggcgatagagtgagacgccatctcaaaaaaaaaaaaaaaaagaaaagaaaaagaactttgtaaaccataaactgttatacaaatattgggcattgtaattagatctcacattgttccttaattcctcttgtgatttagaaggaagtagtggagtgagatcattatttgatagaaacatttgcaaattaaattatgtcttatcactcaggctacttgtcccaataattctttaacccatattaaccttaaaagttactatttttatttggtaaacttttgaaatactttagttgtaaacaaatctccctttctatagaatctagcctttctttttgtcattttggtagtctcaattgaatgcccagagataygccttttaattctgttttgctttttttttttttttttttttacaaataagaccttggtccatagtaaaactatgcaataggtctatgcaataggaactactt

SEQ ID NO: 854380 - DNA, 579 bp, Homo sapiens
ggtgcctgtaatcccagctactcgggaggctgaggcaggggaattgcttgaacctgggcgacagaggtggaagtgagccgagatcacaccactgaactccaccctgggcgatagagtgagacgccatctcaaaaaaaaaaaaaaaaagaaaagaaaaagaactttgtaaaccataaactgttatacaaatattgggcattgtaattagatctcacattgttccttaattcctcttgtgatttagaaggaagtagtggagtgagatcattatttgatagaaacatttgcaaattaaattatgtcttatcactcaggctacttgtcccaataattctttaacccatattaaccttaaaagttactatttttatttggtaaacttttgaaatactttagttgtaaacaaatctccctttctatagaatctagcctttctttttgtcattttggtagtctcaattgaatgcccagagatacgccttttaattctgttttgctttttttttttttttttttttacaaataagamcttggtccatagtaaaactatgcaataggtctatgcaataggaactactt

SEQ ID NO: 854381 - DNA, 489 bp, Homo sapiens
ctgccccgcttccccacttcggagcaacttgcagattaatttaactggactaatgccagttctcagtttgagcctaagatgattcgaacttgtgttttgaattggggaacagcactgcatgatggcttttcagttctagaagagaagaaaaaatcttttatttatttttattttattttattttattttttttgagacagagtcttgctctgtcgcccaggctggagcgcagtggcgcgatctctgctcactacaacctgtgcttcccgggttcaagcagttctcctgtctcagcctctcaagttacaggcgcgtcccaccttatctgactatttttgtatttttagtagagatggagtttcaccatgttgtccaggctggtttcgaacacctgatctcaggtgatccaccyacctcggcctcccaaagtgctggaattacaggcatgagagacaccacgcccggctggaaatctttattttaaacttt

SEQ ID NO: 854382 - DNA, 417 bp, Homo sapiens
tcatacagtatattgccttttcagattggcttctttcacttagagtgtgtttaagatttctccatgtcttttcatagcttgatagttcatttctttctgagactgagtaatatttcattgtaygcaatattcagggaaaggtgtaatgtctgtgtctagattcttttttttttttcatgtggatgtctagttgtttcagcactatttgttgaagagactgttttctccattgcattgtctttcatcctttgtcaaaaatcagttgactctacttatgtgggtctatttctgggctctttattctgttatattgatctatttttctgttcttttgtcaatgccacactatcttaattactgcaggcttacagtaagtagtgtccaccggggcctgttgggggttaggggacaagggga

SEQ ID NO: 854383 - DNA, 417 bp, Homo sapiens
tcatacagtatattgccttttcagattggcttctttcacttagagtgtgtttaagatttctccatgtcttttcatagcttgatagttcatttctttctgagactgagtaatatttcattgtatgcaatattcagggaaaggtgtaatgtctgtgtctagattcttttttttttttcatgtggatgtctagttgtttcagcactatttgttgaagagactgttttctccattgcattgtctttcatcctttgtcaaaaatcagttgactctacttatgtgggtctatttctggkctctttattctgttatattgatctatttttctgttcttttgtcaatgccacactatcttaattactgcaggcttacagtaagtagtgtccaccggggcctgttgggggttaggggacaagggga

SEQ ID NO: 854384 - DNA, 593 bp, Homo sapiens
cttaatagcatgtattcatcattatagtatcatacagaatagtttcactgccctacaaatcctctgtgcttcatctagttattcccctctccccataaccctgtggtaaccactgatctttttactgtctccatagttttaccttttcccagaatgttatgtagttggaatcatacagtatattgccttttcagattggcttctttcacttagagtgtgtttaagatttctccatgtcttttcatagcttgatagttcatttctttctgagactgagtaatatttcattgtatgcaatattcagggaaaggtgtaatgtctgtgtctagattcttttttttttttcatgtggatgtctagttgtttcagcactatttgttgaagagactgttttctccattgcattgtctttcatcctttgtcaaaaatcagttgactctacttatgtgggtctatttctgggctctttattctgttatattgatctatttttctgttcttttgtcaatgccacactatcttaattactgcaggcttacagtaagtagtgtccrccggggcctgttgggggttaggggacaaggggagggaga

SEQ ID NO: 854385 - DNA, 599 bp, Homo sapiens
attatgctcactacctgggtgacgggatccatacttcttctatgacagaagcagactaatgtaatcaacataccaccaagtaattggctaatcacccttgggaatggygccattggggggctcagcgttggtctctgctgctggcagactgggcactcaaaggtggcagtggccaggtcagccctggttagtgggagtacatgctgctgaacccatacataacctccatccctgccgccatggccattttgttcatgagcccattgggcgatgacagtggtggctggggaaagagactcactggtatccacaaaacgggtcatcctatccacttattaaaacctccccttctgaggtcatgctttggtgagtatttacatgggacacagatatcttcatatctttgcccattcatagaggtctattcacattgctcttccccaggtatctttgtcatcaattttccaatcatgttgcttccaaatccctgatcacccagaatgtgtttcctctaaaatccaaatagatgcaccaggcatagtgcctctctcttgagtgtaagaggggccagacacttatccttcaccttaaaagggcta

SEQ ID NO: 854386 - DNA, 632 bp, Homo sapiens
agcaagtgcctctccttggagaaatgagaattaaattmtgttgacaagccagttgacaactgtctatagcaagtttggtcaccaattgcttgggactgtcattgcttagctgctagggcccattaagcttcattgctgttcaggggccacctcaccaagacagtggcacagtgcttagtcattcaggtgccatgggacttttggggttggtactcagtcctggctctgttcactagctgtgtggtcatcagtggaatagttatcttctacagcttcagtttactcatctgtaaatgtaatttttagctatctatcatttgtgtatcaagaaagagcttaagaaggttggtgtattgctaagtactgaccaatatttaacacagaaatcttcaagtttgttggaatctgtaaatcagattaaaacaaggatataattggagtcttcaaagcaagtaaatatttgcatcttaccttggcattaaaacatccattgctaaggcagtagtatagttaccttccaggtggcattcaacagatgactcagtggctataaaacaaatagcaaacaaacaaaaaaatgtattgagaaagcactcactgatcatctaaaataaagaggaacaagaaactac

SEQ ID NO: 854387 - DNA, 580 bp, Homo sapiens
ggccaggtgcccctgtgagatgaagctaccagaggaaagataaggcagcaacatttgccattctgcaaaatttgcggttctgcagcatccactggtgatacctaggcaaacagggtctggaatggacctccagcaaactccaacagacctgcacctgaggatcctgactgttagaaggaaaactaacaaacagaaaggacatccccaccaaaaccccatctatacatcaccatcatcaaagaccaaaggtagataaaaccacaaagatggggagaaaccagagcagaaagctgaaaattctaaaaatcagagagccttttctcctccaaaggaacacagctccttgccagcaacggaacaaagctggacagagaatgactttgacaagttgagagaagaaggcttcagaagatcggtaataacaaacttctccgagctaaacgaggatgtttgaacccagtgcgaagaagctaaaaagcttgaaaaacgattagatgaatgrctaactggaataaacagcgtagagaagatcttaaatgaccagatggagctgaaaaccatggcataagaactgcgtgac

SEQ ID NO: 854388 - DNA, 638 bp, Homo sapiens
tagttgtcaaatcaaataaggatccaatttcatcacaagggttacattagttctaggtttaagccaaaaaaccctactagcraatgttctcaattcttttgatgaagagtcctatttctgttattaattcatggtcataagagccaaactacttatcaaatgtcattccaaattcctctgacccaggtagcttgtccacagcaataaagttttctttacttcagtgccctgaacaataatggaattcaaatttttttccggaagaattttgtaaagttgtcacttccattaaaagtgattcacaaccacaaaacacttcagtccttcctggctccagagagaaaccaattgcagaccagacccaggtataaaagatgatgtagcctttctcttccaagatccatgtctaagccattgccctgtttctgatggctgctcaggctggaaccccaaagcagacaccaaagaataccaattggcataaaactttctcttttagcacatccatatgcttggtttaaaatacactaatttccaccttcctgattttcctatcatcagtaaacctccaaaaaagttttgaagagtaacacaaaatcacaaatgctttgaaaaaaaaaagatgacaatacattttg

SEQ ID NO: 854389 - DNA, 642 bp, Homo sapiens
tcctcaccagcaagggaaattctaaagrttacatttcaggcagaaagaaagtgatcccagatggaagactggaaacacaaaaaggaatgaagagcaaagaaagtgacagatgcatgatgagtaaatccaaatgaacttccactgtgtagaacaatatattttgttggtgttctttaaaaatatagaattaaaatacaaaacaatgagagaaaataagttgggagtggttaaacatttttagagtgttccaaggaccttgagttactctatgggaaatgaaagctttgataaactttagactgtcagtataaatattataatttcgccaggcacggtggctcacacctgtaatcccagcactttgggaggccgaggcggatcacaaggtcaggagttcgagaccagcctgaccaacatggtgaaaccccgtctctactaaaaatacaaaaattagccgggtatggtggcgcacgcctgcaatcccagctactcagggggctgaggcaggagaattgcttgaacccgggaggcagaggttgcagtgagccgagatctcactgctgcactccagcctgggcaacagagggagacttcataaaaaaaaaaaaaatatatatatatatatatatatatatgtataaa

SEQ ID NO: 854390 - DNA, 595 bp, Homo sapiens
ccaaaataccataaataaggaatgttttaaagaaaaatggttcagaaggaaggaaaactataatgtagttcttgttagttaagttgacattaatcctckctttgctttaagtctctcctgtgttgacactagcagaatgtgtcataaagacatggaaagatcataaattctcaactctgctctaaagatctgaccttcagcgttgcatttatttggccacacctttatagtgtggtcatacctagaaaatattttcttgcctggtcatcagccctctcacctcgattactttctatattttagcacaaaagaagaaatggcgcattcaccactcagccagttgcactggaagtgaatttaaattcctgaactggttatcttggaagatattgtgcttattgcagatgtggccggtgcatgagtttaggcactaccatgctctgggctgtggttcttggctcctgcttctggatggctggacattaccaggagagagcctgctgatacatctacgcacattcactctactgcacttcagctgtgtccttgttattccacagccctttaagtcctggttcaccaaccagatgttaag

SEQ ID NO: 854391 - DNA, 605 bp, Homo sapiens
aggctttttttcttcttcaaattcctaaagaatgggtagtcaacctccgccccattttttaagcttcttggtcagccttgtatgagattactgaatatatatttttaatacttgaaagtaaaatagggacatatcttctatatgtttataatttcagcatttacattctacttttctaatactttataagtagaagacaactgatatcttttgtagtatcataatagagccctaacacctagacctttaacttactaggtggcaaaattgtttatttttgaatttcgcatggcatcaatatttgattatttgctgaatgacagaattttgtgattttaatgtattccctaaattgcttctcagtctctcactcagtaaaagatcctacctcaagctgacatacacatcactgagacaatatgaaaattcccctttgtttcttatcagttttgtgagacacatgttttggctcacctctataaaataytcaaggatgctaatttgagaaaactaaataacaggaacattctaaatttatactttttggctttactgatgtatgaatattatcagttacattatcaccgtgtggcagcatacattgc

SEQ ID NO: 854392 - DNA, 534 bp, Homo sapiens
ccttggagagaaaactaaaggtctgtgccaaaaaaaaaaaaaaaaagaaaatctgcaaaggtggttctctgattgtctcacaaagtgtaacttgcacaatttcctccagacagccttaactgtctcaccatctcacagattaagatatgtaaggctaaatgttgtatattttacatctaaagctgctttgaaacatcaaggtgtttattagctggattcatgctatgcctttttagttgttgctgaaccacaggcttatactttgaggctttctggccacatgatggacctgacctttcacccaagaggtaaaaatgccacacatcattgcacaaattccaaaaatatttccattggcgtaagacagaagctttgcttataccatggtaggcacaagagaggattttacattttactagatcctaaatgtcttagtcacatgggaaagcatacakaacatagtgttaaatgtatgaagcagaaaacaaacgtggtagatccctgacatgcaggagggtgtgtctctggacttct

SEQ ID NO: 854393 - DNA, 464 bp, Homo sapiens
agggaagagagtctggcctagtctaagtgtctctattactgaattaattagccatggccaggggatggagtgactaacacagtcatrgccagtgaggatttcctagggatgctataagtgaccatgggcatagtgccaggtctgtaattatttttgtatatttatttctaaattagggatttggtctatatgaaaggtgattttattaaatatgtgtagcatatatcatacatcataaataatgtatagtataatgtagcacatatatacacatttatatattacattatacattataatatacattatatatagatgtaatgtagcatatctatacatttccatagatattatatatatagtgtatattgaagtacatagcttctgatgtatagtaaaataatttgacagaaggttcttagaacttttaaaaatgacatttttattggttagagattcagtct

SEQ ID NO: 854394 - DNA, 464 bp, Homo sapiens
agggaagagagtctggcctagtctaagtgtctctattactgaattaattagccatggccaggggatggagtgactaacacagtcatggccastgaggatttcctagggatgctataagtgaccatgggcatagtgccaggtctgtaattatttttgtatatttatttctaaattagggatttggtctatatgaaaggtgattttattaaatatgtgtagcatatatcatacatcataaataatgtatagtataatgtagcacatatatacacatttatatattacattatacattataatatacattatatatagatgtaatgtagcatatctatacatttccatagatattatatatatagtgtatattgaagtacatagcttctgatgtatagtaaaataatttgacagaaggttcttagaacttttaaaaatgacatttttattggttagagattcagtct

SEQ ID NO: 854395 - DNA, 464 bp, Homo sapiens
agggaagagagtctggcctagtctaagtgtctctattactgaattaattagccatggccaggggatggagtgactaacacagtcatggccagtgaggatttcctagggatgctataagtgaccatgggcatagtgccaggtctgtaattatttttgtatatttatttctaaattagggatttggtctatatgaaaggtgattttattaaatatgtgtagcatatatcatacatcataaataatgtatagtataatgtagcacatatatacacatttatatattacattatacattataatatacattatatatagatgtaatgtagcatatmtatacatttccatagatattatatatatagtgtatattgaagtacatagcttctgatgtatagtaaaataatttgacagaaggttcttagaacttttaaaaatgacatttttattggttagagattcagtct

SEQ ID NO: 854396 - DNA, 667 bp, Homo sapiens
aaagagaattttatttaattaactgtaaaattaacgtcatcattaaaataataaaacccaamttctcttctctaggaggtcatggccttcctagccacttttatgtttcaaataagaaaaatgttgagttaacaatttatttatatggtccgttcagtataagaactaggaagacaatttattcatgccttagacttctaatagctccattcccatatataaaggagtacatatcccaattaatacaactttttgccacattaattattctagcagaacactctaatttttgtgtttaaagaattcacaagcctctttaaaatatcaggaacgatattaatatttagtgaggaacagtatatatatatagagagagagagaaagggttacattaatcatttctcatatatatatatatatgagaaatgaaatgaaatatatatatatttcaaagcttacagagtttaaggaatcttcctgaggtcacaaaggtcacagctgagttttaaaaccaagtctgcacggtaccaaaatccttcttctttctaacacactaaattgccttaagaaaggcagctccccttactgaatcccacaccattcccatcccacgaatatattctttcttttttcataccacaaatttttatttaccacctatcagcca

SEQ ID NO: 854397 - DNA, 634 bp, Homo sapiens
tcaagatttaaatgtaaaaactcaaaaccataaaaaccctggaagacagcctaggcaatgtcattcaggacataggcatggacaaagatttcatgacaagatgccaaaagygattgcaaccaaaagttgacaaatgggatccaattaaactaaagagcttctgcatagcacagcacagcaaaagaaactatcaacagagtacacagaaaacctatagagtgggagaaaattttttgcaaactgtccatctgacaaaggtctaatatctagcatctataaggaacttaaatttacaagaaaaaaatcccattaaaaatgggtaaaggacatgaacagatacttctcaaaagaagacatacatgtggctgacaagcgtatgaaaaaatctcaacatcactgattattagagaagtgcaaacccaaacccaaaccacaatgagataccatctcacaccagtcagaatgactattattaaaaagtcaaaaaataacagatgctggcgaggttgtggaaaaaaagaaaaggaatgcttatacactgttggtgggagtgtaaattagttctaccattgttgaagatagtgtggtgattcctcaaagaccttaagacagaaataccattagatctagcaat

SEQ ID NO: 854398 - DNA, 612 bp, Homo sapiens
tggcaaaattgaattagaaaaatcacaatttgggataatgtttttaggaataacagtaaattcacatattctcaaagaatttccccacaagatacaaaggggaaatgagtaactagaaaagaaaaccagcagatgccaccttgactaatgatcacagttaatattaccagcaatgggacaaatagatgtctacccttccaaatatgatgcaatgaaaaggacacacctcacttttgtggtatttctgccaaaaatgcataacctgaatctaatcatgaggaaacctcagaaaaacctaagttaaggtaaaaatctacaacaataaatggcctccagtcttcaaaaatgtcaagaccatgaaatcacaaaagagaaagaatgtgggattgttagattataggagaaaaaagagatatgacaactaacagaaagttctttgtgattctgggttctgggttggagtctggaccagtattttaaaaaaaawtgccaaatcttattagtaggacagttggaaaagatttgcacgagatctgtagcttagattataattttgtattaatgttaatgtcctaattttggtaattttattgtggtcaagtaatgaggaaa

SEQ ID NO: 854399 - DNA, 606 bp, Homo sapiens
gtcaagctgaatgctgtgtgtggcaatttgaactttgtttcctttccccccgtgtggaatctatatttcctccacatgtgaatattaacccatggggttaacccacctcattgctgggtggaggcctcttctcttcaatgatgtgactcttgaggtcttcagtgtcttattttacttatttctgggagttcagaaattttaggccatttttggctaaactcctaggcaatatgtcaaagcagaagaaagtcccatagtaatcctaggtgtaccatgaaaggcactaagctaagaggagataacagaggctccccatggttgatagagaaaagtctaaagctcttaagattgctaaaataaaattcagagaaagagactaacttaatcgagtgattattgtgtgacatacaccctctcctttcattctcctgttaacttgcgttaatagatattatcttcaggttacaaatgataaagttaagattgaaataaacaaattttcctaggtacacggatcagatccaggcctcctgaatcctgaatcatcttttcttgtgtcatgagtcmaaaaaaaaaaaaaaaaaaaaaaaaagcccaataaaagag

SEQ ID NO: 854400 - DNA, 485 bp, Homo sapiens
ggggattgtcagacagtgggtgtaggacagtgggtgcagtgctccgagcctgagctgaagcagggcgaggtatcacctcacccaggaagcgcaagcrgtcagggaattcccattcctagccaaggaaaggggtgacagatggcacctggaaaattgggtcactcccaccctaatactgcagtcttccaatggtcatagcaaatggcacactaggagattatatcccgtgcctggctcggagggtcctatgcccacggagcctcgctcactgctagcacagcagtctgagatcaaactacaaggtggcagcgaggctgggagaggggcacttgccattgccgagtcttgagtgggtaaacaaagcagtcgggaagcttgaactgggtggagcccactgcagctcaaggaggcctgcctgcctctgtagactccacatctgggggcagtgcatagccaaacaaaaggcaggagaaacctctgcagac

SEQ ID NO: 854401 - DNA, 287 bp, Homo sapiens
agatttctggctaacaaagcaacacctgaaggatcctgtgacattactgctgaaattaagttacaaaaggacagtcactcccatctgccataccattttaccctcttgcttgcttgctctgatgaagccagctgtcatatgaacagctctatggaaaagtccatttggcaaagaactgatggagccctctggccaacagctgtagaaaacctgrggtctcagtgcaacagccatgaaagaagtgaatcctgccaacaacaacataagttactcttggattttagtct

SEQ ID NO: 854402 - DNA, 594 bp, Homo sapiens
catgcagcatgatttgccctgaacatcactcttctagaaaagaaataataccagtacccaagkacattatactggttaggataggctaagttatgttgcagtaacaaataatcctaagacatcagtgccttaatataacaaaagtttatttctcacattttatatgacaaatttttcattcacacatccttccttaatcactgcagcaagaggaaggggatgggtcaaattatgaactattttttaaagcttctgtccagaggtcatccaatcctttctatttcattaactgaatcaagtcatgcccacctaactttgaaatgggtaaggaagtgtaatcctacaatacacctgaaaagagagaagaactgtaatatttatgaacaattctgggggttattataggtataatcctttgtgagagaaattttctctttagattatttcagagtataagttaatagctaccagccaatgagatgagctgcttgactcacgtctttactcatgactcaagaggacacacgcatgacttagaagtacaaagatgaaaagattatcctttttctcaagaatcttgcaggccagtgatga

SEQ ID NO: 854403 - DNA, 595 bp, Homo sapiens
acaagaaagggacatgcagcatgatttgccctgaacatcactcttctagaaaagaaataataccagtacccaaggacattatactggttaggataggctaagttatgttgcagtaacaaataatcctaagacatcagtgccttaatataacaaaagtttatttctcacattttatatgacaaatttttcattcacacatccttccttaatcactgcagcaagaggaaggggatgggtcaaattatgaactattttttaaagcttctgtccagaggtcatccaatcctttctatttcattaactgaatcaagtcatgcccacctaactttgaaatgggtaaggaagtgtaatcctacaatacacctgaaaagagagaagaactgyaatatttatgaacaattctgggggttattataggtataatcctttgtgagagaaattttctctttagattatttcagagtataagttaatagctaccagccaatgagatgagctgcttgactcacgtctttactcatgactcaagaggacacacgcatgacttagaagtacaaagatgaaaagattatcctttttctcaagaatcttgcag

SEQ ID NO: 854404 - DNA, 560 bp, Homo sapiens
aggcaaaacaatcccttcacggtgctttgtgtgtcatctggaacctcatccgtgataatcatgtggtgtatggaggaggggctgctgagatatcctgtgctctgccagttagccaagaggtggataagtgccccaccttagaacagtatgccatgagagcgcttgccaacacgttggaggtcatccccaaggccctttctgaaaacggtggcatgaatcctatccagagtatgaccaaagtctgagccagccaagtgaaggagatgaaccttgctcttggcatcgactgtttgcacaaggggacaaattatatgaagcaataacgtgtcacagaaacctcgattggcaaaaaagcaacagatatctcttgcaacacaaatggttagaatgattttgaagaatgacaacattcataagactggagaatctgaagaatgaagacratgagaatactatgtagtaagatccactactgtgattaaataaatggatgtcttgtgatgcgtctacggttatttattacatcctttttcagaccctgtagatgctataataaaaat

SEQ ID NO: 854405 - DNA, 428 bp, Homo sapiens
tgtcactggggccgaccagaagaaagggaacagcacagaggcagaagagaaggatgcctgggtgctcaggggcagagcacacagacccctgtgtgaggtccagagaaacgtgggtggagcgggagttgagaccgaagcacagagcgccccccgccaggctcggggctccattgcaaagttcccctgagccagaggtaaaggcccgtgtctctgtgtgtgtgcctgcgtgtctaactggccagcggcctataaactgttgttcttaatagaattttaatctctttcatctacgggagtggaaggcgttttttagcttaataattttcaaaagcaccaatcagctttgagactgaatttcttgcttttgttttctcagtagygggagcgttggttactaaagacctaaccctgactgctgggaattttca

SEQ ID NO: 854406 - DNA, 522 bp, Homo sapiens
gtgggaggtgtgcggcactgacttggggatcggtcagagctgctttcagacaaatggcccgtccaggacaaacctcccgcatctctagctgtttaactcatttcatttggttttctaacctctgtttaatccagcacaatttcctatctacccctggatgagttaaaagtaaaacactcaagttcaaatctgccctaaaatcctcggaaggatgatgaatttagtcaaagatgccccgctatgagaaattcagccatgagacattcaccgcgacgcctttcagctactgaaagaacctacagatttgtccttctcttttccattccttagcgaattaaaaagaaaaaacaaaaacaaaaaacaaatgaagaagcaactggtacgagcagatttggtgcaagagaaccaatcgcaggagccgcccaagctcacttaggaaaagagctgagcgacagcagctgcacccagaaggtggagaccgcatgcraacccaggatcccaggcagcacaaggctagagacc

SEQ ID NO: 854407 - DNA, 629 bp, Homo sapiens
gaaagagtgctccttgcagatggaacaatggtgagagcacacctggacagaggaggagaagaggytattattcctgatggagatagcctttactgctgtgtcattcccctattggctaggttggactgcacagtctaagcaattccaactggctattttaaaaaagagcaggagtatgagccagagtggtgaggcatgtagtttggcaggaagggcagttacagaactggtggctcaggatgagtcaggatggagcaggtgaccaggggtgagtcatatcaaagcaggtgaccaggggaagagatgtgaactactgattaggactggtgggaaagttgtttactgaaattagaagggagggggcaaagggaaccaggaagttaaactttaaaatggagaatcaataagagagctgaacatactgacatactgattctttgaatagaaacttggggttcactatatttaacagttcttcatcttgaatttttacagttccttctcttcaaacttccttaaaatgtcttggcttagttgttctgcatgattctctaaaagaaaaagcttctctgaataaggtggaggagaattaagggaggttttagtaagtgctgcctgtatgagtctgt

SEQ ID NO: 854408 - DNA, 591 bp, Homo sapiens
attacaggctagctaaacaatgtcatttcgcatgtggttattcacatccactgcctttatttaaactcttttaacyccaagtgtcttttattttggaaggaaaaagaagacttttttgaaatcctaataattcaagtttttagagcagaatcatgtctgtttgcaaagcctctggacaataaaacacagagataggaagagaaaagttggggacctagaaatgtcatatagctgaaagtataatgtgctgaaccaatgggaataaagttagggagattgtgggtgaattcatgtgttttagggaacaaatgtgaaaagcaagtacatccatatgatatgagaagaaaaactaatataaatgagcattaagtataacagatttgtttatctaaataagtaaaatgctaactttttatttcaaatctaaatcccagtaaagctaaccaaaaagtaaattgataaatggaatctttttatttattttttcaatttgtaaaaaatgaatttccttcctttggaaataatgtttatcatttccaatcatcttccaaatttaattcatttgggcaaaactactcttgtggattctgg

SEQ ID NO: 854409 - DNA, 644 bp, Homo sapiens
acactaaggccgggcacggtggctcacgcctgtaatcccagcactttgggaggccgaggcgggtggatcacgaggtcaggagtttgagaccagcctagccaatacggtgaaaccttgtccctactaaaaatacaaaaatcagctgggcgtggtggcccatgcctgtaatcccaactactcgaagaattgcttgaacccaggaggtggatgttgcagtgagccgagatcactccactgtactccagcctgggcaacacggcgagagtccatctcaaaaaaaaaggggtagttacagtaaaagcccagacactaccactgtgcagtaacatatccatgaaacaaagctgctcttgcgccccctacatctacaaaaataaatacataaagtaaaaaataaagagcagagcagacagaaagcatttaagccaccgaacagcacaatcgaatcagaattttctaaaggaccatcttacttttgtgcagagaatggtcgggtgagggaaaaaggcagacacagggagaccaaagagccaacattcattcagtgcgtgcttttgaccactgatgggtactaagatgtctgtccaggcgtggcaaagatgacrgcaagacaaacaaacgcaaaccccatccccggggagctg

SEQ ID NO: 854410 - DNA, 612 bp, Homo sapiens
atctgttaagttaggctgtctgaaacagttaagcatgaaaatatacttgtttggaaactattttgaargacgtaatgaaaaccagttgaattcttaacttgaattttttttataaaataaaattgtgaaaaacttaagaaagttaaagtgaagtaattttaaagctcccccccaaattagtcattctttaaataagatatataacatagtcaactcctgtaataccctccactggatatcaacagcatacatgctacaggttaaatatttgtaaaaggatagctaattttatgactacccataaatatttttagcctaggacaatgatatgggtaatattcaggcatttgattttctttaatttttttttttggtgaatgatatagtggggttactttttgtagaataaagacacttgtagagagcacaagtggtaaattacagaatataggaaatatccctcacacttataattatatttaaacagcagtaaatgaactaaattagttgtaaaagtcactcttgtcagcatggtgaattgaacatttccatatgactcttacttttctatgtcattaatatcactccatctcatagttatttgtaacacct

SEQ ID NO: 854411 - DNA, 612 bp, Homo sapiens
atctgttaagttaggctgtctgaaacagttaagcatgaaaatatacttgtttggaaactattttgaaagacgtaatgaaaaccagttgaattcttaacttgaattttttttataaaataaaattgtgaaaaacttaagaaagttaaagtgaagtaattttaaagctcccccccaaattagtcattctttaaataagatatataacatagtcaactcctgtaataccctccactggatatcaacagcatacatgctacaggttaaatatttgtaaaaggatagctaattttatgactacccataaatatttttagcctaggacaatgatatgggtaatattcaggcatttgattttctttaatttttttttttggtgaatgatatagtggggttactttttgtagaataaagacacttgtagagagcacaagtggtaaattacagaatataggaaatatccctcacacttataattatatttaaacagcagtaaatgaactaaattagttgtaaaagtcactcttgtcarcatggtgaattgaacatttccatatgactcttacttttctatgtcattaatatcactccatctcatagttatttgtaacacct

SEQ ID NO: 854412 - DNA, 628 bp, Homo sapiens
aatataggaaatatccctcacacttataattatatttaaacagcagtaaatgaactaaattagttgtaaaagtcactcttgtcagcatggtgaattgaacatttccatatgactcttacttttctatgtcattaatatcactccatctcatagttatttgtaacacctttgccttataccatttaaactagataagagggacaggaaaaaatataagttggcctggttttctaaaaaaaaaaaaaaaatgtattcatcccttctataacttgtgaagggaaaataaatctaggggcccccaaatcactaagctaaagagaaaagtcaagctgggaactgcttagggcaaacctgcctcccattctattcaaagtcacccctctgctcactgagataaatgcatatctcattgcctccttaggtcaggctaattcagaaattcgaaagaatgcaaccatttgtctcttatctacctatgacctggaagccccttycccacttcaagttgtcccacccttgctttgagtcatccctccttttccaaactgaaacaatgcttgtcttacatgtgttgattgaggtctcatgtatccttaaaatgtttaaaaccaaactgtgctctgaccac

SEQ ID NO: 854413 - DNA, 411 bp, Homo sapiens
acgcctgtaatcccagcactttgggaggctaacgtgggtggatcacgaggtcaagagatcgagaccatcctggccaacatggtgaaaccccacctctactaaaaatagaaaaaaattagctgggcatggtggccaagcctgtaatcccagctattcaggaggctgaggcaggaaaatctcttgaacccaggacgctgaggttgcagtgagccgagatcgcaccaccgcactccagcctgggcgacagagtgagactctgttttattaaaaaaataaataaataaattttaaaaaagtaaaggaataaaagaatggctacttcataatcagaacagtagccaagaaagaatggctacttcrtaatcagagcagtagcctaggctgctagactaaagatatttacagttattt

SEQ ID NO: 854414 - DNA, 618 bp, Homo sapiens
gagatattttaaatattttttttaaatggggctgttttaagtggcttactttgattgggaactcttaaatcagaatagagcttcctctgggttagaaaaatatctattaacatttttcataactaacagagggtctttcattctaagtgcctttttatgaatgctgggaataacgttcaaaatcctaaggaaattgaacactcaaacacaggattcttagcaaagtaattttacttctgcacagaggggtgcttctccttggccagtcaccatgagagcacacctgaacaaaggggcacaagagcctttattcctgacacaagtcctgcccctgtacactttccccattggctggggtcaggccatacaatctaaagtaatcccggcgggctaaacatttgaaatttttttagataaggtgggcacgtaagggagagagaggaaaggggaaggggtgtctgcaatgagctagagagctagtattctttcyagataaggaaaggaatgtgagctggtactgataatgcctggtactgtggcatgtctgggcatgtaacaaaggcagaaaggaagaaaaaagagaaaaagggaaaaggggtagggggcactatgaattaa

SEQ ID NO: 854415 - DNA, 618 bp, Homo sapiens
gagatattttaaatattttttttaaatggggctgttttaagtggcttactttgattgggaactcttaaatcagaatagagcttcctctgggttagaaaaatatctattaacatttttcataactaacagagggtctttcattctaagtgcctttttatgaatgctgggaataacgttcaaaatcctaaggaaattgaacactcaaacacaggattcttagcaaagtaattttacttctgcacagaggggtgcttctccttggccagtcaccatgagagcacacctgaacaaaggggcacaagagcctttattcctgacacaagtcctgcccctgtacactttccccattggctggggtcaggccatacaatctaaagtaatcccggcgggctaaacatttgaaatttttttagataaggtgggcacgtaagggagagagaggaaaggggaaggggtgtctgcaatgagctagagagctagtattctttccarataaggaaaggaatgtgagctggtactgataatgcctggtactgtggcatgtctgggcatgtaacaaaggcagaaaggaagaaaaaagagaaaaagggaaaaggggtagggggcactatgaattaa

SEQ ID NO: 854416 - DNA, 611 bp, Homo sapiens
ccttataagaggaagagacaccatatctcctcacatgtgcactgaggaaggccatgaggggacccagtgagaatttgcattgtttaagccacccagtctgtggtatttgttayagcagctcaagcagactaatacaaggattcaatggcttcttgagatataacctacaataagtaatgtgatgatactaaaactgatttgcctaatattgaagaaaacagaaggctcaaatagattctaaaaaattaggctcattattacatgagatcagaagcattcatcttctatgttttctagattggcctataggacgacttcttaactaatgcaataaactaatgcaataaatgatataacacaccatataaccctccatgatgagtgattacactcaaccaactactgatacatagtgttgtgttgcaagtagctagaattcatgggtccagaaccaaggggaagaaatggcattgggacttctcaccatcacttcctgtgactcatcttgctcaatttatttttctgtccttgcaaacttttattctacctgactttgtcctggttctcagattttagatcaactggatccctgcctagattaacaggcaaag

SEQ ID NO: 854417 - DNA, 561 bp, Homo sapiens
atcagcttcatcatatttaaaataagaggctagaaccagattagctgcttgtcaaagatgcccctccacccaccgagccctaaggctgcctagagatgaagcctttgggatcttcccccacttcagtcagagctatgcctcttctacctgctttatattgatgttgttgtttgaaggcattatagaaggagtttagttactttcaatagtttgagaccgccgaagccaaattcttcatatatataatcttttcctctgttttttaactgtcatgaagagaaattcttcctagggtcatttgcagtgctaaaaaagtttgtacatctgattaaatcttattaaagttgtacatctgattaaatctgattaaagagcttctccctgttctccagcatgtattctagtataatttaattagataaatgtctgttctattatattttatgaaggaaggctcttctacactgrggttatgtggttaattggttgatttggaaattcaccctcagtatttagttctctgtatttggtggtaaacagagagtacagattcaagattgc

SEQ ID NO: 854418 - DNA, 615 bp, Homo sapiens
ctctcaacatcctaaacttctttcagaggagtgttccaagatggattattctgatttctgggaaaaatccaccatggycccttcacatacctaccctgctgtcaacttcagtatgtgttcccttcatcctggcccaggaaagtatacccaaaataagcaatgacttcattatgagttgaaccgaatggcctcatggtatagattcttagctaaacttcacaatgtgaattgcctggattacttaaatgctctgttgagactaggtgatccaaaaagcaactagactttgcatccagaataaactccattgtgacttagtattatattttagttaagttctgtatgaatagatgtttttggcatgctaatgtgcttgaatggtcctttcatagaattagaggcattttagggctgcagggggaatacaatttttggtccatcctccgcgttttccaaatgagttgactgtggcttggagaggttaagtggcttttccagagccacacgatgagtgtcaagccccactctgtaacatcaaagggctgtcccattcatgtggaggggacttcataagtcatggacaagaggaacatcatggccaccacggtcatgata

SEQ ID NO: 854419 - DNA, 581 bp, Homo sapiens
gcacgagggcctggggaaggcgcctcagaaggaagcaagtctcagaaggcataggtacaccgctgaagttgctaaagctcagagccctgcagcagggcaggaggggagaggtagcgccctaggctccccgctcacggctgttaggttctcaccctcgtccctgcaccctccgcgctgggaggctctgagttgagccactgcagcaaggctgacgtcccacgctcgagctccggacctgcgtcccagcggcaccttccagcagtggctgtttgcaggagaatccagaggaaccctccgcagacagatggatctggactgtgttgtcctgtaagatacactgcatgaacctggagcactcagaggacatcttcggctcaggtgtaatgaaaccaagagaccatagttatttgtcttcaacatgtaattatctcacttttcattctcaccatcacctccgcatggcactcacactgggcaaggcgacagacrgaataatggccccaccaagacttgcacaccctaatccttggaacctgtatgtaaacaggtcattttaagtgggagaggggactttgcagagt

SEQ ID NO: 854420 - DNA, 578 bp, Homo sapiens
acttagaaaaaaaccatgcaaattacaagaaacataaatctacttagggtactaggattggggcataaacaaaaagaagcatgtaaaccttggtgccaagcttaatcaattgattggttgattcgagtattcattctttcaaaaagcattcacctttgcccattagtttccaaggagttggaaaggcacagattaacagattatagtcccaactcatattacagggtcatgcagtaccacaagaaaagtaagaaaatacagtttgagttgcccaaaggaaggaaacttgattaggtcctggatcagggtatggtggagagaatttgggaatttgttttagagaaagtgatggttatctctagaaagatgaataggcagttcctaaggtagattccttcatgatgaaagtatattcaaaaggctgatgatacaaaataataaggcatgactgggattctctgsaagtttagtgtagtggaagtttaagctacaggtagggtgggggcaaagaagtgagacacaaagttgtcaactaagtggtttccagacctcaggaatagcttcacactccacattca

SEQ ID NO: 854421 - DNA, 612 bp, Homo sapiens
ccacccttcccagcctctggcatcctctgctctactttttacttctatgagatcaactttttaaagcatccacatatgagtgagtacatgtgctgtttaactttctgttcctggcttrtttcacataacataatgtcctccggtcttatccatgtttacatgaatgacaggatttcattctttgttttggctgaatagtattctatgatgtatgtataccatatattctttatccatacatctgtcgttggacaactaggttgatttcgtatcttcgctgttacttgttggaactctggaaaaaaatcaaaggcttacagcaaccaatagaatgctgatctaaggaaaaaaagcaacttaaaaatgttaggaaagctgtgtgataggaaactccatctccttcccagtatggcagtggtgatgaagtggcagcagcatgtatttccagtgtgagatcctggtctctgattccaaagaaagaacatatcttattaacaaattattgtgtatgtctgttctaccatgactggagatacctaaaataccagtgcaaggtgcttgtctctgttttgcctaactcagaactcaggccagaaaagtggtgggcatcgc

SEQ ID NO: 854422 - DNA, 624 bp, Homo sapiens
acactaggaatgggcaagatgggcagggcttgggaggagccataaggtgaggggagcgtggcacctcacggagacaagagcaagaccagcagacacaggcatggggcagggaggggagtcaggtggccagggtgtcctacgggcacaggccggaaactgcgatccctacgtccccagctgctctgccatcagaatgtgtggcccggctggatgggtctatttctcccctggccgcctatacaggcttgatgtgcctgggtgcagagcctcaggagtgcaggccaagccactccagtcccagcagccctggctttcacagcaggcttggcagattacaaaggtgacccggccaggcagaggccccaggccaagcagagaagtccctgccgggactgggcgggacagcccagccctgctcctccctggggctcctcccacgtcctgtctatcacataacgggtgcatttttgccttctattagggcggacagtcttgttaccctccctgaccccaggaaagtaaagtggcagcctcagctacttagggggtgtcagtgcccagcccttctcagctgtggacttactgtaccytgcctgagcccccagcactgccatctgcttcatg

SEQ ID NO: 854423 - DNA, 644 bp, Homo sapiens
attgaccataaaggatgtaggggccacgttgttccactgtaatgtcaaggagggggtggccattgtttgtcccagcctggggctccccctctggtttcctatttgtagttactagaatgaaaaaaaaacatgatagataaataaataatccactggcagagatcagagaggttcaatctggatcattaagaatgaattggggccgggcgccgtggctcacgcctgtaatcctagcactttgggaggctgaggcaggcggatcacctgaggtcaggagtttgagaccagcctggccaaaccccatctctaccaaatatacaaaaattagccaggtgtggtggcccacgcctgtagtcccagctactcaggagactgaracatgagaaatgcttgaacctgtgaggcagaaactccgtctcaaaagaaaaaaaaggctgggtgcagtggctcactcctgtagtcccagcactttgggaggccaaggcaggtggatcacccgaggtcaggagctcgagaccagcctggctaacatggtgaaacctacaaaaattagcccagcatggtggcagttgtctgtaatcccagctactctgtaggctgaagcaggaggatcacttgaacctaggaggtgaaggttgcagtga

SEQ ID NO: 854424 - DNA, 525 bp, Homo sapiens
atttgccaccagtaacttggatacttttcattgttaatgctttcatgataaaaactcttaaaaattgttttagtccatccattcttacactgctcataaagacatacccgagattgggtaatttataaaggaaagacatttaattgactcacagttcagcatggcgggggaggcatcggaaaacttgcaatcatgctggaaggggaagcaagcacatccttcttcacatagcggcagcaaggagaagtgcagagtgaaatgggaggaaagccccttacaaaaccttgagatctagtgagaatttactcactatcacggggatagcataggggaaaccacctccatgattcagttacctctcactgggtgtctgccaccacatgtgaggattatgggaactacaattcaagttgaaatttgggtggggacacagccaaaccatatsaacagcttagatatagaagaattatagcttaacataataaaggccatctataacaaatacacagttaaatggtaaaatta

SEQ ID NO: 854425 - DNA, 602 bp, Homo sapiens; identical to SEQ ID NO: 822546

SEQ ID NO: 854426 - DNA, 653 bp, Homo sapiens
aaataatgaatgaatgtgccgttttgctagtaagccatacctgtctgtttttcacatgtctagctatataatattcaaaatagtaaaactgtatctttgggcacttattctctacagttgtataaggcacatttacctaaatgtacttataaagatgaaaataaattatattgttacataaatttacttgcaccattgtagctaaggcatagacttgaagtaaatggatatcaaagtaaaatgacctgtactttattaatttggaaaggaaacataaatatatcatgaaaatttaaaattaatgttgtgtttcttacaactaattccaatatattttcacttatattagaaaataccaacagtaggaacttatttcccccaagagcatgcattctgagattctgtccgctttaaattaaaactgaaaatatttctgaactaatattgttatcgaaattgattgctattactaatgtatcttttgtagagattcttgagctcataaaatgaagacaaaataaagaattacaaaaaaattaaaaaacaaggcagagtacaaaggacgmtattatcttccaagatacttagtttataatttctttaaattaaaaaatttccttagccctatcgttaaatctcatggcttattccta

SEQ ID NO: 854427 - DNA, 466 bp, Homo sapiens
aatcctaatatatctccatttaattgaagcacagaaaggtcaagtaacaataaatttgcacagagagtgcaaaaccagaatttgaatctgaaygaatctcatatgacaccaacgtttagactgtggttatgtagtgtaattgtttgtggatttgggagaatttttctttagcaccacaggttcagtttcttcatatcctatgtatctttatttgcaaaaatgtatagttatgttaaaattacataaaattatattattagtttaaagatctactacagaatttaagaaggcagttgttctattcataattgctcacaatcagcctctcctcctactactgttcctactctctataccctttgtgtctgctcagtaagtattgcacattgcttagtagtttacattagttgtatttgcaggaatgtgctgtattgaacaaatatggaaattaaaaatatgcatagaa

SEQ ID NO: 854428 - DNA, 636 bp, Homo sapiens
tttatgtgtgtccatatacttcaagccaaactgatttttggtgaatttgtctctttataaaatacacagaaatagraagaaaagcactgaaaattgtggactcctagtaataatcaattaagcaattagcattacattacattttcctgtcagtttggcgagcgtatttttcaccaccgaagataataaaaaaaaatcttaatttataatgagaaattataaaatctgtcagatgatctagaatatatttacgtaagatatgaagattttctttcaacaataatgacataggagaaaaaatcagttatacatttccatatttattaaatatcttcctattacaaaaatttcaatttctgctttaaaaatattaaatttctcataatagcataacccagaggcaaacattgtcattattttaattaatatttctaagaacgtggactttggaatctaagagagttaaatcctggctttggccctttaaagctatgataaatgtttcaggtgatggatatcccaattactctgatttgatcattacacgtgatacacacatatcaaaatatcacatgtatgccttaaatatgtgcaactactatgtattctcaaagaataaacattaagaaaagttat

SEQ ID NO: 854429 - DNA, 604 bp, Homo sapiens
gtggcttctattgtcatcattatgaacattctgcctataacgtgtagaacatcagacatgtaaaataatttaaggctcatttgctaggaaagtctgttgactctgactgctagttaatgtcatgactcatttataagtgagaattgcttatttatatcattgaaagaaggcaacactttgtatgaatcctttcccagagtgaagatagggaaagtgatatgagagacagcagaaaaataagagcattgcattatctatatttctttatttaatacaacttgaagagttaggtatgttgtaaaattgaagcaatatcatgctgtctgccaagctagtcttcaaaaagattcttagggaattggctggttctagtaaaattaaacttgggaaaccatatggtctctacacttcaatgcctcaactatcactattccttttacctataatctcattttcttcacacttctttcctagctrttggcagcctagtcttctttccatctttggcttcagtatgtgctccattgcaaagcctatcctggtacctttatggacaataaatatttgtgtatacacgtatgctaaaaacaatgaacttcattac

SEQ ID NO: 854430 - DNA, 604 bp, Homo sapiens
gtggcttctattgtcatcattatgaacattctgcctataacgtgtagaacatcagacatgtaaaataatttaaggctcatttgctaggaaagtctgttgactctgactgctagttaatgtcatgactcatttataagtgagaattgcttatttatatcattgaaagaaggcaacactttgtatgaatcctttcccagagtgaagatagggaaagtgatatgagagacagcagaaaaataagagcattgcattatctatatttctttatttaatacaacttgaagagttaggtatgttgtaaaattgaagcaatatcatgctgtctgccaagctagtcttcaaaaagattcttagggaattggctggttctagtaaaattaaacttgggaaaccatatggtctctacacttcaatgcctcaactatcactattccttttacctataatctcattttcttcacacttctttcctagctgttggcagcctagtcttctttccatctttggcttcagtatgtgctccattgcaaagcctatcctggtayctttatggacaataaatatttgtgtatacacgtatgctaaaaacaatgaacttcattac

SEQ ID NO: 854431 - DNA, 522 bp, Homo sapiens
attagaatatgagcaccttgtaagcaaataatatgttttctatatttttctgtcttaatgcatggcactattgggacttaataaactgawttgaaagagtaaatacctattaaagtccagatgttcacaccaatcctgttgtttctaatactgtacataggaaaggggcccaaagcctctccaataagagcctaggctattggcctgattgagatgccatcttattcataattcaatccttcatgcttttttttcacttatatcattttggtgggtaggggctatgtttacacatcatggtataattttttattactttaccacttagcacagaatctagaactttatagtaataaagcaaatcatttgaggcactataaagcatgttaagatattaattttacataatccttctgccttttctcttgcaatggtctttttggtctctccctatcaaacatcaatatattttttgccagatattttttcttcatcatcaaccctcctaactagtagtcaaaa

SEQ ID NO: 854432 - DNA, 563 bp, Homo sapiens
acattcaactagaaaaaaaaatatttgcaacaaaaccggcctctaaaagaagatatgaagggaaattaaggggaactcatatgagatcatttctatatttgagtgaatgttaaagcaacacatcttccatttcatcttattcaaagacataatccagcttggatctgtactaaacatgcggatatgaactgaagcaggtccaagagaggatggagggatggagactttttttgtctcttctgaagatcctggaaaatatgaactgtatataagactaagcttttatccaattattttcaatgttctttctgatcatttcaggagtccttaacctgaagccacatggcagtctatattccaggaaaatataatatctgtcagttctggaatgtcctcttttctctccaggatttgcatgggtgttttctatgcctggagtactttcctcccaattgcctcacccctttacctagstaaccctattttttgctgggcacagagtaggcctaccattaacacaaagaaaaaattaaggagttccatttagacatacatcaatagtt

SEQ ID NO: 854433 - DNA, 600 bp, Homo sapiens
cctatatgtggttttcttagacttatttggctcatgtttttcctgctttaccttggcattttattgaataatatatctaaaagatctatggaagtatatggagacactcctctttctttgttwtagctgcatcataatcaactgtatgtaacattagaccttagttaaaaatttccttattgatagacacatgagtagttttgagtcctagcctattaaatctactaatttattgaataaacattatgtagatttttgcatttttttctaatttatccctggaaaaattcctagaactgatcagaaggtaaatgcacttttgtttgatatggctacatttcttcctagatagattttgctattttctgttcctatcatcagtgtatgagagtgtctatttttccacagcctcaccaacaaatatgtcaccaaattttgatttgttttaccttggagataggaaattctatctcagtgtcactactcttataaatcaagtgattgaatatgtatgcatttgtatccatatatttttcctatcttaataatgaaatgaaaactgatactgttttatgttttgttttatttattaagattttc

SEQ ID NO: 854434 - DNA, 643 bp, Homo sapiens
atgcagagaaacaggaagcaaaaaaatgtcaaaatgttagtaattggtaaatcaaagtraagggtatatgtgtgttcattgaactcttacaacttttatgtaggtttcaacgtttcaaagtattttttaaaagttaccttttcaaatgaagtttgtggttcttagagaacatatgaatattaccagttctagaatactcagatggtcactgtgacctcttaaaagcaaagtggagaaggacatcagtttgacttatagaaaccttagggagtggttgattttaagttctgcatttttatgcacatctaccctgtaagtaacgtctggcctttctgacatttacatgtatgcacattcttaccttgtctgcacccccttcctccatcctaattaaaacgttgctggggtactttttatgtcattcactttaggtacctctaactgggtactgaaaacatcattcctcatctataataatctaaccagctcttacttagattttcaccactaatgagaacctttcttagataaatgccgataattcatctacataggcccaaaacctattaataaaatgcatccttggatagtagtattttgcttttttaaaatgtattctactagtgttatttttctcttgtgt

SEQ ID NO: 854435 - DNA, 585 bp, Homo sapiens
gatagttctcattgattcatttatcccaacacttgcaagagttgagggagtaagccctatgrctctctgggcagggagcatttcaggaggagggactgcccagtgtgaaagaactttaggtatgtcagacaagtctgtagaaagggagaggccagtgtgactgaagagagtatgtaaattcagagagttaatggagtaggaagagaagctatataatcttatagacctctgtgacaatgttggcctttgctcagattgggatcctttgaagagatggagcagagtaaattgatctgatttaagatatcattgttatctcttgtagctgttttgagagtagttagtaaagggactaggataaaaggagaaggattagctaggggaatattgcagtatctaggagggagataatggtgactcacctcaaaatgtatcagtgaagggataagacatggttggagcctgcatgttttttgaagggaaagccaataggattttttagaagtcattttctcactcaaattcactttttccagaacacttgaggccatggccatttgtgtgaaataagaaggaataaataga

SEQ ID NO: 854436 - DNA, 592 bp, Homo sapiens
aattaaatatcccttttttcatgctttggttatatgcctttaagaggaaagtgtttaggggcctaaattttctacttaattgacttataagcataaggggtggaaatgaagaacaaagagaaaaataaactactgtcaaaattgtattaaatgacatgagtaacttatcctcaagtcagtgagtgatggttttgataatgctgtgtgttagaaggcaaacaaaaactaaaaaatttgcatttttgcacaaattttgctttattgaaggattggaaaatgtctcacatctacatttttatagcaaagaacacataaaattattcttatttttaatgacagttgtttaaagagtacaaagctaaatgttacaaagtatttcctttggttctaatgtgaccataccctggattttaagttttctaaatagaatgcattaatcctagccacaatgctgaagatgatctttttaaaatgttaagagttgcaaagtasttgtttgctcaacagagcatcctcttccctaaaagtttaaaataagaacattcctatacattcccttcattatttaagaagttcgggtgtgcttctctag

SEQ ID NO: 854437 - DNA, 577 bp, Homo sapiens
tcccagataaaagaggatattgaatagagtgaaacctaccctggtaaatccagaaataagtcaacaaaataaataaaaagaagattagaattagaatataaacaactctatctttcttatatcctccaatctttattggctttaatagttcacagatgaaaggtttgtgttaaaatataccacgcaagcctcaaataaagttcgttaacatctaaaattgtcatccagtaagtcaaaatcaataaagcccaaaaaatcaacgctccaaaaagatgccaaaataaatggtttgatataggtacaacataagagcttcttccaggtgatctctggggagaaaaagaaacaaaattggcagcctagagttgccaattagcaggttggttatatgagaaattgtgtcagaatgtaaaatttccagtgatttatcaaagatccaggaacactcttcctcttagaatcattaattaattgtgcamgtgtttgtgtatttggtattgttgagcaactgtgttttgtcgttatttgaaaactacaatctcgtctataattaggaattcccacagttctttaaaca

SEQ ID NO: 854438 - DNA, 532 bp, Homo sapiens
atttgttgaactttgttctatggattgggatatgctgtatctttgtgaatgttacatgagcacttgaaaaaaaatgtattttgccattgtgttctgtatgtgtcatttgggccctgttgtttgattgttattcagaccctctatatttttgctgattttctgccaagtggttctatcagtttctgagagagggatgttgaagaccctaactgtaattgtggatttgtttatttctcctttcagctctgagtttttgcttcatgtattttgaggctctgttgtttggtgtgtacctatttaggattattatgtcttcctgatttattgacctttttatccttatgtaatgtcctatgtctctctttatctctggcaattttctttgctttgatgtctactttattagatattaatatagctactcctgcttttaaayaaatgtttgcatggtatacctttttttaaaatccttttattgtcaatctacctatgttattacatttgaggtgagtttctgtgaaacaatatataa

SEQ ID NO: 854439 - DNA, 646 bp, Homo sapiens
gattttttttgtacaaaatacattagttttttgacttagtgcaattaaataaatcttacaatcagagagttatttttaacagttgagttgaataagacttctcagtgccaattcatatagcgccttcctcaaagaagcccctcctgattaggctcacctggttcccatcacggttgtatgtcatgcaactgtgcgtgtgtctttaaaatatggatcatgcattgctttctaaatgtctttcgtggcttcatttgtgtttcctgtctttactatccaagaaaatgataatcattgcagaagatgtagaagtagaaaagttgtacctggctgctcctgagcattttggaaagatgttgaagagaagtcatttcactattagggatttctgttcaagggattaggaagctttttagtttcaatggcccctaagtatgaatttactttagaagtggacttttaaaatatgtatttaattagtgactaattgaccatctgctgagagcaaggcaatgaaggaacaataagcaaggttggattcagaaaaaaagaaataagcaaggatggayggattcagaagaaagaaatgagaaattctcggagaaagcagacaaatgtaaggggagcattattcatattttgtttaggg

SEQ ID NO: 854440 - DNA, 548 bp, Homo sapiens
ctcgctctcggtgcctcctcagcctcggtgtccactctggmtgcacttgagcccttcagcccactgctgcactatgggagcccctctctgggctggccgaggccggagccggctccctctgcttgcggggaggtgtggaggtagaggcgctggcgggaatcgaggctgtgcgcggtgctcgcaggccagtgccagttccaggtgggcatgcctcggcaagccccgcactcagagcagctgccagccccaggcaatgaggggcttagcacctgggccagcagctgtggagggtgccccagtcccccagcactgccggcccgccacgccgtgctggaattctcaccgagcctcactcgcctccccccggggcagggctcgggacctgcagcctgccatgcctgggcccccacccccggtgggctcccctgcagcctccccaatgggcaccaccccctgctgcatggcgcctggtcctatccaccgcccaagggctgagatgtgtgggcgcatggctcaggactgtcaggcagctccccggggacaggccc

SEQ ID NO: 854441 - DNA, 507 bp, Homo sapiens
cttagcaaagagctcagctacattctgtttatgccctaggatctgtggaagtttgagcttaaaagtgagatttatggtatttggcagaagaaatttrtaagcagcaaagcattcaagatgtgacctggctgcttttaacagcctacactcaaatgtgggagcaaagaagtgacttaaacttggaatttatatttaaacagaaagcagaacataaaagcttgaaaattttcagactggccaagtggcagagaaagaaaaagctttttcaggagaggaaatcaggcaggctgtggagtaaccacttgttaaagagatttgcataactgaaaaagagccagatgctgatagccaagacaatgggaaaaaggactcaaaggcatttcagagacattcacagtagcccctcccatcacaggcccagaggcctaggaaggaacaatgcttttggggggcaggggcaggctcaggatcccgctaccctgcaaagactcaggacactgctcccca

SEQ ID NO: 854442 - DNA, 636 bp, Homo sapiens
aaattcgctgagctgtacagttaagatttgtgcatttatcatgcataaactattcctcagtaaaaaagaaaaaataataaagaaaataaatcatgcatttatmcttcctttcccataaagactacatttcagggtaagaaagacttcggactgagggaaaattcttcttcatgcaagttacagctaagaaagacaaaagggatgaaagaaatagaaactcgttattttgcaattcctactgaagtaatctggacaatgtcaatggttgttaaaagcattagagtgctggccgggcacggtggctcacgcctgtaatcccagcattttgggaggccgaggcaggcggatcacgaggtcaggagattgagaccatcctggctaacacacagtgaaacctcgtctctactaaaaatacaaaacattagccgggcatggtggcaggcgccttgtagtcccagctacccgggaggctgaggcaggagaatggcgtgaacctgggaggtggagcttgcagtgagccaagatcccaccactgcactccagcctgggcaacagagcgagactctgtctcaaaaaaaaaaaaaaaaaatagtattggagtgctggttctgaaacgctagcctgcatcagtgtcag

SEQ ID NO: 854443 - DNA, 632 bp, Homo sapiens
atgctgtgagagagacaaaatgtatcctctgaaaacggagagaccgctctgatggggagatcctggatggcttcctggaggaagtggtgctggctgtgggctgacaggctcggtgagattaatcctcttagtaaactgggctctgggcccatagaaggtcaggcttctgaggtcctgtggctcttcttgcctgcgaacccaggagaaagttggctaagtgctcagtgctggccaagctggacaaggctctggactaaggggtttgggtccctgggcatactgtaactggattttccagatttagaagctctagctttgtgatcagataagcagtattccccggcccttgttgatctgcaaagaccatgatatgagtgaaaggtcatatgttctctgctgcctaccagggaagagtgagagaaattgcccagatggtccttagagcctctgccctctgggcagctttgcccagggcctcccactccgtgctcagcccacccatggtccataggcagggtgggaggaaagcaccagattgggcagagaagcctgggtgtaagacctgayttcacaacttggtttcaggaaaggtcgttcacccctctgaacctgtttcatcaactgtaaaatgg

SEQ ID NO: 854444 - DNA, 569 bp, Homo sapiens
acttgtacagagggcactgatagtccatggcatgaacagttttagagatacgcaaaataaatgcatttgatactcataatttactacttataagaggcaaagaatttaatgactctatacataatattctcaaacatttgtggaaacaccaaggaatataattgtgtccggaattggttcctgccggtgggttcttggtcttgctgacttcaagaatgaagctgcggaccctcgcggtgagttttacagttcttaaagatgggtgtccagagttttttccttcagatgttcagatgtgtctggagtttcttccttttggtgggttcatggtcttgctgacttcaggagtgaagctgcagaccttcacagtgagcgttacaattcttaaaaagggcgcatcaaaagttgttcgttcctcctggttggtttgtggtctcaccagcttcaggagtgaagctgcaragctttgtggtgagtgttacagctcataaaggtagtgtggacccaaagagtgagccgcaaccagatttattgttaagagcgaaagaacaaagagcaaaagaacaaag

SEQ ID NO: 854445 - DNA, 352 bp, Homo sapiens
gttttaggatctatttttatattcctgggttgtgtgatattactgcattggaagagattttgaagtgatctaaggcattctttagcttctaaggcattataacaatatrcagaagcacaagatgtcttctcttaacttttttatggaaagtagttaaagacaagcagactgaccctctaataatctttaaatagtgaaggaatcccatttcaactgatattttgctttctttaatctaattaatcaatacataggcttattttccagttcatttctttctctaattacgagtgatccctcacctacttttctattcccatatgagagcctttgcatggaaccacctagaatc

SEQ ID NO: 854446 - DNA, 603 bp, Homo sapiens
gagagtcaaagctaaatagggaccttgatactaagaaagtagtctgtgaatatggccagatgtytgtcactagtttgggagaaatctcttggtctggccattttctgtgaatgtcagagtagatataattatccggggggacttgccatggactctggtcatctggtaaagacatgtatatttctgtgctaataaagtagttttaattttaaaattcacctcaagtatgagattcttccctctgtacacatgagctttgtttagggctttagcacaaacttagctctgctgcatgcctcaaaagaggtgcagctcagggtaccagtttgctaaaggggagccacatagtcctgttaaccttgcagtgaaacttaagagttgattagggtggcaggaagccagaagcacactgcatggtaatgaagccccaaacaactcgtttttctttctactgatgagaaaaaggaattaagcataaattgcagtaggagacatttggtctggaatctaggaataacttgctgatgggacattttagagattaggatccccagacaagtagtgatgttgctgtgatggggaaggatactgctttctggccct

SEQ ID NO: 854447 - DNA, 613 bp, Homo sapiens
tgcctgtcataaagtagtgattgatttattttgctgaaattcgtagttcaggtcatctgtgctggatttgctatcacatatatggccaaggcataaattgtgctrtaaaattatccattcgttttttttcattatctatgtcatttttcattgtggactgtttaataatatattagcctcaatactttttcccatttataaaaccaagccttttcattcctaaaagcacacgcatattatttttgtgccttaatctttttttttttttttttggtgagttttgagctctgtgtgatccctgcatagttcatttgctccactcccctaaacgaggtctgtttttcctgtttcaccttctccctctctggaatggccttaggaaaaacactttccagtcctgttttaactcttttccatttcttaatctggattgctttatatttacttaatctgtctgcacatgtgatatcccaaatattataaagaaaatgatgtgtttttacttggcttttggcagttcctcaacatttgggttagactaattaatgatgtgatacacttctgtaataccaggaaaaaatttttataaagagagccattttgtttatatata

SEQ ID NO: 854448 - DNA, 613 bp, Homo sapiens
ggccagtgtttgctggggatgtaagttcttcagtgagattgatggagcagttggtggacatccttgatgcacagctgcaggaactgaaacctagtgaaaaagattcagctggacggagttataacaaggtagagagaactcttctgttattttgaattagacacttggtatggcagctctttcttgtcttatagcagttgagagccaaatctttggccccgggacatatacttagaagcaaaatttctaatttggttcatttttccaaggaagaattacagttgagaaaagagcaatgtgccctgccctcccaaaagagtgtaaatgatgttaattacctgagagagatcttagttggtggcaaactttatctatctgattgtggtcaatactgtaagtttataatgcattatctgcacttggagagattatatgttatacagttgatatactttatatgctaatacatggaactcttatagttgcagcaaaattttgacacatataggaatattagmcactgacatatttctttcaatggcagcttttggaagaaggacaagttgccgtctccaggaatatattgttatcagtgccattaatttttcctatt

SEQ ID NO: 854449 - DNA, 576 bp, Homo sapiens
ttaaatacttactctaatttttgtaatcagcaaatatattggtaggaagtaaattaataaactattaatcttcaaaattatttgttacacttcagcttttacagatgcatatttggcttcattccagaattgaaccattgaaaccctcacccccacacctgtagggtagaaagactacagggatgagtttttaaaccatgagtaaaattcagtgttttgggccagacacggtggctcatgcctgtaatccctgcactttgggaggccaaggcgggtggatcacctgaggtcaggagtttgaaaccagcctgcccaacatgatgagacctcgtctctactggaaaaaaaataaaaataaaaaaataaaaattagccaggcggcgtggcacattcctgtagtcccagctactcaggaggctgaggcaggagaattgcttgaccccgggaggccraggttgcagtgagccaagatcgtgccactgcactctagcctgggcaacagagcgaggctttgtctcaaaaaaaccaaaaaacaaataaacaaaattcagtgttttgtcccatttaaactagttt

SEQ ID NO: 854450 - DNA, 576 bp, Homo sapiens
ttaaatacttactctaatttttgtaatcagcaaatatattggtaggaagtaaattaataaactattaatcttcaaaattatttgttacacttcagcttttacagatgcatatttggcttcattccagaattgaaccattgaaaccctcacccccacacctgtagggtagaaagactacagggatgagtttttaaaccatgagtaaaattcagtgttttgggccagacacggtggctcatgcctgtaatccctgcactttgggaggccaaggcgggtggatcacctgaggtcaggagtttgaaaccagcctgcccaacatgatgagacctcgtctctactggaaaaaaaataaaaataaaaaaataaaaattagccaggcggcgtggcacattcctgtagtcccagctactcaggaggctgaggcaggagaattgcttgaccccgggaggccaaggttgcagtgagccaagatcgtgccactgcactytagcctgggcaacagagcgaggctttgtctcaaaaaaaccaaaaaacaaataaacaaaattcagtgttttgtcccatttaaactagttt

SEQ ID NO: 854451 - DNA, 652 bp, Homo sapiens
ggctggttcacccctccttagggcaatctggtggtccttcactcccggaggtcaccatactgatgttgaacttagtgtggataccagaatgcatagcgcactacagcccagaactcctggactcaagcgatcctcttgcctcagcttcctgagtacctgggactacaggcatgcaccaccacatccagcaggagtttggattttaattacaacaggcagtcattgggaggttgtgggtcaggacagacatgatatgaattaccaaacaaacaaacaaaaaactgtcagcttgtggacaatagacaagagagatcagcaacaggggatatgcattagaaagctgataaaaaatggtgtgggccaggtgtggtggctcacgcctgtaatcccagcactttgggaggccgaggtgggcggatcacccgaggtcaggagttcgggaccagcctgggcaacatggtgaaaccctgtctctactaaaaatacaaaattagctgggcatggtggtgtgcgtctgtaatcccagctactcaggaggctgaggcaggtgaattgcttgaattcyggcagtggaggttgcagtgagccaagatcacgccattgcactccagcctgtgcgacagagcaagactccatctaaaaaaaagaaaga

SEQ ID NO: 854452 - DNA, 467 bp, Homo sapiens
tttgcttaggagaaaaattcatctatttatttacttatttatttagagatggagtttcactcttgttgcccaggctggaatgcaatggtgtgatcttggctcactgcaacctccgcctcctaggttcaagcaattatcctgcttcagcctcctgagtagctgggattacaggcacccgccaccaggcccgactaatttttatatttttaatagagacaggatttcaccatgttggtcaggctggtcttgaactcctgacctcaggtgatccacccacctcggcctcccaaagtgctgggattataggtatgagccactgcgcccagctaattcatctttttaatagcaatgctcctttagtttgctatggtttacactgatgctatggaaaaaatatactgtactgctattattagaggaagaataatttgtaccatcatataaacartatactcaattttcataaa

SEQ ID NO: 854453 - DNA, 588 bp, Homo sapiens
gaaatcttggaactgagacatacatttgctgaattgaaaaatccattagagattctcaaccccagaatggatcaagcagagaaaagaatcagtaagctcagagaccagctatttgaaaatacatagtcaaaggagaaaaaaagaataaaagggaaagaaggccacttacaagatagagaaaattacctcaaaagaccaaatctaagaagtattggtgttcaagagggagttgagcaagagcaaggggtaaaaagcttattcaagaaatagaaaacttcccaaaacttaaaaagaaaaaaaatatccggatacaggaaggtcagagaaaaccaaacacattcatcccaaataatactaccccaaggtatataataaccaaactctgaaaggtcaaggataaaagaggggatcctaaaagcagcaaaagagaagaagcaaataacatataaatgagctccaattcatcaggcracagacttctcaacaaaaacaatgcaggccaggagagagtgcaatgacattttcaaagtcctgaaagaacaaaactgccattcagtaatactgtatccccaaaggtatacttcaaat

SEQ ID NO: 854454 - DNA, 621 bp, Homo sapiens
tttttgttttgttttgttttggtcgaggggagagggtctcactctgccacccaggttggagtgcagtggcacaatcatggctcattgcagccrcaaccttcccgggctcaggtgatcctcccacctcagcctcccaagtagctaaaattacaggtgtggtgccaccacacatgttaatctttttattttttgtagagatagggtttcaccatgttgcccagtttggtcttgaactcctaagctcaagcgatccacccacctcagcctcccaaagtgctggaattataggcataagccactgcctctggcctcaattattttttaatgaattttttaaactaaagtatatttagttgagggccaccatgataataagtggaaaccatctgatatgaaagatgagtgccctttatgatgtcttttgctccaaaggcaaatagatgaaagttaaaagtgcatattttaacttaatatagaagaaagctttgtaacaacagaagttctctagtaattataaaaagccatgttactgcaaattagctccccattgtcaaaaatactgaaagagtaagaagctggttcaccttagttgaatgctgtagaaggaaatttgtgtttgat

SEQ ID NO: 854455 - DNA, 603 bp, Homo sapiens
caggaggtggtactttccaaaaagcatcagctgaagtagtgtggagagggatcagtgctgggtggggctctagaactccgaagactatgtgtccattgtcttccactatcaaggtgggtagggaaggaccatcaggtgagggcagggctaagcgtgtctgagctcagactctccttgtgtgggtcttgctgcagctgctgtgggtgatggggctgagattcccaggtcactggagttgtgtacctaggaggattatggctgcctctgctgagtcatgcagtagtgaaaagccgacagtcacaggcctcaaaccagctcccatgcaaaccacagggctggtctcactcccaccatgcccctctgcaacagccccgaggtctgttaccaggcagagggggagacaggcttgaagacttgccctaggctactggggctgtgaaagaaaagggcgttagttcttcccctgcctgtgaagtctgcaagtkggattcgaacactcctccaacttctggccaggaggcttctcgccacatttaaattgttacaaagttcagctagagatttcctgccctctgtggggttttaccccctgctcctctggcc

SEQ ID NO: 854456 - DNA, 603 bp, Homo sapiens
caggaggtggtactttccaaaaagcatcagctgaagtagtgtggagagggatcagtgctgggtggggctctagaactccgaagactatgtgtccattgtcttccactatcaaggtgggtagggaaggaccatcaggtgagggcagggctaagcgtgtctgagctcagactctccttgtgtgggtcttgctgcagctgctgtgggtgatggggctgagattcccaggtcactggagttgtgtacctaggaggattatggctgcctctgctgagtcatgcagtagtgaaaagccgacagtcacaggcctcaaaccagctcccatgcaaaccacagggctggtctcactcccaccatgcccctctgcaacagccccgaggtctgttaccaggcagagggggagacaggcttgaagacttgccctaggctactggggctgtgaaagaaaagggcgttagttcttcccctgcctgtgaagtctgcaagtgkgattcgaacactcctccaacttctggccaggaggcttctcgccacatttaaattgttacaaagttcagctagagatttcctgccctctgtggggttttaccccctgctcctctggcc

SEQ ID NO: 854457 - DNA, 525 bp, Homo sapiens
atgatgatatgatatacatatacattatgaaataagcacaatcaagttaattagcacatctctcatttcacataattagcatttgtatgtgtggtgagaacacttaatrtctattgtcttagcaaatttcaagtagtatatcagataatattattaaccatagtcaccacaatgtaccttagatccccagaactcactcatctgttaactgaaaaagccagacacagtgagatcaatactgtaagatctccctcatatgtagaatctttaaaaagagagaggagagatagagagacagagacagagacagagattggttttttaaatgatttctgcctcagcggcaggcttaagatgctgctaagctggcctggctgcagaacagcagaagtagacgcactattaaaacttttctttgagtaattctaattgcggcacaatttactctcttaccaggagtttgttgtgattctttacacagattcttagagtctttacacagaaaatatatttaaaagcggggtg

SEQ ID NO: 854458 - DNA, 542 bp, Homo sapiens
ttcctatctaactggaagacgggaagagaattccctctggtaacaatgtataattcccatagctctctctactcaaccctttaaagtgcattgagccattgcttatacagtgttaataaataaaagttaattcttagtttgaagttttttaagttgtctatatatacctttttttttttttaattcagagacagagtcttgctctgtcacccaggctagagttcagtagcacaatcacagctcactgcaaccttgatctcttggccttaagcgatcttcctgcctttgcctcctgagtagctaggacaggaatagatgatatggactagaatgggtcgtatattatatacaaaatggtaatattttaaatctaatcctttatttgatatgcgatactaaagtacaaaagttattgaataattatatttagaattaacctttattatatctaaatagatatttgaatctcrtcagaaatatttggatatactcagcaatatctaaatgcttttaagtattttttataattatataaagtaact

SEQ ID NO: 854459 - DNA, 307 bp, Homo sapiens
ttggttggttttaggaaaaagataaattactttttaaaacccctgatgttggtacctctctacctcccatgccttatctctcacayagttccattcccaaccttctatcccaacctcttcccgtgattcagccaaacagcacatgtatgtttctcaaatgtaccctgtgctctctcatctgcagacattcacacatgtcatctcctttgcctgcaatgctcttcctccttctgcttgcctggtgaacatactcattccctttaggtcacaacgtatatatcatttcttccaggaagcttctgaggat

SEQ ID NO: 854460 - DNA, 600 bp, Homo sapiens
tcttaatgttttttacccccattttgttacccagctatgatgtagagggctgattaccacattctttgtaagtattgaagccaattattaattgggtctaaataatacttttcttcccctggattaataatctctgatattactttccaacatttttactcttttcatgtatcttaccttttaaaactctttagagagtcctcctacaattaccttgttgtcatttctgattggcacgtgagtctttttatatctgcaggcctagaatgtagtccactgcctggctcttggtaaatattctttttttttttttttttttgagacagagtctctttctgtcgcccatactgcagtggtgtgatctcagctcactgcaagctccgtctcccgggttcacaccattctcctgcctcagcctccggcgtggcagagattacaggcgtctgccaccatgcccagctaattttttgtgttttttttagtagagacgggtttcaccgtgttagccaggatggtctygatctcctgacttcgtgatccacccacctcggcctcccaaagtgctgggattacaggcgtcagccaccgtgccccgcctaa

SEQ ID NO: 854461 - DNA, 471 bp, Homo sapiens
cagcttccacctgcaaggaaataagtcatttagcccccaggattcccactggagaatgtgccaactgtacatgatctacattcagtcctttcagaaatactatgaaagctgtgaacccaccaacagatggcaagaaaagggaagctaacatttttggcaaatattagtttttcacccacaatgtgctggctttatgatctcttcagaggattcagcagaggaggacagacggggtccccactctcactgagcttacagggatggcagacagtaaaggggtaaagggaagaattaggtggtgcagcttatttatgagcactggactgggagtcagctcctagccctagaagckcagctcctcactgagtttccggaggcagtcacttcaccaatatgggtgacttgcatactcagctacaggatgagggcactgcatttcagcaatctctccaagttctcacattctccaaa

SEQ ID NO: 854462 - DNA, 561 bp, Homo sapiens
ataaatatcaatcaatcccaaaagtaatcccactctatatatgctgtcagatgaagcaccatattgttggactgtatgtattctaagaattttcctggtgttcttcacccctgatatgatctacatctgaggttttgtgatgctacttgtttctcaccagagagtctagaagaggagcatttttagaatctctaggaaaagattgaaacctcggacaattttctcagtcctaggatgctgatataatttaaattacaattaatattaaacatactcttttgctataggttctcatactctgggtatcctttactactagtccagtacaatagttaagtacagagaattccaacttgccctgttgataacatgagctggatagccttactgatgtcattattatttttttctttttggaactttacagacaaatccatgatagtaaaatttttgcaagctttctctctctaccaatagccagagaagaatttggtggtataatctaagctgcacttartatgttatatagccaagggaaaaataaaatgctataaaaatcta

SEQ ID NO: 854463 - DNA, 644 bp, Homo sapiens
ttctccatgcacactcttattctattctggcaggaaatttaattgrtgcattttgattaaacttccaaattgatggctctcttatgctctgacttgtaataattgaaatgattaaagatgtagtttcttctttccaaagcttttcacttatcagttgctcctgttttattgagaaaggtgcttgtagtgatgttatattaagccaaactactttctgatttggttcaaacagactaacacacaaatgctaattaatatttagcatttagatatctgtatccaaattaaattggcacccagaggatgaaagattgaattattcagctgctgttgaaagctatatgtcataccgtgtttacaattgtagttatcagaagtcggctttcattattctaccaaatgtgtttattttctcatagagcattcaaatcttcatggttggctatctatatagaagataatattaaaggttttaaacttgaacaatttatataaaataaaaaaattaaaatctctagtcagataatgtcatttaagggccatttttggatgccttcccatatgcaaagatactaccaatgtagtatcttttgcatgtgttcccatatgcaaagatcaaccatttctgaagcagaatgcttatt

SEQ ID NO: 854464 - DNA, 548 bp, Homo sapiens
ctccagtgtgctccatgcccaccacaacctacaacattctgcttctaatctgcctcttagaattgtgagtaaattaagagcaattaaattttgaatgaagaactaaagaatgcytctgtgagtacaaaagttaaactgtcacacacacagactctttaaaataataataaaataaacatttcataatcctttctggtatattatgcatttttacattagtgattttttttctcctttaagctctgtgggacttgatagtgatcattttttattcttatatcccctgcatctacattgactgtttagatattatgtttgcataatgctatactcatgtctccatttctgttatgaaggttaccagataatggcaatcgtgatagcttgcataatttttctcaagtatttgttcttcccttccctgtaagaaaacattgattccctgcctttgccatgtgatttgcagggcctcctattggaatatacatctctaccccactgaaatcgggcttggtcctacgacacactatagccaatggaacatgggc

SEQ ID NO: 854465 - DNA, 607 bp, Homo sapiens
aattgagacagaatatttagggccagagcatagtacagcatcaaatagacctgataggcatttatagaactctccaccaracaaacaaaaaaagcaaataaaaacccagaatacctaaaacttaaagtataataataataaaattaaaaaaaataaaaataaaaataaaaaacccagaatatacattattctcaccaccacatgggacaactgtaaattgatcacataatcagaagtaaaatactcctcagcaaatgcaaaagaatggaaatcataagaaacaatttctaggacaatagcacgatcaaattagaaatcaagactaagaaatttactcaaaaccatacaatgacatggaagttgaataacctgctccggaatgacttttggataattaatgaaattaaagcagaaatcaagaagctctttgaagctaatgagaacaaagttacaaagtaccagaatctctgggatgcagctaaagcagtgttgagagggaaatttataatactatatgaccacatcaaaatgttaaaaagacctcaagttatcaagctaacatcacaataaaaagaactaaaaaaccaagagcaaataagtcccaaag

SEQ ID NO: 854466 - DNA, 616 bp, Homo sapiens
gagtaatagactgatttcatcttgttagtctgggtcaatcaccccagccaacactgtaactcctttgttagtctgttgacttaaaagtaagaggaccccaaagtgtccaggttgcaawcttaacttccattttaatgggattgttgtgtctcctggtggtagcattcctccctctggaactaagacctctaggccagcagaacacaatgtcacgggaacaggaagcaaaaattttgctactggatcactaggggtgatggtgagtggtgctacttccacctcttgattcctggacccataaatcctggttataggagaaacagtactatatattggttgctgattcagagcatacacgaccttctggagaactctgctccagccctgcatcgtattgtcacctagttggcattgtaactgtgacttcaaaaggccattccaccattctataaatccagctactttaggataatggggacatggtaaaaccagtgaatttcataagcataagcccactgctgcacttctttagccataaagtgagtgccttggtcaaaggcaatgctgtatggaacaccatgatggtggataaagcatttcatgagtccatagatgg

SEQ ID NO: 854467 - DNA, 514 bp, Homo sapiens
tcttgcccctcatgagcaatgaaccagcagtgtcaaatgcatttattttacgtaactctctaaacaaggcctatcagttccttgttcacagcaaggactatcagtgttctccatactattagacgtatagtcctaagaatttggagtctaatcatattaagtagccaactccagaaatcccaaaaccaacaaaagaagtccatccttaatattttgttcctctagaaccactcctggtagcaaaatctgtattagtcagggttctccagagggacagaactaataagatatatataaagaggaatttattgagtattgacttacatgatcacaaggtcccacaataggctgtctgcaagcttgaggagcaaggagagccagtccaagtctcaaaactgaagaactgggccaggcacggyggctcatacctgtaatcccagcactttgggaggccaaggcaggcggatcacaagatcaggagttcaagaccagcgtggccaacatggtgaaactc

SEQ ID NO: 854468 - DNA, 507 bp, Homo sapiens
gctgagtaaataaggctgagacytactggactgtattcccagaaggttacacattctaagtcaccagataagataggaggtcagcacaaggtaaggtcacaaaaaccttgctgataaaagaatgctgtaaagaagctggccaaaacccaccaaaaccaagatggctatgaaagtgacctctggtcatcctcactgctcattacacactaattataaggcattaattagcatgctaaaagacactcctgccagcaccacggcagcttacaaatgccatggcaacatcagcaagttaccccatatggtctaaaaaggagaggaaccctcagttccaggaattgcccaccccttcccgggaaaactcacaaataacaccccttatttagcatataatcaagaaataaccataaaaaatagccaaacagcagccctcagaactgccctgcctatggagtagccattctttattcctttactttcttaataaacttgctatcactttactct

SEQ ID NO: 854469 - DNA, 507 bp, Homo sapiens
gctgagtaaataaggctgagacctactggactgtattcccagaaggttacacattctaagtcaccagataagataggaggtcagcacaaggtaaggtcacaaaaaccttgctgataaaagratgctgtaaagaagctggccaaaacccaccaaaaccaagatggctatgaaagtgacctctggtcatcctcactgctcattacacactaattataaggcattaattagcatgctaaaagacactcctgccagcaccacggcagcttacaaatgccatggcaacatcagcaagttaccccatatggtctaaaaaggagaggaaccctcagttccaggaattgcccaccccttcccgggaaaactcacaaataacaccccttatttagcatataatcaagaaataaccataaaaaatagccaaacagcagccctcagaactgccctgcctatggagtagccattctttattcctttactttcttaataaacttgctatcactttactct

SEQ ID NO: 854470 - DNA, 507 bp, Homo sapiens
gctgagtaaataaggctgagacctactggactgtattcccagaaggttacacattctaagtcaccagataagataggaggtcagcacaaggtaaggtcacaaaaaccttgctgataaaagaatgctgtaaagamgctggccaaaacccaccaaaaccaagatggctatgaaagtgacctctggtcatcctcactgctcattacacactaattataaggcattaattagcatgctaaaagacactcctgccagcaccacggcagcttacaaatgccatggcaacatcagcaagttaccccatatggtctaaaaaggagaggaaccctcagttccaggaattgcccaccccttcccgggaaaactcacaaataacaccccttatttagcatataatcaagaaataaccataaaaaatagccaaacagcagccctcagaactgccctgcctatggagtagccattctttattcctttactttcttaataaacttgctatcactttactct

SEQ ID NO: 854471 - DNA, 633 bp, Homo sapiens
caaacatcatctataaaaatgacatctaatttccacatctaatttatggaaataaaaatgtttaaaggacaaaatcaaaatacaaaaagacaatagaatgaaagttgggagaagaaataaatttgagtggcctctactcacttataatgggagctgagctatgggtatgcagaggcatacagaatggacacaggagactcaaaagtgaggagggtgggtgaggcatgagagataaaataaaattactcattgaatacaatgtacaacatttgagtgacaggcacactaaaagcccagacttcagtactatacaattcatccatgtaaccaaaaacctcttgtacccctaaagctgttgaaataaaaaaagaaaaagaaattattacgtggtttgataggagggttgagattctaatgttagagtttagtagatttgcatggtaaaatttcaagggaaaccgcaaaagaacagaaatagaatatggcataacttccagacaagtagaagaaaaaatggaataagaaagcmaccaaaattcaaagtgttaacattcaagaagaggaaaataggcatagtaaaaatggaataaataagatgcaaaaagtaacaaatagtacagaggaatacagatg

SEQ ID NO: 854472 - DNA, 367 bp, Homo sapiens
ttcagtagtttggagatttctcaaagaatttaaaacagaactaccattggactggcaatcccattattgggtatatacccattatcatatttctcaagagaaagcttttatttaaaaaactgctgccaatttactctgcgagtaaatgaaaatttgcttcccttcaagtgtaaatatgacctaaactgtcattattaataatattgatctttacaaacagtttcatctttacaattttctcttccaccttccttcttctttatcttctttcctccatatccaaaatcatcacctcattttttgccattgactcacatctttyttgctgtttctactgttaaaaattaaacagtggtccttgtcattc

SEQ ID NO: 854473 - DNA, 579 bp, Homo sapiens
cctttaaaaataactctcttaacatgatatgggtatatagggattttggacttcatttgtctcccaccctctcctagctcatttcattagaaagcctggaaggatgatgccaaaagtttcactgaaatctaatttgtattttgctagcttgctcccatcaccagtgttgtttattgcatagttgtaaaagcataaaaaacaatcaggtgctactagtctttcaaaacaagttttggttgctacaaagcattgtatgatcttttaggtgagaggaatggtgtgcaaaatgagggttttgatctaccgtgaagagagtagattaggttttctcagatcccttcatggtcctcaaaactctcctttttgcttttaccatctctgctttccaaggtggctctgatgtttcataccagttttagctgccttcatggtgttaccctccaggattcgtgagcactagaccttttctttcagccccctgatcctcaaatcaagataygtactaattctagtcccaattctaatttagatgaatggctagagataaattctttagtgttaatacatcaatgaatcatg

SEQ ID NO: 854474 - DNA, 656 bp, Homo sapiens
ttttgccacaaaatgcccaatagttaaataaatatgagaaagactggattaaataggtcttcatattgtaggacttttctgagctttttactctgcaaatttatayggtaaattgggggcagaacatatcatatttctcaaactagaatgacaattgagtaccctctctgtgttccttctttcattttgagcaacacctgtcaaatgccctggaattctgggagaaacactactttagtcattcttcggagtggtattcacatccctacctcattctttgctctattactctgccttgaatagtgtctctgtgtcctgccttttctctctgcttggatgaactctatgcttatttgagaaattttaaaagtttaagtttgtgtttatattaagacagccaagctacataggcagctaggactaggaaaagtggactctggtaatcatgtgaagattttcatggagcaataggttctagtgatggaggaaaatgctagtcagaaacaggacaaaaacagggaagtacaatgtcatgcagactaaagaatgaaaatgatttcactctcactgagtgaaatcctgtgacaaagtttgatggtgctaaattatacacgcaagctgataattatgaggattacctcattagagtggagaag

SEQ ID NO: 854475 - DNA, 596 bp, Homo sapiens
gtcttggggaaagaagtttcttgcaatctctcctctgacactttttgcttgtaaattaatccatcaagaaaatggtgtttcttcccagctcttaagggattcacaccacttatgcaaactcccggaggstccagtctaagttgagatgacctaatgagttgcagagccaagctctttaaaaggcaggcctgcatttacatatagaatgatgttgacgcaggcagcagtgggatctcaggtttgttgttctcccaaacgccaccccctctcccatcctcacactatgagagggaagccgaagtggtttattaagttgcctgaactcttttttgctaattctccattttcattttgtagaaggaaggctccaatgaatctgagtcagtaagacctgactcagcctccttgtaatacatttaatcatttattcatccatcatcattattatcatgcacctgccctgtgccacagaaccagcagttgtggaaagacaggattctaccaagggagaggctggcattccagctctacccctgtcctcggcaatacttatagacatctatttaatgggataagaatgggatgttccctacaat

SEQ ID NO: 854476 - DNA, 615 bp, Homo sapiens
gcaacaaagtggcctcaggagtttcagggatagtgggtaaggaaatggctattgtccttgctgaaagtgtaggtccaaaaactcacatgagagaaagatcaaaatgggacttaatggtggcttctgtggtacagggctaggctgctcacacagcatgagccaactcctagtatgactgatgtctgtcttttttacctgggttcaatgtcagttttgacatttattacctagtggccttgggcaagtctcttcactgctctgagcctcagtgtcttcaattgtgaaacagaaataatcatacctctcttagataattgaggaggtcaagcaagtatttaagctgacctgcagcagagtggctggagcagtaaatccctttaaaatcatatcttcatcatggagatgactattataaccttgtggtaagggacccatggtacaattgagggggtgagagaattaagccataaagatcaggcattgagtcttaactctgccctttattaactgtgtgacctggaaaawaacattatacaatctttctgggatagagtctcctgataggtaaaatggagactagtaatcccacagcaatctgtgtctcagagtttttgt

SEQ ID NO: 854477 - DNA, 522 bp, Homo sapiens
gaaatttggaaagtacaggagtcacattttctagatacatatgatttgtttgatgcacagggaaacccaaacatcactgctaagctgaatctggcccatgggctactggtttgccaacagaaatccaatcccatcatttaatgtaagaggaaactgggccgggcgtggtggctcaggcctgtaatcccagcactttgggaggctgaggcaggcggatcacaaggtcaggagatggagaccctcttggccaacgtggtgaaaccccatctgtactaaaaatacaaaaattagctgggcatattggcgcgcgcgtgtagtcccagctacttgggaggctgaggcaggagaattgcttgaacctgggaggcagaggtgtcagtgagctgagatcgcaccactgcactccarcctgggctacagggcgagattccatcaaaaaaaaaaaaaaaagaaaagaaaaaaaacaagaaaccgaggctcagagagggcatgtgtctagagtcccaaagtaagtttgtacat

SEQ ID NO: 854478 - DNA, 615 bp, Homo sapiens
caattcacttcccatgaggtccgtttctcaacatctggggattacaactcaagatgagatttgggcggggacacagccaaaccatatcagtcttgcatgtgatctgattgatttttcatttaattttcagaagtcagtgccttgagtgcttaactttgcacccagggttctagttacttctggatgcttatctttcttttggactataaactcctggaaggcagatgcttatctagcaaccctcaagtttcactcatgcttgcttttgcactagaataaatcagtacactgttgttgacaattctgctcagctatctcactgttggcgtgcagtggcttttttttttttttttttgcatttatctttccaagtgtgccagtttcaggcctcccaaactcaggcacccggcataggcaggtctccatgtttactccaagagttaacaggtgagagccactgccctgctcagcagcaaggttcctgccttcccttttaggtaactcagctgaaacagatctctttcctgaggacactcccagaatgtttattgttctatcamctcctgcatcacagattccacagtaccagcatttcttttgagggaaaagaataaa

SEQ ID NO: 854479 - DNA, 533 bp, Homo sapiens
cctcctcctccggccatgtaggatgtgcctgcttccccttccccttccgccatgattgtaggtttcctgagacctccccagaagccaagcagatgctgctatgcttcctgtatagcctgcagaattgtgagccaattaagcctctcttctttataaattactcagtctcagacatttctttatagtgatgtaagaacagactatacaccttggttttatttgttgtttttttctatgcaagccctccactttcactgtcctttaacaggttcttgttctgcctttgttaggctgattctctaggtatcactgggaggcatagaccctctccttgcagaactccaagggacaccattcgaacattcttctgaaagtcccctgttgagctgtggtggagctctgccatgtgtagttattgttaggaggtttggcattgattccaaattyctaaacatggcctggctaactgctactcaccttcaggtgttattttaattgtcacttccctggggaagatttctctgtatccctga

SEQ ID NO: 854480 - DNA, 602 bp, Homo sapiens
tgggatttatcgttgggatgcagtgatgctttaacatggacaaatcaataaatgcaatacaccaaattaacagaataaagtatataattatatcatctcaatagatgcagaaaaagcatttgacaaaatccaacttctttcatgattaaaattcaacaaatttggtataaaagcactgtatctcaacataataaaggtcatctatgacaagcccacagctagcattatactcaatggtgaaaagttgagtgctttttctctaagaccagaagaaagacagatacccactctcaacatttctgttcatcaaagtactgaaaagtctagccagagcaattagacaaataaaagaaacggaagacataaagggagtgatattaccaagatggcagaatagaatagaagcaatctgtcttcacttacctccaaagaaagcaaaacaaacatacaaaaacaaaaacaaacaaacaaaaacaaacaaataatatctagcatmaagatttcaaccagaaatatctataactaaaatctgatgctgggatttccccaggaacacagagaagtaaaaagaacttcaagtggacactaagaggaacggactg

SEQ ID NO: 854481 - DNA, 560 bp, Homo sapiens
aaaagtacaaaaattagccagtcggggtggtgcgggcctgtagtcccagctactcaggaggctgaggcaggagaatcgcttgaacctgggaggtggaggttgcagtgagccgagattacaccactgcactccagcctgggagacagagagagactctgtcaaaaaaaaaaaaaaagaaaggaaggaaggtaggtaggtaggtgggtatttggggccagctggcctgtaatcccagcacttggaggctgaggtgggtgaatcacttgaggtcaggagtttgagaccagcctggccaacatggtgaaaccctgtcactactaaaaatacaaaaattagctgggcgtggtagtgccacttgtaatcccaactactggggaggctggaacctcggaggcggagattgcagtgggctaagatcgtgccactccagcctgagtgagactccatttcmcaaaaaaaaaaaaaaaaaaaaagaaagggaaaaaaagaaaagaaaagaaaaaagtatttggaaccaaagaagataagaattctgttccatttggtagtttattttaatt

SEQ ID NO: 854482 - DNA, 578 bp, Homo sapiens
aaactgcaaaacgttgttaaaagaaattaaagataatgtacgtaaatggaaagacatcctgtgttcatggactggaagacttaatattattaaggtgacagtgcttcccatattgatctgcagatttaatgtaatcgctatcaaaaacacagaggtcttttcctcccaataaattgaaaagctgatcctcaaattgatatggaaatgcaagggacccagaatagtcaatgtaatcctgaaaaagcagaacaaagttgaaggaagcacaagttctaatttcaaaacttaacacaaaactaccgtaataaagacagcatggtgcaggcaaattatatccttatagatcagtggtataaaattgatccataaggcccagaagcaaacccttgcattttttattaattggttttcaaaagagtgacaagataattcaattcaagaaagaatgaatgatctttttaataaatggygctggaataactagatgcctatgtgtaaaaggatgaagttggatcctacttcataccatatacaaaattaactcaaaatggattattgacttaaatgtaaaatataaa

SEQ ID NO: 854483 - DNA, 637 bp, Homo sapiens
ccattatattctttggtttatcctataataacatgtgtatgcttgcagagtttctttatgcatatacaaacaggtgaaaatatatttttattttctcccccttttttgcacatatatactgctgtataccttacctttttcacctaacaacataccttggagatctttatcagtacataaaaaatcctcactttcttgtatagctgccctttgtgatagggcatgataataccacaatttttaaaaatcgtctgctattgatgggccttcagtttgttttcaaacttttgctaatccaaatgatgttgcatcaaaaaaacttgtgcatacattattttgcatatatgtaagtattcctgtgggataaactcccaaaagtgtaactgctaagtcaaagggagtacgtggttgtgatattgactgatttggcaaattgccctctgtaagtgttgcattaatttataccaccaccaggagtatctaagagtgtcttttccccacagctttgccaacagagagtgttatcaaatttttggaattttgtcagtctgataggtgaaggttatctcggtgtggttttaaaatcatccttattgggctatgattttaatmcaacagaatggactcattttagtca

SEQ ID NO: 854484 - DNA, 484 bp, Homo sapiens
aaattgttacattttcaaagaatggatatgtagatatattcaatttatataagaattaggttaattgaatatgttgaatactgataatttgcttggatctgtgttagacacattgtactgatagccaccatcatccttaaagtcattctgtggttccccttaacacgtggagtcaggtaactggcccactgtctcactgcaggatagggggctaggtgtttgcctaggactgacttttaagcttttcaaggatatcttgcttatattgggtgatctgtgacttttcttatggcataagcatcagtcacacccaaaaatatatgtacatatatagtttgtttataaaggccattgggaaaaaaattctcaagaacatctgagaaagctgtgaggacaatgtcattaagtctggttcttttgttttttcagattccatatccattctccaggscccccacccttgtttcttcattcctaaggcatt

SEQ ID NO: 854485 - DNA, 617 bp, Homo sapiens
agcttccttatctgtaaaatgggaacagttacactgcctctatcatagggtggtttcagaattcaatgtgaaggccaggcgtggtggctcacgcctgtaatcccagctctttgggaggccgaggcgggcggatcacgaggtcgggagatcgagaccagcctggctaacacggtgaaaccccgtctctactaaaaatacaaaaaattagccgggcatggtggctggcgcctctagtcccagctactcgggaggctgaggcaggagaatggcatgaacccgggaggcggagcttgcagtgaacccagattgcgccactgcactccagcctgggcgacagagcgagactccatctccaaaacaaaaacaaaaacacagaattcaatgtgacaatgcacattaggcacaaagcatattgactgacacatagtaactattctaaatgttagctcttactatctttataacgctcccattttccttaaaattagagttagtaaaattgatgtttagacytaagtctatcactaacaactaaagttgtatgagtttcaaaaagtcacttcaacctctaaacttcagttttttaatctgtaaaatggagataattaataattatt

SEQ ID NO: 854486 - DNA, 527 bp, Homo sapiens
agaggagagcagaaggaggaagctctatcagccggggctaaaaacggaggcacaggcaattatgccatctcctcatgactcatgcccaargccaggttagtgatactgaccctcccccagggcacatccctccaaaaggcaggcttttttctggttttcatctacttcaaggccatttgaggcttactttagcctcattttaagttaataaaaacgctgtggttagaaggtagagaaagaatggaaggaaggagtgtatactttgtcccagggtttaaaccccctgcctctgagtcatctgtattgtttcaggtcatattctatcatgtactgcttgatatatgatacatcctagaagactatccaaagatcttcaaatccttctctttgtgaaaattttgcacaggaagttacctgactaaccataaagtagtaaattggttaaattggaatacctcactctacaaaagcctttagcaaaaatgtacagccgtatgattgatggtggccttgctgtaaatccaaaa

SEQ ID NO: 854487 - DNA, 619 bp, Homo sapiens
gtcaaaaagtggcccaagtgaaggcctgaaacagaggagagacctctgcctgctgtgtagtgttttttgaggaggtagcagratgactgtaaggctagcttagtacatctacacagccttaaacttccaccatagtatttattcaaaacacagacatgcacacacaccattaggcttggcctagacaaattgagttactactgatgtgagttactgcagaaccaggcttaaagtgtcagaatgctacaacaaactttctttctttgtaaagcagatgtatagatgtttcctgcccacctagaaggaaagaactgggatttgggtttacacctgatatacagtatcaggtaaactaaaaggataagtcttgcctaattatcacagtggaaaatataaattaggaattttatattaaaagctatagagtaggtgacaactcgcagccgactccctgatttcctagttatagtcttgatgtacctgggacatagcaattaggcttgcaagcatgttctcttcccattagcccaaaggtagctttggagaatactgtcccaccatgaaaggtaactggctaagcagagtcatatgggtttggagtcagacatatttgtgccca

SEQ ID NO: 854488 - DNA, 658 bp, Homo sapiens
  misc_feature 1, 2, 3, 4, 5, 6, 7, 8, 9, 10, 11, 12, 13, 14, 15, 16, 17,18, 19, 20, 21, 22, 23, 24, 25, 26: n = A,T,C or G
nnnnnnnnnnnnnnnnnnnnnnnnnntagtagagacagggttttgctatgttggacagtcaagtcttgaactgctgggctcaggcgatctgcctgcctcagcctcccaaagtgctaggattacaggcatgagccactgcacccggcctcttgttggttttttataaggaatctgccatatatcagtgaaatccttgactatggaaatgatgaaaatcattttgcaaagcagtattgcaggtggggctcacatagtcttcagcttgtgcacaattgctattacttttgaataagtattgttagcctgcagttgaggaggagaatcatgggccatgtgcaaaactctagacatgttggttttcttggccccttatagaattaatacaggtaactctgcttttgctcaaatagacaaatactcagaggcatatgaattcccagagaacaatacagtgaaagcaaggactcccttataaaccagcttcttagtttttgcttattaatttcagagaacgtggtggtaagaagggaaaagattattgccgaactagacctgaaaaattgtcaaattattcttggccaaagtggtttggagtgtttgaatgtacrctaataaaaacaagcactattgttcaacttttaggtgtgtgtactttgga

SEQ ID NO: 854489 - DNA, 637 bp, Homo sapiens
cttttaatagacaattgaagcaaatttactcaatttcagaaatctgttatagtttttgaagcaatcttcctatctcgggattgcagttctaaacgaaataagaaacaatgtaaaactattttttaaatctacccatcatgtatgaattgggttgatttcaaaaatcactcattaggtggttttgaattaagcacagcagtacaaacaaacattaataaacaattttctgatttgcagaaactcacaattcacttaagagttaaaacaaacaaaatataactataataaatagcatatgatttgacagtcagctacatatcatttccctctcctctggcaaatagctgggtcattcagccatgcaactaaactagtacctagtggatcactggaaaagtttcccagtctaaactcagttacatttagtagctcttcatgttcaaaaattatattcgtgatccagcattagtaccagaccttcagacatattatttcattaataatgtctcacttagactgttttctaccaagcatatttactttcagttggccaaactaacatgagaattgaaatctgttttatgaaaaaagggaactcttgaccagtcaacawtcaatatattataacttgtattta

SEQ ID NO: 854490 - DNA, 609 bp, Homo sapiens
atttcatttgttacttggctatcaacttttcatctttttgatattaaactgtcattcatttacactgatttgttatttttttaacaagagacttcaaaacccattaactttttgatttttaagaattttaagcaagtttttaaatatggacatttgagagttttataaatgacacatgctattttataggtcttgaattaataaccataatattaatttggggtgatagtggggtgcctgcacatctgtgttgcaatttctctcctggatagcatataaattataacataaatgactttggtgtattgcaatgtctgcaactatatcctagaatgttcatttaaattatgaccattaaaattaataatagcttatctttacataatgattacatagttttaggcagctatctaagtactctacattaaccaacttagtcctcatgggttatctctgaggccagtcctatcgttgttcctcatttacaggtggaaaaaccacrgtttgaactcagaaagttggcccctcagtcttgctagctaacatcaatagcacccactatctctagtgctccagatgaaacagtgactccttcagggtggcatcttg

SEQ ID NO: 854491 - DNA, 618 bp, Homo sapiens
cactcctggtcctcagcttgagcacagggaagccattcctggctttatctcatggaggtccttggggtatgaatattcttatacaagccttttggtggacatgtgttttaacttcatgcaaggagtgggatttttgtgtcatgtgataggtgtatatttaagcttattagaaactgacaagctgtctttcagggcttttgaatcattttacattcccaccagcaatgcttgagagttccaagtgctccacatcctcagtaattgttagtaattgttaatctggcattgttagtgttttaatactttttgtcttaattcaaaaagtgagaaatttattttttgtgctataacttaacacaaagtaagggactaaaaactgcccaactatcaacatagcaaaaaggcaacccaaagaatgggagaaaatatttgcaaatcatgtatctgataaaggaataatatccagaatatagagagaatttttaaaagtcagcaacaaaacacaacccatgttgaagtgayaatagcagtctgcactcccatgttcattgcagcactattcacaacagccacaagacattgaatcaacgtaagtgttcatcagtagatgaatggata

SEQ ID NO: 854492 - DNA, 540 bp, Homo sapiens
tgtaatgctgtcacattctactgaagtcttgaaagtataaattattgcattggaaaactgtaaaccaggatattgagcaccttttttctttcacacagtctgtctattcctctccttgtccccagctttctgtggtcccagactatccttctttaggcgatgatctcctccttcttcagaagggagggagaatccaccttcagggattttctttcctctctatctccagtacaggtgacagtataaattacccacaacacaaagattttttttacattattcaataaatcactcatctccatctgaattatctacatttagtttaaattcctgattttgtttactaagaacaattgatatgtcccagctttatgtctgaagaacaaaaaggagctaacagaggagcatatcactcaaggactctccaaaatgaaagtctccaaatgcaacagttttaggattcaaagtacaacmgtagcagcaaaaattataatagcttttagtagcatttgtgggtgtacaacaagggtgacatggctt

SEQ ID NO: 854493 - DNA, 634 bp, Homo sapiens
caaaattatcccaataaacaaaattaaaaccaaggaccctcatggagttcacttcactgccctgccacctccacaggagcaggtactgatatccatggatgagacctgaagacgaaccacatcacaggactctttgcagacactacccagtaccagcctggagcctggagcacagtagctctgctgggtgttgacaatcactgtagttcagctctcaggaagccccatcctttggagaagggggagagcaccacatcaagggagcaccctgtgggacaaaaaaaatcctaacagcagcccttgagtcccagatgtttcctctgatatagtgtacccaaatgagaaggaagaagaaaaacaatcctggtaatatgtcaaaacaaggttctttaacagccccaaaagatcacactaccttaccagcagtggatccaacccaagaagaaatctctgaattgccagaaaagaattcagaaggtggattattaaactacccaaggaggcaccagagaaggrtgaataccaacttaaagaaatttaaaaaatgttacaggatatggatggaaaaatctccaaaaaaatagagagcataaaaaaaaatcacaacttctggaaatgaagaacacacttggag

SEQ ID NO: 854494 - DNA, 634 bp, Homo sapiens
caaaattatcccaataaacaaaattaaaaccaaggaccctcatggagttcacttcactgccctgccacctccacaggagcaggtactgatatccatggatgagacctgaagacgaaccacatcacaggactctttgcagacactacccagtaccagcctggagcctggagcacagtagctctgctgggtgttgacaatcactgtagttcagctctcaggaagccccatcctttggagaagggggagagcaccacatcaagggagcaccctgtgggacaaaaaaaatcctaacagcagcccttgagtcccagatgtttcctctgatatagtgtacccaaatgagaaggaagaagaaaaacaatcctggtaatatgtcaaaacaaggttctttaacagccccaaaagatcacactaccttaccagcagtggatccaacccaagaagaaatctctgaattgccagaaaagaattcagaaggtggattattaaactacccaaggaggcaccagagaaggatgaataccaacttaaagaaatttaaaaaatrttacaggatatggatggaaaaatctccaaaaaaatagagagcataaaaaaaaatcacaacttctggaaatgaagaacacacttggag

SEQ ID NO: 854495 - DNA, 563 bp, Homo sapiens
tgagggattaattgaggaaaacttccctggctttcctagagatctagacatccaaatacgagaagctcaaagaacacccggggaacaccctggagaaagatcatcgcctaggcayatagtcaccaggctctctaaagtcaagacggagaaaagaattttaagagctgtgaagcaaagtatcaggtaatttataaaggaacctatcagattaaaagcagatttctcaacagaaatcctacaagctagaaaggtttggagtactatctttagcctccttaaacaaaacaattatcagccgagaatgtgtatccagtgaactaagcttcataaatgaaagatcaagtctctttcagacaaacaaatgctgagagagttagccactaccaagccagcattacaagaactgctaaaaagagctctaaatcttgaaatgaatcctcgaaatacaccaaaatagaacataaaacatttaaagcataaatctcataggacttataaaacaataacacagtaataaaaaagtaaggtatttaggcagcaaatggcatgatgaataaaatagg

SEQ ID NO: 854496 - DNA, 611 bp, Homo sapiens
tagacactctgccaaataattggagcagtacttatgctctaatccaactggctatcccctgcaccttggcatttcaaaacctaaaaaaaaaaaggtaaaaacaagacactgcaggccaaagaaaactcctcatgagtcctttaaacgttaggtttacataaatgctattaaggtcctatgagaagtgccaaataagtttaaagcacaaaatcaaatagctgcagagtttaaatccatgttgctctgttaagtaactataaatttttttaagtagactaaataaactctttttgcgataatcagcaacgattcataaattacactgaggacgccatcaaagagaaagctaagcaattaggacctaccagccagatgggctagaaaaataaaatagctccaaatataatattagcaaaaaaagaagtttgtgtcataattaaaactcaatgttatacctttattcctaatactgcccctgatagaactataacaaaagtgctacaaggattaacagccctatccgataaacttgccaamaattctaaaataaataactctttttctaaaataataaaacattggttcagcggataaaaaaaaaatttaacttc

SEQ ID NO: 854497 - DNA, 606 bp, Homo sapiens
atggcctgcaaggtttcctggtctctcccctgcctgtttatgccacttcagtttttgctgctccctgtcacttagtgcacacatgagcatcctcctattttctggaatatggtatgccttcttctgctagaagacctttgatgtgctcttccttctgtctagaaagttctcgtgtcccttcatctttcctcttgagtcgtcacactcagcccaattgtcatttcttcagggaaacttcctcttactctctggatgagggcatgtcttcctagtgtagactccactagcaccatgtacttctcattcgtagccctcactataattgcatttttctatgtattctttgataatgcttttctcctgtactctaaattccatgagcacaggaaacactgtgtctgcagcacccaggtaattgcatggcatgtagcaggcacacaaatttcttttttgttcctgttgaaatagatatgtataataatgagccatgctctagggtgttctgctgtagttcatctyggttgtatttctctcataatttaatattaataaggcataatcatttagtgggtttttttgaagcatcatccttgaaggattttgtta

SEQ ID NO: 854498 - DNA, 580 bp, Homo sapiens
tgagcttccattttgtaacccacgatcctggtgaagacaatcgttagggaaaaaacatcttaaggattgtgtgttagggcaacctcatttctggcgtgaaaacaagccccgcaaacaccctgttgttactctggtgttctgactgcaaacacggggggatgtaagatttttacctaatcccaaacctcggccctgaagagttaatgatgttactcatgccactggggcacaaaagaaagacttgcatgttcgggtggttatggcttgcccagagcggtggaatgagccataaggctgaaggccaagggactcgggccacccatgcagtgaaataatcccccagaaatgcggtgccgggagtggaaatgaaagtaaagagaacagtcattccagggcattggctaaacctgactaaacctgactgatcatcaagcctaaagttctctcgactcccaaaactgcaaatctcagattttgggaggtactgcgtagaaaccaggaaatgacagaaatcaagcagttggaacmctgttcttgtccaactctgggtcttaagctctgttctcattttcagttccaa

SEQ ID NO: 854499 - DNA, 621 bp, Homo sapiens
tatttgtaccatgtacaaataacttaatggtcacgaccaagacttctacatgttactggttttccaaatgctatttcatttgcctattatgctgcttccaacacttaaccatttgtgtatataaattagtgggtgctttttcagcttttaagatgaaaaatcttttatgttggttgatattgcctgtgtctctaaaatttaaaaaaaaaatccagaattcctggatggcaataatctatgataataataaaaaggcaaaacagcaccacctcagagataaggaaacaagcgcagagacctggagatgcttatgacactgcagcctgcttctgcaccgtgacaggtgcggggaaagagaggcagacatgggaaccaccgtgggggcttcacagacactgggtcctgcaccgctccctcaccccatccacgtcacttgcttgatactgagcttccatgtatgattttgtctgcggaataggagagttctcwtagaaaagaaaaaagcctttagctataactagtatagctgagagattaaaagtatgtctttaaagtcaggtcgtgccacttctaagcagttctcaaacaacaaaggatgacatttagctatactgaagagaa

SEQ ID NO: 854500 - DNA, 605 bp, Homo sapiens
ccaaggactatttagagagatcatatgtattattttattacaagcacatttattattttattacaagcaggcctttctaatggcagtatcacaggtctgctatgttaactcatttctgtacacccactcactaagaaagacttgtaaatggaagtaacaaaagaaaaacttaccacatctagcaaattcatagctgtttgaagaaggtagcattgggctgcccctctcaggagaatctgatgtgtgatcatagtgcaatgaataacatccctgacatcgaaacacaaaaaatgcagttccgtattcccaaagacaattctgataatttgtgattatcaacaagttgatttataacaactacacttcctaatgcagaaagtctgcagaatttcaaagctgttatttcccattatggcctctattaagagctcaattttactatgaaacaagtctcttttaaaaataagactataggccgggcgcagtggctcacrcctgtaatcccacaactttgagagattgaggcgtgtaggtcacctgaggtcaggagtttgagaccagcctggccaacatggtgcaatcccgtctctactaaaaatacaaaa

SEQ ID NO: 854501 - DNA, 605 bp, Homo sapiens
ccaaggactatttagagagatcatatgtattattttattacaagcacatttattattttattacaagcaggcctttctaatggcagtatcacaggtctgctatgttaactcatttctgtacacccactcactaagaaagacttgtaaatggaagtaacaaaagaaaaacttaccacatctagcaaattcatagctgtttgaagaaggtagcattgggctgcccctctcaggagaatctgatgtgtgatcatagtgcaatgaataacatccctgacatcgaaacacaaaaaatgcagttccgtattcccaaagacaattctgataatttgtgattatcaacaagttgatttataacaactacacttcctaatgcagaaagtctgcagaatttcaaagctgttatttcccattatggcctctattaagagctcaattttactatgaaacaagtctcttttaaaaataagactataggccgggcgcagtggctcacgcctstaatcccacaactttgagagattgaggcgtgtaggtcacctgaggtcaggagtttgagaccagcctggccaacatggtgcaatcccgtctctactaaaaatacaaaa

SEQ ID NO: 854502 - DNA, 668 bp, Homo sapiens
tcaggattgtgcttgtcacttccaatttatagaattttatagattttgtagaacttcagaatcctcccttttagcatcaccttttgaaattaaacatcacctttttagccagtcctttatggaagcctcctttgactcttgacttttcaaatttaagatttgttctatctttcttagcatttgacctgcccttaaaatagtctttcaattgtggacacaacattgtaaaaagattgtgccctcaggctaccttgctgttagatgtcaattgtgtaaacaatttagcagcatgcactctaggtctggtcattgtttcttttgaaattcactttaactataagcattgggaacctccccctctggaagaggcctgttctcctcatggactgatcatgtatgtgagtctgcatatgtctgtctgtttttctcttttatttgctgatgctgaagttgcttaaattcttccataaatactaaactgcctgtccagaatgtgtaatgcaaggatgtagttttacattacacacagctgaaaggatacragtattttcagataagagatttgagtggatataaagaatgccagctacagcaccagtgagaaaaatcccaggttcacccgtaaacatgcagtccagtgtcagcaactagttgacttcaacttttga

SEQ ID NO: 854503 - DNA, 537 bp, Homo sapiens
aaaaagtattaagaatttcaaaactcaccagtggggcattagcccagcatgggcctggtgcaactgatgccacatgccatgaagcagtcctgctttgcagtctgaatcatgcgtatgatctgagctggggttctttctctccgtccctctctctgctcaggttctaccatactyttctacacaggaagccaggctgaggtcaagagtcattgtgttctgtacacaatgcatacatgatggattatttaccaggtgagggcctctttatttgtacctcatgatataatccctaaaagctgctattcatgaaaggaagtgtgctattcctgactgaagaatacgaaaatgtcctccagcctaagattcaaatattgttgaatgtctttgagatcctcagccaggaagacaaatgctatttacagagatctgaaagactcataatgcagaactatggtctgatttaaaaaaaaaaaaacacctaaaatgaacaagctctaattgtataacagagattttgtaaaagatctttctcagcaa

SEQ ID NO: 854504 - DNA, 614 bp, Homo sapiens
tgacttaacagaaatcatatcaataatttaatataaatggactaaacgcttcaaccaaaagacagagattggcagctgaaayacaagagcaagacccacctatgtgttgtctacaaaagatgctgtttaaatgcaaagatgcaaatgagttgaaagtaaaagaatggagaaagacataccatggacacataagaaagcatgagaaagctggagtagctacatgatcacagacacaaagattttatgaaagaagtagtgctagagataaatggaaacttcataataatacaaaccgaaagtaactacaaggaaagaaataataaggatatcagtggaaatcaatgaactagaaaatggacaaactaaagagaaaatcagtgaaataaaaaacttgccctctgaaaatatcaactaatttgataaatctgtagctgaactggtcaattaaaaatgcacaaattatcaatatcagagatggaagagaattatcaatatggttcttgtagtcattaaaagaataataaaaaaattgtgaacaacattatgacaaataatttgaggatttagatgaaatagatgtcaaaaacagactcaagaataacagaagacctaaa

SEQ ID NO: 854505 - DNA, 627 bp, Homo sapiens
cttgacactgagactgggttytcctgggaatggttagttcccaagagagtgagttgttataaaacagtgctgcctcttctattttgcgctttttgtttgcacaaactcggtccccttctgtttctctacgatgttttgatgcagcatgaggcagtcatgagaacccaccagatacagctgcctgatcctgaatttcccagccaacagaaccaagtgctaaataaaactctttttaataagttacccactctcaggtattctattatcgcaacagaaaacagtttaagacacctgctaggctcctaaccttgaggggctagaaaacaaagccagaggtccagtaccagcctcctcagagttagaatacacagctcatgagtgctgagctcagccttggcccctacaatcttccagaaatgaggccacttggctgagcccattatatgcaacattcagacccccaagggcatcaaagaagacaaaagcagaaaaacctatccaagaaacagcaacttcaaaggttgaagcaacatcagaccacacaggtgagaaccagcacaagaactccggcaactcagaaagccagagtgccttcttaccttcaagcaactgcgctatttccccaac

SEQ ID NO: 854506 - DNA, 516 bp, Homo sapiens
ctatttaaccgcagcctcacagcaactaccactgcatgcaaactggatccatctaggggcaagtmtagggcaaccagagtgtaaggggttgagaggtaagaaaggagactgctagaagtcagctggaaatgaaaaattccaaagctagaatgtcatgatgaataacaaccaagaaaacattccagtaccatgaaaaaaaatacgttccagtttacattcagctatgatttttaaaaactgaaccctaagttaattagttcaaatacagtttcattagaaaatatctttgcatttttcaaagaaatatataggataatataaatcctggctttaattcaagaattaataaaaaaaatattaagaatcccagttcagttctgattcaggaataagataactgataatttgaggctagaatttagtctacagatgttagaggccctacagtagaacactccgagcagaggaaacagcatctgtgaaggcctagaggcaaaaggaagcagggtatgtttg

SEQ ID NO: 854507 - DNA, 576 bp, Homo sapiens
acttaagtacaggcacctcctaggaattatacccctaataaatgattgtattgaacatttgtttaaactgatgtaaagtactttgaaggttaacatcctttccctccctcacaatattaagtagtgtagcttggaggttgaaagcagattctgggttcaaatccaggttctgtcagattctaccacttaccagctaaatgacgttggacaagtcacaatatctctaagcccttatttctttacttgtaatgtgggagtacaatctgccccatgaagctcttaaaaggatacagaaaaataaaatgtgacaaacgtcttgcattcaatgtatagcaaatgactacttgatggtattttataggtgacaaaatagatgcccagagaagttaatctcctttcttgggtccccccgagtgttaacagcagtgcagggaagcagtcaagcatcctgtctcyggcccatggcttttttatccatgtggagcaccagtcccacacagaaatcatgtttaggctacaagtgatttttcatatatatcttctttaatttgcatttgtctgccaaatccacacatt

SEQ ID NO: 854508 - DNA, 468 bp, Homo sapiens
taggatcctctagcaatttctcaggctaagacttcatgttcccagaagagggcagcaaaactccaaaggctctgccttttcctcaattaaaatgtctaaagcagtttttccttgagaggaaaagaactatactgtaaagaatagccctttaaaaatgatggtatttaggtgacaaagctaatcctattacaataaatataacattcattccaaataagatttttccttttctctgtcctgtgaagaaaataattgactgtttcttcaatctcatgttaattatttgacttatatttccagaaactcctacccatgtttttccatttaactctagatttgtagatcctacttagcaccagtttttaaataaattgtttygtatgtgtaagagaaaaggtgttcaggcctgtttatagcttaggatgcctacctaagtccaaagagtgatcctcagcagtgtctaaatgt

SEQ ID NO: 854509 - DNA, 589 bp, Homo sapiens
ctaatctttctcattctttcattattcaaatatccccgtgcctttctatctttagtcagtgaattatcttgtaatgacaagagcarctaacatttgaactgttcttaactcacttaggccggaggttgcaatttttttttgtcaaaaaatcagaccttggtgataacttgagcagtaggctataagtaactagtaggctagcttactataagtaggctaggcatattaatagcgtataaggtgctctcacagacatgttttccctttgatactcaccatagccctgtgaagttgatagctactatcccccattttacagataaattttctaatctgtaatcaaaatagctgctctttgcttgaagaaaaagtccagagggacaccctatatgtcaagagagctccagggggtgggtaatttctttcataattgctagaagagccaattctgaatgtgaggctttttctatctgctttattacaaccagagatggaataggaaggctttcagttacagtttatcaattccttctgcttttgccagttaatctctagctttactcttttgaaaaaactacctgtttcccac

SEQ ID NO: 854510 - DNA, 505 bp, Homo sapiens
cgtgcctttctatctttagtcagtgaattatcttgtaatgacaagagcaactaacatttgaactgttcttaactcacttaggccggaggttgcaatttttttttgtcaaaaaatcagaccttggtgataacttgagcagtaggctataagtaactagtaggctagcttactataagtaggctaggcatattaatagcgtataaggtgctctcacagacatgttttccctttgatactcaccatagccctgtgaagttgatagctactatcccccattttacagataaattttctaatctgtaatcaaaatagctgctctttgcttgaagaaaaagtccagagggacaccctatatgtcaagagagctccagggggtgggtaatttctttcataattgctagaagagccaattctgaatrtgaggctttttctatctgctttattacaaccagagatggaataggaaggctttcagttacagtttatcaattccttctgcttttgc

SEQ ID NO: 854511 - DNA, 644 bp, Homo sapiens
cagtaaatgcctctcccaatmatttattatctgacttaagacctcttttatgttttgaattttcattttgttttattcaaaaatatttatttagcacatataagatttaatttgcaaaaaaaaaatctgctgctaaaaatagtatgaacataactggcttgatggtttctaagatcctttccacctttctagcattaacattttatgttcctagtctaagagatactgatgcattcattcttcaccccgggaatcttaaagtatgagcactcatttggataattagggaaatgtcatagacattgctcttctggaaagcatacctaaaataaaaaaaagaaacatccaaaaaaggttttctccattccagtgaataccatttactggtttattttcagtagccatagtgaaaccttttctacattttctgcttttgttcttcttcttattattattttcttcttcttattattttcttattattattattttttttgcaaaggggggaatcaaaagtaagaattgtctgtgtcaaaacatatacagacatacagcaatgctttatatttttcaactaacaatttttcaatcagtaagtaaagatatttaatttacttgtaagataactagaaatcctaagagaa

SEQ ID NO: 854512 - DNA, 608 bp, Homo sapiens
ctgtttggcaagatctcccaagcagtggtttacaaattgtgtggcttcactactattaggctgttcaattaattcaatgsgctatgaacagatttataattgaaatggaagagaataaaatacatcagattgaactttataatttttatgttacactgcaaatgaaaaacttgcaaaattttcagtgtttgtatgaatgtgtatgtatatgcttgtggtaaatatattacttttattacttactctggtttttatttgaaaagttttaaagcctagagcaggatttctcatgcaagagttaccaaataatccatttaaaacataggtaataataataataataataataataataataataaaagtatgcatagtatttgcttatatcgatttatgtaataaaatatacacgtacaaagatatgcaacaataatttataaagattaggaataaatttattattcattttactttacgtagtaaaaatgccagaaagttccagttaaataatacaatttaaataacattaacatggcacatgcacctgctttcctgaatttaaactgaccaggttgtgtttaataatatgaagctgtattagcaccttt

SEQ ID NO: 854513 - DNA, 550 bp, Homo sapiens
ccagtgggatggctgttattaaaaaacaagtggtggctgggcagagtggctyatgcctgtaatcccagcactttgggaggccaaggcaggcagattgcttgagcttgggattcgagaccagcctaggcccatggcgaaacactgtctctacagaaaattagctgggtgtggtggtgtgggtgtggtggtgtgggcctgttgtcccacctacttgggggatgagggaggaagatggcttgagaccaggatgtcagggctgcagtgagccaagcttgcaccactgaattccagcctgggtgaaaaagtgatactctgtctcaaaaaacaccaacgacaaacaaaaaccaaccaaacaaacaaaaaacaataagaaaaaaagtggtggcatatgcctgtagtcccagctactctggaggctgaggtgggaggattgcttgggctcagaaagttgaggctgtggtgagctatgattgtaccactgtactccagcctagatgaccgagcaacactgtgtctcaaaaaccaaaacaaaccaaagaaaagctgattg

SEQ ID NO: 854514 - DNA, 550 bp, Homo sapiens
ccagtgggatggctgttattaaaaaacaagtggtggctgggcagagtggctcatgcctgtaatcccagcactttgggaggycaaggcaggcagattgcttgagcttgggattcgagaccagcctaggcccatggcgaaacactgtctctacagaaaattagctgggtgtggtggtgtgggtgtggtggtgtgggcctgttgtcccacctacttgggggatgagggaggaagatggcttgagaccaggatgtcagggctgcagtgagccaagcttgcaccactgaattccagcctgggtgaaaaagtgatactctgtctcaaaaaacaccaacgacaaacaaaaaccaaccaaacaaacaaaaaacaataagaaaaaaagtggtggcatatgcctgtagtcccagctactctggaggctgaggtgggaggattgcttgggctcagaaagttgaggctgtggtgagctatgattgtaccactgtactccagcctagatgaccgagcaacactgtgtctcaaaaaccaaaacaaaccaaagaaaagctgattg

SEQ ID NO: 854515 - DNA, 550 bp, Homo sapiens
ccagtgggatggctgttattaaaaaacaagtggtggctgggcagagtggctcatgcctgtaatcccagcactttgggaggccaaggcaggcagaytgcttgagcttgggattcgagaccagcctaggcccatggcgaaacactgtctctacagaaaattagctgggtgtggtggtgtgggtgtggtggtgtgggcctgttgtcccacctacttgggggatgagggaggaagatggcttgagaccaggatgtcagggctgcagtgagccaagcttgcaccactgaattccagcctgggtgaaaaagtgatactctgtctcaaaaaacaccaacgacaaacaaaaaccaaccaaacaaacaaaaaacaataagaaaaaaagtggtggcatatgcctgtagtcccagctactctggaggctgaggtgggaggattgcttgggctcagaaagttgaggctgtggtgagctatgattgtaccactgtactccagcctagatgaccgagcaacactgtgtctcaaaaaccaaaacaaaccaaagaaaagctgattg

SEQ ID NO: 854516 - DNA, 615 bp, Homo sapiens
ccttggcctcccaaagtgctgggattacagatctgagctactgcacccagccataatttgtcattgatcacttttcaaaaacacgttttatcatgctattttctgtaactgaactcaacatgtttctacgttggtcactttttagagacccattttcttttttcttacttttctattacactttacgttctagggtacatgtgcacaacgtgcaggtttgatacataggtatacatgtgccatgtttgtttgctgcgcccatcaactcattatttgttggggtgatcaggcccaatcccagactgtgggggctacgaagtccagcggagtcaaatgaataagacaagataagttaacggtgcataaagtgggtccagggggctgacactagtatggaggctgtgaaggccccgagctctgggagcccacactatttattggtgatcaaacaaagaagcaggcggtgaggacatgggggtcgaaagaaagtgrtgcatcaagtgtttgatctatagctgtgtcagtttagcattttctttgaagcatatggaacgagttcagttacagaaaatagcacatcatctaattttttagcaaaaagctagcatttacttt

SEQ ID NO: 854517 - DNA, 623 bp, Homo sapiens
caattataaatgtatatgcaactagcaagacagcccaaaaacatttgagataaaactgacagaactaaaatgggaaataattgatcattccaacaataatagttarggactttaataccccactttcaataatgaatagaacaactaaggcagaagaccaatacggaaagagaagaattgaacaacactgtaaacaactagacctaataaacaccagtgaatatgccaccaacaactgtagaatatgcattcttctcctgtacacatggaacatttcttggaatagaccaataaacacaattgtcttgagttagacatttaagcacaccccaataaacttaaaattatttaaatgatacaaaatattttctccactcacaatgaaattaaattagaaatcaataataaaagcaaatttaaaattcacaaatagtgggaaataatacacttccaaataaccaatgtgtcaaagaggaaatttcaagggatattggaaaattcatttagatgaataaaaatgaaaacacagcataccaaaacttatgagatgcaaataagcaaataaagatgctctgagaaaatttatacctctacctatattttaaaagaagaaagatctccaa

SEQ ID NO: 854518 - DNA, 623 bp, Homo sapiens
caattataaatgtatatgcaactagcaagacagcccaaaaacatttgagataaaactgacagaactaaaatgggaaataattgatcattccaacaataatagttaaggactttaataccccactttcaataatgaatagaacaactaaggcagaagaccaatacggaaagagaagaattgaacaacactgtaaacaactagacctaataaacaccagtgaatatgccaccaacaactgtagaatatgcattcttctcctgtacacatggaacatttcttggaatagaccaataaacacaattgtcttgagttagacatttaagcacaccccaataaacttaaaattatttaaatgatacaaaatattttctccactcacaatgaaattaaattagaaatcaataataaaagcaaatttaaaattcacaaatagtgggaaataatacacttccaaataaccaatgtgtcaaagaggaaatttcaagggatattggaaaattcatttagatgaataaaaatgaaaacacagcataccaaaacttatgagatgcaaataagcaaataaagatgctcwgagaaaatttatacctctacctatattttaaaagaagaaagatctccaa

SEQ ID NO: 854519 - DNA, 582 bp, Homo sapiens
cgttccagaagggcacctgccagataccagccagagctctcctgtatgaggtgtctgtcgacycctgctgggagttgtctcccagtcaggaggcatgggggtcagggtcccacttgaggaggcagtctgtcccttagcagagctcgagcgctgtgctgggagatctgctgctctcttcagagccagcaggcaggagcctttaagtctgctgaagttgtgcccacagccgccaggtgctctgtcccaggaagatggaagttttatctataagcccctgactggggctgctgtctttctttcagagatgctcttcccagagaggaggaacctagaaagccagtctggctacagcagctttgctgagctggtgggctccacccagtttgaacctcctggcagctttgtttacactgtgaggggaaaaccgcctattcaagcttcagtaatggcagatgcccctccccccacctagctcaagtgtcccaggtcaacttcagactgctatgctggcagcgagaatttcaagccagtggatcttagtttgctgggctccatcagggtgggatccattgagctagacca

SEQ ID NO: 854520 - DNA, 582 bp, Homo sapiens
cgttccagaagggcacctgccagataccagccagagctctcctgtatgaggtgtctgtcgactcctgctgggagttgtctcccagtcaggaggcatgggggtcagggtcccacttgaggaggcagtctgtcccttagcagagctcgagcgctgtgctgggagatctgctgctctcttcagagccagcaggcaggagcctttaagtctgctgaagttgtgcccacagccgccaggtgctctgtcccaggaagatggaagttttatctataagcccctgactggggctgctgtctttctttcagagatgctcttcccagagaggaggaacctagaaagccagtctggctacagcagctttgctgagctggtgggctccacccagtttgaacctcctggcagctttgtttacactgtgaggggaaaaccgcctattcaagcttcagtaatggcagatgcccctcccccsacctagctcaagtgtcccaggtcaacttcagactgctatgctggcagcgagaatttcaagccagtggatcttagtttgctgggctccatcagggtgggatccattgagctagacca

SEQ ID NO: 854521 - DNA, 625 bp, Homo sapiens
ggaaccatagatatttattttattctatgtgttcagtactaccattatttactttgtgactcaatttgctctaacattagccagtcaagtgggtccttgtgcttaaacaagccttaattattttttgtttttattgatttattttttagtgtttcctttattttctgggaccacaagatgttctttactttctactcctatgacctccaaacatttccaaaataggactgatcccatgaggcactctattaactttgaagtggtaagctaatgagttcatgtgactggtagtatctactctgtgaattagttctcttctgtgtagcaagctacacaattgtcaaataagaatcacctgtgcctattactgttacatactagtcgtggctgaatatttgccaaataccacgcacaaatgaaaaacaataagctgacttcatgcttttgcttggggaattgtatgtatgttgtgtgtgtcttcaaacgaatcaaggaaattttagattgttgtagatgcttcgagggatatgggggctgattttttaaaaagcaatacatgaccacaaggtggcaatagcacagatragctttatttgcctttgacaggtttgcatgcaggagaagt

SEQ ID NO: 854522 - DNA, 463 bp, Homo sapiens
gcaaggtgaaccctactcagtgtgaagcaatgaccatggttgcagcccaagtcatggggaaccatgttgctgtcactgtcggaggcagcaatggacattttgagttgaatgttttcaagccaatgatggtaagctttaaatctgatttttaatgttttttgaccaaaggcttattatcttggttttgtatttcataaagacttctagtgattccacattgggtagttgggtgacataagtagcagttggaagtcaagcatttattaagttaccagaataatcctagataatagaaattagttgacttttaacctaagcaatttgatgttttttttaatagcccgtttaagaaaaataaaaygcctccctacaagcctgtctccttctcatgctgctgctttcttcttcaaattcagtcttcttggaaggatagcacatactcactttcatttatgctgtagtc

SEQ ID NO: 854523 - DNA, 601 bp, Homo sapiens
acttttgtgggcacctagacaagcatcattagtgtaagaacatcccctatgcaacttttcaaactggggccattcaacttccctcagacaccttcaccgatgtgcagttcactcttcaactaaggccactttgaactgccctaattgttagaaagtacttccttctgttgaactgaaatctgtctgccttaaacttttatctattaaatttaaatttgtcctgtggggcttggctgttatgtttgattcttttcccacagaagagtcttttaatgttttaagaaaatgattgcaaatcacccaagtcttctctttcagggacaaaatgtcttttatttcttccagtcatcagagtgactttgagcacctttgccatccttattgctttccttcagcttcatcaagacactctttcagtgaatacctactttgctcctgctgtgtgcctggcactgatctaggcactgagtgtayaagaaaggtgcaataagtagtggaaacaggacaaaatctctatgctcctggatcttacatcaccgaggtggggtcagagcatacatgaaggatttataaccttggcatgtgccatccaggatgttct

SEQ ID NO: 854524 - DNA, 438 bp, Homo sapiens
cagaacaataattgtggttatcatctaaaaatcaaagttatttctaagttatttgtatgatatacaaaaaatgataggactgaaataaaaaatatggtaaagttatattagaatcttattctcctttgcttgctatatcattgttacataaaatgaaaagcagcctcattgtaaaaccagcctttccactttattaatataaacagaactaagctttatttaaaaaatatttaaaatattaaacatttaactacttaatatctttaaaatattaaaatattatttgaatgcttcctatttgtacaaagtaacgtgtaggaggtctttcccctcaaagcattcaccatctagcactgtttctccacattaataacacaaacrtgcttttttcaagctctcatagtattttatatcttttttcagagcttattcactctt

SEQ ID NO: 854525 - DNA, 267 bp, Homo sapiens
tgcattttaagaagatcaattgagacgctttggagaaggtaagaggcatgaatagaagcgaggatctccatgtgaagaccagtgtagtagtctaggaaagacatgtgatgacttaggcgaggttggaacagtactgacagcggggaagggagagagccaagacatgwttagaggcagcagcaacagaatctgctggtgaattaaatgtaggatataggggaaagagaggagtcagtgatgacttctagatttttggcttgagtagct

SEQ ID NO: 854526 - DNA, 374 bp, Homo sapiens
aaagaaagtaaatcctattagaggtgcaatatgcttagtattctgagattgcaattactaaatattacagagcaaattatgtaaaaatatttcgatgaccagtatattttctagagggtatgatttgcaatttcttcaaaattcccacatacaatgtttagctgaccaattaactagcattactaactactttagcgttattaaagaagaagaaaataagaagtgttgttggcatgtcagcctcattaaaascaatagttcatggaatgctaagggtatgtacattgcagagggtgtgcactcctttgtttgtggcctatgaagtaaagagatgaagggagcagtagtggctgggaaattgtccataaggtcca

SEQ ID NO: 854527 - DNA, 497 bp, Homo sapiens
gaactagttagggattttaaaagaagcaaatacttttcaaatttaagcagaaggataagaaaaatatttgattaattaatggactgccacaaggggcaattcttcctgacttcatatattctacattagttgttctttataaaacaaagagtatattgtattttcatgggagggtcaaagaattatagagtcaagtctagacctaacataaattcttcctatatacacaaaacctcaatagcaacaacatatcagtcatagagactttttcctagatttttaagatatcaaaaacgttcttcaataacacattaatcaaaggtactctaatggcatctcatgagctaagtaggtgtcaaggatcatctttcttttatcatgagaaaataaagcagaactggttctgtgatttagccaagawcaaatgtcagtaagcaaacaatctcaaaatcagagcctttcaagtctcaattgaccgtctcaacccagagggtgaa

SEQ ID NO: 854528 - DNA, 617 bp, Homo sapiens
ggatgtgatctgagttgagtggttgtaactgaattgatctcctctattgacaaaatataaaaaatattccatctatttgcagaacaattcttgtgargtaacaaagaaaagaaagtaccattatatgagcacttagcctaccttcacccctcctgtggggtaaaaatcaaagtgtgcctgcttttcttttagccacagaggctgatgatccacgatcctctctggtttagtggctccaagagactaagaagttctagagttgacatgggcttctgttcttttctttggtggctccctgactaagaattggctccagagcttgctccagaacactcagggggaactgaatttcaactcccattaggcaatcccctgactactaaggacctactactctcctttatctctctcttctccattctgagcctgctcagaaacagagattttccctggacaaagctgcctggtagtaaatgtaacaaagaagggtcctttcagcatccaccatctcccctccgggccctggtttttttgttccctataccctccaggttccttgtttcatgtcaagacccattttcaggttccatttgggaaaaagtagtacactttcattg

SEQ ID NO: 854529 - DNA, 610 bp, Homo sapiens
aatttatttcaataatctgcctccrattccctaaacataccattctctttccagcctctatacctttgttcatgcagcttcctctgactgggtttgttcttcacttggctaacccctcttttacttaagcacaccttgaacattccctccttccccatttccccgcagtgcccctaatggacatacttctgaataacacaggtggtattccttccttgttggaacctcctggaggaagagacagatgattaacaaatccttccatcaacccctttgaccatgacatcaacagtgctccaaattatggggtaccgtattagcctatgtctatcttgatcagaatccttacctcggtgtattgaaattatctatttcgtgcctgcctctttaaagtcagggtttgccttatctattgtctaacaccatgcagtaggtaacatgcagtaggaaacatggcattaaattatttgggttcaaatcccagttatggtgtgtaaatgcctaccaggcgtgaggcacctgctaagcaggttgcacgcatcatttgaattcacaccaccctttgcaatagaacagataggcaacagaggctcatttgggctaaaggatt

SEQ ID NO: 854530 - DNA, 542 bp, Homo sapiens
taaggaagaatgagaaggtggctgaatggtaggagctaggaatgttggtaatattttctcctgaagcgkacccagacttctctgggaaacttgaatttaagaaagcttataagggagactgtgcagtggaaggggtctggtcaaggagaaacagagcactggtgcctgtatactgccctcccccaataaaatatttgtctcctctaccccacaagccagaccacagccattcacatttaaagcttgtggtttgtccatccttgggagggtgccacgtggaataggattatattaagtgcatagtgatggctttgtggctcaggcagggaaatgtccctggctaattgcacattagatactagtcctgtaaatgttattaggctgtgcaagctagctgctactattaactttatgttgaccttctttgtaccaaacacaagctctcaaaagagttctttgcagagtgccatttaagggctcgtgcagcctttagaagttgatttggggatgcctgggaatgcagtctcctggaattgcattta

SEQ ID NO: 854531 - DNA, 525 bp, Homo sapiens
tttacctatcctgccaaatttgagtttcaggaacctaatccaaatgttaattcgaatttccaaatcaccaccgattgcccatccctaatcaaaaaattytaaatgctccaaaacctaaaacatttgagcaccaacatgatgccacaggtggaaaattccacacctgacctcatgtgatgggttggagtcaaaactttgtttcatacacaaaattattaaaaatataggggccaggcatggtggttcacacatgtatgtaatcccagcactttgggaggctgaggcaggagaatcacttgagtccaggagtttgagaccactctgggcaacacagaaagaccctgtctctttaaaaaataataataattattattttatatatatataaagtaagattacctttatactatgtgtataatgtgtgtataaaaaataaattttgtgtttagatttaggtcccatccctaagatatctcattgtttgtatgcaaatattctaaaatctgaaaaaatccaaaatctaaa

SEQ ID NO: 854532 - DNA, 585 bp, Homo sapiens
tcataagcatgcaacatctctagcttccaaaatagctaataatcatatgagtatggttattttctatgttaatgatgatgtccttagtgttatctatttactcaataaacacacacatgaaacaaccctgtcaaagtagctgttaaaaataaagattgccattttccatgtgaataatcatgaccttagagttttatatataccccattatttctgataattttacatcctaatgtttagagttattaaactgtgacagattgtttggggctagactactacatgctatgaactaaataacaggtgagtcttgccagggctaattacaggaagttctggtgtcatcagctaatgcttctcttggaaaaaaaaatgattgcttacactgtcgatcaatgttcactgttttattttatctcatatttattataagcaagtattaaatataatattctgaatcacattyattttattttcaataggttctttaaattaaaaatatgtaagggattatgggaagaaaaagctagaaataacttgaaaaaaacctaattatatgacaaatatataagactttgtacactt

SEQ ID NO: 854533 - DNA, 566 bp, Homo sapiens
tggagatgccaggaactgcagagtcccaaagaggatgtcacaagccctggcttgtggagtccctaggtctgtggtccctgaatggctgcagcttttctctccttcttgttactcacaacatggtgagcaaggggtcgtgtttcagcactgtttgtgtaacagctgtttcagtcctgctatttggtgggcccaagttcttgtcctgtgtccaggaaaaatgaagtatgcggacaacaagcaggcaggttgtcccaaagaatgtctgagcctgactgattctggggtttttatgtgcccagaagtgaggaagtccatgctgattggcccatgggtagccacaggcagacctggaaaaagcaccattcaattggccaaatggtcctcaatgaagttctcactccaggctgcaggttcccccaggaactggcagcctggtctccaggtttcaggctgtcyctggactgaaggtagagtttcactgggaacccatctcttcctccccaggaacctgtctgctattaacatgccatccatggcacctggactgtctatactgagaggcaccc

SEQ ID NO: 854534 - DNA, 507 bp, Homo sapiens
attgtctatgaaaccatatatataatatcccattataaaattatctaatgaagagatgtaataaatgaacaataagactcagctatatgctgcctacaagaaactcatctcacttttaaggacacacagagactgaaagtgaagggatggaaaagatgctccatgcaaatgtaaaccaaaagagggcagaagtagctatacttacatcagacaaaatagtcattaagtcaaaaattgtaaaaagagacaagaacactataggctgggcgcggtggctcatacctgtaatcccagcactttgggaggctgaggcaagggggatcacgaggtcaggagatcgagaccatcatggctaacacggtgaaaccccatctctactaaaaatacaaaaagttagccgggcgtggtggcaggtgcctctagtcccagctactcaggaggctgagacaggagaayggcatgaacccgggaggcagagtttgcagagagatgagatcatgccactgc

SEQ ID NO: 854535 - DNA, 533 bp, Homo sapiens
tatccagagataattaaaaaataacttagaggcaagaaaaggcatactaatattgcagaagtaccatacatttttaaattaaattgtaataaactacagtgtaaaataatttaaaagatgttttgataaraacaatttacttcttaactttttttagctgctaaattcattttttctctctctatatatgttcacatttagagatgcaaacttttaagtaccactttatgattaattaaaaacatctttcctacctttatagttatttgagcttgaaagttcctttttgagaaaacattactgaaaagtgttaaggtgaaaggaaagagtgagaaggaaaatggtaattttaggaatatcagcttttaaaaaagtaaagcatattgaaatgccagtttggaaaaatatgtgcagcatggtaattagagtaatagaagacagtatgtgaaacgatatgtctaaattcagacctgacaaattgaatgcatatgcaacttgatttaggaaaaagcaattgttatttgttctcatca

SEQ ID NO: 854536 - DNA, 628 bp, Homo sapiens
ctaaatcacattttcatcaatttggcctcattgtgaatacatcagtctctgcagcctgttttgggtctgtatgagaccagccattttatagcttatactgtttggaaaacttctgttttttttttgagayggagtcttgctctgtcccccaggctggagtgcagtggcgcaatctcggctcactgcaagctccgcctcccgggttcatgccattttcctgccttagtctccacagtagcggagactacaggcacctgccactgcgcctggctaattttttgtatttttagtagagatggggtttcaccgtgttagccaggatggtcttgatctcctgacctcgtgatccgcctgcctcggcctcccaaagtgctgggattacaggtgtgagccaccgtgcctggcctggaaaacattaaaaaaaaaacaaaaacagaaggaaaagggtgtttgagccaagaggaaacttcccctttgccctctgaagttttgctgaaaaatcaactgacaaaaggcaaattaattggagataggctatataaatgtatttaatattgcctaataaaaaagccccaccagctcttttcagaggttgagtcagggaattctctgtctgtctcgtgctgcc

SEQ ID NO: 854537 - DNA, 456 bp, Homo sapiens
aaaagcttttataggtttttactttttcgtgtgtgtgagacagagtcttgctctgtcgctcaggctggagtgcagtggaatgatctcggcttactgcaacctttgccgctcgggttcaagtaattctcttgcctcagcctcctgagtagctgggactacaggtgtaagctgccacgcctgcctaatttttgtatttttagtagagatggggtttcaccatgttgcccaggctggtctcgaactgttgggctcaagtgatccgcccgccttggcctcccaaagtgctgggattacaggcgtgagccactgtgcccggcccagctttcgtrggtttttagagaaggaatgtactacctctaaggcttcttgtggcctcaggaatgggctactaagcaaagggattcccttcctcacgcagaggaagcacccgtgatccactagatggtgagtcccctg

SEQ ID NO: 854538 - DNA, 595 bp, Homo sapiens
aataaactaataacaagttatgaaattgaggcagcaattaatagcctaccaaccaaaaaaagtccaggaccagatggattcacagccgaattctaccagaggtacaaagaggagctggtaccattccttctgaaatgattccaaacaatagaaaaagagggaatcctccctaactcattttatgaggccagcatcatcctgataccaaaacctggcagagacaccacaaaaaaagaaaatttcaggccaatatttctgatgaacatagacgtgaaaatcctcaataaaatactggcaaaccgaatccagcagcacatcaaaaagcttatccaccacaatcaagtcagcttcatccctgggttgcaaggctgtttcaacatatgcaaatcaataaacataatccatcacataatcagaaccaatgacaaaaaacacattattatctcaataggtgcagaaaaggccttcgacaaaattcaacaccccttcatgctaaaaactctcaataaactaggtatcgatggaatgtatctcaaaataataagagctttttatgacaaacccacagccratattatactgaatgggcaaaaac

SEQ ID NO: 854539 - DNA, 704 bp, Homo sapiens
aatttatattgagtagtcaaaagcctgggaaggactgaactctgttgaactcagaaatcctcycttgagagttctagctaaactagaactaccacagataggtgatagcagaatgctatatttgaaatgctgcaaataaataaatttatacatgcaaatcaaaatcttttagtaaaatcacacaattaacctctcactggggagaaagagccaatgtagatatatgctttagaaagttgttaatcattttctcattgcaacctactttgaaatcaccttggcctattgtctctcatatatatatgtttatatatatatatatatgtatatatatatatataaacttattttacacaatgtagatttattttatgctgatatactagtaatgttcttccctacattttacaaacaatgagattttcatttattgatggctggtctttgcaatggtcagtactctttgtaactctgactttttacagcacagcctttggcctcccctgaatttagtgtctttgaacacctgcttcattttgttggtgctgagatttcacatctcatgtgcactaactgctgtcatgttatatgaagttgaagtcatgtgttttgtaacaatgagctctggaactatcccttactggcagtgtgactttgaaccttactgctgctccatttaaccaactgtaaaatggtgataatgg

SEQ ID NO: 854540 - DNA, 641 bp, Homo sapiens
tagtaagtgcccttcagaagtacaagagctccattgagtcttgagaactataggataaatggaaacacatgccacactaagggcagccaaggaattttaaagggaagcaggagcaagacaaggagagagcactcctcgtaaatcgcctctcagcttatcccctgaatacattccagcagctcaacccagaaagaataggcgctggccagacattgcactataggtaaaatgcgttattcttcctacttctcagaacatacggcttcccgaagagggctcgctaataaatgccaaaagtggaatggaaatagatctgctaacaagctctcacccaaaatattttatctgacaaatgtgtaggtcaaagagttagaggagacaataactatgtgcagttaagtggacacatatatctggctgttggagaaagaaaacatagaaatgtccccaaactattctgtgttctagagaagacaatgaataagccatgctgcttggcacacaggtgccgcctggcgaggctgatggcttaccatgagaactgcaggacatacaggcaggactggtgtcaggtgaaggccttagggatgctctccctcgtatctggtattccctayccacaaaccaaagaaggggatgat

SEQ ID NO: 854541 - DNA, 545 bp, Homo sapiens
attggctttatatttgccaatttacttttaaaaatagggaaaaaaggcttctcatatccacctacatatatttttattactctttyttctttcttgatatcttagtttccattttcatgttaggtgggatcatttctgcataaaattattttagtattttgtgtagtgtgtttccaggcatgatatactgtctcagtctttttttccttggttttaaaatatcttcatgttcatcctcatttgtgaagagtattttctctgtaataaaattctaggttgatagttttttcttttcttcccaatacattaaagatagtccatttattctggcttctattgtttctcatgagaagtcaactgtcaatttcattgttctctgatttaatgtcttttctgactgcctaagaagatctcatcacttttagtttcagctgtttgactatgattggcttgggtataattcgctcaccatttctttctttcttatttttttagagacaaggtctcattttgtcatccaggctggagtgcagtggcaccatcat

SEQ ID NO: 854542 - DNA, 635 bp, Homo sapiens
cattctttcaacaccactttataatgccacctttgtcacatgatatatatgggtatgataggggttgatacctcgtgatgggcatccttcagttatattttattcttcaaggtttccctgcatatccttggaccttttggttaactcagctttctctgattataaaatgtaaaccttaaaattattttgtaaatttccacaagcaaactggttgaaattcttactggtattccattaaatttatgcagtatttcagggataatcaatatcagtcttcatatctatgagcatgaatatttctccatttattaggccttctttaatttctcacaataatattttgtagtttttagtgtagtaaagtacagtaatgtttttgataccacttgttacattaattcctatttgatattttagattctactgtgaataataccacttttgtaaattttgtcattgatacaaatacaaccagttattgtattttaacctcatattgaatgacttctgtagattggcttattaattccaacagttcttctgtaaacaccaaaatgtcctctgcaaatgaccttttttttycctcttcttttctaatacttacgatatttttcttgtcttactgtactggctaa

SEQ ID NO: 854543 - DNA, 610 bp, Homo sapiens
ttccttttgagtatttctccacttaagaggcttcgtaatgacttgaattggcagctttcatgtccttgatagaccattcatgtgtctcacaaatttctattttcgttattttacttgttgaacaaacatttagtgaatgaatatttgaatatttatttgttgaacaaatatttaccatagcacccttggtaaaacacaggttccgtcatcacatggacttaccttatgctagttattgcaatcattcctcagttgttacaaagatttttaagcaagctactggcgtgataggaaggttctgggttcagttaggtatatggaaaatgaggctggagttgtaaattgaaaaggatcaaactctgagctttaaattggaaacaatttggctcttcttacatctggaagtcaaaaggaaaggccatgtcaagatttctttataagatcctgtggggaaaaaaaataaatagatctagagggtttaccttgtttggaggtgagcagattcatttttcctctttaattaataacagtaagtatatttctttgtttcatgatcaggtatattttkcatgtattttctgagcaatgactgtcagtaataaatatcaaa

SEQ ID NO: 854544 - DNA, 619 bp, Homo sapiens
tcatgtattttctgagcaatgactgtcagtaataaatatcaaatggattgggatcacctctttctttgctcargtttatttttatcagctctgctgttacaagctacacctgaaaaaatgatgggagctgaaatatagggccatgaaatgcaacaatagcacttttccaagggcaacatataggctttacttagcattcagcatttgaaaacatgctcattatttcagtgagattaaaaacgtacaggaatccaaaaatataaattaggaagagctcagagcaaagcatttataaatatgagtggtgagaatgaagatgactttgagacacctgatctagttggtctctctctctccaaagtattcatttttttaaaaaaaaaaggccgacttcgtagagtgaagtattttactctctgcatcataccctcagctgaaccacactaagcactggagatactcaacatctgaataatgcagtcttttattatttgcggtttccttgataaggggtaaaaattacatttcagattctgctctgtctcttacatctttgttataaattgtctccagattagtgtcattaatcatattttgtagacaaagaaatgagatacac

SEQ ID NO: 854545 - DNA, 657 bp, Homo sapiens
tttctatataatttaatacaatcctttaaccctaggccaaagtttacatttccatgccttcttataaccttttactataaaaacacattttactattcttacaccccttacatgtaaatctartttcagtagtttcaattacatggtataatgttaactcctaacaatttttaactttaaggtaaaacctggtaagttactttaattgtgtgctgactgcagccgaggtttgcctttttagttaagggtgtaattaatttcatatgtccccaggccttacctattgtgaagccaacaagacagacagttctcaaaacccaaaaagcagtttataacctcaaaacacttagcaaaccttgcatctgacctgcatagtttagttcacctatttacattttaatgacaccttcattttaccaataatctttaaggctgtttttatttcttaaagagtaaagtcacatgcactgcaaggtactacagcttttaacttcccttaaaaaaattagatccaagtgcttgtctttctttaggccaaattaattacagctctttgacagacgttacacacagtacacacacagagaggcagaagaaaacctagtcactgaatggggctatttaagagacagatttagaaaaacatgcagatattga

SEQ ID NO: 854546 - DNA, 633 bp, Homo sapiens
aaggctgtttttatttcttaaagagtaaagtcacatgcactgcaaggtactacagcttttaacttcccttaaaaaaattagatccaagtgcttgtctttctttaggccaaattaattacagctctttgacagacgttacacacagtacacacacagagaggcagaagaaaacctagtcactgaatggggctatttaagagacagatttagaaaaacatgcagatattgaaccagaaagggctcattccataaggcaaagtcttgccactggagttacaagccatgccctcaggatgtataacaaaatggaggcttgatttaacaaccaaaactttgcagagaacacagtgatagttgttgggggtgggggtctggcctgctaaaggggaaaaagaactttaaaggttaactgcagacagggtggagaagagaaaagaaaaaaaaacatttaaaaatgcctggggaagaacctcttactcttatgcaagttcctccaccagggagaaaagtttaattactgtccgatggagctgaaccctttgkccagggaagcagaaggctgctgtggtgatgcatagctgggaacaagccagccagctgtgtgggacccttggaccatacgtcccagcccca

SEQ ID NO: 854547 - DNA, 523 bp, Homo sapiens
ttgaactagatttaataacatcttagtgtagtaacttatttgtgaaaaaatctgaaaatatctcaacagaatatcattataatatattgtatttaaatgatgtatttatttmtttatgttgcagccaagatcatagttcatgatgcggctatattcattgtttatagttgcagtgtgacttatgttaaccactgtaggttttttgcaagaaaatatttactgcctgtgttagtaataaggcctaagactgggcaagcaatggtaattttgttttctggattggtaaagttatcaagaaatacattcttgtttttataagagtattgtatacaacatttaggctactatttagagctttggactaaaattatactttatctattacattgaaaactttaagagagaaattgacagtgtgagaataatggcaaagcaattttgtgattcaaaacattttagttgataaaacggtcaaagaaaagccccgtatctttaacaactgtaatgtaaaaattgtagcaga

SEQ ID NO: 854548 - DNA, 612 bp, Homo sapiens
gctgtcattccccctgcttggacctaacttccacagtgagactgactgctctcactgactgttccctgctttagagggcagggaactcttcttgaataccagctccagcttcaaggaaccagaraagaaaaattaagatgcataagaaagctcaggtaactaggataagaagactgagaacaaggagagccaactgctggaagcaaagggccctgggctaagggaagacacagattgctcagcaactcctagtttccttctcttctgccaagagaagtgtgttatggtggagggccaaacaggagcacaggggagttcacccaggggtgggttgggggacatcttgagtgctgggtctgcacagacaagcaaggctgtggggacagcacaggacaccttgtcttgaggtggttccatctttgtgtggggacactgctaactgcagccagtgctgccccagaaaccacccacacacagcacctggcttggccaactctggttatccacctctttcccaagagcttgaggtttagccaaagagaactagcttaggaagtgtggtgagtgttcacatgcctctctagagaaagggaaaaaaagattgtttcagct

SEQ ID NO: 854549 - DNA, 619 bp, Homo sapiens
atgctgctgcttacagcaactggagaatttataatgtggtgcagcctggctgttcctgtagcctgaccacctgggtttgcatcctggctcagctgtatsactctggacaaattacataatctccttgtggctcacttatatcatctgaaaaacacaaatgataatattacctatagaatggctacaaagatttaaggggctaaaatgttagcaataactcgttattacggttatggttatagtgttcagttatccagtttggaacgatttatcactgaaaattaatactcatgcaagtagtaaacgaatgtaatgaccatgataaggagacggacggtggtgatagtatcggttttataattctgacaatttttctggaacattccaacatttgatcaacagtatacttctgttaggtcaaaatagtaggctaccatggttactttaaaattgcatctttgccttaaaaatgttttcacatagaaattccacttcttagaattgagcctgtgaaaataattgtaggtatgaacacagcaatcttaaaggatattggtcagagtattagaaacaccctatgtgtccagtaaattgtagtgcatgcataccgtggacagac

SEQ ID NO: 854550 - DNA, 619 bp, Homo sapiens
atgctgctgcttacagcaactggagaatttataatgtggtgcagcctggctgttcctgtagcctgaccacctgggtttgcatcctggctcagctgtatcactctggacaaattacataatctccttgtggctcacttatatcatctgaaaaacacaaatgataatattacctatagaatggctacaaagatttaaggggctaaaatgttagcaataactcgttattacggttatggttatagtgttcagttatccagtttggaacgatttatcactgaaaattaatactcatgcaagtagtaaacgaatgtaatgaccatgataaggagacggacggtggtgatagtatcggttttataattctgacaatttttctggaacattccaacatttgatcaacagtatacttctgttaggtcaaaatagtaggctaccatggttactttaaaattgcatctttgccttaaaaatgttttcacatagaaatkccacttcttagaattgagcctgtgaaaataattgtaggtatgaacacagcaatcttaaaggatattggtcagagtattagaaacaccctatgtgtccagtaaattgtagtgcatgcataccgtggacagac

SEQ ID NO: 854551 - DNA, 566 bp, Homo sapiens
gcctcctaacagtttccctacctcccatttctagtcccacaacctgccacctacaataccaccaaccttgtcatattgcccctaggttcagagattttagtccaagggtgctccagctaaggccgacatgacagccacagtctctttcaactcctctcccaccacacacacatatacacagaatcaacgagcttctaatatttagttttcattcatgccagggttcgggcctggtccctgggggcgcagaccccagtcctgccctgttcctccagaatcctgagctttaagcaccatttcctgttgccccagggagctgacccatggcccctgacatatactgaacttgcagacacactgggatttggctctgaatttgctaggaggcccagatcatgagagggctgtggatgcaaacaggaagcgtccctgtgggcccccagaaataactgtcagaggcatgactggcrggggagatgggcaagggtcctgccattatgaagtgggttccaagagtcagcagagttgaggcattaaagttttcaggacattatttggggctgttg

SEQ ID NO: 854552 - DNA, 633 bp, Homo sapiens; identical to SEQ ID NO: 844687

SEQ ID NO: 854553 - DNA, 615 bp, Homo sapiens
aagtaatatcagtttacaaagtccaatccctaaacctcacccctcctgaaagtttagccatgtcttcctctcataactaaacaatccaggtactgagtctatgtttcctgctctggcctggagcatcacttattaatttgtatgatatttgtaaatacataaggaaggaattaaccataaaagaaaaatagatgcatttaccatacaaatgagaaatgttatttcaaaaaacaatgtaaacccatgtgaaatccaagtgacaaactcaaaacatgttttcacatctatgtcagagctggtgaattcttatttttcacacttgatgcttttgctcgcccactaatatttctccgatttgagctagcttcccgggacttctcatcctcagaagagttgctccttgcccactttgtcagtgtgattgtctcagtgctttcagtctctgtgagtaaaataatcaaaatgaaaatataaaaatacgtattttttctagtctttgagcagcaaagatctttcttaccatgaaaaattcacaggagccataagsaaagagtcagatttggccgcgtagacatttaaacaaaattcgtaatagacaatgagatgagacaaatg

SEQ ID NO: 854554 - DNA, 586 bp, Homo sapiens
gggatccagccgcaaggaacagaaaggcctgggactctggtcctgtcaaaggtcaccaggtgctttattgggttctcctcagacccatgtgcagcagtgggaggtttctttttgtccattcttctgcctgcccttcccctgccacctcctccatcctcacaggtggaaaggccgccggggccgtgcgggtgcggtgctgtggccgtgtgtgcagtgctgaagtccccagaggagacagtcgttcccacactcaccccctccttgaaggctggcttgattgatgatcaatcaattttgttgggggtcactgcaagagccatccaggagctgctttcagggaccacagcctggctgggcagggcaagggccctctggccttggggagagccgtgagggggaggagttattggggagacatagggcgcaccaggcgggcaggggccgggagagtgaccggtgtggtgtgcrggaagggctgctgggtggtccagggtggggttggcaaggggtctcggtgagtccttcagcattgtcgtcttgctggttagtggcagctgagatttgctgagttttgagagggcccggg

SEQ ID NO: 854555 - DNA, 602 bp, Homo sapiens
gcccgtggcaccctcctcacccctccttgccttcaggttcttcgaggacctggagcagcggcacaaggcccaggtgctggtcgaggacatcagtgacatcctggaggagcacgctgagaagyacttccacccctacatcgcctactgctccaacgaggtctaccaacagcgcacgctgcagaagctgatgtgagtgggcggccccgaggcccgcaggggtggctcaggagcatcctgcaccctggtctcccaaagcacattcctgctcccagcccagcttttgcaggtcctgcctgattttggtacaggctggccatgcagagcctggaaggacagccttgtcctcttgcagaagcagcaacgccgccttccgagaggccctgagagagattgagaggcggccggcgtgcgggggcctgcccatgctctccttcctgatcctccccatgcagcgggtgacccggctgcccctcctgatggatgtaagtccacggcctgagggtggggccgggcataccatcctggggtcccacggccagagccctgccccggatggagcattacgtgcttgtgaccttctcgtccaggcttggcctatgata

SEQ ID NO: 854556 - DNA, 539 bp, Homo sapiens
gaattatgggagctacaattcaagatgagatttgggtggggacacagcaaaatgatatcaccctttgtttactgcattatctcgagagagttatctacatccctcaattattttgcgttctttcatttgtaaagtaatagtatttctaaccacatagagattctgtgagcattagatgaaataatgttaaaaagcatcatgtctaacaaaaaagaattgacaatggcgatctatgattattattgcctgaaccaggaagagggcaggaggatgaagtgcattagtgaattcatctaggctcttgctgggacttgtatatgagaagtgaggcaacttgagttgttgattgccggtttcttggaagcagaagaccaccacctacccagccatgatttgcctatagaaagaagaagttgctaaggatacttctccctgaagatatttaagggataagatttccacaaattatcttatttaagtatttctggatccwgtagtgtcttctttctgtggcatgtccctacaaggaagcaactgta

SEQ ID NO: 854557 - DNA, 556 bp, Homo sapiens
cagagacaggaggaaagtgcccctgcaagggcccacagagatgggragcccccagctgctgcggcctctttagcttggctaaagagggattatgcacctgtttaatctggagagaaacgctgcctgcaagttatggctgttttgctctaacacacgccattaactattcctggaatccaaatggaaaaggaacaaaataaaccactttgaagtcccaggctagggctgatctggtgggggtggggttcgggtccagttggatggtctgggcagtgagggctctgggcgggggccgccccttgcactctaattgggtgtgtctgggcacctgtttgtcctgacatctgcaggaactggggggagagaaggatggcctcctgggtgcagctaccgcctacactggaggagggaaggaagagcctctggccagggtgtgcctgggtggattgacttcctgagagctcaggccacccccatctgcagtgaggcagatgctgtcacggcactaaatgctgcagatgcatgaactcatttaatcctcgcaacaaacctacaa

SEQ ID NO: 854558 - DNA, 520 bp, Homo sapiens
aatgcagagagaccctgggctcacagagaggccatgggccaggaatgactgcacccaggaacccactgccttttgtggtaggggacccaaaggtgactgcagctcaggcaggaggaccygagtggcattgcctcagcccctggggcagtggctgcatgtttgtcccatggcttctcagggctgagtcatgctgtacaaggaagctataggttataccaggtgacaggagcagggaaggctgcacccagggaaggccagtgtactctggggcagtgggtgggagccctgaaccctagatgctctctggggctctttatttctgtcctgcctgctctgctccagcaatttaaatccaccagccctagcaatagttgccaagataaacaaacagtagaggaagcctggatcgcagctccctcccttttgggggtggccctgagggagatgttgggctccacagaatgctctctcagggatgagtggagatgaggggtgcccatggtgaactcttgggattgct

SEQ ID NO: 854559 - DNA, 669 bp, Homo sapiens
atttcctattgctagcagaaaaggtggccggacacaactttgaatccaaaaagtcctgttggaaagaaaagaaagagcatatttatttttacctccttcccctttatacttgttatatttaccctcccaaatttggattgaactttgagccatagctaatttccataattcagaatgttcctgtcctatggcaggagataccatttttggactaggggcgacaatgccagtaggactccatatgatagggacctcagcttttgtccaaatatattgtgtattatttaattgccaatggttctatcagtttgttacatttgttctacaagaaggccttctggtgcaattttctttaaagatccccttaggggactaattaatgatgattccataggaattattttatggcacctcagccttaacttgctatacaattttcccaagttcaagcatccccacctttaaactaaactctattttgtttatatttgaacttattcagatggaacctcagggttttaggatgggaatgattatattttaaactgtgccctgaaatcatatgcaaaacagcccatgatttattttttcggggaatactgccaaccaggcctgtgtgtcaatcygtaaacctccaacagcaggtcccaggcatattggggatattta

SEQ ID NO: 854560 - DNA, 549 bp, Homo sapiens
gagcaagcatgaagagcctcgcagtcacctgcccatccctcatatgtggcagagacccagagagacgaagagactgacctgtcacaccctgcaaggtcataggctagcccaggcctccaggctccccacatcagggtccaggactcactgcatggcagggggataagcagccatcacaggacatcttgaccagcccaggctggcctccccgaagggtcccctcagcccatctgctttccatcatcacatgttctagtaacataaagccgggattgtccaacctcaagaatccactgggtgtggccaggctccacccaccctaggccctgtggtctcaaaataaaaacaaccctcaacatcctctttgtcagaactccctaataccctctgctcactgacagccaaggtagcgctctgttcccagggccacatcctcaggtctttmtgggcagagcctgacaaaggtctccagggaagccacccctccaggtgcctgagccatgtcatgtggccacaagggcccaccctgttcccagcctggcctgaaca

SEQ ID NO: 854561 - DNA, 502 bp, Homo sapiens
atatttttattccagccataatatattaaatatatgtatattttactatattataaaaatactaagtcacagactatgcattactgttcttacatatccaggatctagtgaggtgtctattacatgttaggttgattaacgataataataaaaatttttaaaactaacatttgttgagtgcctgttatatgtcactattattataaattatttgtatattaacttatttcaattttacaattatcttatttagttaatattagttcatatttcatataagaaaactcaagcacttggtggggcagttatttgcccaaggatgtatgcgaagcagtggtaaaaaaaataggtctgaaattcagactacagagcttaatttcttaactaccatgctacaaagagcaggttaagcacgtaacaacacaggattggcgagcagtaagttctcagtaactgtgagctatsaatacactattcagtttataaagtaagataacatagt

SEQ ID NO: 854562 - DNA, 650 bp, Homo sapiens
tttattaatattcagtggaacttctggtcctctgaacataatttgtgaaatactagtaaattgaattcaggtgcttcaatctaatacttatgaaaataaaagttgtacgtttcagcaactctatgtatacagaaagtatgtccacaattaaaaataaactgaaaaatcaccactcgtccatagaaacaaaaataaacacattacctcccaccacaaaaccttttccttagagggtaatatatttcaaacagtcttttaaatggattcttcttttcaaaaggaggaagatggcttgtctaggacatttcaactacccagtgttcttgaagacagtaagaagaaacatgttttggtagtaaattccacattatttttcttttcgtttgtgataataagacttgttttccatgaatttttggagaaaataaatgtcaaaggctttctactgtcttttatttctaatcatcgtaataaagaatagagagaaaaagaggaagagaaaaggagaaagaaaaagagcagaggaggaaatagcaagagaaaagggctagcagattccaggtgtattacctacgatgaataaayggtatatttatttagacctttttactattgcatatcaattactgaaattctcccataagttttct

SEQ ID NO: 854563 - DNA, 467 bp, Homo sapiens
ggtagcaggcattggatccgtattgaatctcaaatcttgttacagaggtgccacactgtttcaattttcttttgttattttaaaggtctccctgagcctcgagaccatcattagaaacacttggcttcattcatttatcttcattttatgacccagcagtcactactaaaagtactgacccctgttgatgggaagcatcaaccacttccttaattttcactgtctccattcctcttagcaaagggcaggactgcggtgttggaactgtcttttgcatgtttggctttcacagctgcatttgtagtccaatagtttcctcctgttggtcacaatgcaaccgaattcatcctctccagccacgtttattcttcagacccatcgtgctctctgggcacctgcctttctggttggkgaggagagagcagaggaatgcccaggtttgggaagaacagtgggacctgtagaga

SEQ ID NO: 854564 - DNA, 554 bp, Homo sapiens
tatgtctttagatgaatgcacacttacacacttacatgtagacatgtagcttagaaggtatataagctctggaaaactttgtaattttgagttggtctgacaataatttccaggccttctccctgttacctgttgcagaaataaaaactctcttcctccccagttcatctgcatcttgttactgggccacaagaaatagcagcctgaccctcagtttggtccaggaacagtgacacatggccactgcagctcttattgctaaggtcactgtatgtccaggtgaaggctgggattggctgagatgcaggaggaatgagggcaactcagcttgtgtagacaaactgaagtgaaggttttaaacatggctgcaggccgggcatgatggctcatgcctgtaatcccagcactttgggaggttgaggtgggtggatcacttgaggtcagaagttcaagaccagcctggccagcatggtgaaaccccgtctctrctaaaaatacaaaaattagctgggcatggtggcacacgcctgtaatcccagctactcgggaggccg

SEQ ID NO: 854565 - DNA, 588 bp, Homo sapiens
taaaaatggccaacagatatatgaaaaggtccttgacatcattaatcatcaggaaaatgtgaatcaaaaccactatgagatattattttagaccctataggatggctattatcaaaaagtcataggggtgtggggaaaagggaacacttgtacactgttggtgggaatgtagatttggtgcagccatcatggaaaacagtatggaggtttctaaagaaattaaaaacagaactaccagaagacccagcaatctctgttctgtgactatatccccccaaaatgaaataaccacctttttaaaatacctgcacttctattttcacgcagcattcttcacaatagtcaagatatggaaccacccaagtgtcgatggaggaatggatttaaaaaactgtggcatctgtatacaatggaatattattcagcctttaaaaagaaggtcctgtcgtttggcacaacatggattaacctggaagacactatgctgagtgaartgcgtcagacaggaaaaaaaaatagtgcatgatgtcacttacatgtggaatctaaaaacaaaatcaaatgtgcagacgcagataataaaacagc

SEQ ID NO: 854566 - DNA, 563 bp, Homo sapiens
tgcattaagtcagtgtgtcccaaacatacattcagggggtgggctttgggcccatttagggcaagggtagttatgtatatatagacatctctgtacttagcagcaagcagcaggaaagaagtgtgaaatgagagtttattgctgagtgaaaactgggattgcccctaaggtagatggagcttatgtgctttgcttttttagtaggtgagaaatcagatgtagctgggggttgtggatacactctgggactttgctcatcctatcaggggagtatttccccaactttggaccataagtcaaataaaagtcctgtacattacttcgctcctcaaaatttccctcttcctaaaatggatagagtaatgcaagtctttgagattagaaggaaaaatgaatttaagtcataattagcatctttgagcttcttgccatatttggggcatagcctggtgaaatggggcaaggcgcgggggtgggggcrgggaaaatgagggcagtccttgctagaggtcccagctgcagggcctgggaggggtccaaatggaaaaagcagagatggcaaa

SEQ ID NO: 854567 - DNA, 675 bp, Homo sapiens
tcatgcttttcctgtaataaggatcctttataaaggcatgatggtgttcacatgcagatgctttctgaagagccctggggcagrgggcagccttgcccctcacatcggagctcctttgttgaaatgagctggtttggcttttgtggattccaggtctggagccaagaacgtagtccaaagatcccctcttcccttctcagggaaggtgcttcaaagcatacacagtatcagggatgtgatggcatctgggcagagcctatacttgggctaactctcctccaacagtccttgcccctgactgcccagatggctttgtcccaaccttgcccaaagggcaggtgggttaagccccaggcaacattaccttttgaaatgggaagaattaagtgctccccagccaaactataaagcaaaagccaccttcactaatgaggatatagctcagagatgtgaaagcagagggttgtatgcccagcacaggcaagatttggctgcctggcctgggcttcacggaccccagccagagctggtactttttaactatggccttaggacaaaccaggtgaaacagattaaccacatcctccttctttgggctagcaagtccagggctgcctggagtctgtctctaccatcaggatatagaatcttcctgcttggataaaaggagaggac

SEQ ID NO: 854568 - DNA, 512 bp, Homo sapiens
ctacttagaaaagttgtcctcagttatccatagacatttgttaatactggcatgatkgaagtatgctcacagtttctgcttttcaaagcttataagggatactgaccattattaaccagatctctggggaagtctctactctgaggatgggcaccaaaacttttactttttttttttttgagacggagtctcgctctctcacccaggctggagtgcagtggcgcaatctcagctcactgcaagctccaccttctgggttcatgccattctcctgcctcagcctcccgagtagctgggactataggcgcccaccaccgtgcctggctactttttgttttttttgtatttttagtagagatggggtttcatcgtggtctcgatctcctgacctcgtgatccgcccgcctcggcctcccaaagtgctgggattacaggcatgagccaccgcacctggactacatttttttaacatttaaaaaattcaggtggcaacatgtacctgcactgggcat

SEQ ID NO: 854569 - DNA, 677 bp, Homo sapiens
gagataattaaagagagaattgcacagtgccaagtgccttgcacggtcgcccactgtagatccttaatacctgtgagcttccatttctacttgtcatggacaggactggctgtcggagccgaccatagcaatgacagataccacttaatggtgacctgatagtgaagatcgtgtctcttcaatcagaagactgagtttttcctctgccatcctaggtggaagcctgaggctaagcctcttgtgggcaggaactgtctcctcactagcccttatgggagggtcctgtccccatgtttcttaggcaggggagtgtcagccacctttcctccccatggctgggcttcccaaggacttgcggtgcccagcaggccccagccgctgcctgcccagccctcagcctgtcctgcccgcggtgttctgctttggctcagtatcccagggccaagccactgggcagggatggggtttcagcctgatctttaccaccagctgtgtgtggctgggctgctgggaatttaggaaattggtgccagaaagaggagagatgatccagggaaggagccacgctggaggcagggggattgtatcmcatggttgcatccccagggtccatttctaggctggccagggtgagtgagggttcctggaaataagttatgtccccatcagcctcaatt

SEQ ID NO: 854570 - DNA, 621 bp, Homo sapiens
ggaggggagtttggatcataatcccwaaagacataatccctaacaccatcatcctgaatgtcgaaatacccaaagatcaaaatccctaaacagaagatgggaaaatgcaatatgggatgcccaagtcagtatataacaaatcatagaagaatttcaaaaagagcagtgccacagagaaaatgaatgtgaacatattctccaaagaacagccatatccctaaagaaagaaagcagctactcatcatgatgcaagccttcaaaatgtagttaatcagactgtgtgtggtggctcatgtctgtaatcccagcactttgggaggctaaggtgggaggatcacttgacgccgggagtttgaaaccagcctgggcaacatagtaagaccctgtctctacaaaaaataaaaaacaaaaattaaccaagcatggtggcacatgcctatagttccagctactcaggaggctgaggtgggaggatcacttgagcccaggagttcaaggctgctgtgagtcttgatcatgccactgcactccagctggggtgacagagcaagacttagtctcaaaaactaacaaacaaaaaaggtaatgatcgcgaaagctggccagctgctatgtaccatc

SEQ ID NO: 854571 - DNA, 621 bp, Homo sapiens
ggaggggagtttggatcataatccctaaagacataatccctaacaccatcatcctgaatgtcgaaatacccaaagatcaaaatccctaaacagaagatgggaaaatgcaatatgggatgcccaagtcrgtatataacaaatcatagaagaatttcaaaaagagcagtgccacagagaaaatgaatgtgaacatattctccaaagaacagccatatccctaaagaaagaaagcagctactcatcatgatgcaagccttcaaaatgtagttaatcagactgtgtgtggtggctcatgtctgtaatcccagcactttgggaggctaaggtgggaggatcacttgacgccgggagtttgaaaccagcctgggcaacatagtaagaccctgtctctacaaaaaataaaaaacaaaaattaaccaagcatggtggcacatgcctatagttccagctactcaggaggctgaggtgggaggatcacttgagcccaggagttcaaggctgctgtgagtcttgatcatgccactgcactccagctggggtgacagagcaagacttagtctcaaaaactaacaaacaaaaaaggtaatgatcgcgaaagctggccagctgctatgtaccatc

SEQ ID NO: 854572 - DNA, 643 bp, Homo sapiens
caaaagccatgagaagagttattttctacctctttttccccacctccctccccataactttgtggttttaatatgacttgaactaaaactgcacaataggttggtaggcgagtgacacattgaaggggttatgaagaaacaacaagatgctcagacgttcagcttggtccaaatggatttgcaaatcccaaatcacgtgaattcatagcacacggtcaagcagattctttattcactattcaggtaatatgaatagttatcatgaccataccatatataatgcagactttttaatttgtgtatatggtttaggggtgattgtataacacatatgtgttgtgtatacaacattacagataaaattttaatgattcaaactatattactcttcagtcttggctgtaggagccagggcaaaacagaggtccatttactctcatccccatctccaccacgctcaggaattgaataaaactgcaagagcaacattcactcaacacatatttattgagtgcttgttttaygtgacacactgtagtaggtgggaggaataccatggtaaacaaaacagataaggatcctgctctcatgaagtgtgtattccatcagaggggcatatttaatacataagtaatgcattaaa

SEQ ID NO: 854573 - DNA, 606 bp, Homo sapiens
gctctcatgaagtgtgtattccatcagaggggcatatttaatacataagtaatgcattaaaaatacataatatgccacacggtggtaagtgcctggaagtaaagggayagtgatgagatcaatctgtccttgtagatagggaagtcagggcagcctctacaaggagatgacttctaaccagagaccagaatgaaatgagggattgagccatacttgggggaagaaggttccaggctggagatcagcaagtgcaaaggtgctgaagtggagcctgccaggggtttcaggcagagcaagtaggccagtgtgggaagcagtttggccggtcgtgaaattgagagcacttgctctgtttcaggcaggcaggtaggttctactcatctccaggactgctgtcctatacagaagcaggactaatgtttaccaaatctttaacattttttcaagagaaactggggaattttgacttccgtgtgaaatctcttaatgttttcatcttggctcaaattttttaaaaattttgtaagccaaaataaacacatatgcaagccaaatctagtctacagacaccaatttgtgaactctgctctaaataaatagaaaaaa

SEQ ID NO: 854574 - DNA, 660 bp, Homo sapiens
agggctcctcctttataaatggggtaagaggtccttataaaaaaaacttgaggaagacaatttgtcatatttgcctttttgccttctgccatgtgaggacagagcatttctcccctccagaggatgcaccatcaygatgccatcttggaaacagagagcagcttcaccagacaatgaacctgccagcaccttgatctcggacttcccagctccggagctttgagaaaatatatttttgttctttataaattagccagtctgtgatattttattatagcagcacaaatgagctaagacagtaaataaaacagaactttaaaaatgaagtagagaataagaaaacaaatattagaagataaaataatcagaaagtggaaaatttacaaattaacaactataaaagttggttatttgaaatcaacaatgtggaacataaaattcttgcaaagtttactaagaaaacagagaagtaaccaaaaaataaatatgaaggagagataaaaatacagaagagattcaaatattaatcatgaaatgacagacaaaaattaagaaaattttaataaccactccagaaaacaaaacaaaacaaaacaaaaatcagtagaacaaatttgttcagaaatcttttaaagatagaaagcagagaggaattaattg

SEQ ID NO: 854575 - DNA, 567 bp, Homo sapiens
cttgccactgcactccagcttggatgacagtgagcctctgtctctgaaaaaaaaaaaaaaaaatcggtaattgggatatatcctacagtcaaaacaactacaaaaaaaaaaaaagaaaagaaaatcttaaactgttttcagaaatcatagtgttggtagtagttttggtattgttattctaaaactgtttcagagacatggtaagatagaaaaaatgggtgggtaattatatgatattctaattccatcaatcccactgtcatagaaaacttagatacttagcacagagaaaggagatatagatggaagataaaaaaaataagactctacagaactaaatttgcactggaagtctcaatatgaactctcaatatatttcatgctaaaaaaaatcccaagaaacaatgaacaacctagtaacaatgaatgctcccagtttctagactgtggcccacataccatttttcagtaaaagaaaccaagattctcaagagaaatatgattctagatctgaaatacacaagatgaatcaaaygattcaaaagccaactcaaataggctcccact

SEQ ID NO: 854576 - DNA, 641 bp, Homo sapiens
gaggatgacatctgcacacataataaaaaagtaaacaaagaaaaattgcaatggggaatgggaaagtgttgagtgtggattgaagggaggtggcttttacccacaagggtccaactgagagctgatgttttaaaatttcatctcacccgtaagactgagagggatttcccagggtctgggagcagaaatcagagaagcagtaaagtggaggatgtgatagctctagagaccaccctgtagcacagtgatggatgatggcttggcttccagggaataaggtaagcatgaaagcctcttttgtgaaaataggcttagagagacttgcttatagctagaggatgcttctaggtaggagatgatgctatgtgcaacctacatgcagaaagatgttgaaagagaggtcaaagttaggacatggaacaaaagccctggcaaaattcaagcagaccttgactttgggagagcctggagcagactaagtaattgtgaagtcagctggccatgtctccccaaaatactcctggtatttgctttttgtggtctgggatgtmccagactcaacagggaacaagatcagaagaagaaaacagtgacatttgtagccaagtatgagatgaatttcagtaactggtatatagtag

SEQ ID NO: 854577 - DNA, 592 bp, Homo sapiens
gttactacaattacttgttactacgataatctctttatcaatataaacttaaattgtatgtttcaatatttgtarcaagtatgtgggagacatagactaagattagcccactctttaatctatactttttggtaagtcctccgaagttctatttaaacatagaaacctacagtatatcacccagtcatatctcttgacttgcggagaaattctactaagaaagtgattctgacatctgagaggtgtaaaaacaaggtgcaaaagataagtgttacaatgttcaagtccgtcactgcagttgtcactatagtcaaccctactctggtggttcagtggctcaatgacctaagccatttaatttcccccttccctttgttttcttaaagtgtgtttgatttaaccttcttatcctgagcagcacaaagtcagagataaccaggtccaggcaggcttgtgtctttgcacaatgtcagacttttattgatgcaatttcaatcctaaaagcaagcctcatggggttgccaaggatgcaattgtccttagtacttcctgttcacagtagtcagagctgtgagcgcacaggctcaaacaa

SEQ ID NO: 854578 - DNA, 530 bp, Homo sapiens
gtaagggtgaaccagtgcatagggttaaggtccgaacaagttaatgtggctgcctcctcgtaactggtgtgaactcaagaagtaaaaatagatgtaaattcctgtgagtaactatgaatgaacatttgttgygatatattttccatttcttgcccctgagaaagtctgggaagagtaacattccccaaacaatgaaacagctagcttctagattttggttttccagtatcaacttccactaaaatgaacctcaactccttggaaaatttttaaattccagacttggagcaggagaagtacaatataatcctgaattttagaacgaaaaaatataatttggtaccaaaacataagaaataagttcaaagaatgattcaaataatgatatgggacttgtcaaagagacacaaaatccagttaaaggaggttttcactggcaaaatctggaataatttgagcaggaaaataaataacaataatgatggattataacacactgaaaaaaataaaaagctatgagtctatactga

SEQ ID NO: 854579 - DNA, 568 bp, Homo sapiens
tggctattttttttttgtatttttagtagagatggggtttcaccgtgtgagccaggatggtctcgatctcctgacctcatgattcgcccaccttgtcctccgaaagtgctgggattacaggcatgagccacygcgcctggcctggagttatttttttaatattgtgcattgtatatttttttctgttttcatagatttatttaggagagtgtatgacatgatgaaacagtgagacagtacttggtaagcttagtagaggccaccttaaatagcaatctcattccttctagtttttcagtcaaagaagaaaaagtacaaatgaaatatttgcttgcactaatcaaaacacacagcaaaaattctgagcaaaagtgtctctgaaaaattagagaacatttaaatttatttcccaagtgaaagaataaattcgatagtataagaatagtaattggtatttgtttacacagacacacatgtcagaagcatgtgaaccagagcaactccatcttaaataggagctgggtaaaatgaggctgaaacctactgggccgaattcccagatggctaa

SEQ ID NO: 854580 - DNA, 592 bp, Homo sapiens
tctcaggttccacacaggaagggaaggagcctggctcctgccagctgmaaagggtgtcaacttctgtggctccgcccccgtgtgcaggctgcttggagtttctccagggaccctttcccatcttggtgtctcaacatacttttattcaagaaaaaaattccaattcaaaaaaaaaaaagtccagggattcaaatgagagggagaaagataaaagaaaatcaaatgagcctcagaaaaggaattcgatatggaaaatctgggacctagaactgtgtgtttagcctgagtatacaactaatatgaaggaaaacatccttttttagatatgcggcacttcaggatacgcacttttttataatctttctgaaatatggatgcattcagcaaaacatcaacaaaaattaattaaaaactgattaaaaaagagcatcagtgtgctctggtgatatttagggtctggttgcgattgcttacaactgtagagtaattgagatatcttagtagcagtacaagatacacatttgaagatctacttagaggaaattcaaagatcaaagatgtctgcctatatttagtgaggctcaatctgtgg

SEQ ID NO: 854581 - DNA, 592 bp, Homo sapiens
tctcaggttccacacaggaagggaaggagcctggctcctgccagctgcaaagggtgtcaacttctgtggctccgcccccgtgtgcaggctgcttggagyttctccagggaccctttcccatcttggtgtctcaacatacttttattcaagaaaaaaattccaattcaaaaaaaaaaaagtccagggattcaaatgagagggagaaagataaaagaaaatcaaatgagcctcagaaaaggaattcgatatggaaaatctgggacctagaactgtgtgtttagcctgagtatacaactaatatgaaggaaaacatccttttttagatatgcggcacttcaggatacgcacttttttataatctttctgaaatatggatgcattcagcaaaacatcaacaaaaattaattaaaaactgattaaaaaagagcatcagtgtgctctggtgatatttagggtctggttgcgattgcttacaactgtagagtaattgagatatcttagtagcagtacaagatacacatttgaagatctacttagaggaaattcaaagatcaaagatgtctgcctatatttagtgaggctcaatctgtgg

SEQ ID NO: 854582 - DNA, 585 bp, Homo sapiens
aaaactggcttttcttgcgctatagtaatcaaagattctttcatcagcaggtgctgaggcctgtacacatttagcaacactgggttcttcttcgtagttaaaaccaaactgggcccctgaatttargccacaactttcagcagagaggttaggttcttggctttcacctggggtagcatgcagcccagtgggtttgtagcattcatttcttttaagcacctgagactcaaccctctccattgtgctgttgtactcggtcagagatctctcaatcactttttgttttcctaaatgatttccctggcttccacctgtgaaggaatactgactgtggccaggcagcatttgacgtaagtcgtcattctcagaaatgtcatcctcctctagatataatgaactacaggcaccatcatcatcttccacttcattctgatacaaggcctggtcatcgttagaaagctgttcattttctaggcttgtagtctctgcatcctggacaaatccttttctcaataattcttctgagtctttgtcttgtcttgcagcttgtcttaaagggttcacgccaactgggtaatccaaaag

SEQ ID NO: 854583 - DNA, 627 bp, Homo sapiens
atcatataacacagacattaaagatgggaatatgtgcgattaaattgtttgggagattctactctaaaataggtgacctgcatttttctccctagaaataactgctttttgtggcaactttagttcttgatttatctttcctaatgcagtctattctctaatgagaaatctgtttttttgaggcagcttaatgatctgaggttaggagtcaggcacaagtttgaattccaattccaaatccttcgtagctgtgtgatggagcaagtcaccaaattcctctgaattggttttctcatctgtcaaagggagatagtaatgatgtctcccttacgggattgttgtgaggcttggggatgatctatcaaaagtgcccaatgtaggcctgagcaaccccactgtgggcgcggctgtggaatggctttgggtcttgaaaagaaaagtgcccaatgcaggaggtacctaatattattatacatatatatgtatgtatgtattttaatatattttatagtaacaaaacttgcttgataggtaaataaatacatggcccactatacmggtcccctgtttttgtcaggttgtctggaattactccattacagatttagtcctttgggaaggttatag

SEQ ID NO: 854584 - DNA, 407 bp, Homo sapiens
cctaggctggcgtgcagtggcaggatcctcgctcactgctgctttgacctcctggactgccctcccggactcaagccatcctcccacctcagcccccgaagtagctgggaccacaagcacacgccaccacacccagctaatttttttttagtttttgtagagacagcgtatcactatgtggcccaggctgatctttgaacctctaagtcaggcaatccacccacctcagcctcccaaagtgctgggattaaaggcgtgagccactgtgcctggcctcagacyttacattttaaattaacaatttcacatataagactgtgagcctaaaagcaagaaagggtagactaatatctctatttggttttgtggcactctgctcttgttagtacttcaggaagaaagttaaa

SEQ ID NO: 854585 - DNA, 669 bp, Homo sapiens
tatttcaaaggaaatgctaatccctatgtttggaattcattaccagagagcttctctgcttaacaagcgtgactttatgcccacagagcttcataagccaattttatcaattttgttgaygaggtggcttttttttttccccacctggaaacactcagtgatcttctatctggaaagtctcaagttgggtaccaattaaagctggataataatgactcaagttggcaccattttagcctgttcttttctcagtcctaacatacgtagtcatgtgttggccttggagattagggtggaagaaggaagagaagataaagtgggttagggtttaaaacagaggctagtttgtaatctagcctaagtcttatgaagcaaagtaagaagacctgaggtctcctgcctcacacctgcctgcgtgatggaactcctaactggaactattttgtacttggactttgtcgtaaatgagacagagctgaggtttcccttttggactctgtatgtaaaaggtttcacaagcaaattaatcacattattaagattttacagattcttagcctagttgaaaaaatgagttttagtttctattagccccactggtacaatcgactaatgcaccaatcacaaaccacagaacttcacagtgggatccttcactttttacctgta

SEQ ID NO: 854586 - DNA, 615 bp, Homo sapiens
aagtgggagagttttcgtctttttataaggccacagttatatcagactgggccctgcctttatgctctcactttaccttaattacctcctaaagattctatctccagaaacagaaactgrggattaagttttcaacatattaattttttggggcacacagttcagtccatagcagcaaccttatatcttagattattatccctgtttttcagatgagagaaaacctgctcagagaggttaagtaacttctccaagattacacaactaagaagttgcagagataagagtctatgtctgtctgactaaaggacaactgtttttgtgtgctgtactgtttctgttttgcttcttgaattagtggcatctcccactccactgtgtagtacattttgagtcaatataagagaagactttgatgtttggaataattagagctggtaacagggtctctatcacaggcagtgttaagcagtgtatagatattgtagaggagattcttggagtgggtggaatattgtaccagagcaatgatttccaaagagtgccaagtgacggggtgggccttggggtgcctaccccacatcttcttcaatcaaagccactcagagttcatct

SEQ ID NO: 854587 - DNA, 588 bp, Homo sapiens
tagtaatatatttaaccaaggagtgaaagacctctacaaggagaactacaaaacactggtgaaagaaactgtagatgacacaaacacatgggaaaatatcccatgctcatggataggaagaatcaatatcattaattaactgtgttgcccaaagcaatatacagattcaatgcaatttctatcaaattaccaatgtcatttttcacagaattagacaaaacaattctaaaactcacgtagaacctaaaaagagcccaaatagccaaagcaatcctaagcaaaaaagaaaacctggaggcatcacattatccaactttatactataaggctagaataatcaaaatagtatggtactgatactaaaatagacacgcagaccaatggaacagaataaagaactcataaataaagtcatacacccacaaccaattgatcttcaataacattgataaaaataaacaagggagaaagcaaamcctattcaataaatggtgctgggaaaactggctagccatatgcagaagaataaaactggatccctacctctcaccatatacaaaaattaactcaagatctattaaaaattta

SEQ ID NO: 854588 - DNA, 610 bp, Homo sapiens
taactgatcccataaagctgtaccaaaattmttccaactcttcaaatgcaaaaaaaaaaaaaaaaaaaaaaaaaacagccttctgtttttggagttctacctctggcagtttcttcctacttcactctcacgaattcagggcacagtaaatgtctcttaccaggctagctcagcttctatgatatactctcatagtatgctagtatgctctttgtttctctgttaacacccacacacactgtaataaactcagtttgtgtaatagtacaatgagtttagagatgagatgatacaaggttggcatctagaatgaaacaacttccctcagaggtcctcagaattccctgggagtggcagcctctcaagcagcactgtcttggtacattctgtggccattgcgaaattccccaaacattctgtaacaaaggttataaagatggtccttgattggcaggtgtcgagggagaactttgcaaaagaattttatgcaaaattggagttgagttccagggtagactgggtacggacctcatcctcactggttagaaacaatggaaaaccccacatggaaagtcgctggtttaacagcattgaggcaggttggatccca

SEQ ID NO: 854589 - DNA, 530 bp, Homo sapiens
cctgtttgcctgggtatcaccagcggaggcttcagaacagcaaatattgctgcctgatccttcctatggaagcttcatcccagagggacacctgcctgtatgaggtgtctgtcggcccctactgggaggtgtctcctagtcaggttacacaggggtcagggaccaacttgaggaggcagtctgtccgttatcagagctcaaaccccatgctgggagaaccactgctctctgcagagccatcaggcagggacatttaagtctgcagaagctgtctgttgccttttgttcatatatgccctacccccacaggtggaatctagagaggcagtaggacttgctgagctgtggtgggctccacccagtttgagcttccctgctgctttgtttacactgtgagcatactcaactgcctactcaagyctcagcaatagtggatgcccctccccctgccaagctccagtgtcccaggttgatctcagatggctgcgctagcagcgagcaaggatccgtggtcgtgggacccagtgagc

SEQ ID NO: 854590 - DNA, 611 bp, Homo sapiens
cctggcttggattatgtgcagttgctaacccatctctgtgaccagcaggaagaaattatctgacaagacctaggttgtctgtctagctcagtcttagggtgggtcagcaccatcccaacyactttgactaggacttgtgattcccccacataaaaatcagatgctcttacgagatgagggagaaatgtatgccatatgggcagaaaccgcagaatcctctcatgtgactatagaaccatgtatgtatgtgtgtatgtgtgtgtgtgtgtgtgtgtgtgtctgtggccacacttagtgacttttagacttgtcacagcaatattaacctcataaggtacagctcactttgtggataacacggaagcattcctttgcctgaatttaatgtgcagcttcttctgaagccagctgggtgacttccggctcaggacattagctttttaatttacactggctcttggtcagcttccaagttcaagtcaaggtgttgattttaatctaatgttcaaacttctaaagcactggctactgtagttgcaatagtacaacttgcatttttggttctgcaaacctagctgccttagtttgatggctaaattgtagcctcattt

SEQ ID NO: 854591 - DNA, 569 bp, Homo sapiens
cgaggaaaagctttaagagtgcaaatgattttaaagctcaaaatagcttacattgactttgacggcagttgttctttttctccacctccattcctaactcaagctcattcagggtcttttgtaaatagaatggacagtttgtaacttccatcagtgatctcgtgataatcaagacccacttttcactgttcttttactgtggaggagatggggcgaaggaggcacccaccagaggcaggatgcacagttctgctgctagtgtgatgctcggcaggttgagccttgaagcaaaaggaggctggtgaaaatgtccactcctagggcccctccaagggttaagagagttaatgcatataaaggaaggtcctggcacataggaaatgctcaatatcaacaaatggatctgttcatttagtttattactaagaagtctctttgatgctctcagctaactcamatgttcatccttttgatttttgctttgtataggttacattcacttctttagaactactgcaaccatcaagccataattcttaataatcttgatgatatttcattcagtctta

SEQ ID NO: 854592 - DNA, 616 bp, Homo sapiens
ctccacagtggttggactaacttacatccccaccaacagtatatgagggttcctttttctctacatccttgccagcattggttattgcctgttttttgtttgtttgtttgtttttgttttttcagatataagccattttaactggggtgagatgcaatctcattgtagttttgatttgcatttctttgatgatgagtgatgttgagcacgttttcatatgcctgctctctatttgtatgtcttgttttgagaaatatctattcagagcttttgcccattttttattaatttattagatttttttcctatatggttgtttgagctccttatatattctggtgattaatctctcatcagatgggtagtttgcaaatattttccatgggcaaatattagattcacatttctaagtgaaagaaggccgcctgaaaaggttacatgctatgtgattccacttatataacatctggaaaagaaaaaactatagagacattaaaaagatcaggacttgtagaaaatttgggaaggaaggagggttgaattggtgatacaggattkttttttaggtttattaaactattctgtgtactataattgttgatatattgtagtatgc

SEQ ID NO: 854593 - DNA, 577 bp, Homo sapiens
tagagatagaggtttccagaacctataaaaatgtcaagcatcaaaggctgaagtttagtctctctcactttggtaaagccctaagtggaagtctgaagtcagcagagtagggtgggattcagtgttggtcacgttccttacacatgctgtcactaatcctctaagtgaacctggccacatgagcaatggacaggctcatcactcaagtccacatttccatggatactgtctgaaaacacagtaagataaattcctctggctggcttctcattgctaagcacctggtaatcctgaccatccacctttcagtccttaccaaagaagcagaatgacatggaagcaaaatcacataatccagagcccagaggcctgagatcaagtcatggctccaccattggctcaatgtatctgggtttctgcacatgtagaacagaaacaatacctgaccacctayggggttgttgcaaggaccaaactagacaaaagcactacgtaaaccccgaagatgctaccaatgattctatcattctttctgctttgctcactgattcagcatcccccaacattccagtcctct

SEQ ID NO: 854594 - DNA, 594 bp, Homo sapiens
agtggtgtgttcctcatattggtaaagaagctagaaaaattaagttaaatattgagaaattaaaagaataaacacaatgtgattccgaaatacacttatgagaatggctataattgaaaagactaaacacaaaaatattggcaggaatgtagagcaatgagaactctcatatattgctgttgtgggtgtaaactgggacagtcactttgaaaaccagttttgtaatatttcctgaccctagatgtttacatagaccttcacacagaaaagttatgtatccttataaatatttatataaatatattggagagaaatgggtatatgtgtccacctaaagacatatgaccaaaatatgtttataaaattctttgtacaataagtaccagcttattcataatagccccaaactcaaaacaatgcaaatgcccatcaacagtagaatggatagatacaccgcagcatatttgcttaatggagaaccacacagctacaaaatacaactgctacctacaasaacattgatgaatctgactgtcatgagtgaataaaaccagatgcaaaatactatgattccatgtatatgaaggcaaaaaa

SEQ ID NO: 854595 - DNA, 613 bp, Homo sapiens
gcagaaatccactgatttttcgggggaaaaaactcatacaactaagaattcttctctcagtgtttgtcagttttcagactatcatattgatayaataagcaaaaatctcatttactggaagtctccgcagataccttattcttttccaatctgtttctaagacaaagaatatggaatggactggagtagtctatgggaagaatttggcatgggagttgaatggactaggtttccatacttttcataagtgaccccattaaccatttgagaagcaaagaaagagttacagataagagtcatgaataaaatgtgggagtttccactactttgctgggtacttttggttcttttggtctatttatttaggctcgctggagtaccaccgacatgcctggttacttgcacttggcagtaattccagctaatctgccttcagcctgtccatctggtgttttggtcgctagggtagggatgcaaggatatggagcaggatgccttttcttgaatttcattagtgctgcttcaaaaataaaatccttgagtaaagttgtaccttttattccagattgattcttcttagagtcttccagatttaattcctcttctagattca

SEQ ID NO: 854596 - DNA, 604 bp, Homo sapiens
atggttactgataacatttttatcacttaacatctggacttaaaatctttagaacatattacagtttctcctttcctcccttgtattccttagagtagccctgtttaagaatctcatttaagttatactacttaataatgttgttgatgaggggatgatgatgatggtgttacaaacagaaccaaagagttaatcacagcgtccatgttagcagttatttttgttgttgttgttgccatagtcatctgagcctcatgattcactcaatgtactaaaacattttaataaatattaccttaatataatcagaaaactgcaactacttgatcattcaatagcatttgttgaattttaaatagggaaggaagtgaacatttctcctcaatacttaatagatgcaacattatatccagcattttagcaaggacaatacatccctgaactgatcattttgtagtttaaacaccgcagcctggagacagtcagttaaatgttctcagctaaatagacatacttgcttcartccccagatgctttccctgtcgcttcatctgtcactaacttgcccatttttctgtttcacagtcacattccaagagggtta

SEQ ID NO: 854597 - DNA, 603 bp, Homo sapiens
ttgtgcaatggttacaaaaccatgtagatttgtttgtctttccagaaacaagatttgaagtacaaagagaagcaagaaaagggatgcgtgacgctactgagaaataatacttccttaagcaagaatctattggatttatgctatttgaggaaaaagaagttaatttatgtttcctgttacataatgcactcaaatgtttctcaccccctgaagcagtgtctgtcttcagtacacaaaactctttggcatttggacatgtttgagcataggataatataggtggaaaagtgttttccttggagctaaatgttagccacaagagatcttgattagggttgccagaagcaaagtgacagaagttgctatataaatttaactatttatttgtgtgtttgtgatatgggaacatcgaaagcacacagcatggggctggtttctttcttaccctgctctgttcatggtgactgtgttacctagagtagaagtaggagytgatccacatgggaaaaccccagagaatatctatttctgaagtcagcacgaatacgggactatagaggagctaatatgaatgactgtctatctaaaaactgtgctagtttt

SEQ ID NO: 854598 - DNA, 636 bp, Homo sapiens
tgttatttcctgttttatcatattcatcttaatgtgctaagtgatgtctccttgtgcttttgttttgcattgctctastgcaataataaatggaactaatgatgtttagaatctttccatatgcttatcaccattttcgtatgctcatctccaaaaggggtggcatatcttttttggacaaatatctgttcaagtcttttgcttgtattatatgtgttgtttttatttttgtcactgagtttgtagtcctttatatattctgaatatttaatccttataagatatgtgatttgaaaatattttcttctattttataggtttcccttttaccgtcttgataatgtactttgatgcacacacttttttttagatttcattgaagtacaacttacctattttttcttacattgttcatgctttttggtctcatatctaataatccattgtcaaatacaaggtcctgaagatttattctatttttatttttcattttccagttttaacttttacatttacattgttgattgacttgtgttaaatttttatattatttgaaatagaattccaactcctttcttttacttatagatatttagttgtcccagcaacatttattaatgagataattcttttccc

SEQ ID NO: 854599 - DNA, 650 bp, Homo sapiens
atgacgagagctagaggatcccttctcaagtaactatggaacaaagccttcgaaacgcatacgttggtacagagttaggctgagaggggcctgagcttacacaatgtgggtgtcctctttcagaaagaagaaatacaaaattaagtacacaattgttatcatttagaaagataaaagaaattaccgtgaattacacactttcaaaacctgtgaaataccacaaacagcataaaatccaagaaaataatatctttattacttaattgtccaaccaatctctgtaattcctgttttcttatattttctgctgtataatgtttgatggccttttttctgactacagttttgtaatgtcatttctatagagataatagtgagaaaattcagtctttagcacaatcaatcacaatttggttcttattgataagttgaaaatctttctttcagttttacaactcattattggtaagtcatgtaagtgttagtgttattatcaagttgtggataacttctgtcaactttttytcatatgtaagctgtaagatttggaaaaccttttgacagactggcttctgactctttttcaaactttcattcccttccctcccgacgtacttcctgtgctgtggaggatgtttggcctgggagat

SEQ ID NO: 854600 - DNA, 652 bp, Homo sapiens
caacagaaccaatctgtgtgtgtgtgtgggtgtgtgttagtgtttgrgggaaagattagttctctttattcactcacattaagtgcactaattaaaataactttccctattcaaatacaagtgggagggattagcagaattgggtaaccacccacttcagccactcagggcaccagtgatccaatatcaagtagcaaggacaaaataatgctcaggccattggatcactctgctcttttttacttttttgaaagaaacaaaaggaaggaagagtagaagggagggaggaagaaggaattccctttcagaaacctaaatcaagacgtacctagaaatcgacaaacttggtgaaaatgtaagccctggtgttgtggcatgtgctcttctctaaagatcctttgaagtggccaagtctggaagcctttgaaaaagctgcagagagtagattttaggtgctattaccaaaaaaaaaaaaaaaaaaaaaaaaaaaaaaaaaaaaaaccccacaaaagacagaagataactttggaaggatggatatgttaatttgcttgcctggcatcatatcaaacatcttaaataataaatatatacaataaaacatagctttggaaaaaacagaaaagaaagctgctccaagccttgctttcag

SEQ ID NO: 854601 - DNA, 637 bp, Homo sapiens
ggccttattattttcaacagcaaaactgaaataatatcagtcatgcttcatgttctgttattatgactatcaaaactgatcatggttggaaaatgttttgtaaacgtcaaatgactatccactgtgtatatcattatatactactatatacatttgtatttgttattaaagtctatacatacttaattcatgcattcttactaaaattggagttgaagttatttcatttcagaaagggcagacgcattttctaactttgctaaaggtaattttttttttagagagagtctcacactgttgcccaggctggagtgctatggcacgatctcggctcactgcaacctccacctcctgggttcatgcaattctcctgcttcagcctcccaagtagctgagattacaggcgcacaccaccacatcaggctaattttttgtatttttagtggagacggggtttcactatgttggccagactggtctcgaactcctgacctcatgatccacctgcctcggcctcccaaagtgctgggattacaggcgtgagccaccgcgcccagctggtaaaggtaatcttttgccccttgatacagtgtawctgctttctgaaataattttataaagagattctcatttaagt

SEQ ID NO: 854602 - DNA, 702 bp, Homo sapiens
gactggaaatgtggatcctgtcagtaccactgaactcacttggaaaacgcggctgcaatgtgtcacgcacaggcacactggccagaggccgggacccaggccctgcggcggtgggagctgcgaatgcactgactggacgtgggccctgtcagaaacacttcatccatcagtgcgcagcccactggggcccggagggctccatgaaagtcaccgggccctgagacaccaggaatatgcttcctgtgctccaagatcacccagtacccctctggtcccttcaaaggctgtgattccacctctgaaaatgggttagagaaacctggcattaaacaaagatgatgagagtccaccgcttcagactgaactcctgccctaggccccaacagaccaggccaaatcaaaatggaatcactcatgccaaatgtcacatcatcaaactgaaacttgaaggaagcaaatagggcccaaaacagaccagtttttcctgaaaacaggagattccagtctactgagtcagcataataaggaagttacgttctccaaaccttccaaaacaagtatcctcatgytaaccagtcagcttttttcttgtttccctgttcccaccttaccaaacccactgttctgctcttgcccagtgagatctctcattctgtttaatagaagggaggctgccctggttcatgaatcatgcataaaagc

SEQ ID NO: 854603 - DNA, 601 bp, Homo sapiens
aactttgaaaccacctgtctatatcttcatttagcttggtctttgacagctatcaaatgagaawgttttgatgtttttgcagcaattctgaggtgaagggctagctctttgttcccatctataagtttgtcattgcaaccccatcagaaacagaaatgatgtgtctgttctttcatgcgtgatatctactggtgaatattaatttagtgatatgttttcgaaggtcactggggattgatttcaagcttacttgttcatcatttccaaaattcagccattatgcttaggcaagtaaacaagcaggaccttgcccagctccctgcttctggtagtactgtgatgatgctccatgagttaacgtagcaaagtgaccctgaaattacatcaccaaggttttccaataatctggatgtttatctattcttgatttaatatcttgctaaaattccccaaacaaaaaattccaataggtaatatctcataataaaatactaaaacatccataatcgtcaattgcttctggtttctaaaaattataggctattttcctaataggtgcattcataacccagtcatcataaactccaagatactaattttg

SEQ ID NO: 854604 - DNA, 494 bp, Homo sapiens
tgatttttattaatttaaatttaaattcaagtagctacatgtggctggcagccacctggttggccacacagctatgggctgccygctctgcacaagcaggtgccagtctctgttgctgcccatggtggctcccacatgggcatttaaatatctgtgaataaataagtgagtttaactaatttaaatttaactaaagaggttatgtatttgaaaccaaatgtcccatataaagaatattgctggtatcacattctcagcaggacaaactctgccattattctcgttgcttttttccctttaccagcaaaatttgggttgacgatgagaacttttttgggaggtactatgtaatgcctcacttgattaaaatggactgattttccacatgacgactagataggattgcatatgccaatcgattttagaaaataagatcaagaatataatatagaccaggaccaaatgaaaattaaaaagcagcaagtaaaaagcta

SEQ ID NO: 854605 - DNA, 494 bp, Homo sapiens
tgatttttattaatttaaatttaaattcaagtagctacatgtggctggcagccacctggttggccacacagctatgggctgcccgctctgcacaagcaggtgccagtctctgttgctgcccrtggtggctcccacatgggcatttaaatatctgtgaataaataagtgagtttaactaatttaaatttaactaaagaggttatgtatttgaaaccaaatgtcccatataaagaatattgctggtatcacattctcagcaggacaaactctgccattattctcgttgcttttttccctttaccagcaaaatttgggttgacgatgagaacttttttgggaggtactatgtaatgcctcacttgattaaaatggactgattttccacatgacgactagataggattgcatatgccaatcgattttagaaaataagatcaagaatataatatagaccaggaccaaatgaaaattaaaaagcagcaagtaaaaagcta

SEQ ID NO: 854606 - DNA, 494 bp, Homo sapiens
tgatttttattaatttaaatttaaattcaagtagctacatgtggctggcagccacctggttggccacacagctatgggctgcccgctctgcacaagcaggtgccagtctctgttgctgcccatggtgsctcccacatgggcatttaaatatctgtgaataaataagtgagtttaactaatttaaatttaactaaagaggttatgtatttgaaaccaaatgtcccatataaagaatattgctggtatcacattctcagcaggacaaactctgccattattctcgttgcttttttccctttaccagcaaaatttgggttgacgatgagaacttttttgggaggtactatgtaatgcctcacttgattaaaatggactgattttccacatgacgactagataggattgcatatgccaatcgattttagaaaataagatcaagaatataatatagaccaggaccaaatgaaaattaaaaagcagcaagtaaaaagcta

SEQ ID NO: 854607 - DNA, 494 bp, Homo sapiens
tgatttttattaatttaaatttaaattcaagtagctacatgtggctggcagccacctggttggccacacagctatgggctgcccgctctgcacaagcaggtgccagtctctgttgctgcccatggtggctcccacatgggcatttaaatatctgtgaataaataagtgagtttaactaatttaaatttaactaaagaggttatgtatttgaaaccaaatgtcccatataaagaatattgctggtatcacattctcagcaggacaaactctgccattattctcgttgcttttttccctttaccagcaaaatttgggttgacgatgagaacttttttgggaggtactatgtaatgcctcacttgattaaaatggactgattttccacatgacgactagatrggattgcatatgccaatcgattttagaaaataagatcaagaatataatatagaccaggaccaaatgaaaattaaaaagcagcaagtaaaaagcta

SEQ ID NO: 854608 - DNA, 524 bp, Homo sapiens
acaccgattattcttgggtttggtcgtttaacacaatcccagacttcttggaggctttgtttgtattttcttattctttgtctttgttggactgggttaatttgaagaccttgtcttcragctctgaatttctttcttttacttgttcaattctattgctgagactttccagagcattttgcatttctaaaagtgtgtccaatgtttcctgaatttttgattgttgtttctttaagctatctatttccaagaatatttctcccttcacttcttgtataattttttggatttccttgcattgggcttcacctttttctgttccctccctgattaccttaataactgacctcctgaattctttttcaggtaaatcaaggatttcttcttggtttggatctattgctggtgaactactgtgatttttggggggtgttgaagagccttgttttgtcatattacagttccttctcattttaggcattgtcagagggaaggtctagggctgaaggctgttgttcagattt

SEQ ID NO: 854609 - DNA, 301 bp, Homo sapiens
ctcccaaatttctgggattacaggtgtgaactaccacagctggcctgtttctacaatatttctttttctttttgtatataactcactattatttttaaaatggtatcaatataagtaacccttgggaaaggagcggggtacgattcctcctctaactgagcagcagtygttggaagagtttatgctcacacctcctcttgtcttgctcggctgtctgctctgcagaacaatgcagactctgactggactcttagaaacagcaagtttagtctgcctgctcatgtcccaccttgcagagctc

SEQ ID NO: 854610 - DNA, 599 bp, Homo sapiens
ttgaggccaggtctcgtggctcacacctgtaatcctagcactttgggaggtcaaggcaagaggatagcttgagtccaggagttcragaccagcctgggcaacatagcaagacatcatctctacaaaaaattttaatagttagctgaccatggtggcctgcacccatagtcctagcacctcaggaggctgagatgggaaagatcaactgagtccgggatgtcaaggctgcagtgagccatgatcgcaccactgcaccccagactgggtgacacagtgagactctgtttcaaaaaaataaaaataaaaaatcccagccgggcacagtggctcactcctgtaattctggcatctttgggaggctgaggtgggcagattgcttgagcccagcagttctagaccagcctgggcaacgtggtgaaaccttatctcttattcatttatttttaaaaactagaaaggtgtcttcctatgttgaccaggctggagttcagtggctattaacaggcatgatcagggtgcactgtggcctcaaacacctggccttaagtgatcctcccatttcagcctcccaagtagctgggactataggcaagtaccac

SEQ ID NO: 854611 - DNA, 622 bp, Homo sapiens
ctttttactaattatttacccgaagattttgatactttaagacatgatcaactccatatactactgggcctaatcctygttattggcacattgaagcaacataagccacctcagaactgagaaatacagattaaactagccaaatccatgacaatgactgagttgtgtacaaatgacccataccaagtattagatgaaacaagagacttccaagaattggcatggcctcagggagacacaatgtgccactatgtctgaagatgtgccataactgttaagctgccatcttaccagttacaagaactcaagtttaatctcttgcaagaactatactgaaaagatggcctaacaactatgtgctgtcacgtgtctgagtgttgcaacaacaggtgaatgattagtatggaattttaaaaggggaacaaagacaaagaaggaacagaagctaactagcataaactggggagaatttgtatctggcaaataccaacagagaagtatctgctatgttggggcagggacttccaactggctttcccaaggccttggtaaatgtccctccaatcctgtgacggttaattttatgtatcaacttgactgagctaagggatgcccagatagc

SEQ ID NO: 854612 - DNA, 631 bp, Homo sapiens
tgatgtgacagtgttgggcaggacttccgggacaggtgggttgccaggtgttgcccgctttcctcttgaccatcagcacatgccataactgtgactggtgagatctattccctttcattctaattgggtcaggggaaatgtgggaataaaaccaacacttagtttttgttttactcgtatctgtcgagtctagtttccaacttaaggacccattctgatgatagaaacaagaacctgcttctcaactttggaattaggaaattagtcttcagccagacagaaatagatagaaatgacataatgattaaatctagcaatttgacatccttaacacaagcaagagtacaagtcaccaataaaggttacctttgaaggtcaaaagagaatttaagtgaaaggtgtattgatcaatccaggagaagctgaaaaggctctgttctcacagtggactctaagctacaggattcagacgtgtgttgttaataaaggaggttaaagtggtagtgagacagagacagctaaggctrgaggtgggaaacaatcctcccattatcccctcttggttagaaaccccattatattctctattggcttcctggacccctcctttgaggagaaaataatattgaag

SEQ ID NO: 854613 - DNA, 640 bp, Homo sapiens
tgctccctttatgatttttaaaaattttacttacataactatgtaattccaaaatagaaaagtgagtgagccatcactaaaatttactggaaactaatattctttcatggaaacaactgataaacattttaaagttctatatttatttaaatttggctttttaaaataggtaagcttttcatttcaattattgtttaatactttaaagctagtttaaacaaagataaaaccaaggagaactagtaaagcattccttactttacatacagtgcctcaagtgccacatacataataacatatcacaaaagaatgtatatggtttagcagattacagagcaaacctaaaagtttatacaaagctaaacactgcctcccttctgttccatttattgtcttttaatttgatcttggctctgtattatccttctataataccactgtgtgacatctatcagtcttctaagtgttctgattacttatatatacctttttctttaaacagctttgtaacatttgagaacattcatccaatcttttccattagatatgatatattcatttttctcacaraatgctcactttcctgagctatattaaacaccttataacaggtgtatgtgtaactgaagaccctaaaatg

SEQ ID NO: 854614 - DNA, 577 bp, Homo sapiens
ttttggttaccaaatggtaactaatggaatatctatttccaacactttactttcagtctatgcacatccttaaatctaaaatgagtttctcatagacagcgtatagttggatcttttttttttttaaatccgttcagccactctgtgtctctttattggaagttatatctatttatttatcagaagttaaacctatttacgtttgaagtaattactgataggaaattatttattattgccattttgttcatcattttctgtttgtcttatagttcatttgtttttggagttccagagctttttggaattccttagtgcacagttcttagttcatttttctcccttgctctcatcctttgtgtttcgttgattttttttgtattgataaacttttattaatttcttttttacttttgtgtaacttatatgggtattttgtttccagttaccctggggcttatataaaatayggttatgacagtttaagttgataacaacttaactttaatcacatgcaaaaactctacagttttactcctcctaccttcacattttgtcgttgatgtcacaatttact

SEQ ID NO: 854615 - DNA, 412 bp, Homo sapiens
aagatagaagaggtacaaaaatatatgttcacaagacccagcgcatagagggatgttaataaatagaaatataactggagtgctgagaggagactgttagattwgatgttttgaaagctgagggtttggttgtaatagcacaatgtggagagttcggcagctgttaaacagcgagtaaaaagttgagtgttctgtataatcccagcactatgcaagtatcagtgacatattagatataccttttactaggtgactctctgaaaatgaggcaactttcctgtgtgtcttgtgatcattctcattaatttatattaacttaggtaaatcattagacatctgtttttatgctacactattggcttttaaaatttcttcattgttgagaaatgcactcttaaatttttgaggaatg

SEQ ID NO: 854616 - DNA, 412 bp, Homo sapiens
aagatagaagaggtacaaaaatatatgttcacaagacccagcgcatagagggatgttaataaatagaaatataactggagtgctgagaggagactgttagattagatgttttgaaagctgagggtttggttgtaatagcacaatgtggagagttcggcagctgttaaacagcgagtaaaaagttgagtgttctgtataatcccagcactatgcaagtatcagtgacatattagatataccttttactaggtgactctctgaaaatgaggcaactttcctgtgtgycttgtgatcattctcattaatttatattaacttaggtaaatcattagacatctgtttttatgctacactattggcttttaaaatttcttcattgttgagaaatgcactcttaaatttttgaggaatg

SEQ ID NO: 854617 - DNA, 626 bp, Homo sapiens
aagatagctttcaaaagaaagatttacttagcaagtagctcttcctgggtcaaaacacatttcatcttgtactggaagaaacagatatgcatagatttaagtgcaatacagaatagagaggaccatcattctstatagggtgctacagaagcctgcatattatgtgtaaaagccgtaggttgtcaaagaatgaaaactattttttcaaactacaatgaaaatgatttttctctgtaatattttttagagaaaacagaatgaaaactgttttttcaaactggaatgaaaacgattttctctgtaatatttttctcttttctaaaaataggtcagaaaatagcttatgttgatggaaaaaataatcagggtttttgtatctttagttcataagtgaggtttctccttcttgactggcatttggaagactgggaactgtacactggcatgttgagtcctgtctctgctaggagaatggtgagtccaaaggccagatttcacacggcaaagaatggcaggcatatttattgagtgtttactatatgtttggctctctgatcaatacttcaaatatattgttacattcagtcctcacagcaacctatagtatagacacccaaatttccttt

SEQ ID NO: 854618 - DNA, 609 bp, Homo sapiens
cctatatgtaatgataatttgggatttaattcttagacaattccmctgtgcaaatatagatcattcattgttatttcaaatatctaaacctagacttttgtagtaggaaacttaaagattatttttaagttgtggccatcgatgttggtaagcaatgcgcatatttaatgtattggcagaacctcaagatactgggtttgaagtctgaaataaaagtctaaactaaatgtattttaagaattttggtattataacttcaaagcaaaactgaacattcttgaaagagcttagaaatagtttttagatttggtttaagaaacaggcgatttgagtgcttccaagatggccaaataggaacagctccggtctgcaactccagcaagattgatgcagaagacgggtgatttctacatttccaactgaggtaccttgttcatctcactgagactggttggacagtgggtgcagcccacggagggtgagctgaagcagggcggggtgtcacctcacctgggaagcacaaggggtcaggggattttcgtttcctagccaagggaagctgtgagagactgtactgggaggaatggtacacttctgctcaaatactca

SEQ ID NO: 854619 - DNA, 580 bp, Homo sapiens
aaagtctagagaataaaataaaatgaaaatgaaaattaactcaaagtaattttgccctcagctgtgaatattgccttttcccttattacaccacttggaatgtgcaccagcagaggccrttctttggactcatcccattttctgggcttcatattttaaatgctagttaatttttcccacatttgttgccacaagataataaattattaatgtatttactgagattttactcgtttaggtactgtgttagggatacaacagtgaacagggtagacatatttctgacctccgagtgataaaacttttgtgttggagtgaggatgataatttgatatgctgtattcctgggtgtaaaggtttgcaggagtacatagaataaccaaccaaggctttgtgggaggatggggagagcatctcagtagctgtggttcttttcactttatcctggtgcagcctgtcagaaggtttcagttgcgagtccctcgctttagggagggcagtctggaagaatctgtggagtttggggaggtgggaagaagggagatgctttaagaaactgggtggtaattcagttcagttg

SEQ ID NO: 854620 - DNA, 590 bp, Homo sapiens
ctatttaattattcacaattttgctggagaatcttaggctggttacttcagtctactattccctcccaattgcctttcctttaaaaaacaaaaagacacaaatatatcctctaattggayatctgtcacaaattggacggttgattctgattctgtggttgaacaagtgagtggtgtctccttctttccttcctctccctctataagcatctctcgcagagctgtgaggtcaatcagatcagaaaaatgtccccaaagggatagctcttcatcagtcaggggcacacccatagcaggggctccgagtcagcccagagcagggccctggctctacctccactcagtgtatgacagtgggcagacgacatcacttgtctctgcctcacttgcgtcatctataaaacgggcatctacctcacttagttttgtggagatgaaattacataaagtatggaaagcattcagtactacgctcaatacttggaatctctcaattttcttttcttccctaaattcagggtaacactgtaagggaaggtcaaatgagggagagcaactgatttcaaagactgggatcttgggggatcccc

SEQ ID NO: 854621 - DNA, 459 bp, Homo sapiens
gttcctgggaccatgtattcttcctttaggagacacagagccatatcaaagtctttkatgcctacagtatgttcttgaggatgcatacatatgcacagagcattgcctctgagctggtgttttagctgtgttgttagtaggccattccaatgcaccataaaatcagaagattctcgtatgtgatataactagtggatcccttagtcactggccctgtcctgcatctgctttattctaaaatgggtcctgtgacctggcatgatgatggatgggatcccatgctggtggatcaaacactcagccatcccgtagttgagctggctgagagcttgcaagagggaaaggcaaaaccatactcagaatgagatatcggtcactgtgagaatgaaaccctggctctttcaggatggaaggtgcccagctagtcaacttgccatccaccaagtggctggttggtct

SEQ ID NO: 854622 - DNA, 459 bp, Homo sapiens
gttcctgggaccatgtattcttcctttaggagacacagagccatatcaaagtcttttatgcctayagtatgttcttgaggatgcatacatatgcacagagcattgcctctgagctggtgttttagctgtgttgttagtaggccattccaatgcaccataaaatcagaagattctcgtatgtgatataactagtggatcccttagtcactggccctgtcctgcatctgctttattctaaaatgggtcctgtgacctggcatgatgatggatgggatcccatgctggtggatcaaacactcagccatcccgtagttgagctggctgagagcttgcaagagggaaaggcaaaaccatactcagaatgagatatcggtcactgtgagaatgaaaccctggctctttcaggatggaaggtgcccagctagtcaacttgccatccaccaagtggctggttggtct

SEQ ID NO: 854623 - DNA, 445 bp, Homo sapiens
aagtttatgacagaaatttcaaagtgcatggtattttcccactgcatgccaaaatataatattccatctgctattggtaatacaatccaacttgtttgtaatataatagtaatttctaataaaatcaaaattttcataggtagtatagcatatactaaattttattttagaactttatgaatttacagaagcaagtcaagttgctgagagtattacattatagtatatgtaccaatggcatttggttttaatagggagatatacattatatctctcacttaaaaaaatcataagcaatttgatatgcatttttacttctgaaatagtctcacacagtttctaaatttctgctattttaagagatgaagattttttgttcttaaagacctataaagccaggaatttytgtaagttatataaaatttacaaagtcatcttaaacagg

SEQ ID NO: 854624 - DNA, 558 bp, Homo sapiens
gtttcccagtagcactcgctagcccatgagtaatacgttaattacagaatattcttatctaatcaatgtatytgggctggcattatcccagaactagctacactaaatatattcatgagtttttcaactgcattttaaaaaataaatgttatccaattcagaattttccgacaggccctgtaattctggtatgatgagactttattctacagcttttaaaaagtcttctgtagctccactcagaagacagaacattacatttagcttaaaatccccacccagtggcacagtagacactaagtaatttcaagcattcaaaacgacactggcagctgctaggaataaagtcaaatatattccatagagcagagaggctgggccacgccagacatctagggtgatgcaggcaagccactgagatctctgtgtgaggggctatgaagggttcactccagaacgaggccttggaacttttgttatgggatctgttaagggatggaatattgcgctttaaaacactcaaggaattctaaagtggacgaagggcaagaattagac

SEQ ID NO: 854625 - DNA, 558 bp, Homo sapiens
gtttcccagtagcactcgctagcccatgagtaatacgttaattacagaatattcttatctaatcaatgtatctgggctggcattatcccagaactagctacactaaatatattcatgagtttttcaactgcattttaaaaaataaatgttatccaattcagaattttccgacaggccctgtaattctggtatgatgagactttattctacagcttttaaaaagtcttctgtagctccactcagaagacagaacattacatttagcttaaaatccccacccagtggcacagtagacactaagtaatttcaagcattcaaaacgacactggcagctgctaggaataaagtcaaatatattccatagagcagagaggctgggccacgccagacatctagggtgatgcaggcaagccactgagatctctgtgtgaggggctatgaagggttcactccagaacgaggcctyggaacttttgttatgggatctgttaagggatggaatattgcgctttaaaacactcaaggaattctaaagtggacgaagggcaagaattagac

SEQ ID NO: 854626 - DNA, 611 bp, Homo sapiens
ctgacagtttttctggttgaggatgctactctattgtctttttagtgtgcatggtttctgaagaaatgtctgttacaattcttgtctttgtttctctgtatgtaatctgtcttttttctctgctttcaagattttcttttttccatcagtttgaatatgatatgcccaagtgttttgttttgtttttgttctgtatttaacttacttgatggtctttggctcagtagaaaattcctgactgttatttcttcaactatttcttctgagattccaattacacctatgttggacagtttgaggctgtctccaaattcttagaatgctctattctgtttgcttcattcttctttctctgtttcagcttgaataatgattcttttccaggctgtgttgagtgctatcaaatgcgttcctcatctctggcattgatgttacagatgttacatttccatttgagggtttctttcatgcccatctctaygctgtgattacccacccggtcctgcatggtgcccactttgtccactagcctttaatacatcattcataattattttactttccctgtcagatagttccaacttctgtgtcctctctgagtcttgttctga

SEQ ID NO: 854627 - DNA, 560 bp, Homo sapiens
aatttatatcccattgctataataaagctgcagtggtacacacagcactttcctgagttctgtgagtcattctagcaaagtaccaaatctgagagtggttttaggaagcygcaaactcgcagttggtgtctgaagtcagggcaatcttatagggattgttccgtctgactgtgtggtttgggtaactccttacagataccaaggcaattcactgagaaaatggactcttttgcacatgtcatactgtaattattgatatccatatgtaaagaaatgagcctcaacccttacctcatagtatctgcaaaaactaacttgaaatgaaaagtagaccggaatgtaagaactagaactagaacttttctagaataaaatacagaagaacgtctttgtgaccctgggttgggcatatattaatatattaaatagaccacaaaaaggaaaatatgatgactaggtcttcataaaaattttaaaaatttgctcttcaaataatactgttaagaaaatgaaaaggcaagtctggggtaaaatatcggcaaaatatgtatctgtcaaag

SEQ ID NO: 854628 - DNA, 622 bp, Homo sapiens
agctatctgggcatcccttagctcagtcaagttgatacataaaattaaccgtcacaggattggagggacatttaccaaggccttgggaaagccagttggaagtccctgccccaacatagcagatacttctctgttggtatttgccagatacaaattctccccagtttatgctagttagcttctgttccttctttgtctttgttccccttttaaaattccatactaatcattcacctgttgttgcaacactcagacacgtgacagcacatagttgttaggccatcttttcagtatagttcttgcaagagattaaacttgagttcttgtaactggtaagatggcagcttaacagttatggcacatcttcagacatagtggcacattgtgtctccctgaggccatgccaattcttggaagtctcttgtttcatctaatacttggtatgggtcatttgtacacaactcagtcattgtcatggatttggctagtttaatctgtatttctcagttctgaggtggcttatgttgcttcaatgtgccaataacraggattaggcccagtagtatatggagttgatcatgtcttaaagtatcaaaatcttcgggtaaataattagtaaaaa

SEQ ID NO: 854629 - DNA, 638 bp, Homo sapiens
agatcaatcagcagcttgccccttgcccttggaaaagccacagtcattcaacaacctgtgagagcagccttggcggctgaattctgtaaagccagaggggtggggctgcccaaggccttgtgagcccaccccttacaccagtatgccttggatgtgggacatggattcactggagattattttggagctttaagattgaatgactaccctgctcaatttcaaacttgcatgtggacagtagccctgtatgtttggctgatttatctttttggaacagatatttttacccaaagactatggacttttgagttaatgcttgaatgagttaaggctttaggaacctatttggatggcatgattgttttttgcaatgtaagaaagacatgagatttgggaggggccaggggtggaacgatatgctttgaatatttgtccccttccaaatctcatgttgaattgtaatcctcaatgctagaggaggggcctggtgagaggtgttttgatcacggagstgggtccctcgtgacttggtgctgtttttgtgataatgagttcttgtgagatctggtcatttaaaagtgtgtggcacctcagccctacgctctctcacttgcttgctcctgttttcaccatgtgac

SEQ ID NO: 854630 - DNA, 638 bp, Homo sapiens
agatcaatcagcagcttgccccttgcccttggaaaagccacagtcattcaacaacctgtgagagcagccttggcggctgaattctgtaaagccagaggggtggggctgcccaaggccttgtgagcccaccccttacaccagtatgccttggatgtgggacatggattcactggagattattttggagctttaagattgaatgactaccctgctcaatttcaaacttgcatgtggacagtagccctgtatgtttggctgatttatctttttggaacagatatttttacccaaagactatggacttttgagttaatgcttgaatgagttaaggctttaggaacctatttggatggcatgattgttttttgcaatgtaagaaagacatgagatttgggaggggccaggggtggaacgatatgctttgaatatttgtccccttccaaatctcatgttgaattgtaatcctcaatgctagaggaggggcctggtgagaggtgttttgatcacggaggtgggtccctcgtgrcttggtgctgtttttgtgataatgagttcttgtgagatctggtcatttaaaagtgtgtggcacctcagccctacgctctctcacttgcttgctcctgttttcaccatgtgac

SEQ ID NO: 854631 - DNA, 646 bp, Homo sapiens
ggttatctttttaaaattttctccttttctgccatattttgggttaatcaaatatattaaatattcgattttaattactctattgcatgtttaactagaactcatttatttcaagtgttttgtttttctacagattacggtaggtatacttatatcacagtctacttagagctcatattgttaaaattcatataagtggaagaacgttagaacagaaaaaatcaatttccccgattttgggggctattattttaatatattttacatttgcgcatgcagtgaactccataatataaggttattatttttgctttgaataattggttgtctttcaaaggggaaaaattaaggaatgcctttcctgtttgcttacatatttacctttcctagtgattgattgtcattgcttcctgtataacctagttagttactatctggtttcattttaaagaaagacacaccatgaatcatctaaaacacttcatagggcctttttctgagcagtcctctttatccagtaccctaataatttttgtaaatatccatcttcaacattagtttctagaactatgagcatttgtaatatattttwaagaatgttctatagagatgatgctgggatcagggagacttcggtttgaagact

SEQ ID NO: 854632 - DNA, 565 bp, Homo sapiens
acatattcactgcaacactattcacaatagcaaagacgtggaatcaacataaatgtccatcaacgatagactagataaacaaaatatggaggttgcctacttttctccaattttttgtcagattgttagggaaacttggttctatgggttgcattgtatctgcccaaaaatgatatggtgaagtcataactcactcctagtacttcagaatgtgagcttatttaaaaagaggatctgtttaagtattattagttaagatgaggtcttactggagtagagatggcccataatctaaaatgactgacttcctcataaaaagactgccgtgtgaagacacagacatacacaaagagaatgctatgtgttgataaaaacagatatgggagttatataactgcaagcaaagaaacatcaaaatttgccagcaaactaccagagactaaaaccagagacggaaggaaaaatccccattgtttaaaaagtgtgtggcgattcctcagggatatagaactagaaataccatttgacccagccatcccrttactgggtatatacccaaaggatt

SEQ ID NO: 854633 - DNA, 539 bp, Homo sapiens
ataactgcaagtaaaggctgaagacaatgtgagctgaacacggaactattacaaaggtttctgatttgttttgtaattgggccagtttctgtctgaagctcttaagcgagtrgggcagggaaaggcggatcctaggcgctgaggtgcaggaaaaagaagcagcttctgagacaccttaaaattcttttgctaaaccgtctttttctgaaagtcatttaatttataggtttttttttttttttttttttttgtttttggcagctttcaggttaaaagtcctccgggtaacggcagaaaccaaatagtcaatcattaaggtgcctgactgcacgtaggcaatagttatcgcaggactgaagccccctttgcagtacaatttatcctttcctagatgcccctgagtacggaggactggaggaggtagaaagggaaagaaaacctccttctggcaggatgtagcttctgctgcacaaggtaggatgatgacaaaaggttttcactgctggggaatggatgattgcgggagaaaaagaatctcg

SEQ ID NO: 854634 - DNA, 553 bp, Homo sapiens
atactcgctgtagctcctccttatgaagttctcttctcattgtagtctgttaagtgtttatgattaaagagtgttatattttgttaaatgctttcgcagtatctttggagatgatcatgttttttctttattaatctcttttttattttatttattttattttattttattttattttttattattttagtttttattttgagatggaatctcactctgtctcccaggctggagtgcagtgccctgatctaagctcattacaacctctacctcccaggttcaagcgattcttctgcctcactttcccaagtaacagggactacaggtgcgtgccaccacatctggctaagttttgtattatcagaagaagataggccgccattggccaggctggccttgaactcctgacattaagtgatccacctgcctcagcctcctaaagtgctaggaatacaggcgtgagccastgctctgggccttcctttattaatttcttaaactggcagatttagaatactaaacttccttctattcttagaataaaccctatata

SEQ ID NO: 854635 - DNA, 626 bp, Homo sapiens
cgttggctcacgcctataatcgcagcactttgggaggccaaggcgggtggatcgcttgaggccaggagttygagaacagcctagcaaatatggtgataccctgtctctactaaaaatagcaagattagcccagcgtggtgacacatgcctgcaatcccagccacttgggaggttgaggaaggagaattgcttgaacccaggaggtggaggttgcagtgagccaagattgtgtgcttctgcactcctacctgggagacagagtgagaccctgtctcaagaaaaaaaaaaaacatttttttttagagaaggggatctcactatattgcccaggcatcctcccatcttagcctccccagtcactgaaattataagtgtcagacaccaagcatggccctacattttgtctttatcaatcttatttttgtttttgcttgttttttggtttttcttagtttaaatatctaagaatggatccataaattgtaagtcatttcattttgcctatttttatcttcacataaatggaatcacaagctgtatataattttatgatgttttttatccaaaccaatatttttgagattcattcatgttcatatatgttactccagtaccatcatttcatt

SEQ ID NO: 854636 - DNA, 508 bp, Homo sapiens
tactctaggggcgtgtgtgtgtgtgtgtgtrtgtgtctgaattaaaaaattccatcagttgggttacattattgtcagatactcatcaaattcagtggtttcattttctgttttcctgtgtgggaaaagaagagtaacaaatttctctgcccctttcatgacccttgtttccatggcctgatttacagactaccttatcttcggaagtataccattttatatatatacaatttttagtgggggcaactacaaaataaaaacaaagaaaaaaaatttcacctttgccttgcaaactccaaaatgttacatatcaatatttactgttggcaggtcgagtcgggtgagtatggagaaataataaaatgggatttctgaattgtcttgagttttagctattatctttataatatgaagaagctattggttattcagagattacatacttgttttattttaattataagtacttgcaggcaactatgtaactgtgaaatggatatatactata

SEQ ID NO: 854637 - DNA, 636 bp, Homo sapiens
gtttgtattcctattgataattaattagggttagctcagtagagttgaaagtggcttgcaaaaacaaacccaaaaaatacttacaaattacaggttatttcgtatcattaagatgcatacaaaagacaataaaacatttgttctggttctgttgctttaagtcactaactatatttttatgtaaatgtaaacactgacaaacattaacttctctcctgtatgtctcaggccttttaacagctttgcaatcctaacgagatcgatttaaattacatgtgacataaagtctctttgcattttaattagtttgcttttttgggtttttgtttgttttgagacagtctcgctctgtcgccgaaactggagtgcagtggcgcgatctcgactcactgcaacctccgcctccggggttcaacattttctcctgcctcaacctcttaaatagctgaaattacaggcgcgcgccaccacgcccgacaaatttttttatttttagtaaagacggggcttcacaccatgttggtcaggctgtcctggaactcctgaccctgtgatccgcccaccttggccttccaaagtcctgggattacaggcgtaagsaaccgcgccccgccaatttgcttatgtatttttatg

SEQ ID NO: 854638 - DNA, 571 bp, Homo sapiens
aaccgtcttttttctagccccaaagctaccaaaatacatactacgcaattgacattggaaaatgacaactgtttccactagccattctaatgaacctgaaatggcatgaattttctcttgcagtttatgtaattattccacaatctactacaaatagtattttccaagaaatatcatcagctccacattgcaaaaaaggccagtgaattcatttttaagaaaataaggctttatgctgtaaaagatgaaaaaacgtgagattctaatacaattctggttaaattgatatttaaccctttctgcattgcaatttgacagtgtatttcaataaccttacaaataatggtctttttttaaccccaaattccactgcaaataatccattctaatgaaacaatcagaaatgtagattaatttttgtggactaaaattattttttaagttagatatctctaatttttttwaaaaaatgaggccattataagttgcaacctcagaaaatggtattaagaatttttcatggagaatattcatgatatgtgaaaagttaaaacactatgaatccgatcct

SEQ ID NO: 854639 - DNA, 639 bp, Homo sapiens
aactttaagtttcccactaatacttttgaaacttttgaccaatgattttaactataatttatcaaaagctaagttaaagtcacwccactttaatatactttattttcccacctttatctttttttcatatatcgtcaatattaaacctttgttttcctaagtattataagtatttttcctaggttgtcatttgccttttaccttatttaccttattttggttttatataaatttttttaatatgtgagatagtataggtcagtacaataaattctaattcgtgttctatcaagttgtgtttcatgaagtgatagttgtattctgaaatgttgctacaggaaatactgaattagtgagtaccgagtcattgctcttagaggaaatacaagtttagtttcctgcaagcctttagccacaacatgttcattaactgatcaaaacctaatcttgttttatgtgtttctgtttaaagacacttcacttcatacattttgctgattaattaatgtcgaactcatggccaacaatgctataactcatgcctgaatcaagcttacctaacacacacattgtctccataaggcacatggaaccctttttgctcttagcaacactagacagtacttcagcactatgttt

SEQ ID NO: 854640 - DNA, 531 bp, Homo sapiens
taacaatataaaaagttcattgctttgattgcagattctatcttkcaaagagacttcaagaaacaatgaacttttgtgtcatatcaaagaagaatatccaaaatattctgaagacactccttcctttcccaacgatttatctgtgtgaacctggattcttcatatgcagaagtagatatgataagccagctatcttacatgaagccaatattaaagaaatttgcaacattcttctcactatttttttcttttagaaaccgtagccactttgattaaactgttttttaaattaacatttaatgactttaaatggattgataactatttacattttttttttacttttacactctaatacagtaaatatattagatataatccacattttttaaaacaaagctccttgggctccttggatgatcaataattaatttttaaacatatataaaaattctaagaccaagaagtttaagaaccactgctctagaatcgcactctttcaactggtaatggggaagaagactaagtatt

SEQ ID NO: 854641 - DNA, 506 bp, Homo sapiens
caataggaactcacatttatttctggtgggaatgcaaaatggtacagccactttggaagacaatttgaccatatcttaaaaaactaagcatgcttttctcatatggtccagcaatcatgctccttaatacttacctaaatgaattgaaaggttatgtccacacaaacacctgtacatggatgtttatagcagctttatttataattgccaaaatttggaagcaaacgagatttcctccagtaggttaatggataaacggtggtatatccagatgatgcaatattatttagccacaaaataaatgaactagcaagccatgaaaagaaagggaggaaacttaattgtattactaagttaaagaggccaatctgaaaaaaattacatactttctctttcagtcatatgacattctggaaaaasccaaactatggagacagtgaaaaatgagttacaccaagagggttaggagggggagaaagataaataagtagagcacagaagatttt

SEQ ID NO: 854642 - DNA, 599 bp, Homo sapiens
tattcacagatgacataattaattttatacaaaacccaaaggaatctataaagccaactacctgaactaattaagactgacaaattctaaatatgcaagttcaatataaaataatcaattgtatttctgaaaaatttaaaactgcattaactgtagcatcaataactataaaatacttacttatatggtgggccttcaccatatagaggctcaggccttcagttctggaaaactaccttgtctttctgtaatgtttccttcattttgtgtgttctttatggaattgcaattagttaagatacttgacctcctaaattaataacatgaattttcttttccctttttgttcaattctcaacattttctttatatttttcatcattcttcacttttagaatgaggcacagagaacctgggtaattcttcaggatcactcagtctttgtttgaactgctctttggaaacagagcacatgactttagcgactacacaatactgctttttttaraaaatgcttttgtaatgaataacctgatgtttaattaataagtgtatcctatagggcagagaagccacaaaaagatataaaaatgcattca

SEQ ID NO: 854643 - DNA, 491 bp, Homo sapiens
attattttcttctcctcaatgtcagtttgatttttctgactctttgtatgcctgstcatttttttttttagatgcacaacattgtgatttttatcttgagagatgctgtatatttttgttttattaaaaatattcttgcactttttctggagcgtggtcaggttattgagagataattggatactttcgggtcatgcttttacgctttgtttggcaggaccagagcaacatttaccctagggttaattttttctcactactgagtcaaaatccttcatattattaacctcagccccatgaattatgaggttttactctctggatgatgaaaatagctactattcctggccctgtatgagacgtggggtagtttgctattatcatttgccatggtttattccctggtctcaggtagtttcctctcacatgcttcatcagttctcaacggaaaccttgaaggggaccctctgcaaatctcagacactcactct

SEQ ID NO: 854644 - DNA, 638 bp, Homo sapiens
ctgccctcagtatagacgtatccaatgggaaaacagcggacctgcccagagcagggaggtgtcgtggaactgggtagaccccctgcagcgttaggggcccatttgtgggctcgccaccttcaggcttccccagccatgacacttcagccccgccacccatgcctgtctgctgcagccatccttgcactctccagcgacactctcgcacctccctaggggaagcttccctccccctgggctgctgctctgagcccatctgttctccccctgcaagaaggggcaatgctcttgtgttgtccctctgtctggacgcgcctggccactccgaaggcttttcaccccattatggccaaatagtatagggccactggggagggggaagggaatcattttgtgttcatttttgttttctgtttcacctaaaccagcataggattgataggggagacggttggcgggcatttccgtttctatgtgaccaaggcagcaggggcttttacctgctaagcggcaatcctttggccctgagaatttgggagagaacagtgcatcaggccaggctcagcaatatgtttgctcacattctttcagccttctstcacccccctcaacaccaaactttcttccttgtgagcaga

SEQ ID NO: 854645 - DNA, 492 bp, Homo sapiens
gactcctgtctctcagaatccagacttcgcccacaccggagcttacattttctcaaaggtgttagctgaaggtgaggtttgaacaattcgcyccaggaaagcgcataccaagcagaagtagcacatatatgaaagctgcctgttgggtctcttttcacagaaagaaaagctaaaataagggctcagccttaagatctgtcaccaaccacggatagcacaggaaacaggctggaactgagattaagatctgtgacatgctctgctacttatagactagggtgacttgttggtgcttagaatgggcactgactcacccattagtagactatatagccattatggctacagttattattatcatcatttaaaaatgaggtaggccttcacgtgcagtgctttgatctactgagcccaaatatacttcaatagaataaagtagagaatttgaacaagtcatttctaaagaccgtgcccttaaatcaacataacaat

SEQ ID NO: 854646 - DNA, 588 bp, Homo sapiens
taatacaagaggatttaaaataaaattttaacaaatatttgattaaaagaaaaggaagtaraaaaagaggaacaggaacaaccaaaagagaaaaaaaaacaggaaggataatggagaaaaaaataataaaaggttaaacataaacccaatcacgtcaattaaatgtaaataaatgaaataccttatgtaaaaaacagaatgtcagactgaatttaagaaagcaagatctaaatatatgctatttgcaagaaatgcacattaaacataaaaacacagcaagatagtcagtagaaggatagtgaaaggcattccatgaaaggactaagcataataaaggtgaatcaatgtgttaataaatatcactgcatatgttacattagcatcaaatttctttttaaatattcatgtatataaattttttatgatgaggaaatttaccagaaataacaaaggacattttacaattctaaaagtctctattaggaagatgaaacaatcataaatgtgtattatctaataacagtttcaaaatacatgaagtgaaagtctaacagaactaaagggagtaaacagcagacccacaaatta

SEQ ID NO: 854647 - DNA, 674 bp, Homo sapiens
gtggaaaacagtgtggtgattcctcaaagacctaaaaacagaaatatcatttgacccagcaatcccattactggttatatacctaaaggaatataagtcattctatcatagagacatgcacacatatgttaattacagcactattcataatagcaaaggtatggaatcaacctaaaaacctgtcaatggtagactggataaagacaatgtggtacacatacaccatagactactatgcagccataaaaaagaatgagatcatgtcctttgtaggaacatggatggagttggaggccattatccttagccaactgatgcaggaacagaaacctaaatactacatgttctcaattataagtgggagctaaatgatgagaacacatggacacatagagaaggaacaacagacactgagcccaatcaaagggtagtgactgggaggagggaaaggatcaggaaaaataattaatgggtattaggcttaatacctaggtgatgaaataatctgtacagcaaacccctatgacacaagtttatctgtaacaaacctgcgcatgcacccatcaacttaaaaattaaattacaaaaattaaaaaaaataaaataactaaatkagtataattgaattgtttgtaacactaagaaaggataactgcttgaagtgatggataccc

SEQ ID NO: 854648 - DNA, 674 bp, Homo sapiens
gtggaaaacagtgtggtgattcctcaaagacctaaaaacagaaatatcatttgacccagcaatcccattactggttatatacctaaaggaatataagtcattctatcatagagacatgcacacatatgttaattacagcactattcataatagcaaaggtatggaatcaacctaaaaacctgtcaatggtagactggataaagacaatgtggtacacatacaccatagactactatgcagccataaaaaagaatgagatcatgtcctttgtaggaacatggatggagttggaggccattatccttagccaactgatgcaggaacagaaacctaaatactacatgttctcaattataagtgggagctaaatgatgagaacacatggacacatagagaaggaacaacagacactgagcccaatcaaagggtagtgactgggaggagggaaaggatcaggaaaaataattaatgggtattaggcttaatacctaggtgatgaaataatctgtacagcaaacccctatgacacaagtttatctgtaacaaacctgcgcatgcacccatcaacttaaaaattaaattacaaaaattaaaaaaaataaaataactaaatgagtataattgaattgtttgkaacactaagaaaggataactgcttgaagtgatggataccc

SEQ ID NO: 854649 - DNA, 674 bp, Homo sapiens
gtggaaaacagtgtggtgattcctcaaagacctaaaaacagaaatatcatttgacccagcaatcccattactggttatatacctaaaggaatataagtcattctatcatagagacatgcacacatatgttaattacagcactattcataatagcaaaggtatggaatcaacctaaaaacctgtcaatggtagactggataaagacaatgtggtacacatacaccatagactactatgcagccataaaaaagaatgagatcatgtcctttgtaggaacatggatggagttggaggccattatccttagccaactgatgcaggaacagaaacctaaatactacatgttctcaattataagtgggagctaaatgatgagaacacatggacacatagagaaggaacaacagacactgagcccaatcaaagggtagtgactgggaggagggaaaggatcaggaaaaataattaatgggtattaggcttaatacctaggtgatgaaataatctgtacagcaaacccctatgacacaagtttatctgtaacaaacctgcgcatgcacccatcaacttaaaaattaaattacaaaaattaaaaaaaataaaataactaaatgagtataattgaattgtttgtaacactaagaaaggakaactgcttgaagtgatggataccc

SEQ ID NO: 854650 - DNA, 611 bp, Homo sapiens
ctgacatacgaggtcagttggggaattttccacttggggcatgatgtcggtactccacaagtttcctattttgaaccattttttttctttttttttttgagatggagtttcactcttgtcacccaggctggagtgccatggcatgatcttggctcattgcaacctccacctcccaggttcaagcgattctcctgcatcagcctcccaagtagttgggattacaggtatgcaccaccacacccggctaatttttgtattattagtagagacggggtttcaccttgtcggccaggctggtctcgaactcctgacctcaggtgatcagccaaccttggcctcgcatagtactgggattacaggtgtgagccactgtgctcagctttgaagcatttttgatttgaggtttctgactagaaatgctcaacctgtacttctgaaaggaggatattcttttcagtgtaatccttcaggaccgattttgtactcctttcctaaggggaatgaagggtcwttcttcttttagtccagatattaggagcactatagtaatgcgatatttggttattatgactgcatggtgtggaaaggtcactggactaaaaaggaactgt

SEQ ID NO: 854651 - DNA, 628 bp, Homo sapiens
tattttgttatagcagtctgagcatattaagacaatggataggacaccaaaaagcaaaggcaacaaaaacaaaaataaacaartaggactacatggaactaaaaagcttctgcacagcaaaggaatcaacagagtgaaaagccaaccaatagaatcagagaaaatatttgcaaaccatatatctgatataaggggctaatctccaaaatattaagaaactcctacatcttagtagcaaagaaactaataacatgatttaaaaatgggttaaggacttgaatagacatttctccaaacagtacatacaaatgtccaaaaggcatatgaaaaaatgctcctcatcagtaatcaagaaatgcaaatcaaaacctcaatgagatatcacttgtcttgttttaagctataatgataacaatatgctgatatgatagcctctgttcgttttaattaattaatttaggaagacgggatatttaggttaacataaattggaggttatctttgacatctgaagattaaagaacaccttaatgagtaaatttgcttattttgcccctactgttggcatcaggtacacatctatatccacataaaagcagaatctgtcacttctgagttccgcttatcc

SEQ ID NO: 854652 - DNA, 469 bp, Homo sapiens
agtttaagcatgtatcttcaatattatccatccaggaccaaagtaagtcctgatgcaggaaataagggagtttcacagctttctgagcccctactcgacccaggaagcccagccagcccctcytctcaccactgcactgggctgtagaggaaggcaatagaagaacagcatatgtaaagttcctgagaatggaaaaagcatggggcctttgagtattgaaagaaggtcagtgtggctgcagagtagtgagaaaggggaaggggccgggagatagttgagttttgtgagacaggaaatagccaaatcatatggggtctttgtagaccatagtaaggagtttggattttattctcatgcagtaggaagccaatgaatgggttttaatagaaaagtgacatgttcacagatcaggtcaaactcatggcaatccagagtagccattttgcagtagggtctaaaatttgcttgt

SEQ ID NO: 854653 - DNA, 634 bp, Homo sapiens
gaataaagttggatccttcccatcggagtgaagcaatttccagagggattaaatggaaacaatttacattaaaataagccagagaacaatagatataattatgtataattcatatgatctctgggaaggaaaaaattttctaagcacaacactgaagagaggaacataaaaatttaaacttctatataggagtaaaaaaatcagcaaacaaatactaaagcttattaataaatttaaagtatcaatgacaaaatggtaaaaaaaaattggcaatgtgttaggcaaaggtaatatcttaatgtataaagcgcctttcaaatcaataagtaaagggcaaagacctcagttttgtaaacttgggtgctccttagggacaactcagtaagaccatgaggggggttaatgttgacaacttggtatagaagtatagagaactactgtgaaatacaaggaggtttcttggttggaaggaggtttaaaattatgttgagaagctccagggagtataattactcctttaattagtcattcaataaatgtttatctygtctgtactctctactgggtgccaggggcacagtggggagcaagacatggagcatatcttcctgttgtgaaagaatgtagattaagg

SEQ ID NO: 854654 - DNA, 679 bp, Homo sapiens
aggactctctacggcaagagtgtaagtagaaaagggaaggatgtccaggaaataatcttagagtactccaacatttagagcagctgaaaacaggagacagccagaagcctaagaagaactggccagtgaatgaggagtaatgcaagagggtgtggtgtcatagaaatcaagagaagagtttcaaagaggacaacgtggccaactggaagataaagtggtcaactgctttggatgctgctgagaggttaagtaagaggtcaaagtgatgattagctttggcaacctgaagctattggtgatctcggtgaggacagttttcgggtcatagagggggcaaacactagccctaagtttacttcctctcagttttgtcatcatgaaggaaggaaacttcagctactggagcaggtttccataggcttaccttgagtcacctgcccattcccagattcatagtaacataaatagctcactttagactgaatccttctacctgtatccattgctgtgtccaggaaagtcaattcatggagtaggagtctataaccaggaaacctcccctgtgcccgtgtttgtctgcaaaatggtatacaaacatttttctattcttaaaataagtcagggggagcaaacattttgtaaaaattatctggatccraggtcaaggcttaatctcagc

SEQ ID NO: 854655 - DNA, 628 bp, Homo sapiens
gaagcatgtttgattactcaaattataccagaaacagttctaacacttcatatccccctcaaaaatgtttatgtgtaaatatgatgtgaagccaaatgtgttgtctttacttactgttttaaatgacagatgttatagttttatatgcaactttgtctctttccagttgtgtcacttaagattcctccctctcaattttcttatctgtggaaaggagctactgacactatcagtatatgctgtatgccacacactgttgacatcaaaagaaacaagagataatgttgtgacatgccctgcaatttgtgacacagtatactgctgttaattttgttgtcattattattattattgtcagtatgactctgtcaaataacatggaaagggagaagaaaatcttttggtcacaaacaatataaagcttatttggtagcaacttaccatgacacaagagaaaatgacaagcttctttcctacatattttttaaaaattaaatgttatattttattaataaccayattttgtcagaaaagaggaaatgtgcacattaaaaatgcttcaaaccaaaattagtccaatgtaattagtgtgaattatcaaaataccggcatataagagtatatgtgt

SEQ ID NO: 854656 - DNA, 606 bp, Homo sapiens
gcacattaggctgatgatggtagtggggtcagtgttcagaattagtaagataggagtaatgaggactttttaattagaaggagaatttaagaatctgaacgtaaagcacttgaactaaagaaygttggagaaggccagcctttgataaagctcattaactgctcttcccaacattcactctgcccatagcatcaaaattattcttcctctaatctaccttggatcttgctgctccctaggcactcttattgcaggtagccaaactccactcacctactaaagttcacttaaaattctcctttcatttatttaatcagtatttatggagcatctattacataccatgtacaacgctagatggtgggaatagtggtataagttgtgcagtttcctagtctatttctgttcttagtgttattgtaaagcaatgacagaagcgtatcatagtggctcagaaaccaaatcgaaccagtaaagttactaagaatctagagaatccagattttgataaatacctttcaaaatgtgacatacgataagcaaacatctttcactaaatacctctgccctcattgctgaccttctcttttgaatttctaagtttac

SEQ ID NO: 854657 - DNA, 540 bp, Homo sapiens
tgttgaatagaagttgtgagagcagacatatggtttgctcctgattgtaggagaaaagcattcagattttcarcactaagaatggtgttggttgaaggttttctcacagataccctttaacaggctcccttctattctagtttgctgagaattttatctgtaatggatgttggattttgttaaatgcttttttgtatctattgagatgatcatatggtattactcttttagtccactaatatgataaattaattgatttttgaatattaaaccaatcctgcacttctggaataaacccatttgatcaccatgaaaccaatttactaaaattttgttaagaatttttgcaactattttcatgaaggatattgatctgtagtttgtgttgttaaagggagctctccatttcatctaagttgttgaattgattgtcatacagtataggtatgaaagtatagtatagatacaaaagaataatatgtgaatattaaaatattcacatattaagtatattcttaatagtaatattcacagattatt

SEQ ID NO: 854658 - DNA, 540 bp, Homo sapiens
tgttgaatagaagttgtgagagcagacatatggtttgctcctgattgtaggagaaaagcattcagattttcagcactaagaatggtgttggttgaaggttttctcacagataccctttaacaggctcccttctattctagtttgctgagaattttatctgtaatggatgttggattttgttaaatgcttttttgtatctattgagatgatcatatggtattactcttttagtccactaatatgataaattaattgatttttgaatattaaaccaatcctgcacttctggaataaacccatttgatcaccatgaaaccaatttactaaaattttgttaagaatttttgcaactattttcatgaaggatattgatctgtagtttgtgttgttaaagggagctctccatttcatctaagttgttgaattgattgtcatacagtataggtatgaaagtatagtatagatayaaaagaataatatgtgaatattaaaatattcacatattaagtatattcttaatagtaatattcacagattatt

SEQ ID NO: 854659 - DNA, 619 bp, Homo sapiens
acatctcttggacttctctgctcttccagggccattgccacygacctggaatgtgtccttatcgtttcacgccaggcttatggcagcagtcagtcacccagatgacctcctgacctctggcttatttcacccccactggactgttgttcctaaacacttctttcgtatgtcactctaaaatctgaccctggctgtacctttctttaactactccctgactgcgtgctgagagaagatgggtcttgtcttttcctgcctctctgcttttgtaaactgccatttctacctgaagtggcaactgaaatcatatcttcttcataaactgtctttggctacctcagttagaattccttatcccattttcctgaagcatttctttgactcttctttactgctcccccacccttttttttttctttgagactgaattttgcttgttgcccaggctggagtgcaatggcccgatctcggctcattgcaacctccgcctcctgggttcaagtgattctcctgcctcagcctcctgagtagctgggattacagtcatgtgccaccatgcccggctaattttgtatttttagtagagatggggtttctccacgttggtcaggctggtctt

SEQ ID NO: 854660 - DNA, 559 bp, Homo sapiens
aaacttctgcagagaaatatcataaagaaaaaataaatcacagcttcaggaaatgaaagacacacttagagaaatacaaaatgtagtggaaagcttcaacaatagrctagaacaagtagaagaaagaacttcagagcttgaagacaaggctcttgaattaactgaatcaagacaaagaaaaagaattttaaaatgaaattttaaaagaaatttgggtttatgttaaatggccaaacctaagaataattggtgttcctgcagaagaagagaaatctgaaagtttggaaaacttatttgaggaaaactttgctggccttgctacagatctagacatccaaatacaagaagctcaaagaacacctgggaaatttattgcaaaaagatgatcagctaggcacatatttatcaggctatctaaagtcaagatgaaagaatcttaagaactgtgagacaaaaacatcagataacctataaaggaaaacctatcagattaatagcagacttctcagcagaaatcttacaagccagaagccagaagggattggagtcccatttttaa

SEQ ID NO: 854661 - DNA, 620 bp, Homo sapiens
tttgaatacattattggtatctaataagaacctatggttggcccttttgtatagtaaatatacactgatgactattcatttgtattaaaattttcccgartagcttctgcttgactaaagtatttcctcctttctattttaggatttagccttcatataattaatatctattaatatatgtgtttgctttagggaagtgttgggattggcttccctggaaagcagaccctgtgatgtatcaagaaatgtgaaaggtttatttactgggaggtgaaatgaaagaaaagaaggcaggattgggcagagatagccatcaaacctgttgcaggctgacaaggtctaggccgaaacggggctgtagagcaagatttgcttggtaatgttatcaagagcttggtggaaaaggctaagtccttgctaccactgccttgctcaatttttggccagagctatcctgagaagtataaaaccttggccgccaacaccttgcttattccagagttcccccagatgggttttccttttacttgagaactaagatggactgtgaaggtgatcatagctgatggccttcagctaatggagttcatcatagcagcaagtcccttcttgaagggaca

SEQ ID NO: 854662 - DNA, 548 bp, Homo sapiens
atggttatgcagtatatatttatatcaagtaacaggttagaatggattgtatatattatttctacacacacacatgatttcatagtttagtgaattatttggcaacacttgagctactacttcagttcaaattctgaagagtgttttatggtgattcctttaaataattgccaaacatttgctttttttctaaagaaactacaataaagataaataagtctaagtgcaattatatcaatttatgagaattaaaaagttaaagtcctattgtttaacagtcaaactgtggagtgatgagagcttcatggtaatattatcattcattttataaattcaaacatattctggttagattataatgacctcctctttaacctctagatactgcatgcatataaagtagaaaactcagctgttacacagtaagcctctaagagcagtttattagaattcaaatattaaggctgaggactgacaattatgtggaagaacagcctaaagatgaygtgtaagagcataataaacataaatttaaagttgagaagtga

SEQ ID NO: 854663 - DNA, 578 bp, Homo sapiens
tctccattctttcccacaggcacactcccacctgcattccaaactgactgtttcatttacataattccaatagctttcactgccagcttcctgtttttgtaaactcatgtagaattttttagtttcataagaaacaagggccccagctcacaatcaccctctaccaacatagtttatctgcatcaaagaagacagggaagcttctgtccattggtttcccttcttattttagaaatagaagcttaaaaaacaccccagtggtttccaatccagagagttgcatataagcttttgactttactggttactggcttcctgttaactgaaagaagtttcaagctgagtcagagaagagaaccgggcccagcagtgattcattagtgttgctaatgacacccctaccgccaccaccatcactgctgcttttgctggggctgctggggcctccatgttagcctaatcctaagagagcaagaaactgaagccattgwcctgattttctcttccagatggcattgcagtggcagcagtgagcacaggccaagcaagactggccttgagatgaggaggccagatgg

SEQ ID NO: 854664 - DNA, 485 bp, Homo sapiens
cccagggtgggggtggagtgaagctggggtttcataagcacatagatagtagtgtctcttagcttccgtttaaatatgggggtagcgatgtggagggcccagaagtatcagagaggagagacaggctgctctgattgcctttgtaaaatgcacatttgagcttgtgcaaagccctgggcctgagctcagaaaaagcaaggccaggaatgaggctcttggttcagttcccctgcacaccctgggcggggaggggttgttagagtcatggaacccctattttttttttttttttgaccgggtcttgcttggtcacccagccagagtgcagaggtatgtgcacagctcactgcagcctcaacttcctgggctcaagcgatcttcctgcctcagcccccagagttgctggagctacagccccatgccactacacctgkctaacttttgtactttttgtagagacagggttttgtcatatcgcccaggct

SEQ ID NO: 854665 - DNA, 592 bp, Homo sapiens
ggatccttaaacgactacattttgaacctcactctcagtatgcatttccattacttttgttaattttgcttaggaagacaactgccttcacctggttgattttgcctaatttcatgggggcatgaatacagaagacagagaaacttggttccggtgaggaaatacggcctgttgatgttctgaactatggacttagctagagcctagatttttttcagtttgagggatttctgtcctcatgagtaagactatttatgaccagctctgttgtaggtttttatatctctacacataacaataaacttactatcttgtctttgactgggttgagtatatgtcttagatgtttcttccctgcaagagaaaactcagttccaagacacaagccactttttcatccctagctcattcacagtgacgggctgctgccaatcagtcaaaccagacaggagtctgtgtagcattacacacgctcatatcccagtrattgtccctaaaaactcccacatgggaatggaggccacattacctagattgacattccaattgtagcgtccaaacacttacttttaatttgcttcttaccagtact

SEQ ID NO: 854666 - DNA, 624 bp, Homo sapiens
atagggcgaggcatgggggaagggttgtgaagcttccatggcctccttgggcaaatattcagctttctkgaagctcctccaaactctgtcctttcgggcttttatggaggcttcattatataggcatgattgactaaatcattggccactggcgatcaacttaacttttagccttcttccccactccctggaggttggccagtgaggctaaaagtcccaccttctactcatgccttggtctttccagtgaccagtcccacttggagctacctatgggctgcagccaacagtcaatcattagcatatgaaaagtcatgactttgatgattctaaggattttatgagttgtgtatcaggaaacaggaaatggggttgaagaccatatgtacattttataatatcacacatgtcacaaaaggttaacaaaatccaatactctttgataataaaaactcaacaaagaagaaacagagaactacttcaatctgataacggcatctacaaatatcccccaactaacttcacacttaatggtgaaagatgaatgctttccccctaactctaagaacaaaacaaaaatgtctgctctagctacttctattcaaatttatactagatctccta

SEQ ID NO: 854667 - DNA, 643 bp, Homo sapiens
gtacctcacaaacataaacaattattatttgtcaattaaaaaataaaatttaaaaaagaatgtttacttttgaatactacaagcaattctgcaatagagttttttttatgtgattttaaatctatattatagattctctctagaacattcgtaggagttcgcatttttcacattaatatttattaccagattattttagtagcaatttaaactttctccagcagtgtaaaataatgaccatttcctcatatctccttcagcagtgaatagtatcagtaatttttaattggtactaatcttctaaatggaaaggttatctaagtattttaatatgcagttatggggacactaatgatattgatcttttacaatatattagtacgatccgtcacatttccttctttatcaatgccctggtcacatccattcattccttggattgtttatatattgtaggcactctacgtttggcagattaacccaccgtgtgggtcatttattcatctgatttacagccattgagtgcctactacttatcaggcacttttgaaggtagggagtgcagtggtaaacaaagcacagtatatgttctcrtgaagcctacattctactgggagaggcaaggaccaagtaatctaaagtc

SEQ ID NO: 854668 - DNA, 659 bp, Homo sapiens
aaaaaaaaaagaactcttacctattaaaaatatgtgtgtttttattatatactaatatatacttattctagaaaatcatggaaaataaaacaaaatagarataactagtattttctgtagtcctcctaaccagatactactactttgtacgtatagatttttgttgttgttgctgagacagggtcttgctctgtggcccaggctggagtgcagtggctagtcacaggcacgatcacagttcactgcaaccttgaaatcccaggctcaagtgatcctcccgcgtagctaggtctacagatgtgcgccaccatgcctggctaattttaaaaaattttttatagagacagggtcttgctgtgttgctcaggcttgtcttgaactcctggcttcaatcgatcctcctgcctcagcctcccaaagtgctgggattacaggtgtgagccaccatgtctgcccagtttctagatatgattttttaaagcatagtttgtaattgtgctatattctgtattttgcttttccctcctaatactgtctcgacatttttctgcttgagtagcctttaacaactttttaaatgactgtatattgtctgataaaccataatttacttaaccattttctgttttttttcctcaactacatagtgtttagtgaat

SEQ ID NO: 854669 - DNA, 411 bp, Homo sapiens
aattttataatttcataatggcccttcattactagcatccagtaaaggtcctcccatgcttttctaggtcaaataatctctatcactctaaatccaaagaacaaaaattattattaagagatggaagaaaattasactacatttgctgcagaaaggagctgtgcttagtccaagaataaaaacaattttcaaaagaaacaaaacaagtaaacattaaatgagccagtgtacaagatgcctgatttgccagcttttaggcttaccttgccttttgcgtttcccgtataaatatattcccctcgcctatcaaaagatgccacaacgttcaaatcggagtcatcgtccaccggcagaacaacatgtttggaatctgaaagggtcaacatgacaggagcagatttcatgggacac

SEQ ID NO: 854670 - DNA, 441 bp, Homo sapiens
attatgtgatgttagttaaagtgctattatggagaaaacacagtgatcattgcttccctttcattctttatctttagaaagaaattatagtgatttyttatgtcatatttttattttatgtaatgttactttcttctaaagattaatatttgaaagactttatttcctcatcttgatataaacattatgaaaattcctttctcaaatgtcttttaagaaactctaacaactgcattgctacatctctaatcagtcaaaattgatgtatatacagacatcaactggaaactaaatttatgttcatatacttactaattactgttggatattcatgccttcatgccatgcaaataaggcttaaaatgcaaatttttaaacataaattatgctaaaacattcacaatggattgtataatttgagaattgaatctacaaatgtgt

SEQ ID NO: 854671 - DNA, 441 bp, Homo sapiens
attatgtgatgttagttaaagtgctattatggagaaaacacagtgatcattgcttccctttcattctttatctttagaaagaaattatagtgatttcttatgtcatatttttattttatgtaaygttactttcttctaaagattaatatttgaaagactttatttcctcatcttgatataaacattatgaaaattcctttctcaaatgtcttttaagaaactctaacaactgcattgctacatctctaatcagtcaaaattgatgtatatacagacatcaactggaaactaaatttatgttcatatacttactaattactgttggatattcatgccttcatgccatgcaaataaggcttaaaatgcaaatttttaaacataaattatgctaaaacattcacaatggattgtataatttgagaattgaatctacaaatgtgt

SEQ ID NO: 854672 - DNA, 543 bp, Homo sapiens
ttgattacatctcccaagtagttttaattttctggcttcctggagtttttcttctatgattatatagcttaatttagagcaaaatcatcaatggtatatctgtggagatttctgtaactcttatgtttaggtccctcttctctagcattttgtttccaaaattccacctactttatcccctcgtatgtcttacctgtctcttcaactactatgctctgcctgtgatctctttccctgcatgtggtacaaaaatggcctctcagtggaagttaaggtgatgataaggctctacttcttagtttttcctaagttatcacaattatgcactattattgtctaatatttggaaatagttgctttatatacttagtaaagctttttaattttttaaactagaaaagaattacagcatcagtgcttcatcaccacggaaatggaaatttttcatttgttaaaaataaaagctaaawattttatttagctagtccactgatgagcccctgggtattttaaatctgattcaaaccatttctttatgccaaa

SEQ ID NO: 854673 - DNA, 541 bp, Homo sapiens
gttggcattcatcctgtttggtgttctctgagattcctggacctgtggtttggtgtctggcatttatttgggcaaaattctcagtcattattatttcaaatatttcttttgtcctctccctgtctcttcttcttctccttctgggatttcctttattaatattttaccttttgtagttatcctaaggtacttggatgtttggttcttttttcctcagtctttgttctctttgatttcaactttggaggtttctcttgagacagttgtaagctcagtgattctctcctcagctgtgcccagtctactgataagcccatcaaaggcagtctttatttccgaaatagtgtttttgatccctagcatttatttctgattttttcttaagagttttaatctctctacttatattgtccatctgttcttgtgtactgtctactttatccattagagcctgtagcatattaattatagtggttttacattcttggtctgataattgyaatatccatgttatatttaagtttagttttgattcttgctc

SEQ ID NO: 854674 - DNA, 616 bp, Homo sapiens
tgaagttgtaacagtgaattacrtaattatctagtaatatagtgataattcaggaaagtcttaggtgctgaatttttgcctgatttaatcttagcgggtaattgttttactctgagaattgaataagatacattttaaactatttttatatttttactgaaatcacggttatagttctaattaaaaatgtagatattatggactttacatttgattttatcattaaaaatacctaaatccacacacttaatggtcaataaaatgtaccagtgttactattgtttggtttttacagaatgccctggtaactgggctgcccaatggtaaagacactgctgaaaaagaagaaaactaaacacaatctactcaacctctgatagtgctactgcaaattttaattgacatactatttgttaaatatacaatatcaagttttcattaaacagatgaattaggtgaaaccatgcacttcaataaacgatgtcatttttgtctgactcttttgtaactcaggaaattgaaaatagaatttagtccaagaatgtctatttttatattagacttaaagttgttggcagaatgaatgaactatttcatatttgagagaataattaaa

SEQ ID NO: 854675 - DNA, 556 bp, Homo sapiens
gacacagcaggtcggaacatcccacaccccaaagacagactacggagcagagccggcttccgcagsggaaactcacacacagcccattcccattcttgccgaatatctcagggactctgtgcggtaagggctgcaggtgtgacctcactctgcgccaggagatccgggtggtaggcagtgttttggagggtgctcgtccagacgagagagaggcatctaagggggctcataagcagatccatgagacacaggacacctcagagaagggccgacaaaccccacaaagtcgctcccatcctggagagcagcttggagaggacggggcgccgcagtctcctcccagcccacgcttcggcatggagagcagcttggagaggacagggccgccgcagtctcctcccaacccacgcttcagatgggtctcgctgcagcctgtggtgctcatcaggctaagcagcaagaggaagcttcccagggcaggagttctcctttcacagcaaaagtggcacaggcaatgcagcagggctacttcagcccagggctcaggaaccacggg

SEQ ID NO: 854676 - DNA, 600 bp, Homo sapiens
agtctatttacattgatttcaacttgtgaaatatttgagctggaaaatatattttgggttttcctggttcaatggtttcaacctaggctgcagattagaatagcctacagaacctctaaaaatacccatggggacgggggacaaagcagtattcaaaccaattaaaacagaatctctgtggggtaaggctcagacctcagcactcgtgaaaggtcacaagatgattctggtgtgcggctaagttaagaagcgctggcgtagttcaacccactcataccatcctgactaagacaggttgtagtcccttagtccatttgccatttgggccggttataacaagattcctgggactgggtcatttattaaaacagaaatgtattttctcacagttctggaggctaggaagtccaagatcaaggtgccagcatccggtgagggccttcctgctgtgtcctcagatcacagaaggtgggaaaggggaagagggagccaatctctccatcaaggccctttatagggtacctartcccattcacaagggaggagccctcagggcctaatcacctctcaaagaccccacctcttttttttttttttttg

SEQ ID NO: 854677 - DNA, 528 bp, Homo sapiens
tgggaatataatttgctgctgtactgcacacttaaaaaatagctaaaatggccggatgcagtggctcacgcctgtaatcccagcactttgggaggccaaggcaagcagatcacttgaggtcaggagtttgagaccagcctggccaacacagtgaaacccccgtctcctctaaaaatacaaaaaaaattagctgggcgtggtggcgcacacctgtaatcccagctattcggaaggctgaggcaggagaatcgcttgaacccgggaggcagaggttgcagtgagccaagaccgtgtcactgcattccagcctgggcaacagaaggagagtccgtttcaataaataaataaataaataaataaataaataaataataaaatgattaagatggtaaattttacattatgtatattttrccacaatttaaaaaaaaaatctaagttcacaaatgcctggctctaccaagctgctttgagatttcatcagaaagagatttctgaacatggtgggttggggcaaatgattatctg

SEQ ID NO: 854678 - DNA, 475 bp, Homo sapiens
ctcccggctgtcttaccatgatattggaggccacaactgtagggtcgtcgcacaccgactcgatgaaaaacgcctggtggaagtgaggtggggatgttagaaaacaaacaccacgaaggatcaaccttgccatcactgcgatgtcatcacccggacaaggcggaagcacgccacccaccaactcccaaacacaggaaagcccacctcctcactgcagcctctggaacgccccatggcccccaagagccctaccacacaaaggcccaaatttaaggccacaaaacgtgggcagcaggaggggagggaccgagcaggactaaggaacatgggcagcaggaggggaaggaccaagcaggactcaggccgcttcctgargccttttcctctctcccgagccctctagcacaacacaagacgctcagctcaccttaaagtcattttctttggcaaaatgaaggatcatgtgtctcctctc

SEQ ID NO: 854679 - DNA, 615 bp, Homo sapiens
tgtttttaacttttgcctaccttgtcggctcacgcctgtaatcccagcactttgggaagccgaggtgggtggatcacctgaggtcagrggctctagaccagcctggccaacatggtgaaaccctagctctactaaaaattcaaaaataagccgggtgtggtggtgggtgcccgtaatcccagctactcaggaggctgaggcaggagaatcgcttgaacccaggaggcggaggttgcagtgagccaagatcgagccaccgcactccagcctgggtgacagagtgaaactccatcttaaaaaaaaaaaaaaaaaatgcctacctaaatctaacgtaaaactttgagctcactctgaaatatattcatatttacttacaaggggaaaatgccctatgaactgaaaattatgtgtattttagaacatacacaaaagagaagttaaaagaaaatgagaaaaataaatagatgtgataatactttatttcattactccgattaatagtcttaccaaactcacccgaagactgcctgcaaagttcttgaaggagcttgggattgtaggtgcttttgatgttttattcagactggactagatgctttaaccctgaaggtgcat

SEQ ID NO: 854680 - DNA, 615 bp, Homo sapiens
tgtttttaacttttgcctaccttgtcggctcacgcctgtaatcccagcactttgggaagccgaggtgggtggatcacctgaggtcaggggctctagaccagcctggccaacatggtgaaaccctagctctactaaaaattcaaaaataagccgggtgtggtggtgggtgcccgtaatcccagctactcaggaggctgaggcaggagaatcgcttgaacccaggaggcggaggttgcagtgagccaagatcgagccaccgcactccagcctgggtgacagagtgaaactccatcttaaaaaaaaaaaaaaaaaatgcctacctaaatctaacgtaaaactttgagctcactctgaaatatattcatatttacttacaaggggaaaatgccctatgaactgaaaattatgtgtattttagaacatacacaaaagagaagttaaaagaaaatgagaaaaataaatagatgtgataatactttatttcattactccgattaatagtcttaccaaactcaccygaagactgcctgcaaagttcttgaaggagcttgggattgtaggtgcttttgatgttttattcagactggactagatgctttaaccctgaaggtgcat

SEQ ID NO: 854681 - DNA, 656 bp, Homo sapiens
ttaggactatacagtaggctttaaatatacttacaaygttgtgtttcttaacctgagtggtaggtgttttccttttgttataattctttaaattatatatgcctgtcatttacatatttttaatttacaaagttcattagagaagagagctatcttattaaccagaagacagtataaggtctattttgaaagacggatgtctcttgagctaggcttaattatccctcaacaatgcccatgtcttaattcccaaaacccatgaatatgtcacaaagcaaagtaaattttcagacgtgactaagttacagatcctgagatcaggagattcttctggatcattgagggtggcctcaataaaatcacaagagcccttgaaagtggtagaggtaagcagaagggagcgtcagaggaagatatgactataaaaaaaagcacagagagttacaagtcttttggctttgaaaatggaggaaggccacaggagccagggtgtgtaggcagcctttagaagctggaaaaggcaaggaagcagattcccgcttaggcatcctaaaaaggaacacaatccaggcaacaccttgatttgagtccagtcagattttttgaacagctaacacccagagatctaagatgctaaagtgttgtagttttaagcc

SEQ ID NO: 854682 - DNA, 603 bp, Homo sapiens
tcccaaaacccatgaatatgtcacaaagcaaagtaaattttcagacgtgactaagttacagatcctgagatcaggagattcttctggatcattgagggtggcctcaataaaatcacaagagcccttgaaagtggtagaggtaagcagaagggagcgtcagaggaagatatgactataaaaaaaagcacagagagttacaagtcttttggctttgaaaatggaggaaggccacaggagccagggtgtgtaggcagcctttagaagctggaaaaggcaaggaagcagattcccgcttaggcatcctaaaaaggaacacaatccaggcaacaccttgatttgagtccagtcagattttttgaacagctaacacccagagatctaagatgctaaagtgttgtagttttaagccactaagtttgtggtgatttgttagagcagcaataagaaacatatttcagaacattcagcatactattttattgtaggcctccttcatgtctaaatgacacttgggaacagctgaaaagacaaaaagaacaaattaaacaaaygctgctcctgccaccaccatcatgactgctaccatttggtttgcgcttagta

SEQ ID NO: 854683 - DNA, 373 bp, Homo sapiens
aaattatactttgtctctttgcttatttgtgaattaattaagcagaaatttttcttaaaattaaggacaatgtctattaataattttaattctcatcacccatcacagcacccagggcttgtttggcactcaatgcatacttgttaaatgcatacatctaatgtacaaatgcataagtagtggaattatgggcatctggcaggcaaagtggacagatattttgttacaggcactctttcatttgtgcttttaaaattactrtgatgatgatgtgaaaggctggccttattttagtgcaaattctaatctaattattttcttctgactcgcaggtaactttcttctcctgtttaatattgctgatatattgata

SEQ ID NO: 854684 - DNA, 592 bp, Homo sapiens
gtggtggctcatgcctgtaatcatagcactttgggaggccgaggcaggtggaccacttgaggtcaggaggttgagaccagcctggtcaacatggcgaaatcctgtctctactaaaaatacaaaaattagccaggcatggtggcagatgcctataatcccagttactcaggaggctgaggcaggagaatcacttgaacccaggaggcggaggctgcagtgagtcaagatcacaccactgcactccagcctgggtgacagagcaagactccatctcaaaataataacaacaacaacaacaacaacaacaacaacaacacaatggcctctaagtgttcaagtgaaaggatgagttacacatctcttgctttaaatcaaaagctagaaataattaagcttagtgaggaaggcatgccaagaactgagatgggccgaaagctaggcctcttgtaccaaacgttagccaaattgtaaatgcaaatgtaaatttattgaaggaaattaagagtgctactcttgcgaacacataagtgataagaaagcaaaacaaccttattggcaatatgtasaaagttttagtggtttctggatagaa

SEQ ID NO: 854685 - DNA, 591 bp, Homo sapiens
atctcatgtctcatcaaccattcaacagaagagaaaactgaaactcagcaaggttaaatgacttctccaggtwttcgtggataataaagtacaaaacagatctaaatggaaaaactggaaaaaagtcagtgatattgattgtactacaggataaaatccaacctccttagcaaatatgattaaattcttttatcttcaactttattttcaaccaactaatccccttggtccttgtgctctggccacacggaatgacttagagttctcagaaattgctttaaatctcagcatttttgcccaagcctttgtctctttcttaggtgacttcctcaataccccttcctaatctagaaaattccttcctacacatcctgtcatcccatccaacttacttggagataatttaatcaccccttcctttgtactacttttggacctcagacattatatatatacatatatattcaataaatacttgtgggatggctatatatatttatatatatatatatacatacaccacatgtatataatacacacacacacacacacaccaggtcctatacactaggttttgttttttctttcttt

SEQ ID NO: 854686 - DNA, 422 bp, Homo sapiens
tggtggatctcctgagttcaggagttcaagaccagcctggccaacrtggtgaaacactgtctctactacaaatacaaattagccgggcatggtggtgtgtgcctgtagtcccagctactcaggaggctgaagcaggagaatcacttgaacctggaaggcagaggttgcagtgagccgagattgtgccactgtactccagcctgggcgatagagtgagaccctgtctcaaacaaacaaacaaaaaaaaaaaaaaagagagaagtgacatgtgaactgaataagggctcatttagaagacagaatgccaggattttcctgaaatttccagagcttcccaagtatggtaagttctatgctctcatccttccaacggatattcctatacagtagagactagagagctagagctgcatttctctgac

SEQ ID NO: 854687 - DNA, 623 bp, Homo sapiens
aaacatgtgcttgatacagcaatggaggatccagcattgcacggctaatatttttagctctcggcagcggaggggccttctctcccagggtcttttggccagtcctcaatccaggtgagggaactgtagagccctaagggagcctacttattctgaagacaagtgggaagtttagtggcaaaagttctggttggctccttccatgaagtgcatgccagaggagtagcccaggcatctgaaggaagggcatacacacactcatccaagcacccagatgtttggaggacaagatgccgggctgtctggctcaatccactgctgaattatttaacacatatttgtgtctggggctgatatggtttggctgtgtccccacccagatctcatcttgtagctcccataattcctacatgttgtgggagggaaccaatgggagataattgaatcatgagagcagtttcccccatactgttctcttggtagtaaatamgtctcacgagatctgatggttttataaggggtttccccttttgcttggctctcattctctcttgcctgtcaccatgtaagacgtgccttttaccttctgccatgattgtgaggcctccccagccatgtggaac

SEQ ID NO: 854688 - DNA, 514 bp, Homo sapiens
ggcaattctttaccaaatctgaaggattccttgcacttttttatgtttctacacctctctgtgacatctgacacaactgaacattcttctttagtgaaacactaatttcttgcatccagcataaccctcaccattatacttttactctattggctccctccctggccacttttaaagtttaaaaacttcaaaccttcttaaacttggggagtttaaaactcagcccttttctatcacatcttttctttaaacaaatcttcattacatggagcacttgccaaatctcattctccagccaacttctcataactgtgtgctagctacctctgcttatctctgcagctcctcttctaccatccagccttctactctaagatgttgctacagtaaatggtctacaacttgcactcagctggaaactcccctcttggagctcccccatccacctgcttttggaaytcctcctcatccttatacatcttgctaaattgtcatacactctacaagtttcccc

SEQ ID NO: 854689 - DNA, 633 bp, Homo sapiens
aacatggccactcaaaagaaatcttgcaagattctggcttgccctttgtattgacagattcagatctcaactatatcagacctaactcttaagtctctttgttagggaccagcaataaattacttgaggtcaagttctgtttatacagtggactgttctaagagaattaccttcttgacttaatagcttccttttgggtgacatttctccctgaaagaagacaaattgtctaaggtcagtctgcagatcagttccgagtgtaggaggaaattgtagtggatcaacaaaattgcaccagttctaccaaccagcattaggcagcatgccgccagtcagaggcagaccctgagggactacagccagagctccttgaaagagcagagttttcaattctttctttttgggctgctcttgacttttattttctcaggctccaccaaaaaacaaaaacaaacaaacaaacaaaaacaaaaaacaacaacaaaaagcccaaaacaaaaaaactcctgcattaacaatgaaataaggtctattaaactcttcattcagtgctgagttgctttaaaagtttgtttccctccatctaccaaggctaatttgaaagttgaacraaaagagagggtgaatttcaga

SEQ ID NO: 854690 - DNA, 221 bp, Homo sapiens
cccaaactatggtaacccagtttgtttacttttgttgtttgtgctttaggtgtcatgtcygagaaatcattgaaaattcaatgtgataaagtttttactctacatttctttctaaaacgcgtataattttagcttttacattaggtctttgaccatttgagttaattttttgtaagtggtgtaagttaaggatccaacttcattcttttcagatattcagt

SEQ ID NO: 854691 - DNA, 515 bp, Homo sapiens
  misc_feature 304: n = A,T,C or G
tctcaatctcctgacctcgtgatccacccacctcggcctcccaaagtgctgggattacaggcgtgagccaccgcgcccgaccaatttaaatgatattcttaaggagaacacagagaaagagatcccagtcaggttcagtggctcaggtctgtaataaccagcatattaggagcccaaggcaagaggatcacttgaggccaggagtttgagaccagactgggcaacatggcaagaaccccacctgtaccaaaaaaaaaaaaaaaaaaaaaaaagaaagaaagaaagaaaggaaaatgcccttcanataaactacttttctcccctgcttttctccttatttacccttaccaccaccttgacattcatatatgcgcacgcgcacgcgcgcgcgcgcacacacacacacacacacacacaacacacacacaacacacacacacacacacacccctaactaaaccattwcctttttgctccttgagttcaggcattaaatgatactgctaaattcaaaa

SEQ ID NO: 854692 - DNA, 600 bp, Homo sapiens
ggatgtagaaattcctaacttcacaggaattttgacctaacctaaagccagctctcttgtagaaaacaaaggcagtgattacgcattcttaaaactcaagtggctgagcccggsgtggggcttttcttcatacagaagccactgctacttattaacacaacgtgctgatagagggacctcgggggcacctgtcagctgagggcctgaactcttacacaaaacctcccacagagccacaaattcactcaaacacctgaggttgtttgtcacaatacatattagaactaaaccatcaaaaggaggaaggatacgcctttccccatgcttctggctactctttccttactgatccaagatgtcaaccacatctagtgtgagtctcctgcttacccttttcactggctgttcttaaagggacctgaaattaggataaagattctattagttgaagccaggtgcagtggcttgtacctacagccccagctccatgggaggcttcagtaggaggatctcttgagcccaaatgtttgaggccagcatgggcgaaaaaagaaaagagaaaagattctattcattgattcaatttgtcaaaagagtttt

SEQ ID NO: 854693 - DNA, 609 bp, Homo sapiens
tccagtcttaggtatttcttcatagcagcatgagaacagactaataaagttaattggtactgggagtagggtgctgttataaagatgcctgaaaatatggaagcaactttasaactgggtaacaagcagaggttgggacaatttggagggctcagaagaagatagaaaaatgtgggaaagtttggaacttcccagagacttggagggctcagaagacaggtaagatgtgggaatgtttggaacttcctagagacttgttgaatggctttgaccaaaatgctgacagtgatatggacaatgaagtctgggctgagttggtctcatggagatgaggaacttgttgagaactggagtaaaggtcactcttgctatgcaaagagactggcagcattttgcccctgctctagagatctgtggaaatttgaacttgtaagagatgatttaaggtatctggcagaagaaatttctaagtagcaaagcattcaagaggaagcggaccatcccccctttgtatctaggaagtaacaaacttgcttttaattttacaggctcacagacagaagagatttgtcttgtctcagataagactttggacttggacttttggtt

SEQ ID NO: 854694 - DNA, 598 bp, Homo sapiens
tttaggtcatagcgtatggggtgctcaactttagaagacaatgctgaattttgtaccagaaagttgtgtcagttggcactttcattgccaaaaataggagaggtcagtggtgcaatacttctcaagtatttgatgttgtctgatttttttttttttttttttgctactccaaggagtgtaaaatgaaatttcattgttgtcaaacattgctctcactaatcatgaaagtgatgagactgagaatctctttttatggtgatcttttctttcctgctggggaatgactgcatatatttgctaacttttctacagggtttcatggtagattgttttagaaatgaccccagtcgtttgtctcatcccaaaggtctgatatcaattttaccctcaagagttagggtctgtatttcctcccattgactttgaactgacccttgacttgatttgacaaatagaatgagacagaagcaatgctgtgtgactttggggcccagacttagaaagctcttagtacttctgttttcacttttccaaagcctgagccattagttamagaagcctgactaacaagctagatgaagaagtcacatggagataa

SEQ ID NO: 854695 - DNA, 546 bp, Homo sapiens; identical to SEQ ID NO: 838167

SEQ ID NO: 854696 - DNA, 599 bp, Homo sapiens
ggagagagtgggatgacatttcaaagtggtgaatgaaaaaaaaaaaatctttcaatctagaatgytatgtccagcaaagttgtctttcaaacatgaagaaaaaatgaacactttctcagacaatcaaagctgggaaatactgtaaacaccagacttgtgttataagaaatgctaaagggagtttttcagtctggaagaaaaggacactgatgaacaacaagaaatcaccactcacttgggaatagtaagtacacagacaatacagtataaaccatatgttaggccacacaaaaacattttttaattgaaacaatatcaaataccttttctgaccaaatggaataaagctagaaattagtaagaggaatcttggaaactatataaacatatgtaagttaaaccatatgcttctgaatgaccactgggttagtgaagaaagtaggaaggcaaataaatctttcttgaaacaaatgaaagtagatacataacacaccaaaagctatggaatatagcaaatgtagcagtaagagggaaatttttagcaataaacacataaatctaaaaagagcaaagcttcaaataaacaatttatatttgca

SEQ ID NO: 854697 - DNA, 443 bp, Homo sapiens
aaaactgtgaagtacaatccaaaaataagttagtcattctagtccctgggcctctgtctcctaaaagcgtgagaagtctcctgagaggggctagctagtgtggttgggcatgggagtccttgtggctgtggkgggggagggaaagggcacattcatgaaatgaacccgaggggacaacccgcagcaaggagagagaaatgtgggttttgcatttcctcttgatctctgatgtatgaaaaggagctctccatggggttcctcttgtgatggacaggaaatgcccgctaggtcgcctgttgagaacaaaatcgatgcattgaaaggaacagcgggagtgcagaggaggccagactgtactgcccacagggtaagcagggtgggaaaccagtgcacaaaacgtggttacaactgttctgttcgtttgttcagttacattcaaaata

SEQ ID NO: 854698 - DNA, 652 bp, Homo sapiens
aggcccggggactggaactgggagtggttgggaaccagacctgctatgggcatgggggctgcagacagagggagayaggtgagcaggcgaggcctcgggagagcgtggggcgttgaggcaggccaacctgggcccgagtcccggctccccttttcctcctcaatgactgaccttgaacaagttcttagtccttgtttgtaaaaagagcgacacatagattcccattctcccaggagataaagctgtcaggagatgtgggtaccagggtgtctgtgggagggtctttagccctctgtgttcaaggaggggacccaggtgtctctgaagttacttcaagaatggtcagtcctgtgctaggtggagttgctggcctaggttctgaacaataaagacctcggagcctggggcagggtcatgcccatcctgttggggtgcagctctccagagacccacaagacacagtgagcagggagcctgtgacccaggaaggtgaacagatgctgggcgagacagtgtggcttagcctctgcaaggccatttgaagctaagaaacttccagttcttggacctctcccagaggctaaagaccaggggtctagaaaggagggggtgctccagggtgggggtcttctgacagttcaaaggatccaca

SEQ ID NO: 854699 - DNA, 712 bp, Homo sapiens
ggggcaagtatcaccacccataggatccgcatacmcagagggccccccagggaaggggaagagttctactacaatcgtattgctgtaatgtgtaatttaagtaacaaaggtgctgtgtttcactgggggcactgttattgatttggaatatgtgctgacaactgtctggtgggagaaaccccagagtgtcattggggaagccatttaaggcccccaaacaaagggggggccataaggagtccagctaccagtatgacaggttccccgtatacgctgttccaggcatatcaggtaggatacaaaagcttttgactcattgcaagggtggatttcgccttttgttgaatttgggcaagaatagactgtttagtttggttaaaagaagttcaggttgtactacaggtgctattctcccaaccccattggtagcgacatagccacttggaaatattagcagagataatattctaaggtaatccattccctgcagcctctggcaactcgacacataccagcactgactgcggttgagctcttttgcagcagtggctaccaggtaataaattcattctaggcctcagacacaaagacacaagacacatcagtagataggtcattccctgtaatagcaaaagtggaggggaacatgatattgttttttcatatttaggaaattgtactatgccttcattttctgctcccatagctacaa

SEQ ID NO: 854700 - DNA, 587 bp, Homo sapiens
cccattgaagaggaatggattgggatcctgctttaagaaacaatctggccacattctggcaaagcagctgtgctgcagtggtagaacccttcctcctctggactgtttgcactgtccaaagmccacaggtagaaatggctgagttgaccatacagcagagagggtggcctgcccctgtccccaggggctctgtctcaggcaggctccaccctgttgtcagtggctggctggaattccaagccagtgggtcttatcttgtgaggtgccatgaaagtggggcctgcagaactgtgttgcttgggccccctggacttatcccccttcatagaggagagtaggaacctcccaccttgccagggatattggggctggagtatgtaaaactcctgggtctctgtgcatgcctgagcagctgctctgccaagattctacacaactctgtgttggaccaaggccctagtgatgtgggctcatgagggtatctcctgacccagggttgcaaagatccgtgggggaagcatggcttgccagggctgcacaatcactcactgctttccttagctggggtgggggttcccttggcttca

SEQ ID NO: 854701 - DNA, 608 bp, Homo sapiens
tgtttgacttttctgttaatatttaagtatatatgctaattcaatatatagtagacctttaaacaatacaagtatgaactgtgtgggtccacttatatgtgaattttttcaataagtataattgaaattttgttacagatttgcaacaatttgcaaaaccttacagacaatccacatagcctagaaataccaaaaaaagttaagcattttatgaacacataatatatacaaatctattataaaatgttaagctttatcaaaacttagacacacaaacacttacagaccatacatggccccatttacagctctgagaaatgtaaacaaacatgaagatgcagtattacattataactgcattaaactaaccacagtacatactgtactacagtactaattttgtagccaactcctgttgctattgtggtgagctcaagagtggctcatgtgacactaatcatctccatgtgagcagcttctctctacagtaaattgcagattcagcaaaaagtgatctctcatggttctcccatrttttcgtcatgtttagtgcaataccataaacctcgaataacaccatgggacccatacaatttgccactattaat

SEQ ID NO: 854702 - DNA, 594 bp, Homo sapiens
acgtgtgtgcatgtggatagataaatagacagacagatagacagattgatacatagcaataatccagatagagactctggtagcttggatctagattgtagtggtacaggtagtggtagagagagataaagagagacagaaagagagagatttcttttaagaaaccaggttataaaattgtgggagtgggcaagttcaaatctgaagggaaggctagcagggtggaaattcaagtatggattgatgattcagttttgagactgaattttgcagggcagcaggctgaaaattcaggcacagtttctatgttgcagtcttgagaattccttctttgagcaaccttggtccttgtcctaaggccttcgactgatgggatgcgactcactgatgttatgcagaataatctgctttactcaaagtccattgattttaaaaattaatcacattgaaaaaatattttctcagccacatctagactttttygaaaaagcaacaaacatttttggtgtttaacagaactaatgggtaccagggaccagtaagatgccatttaaaattacccatcacatcttgatatattatagattattctaa

SEQ ID NO: 854703 - DNA, 627 bp, Homo sapiens
atttaaagatataataccgtcttcatgaatttggtagattatagaatcaataaccactttgagtgattcaattgcttttctaaacaataatgaagttaaaaggaagaagaaaatttccacacataattgctttcttaggacaattgaaaaaatcatacaaaagcatataagtaaattctttgtgactgtgcatgaaggacataaaccaaacataactagaattaatcaatgacagtcaaattacagctgttttacacaatagtaaacacatgtttatgcatttaaaaaatgccagacaggctgtggtactagcttatgtttccttttagtcaaaaaaataaaatggcatgtttatgctttgggaataaatttatagaagttaatatttttaaggcaaacctctgtgtgatattgtgaggttagataatgactctagttatcatttcccaactcacactgtagcttaaaacataaaaacataagtacctggaccattggaccaaagraggtgaaggagggatgctaaataaagaggaaccactgagatagggctttttattctgctagaaaatgttagctatcattgattgagaatttactctctgttagacacaaggctaagaattt

SEQ ID NO: 854704 - DNA, 488 bp, Homo sapiens
tctgtatttacagccgctccccatcacttgcattaccagccgagctccgcctcctatcacatcagcagcagcattagattctcacaggagcgtgaaccctattgcgtgtgagggatctaggttgtgggttccttatgagaatctaatgcttgatgatctgtcattgtctcccatcacccccagataagatcatctagttccaggaaaacaagctcagggctcccactgatcctgcattatagtgacttgtataattattttattatgtattaataatagaaataaagtgtgtaataaatataatgcacttgagtcatcctgaaaccatccccccacccctgacccctaaccactctggtccatgaaaaaattgttttccacgaaactgatccctggtgccaaaagggttgaggactgccgccctagaggatgcatgagataaccgaagatagtgyctggcacatggtggtatctcagccccagctcct

SEQ ID NO: 854705 - DNA, 502 bp, Homo sapiens
tgcactttggagacactatttaggtaatgccaccatccaaagtcaaagggtagggagctctgaggtcaggaggggcagggtatcggagctgtgaggtcaggakggggcaggtgtcccctgggtgtgtggagctgtgaggtcaggaagggcagtttcccctgggtaggagaggggctgtgaggtcaggagggggcaggtgtcccttgggtgggaggagctgtgaggtcagaatggccaggttccccttggatatgtaagctgtgaggtcaggatggagcagccacaggaggccttcccaggagctgaccacgttttcttccttgacccaagttgtgattaccctggagttgctttattatcattctttatataatccattatattttatgcactcttctttatttagcttaattaagaaaataaaaagaacttagagagtgaaaaagacaaggccaggtgtggtggctcacgcctgtaatcccagcactttaggaggccgagg

SEQ ID NO: 854706 - DNA, 629 bp, Homo sapiens
gactttttaaagcaccatgaaacatgctcagagatgatagatcatcaatatttcccccccgttttaggatcttcagcaaagcataatgtgtttttttctatcagaacttaaaagaacactttgttcttccacaatctttttttcactgtatgaacttaagactgttttttaaaaataagctcctaggatttccctttacaatccaaatagttccctgacctagtctaaaagtcctaataaagagttattttgagattgacttttcttttgtagttttatatttattgcgttttaagaaagcatctcccagaaacattgcattaacaaaataaaatctaggccgggtgtggtggctcacacctgtaatcccagcactttgagaggccgagccaggcggatcgcttgagcccaggagtttgagaccagcctgggcaacatagggagacaatgtctctgcaaaaagatataaaaattagccgggcatggtgacacgcaacttyagtcccagctacttgagaggctgaggcaggagtatcgcttgagcccagaaggcagaggttgcagtgagttgagatcgcaccactgcactccagccttggtgatagagggagaccttgtctcaaaaataa

SEQ ID NO: 854707 - DNA, 629 bp, Homo sapiens
gactttttaaagcaccatgaaacatgctcagagatgatagatcatcaatatttcccccccgttttaggatcttcagcaaagcataatgtgtttttttctatcagaacttaaaagaacactttgttcttccacaatctttttttcactgtatgaacttaagactgttttttaaaaataagctcctaggatttccctttacaatccaaatagttccctgacctagtctaaaagtcctaataaagagttattttgagattgacttttcttttgtagttttatatttattgcgttttaagaaagcatctcccagaaacattgcattaacaaaataaaatctaggccgggtgtggtggctcacacctgtaatcccagcactttgagaggccgagccaggcggatcgcttgagcccaggagtttgagaccagcctgggcaacatagggagacaatgtctctgcaaaaagatataaaaattagccgggcatggtgacacgcaacttcastcccagctacttgagaggctgaggcaggagtatcgcttgagcccagaaggcagaggttgcagtgagttgagatcgcaccactgcactccagccttggtgatagagggagaccttgtctcaaaaataa

SEQ ID NO: 854708 - DNA, 629 bp, Homo sapiens
gactttttaaagcaccatgaaacatgctcagagatgatagatcatcaatatttcccccccgttttaggatcttcagcaaagcataatgtgtttttttctatcagaacttaaaagaacactttgttcttccacaatctttttttcactgtatgaacttaagactgttttttaaaaataagctcctaggatttccctttacaatccaaatagttccctgacctagtctaaaagtcctaataaagagttattttgagattgacttttcttttgtagttttatatttattgcgttttaagaaagcatctcccagaaacattgcattaacaaaataaaatctaggccgggtgtggtggctcacacctgtaatcccagcactttgagaggccgagccaggcggatcgcttgagcccaggagtttgagaccagcctgggcaacatagggagacaatgtctctgcaaaaagatataaaaattagccgggcatggtgacacgcaacttcagtcccagctacttgagaggctgaggcaggagtatcgcttgagcccrgaaggcagaggttgcagtgagttgagatcgcaccactgcactccagccttggtgatagagggagaccttgtctcaaaaataa

SEQ ID NO: 854709 - DNA, 689 bp, Homo sapiens
ccacttccaggagctcagcagaaaatattatttccaggsaataggtacttatttatggataggacatactccatttacaccaaattagaacacaaaatattgcagatggatttctttccaagatctacttgtatgaaaatcaaagaaaaatgataaatgaacaacttgctatgagggatgacttctacacgacaactctggaattgaaacagacttaacgcaaatgtcccagttttgggggcttcctgcgtctacagttccaggtttctaacggtgcccttgggcactggaaatgcaagggccttctgaatcattaggtaagagaaaagtcattttcaatggaaattatacggtatttcacttacttgtagttctctgaaattggtcagcgctgtgtggtatggataggaattctcaattaagtaaaatatttgagtaaccagaacattccattgccagaccaactttgataatcaaacaggagtttgtatttctatagagagcacactaggcacaaagcaaagactgagcaaaattattgatttattttagacagaagggttatatctccaagtatgatgtatatcaaatcaatttgtaactgcagccattcaatacctttaagttcttgcagaggtagaagagcttagttcttacatttcctcggtaaaattgccttgatgttctgg

SEQ ID NO: 854710 - DNA, 697 bp, Homo sapiens
aaattattgatttattttagacagaagggttatatctccaagtatgatgtatatcaaatcaatttgtaactgcagccattcaatacctttaagttcttgcagaggtagaagagcttagttcttacatttcctcggtaaaattgccttgatgttctggaatgaggtttctacaaatttaatatattgctcctgaaatagcctattgaaaatgatgacttgttctaatctactgcactttctgatagggaatgcgattaagatcagtccagcaaaggtcagtaaaaatgaatcgtatctgttctcaaggcatctatgagaaagttttcaaaaccagataagaatttaatatcagaaatttttgtctgtctaatcaaatctagatgccccaatgctgcctggaatttgtgctatagattgtaatctgcaggtggcttataaatgagtcatgtgtcttaaaaaggagttcctaaaatagaaaaaaactttcttttttttcatagttcaaaggttcttatcacagacctgtttctcaacaaaaataattgtatttattctcatattctgtgagtcagaaattcatcaggcctgggctagacacttcttctgtygcaggtggcattgacggaggatactaggtggtctttagctgtcagtgggttgacctggagggtataagatggcttcatgcatgtgactg

SEQ ID NO: 854711 - DNA, 582 bp, Homo sapiens
ggggaggctctagacactaagtctagttgtttgtagtagtacacatttaagtatgtgtgttaaaatgtaagagtaatctataaaaggagggaaggagagtgtaaaaattttatacctttggaggtgagaggtgagggagagaagagaagggaaagagaggagatgaagaagagaaagaaaacaagcaaaagaaaatgtaaaaaccctctaacaggtggcaggggagagagtaacagaaaatatggtgatagaatacacacacacaaactctcgcaaaaagaaaaaaagtatagtccttcacaaactcttccaaaaaaaaaaaaaaaccacaaaaaaaaccaaatgccacatacaagaaaagagaaccctttcaaactcattctatgaggtcagtattactatgttaaaaaaaaaaaatctaagacagcacaagaaaagaactacagaccaatacctcttgtaaatatagaggcaaaartccttggcaaaatactagcaaaccaaatccaggaacatatacaccagggcccaatccaggaacatatacaccagggccaagtgggattcatcccaggaatggtt

SEQ ID NO: 854712 - DNA, 529 bp, Homo sapiens
aattatacgattaacttaatagacagaaacagcatttaataatatctaacacccttttatgataaaacacttaacaaagaaggaatgaaagggaatttccctaagctgattaagggtatctacaaaaaccaaacagttagattgtacttaatggtgaaagactgaatacttttccctgaggtaagaaatatgacaagaatgtttgccttcactacttctattcaacattgtgttaaatgttctagccagggaaactagacgagaaaaagaaataaaaggcatccagatagaaaaggaagaagttaaactattagaactagcaaataaggtcaataagattgcagggtatcagatcaatatacaaaaatcagctggatcctccacgctaataatgagtaatctaaaaacaaaattaagaaaattccattacaacaacataaaaaaagaataaaayaattaggagtaaatttgagaaaagaagtacaagacttgtacattaaaaactgtaagtattgttgaaataacttaa

SEQ ID NO: 854713 - DNA, 587 bp, Homo sapiens
ttggtaaaacctatgataacttggaagatacacagggtacttaatgaatttatggacttgggcaaggtaattttttgaagtgttaaaattatgaaatggttacatttagctatatatgaataaagatctaaaggaaagagctaaaggattaaaaagggaccaagacttatccaaattaaagtctctcaccttctctggaaaagatggtagtcttaaaaaacagctcagccaccaaaacaggacgtttctaatgctctcttccaaaatggtcaagaaagatgatggaaatgaaaaggcatcctagaatggggaaccaagagccatgactaccaaaggaagaggaaggaagcagagctcggtctcatcagggaacattcctgactgagagcaggaagccctggcaacactttctaagtgagatttcaaaactgctacaagtcagtgctatgtgccttcccttcttcccttttctgatgagtgtgtttgttgtgtttatcttgwccctgttttcacaggacatgtatgcagaagacaacgtgtctatctaattcatataactctaagttcagaaaagccacatttggact

SEQ ID NO: 854714 - DNA, 637 bp, Homo sapiens
atatgtaaattaaacaatacatttctaagcaattaatgggtcaagtaaaaaatcataaaggcagttagaaaacattttaactgcataaaaatgaaaacaaaatatgaagactttaaagctrcagctaaagtagtaataataagaaaatttatattattaaatgtataccttaaaagaagaaaaatgtgagatagtttatctaagcttctaccttagtaagctagagaaataaaagcaaactaaacccaaaataacaagaaagaagaaaataataaaaataagacagaattcaatgagaaaaaatagacaaactataaggaaaattgattaaaacaaagctgttctttgaaaagagtattgaagttgacatatctagactgatcaagaacaaagacaaaaggtacagattatcaagaaaatgagcgggcaaagcaagatggccaaacagaagcctgcaacaattatccccccaccaaaggaacactaaattttaacaactaactacacacaaaaaagcactatcacaaaaaacaaaaatcaggtgagcaatcacagtacctgattttaacttcatattgctgaaagagacattgaagagggtaggaaagacagtcttgaattgcctatgccacttctc

SEQ ID NO: 854715 - DNA, 393 bp, Homo sapiens
agagaggatgccaaaaaattgaacgatattttatgttccttgattggaagaatgaatgttgttaaaatgtctatattgtcacaggatccttaggatgttgctttgccagctggaaacctctgtggycagtggcacctttgcccaagttttgcttgggcccactgggctcattccacccattcgacctggcagactgcgctgggctttcactaccagcctggataccatgcctgccaagggtaagccaggaatggtgtggtgaggcttgcatgagcagcgagtacagggtctggccactgcacacagccagacactctggctgcagtggggcaggcagctccaggcaccagcgtaagcactgtctccctgctgcaactggaccagacataccgc

SEQ ID NO: 854716 - DNA, 608 bp, Homo sapiens
agcctctaactagaaaaggtgataacgcacatttttctctgagaaaattttaagtgagatctttccaattatcatatraacaaatgcccaaggacttttttccattttccaaaactatatgaaaatcctcctaacacattaaatagacacaggcaaaaatcctatctctaacctaagagatcacaaatgacctaaaaaagatattttcatatctttctaaattttcaaagcaaatttcctaaaatggcctcaattttaatttacttaaaacagctagatatcatagcaatacttttagtaatacaaagtaaaacacattcccaaataactagatgtgtaaataagtaaagtggagtttgagcaactgccaatttcagtttattgcaagcaaatgcaaaattaaatggtaattaagagttatttgtttaaaaaatactaagaatattagaagaatatttttaaataaaatgaaaaaaatacctacttcaaaaatattccatctgagaatctgaacacttacaaatatcttgtattttcagtactgttttcaatttaagacagaaaaattgaaaattattgaaataacttttaaaaatcgtctttaacca

SEQ ID NO: 854717 - DNA, 530 bp, Homo sapiens
agattccgctttccctgtacttctgggctgasccaagggtcaacagagaagaaagccattcagcttcggggtcccgacaacaagttggttgaccctgcagccatgagcagaactctcaaagttacatcacccaagagagactagcccatctatcctatctatcctgacccttgcctcctaggtcctgatgcctgtcagacaaacttcctcccacctctcttctccaaggctagtcctgtttctaaaaaccactccctgtccctggcgctcttctagtttatcctataagaatgatttctagtataaatttcaggactctgttcccttctttaggcacccaggctcaccaataagaaagatataattattgcccaaagccccatcagtggggggactatctggaattttaggatccctcctcagactagcaggcctaaaaaaggctattcccaaagctaggatatggggagcctcagaaattatagactccaaaattgggggggatatcattcccattcatatgatgagaa

SEQ ID NO: 854718 - DNA, 635 bp, Homo sapiens
tttagggtgatttttattataaaaataaaaagcaggaccttgtaaacaaatactttacgtaagccagaatgctcaatcatcatgacctttaaattccrtaagttacccaaatggacctgcaagcatttatctgaaaaatatccttaaatctttggggaatattggctacaaaccctgagataatactaattcctgaaacccaaaatatcactttagaatatgccagtctgagcaaaggcttatgagagtcaggtgacaaatggagttctaactcaatgtcacctcagagtcgaaaggcctgcactctactagtagctctgtgtctaacttgttaaccctgtgggccccaatttcctcctctatcaagtgagggttaatgcctatctcatagaattagtttaagtattaaatgttttacataaaaatatttccaaatgttaataaatgtgaataaacacagtactcttcttgcacaaccaaaccaagttttactagtcagtttgaagaaagaaacccagaaaacaaaaagggaaaaaatgattgtagagccctatccctacccccaaacaactctctgcattacatcattatttttaggattagaagtaatagatgtaaattatagtaggctgcct

SEQ ID NO: 854719 - DNA, 659 bp, Homo sapiens
aaaaccagaaacctcccctatctattggggaagacccttgaagtggccaggccatgcctcctgctctatctttaacctcttacttaacctctaaagggcactgaaatgtttgaacatattccttactcttgaattcatagctcttcaaacacaagttccattgtggtttaaatataaatggattctaaagatgaaattgggtcaaattgaagatttgggtggataagcaaagggactaaagtcatcttcttgaatgcctattccttcttcatcacttctccactgttgaactcattgcccatgtggctgatgagattagatgagcccagatctccctctcacgtgggagaaggcactatccaatgcttctacttcagaaatccaagaaagaaactctttcgtatctccaaggcttaatgcagtctaactgctttaaacaacacctatgcactgatgactccatattgtatgatgcggattctgatgttaatctagtccctctttattaactcccattcacagcatcattgtggctttagctatttagtgtctacactgagagaggtatatttagataacactttattaataggcttaggcagaaataggaawggacatttcaatgacttatgacactaactacccagagttgggccaaa

SEQ ID NO: 854720 - DNA, 483 bp, Homo sapiens
ctcttcaaggacaagtacaaaccactgctcaaggaaataagagaggacacaaacaaatgaaaaaacattccatgctcatgaataggaagaatcaatatggtgaaacggccayactgcctaaagtaatttatagattcaatgctattcccattaaactaccattgacattcttcacagaattagaaaaaattattttaaaataatatagaaccaaaaaatagcccaaatagccaagacaatcctaagcaaaaagaacacagctggaggcataacgctatttcaattactcaattcaatttactcaatttctttggtctctttctgagttatatctggaaatcggatgataagctatttctacaaattatttttaatattcatcactcacaactcaattggaccctcctgcaatttttttgaaagcaaaaaattggaaaccacctaactggctaaagaatttgttacccagacattacaaaatca

SEQ ID NO: 854721 - DNA, 594 bp, Homo sapiens
ccctctgtgtgtccatgttctcattgttcaactcccacttatgagtgagaatatgtcatgtttggttttctgttcctgtgttagtttgctgagaatgatggcttccagcttcatccacacccctgcaaaggacatggtctcattcttttttatggctgcatagtagtccacgagtgtatatgtgccacattttctttatccagtctattattaatcggcgtttgggttggttccaagtctttgctattgtaaatagtgctgcaataaacatatgtgtgcatgggcctttatagcagaatgatttataatcctttgggtatatactcagtaatgggattgttgggtcaaatggtattactggttccagatccttgaggaatcaccacattgtcttccacaatggttgaactaatttacactcctaccaagagtgtaaaagcattcctatttctccacatcctctccagcatctmatttcctgactttttaataatcgcctttctgactggcatgagatggtaagtcattgtggttttgatttgcatttctctaatgaccagtgatgatgaaccttttttatatctattggctgca

SEQ ID NO: 854722 - DNA, 638 bp, Homo sapiens
caggttgatagatgcagtaaaccacatgtatacctgtgtaacaaacctgcacgttcagcacatatatcccagaacttaaagtaaaagaaaamaaatttttttaaaaagcgtcagagaacttggctgaattgtgcctgtattctagtgttttgcagaaggtagagcggtgaacactgaaattacatatttggataaggaaatttctaggcaaagtgtgaaagttgtggcttggcttctcttgacagcctacattaaaatgtgaaaagagataaaagatttaaagacagaattgttaatcaaagagaagcagcacttaaagatttggaaaattttcaccctagccatattatgaagaatgagataacgggtacagtggttcatgcctgtagtcctaactgttagagaagtggaggcaggaggatcccttaaacccaggagtttgagacttgtctgagtaacatagtgagagtccatctcttaaaaaagaatacatttcttaatgagaaggcacattgggaaagaacaccaagggtgcggccaaatgaccatctgataaggagattagtctaccaagtggaacctgttgctcaaggtgattcagaagtaattggggctgccacctccatcacagctccaat

SEQ ID NO: 854723 - DNA, 615 bp, Homo sapiens
gtatacaaggatccccttctaaagtgtggagcttggcattgagcaagcaaagctggaagaagggaagccagtcaaggagctgttgaaataatttatgtagatgtctgtcccacagaccctgacccaatgatraatcaatacagtacactgacacagatattctgcttagccagtttggctgagtgtctgggccacttacagactcccagaagagtgctgtaaacagttgcgaccaaggcctcggctagccagcaagactagcatttattcagtaaagattaattgacaaaggcttgagtcaacaccactagagtgtaactgacattgcagacttcccaaatagaaagtaattaatcacctgtgataaatcaaaggttagtcttaggaccatatgagtaaacaagctagctagataaactccccacattccttcatttctactctaatttaactaaggggacaaagctgccttcaggcaagtactatatgtaataacccccaggccttccaatagggtttgtgtatattttctataactaaaatttttcccaccagcctgactgaacccccacaaatttacaccgaagatgacaaaggcttagactgagatggtga

SEQ ID NO: 854724 - DNA, 583 bp, Homo sapiens
tgctgttttatgcatttttaaaaaatcattgtatgtcatgaaattaagacagttgtatactacttggttatctgctacatttctcaaaattgaaaataaaaattgtatatatctttgactaatcatcagagaaatgcaagttaaaaccagagtgagtattgccacacaccagttcgaatggctgtggttaaaaacaaagataaatgttggtgaggatgtggagtgaagggaaccctagtacattgttggtgggaatgtaaattagtacagccattatggaaaacagtatggaagttcctcagaaagctaaaagtagaaatgccatataatccagcaatcctactcctgggtatatatccaacagaattaaaatcagtatgttaaagaggtgtctgcactcccatgtttattgaagtgtttttcacaatagccaagatgtggaatcagcctagatgtccatcaatggataaatatgartgtgttatgtgtacacaatgtaatactattcagcattaaaaaggaaattctgtcatttccaacaacaggaataaacctggctgacattatgctaagtgaaataagc

SEQ ID NO: 854725 - DNA, 606 bp, Homo sapiens
tcaccattcagagataaacttccagatacctaaatgtatatagacacatatagctatgtggacataatgctttgtaaataagtttatgctacattgcaggttaattttttcacacttaaaaacatgctgagaggtcaggcatggtggctcacgcttgtaatcccagcactctggtggatcacttgaggtcggagttcgagactagcctggccaacatggtgaaaccgcatttctactaaaaatacaaaaattagcctggcatggtggcacatgcctgtagtcccagctactcgggaggctgtggcaggagaatcacttgaacctgggaggtggaggttgaggtgagcagagatcgcaccactgcatgcgccatagcctgggagacagagacagactctgtctcaaaaaacaaaaacaaagccaaacaaacagataaacaaacaaaaaacatgctgagattatgtttctacctcagtaaataaaaaaacacacactcttattttttaatggtagcagagtatctcatgtttttaaccaatcatccagtgrtggagattttgttgtttcttttcaatttcgcttttatgaatgctaaaataataagca

SEQ ID NO: 854726 - DNA, 613 bp, Homo sapiens
gacacatttctagaatcccctgactatcttaaacagtcttttaacaccttgcactttttcttcctaattctyacctcaatttgtaattaatggtttgtaaaattaactgtaataaagtcatgatttatgggatcatctgtacactctgcatagcatgacccaggcttatcttgaagactgtattgccagcctgttggcatagtactttgtacttggtaggtgttcagttaatctttgtggattgactgcggaaggaagggagggagggaaggaagaaggaacaaaagaaaaaaaaaggagggaaggaagtaggaaggaaggaaaaaaaaggagggaaggagggaagaaagggaagaaaaaagggaatggtgcctctgattctcaaatccacacatgtggccttgacttcttattctgcagcttcctataagacattcctcttggtggcagtggagaagtttacttgagaaaccaagttaggatcaggagatgtctggtgaaaacagaagcagtgtagaggcagtgggacagtcccaagggatggcctcatgagaacatagtaggctggtgagttacttcctgttctgcagaacaccgacattagcaaagctgc

SEQ ID NO: 854727 - DNA, 613 bp, Homo sapiens
tttgcatttcctcatgtatcttgtgaaccagttccccaggagctggatccattgctaaactccactggtaacttttacctttaggaactttttttttatttttttattttttwaatttttttattttgttttttttgagatggagtctcgctctgtcgcccaggctggagtgcagaggcgtgatctcggctcactacaagctccgcctcccgggttcacgccattctcctgcctcagcctcccaagtagctgagactacaggcgcccgccaccacgcccgggtaattttttgtattttttagtagagacggggtttcaccgtgttggccaggacggtctcgatctcctgacctcgtgatccgcccacctcagcctcccaaagtgttgggattacaggcgtgagccaccgcgcccagcctacctttaggaacttaatacagcacagctgcagctccataccatggatgaccccgtcaagggttcctcattccctacccttttatcctttctctttctatccatttaattttatctgtctcattttttcttcattttgaagaaatctttatgtagcctccaaactagacaaatttactttttctttagcaaaaaa

SEQ ID NO: 854728 - DNA, 613 bp, Homo sapiens
tttgcatttcctcatgtatcttgtgaaccagttccccaggagctggatccattgctaaactccactggtaacttttacctttaggaactttttttttatttttttattttttaaattttttyattttgttttttttgagatggagtctcgctctgtcgcccaggctggagtgcagaggcgtgatctcggctcactacaagctccgcctcccgggttcacgccattctcctgcctcagcctcccaagtagctgagactacaggcgcccgccaccacgcccgggtaattttttgtattttttagtagagacggggtttcaccgtgttggccaggacggtctcgatctcctgacctcgtgatccgcccacctcagcctcccaaagtgttgggattacaggcgtgagccaccgcgcccagcctacctttaggaacttaatacagcacagctgcagctccataccatggatgaccccgtcaagggttcctcattccctacccttttatcctttctctttctatccatttaattttatctgtctcattttttcttcattttgaagaaatctttatgtagcctccaaactagacaaatttactttttctttagcaaaaaa

SEQ ID NO: 854729 - DNA, 606 bp, Homo sapiens
atgtcttttatcccaccatccaggaaggcaactttgtgatgtccaccataaatagtgatttgttgtcattatcaaccagaggaagagaaaaaatcatgtgcagtttttcacctctctttcaggttycattttgcagagtagctgagatgctattcagtcctctctcctagctctattagcctcagtaactgcctgaaacagcaagactgcagacaatattcgggcttatgaccacagaaatccaaacagaatgacaattttcattcatttgaggtgaactgggttattctaattttcaggaattggatattcttctaggagacctgtccctgtggcagtagaaggggcctgttgctgtcagcacagttgctcaaggaatggcttgtgagctgcaattttttcacactactaatgcattgccttcaccagggagcacagccggttgctgtgggattgcattagaggctttggtgaaaagcctggagacctcactatcaaggaggaagtgaaaggtgatcagtgggactctaccagttaactcttcagggaacctaccaccatttatgtgtttaccagagatatgcttctgattgtaatgggacccct

SEQ ID NO: 854730 - DNA, 601 bp, Homo sapiens
ggattgctgggtcaaatggtatttctggttctggatccttgaggaacttccatactgtcttccacaatgttttaactaatttacactctcactaacagtacaaaagtgttcctatttctccacagccttgtcagcattgattatttcctgactttttaataattgccattctgactggcatgagatggtatctcattgtggttttgatttgcatttctctaatgatcagtgatgatgagcttttattttctatgtttgttggctgcataaatgtcttcttttgagaagtgtctgttcatatccttcgcccactttttgatagggtttttttcttgtaaatttgtttaagttccttgtagattctggatattaaacctttgtcagatgggtagattgcaaaatttttctcccattctgtaggttgcctgttcactctgatgataagtttcttttgctgtacagaagctcttcagtttaatatgaycccatttgttaattttggcttttgttgccattgctttttgtgttttagtcatgaagactttgcccatgcctatgttctgaatggtattgcctaagtttccttctagggttttttatg

SEQ ID NO: 854731 - DNA, 520 bp, Homo sapiens
taaaattggaatagagaaaagaatgtgaagaactaagcaaaaaccactaatgtttgatgacctgtcaattctcaaatgaaaagcaggtgtcctgtctcctaacccaatcctrcaaagactcagggcttccaaagggaaaggaaaggcaggcttcgattacagctaaaatatgcctatatcacattggatgtatgcattttctacttttgttttgaagtcgccctgactacatctgtgaaggatttgaggcaactttccgtctcatatatatatattttttattatactttaagttctagggtacataagtctatgtttctttctatcaactggttactatcttaaattacatagtgtctcctactttgtctcatctctaattactaattaactcacattttataacttttatagtagagtagagattctggttctccttctgagatgcagcactagtatgagaaacagtcactttgtaccagaactttaaactgtatcatttgaaaatcaacagagagca

SEQ ID NO: 854732 - DNA, 612 bp, Homo sapiens
attaaaaaataaacataccatacaaccccaaaatagtacttttagccatttattccagataaatgaagacttatttctgtgcaagaatgtgcacatgagtgttcatagcaccattattcataatagccataagctggaaaccacccaaatgtttttttaatcggtaaatggttaaagaaactatggtatatccacatcatggaatattattcatcagtaaaaaggagcagactgttgatatacacaacaatttggatgaacatcaaggaattatgctgagtgaaaaaagccagtctcaaaagaatacaaactgcttgcttccattatgttacatttgtgaaagaacataatcagagatatggagagcagattagtgtttgccaggagctagggatgaggaagatggatgcatgactatgaagagaatcttatggtgatataacagttgagtatcttgattgcaatggtagttacacaaggctacatatgtgataaaattgcataaaactatgtacatgaaatagtgtatgtgyaacctaaaaatctgaataagctgtatgtattgtataaatctcagtatattggttttgctattttaacatgtgtgtataa

SEQ ID NO: 854733 - DNA, 505 bp, Homo sapiens
gatacagtccctgcagctgctttcatgggctgacatggagtgcctgcagctttttcaagcacawgctgcaagctgttggtggatctaccattctggggtctggaggatggtgaccctcttctcacagcttcactagggagtgccccagtggcgactctgtatgggggctccaacccacatttcccctctgcatttctctagtagaagttctccatcagggctctgcttctgcagcagacttctgcctggacttccatgtatgtctgaacaacctctgaaacctaggaggaggcttccaaagcttaactcttgtcttctgtgcacctgtgggcccaacaccacatggaaggtggcaaagcttgggtatttcaccctctgaagcaatggcctgagctgtgtcttggccccttttagccacggctggagctggagtggttgggacacagggtgccatgtcctgaagctacacagagcaacagaatgctgggcccagcccatgaggtca

SEQ ID NO: 854734 - DNA, 571 bp, Homo sapiens
attaccatatgttaattactgaagaataactccataggttgcaataattgattgctttcttcatttatatgaatsccattgttccagatgttttcaggattcacagcaagagtatcctggacttaaaaagctgccagcacaggcatgatacgtgctctgtgagctcaaacttcacagttgggctgtagcatgcttactaacttatacccaatgatttagactcataaaatgcaacaaaacttttatttagatttgaatgaaagtttagcttaccttttggtataaagatttcaaaaataaactattttcattccttttttgacttaccatatttttcagtttttagtagaatcaaactaaaacaatctgcataaatagcaggttaacccaaaataaagcaattatccaggccataaatctcataacaagaattttgcaagcaaagttttgtcttactgatatatgaagatcttaggctgtgtatttgggtagggctggcattcatcaaacattagaaaaaaattaaagaagaattaaaacactgcaaattcgcatcgcaaaaatgatagaa

SEQ ID NO: 854735 - DNA, 523 bp, Homo sapiens
agttggtttccccctaacaaacagtacatttaaaaccaatgtaaatgttttccatatagatcaatgctttatataagcatatttccagtatataatccacatggtcttgctcacagggcatattggaattagacctgctcagtggcgatggccaacataaataacaatgatgatatttacaccagaaaattgcaactctagggagtggaagagtaaaggaactttagcgttggtacccagggcacctacccaggtctccttagggctgagttaatgtctatggagttttatttttgacctgggctacaaatcatgggtctctaagaagaaaggacatgtacatgcaaggttggcgaagctctgcctcaaaggcagcaattacattcattcatgaatagggccctacatattagaacctagtaaaaatctrttgattgaactaattaaatacacagtagcaatgatcagttcaatactaaaagaaaatcaagagcataaatttaggttttacagcattaaaaaa

SEQ ID NO: 854736 - DNA, 500 bp, Homo sapiens
agacttagctgctggcaattttttcaacaagcttctgaagcctcagttttcatcaacactgaaactcttatttagagatatgtttaaaacagcaaggcaattaagagcccaattctttacatctctatcaactataataacctcccaaactataataatctcctctattcttatccccactctgctcaatgctatccatcctttattctgtgcactgtggaatcctagctcctctctaaattatttattcctttgttggccttaactaaaaccaggctttctctggaaaactcagcttacccaggaggtatctccaataaaaccattctctcactgtccatggacctccaaatcagaaaatgaaatagagttcccctcatcctctagamctgtttctatgattcttcttctactctcctttaaatctaagatttttatagttccattgagcaatactggtcccttcttatttctgatatttacaaacttgtggtcattcc

SEQ ID NO: 854737 - DNA, 608 bp, Homo sapiens
atatggctcaatttcactgtcacttgggttcactgtattgtagaagacctgcaaacttcactaaccagagaaacaaacgtgctccaggccttcaatgccaagattttcatcctccagttcttccccaacccccaaatctgccccatcctaaccctctatccctaccccaacttttgcccaattaccattaatgactaatgttttcttctaagctgtctcttcccacagctattctagtagatccctccagtggcaagtgattctagggcaattaaggaagctcaaatgaagaatcatacaccatagagttagcttaattcagaatctactcagagcctacagtttctcccagagatatttacctctgacctgaacactttctagttcttcgtctcacacagatatatgggtacatgcaataagggtcagacagcaaagcgctagtcagcttctttcttccaactggccagtccactgatcaaagaccaaccattctgccagatagtacaggtaaactgtctcatcaacaataccactaccattagccacagacattgagaggagaaagsgtctgtagctccaactgtcatgtagttgtggcttcttgc

SEQ ID NO: 854738 - DNA, 443 bp, Homo sapiens
cgggcactgggcaagggacagggtcagagagtggggcgggcaggcccacagcctgggtacctgccttcctggagctcccatgtcagtgggggaggcaatggcagcccctgacagagaacgcccatcccaggcaggtgggtagccaggtcagttcccagaggacagggagggaggggcagccaggcttccggggtggatgggacctgatgactctatatggacaggcccccaaggaaatgatcctggcccccaacacccaaggctcctgggtcagggccaggcaactgtcactctggcttctactttgtttctaycacggaggaactgtgtgacctggctgagagtcttgccctctctggctctcagtgtccccataagtacaatcagagagtctgttctcagaatctccaaggatcctgtgtttcagcgtgttcaattccatg

SEQ ID NO: 854739 - DNA, 656 bp, Homo sapiens
ccttggagtgatagggggatgtagggagctactgtgtaggtgataacacttaacgatctggagaccaaaaaataaataaataaataaaaataaaaggatgaaaggacagacggacaactcaatgacaaggaaaaaatacaggttgaggtttagacatatagtgggacaggaagacaggagggtgaacaagcagacaccaaaggcagagacgaagaaggtgctggaggaatgggtgtaaagggacatactgtttactgaacgcctaccacgtgttagtaaccaaagtggtgttctttttgagcggaggatgtagacagaggtgggtggggacgaagccggatagactgctgggataagaggatggggcacccatagggcggggcaagagctgcctaagaattagaagaaagaaggcgtgcggggtggaaagcctcaaaagggggcactgccggccaggggtgaggttttagacaaatggacataggactcaacgatgaaaaccgggctggaaccaaacaaggaggcagagggagcagggagcttcgaagagccggtgcgggaagctctccgcgaagcgcagctcagccctgacctccccgcctggggctgcctggctctcagttcacctggatccsagcgcggcgcgtaccaccggg

SEQ ID NO: 854740 - DNA, 455 bp, Homo sapiens
tgccatattaggtgtacctggcttttagtatagctgytggtattcgtctatgcaagcttccagcttgcttatttatgcttgcagcttggcttttcaggcaggtttctgttagaaaagaaatggtttgggggctgcttttaattaagaaaaaagacttaccgaggactcctgtacactcactatctgcctaaataatttatttttaacttctatattagtatcagcctgcatgccagcattcttgggagctatgtcaaaaagggcaatgagattctcacttttcatatgtagattttcatttttagtatgatatccctttcttccacttcctgatgtcctatgacctgagccattatggtgcagcttcttcagagagcaatccagtcttatactggggtgggaaaagggtagtcattatttggagtgaaagaggggatctggggattctatttcct

SEQ ID NO: 854741 - DNA, 657 bp, Homo sapiens
atacatgcaacatacttaatttttcataactttccaattcttattaactcaactttttgttccataataactgtgcttctctttgtaccagtactttccatattcttattgctttgggactagcaagacacaatgaggtgaataatgttatttcaatgcatcttaaaacaccagaaaccaattaatatgcgatattcaggattaactgattccaaagggctgttaattccatctcttgatattgacaagtagtaagtaaatatgcctaagcttgattatttttgttcatagaagtaaaatatacatttcataaagtgaaagttcataagatttgcttttattgttttaaaaaataacagttaatttaaacaaaactgaggagtcattggatactatagtagctaatgaaatcctaagaagacatgaatttcaggaaggcgaggaaccagggaaactcttgaaacttgaacaattaataatattcagagccaatgagcttcaatatctgagtttcttaggaaatgtcccaaattagcaggggaaagcatctgattggtaggcttggttctattgttacacctggatcaatcagctaygaccaaggaatctgagcagtacactataaaaattgctgcttttaattatttcaaccattgt

SEQ ID NO: 854742 - DNA, 616 bp, Homo sapiens
ttctcataaggagtgtgcaacctggatcccttgcatgcgcagttcataatagggtttgtgcttccatgagaatctaatgcttctgcacatctgacaggagatggagctccggggtaatgctcacctgccactcacctcttgctgtgctcccagttcctaacaggccatggtccccataccaatctatagcccaggggttggggacccctggcctagaggacattatgttaagtgaaataagtcaggcacagaaacataaatgctgcacattctcacttatatgtgggaactaaaaaagttgagcttacaggcccagctcggtggctcacacctgtaatcccaacattttgagaggccaaggcgggtggatcactgaggccaggagtttgagaccagcttggccaacatggcgaaatcccatctctactaaaaatataaaaattagccaggcatagtggcgcgcgcctataatcccagctactagggaggctgaggcaggagaatcgcttgaaccyaggaggcagaggttgcagtgagccaagatcgcaccactgcactccagcctgggcaacagagtgagactccacctaaaaaaaaaaaaaaaaaaaaaaaaagt

SEQ ID NO: 854743 - DNA, 548 bp, Homo sapiens
tggtcttgaactccccatctcaggtgatccacccccctcagcctcccaaagtgctgggattacaggcatgagccaccacgctgggtgggagactctatctcttaaaaaaatccaragagatatggagtacagatgtactaacttccagatagtaaaagtcccagaaagagacaggaaaaagagaaggaaggaaatgttcaatgaaataatgaatataaaattcctatcattaaagacaagtgaaaggacttcagagtacaaaaaggccagataaagaaaaactgtcaactagacacattgcagtgaaaattaagaacatcaaagacaaagagaaattctacaggcttccagagggaaagagcaaatatccaatcaaagatgatgagtcaggttaatatcagacttcttattagcaatattggaatgggattggaagaaatggaggaatgcttctaaggtaataaggaagaatggaaaaaaaatgaaccaaggatattatatctttcgaaattgttattcaatgtgaggttgtaaaaaatgctttcagg

SEQ ID NO: 854744 - DNA, 589 bp, Homo sapiens
  misc_feature 1, 2, 3, 4: n = A,T,C or G
nnnnatgtagccattaatttggcaaatgcctttttttccatttctgtccataaggcccaccagaagcaatttgccttcagctggcaaggccagcagtacacctttactgtcctacctcagggttatatcaactctgtagcttggtgtcataatcttatttggagagaccttgatcgcttttcacttccacaagatatcacattggcccattacgttgatgacattatgctgattggatccagtgagcaagaagtagcaaacacactggtcttattggtgagtcatttgcatgccagaggatgggaaataaatttgactaaaattcagaaaccttctacctcagtaaaatttctagggatccagtggtgtggggcctgttgagatattccttccaaggtgaaggataacttgcttcatgtggcccctcctacaaccaagaaaaaggtacaatgtctatttggattttggaggcaacatattctttattttggtgtgttactccggtccatttatcgagtgacccaaaargctgccagttttgagtggggtccagagcaggagaaggctctgcaacaggtccagactgctg

SEQ ID NO: 854745 - DNA, 618 bp, Homo sapiens
gatttagtgcactgttggtaggaatgcaaaagggtttagttgctatgaaagatagtacggcagttcatcaaaaatttaaaaatagaacgatcatacgattcagcaactccacttctggaatatacacccttaaagaaatgaaagcagggtctagaagagatatttgcacactcatgttcatagcagcattattcccaatagcttaaatgtggaatcaacccaagtgtccgttcacagatgaacggatcagtaaaatgtggtatattcaaaccatggaataatattcaaccttcaaaaggaagaaaactctactttgggaggatgaggtggatcgcttgggttctggagttcaagaccagcctgggtgacacagcaagacctcatctctgctagaaataaaaaaaaaattagctgggcatggtggcacacacctgtagtcccagctactcgggaggtcaaggtgggaggatcacttgagctcaggagttagaggctgcagtaagcyatgattataccactgtactccagtctgggtgataaagcaagatcctgtctcaaaaaaaaaaaaaaaagaaagaaaagaaaaaggaagaaagtcttgagacatgctgtaacatg

SEQ ID NO: 854746 - DNA, 622 bp, Homo sapiens
caattcaaaagccttccatggctccccgctgaccctggctgaaagtcctagattctccatgagacacagtttcaataagccaygtaacttttctgtatttttgttttcttaattggaaaagcgggataaaaagagtagctccgtcatacactcgcaggattccattatgagcatggtggggtacacagtctagcccagggcctgcctgctcctctcttcctcttctcccgccatcactctgtcccagctcgtgcttctctgaacatgccaggcatggtcctgcctcagggcttttgccccagctgttccctccacctgaatggctgtttccccagaaatgagcctgactcacccctctccttcaagcctttgcctaaaaatcaccttctcaatgaggcccccagcccaccctagttaaaactgccccctcacacaccctaacccctcctatgttctatttgctccacctcatttatcactgattttatttatcacctattcatctattttatttattgtttttcatctgtcttccccccatctgattgtaagctctttgggggaagatctttctggtctattttgtttaatatcagcgccttccccctttccccagcactta

SEQ ID NO: 854747 - DNA, 524 bp, Homo sapiens
aaatcttaagggcctgtgctgcgactcacctataggcrcctgccaaaggctccaaacttatctgccactgatgcttcgagcaatattggatctgctgggtcacatggtccctgtggcagagtagcatgcacggacacctggacctgctgcacggccttctcttgttctcaacaccagcagcctttcaggtcacttgttacatgagctggagcaacacacccaaatgaggaatatgcttcatcaaaactccaaatagttcaacttgcattataattcagctagccacaggatgagattctgagtttgattttcagcaatctcagctgaggggctacctgggctaagggtttacttgagggcacacaaaggagttttcaggtcatttatgtgatacttgagttgggaattggaatccctgagctcattcttttatttcccctttgtctagtgacaatagaagcaaccatctagtattcattagtttgctgaaaatgtttgaaatgccctatacacagtcacccaga

SEQ ID NO: 854748 - DNA, 579 bp, Homo sapiens
aatcctcctcccctggtaggacaaggccaggaacagactgtttccaccttycttacatcaatctgtcaggctgcggcaggtggctctgctggaaggccactgccctcgtccctggctgtccagaaaagtgtctttccccagttccagtgacgtcaggtggatgctgcacctgcagaggagagcagctgtctctgaagctggccctcgggtgacaaccccacaggcgatggtgagagcgaatgacgcttgtggctctcagagtgtggattacatgtggcaggccatggtcttcgaagctctgaaataagcaagatcttctccccccaggcaaagcatagactaagccctgctctttcttccagttgagcaaggaggatccagaggctggggatgggttcccatctgacttggttctgaagcccatatcctgggagtagagttgccagcatggtgcctgaatatggtgtatggtttcccatgatcaagggtgaccaaagttttaaagacccaagaaagtgctgagtccagtggcctgatttcacttgctttattttttgctgagtactgaccttccgtcag

SEQ ID NO: 854749 - DNA, 576 bp, Homo sapiens
ttcagacatttcatcatcttcttcatcatcactatctccagattcatcttcatctccgaaaatggctttccgacgcattcgaccagtgttcaagtccatttgtttttcctcctttggcatcattagcctgtattaccaaggaaatacaaaataattcaatttgtacattaatcagctaatctagaaatggcaatatagtcaatgaaaatacaaagaaatagaaaatgtcaaggaattgtttaagatgacatagcatagggaaaatatgatttgataaacattggaagagttaagaagcaaactcgggcatggttccctaacaccacacttcaaaagaacttatagagagaataaaggaataacccttaaaaaacaaaaatctaattttagaaaaaaattgctcaaaagagaagttactgttttgtagatcttttggaaagctgattaatttctaagctaaaaacacatgatccttaagagaaatgggtaagtccaggcccaaagcagaaagaaggcaaaatgagcctggatccwcttgttctgtcagaaagtgagaaatgctcaaagactaacaga

SEQ ID NO: 854750 - DNA, 632 bp, Homo sapiens
gatggtgggtacctgtagtcccagctacacaggaggctgaggcaagagaatcatttgaacctgggagacagaggttgcagtgagccgagattgtgccactgcactctagcctgggtgacagagtgagactttgtctaaaaaaattaaagtaaaattaaattaaaaattctggaaatagatagccctaatatataaaaggaaaacaaacttttccaaatcagaatataattcttttgaattactttttcactcacagtcagttacccaagcttttgagcatactcaaatgccctctgtgataatgatagaatttgtgatgaagcactgtttaagagtgcttcaatgttgtctgagatttttttttctttcaagacatggatgccatttttaagttgatgccagtgctttagtgatcttacgagaacttgcaatcagtgcaaggttttcagacaacaaacagaaatcgtgttccttcttcaaataagtgttaaatggtttgctgatggaatcttcaaggagtcatacattatggaacaaccaccaacctaattcacttcttagtgaacttwttctttagctgatcagatacatcaaaacaaatatgcttagttacttagtctcctagacatcca

SEQ ID NO: 854751 - DNA, 628 bp, Homo sapiens
gcctcagcctcccaagtagctgggattacaggcacctgccaccacatctggctgatttttgtatttttagtaaagatggggtttcaccaggttgaccaggctgctctagaactcctaacctcagatgatctgccsgcctcagcctcccaaagttctgggattacaggcatgagccactgcacccagtcttaaaagcattttcacatcccttaatgaagctaggcttctcctcatcacacagataggacagctgaggcccaaagagctgcaccaactggctccaggtcacactatgcattaggagcaggatgaagacctaccgataccaaatctttgcattttactagtcctcagtaccgttcctttacccactctgcaggagaaagcaagcacaaaaacacaacttacgcaccttctttcttttcttccacaatatgaaatgagtgtttactgccattacaggccctgtgctaaactttaggacgggaccaacaaactatgctttcagaccgcaggcccactgcctgtctttgtatggctcacaggctaaaatggctcttgcaattttaaatggttggggaaaaaggatcacaagaataccattcttcaacacatgaaaatgatggga

SEQ ID NO: 854752 - DNA, 560 bp, Homo sapiens
gccaggcgcattggctcacgcctgtaatcccagcactttgggaggccgagatgggtggatcatgaggtcaggagttcggggccagcctgaccaatayagtgaaaccctgtctctagtaaaaatgcaaaaaattagccaggcatggtggtgcatgcctgtaatcccagctactcaggaggctgaggcaggggaatcacctgaacccgggaggcagaggttgcagtgagccaagatcacaccattgcactccagcccaggcaacggtgtgagactacaccttaaaaacaaaacaaaacataacaaaacaaaacaaaacaaaacaaacaaagaaaatccaagaagggctaaacctacagtgacacaatgtcctgcttacatttcagcataacctgtgtatgcgttccacgtgctgacgtcaaagctctcactttattcattttgccctagttttatcacttgcatcgaggtggaacttttgttttgacttccaaatttaaggcaggagctacaagctgcggaagtgggatgaggaagaaaatagtgtgaagcaccaatgggca

SEQ ID NO: 854753 - DNA, 636 bp, Homo sapiens
cagatagttatgatttaaattaaataaaataaactatgaattaaaattagttgatgcgacagtatatggctaggtgagtctctaagcttaggttataaatgatgacttttacaaagagactacccttaagttgaaatctgtattataagtagggagcacctataaatatyggggcagggggttagttttgagcaggtggatcaattagtgcaaaggtcctggggcaggaaggaggctggagtggtttgggaaccaagaaagagccgggccagggttgcattttagtggatgatagggaaggcagcatggaatgaagtggagatgggcttgtggggccgggtttctcaacctcagcactactgacattcgaagctggagaatgctctttggtgagggctgtcctgtgtatagtaagatgttcagcagcctctctggcctctacccactagacgatagtacctcgcactcctccagttgtgacaataaaaatgtctccagacatttgccaaatgtcccctccaaatgtgacaaaatctcccttggttgaaaaaccactgaaattggccttgcctgcaagaagtttgagtttattctaggatccatggaaagccactgaaagtttgaagcaattaagta

SEQ ID NO: 854754 - DNA, 625 bp, Homo sapiens
tcccttggttctaagctttgcttggtcagtgtcttcagcacctaatttgacaattaaatgtatttcacaacccactgacactgcttcattaggttctccaggagtcatcatttccctgcagcctcattccagtcatctctaatagatggtgtgtgtattagtccattgctacactgctatgaagaactacctgagactgtgtaatttataaagaaaagaggtttaattgactcagagtttcacaggctgtataggaggcatggctgggaggcctcaggaaacttacaatcatggtggaatggcgaaggggaagcaagcacatcttcacatggtggcaggagagagagtgaagagggaagttttacagacttttaaataaccagacctcgtgagaactcattcattatcaggagaacagcatgggggaaatctgcacccatcattcagtcacgtcccaccagctccctcctccaacattaagagttataattcaacatgtgatttgggtggggacacagagccaaaccatatcagcatgccartgaggctcttctgatgggacaaggaaactgccaggctcctcttggtcttgactcttgtgccaggaaagagtagctggatttca

SEQ ID NO: 854755 - DNA, 627 bp, Homo sapiens
tctacccatctacccacaatctacctgccagcctacctatccatttacccatctctccatctagctatccattcatccatgcacccatccatccatccatccatccatccatccmtccatccatgcactcattcaattaacatttattgaatccccatttatgttctacagtagagccaaaagtgatgatttgaacagtgttagtactcaggaaggccactgtcttggtgatagggatatataaatatatatgtgtatatgaacagatattgtataatgtagtggccctaagcacagagtcactgatattcacaaagcataatgtgaaatgaggaagttattcttgtcacgcactgcatcctcatcgattgctgtcctgttgtgaaccacggttgaagtcaggtgtgtttctttacttggttttgtcagtgtgcactgggcaggttgtaaataccacaagagcaggaacagtgtctgcttaattgaatatgctctccccaggacccggcacaatgcctggcacatggtggacgcccaagggctccaaaagccaatgttccaagcagaaggtgtgacatggtttggctgtgaccccacccaaatctcatcttgaattgtaacttccac

SEQ ID NO: 854756 - DNA, 627 bp, Homo sapiens
tctacccatctacccacaatctacctgccagcctacctatccatttacccatctctccatctagctatccattcatccatgcacccatccatccatccatccatccatccatccatccatccatgcactcattcaattaacatttattgaatccccatttatgttctacagtagagccaaaagtgatgatttgaacagtgttagtactcaggaaggccactgtcttggtgatagggatatataaatatatatgtgtatatgaacagatattgtataatgtagtggccctaagcacagagtcactgatattcacaaagcataatgtgaaatgaggaagttattcttgtcacgcactgcatcctcatcgattgctgtcctgttgtgaaccacggttgaagtcaggtgtgtttctttacttggttttgtcagtgtgcactgggcaggttgtaaataccacaagagcaggaacagtgtctgcttaattgaatatgctctccccaggacccggcacaatgcctggcacatggtggacgcccaagggctccaaaagccaatgttccaagcagaaggtktgacatggtttggctgtgaccccacccaaatctcatcttgaattgtaacttccac

SEQ ID NO: 854757 - DNA, 588 bp, Homo sapiens
agttagactgctttaaagtggatccttgtgccttatttcastagctatgtgacctgggttaataatgagtctctctgtgtctcagttgccacatccacaaaatgaggaaaataattatgcctaccctagggggctcctgagtagatataagatggtgttcataaagcccttagcacacagctttgcacctagaaggtgctcattaaattagttcctgttctccatgcttagtataacttctgtatgatgttcagcgttgctttggggcaacactgcaggcaattaaattgtctttctttaattgtcatttcttcctcttattccacaggtatgtattgtacaactactctaaagtggggcacaaaatagacaaagcccctgactttctttttttaattattatcatccttttaacttctgggatacatgtacagaacgtgcaagttcgttacataggtatacacatgccacagtggtttgctgcacccatcaacctgtcatctacattaggtatttgtcctaatgccatccctcctctagccccccaccccttgacaggccccggtgtgtgatgttccccttcctgtg

SEQ ID NO: 854758 - DNA, 616 bp, Homo sapiens
actgaagtgtctcacaacaccctcttcctccatattttctgccagtmcttaactcaaattgtcagcaaaataaagacgtaaggagctgtgctttaccataattaagaaagtattaatatgttctctcaagggcagaatttgaaccaataatccttgtcgatgacaagacaaataccagctcatccgttataaatttatcttagaaaactctcagatccccaggagtaacagcgattggcgtgacctgctttttggtgaaatcagaaaaggacttgcctaccctcatggcagcaattaactggagctgattaacagctgctccctttagataagtacatatgcttgagtttaccgtgattctgtgactccctacgtttctaacagttgttacctctctggtccttgtaggcattcagctttggaactttgataaagcagcttaagggtttaggaaggatgtttaagatcactgatgcaactattcatctttccttcccatcaggtgtttgaattgttgctgcatttctccagcctctgctttcttaaacactcttgtgatagggatctcactatcttcctatgcggctgatacttattttttattttattttatttt

SEQ ID NO: 854759 - DNA, 614 bp, Homo sapiens
atttcttaagggcttatagaacaagacgagtgacatgatgccaattgtaacttttatcacactaatttccaatgtaatgctttaagacaatgaaggtarttataatcagaatagcttgtatgctttcccagtcatcgtaaatatcttaatttacatctcactttctatctgtattgtatatttcacatatttattctaagcctagagtgtttgatatcaatctgtaaattttagaattaaaaaataaatttattgactgggcgcggaggctcacgcttgtaatctcagcactctgagaggccgaggcaggcggatcacaaggtcaagagatcgagaccagcctggccaacatggtgaaaccctgtctttactaaaaatacaaaaattagctgggcatggtggtgcgtgcctgtagtcccagctactcgggaggctgaggcaggagaatcacttgaacctgggaggcagaggttgcagtgagctgagatcaagccactgaactccagcctggcgacagagcaagactccatctcaaaaaaaaatgaacaaataaataaatttatttttaatattttattatactacaaatgcactacatattgcaaatatacata

SEQ ID NO: 854760 - DNA, 614 bp, Homo sapiens
atttcttaagggcttatagaacaagacgagtgacatgatgccaattgtaacttttatcacactaatttccaatgtaatgctttaagacaatgaaggtagttataatcagaatagyttgtatgctttcccagtcatcgtaaatatcttaatttacatctcactttctatctgtattgtatatttcacatatttattctaagcctagagtgtttgatatcaatctgtaaattttagaattaaaaaataaatttattgactgggcgcggaggctcacgcttgtaatctcagcactctgagaggccgaggcaggcggatcacaaggtcaagagatcgagaccagcctggccaacatggtgaaaccctgtctttactaaaaatacaaaaattagctgggcatggtggtgcgtgcctgtagtcccagctactcgggaggctgaggcaggagaatcacttgaacctgggaggcagaggttgcagtgagctgagatcaagccactgaactccagcctggcgacagagcaagactccatctcaaaaaaaaatgaacaaataaataaatttatttttaatattttattatactacaaatgcactacatattgcaaatatacata

SEQ ID NO: 854761 - DNA, 372 bp, Homo sapiens
ttcagtagtttggagatttctcaaagaatttaaaacagaactaccattggactggcaatcccattattgggtatatacccattatcatatttctcaagagaaagcttttatttaaaaaactgctgccaatttactctgcgagtaaatgaaaatttgcttcccttcaagtgtaaatatgacctaaactgtcattattaataatattgatctttacaaacagtttcatctttacaattttctcttccaccttccttcttctttatcttctttcctccatatccaaaatcatcacctcattttttgccattgactcacatctttyttgctgtttctactgttaaaaattaaacagtggtccttgtcattccttac

SEQ ID NO: 854762 - DNA, 629 bp, Homo sapiens
ttgttgttgtcttttctgtttcagcagacaatcatctcatttaagaacagactgggggccgggtgcggtggctcacgcctgtaatcccagcactttgggaggccgaggcgggcggatcacgaggtcaggagatcgagaccatcctggctaacacggtgaaaccccgtctcgactaaaaatacagaaaattagctgtgcgtggtggcaggcgcctgtagtcccagctacttgggaggctgaggcaggagaatggtgtgaacccgggaggcggagcttgcagtgagccgagatcacgccaccgcactccagcctgggtgacagagctagacaccgtctcaaaaaaaaaaaaaaaaaaaaagactgaaatttctaacctgtcttctgcgtactgatcattctaatttcagttcatttttaatgtgtttgcagtgttctttcattttatgtgacaactggtggacagtctacagcctggctggtggtctatcccctagttcaatttgaaaagcttttgatatgatatttattatcagattgacacatkagaagtttgttagtgagttcttgagttcacactcaatttcatgctatagctttgttgaggtttttccttgtgctcttctccttaa

SEQ ID NO: 854763 - DNA, 616 bp, Homo sapiens
ccctctctaatcatattgggaaaaaaccctttgcgattttgccaataccaggcctgtatctgctyctagcactgttctatctccctcctatgctcaagccaattcttggaggtgcagatcccctctcagccctggcatcttactctccccgtgcccaagcttccaaaattaccccattcactctcttctcttcccaaccccagcccatattttcctaagcagaaagaaatgagatctaatttattccacagtattgatagtggcacaatgatttcatttggggagagggagagatttctggtagttcaggggacaggagtgctgcctgatgcccctttatggacccctgaaacttctcctttttcctccgtacccaacctcctggctgtgaccaggaggaaagccaggagaaagaaacagaatgctagtgcccagagcctccagcctgccctagccttggaacaaagacgtggtcgcctgcaggaagcagcacacattctccacaggcccgtcaacctgccctcagcctccgtcctggaaaacgcccgccgcgctccacctctcacaacagctggcccgcgtgtcacagccaattaggctttggagggagtgagag

SEQ ID NO: 854764 - DNA, 616 bp, Homo sapiens
ccctctctaatcatattgggaaaaaaccctttgcgattttgccaataccaggcctgtatctgctcctagcactgttctatctccctcctatgctcaagccaattcttggaggtgcagatcccctmtcagccctggcatcttactctccccgtgcccaagcttccaaaattaccccattcactctcttctcttcccaaccccagcccatattttcctaagcagaaagaaatgagatctaatttattccacagtattgatagtggcacaatgatttcatttggggagagggagagatttctggtagttcaggggacaggagtgctgcctgatgcccctttatggacccctgaaacttctcctttttcctccgtacccaacctcctggctgtgaccaggaggaaagccaggagaaagaaacagaatgctagtgcccagagcctccagcctgccctagccttggaacaaagacgtggtcgcctgcaggaagcagcacacattctccacaggcccgtcaacctgccctcagcctccgtcctggaaaacgcccgccgcgctccacctctcacaacagctggcccgcgtgtcacagccaattaggctttggagggagtgagag

SEQ ID NO: 854765 - DNA, 449 bp, Homo sapiens
cctggcttgcaaggactcacctggggggatttctattgtgcttgcttcacccaaagacccctctagctcactggcaccctgttcttgcccaggggtgagccccacagaccgtaagtctggagctgagagccctcggttcttgttagacagggacagtgggagccctgcccccctctctccaccactgtcaaacttccgagggaccgcttcacttggtttcacagagctgaaagcactggtgattttcggactttcctggggctccctaggttcagctggataggacgcgggcagtggttttgcgtcacttgatcttgaagacattctcgtcacaggaaatgggctacctgccagctcgtccattccgttgctaacctccaggtgtcycttctctgcactcgtgcttccatctgctgagcagaaaggtgcaccgccaccttcttccacgc

SEQ ID NO: 854766 - DNA, 653 bp, Homo sapiens
attccatacatgttttattaattgtatacctgagtactttattaggagttactgtaaaaagaaatagtgtaatcagttacggttactacatattcataggtgtgtatgttagtaataaaatacaattgctcttgtgtattgatcttaaatcttgcaaccttgttgaactcactagctaattctagaagtttcttttgcagtttctttttttactttctatgtgtttactgatgtcatctgcaaatagaattgttttatttctatgtttccaatctgtatgcctgatatgcctttttcttgcttcattacagtaggtaggaattccagttctgttcagtaagaatggtgagtagaagagcgaagatggctggctagacacagccaggaaaagcttctcccactgagagaccaaaccatcatgtagactaacaaactctgaacagatcttcgggaagaaggcattgagaatggatacagagaggatgcagactcgagttaaagagaaggaagctgagaaccctgcatggggttgctaagcactaggatgtgttcctggccctgagtggctcctagagaaggggtgagtgaaataagcgtagagtggcgcactctcattacagacctccaggatcckagctgtgggagaccccatg

SEQ ID NO: 854767 - DNA, 313 bp, Homo sapiens
agctacgtgatggtttcattgtgagatatccacataatgaaatatgcaaccattctctcacacacaccagagagaaaaagagagagtaagtgaataatggtcccaatatattatttgaatacaaccactatcttggacaatttgtgaaggggtacatgtttttttaaagacatatacatatttctgtgtgtttgtgaatttgtgtgtgtaaggagaaatcagtgtatgccaaagygcttgtttctagattataggatttattttctttgcgtttatctgtggtgtctaaaagttctatactgaacatataata

SEQ ID NO: 854768 - DNA, 510 bp, Homo sapiens
gaggatgggagcctagcttccatggggccctgctagaaagacaagtttgtttttcctttggataaagccaattagctaacacagttggtcacctcaattaccatgtcgatttaggataaactatgtgtggcaaatgatggtgtcaagtcctcttacttgagactagctattttttactctgagaacaggaatgaaaaggcttggatctggttggctctataggaggggcagacttccttctgtctttgcaatctctcagcagattgcctgtgatgggcatcacattctggtttaatgcttattcaataataaaattgttttctttctcttctacctttgtggatagattttctgggttggagggagattttgtttttaattttatttcctcaagaagcacgaggaatcttggtggtaatggaatagttytggatcttaattgcggtggtgggttcacaaatctacatgtgataaaattgcacagaactacaccacacacatacacacatg

SEQ ID NO: 854769 - DNA, 595 bp, Homo sapiens
aacacagaccctcagctcctggtaaggtgggaagggaagtggacttttggatactttgtctgccctgctttccctgcttcagagggtgaggtgatttgagagttgaatctgtattagagacctcactgagttcaatgagattgtgctttagtgaaggactggctggttctccagaacttgaagttagttacattcgaagacactcatagggtgacccacttgatcctggcttgcttggggttttcttggttctagcacttaaacccctacaccctggagctctcccagtgctggacaaacccagacagccggtcaccctttaagtaactttttatgtttattaaatctcaattaacaaaagatatgtttgggtcaagttgttttaattaacactaaatatgccacattatcctgaatcagggagggtaggtaatcggtggagagattcccacccgaatttaccactacgccagtgcmaattcaaatcctttgaaaggcaaaggtaggaaagtcatttaaaatgcctactataggccaggtgtggtggctcacgcctgtaatcctagcactttgggaggttgagggcgggcagatt

SEQ ID NO: 854770 - DNA, 525 bp, Homo sapiens
catttttgtttgttcatttatttctacagacagaataaacccttattattgtaataaagaccatctggctgggcgcagtgtctcatgcctgtaattccagcactttgggaggccgaggcaggtggatcacctgaggtcaggagttcgagactaatctggtcaacatggtgaaaccctgtctctactaaaaatacaaaaattagccgggcctggtggtgggcacctgtaatcccagctacttgggaggctgaggcaggagaatcacctgaacctgggagacagaggttgcagtgagccgagattgcaccactgcactccagcctgggcgctggagtgaccgagggagactctgtctcaaaaaaaaaaaaaaaaaaaaaaaaaagacgggctgattaaacatttttattcttttcttttattttatgacagcaccttggatttagcaagcagaaaggcatggtgtttgcaytggggcccagtaggtctgcagaaccctttgcagccccagtaaaagcataaacagaa

SEQ ID NO: 854771 - DNA, 613 bp, Homo sapiens
aaattagaaaatgagtggccaggccagctggcagtggagctgatggtgaaaggtaccatgcaggtgagctgggccacggcatgccataaccaactagctaagtgatattacaaagtaactgaagaataaatcaatcaatcaagagtgaagaaactggtcagtggagagagaatggagtagatgggaagagagaaacaggcagtcccaggaggaaagtccaacctcaaaagctgctcctggttctctctgtctcttttttgagctaacctgagtgagtctctttgcaatcaatcaaccaggactgaatgaaagaataacggcatttggccaaaaaagaaccacacaggttaacatgcatggtctataccactgccaggacaatgtgggcaggtgctctggaggtgtgtcacctcaatgatatgactgtcacttaaagaccagcatgactttggatgatggattttggaacttgcctcttggarccgagctcacatttgaaacatttctgggctgaagcgggggccatgatccaggtaggattgtctttatggtggacccagctcctggaccttgtcacatttaactagatggcctgggtactgacattatgcac

SEQ ID NO: 854772 - DNA, 671 bp, Homo sapiens
gttgattgatgcactacaccctcaggcagttcttcctaattccacttactgtctatggcacactttcyacacagcaatggctagagtgatctaagccttgggttgagtggttctcatctgcacatacctcggctttcttttcagggtggatgaagcccttttctgtaaggcatgtgaatgctgcagggttctggagactttcaatttcttcagagatccagcagaaggagtaggtgctattggttgggtttaggatggtaaaggtcctggccagggtggggagaattgacagaagagagtgggacaggggattgaggattaagagaaatttcttagaacctggccccaacccagtcccccatctgggaagcagaactgttcagagcactttgttactgtggaaatgaaaactccatctcctctagcgatccacagtcagggtagggttctggactttggaataacaatgctgccaagggcacaactgtgccaatgatcctctgtggttaaggaggtggtcagggattatacttttgtgtcttccatattttcctcagtggcaaaactaaggagacagaattcagctttcttaacgtaacagttctctaaagtcaaacctctaaaactcaggtcaaaccccaggatatcgagcctgcttataggaataggtc

SEQ ID NO: 854773 - DNA, 606 bp, Homo sapiens
caatgatcctctgtggttaaggaggtggtcagggattatacttttgtgtcttccatattttcctcagtggcaaaactaaggagacagaattcagctttcttaacgtaacagttctctaaagtcaaacctctaaaactcaggtcaaaccccaggatatcgagcctgcttataggaataggtctagctcatctatctgaattcttttagagttctttaggaccgatgtgaattcaatcaatgtaaacctaagcaactcaccggagattcttccctcctatgcccacagtggtgaactcaatcacccgggtgtttggatccagagctcccccactggaccctcggagctctgggttgcgctgatggccacttatgtagtccgagtctttcagatcaaaatggcagatgggcaaggtgctccgcccttttgctaccaggaccggaccttgctctccaggtggcaggttgggaatcctgagaggataaggttatttttatttgttttattttgtcatcagttgttgctttcttagttggttggaaatgaatmttatatccaccagaatgtgagctctatgggagtagaggctgggtctgtcttggtcaata

SEQ ID NO: 854774 - DNA, 606 bp, Homo sapiens
caatgatcctctgtggttaaggaggtggtcagggattatacttttgtgtcttccatattttcctcagtggcaaaactaaggagacagaattcagctttcttaacgtaacagttctctaaagtcaaacctctaaaactcaggtcaaaccccaggatatcgagcctgcttataggaataggtctagctcatctatctgaattcttttagagttctttaggaccgatgtgaattcaatcaatgtaaacctaagcaactcaccggagattcttccctcctatgcccacagtggtgaactcaatcacccgggtgtttggatccagagctcccccactggaccctcggagctctgggttgcgctgatggccacttatgtagtccgagtctttcagatcaaaatggcagatgggcaaggtgctccgcccttttgctaccaggaccggaccttgctctccaggtggcaggttgggaatcctgagaggataaggttatttttatttgttttattttgtcatcagttgttgctttcttagttggttggaaatgaatattatatccaccagaatgtgagctctatgggagyagaggctgggtctgtcttggtcaata

SEQ ID NO: 854775 - DNA, 564 bp, Homo sapiens
ctgggaaaatgattcataactttcaaaagtttctccaagggatctataatctcccacaaggttaagacctaagagacaagattcctagttatcttgagatggggcattggcctrgtgcagggacagagttcagactccaggagggtggaggtaagatttggagtccctcaggcccatttggctctgcagacaccacaaggtctctgctttgcttttctttagctacttaggagaccctctgagcagtgctggcctctccatgaacaaggctcttctaattggtgactcaggccaggccctgggttttacttgtcactgaatttaccttggtgatctggttttgcaaagctgactgcctttgaggtatcttctgagagccagctgaattccagctggacacgtcctgaattaatcacatcgaacctgcaaatcgatcagggagcagatttgagaaatgtgctgcaggtggttttggtcctggctgcatgtcatctatactgtacttaaccttttgaagtcatgtcactttgtttcttaaatatttttaaaaaggcacattttaag

SEQ ID NO: 854776 - DNA, 618 bp, Homo sapiens
aaaagtctctttgtcatctgtgaattcttggggaaggagaactttccatggaatgaaaagtgtgggcactgccatgaagggctgtgtggccctgtctgaggggtgtttccctscctcctcccgtgtgccaccctttccttgctgaggagcctccctgattttgtgttactttttcttttcttttcttttcttttttttttttttttgagacagggtctcgctctgttgctgaggctggagtgcagtggcacgatcacggctcactgcagccttgacctctctgggctcaagcgatcctcccattccagtctcccaagtagatgggactacaagtgatatgaccaccacgcctagctaactttttttgtattttgtagaggcaggggggtcttgccactttgctcaggctggtctccaactcctgggctcaagcaatctgcctgccttcacctcctacagtgctgggattacaggcatgagccatcacacccagcctctgtgtttcattttttatctctggggatgagcacaagccagagctctattctaccaagctactatttggattgtacaatatcgtgattcttagaatgtaatgaaaaaggaaagccctttctt

SEQ ID NO: 854777 - DNA, 618 bp, Homo sapiens
aaaagtctctttgtcatctgtgaattcttggggaaggagaactttccatggaatgaaaagtgtgggcactgccatgaagggctgtgtggccctgtctgaggggtgtttccctgcctcctcccgtgtgccaccctttccttgctgaggagcctccctgattttgtgttactttttcttttcttttcttttcttttttttttttttttgagacagggtctcgctctgttgctgaggctggagtgcagtggcacgatcacggctcactgcagccttgacctctctgggctcaagcgatcctcccattccagtctcccaagtagatgggactacaagtgatatgaccaccacgcctagctaactttttttgtattttgtagaggcaggggggtcttgccactttgctcaggctggtctccaactcctgggctcaagcaatctgcctgccttcacctcctacagtgctgggattacaggcatgagccatcacacccagcctctgtgtttcattttttatctctggggatgagcacaagccagagctctattctaccaagctactatttggattgtacaatatcrtgattcttagaatgtaatgaaaaaggaaagccctttctt

SEQ ID NO: 854778 - DNA, 589 bp, Homo sapiens
tagcttttgggggtacaaatggttagactgacaacccacagaatggcagaaaatatttgcaaactatgcatctgacaaaggactaatatccagaatatacaaggaactcaatcaaatcaacaaaaaaatccccagataatcccatcaaaaagtgggtaaatgacatgaaccaactgttgcctcttgaggctaactaggaggcggtaaagggtccatctgtccaggaaaagaactggggggcagtgggggaagctctcctgggtctgctctggggagtccacctctgtctttgctccagttgaaagcccaagccacccactccctattgcatgtgctttgggtgccaggaggaaatttgcagctgtcaccaaactcaagttttaattcagaatttccatcttctctttcattagatgcttgccaatgtttcacagagcaaactggaccgacttgagtttcgccttctttctctgactgcttgccctctgacagatgacaagrtgggctgacaggatgtgtgtagtgcctccctcttgagggatgccaagtgcctggagccttctatttcttggcttccccagggtgggtc

SEQ ID NO: 854779 - DNA, 648 bp, Homo sapiens
aataagagaggactttttttaacttctctgacttgctttaagtatgatttgcagatcacactacatctcttcctcagcttctttgttgccatcttcagtcagtattcattccacacggtacgaatcattaagagtttccattttgtttgtgcagtttctggcaatcaagggccaaactgatttcagagctattgagagaagcagctttagacattaaaattagttgaagatttaagtgtactttgttcccaagtgcttaaattactgtcagttttgattaaaacttctagtaattacaataaaaataaagcaatttaacttaaatttgtaccaattacctccctgtccaagaaaatgctccaaacccagaaatctcttttatttaaacatctcattttaatgtgtttgtacatataaatcttgtatttacagataatttcagaaacacatggtatgtatagacaaatgagtaattattccacgaagtatgtacgatttatgtgcagaaaggaaattattgtacaatacttatttcaggaatctgtactttgaaaatagagctctaacttcaggcaacatcatagatsaatgtcctgcaaattattctatagtaagattggaaaatgtcaaaataagaatatgacatta

SEQ ID NO: 854780 - DNA, 466 bp, Homo sapiens
gccaattaactataatgtgaatattatgttcaaccaactgccttcttaatgagttctagatgtgagtcctatctaaaattaaatggttaaggaattcacaggatagaatgaagaagtgtataagagcttgatcactgtgtgtgagacaaaggatgcccacagctgcttttcttttgttcaaaagcagaaacatgccaatgaaatatcaccacagggagactacaggtagctgcaatctatctagatgttaaacgccaaaagctaagaagagcaattttcctctagagatgacataggttgattgagaagttgaaactttggtgtgataatggtacaagcttttttttttttattaccscacttggatatatggagtcagaaagagagaatcaaggtgaagaatgtagctatttggcaaacttcagccttgagatgctcatttcagcattatgattcagactatttt

SEQ ID NO: 854781 - DNA, 442 bp, Homo sapiens
ggtagctctgtttaagttctttgaaaagtctccaggtgtttttcacacaggctggactaatttacatttcaaggtataagtgtatacattacaaggtataagcgttctcttatctcagcagcctggccarcatctgttgttttttaattttttaatagtagccattctgactagtgtgagatggtatctcactgtggttttgatttgcatttctctgattagtgatgctgagcattttttcatgtttgttggccactggtatgtatgtcttcttttgagaagtgtctgttgtcctttgcccatttttaaaatggggttatttgttgtttgtttgttgaattgtttaagttccctgtagattctggatattaggcttttgtcagatgcagagtttatgaacatcttcttccattctgtagattgtctgtttactctgttgata

SEQ ID NO: 854782 - DNA, 334 bp, Homo sapiens
gcttagtttggtgggacatgaaattcttggctgaaatttcttgtctttaagaatgctgcaaacaggccccccatctttccttgcttgtaagatttctgctgttagcctgatgggcttccctttgtatgtcatctgacctttttctctagcaacctttaagagtttttgtttagtgttgaccttggacagtttggtgactatatgcctyggtgatgtttattttgaatagtatctcacaagtgttctttggatttcttgtatctagatgtctacctgtctagcaagattagggatttttttgaattattcccttaaatatgtttttcaggttttt

SEQ ID NO: 854783 - DNA, 510 bp, Homo sapiens
tcttaagatttgaaaggatgattctaattagattcagataaaactgaataatactaaaacagaataatccatttgtttcaaggatgaggcaatctcttttcaaaacaagtaagtwctgtatgaagtgattgtataacacaaaacacagacactagcactagagaaggagcagaaggatattttttgaaatcatttataattttaaaagctgataaattattgtatttattgtatttgttttttgctgtaaaaaatgtaaggaaacaaggcttctacacaataagccaataatggtaaatttgttaaaattacagactgacatttgaattggaaggacagaaagtagcatgatggtttctagaggctgagaaaaggaaggaggagagaattgtttaatgagtacagagtttcaagtttgcaaaatgaaaagagttttggggattggttacacagcaatttgtatttaacactactgaactgtcacttaaaatagttaagatggtaaatttc

SEQ ID NO: 854784 - DNA, 596 bp, Homo sapiens
aatcagtttcgtgatctatacagatttwaaaatttttttttgtctgagtttggccaagtcactaatttttttttcttaattttccaaatcttgggaacctaaaagacgtagtaggttcaaggcagtaagtatatgtgctgtatcctatcaaacaattatttttctaagattgggattacaggagaaattgttacctactaaaaagtgaactttctagtgttgctaaaacaattaagttatcacaaaatgactaaaatagtgcattgaacagcagtgattcaaaaatgtagcggcaagactctgacatttagatgtaatatttcctttgcttcttacaaacacatataaaaaatctagcagggcaaataaaagaactaggccatttttacaaagaggcttgataaagcaacacagatctgactgttctacttagagtggtcaaaactcaaaggacatataaaacataatattgttctgggagcattctctagggaaaaacaaatgcttttaaaatacttgaatcagaggaaaaaagatagctatgtagttctttagttcattggtaatttctccccttagatttttgtaaggttgca

SEQ ID NO: 854785 - DNA, 575 bp, Homo sapiens
ccactccccccaacgatttgtgagtactrttgtatattctcagccaatcagtgctttcagtaattttttgagttaagtgcaatgagttttgttcattattctgggcctctccttttgccatttgcttatgttctgatgagcagttttggctcataaaacttgataaaagttatggtgctggacctaccacaagattagcattatatctgtaaaaatgcaaatctcctggaaacttgtgatacattcaagagatggcttgttatgcagatgaaaagtacagtaggcaataaaaaattggtagacgtgtcctgatatgagaaagtgcttcattcatatagctgcagtctggaaagatttcccaactgttacatgaactacagctaggagaatctatgactgggaaaaatgcaacactttaatgactgttctattatgacaccctatagagctgggttggttgatgtccccccaaaattgtctaaatgtttgtgcaccacccctcaaaaaaacatgttgaaaactggatcaccagtgtgatagtattaggaggtagggcctttgggaggttattagat

SEQ ID NO: 854786 - DNA, 622 bp, Homo sapiens
aacaactctgtccaacagttgctggagcaactatccactagttgaatgatattaattttgctgtgtaaaaatagcttcagtttaaacattttaagaaagttatgggcaaaataaatgcctcagaggatttgtgatggtatagtttttggtttcgtggtctacagaaatatttaaaagagctacaaaattaggtaatttaagaagcacttactacacaaaatttggtatttttagtggtgaccttcttgaaaatttgtaaaagtttaggttgaatgatgacttaagcatcacttcatgaactcataatgaaatacttacctaaatgcttaaagagccagaaaaaaaggttcacataatctgtggctaaaaatgtttagccaatcatctcacctcagtaatcatattttatgatcaaagcaaagacaaaaagtaaaaataatgtctggtttctaggttcttagcttttgctttttcctagtaaggagaaaacatgctacmgttgatgtcccttcaaattaaaattaatcacatgagaactaaacagctacttcagatgattacagactgaatctagcaaaacaatatcagccttggtgacaatgaagagtaaaggtgttttatt

SEQ ID NO: 854787 - DNA, 630 bp, Homo sapiens
aaaccaaataaaaagttgaaaaaactgaaaatttaatgattcttagatctgtaggagaagggaagtcatagggcaacctgctgaccccaaaattggggagacagaagggcagacccagagaatcataatttaccygagtagaatcacaagcagatacttccatggtcaccaccactgctgtggtagaaaaatcttaactgtaattgatgaattgcttgaggctcagtgtggacaactctgaaagtcaaaaactccagggagactctgtcacagatgggcccctgcactttggtgagttttacttttaggtgcatgacctgggtctcccagtgaatatccgagaagaattagctagtgcttctagtgcttctagcagagggaggggaaagggagccattctgaaggcactccattcttcttaacgaggtctgccctcagtagaagctagttaactagagcctaatttgctggggttttatcagagcctaagctgacctggatgaaggaaaatcaccaacaccagccacctctagctgcccacatagaaaggaaatacctaacactagcccactttagccattctgtcccacctatggaagtgaagactgagaagcagttatgaagttcaca

SEQ ID NO: 854788 - DNA, 602 bp, Homo sapiens
gaagtgcataacattagtctttcatcatgtaataatagtaacacctaccaggttatcctaggtttgttaggagttgtgatttgagatatgaaggcaaaaattgtgagtctcttctgaggcctgagtggaagcatctctgtccctctaattagatggaggcaagagtcaagactgagttttgcctgattttcccagatgtggagacccagggactcaatgttgaatttcagtgtacagggaaacttcaatacacggtgccacatctgctgcaaagattctaaatcaggtcatgaaaaatgtaagaagaattcttaaatgcgccagacccagaaaagattgatgattagatttcacaacagacttcactaacatttcaggtataatttacatttgaatattttttcctgacacaaaatttaatataatattcaagttaaataatgtccaaggcattctttgaatcattgacaagaaagtatatattttgtacaggcccttttctacccttagatttttcacaattcattcttttagatagaaaagaaatacatrcccctgaatatccactcactgagtcactgaaaggcaatggcccaatacaa

SEQ ID NO: 854789 - DNA, 622 bp, Homo sapiens
caagcgatatagcaacgtatgtgagtgcctctgatgatttagcataaagcmgtcctgagccacatgacaggcacagccgcgaccagggacacaggctatctcataaagtactagcatgaagaattcagcagtgggactaagaaagaataaccctgaattgttcagtgtcagccaggagtatgtgagttttctgcaggagttgaattcctagggcaagagtttaaaattttcagaaattagtgggaaaatcaaagtaaaagaaaatactcattcaatttctacatgtcattatgataaagaagagaaggatacagaagcctagatatagtcaggacagaacttttttgtttcagaaactttttgtaaatgatgtctgtcttatttaaaaaataatccccagtatctttgcccaagacttgagtaataattttgtttgaatctcctatttttaaatttgtttcagaatacaacctaaaaggaacaaactaatgctctactcagtaggcctcttttcccttttcctaaagctcgtggcccagagtctctaatctcaccctcacaggcaatggggagttctagagcacacaagaggtccgtactctggaagcatctatgtttcttc

SEQ ID NO: 854790 - DNA, 471 bp, Homo sapiens
aatattctaatcctattcaagatcatcagatacattcatttttaccacaccgtgtataaaatggtgtgtttatgaaaaaacttagtatccatttatttctcctttgtgtattstaagacttgctttccttttttgtttttggcctcattaagtagattttatttagcattatttctttagtatgatcaagccaattatgaaattttgcacttttataaatggcattagctttccttatgttcaatatttccaactatgtcaatagatacgtttataattttatgatctttcaacaaggtcagttgagtttatcacctgtagttcagcatcagtgctgcaagtaattcttcgctggttgtctttggacctttaagaaagagaatgatacatagggttattaagcaactaattaacctttgtgtggtgtaatgtccctttctgcactgagattatgcatgttctcttctttca

SEQ ID NO: 854791 - DNA, 663 bp, Homo sapiens
tcctttgtattccactgtgtgactggcacaggtctcttcctgctgtgggccggcatcaaaagcttgttgactgcgtaactgtgccgttaagctgcrcggggaaaggactcttagccaacatccttctctcggccccagcagaaaatccagcatggtcatatgactcatctgggacccagaacgagctaggtgttgggaaaacaaagtacaaagcccccagcgtgctctgttccccacagctcgggtcccaggactggggctccttaagctgagtaggctgagagctaggctggggctgcctgtcccctccagcccctgcctgcttgattctgtcttcacagcctgggggttccacaaacaagaaagccagtctggagatgctcccacgctccttccccccagcaccaaggcctaaatgtccccacttacgctgcatgctctctgacaccctcacagccagctcattgtaatccagatctccagcaaagtcagctcccaatagtcctccattgccagcatacatgccgccttctgctgctgccccatagcctccgcctgggccgatgtcagtgccatagggacccctgtctcctgcagcttcaccaaaggcaccgcctgcacccagggagcctgcaccacctcctcctgtgctcatggaagagc

SEQ ID NO: 854792 - DNA, 623 bp, Homo sapiens
cattaaaataatgaagtgaaaatagtaaaattatcaaacttgtaggatacattgaaagtagcgtatacaagaaaattctaaatgytttttagaagacagcaaagggtgaaaattaatgagctacgaatgaagcttgagaaattgaaacaaatcacaatccaaataaagtagaaagatggatattctaaagaacaaaaactatgaaatggaaaacaaagccaaaagtttgtctttggaaaaaagaaaaaaaaagctagacccatggctggcaagattgattaaaagagagacgacacaaattattaatattagaaataacaaagggtattaataatccagatatagtagaaatgataaagatcatgaaaaatattgtgaatatttttatgtcaatacatttgaaactgtagatgaaatagaaaaatatggcttattaaaactgactcagttgggcaaggtggctcacacctgtaagcccagcacttcggaggctgaggtgggcagattgcttgagaccaggagttctagactagtctgggcaacatagtgaagctttgtctctgtttaaacaaacaaacaaacaaacaaacaaacaaacagaaacactgactcaagaagaaata

SEQ ID NO: 854793 - DNA, 515 bp, Homo sapiens
aggtgaagagaactgggcccgtggtggagtctgattactcctggtacacatgcaaggctgacacaggctccgatacactttgagcatcttcrtgcaaagcagagttctttctctggctctcagaaggattttctgattattttccatggtctttccctggagttgccatgactatcctcagtgggacagcttaattccaggtgtagaaacaacaatagatgcagtttcatccaaagttgttgaacccaagaaaagatgatgacaactcaaaacaaaaatgaaagtttctttaaggcatggccacctcacagtcacactcacagctggagtttcctgctaacgtgacccttgagtctttggaggtccgggccaactgacaaaacaatttgttcatgatggtggctcagtgacaaagaggaaatcgctcatggactgctggggcagccaaacctgtccaaagaacacagctttgtggtactgtagccacagggaactactgggcgaggaattctttt

SEQ ID NO: 854794 - DNA, 514 bp, Homo sapiens
ttttctttgtgacataacatatggtctatccttgagaatgattcatgtgctgcagaaaagaatatgtattctgcagctcttggatgaaatgttctgagaatatctattagattcattyggtctatagtgcagattaagtctgatgagtctttgttgaatttctgtgtgaaagatttgtccatttctgaaactggaatgttgaaatctccagctattattttattagagttaatctctctcttcaactcaataatatttgctttattgatctagatggtctagtgttgggttcatacatatttctaaatgttatattcttttactgaattgactatcattatatagtgatcttttttgtttcttcttatagttttttctttaaatctattttgtttgctataagtacagtgactcctgcttttttagtttgcattggcatagaatatctttttctatgcctttatttttagtgtatgtgcgtctttataggagaagggagtttcttgtaggtaac

SEQ ID NO: 854795 - DNA, 642 bp, Homo sapiens
taatatttgacctgcctaaattagaccaaatgtctttattttactaataatttttaaaactttttgtttccaaagcttactacagtcacatgaactaaaaggcattacaatttttattttttcagasaaaatatttgatataagcacttattatctttaaacccattaatcagagctcttttatataaacatcatgaacacaacacatataaatacatagacaaacagaagatccagtagttgtaaaattttttatttgccagtttttaaatgtttcttaattgtattactggctttagtgtggagcccttcaaggaacaggggcagaaaagcatgcagtttctagggcccaataagcagccacagctggaaggcaaaaacagatccccaaaattaagggtcccatttttatatcacatcctggatcccccaaaagagggaaattctatggaagaagacagtgcaatgctttcaccatgtatttcatcgcaaagcaccccagtgtctcagtttattctgtgataagcccatccctcaagggagtcttatctctcagtgggggtgggggaatttccatacgttctaggtggccaagagcatgcttctatgatccaaacatgcaaagagctgagtactccccat

SEQ ID NO: 854796 - DNA, 593 bp, Homo sapiens
gggaaattctatggaagaagacagtgcaatgctttcaccatgtatttcatygcaaagcaccccagtgtctcagtttattctgtgataagcccatccctcaagggagtcttatctctcagtgggggtgggggaatttccatacgttctaggtggccaagagcatgcttctatgatccaaacatgcaaagagctgagtactccccatgactgacattattgccccataatgccattagctatccctaaaggtatatttcttacctagttattacacaccaaagttctctcataatgtgaagtaatttctgatatacccccaaaagtaaaaaatgtcagataacccaattcaaagcagaacagagccttagattttgagagggatctatccactttcaattcctggggttccatgagaggagtttttttcccccaaaatagcatgtgtgactatttttgcccaaggagtcccaggatgttagaacttgaatacgattttcccaagaagtcccaggatgttagaacttgaatatcacttttaattaagctgacttttaaccatagcacttttaaataaaaatccttttaaatctcat

SEQ ID NO: 854797 - DNA, 573 bp, Homo sapiens
ttaaatagattaaaaagtacataggattgtaaggaaagccaattatattgaaatacagttatcaaaatatgaaaacaatatcatgatagaataatacctgtggttaattaatgcattaagwgataagatctagtggcaggactagtaaccactataattttgaagtaatgatgagagtaaataacattttgagataactataggaatattagtttgatataaaatatccgtcatcatttctattggtgacaaagttacgggtatgggtaatattactttgttgttgcctacattcataatgaacataaatgctaacttttggtgaaaaattagtgaaaattaagatgcatcacatactttgtgtactttaacttttgatttttttaaaaaaaaaaaaaccctcagctatagattaaaaaagcaaaatttaatctgtcagtcatagctaaaaaatgactttttggtatccaccctcccctgaagagtagaaacctacagattctgtgaaacctaggacatcaagacttccagggaataaacaatatgtcaatttaattgtttaaaaatggatta

SEQ ID NO: 854798 - DNA, 627 bp, Homo sapiens
tgcatatccctgggttgagattttcatgagtctattttgagcyagcataattggcaaaattttctctatatggaacttataagtaactttatggcttatttagagagtgcagattcaaaattaggtctaggccaagaagcaaggccatgtgacatagatgctaatggtttatatctctagagtcccaccacatatgagttgaacctgtttggacacatgaaaatatacaggaatgatcacagcccctccatatggatattagagtatgaatttttgaaatggtaagaatgggtaatcatgttattgttcccttcatccatatgcaaaatagggaatggaaatatctccttttgtgttggggatgctttctgtgtctaagaagcaagaatctagaaaatgttttttcattgtatgggctgtagtaacattgtttggaatcttcaagcaagacaattgactcataagaatgaatataaaaagaactccagcatattagaaatcttccttatgctaatgtgttctgatattagaaacaaattgattacatctgtaaaatagaaaagaaagaaaaatgatacccccaggatgcaacagggaaagtttaataagctgccttaaatcattcaa

SEQ ID NO: 854799 - DNA, 507 bp, Homo sapiens
tgggattacaggtgtgcaccaccgcacctggcccacttcaagatttttcagaggaagagagggtaagaatattctctggtatatggctgtccatcacagtacaagctacctttataggaaaaaaatgctggagawatcccaccagcaggatgacatccacgactaaggacacagagcagcaggggtgccccagcttccacactgaccagctgtgtgatcgcaggtaatttccctcatttccctatgccttaaagtccacatctgtaaaccccaggctaatgtctacctctccgcatggttttagaatgaaagatttcacaggaagcatattataaatgcctaatcattcttaacaggttaatcacttttctcctcctcctcctcatgctcataaccacagtgcaggcaaggaggctggtgcctagcctcctgagtacctactatgcacctggcactatgttagctgctaggtcctgtggggaaacagaaaaacagagtagccacact

SEQ ID NO: 854800 - DNA, 612 bp, Homo sapiens
aaacaagtatagtcatttctcacttgatgtcaacaggctgttagaaactgattataagtgaaaccacctagagcagttccccgaatatcgctcaatattgctacarcgttgatgagaaaaatattggtttcattatatgttgctttgcttaaagtcatagaaaaacatgcctaaataccactcaacatccagatccaaataaggaaaaagatgggtatgtttgattgcatcaaaaacaaaaccttttgtgggagataacatagccaaaggaaaaagacaaactgagaaaaatatttgcaaattatatcacagaataagagttaatagcaccatcagagagaaaatagataaatggaggaattctctgcaaaaatgggctaggttatttaacaggtggttaaaacaaacaaacaaaaaaagccaaatggtttttagtcatgtgaaaaaaatactctcattcataagagaaattcaggtcaaaattacactgatgtcatttctcttaataggcaaaaactcacatttgccaacataatcattggtaagactacagaaaaacagatattctcttacattgaatagaggaaatgcaaaatgatatgacactcctgt

SEQ ID NO: 854801 - DNA, 640 bp, Homo sapiens
gtaaatttttcaaaacaaaattatrgtggccaactcctccaaaatgtcaccagttaacatcatttaaagctatctacatattacaagaaaatgagacttttacaatacaattccacctttgtaaagggattaatgactgagttcacacaacggggttctgaagttttggtaatgtcttgatctggccactggtcacataggtatgttcactttgtacaatttcactgggctgtaccttatggtatgtatacttttctgtgtgtatattatacttgaattaaaatttccttaaaaaatgaactctataagcaagtaaacaaactaacataaaaagagtactaatggtactttagcagacaataagcttaagtaaagaaaaacatgtaagtcagtttaatattggccgggcgcggtggctcatgcctgtaatcacagcactttgggaggccaaggtgggtggatcacttaaggtcaggagttcgagaccagcctgggtaacatggtgaaaccccacctctactaaaaatacaaaaattagctgagcatggtggcacacgcctgtaatcccagctactcgagaggctgaggctggagaatggcttgaacctgggaggcaaagggccaagatcacactactgta

SEQ ID NO: 854802 - DNA, 563 bp, Homo sapiens
aggatgtcccactggagtctctatgcacatttgcactgatggtggtgttagtttggggttgacatgctggtaggcatgggactatgagtgccctttgagcatgtttttacacgggtgatggtgcctgctcagagtaggggtgggtctgatggtctccgtgcatagtttctcaccaacaaaagtgtttgtgtagggccaaggtgctggcaggtgcttgaccagagtcctctttgtgcacgttcatgcaggcagcagtagccgcacagtgcatgggtggggacattggcctgcatgcctagttttgtgcaagcagcagtgtcagtatgggggtggggagctggtgggtgtgtggctggcagtttccatgcccttggacactctgatggcaatggcagcatggcggggggcacggtgcactcacactggcagcaggggcatggtaggrtgcatgtgcacatgcatgctggtggtgaaggagggggaaagtttcacccccctacacacagacaccagctaagcagtgtaggaggtggccgtgggcaagtgtgtgtaggtaaagtggc

SEQ ID NO: 854803 - DNA, 615 bp, Homo sapiens
gttacattattctactgtatatcacactttatgtttgtactagatagtatttcacatgaaatactagatttagcctatgaaccaaaaattgcactgtatagctgggaaagggaagtctgatatgattttctattaatacttagtcctctgatgaacaatttggcagtatctttttgcactaagctcccagaatcccttaattgaagttgactttggtgatgctcaagccactgcactgtaattttaaatttcttatgaacaaaaatctattaactaaaaggatagccaatgttctgaacaaatactgttgattcacatttattccaaatgattatttgtatcaccttgcatatgtctatcttaccttatttcttagatctcaaaatgtctactgggtatattttcttttatgttgttgttgtgctttttattattattatttcattcctttttgggaaacaggtagtgtttggttacatggataaattctttaggtatgatttctgagattttggtgcatccatcacccaagcagtgcacactgtacccagtgtgtagtyttaaatccctcagccccttcccacccttcctctcaagtccccagagtccattgta

SEQ ID NO: 854804 - DNA, 434 bp, Homo sapiens
gaaaagagtgaaaccctgtaaaatacttggagagtgattctgagccaaatatgagtgacggaaggcccatgatgccgtcccaggagatcctgagaacatgtgtggcccgagagggttggggtgcagctggtttgatacatgttcgggacacgagacatcactcagtacgtgggagatgtacatgggtttggtccagaaaggctgcgggtgtccaggtcattggtggattcagtaattttccaattgacaattggtcaaaagagttaagttattatctaaagacctagaatcaatagaagggaaagtcagggttaagataaggtgttgtggagaccaagtatatgcagatagaatcaataraagggactatttcttgtcagagtctgttctattagtcttaaggtctctgttttaatgttaatgctggtcagttt

SEQ ID NO: 854805 - DNA, 474 bp, Homo sapiens
agtgggccccacacagtgcagcttcgtagtctgcaaagaaaatgtccaaagaatgagttgtggatcctcccagccagagcccagatcccaggcaccccgccccacttcccccgaccaccaggcggccccagagcccaggttgtccctcccgccacctcctgtaatgggtccacccccaactccggtcagactggtcacagagcaccgcccagctccagccctcctctctgcatcctgggtcccagctcaggggctgcagagatcaacccagggcagaggcctggaccacgtcctccccagacacttccagaacccacacaaaagcacacatccacgtttyccttgttctagaatatttggcccctttctgccccaaggatgtgggggtcaaagccccggggttcccggccgaggagaaaggaagcaggtggagtcccaagtcaggaggcaggtgctgctggagcaggtgcaggt

SEQ ID NO: 854806 - DNA, 629 bp, Homo sapiens
tgcggaggctcctgcttttcatcacacacctgtcaatcacacctagatttccaagtgagtgctggsaatcgctagctttgtgaacttgggcaattaagtgacttctctctacttgcctagatgttcaaatctgtcatatgtgggacaatgacagacacctcccaaggctgcctgagtcaatgagataactcaggcagagacccacggcagcgtgaaacccgtgggaagcaaatgtccagttgacagcaattatcctagtaactctgttttcaaccatctccaccttttataaaacagcttcaaaccacctctactcaaggacagatctaaagcaccagatctagaattaaacagaattatacacacggctccttcaacaggtcaccccaggcctgaccttcagaccaggcctttcatgccttttcctgtctgcagcaaagtgcggtgtggttaatctccaaggccgtcgcaaccctaaacggttacctccaagcgagcaggacgcatacttactcgcgttttttcttacggtgaaacccttaattccaaagcatgtaattgctacaaaacataacagaatcattccttccacctatctggaacttactagaacgaaaatgtgagcttcg

SEQ ID NO: 854807 - DNA, 629 bp, Homo sapiens
tgcggaggctcctgcttttcatcacacacctgtcaatcacacctagatttccaagtgagtgctggcmatcgctagctttgtgaacttgggcaattaagtgacttctctctacttgcctagatgttcaaatctgtcatatgtgggacaatgacagacacctcccaaggctgcctgagtcaatgagataactcaggcagagacccacggcagcgtgaaacccgtgggaagcaaatgtccagttgacagcaattatcctagtaactctgttttcaaccatctccaccttttataaaacagcttcaaaccacctctactcaaggacagatctaaagcaccagatctagaattaaacagaattatacacacggctccttcaacaggtcaccccaggcctgaccttcagaccaggcctttcatgccttttcctgtctgcagcaaagtgcggtgtggttaatctccaaggccgtcgcaaccctaaacggttacctccaagcgagcaggacgcatacttactcgcgttttttcttacggtgaaacccttaattccaaagcatgtaattgctacaaaacataacagaatcattccttccacctatctggaacttactagaacgaaaatgtgagcttcg

SEQ ID NO: 854808 - DNA, 629 bp, Homo sapiens
tgcggaggctcctgcttttcatcacacacctgtcaatcacacctagatttccaagtgagtgctggcaatcgctagctttgtgaacttgggcaattaagtgacttctctctacttgcctagatgttcaaatctgtcatatgtgggacaatgacagacacctcccaaggctgcctgagtcaatgagataactcaggcagagacccacggcagcgtgaaacccgtgggaagcaaatgtccagttgacagcaattatcctagtaactctgttttcaaccatctccaccttttataaaacagcttcaaaccacctctactcaaggacagatctaaagcaccagatctagaattaaacagaattatacacacggctccttcaacaggtcaccccaggcctgaccttcagaccaggcctttcatgccttttcctgtctgcagcaaagtgcggtgtggttaatctccaaggccgtcgcaaccctaaacggttacctccaagcgagcaggacgcatacttactcgcgttttttcttacggtgaaacccttaattccaaagcaygtaattgctacaaaacataacagaatcattccttccacctatctggaacttactagaacgaaaatgtgagcttcg

SEQ ID NO: 854809 - DNA, 589 bp, Homo sapiens
agtggcgaggcccacgcctgtgcaggaggcctgaggcatggggtggcctccctcacagctgtgcccacccagcctgtgcgcagggcgatgtgctcctatgtctgggcagtgagctgggccctgcggcgagagcagcaccagctcgatttcacacggagccactagggagtgggccgttcccttggccatacccgtgggggacccagttcatctgtggaattaggaaccccagagtatttaatctcccatctcaggaccttcgtggggagtggggcaggtgggtgggggttcccgctgggctttcgtggtgcatgccaggcactttagaatggagcgccccagtgagccagcggctgtgcttcaggcccaagagcagggagtaagagagaagcttgctcaggcagaacaggtgacactggtggcgggggctgcaccccaaacacttgccatccgactaagggkgtggggcagcccttctttccttagtcctggcatgtcgggtgggtcagcttggtggacagctggccctgctgacccgggatccgccctgggttccccatggcctggaggcaggaggagatggccactg

SEQ ID NO: 854810 - DNA, 576 bp, Homo sapiens
attctgagtctagatcgtaaggaattaacatttttctgaacaagggcttacagttatactggtcttttaattttattttaaaaagtcagtgagactacagttgtyattttttaaattctttcaatttttaattatgtaactacaaagattctgcacaaattttgggaagtggcctttaaatccagccaaaataaagactctagtgcaacaatttagaggtgcagtgggcctatatataactggaatataagcatgcctgtagttaaatgttctattcttaatgtcccaccacccacccaagcatcatgggtcagcctagatcatacctgttatggtagcggcaggtgctttttacttgaataactcccttttcataatgcatgtctgtgtgctgcacatgcacacacacaaacacacatacagagacacatacttaaactctatatatcaattctttgcaaattctaccagtaatattgtagagcagtattattccagctattcctataattgaaacctgcagagtcagctattgagcagcaaatcagggccccttattcaacaatgccagctcgg

SEQ ID NO: 854811 - DNA, 538 bp, Homo sapiens
tttataaatataatgcacattgaaccaattatttgtcaacaaatttaataagatatacttatagartgaaagagagtaaacagagaggaagagatagattttcatgtttttctgtgatttcatttggctgaagtttggttttttgtgtgtctgctaattgataaaatcattaaaaatgtttttagtcattcctttaaaatttcaaagaaaactaaaatatttaaaaactcattgtttaaaattaagagctaattgatgcagtaggtattgatgaaagatatgattatgtcatgttaggagaaacaagcataataatatttaaaataaattaatatgcaattactaattaaatcagcatataataccaggtaagaagaaatactgaaactggtctaatcatcccacagaactgatgtttatgttttcttctgaataaacctagaaactgatgctcccagttctgaaacttgcaaaagttacatttgccttatctgagttcctttcccaggaaaccaaccattagacctcccaggtagta

SEQ ID NO: 854812 - DNA, 538 bp, Homo sapiens
tttataaatataatgcacattgaaccaattatttgtcaacaaatttaataagatatacttatagagtgaaasagagtaaacagagaggaagagatagattttcatgtttttctgtgatttcatttggctgaagtttggttttttgtgtgtctgctaattgataaaatcattaaaaatgtttttagtcattcctttaaaatttcaaagaaaactaaaatatttaaaaactcattgtttaaaattaagagctaattgatgcagtaggtattgatgaaagatatgattatgtcatgttaggagaaacaagcataataatatttaaaataaattaatatgcaattactaattaaatcagcatataataccaggtaagaagaaatactgaaactggtctaatcatcccacagaactgatgtttatgttttcttctgaataaacctagaaactgatgctcccagttctgaaacttgcaaaagttacatttgccttatctgagttcctttcccaggaaaccaaccattagacctcccaggtagta

SEQ ID NO: 854813 - DNA, 538 bp, Homo sapiens
tttataaatataatgcacattgaaccaattatttgtcaacaaatttaataagatatacttatagagtgaaagagagtaaacagagaggaagagatagattttcatgtttttctgtgmtttcatttggctgaagtttggttttttgtgtgtctgctaattgataaaatcattaaaaatgtttttagtcattcctttaaaatttcaaagaaaactaaaatatttaaaaactcattgtttaaaattaagagctaattgatgcagtaggtattgatgaaagatatgattatgtcatgttaggagaaacaagcataataatatttaaaataaattaatatgcaattactaattaaatcagcatataataccaggtaagaagaaatactgaaactggtctaatcatcccacagaactgatgtttatgttttcttctgaataaacctagaaactgatgctcccagttctgaaacttgcaaaagttacatttgccttatctgagttcctttcccaggaaaccaaccattagacctcccaggtagta

SEQ ID NO: 854814 - DNA, 576 bp, Homo sapiens; identical to SEQ ID NO: 851089

SEQ ID NO: 854815 - DNA, 576 bp, Homo sapiens; identical to SEQ ID NO: 851090

SEQ ID NO: 854816 - DNA, 534 bp, Homo sapiens
cgtgatcaaagtgaagcttttgacaaattagactagtttgataacctgggttttaaagaaactgtatcctttttccttgattttagaagagaacagcaaaagataattataaattttattttaaaatataatgtgtatttttctcactaaaagacgagttaatatgaaattcctaaacttttcatactgttttactattgagctaacattactttcacatataagtaaaataaatttaaaactatgttttcaatcaaattagattataattttaagaaacatttttatagtaatggaatatagttttgaacttatattaaacccaaattaattggatacttggattatttttaactaaagtagaatattaaaatattggttaccagcgtaattttgacatacattcctttgattcttattttyacatgttatagagtagcaataacttagggccgtgtttgaaaatgtcttaatgtttgcctttttaaggtatggtaaaaaaaaaaatgtgtatggccgtcagatatcatacta

SEQ ID NO: 854817 - DNA, 607 bp, Homo sapiens
tcaatgatataagtatccattacaaaagttacaagataacaggaaattaaacatgaaaagyagaaagattaagataattaatgtaaaataggaattaataaaataaaataagagaaaaattaccaaagtcaaaatttagttctttgaaaaattagtaaaattgataaaccccaagaaagattgatcaaggaaaaaagagagtacaaatgactacaattaggcattagaggaaataactaaattttccacagacatatattaaaataatgatatattgtcaatatatttggtagtatagataaaattaaagcttataatttaccaaaaattatacaaaaggtaattaaatataaatagtcctacatgtatttatacacaaacaccttccccccatccccaaaatctccaggtccagagccttcatcagtgaaattgaaatgcttaaagaaataacatcaattttaagaagctcttctagagaatagaatggcaagcaacaccttccaacttacctttcaaagccagcgtaactttgatactaaaatgtgagaaagatgtaaaaatacaggccaatttctctcaaggatgtagatgcaaaattctactc

SEQ ID NO: 854818 - DNA, 623 bp, Homo sapiens
tgggaagggactttcttctggctaggggaaacatcaattccttgacacaaacaaaaatygaattaagagtttattctgaattaatagtactgaggaaggttaatgaaaaataaacaaagagtagtcattaattaaaaatattagcaatccagtaatatagtctccgtatggagcatcctcactactaacaggcatctttagcatttattagatttcaggcaaggctctctttagtagcctttgttcaggcacacaaaatgacctgctcctttatacttctgtacttttaaacaatctatttatttatttagatggagtctcactctgtcacccaggctggagtgcagtggcacgatcttggcttaatgcagcctctgcctcctgggttcaagcgattctcgtgcctcaccctcccgggtagcatgtgcctgccaccacgcccagctaatttttgtatttttagtagagacggggtttcaccatgttggccagggtggtcttgaactcctgacctcaagttatccacctgccttggcctcccaaagtgctgggattacaggcatgagccacctcaaccagcccttctatgcttttgcacatggtttttccctttgcctggactg

SEQ ID NO: 854819 - DNA, 623 bp, Homo sapiens
tgggaagggactttcttctggctaggggaaacatcaattccttgacacaaacaaaaattgaattaagagtttattctgaattaatagtactgaggaagkttaatgaaaaataaacaaagagtagtcattaattaaaaatattagcaatccagtaatatagtctccgtatggagcatcctcactactaacaggcatctttagcatttattagatttcaggcaaggctctctttagtagcctttgttcaggcacacaaaatgacctgctcctttatacttctgtacttttaaacaatctatttatttatttagatggagtctcactctgtcacccaggctggagtgcagtggcacgatcttggcttaatgcagcctctgcctcctgggttcaagcgattctcgtgcctcaccctcccgggtagcatgtgcctgccaccacgcccagctaatttttgtatttttagtagagacggggtttcaccatgttggccagggtggtcttgaactcctgacctcaagttatccacctgccttggcctcccaaagtgctgggattacaggcatgagccacctcaaccagcccttctatgcttttgcacatggtttttccctttgcctggactg

SEQ ID NO: 854820 - DNA, 323 bp, Homo sapiens
tgcaagccccaagacttggcagcttccacatggctttgagcctgtgggtgcacagaagtcaagaattgaggtttgggaaactccgcctagatatcagaagatgtagaagtttgckgtaggggtgggtccctcatggagaacctctgctatggcagtgtgaaagggaaatgtgacattggagcccccaaacaaagtccctactgtggcaccatttagtggagcagggagaagagggtcaccgttctttagaccccagaatggtagatccatggtacggcttgcactgtgcacctagaaaagccacagacactcaatgccagcct

SEQ ID NO: 854821 - DNA, 537 bp, Homo sapiens
cccattcatttgacctgttccttgagtaattcttgagtgcaatgtccttcttccttagaataacataatgttaaaaagaaagcaaattctgttcttctaacttgttgcccaagttttctattctctccrgagtagcaatgttaaatgtggggaaggccggggatggcagtggaaaaagatttgccatgaagctaaagaagtttccaaggacctaaagtgggcctagcaattttgtacttgcaatttcatatagtttacatccccaaatgtatatggttctactgctcttgagtagcacactttttacttagaagtattgttctcctagcttcaaacatatgttaatattaaatatcagatagtgaatgtatatacagataagaatacaataggcctaaataatgtagactctacatattacacatccaacaggctatttcattctgacctatcactactctttttcccattattgtttcctctattgtttctatgccagccactgttggtgtctacccgatagccatcgtcagctag

SEQ ID NO: 854822 - DNA, 628 bp, Homo sapiens
gttctcatgagacctgatggtttaacagtggcatttccccctttgctgcctctttctctctctcctgctttgytgtgcttgcttgcccttcaccttctgcccacgattgtaagtttttttgaggccttcccagccatgtggagctgtgagtcaattacacttcttttctttataaattacccagtctcaggtagttctttatagcagtgtgagaatgggctaatacaccttcaagcctccccctacctgcaaatgagtaaacaagtacatttaaaccaaaataactaaaggagcacactggagaacagcaaaaaagcagccagaagaaatcctgtagagcacggaaacccagaaaggccacatagagaaggaaaagaaacaccttacctttaccacctcatgccccaagtggggatcagctcacaagcaggaaggaaggacagctccctgcaaggaaaaggtaagcaagataccccagcaacctctctcactactgtggacacttgcagtcattgcgactggagacccctgcagtctgcacaggctctgagcctggctgagggagctcccttccaccagagctgaggcagcactctgctctcagagggccgcaggcctcctgaacact

SEQ ID NO: 854823 - DNA, 649 bp, Homo sapiens
tcaacactatggccttccaaggattagactggatggtgccagatctgccagggatgggccactttgtcctggtccatgatgacccccacctactttgagrtctggtcattgttctctctcccagtcctctctcacatgggcatcagttaggcatcaggtataggttgaggccctaagaaaggacttagcacatgttgccaaaacaactctgtgcaccgaactcagtctaccctgcatggactgttgcttccattcccaaaacaaaatcactgaaaaggaaatcatatatttcccaaccacagggctctgccactgagagaagttaattggcttttggaaaaaaaacaacttggcttagtgagatctttttgttctcataaactctaaccactcactgaggatgcaaagtttgacgtcaaaagaagaggacatttagatttataaaaaaattctgagaaagataagtagaaacaatgaggcacagattaagagacataaaacaaataagaaagattctgttttgaaagtgaaggaaattgtactgtcacttgattgaaacaaaagaaaacagtttgacaagcatttattgagtactacctgtgtaccaggccctgtgctaaaagttagagatgtgaattagtcacagtct

SEQ ID NO: 854824 - DNA, 649 bp, Homo sapiens
tcaacactatggccttccaaggattagactggatggtgccagatctgccagggatgggccactttgtcctggtccatgatgacccccacctactttgagatctggtcattgttctctctcccagtcctctctcacatgggcatcagttaggcatcaggtataggttgaggccctaagaaaggacttagcacatgttgccaaaacaactctgtgcaccgaactcagtctaccctgcatggactgttgcttccattcccaaaacaaaatcactgaaaaggaaatcatatatttcccaaccacagggctctgccactgagagaagttaattggcttttggaaaaaaaacaacttggcttagtgagatctttttgttctcataaactctaaccactcactgaggatgcaaagtttgacgtcaaaagaagaggacatttagatttataaaaaaattctgagaaagataagtagaaacaatgaggcacagattaagagacataaaacaaataagaaagattctgttttgaaagtgaaggaaattgtactgtcacttgattgaaacaaaagaaaacagtttgacaagcatttattgagtactacctstgtaccaggccctgtgctaaaagttagagatgtgaattagtcacagtct

SEQ ID NO: 854825 - DNA, 636 bp, Homo sapiens
atgtgtagcacctccccctccctctcttttgctccttctctcttgtgaagcaccagttcccgcttcaccttccgccatgattggaagcttcccaaggcctccctagaagcagatgctactgagctttctgtacagcctgcagaaccctgagccaattaaacctcttttctttataaattacccagtttcagatatttctttatagcaatgtgggaatggtctaacacagaaaatcagtactgaggagtgggacattgctataaagacacttgaaaatgtggaattaggtaacaggcagaggttggaagagtgtggaaggctgagaagaagacaggaagataagggaaagtttggaacttcttagagactggttaaatgactgtgaccaaaatgctgacagtggtatgcacagtgaagtccaggctaccaaggtctcagatggaaatgagcttattgggaactggagtaaaggtcacttttgttataccttagcaaagaccttggctgcattgtgtccrtgccctagggatctatggaagtttgaactttagagtgatgacctagggtatctatctggcagaagaaatttctaagcagcaaagtgctccagatgtgccctggttgcttctaacagcc

SEQ ID NO: 854826 - DNA, 612 bp, Homo sapiens
tttcataagctcaataagaatttgctctctgtattacacaatacaattggaaacactggtttaattrccaaggctttgactgaaatgtaatatttgagaattaatagaatgcctcgcttcaaggattcccagtgtgatacagtttggatgtttatcccctctaaatctcatgctgaaatctgatccccagtgttgaaggtagggcctggtgggaggcctctctcgctatgtgactctactgactcccctagcctcctaccataagtaaaagctttctgagcccctcaccggaagttgaggagatgctggtgccatgcttcttatatagcctgcagagctgtaagccaaataaacctctttttttttttttttcataaattacccagtctcacatattcctttatagcaacacaaagtggacttacacacagcattacagtgagtgagtaaaaagttgtcacttcctggcaggcctaggaacctcaagacactagataaccatagacaaagtagacaaagtctgatgtcggccttggtttggcttcctagtgatgagaggtttttaaaagtataatctgagattgtttgtcaaaatttccagcaaatcaaatt

SEQ ID NO: 854827 - DNA, 626 bp, Homo sapiens
aaagttttaccatttaaggacactggatcccagtcctatgmacctgtgccttagcacgtattttttgcagctgctgatacactgaagagccaaagctaagctttgaaagtttggattcctgtgtgttgtgataatcagctggggtttggaaatgccttcaaaaatctaatgctctggccctttaacaaggcttctgaaaaaacaatttaacatctggaatcaagtattttgtggaagtccaagaccaacagggcaaagaacatttctttcagtaacagttaaaatgtggcacttccttctccttcatcaaataaatgggtttatttaacaaagatcctgaggtagtttataataagtaaaatatggcatagaagcaaggtatagaaaacaggatactccagatatttatcactgaaagtctttcctaaatatgctgctttattcttccagcatcattttcttttccaaaattcaaatccgaaaaacaatcgaagtcaagccttcttcatttaacctttctaagagactgcagagtgaggatgagtaaagaaattatagagttcatctttcatcttttccaacatacttcagaagaagacaaaaacagtaactgaatgtatgaattt

SEQ ID NO: 854828 - DNA, 626 bp, Homo sapiens
aaagttttaccatttaaggacactggatcccagtcctatgaacctgtgccttagmacgtattttttgcagctgctgatacactgaagagccaaagctaagctttgaaagtttggattcctgtgtgttgtgataatcagctggggtttggaaatgccttcaaaaatctaatgctctggccctttaacaaggcttctgaaaaaacaatttaacatctggaatcaagtattttgtggaagtccaagaccaacagggcaaagaacatttctttcagtaacagttaaaatgtggcacttccttctccttcatcaaataaatgggtttatttaacaaagatcctgaggtagtttataataagtaaaatatggcatagaagcaaggtatagaaaacaggatactccagatatttatcactgaaagtctttcctaaatatgctgctttattcttccagcatcattttcttttccaaaattcaaatccgaaaaacaatcgaagtcaagccttcttcatttaacctttctaagagactgcagagtgaggatgagtaaagaaattatagagttcatctttcatcttttccaacatacttcagaagaagacaaaaacagtaactgaatgtatgaattt

SEQ ID NO: 854829 - DNA, 597 bp, Homo sapiens
ctggggctagtgaagtgattggttcagggacttgcttggctagttaggcacacagctagggctccatctcctgactcttatcccagtgttctttctgcttctacacaactaagtagttctgtgtttagttttttytggttaaaaaatgttcctggaagcattgcttacaaataacttgaaatgccaaggaacgttatagtacagtggttaagagtgcagactggccaaacaagcctgtgtttgcatctcagctttatcattctactactatatagccttgagcaggttgtctaatttcttaaaacttcatattcctcaacagtgaaatcgggataacagagcacctaccacagaacagccctgaggacttaaataagtgaaagcattctgaaaaattaatagtgttaggtacatagtaagtgttcaataaataggaggtgttattattcatcataacactctaaaatttatcagaattcaaatttccattcttgtttcttaggtaaaatgaagcaaaaataaagtaacaacagacaaacctctttaacttgacatctttccaattcacaaccaagaggatgtttactgcaacgtgct

SEQ ID NO: 854830 - DNA, 573 bp, Homo sapiens
ttgtttcagatctgggctcatcccattttgccccaacactgtggcagcttctagatgctgtctccaccatacagccgccagtgtgaactcatgctgtctttaatggccaatctgaaagatccctgctatgctgaaaaccttcgtaagagagccttaccacggattgcctcactgatgtgtttctgtgagttgtgaggtgggtcacaggccatttgctactaataataaaaccccaaagactccatagactcactcctgtatctagatgccttcccccgtcgctgagtcaccagctgtgctgcctggcaaattccttctcctccagcaggtctcggctcagatgctctctctgtgaatccataatccgcagtgcccactcctaccccatccggctcacgtccttctcctacaggcttgctgtgctttgtatagacttccatttaagaattgtcttgtttcattgcaattgtttatacaaacgtctcccatttctttgtaagctccttaaggacagaggccaagtcttagctcttyttacatctccagtaaatagcagtttgtggcacattttag

SEQ ID NO: 854831 - DNA, 348 bp, Homo sapiens
gagactattctaagaaggccatatgcagcaggaggatgaatgcagattcaggctctggacacttgatggttccttaaaatggatgtgtaaatttaacatttaagatagggtcggatattaattaccaaaaaaagggtaattatttaaagaaactttgtggtgattacatctgtgaaaatgaagaatcattctgtaatgtgaatcctgactctaattcagaggtccttcactcaytaattaaaactgatggactggtcagaacccagtagatcccatgtattccaacttaacacgtatggtttataagtataaatttttgcatattgagctggattaaaataggggcct

SEQ ID NO: 854832 - DNA, 485 bp, Homo sapiens
gtactcagatcctaaaccatatggtatcattattattagtgttggattgccctaaaaggggaacacccrggggcctacctcaatgatttgcccaggtgggctcagtttcatttctttctctgacattctcaagcatcagtgctggattaccctaaggggcttcctcagatcgcctgtgctgtgcattttcccaaaagttcacaggcaagagagggaaaaaaaaaagaacaactcaaagctactaaagcaaccgcagaaatgcaggtcaaaatgaaaaggctctgaaattgctgagaaaggaaagaagtgaaagcagcaaaaagatggcagtcaaatgccaagagagattcaagggcaactcaggtgtgtaaagaaagaggtttctgttcctaccaatttgtgtttatgctcacaaatgtgtgcctgcgggatcaattatactctacactgttggccagcttttcttttctctttggagaaacgtt

SEQ ID NO: 854833 - DNA, 485 bp, Homo sapiens
gtactcagatcctaaaccatatggtatcattattattagtgttggattgccctaaaaggggaacacccgggkgcctacctcaatgatttgcccaggtgggctcagtttcatttctttctctgacattctcaagcatcagtgctggattaccctaaggggcttcctcagatcgcctgtgctgtgcattttcccaaaagttcacaggcaagagagggaaaaaaaaaagaacaactcaaagctactaaagcaaccgcagaaatgcaggtcaaaatgaaaaggctctgaaattgctgagaaaggaaagaagtgaaagcagcaaaaagatggcagtcaaatgccaagagagattcaagggcaactcaggtgtgtaaagaaagaggtttctgttcctaccaatttgtgtttatgctcacaaatgtgtgcctgcgggatcaattatactctacactgttggccagcttttcttttctctttggagaaacgtt

SEQ ID NO: 854834 - DNA, 532 bp, Homo sapiens
caagtagctctaactgggtggagcccaccgcagctcaaggaggcctgcctgcctctgtagactccacctctgggggaagggcatagctgaagaaaaggcagcagaaactyctgcagacttaaacattcctgtctgacagctttgaagagagtagtggttctcacaccaccaagtctgagatctgagaactgacagactgcctcctcaagtgggtccctgacccctgagtagcctaactgggaggcacctcccagtaggggctgactgacacctcatacatccaggtgcccctctgagacaaagcttccagaggaatgattaggcagcaaaatttgccattctgcaacatttgtggttctgcagcctccactggtgataaccaggcaaacagggtctggagtggacctccagcaaactccaagagacctgcagctgagggtcctgactgttaggaggaaaactaacaaacagaaaggacatccacaccaaaaccctatctgtacgtcaccatcatcaaagaccaaaggtagat

SEQ ID NO: 854835 - DNA, 642 bp, Homo sapiens
gctttatgcccatcttgaagaaactgttttacattattttacaagcaggatacattttgttatttggtatatctttttttcatttgtgtgaaagagagatttagaaaaacaaacttaagtcttagtgcagtgkctcacacctgtaatcccagcactttaagaggccgaggcaggaggatcacttgagtccaggagctcaagaccaacttgggcaagaatagggagatccctgtctctacaaaaaattaaaaacaaacaggctgggtgcagtggctcacacttgtaatcccagcactttgggaggccaagacaggtgggtcacctgaggtcaggagtttgagactagcctggccaacatgatgaaaccctgtctctactaaaaatacaaaaatgagctgggcatggtggcaagtgcctgtaatcctagctacttgggaggctgaggcaggagaatctctttaacccaggaggcggaggttgcagtgagccaagattgcaccactgcactccagcctgggtgacagagcaagactctgtctcaaaataaaaaataactaaataaataaaaataaaaacaaacaaacacatatgttcccaatatcccccaaagagccctcttgttttgtgttcaacaaatttttc

SEQ ID NO: 854836 - DNA, 359 bp, Homo sapiens
cagaccatattattaaccctatgccacttcaatctcccttaactaccctgtgaggggaacctgagagtctcattaactgggttctggatttagggtcactgttgtcaaaactctggtaactgttctcactrgaaagttatggatcagaagggcagtcttgggaaccagtgggaaagctagggaaacactaccaccctgactaggaggaagagcctatgttcatagcatattatttttgttttatgaaaaagtttatctgttcacccaacaaatatttgttgcatttttaccatgtgtcaggtacagtttaggtgctagggatacagcagggagcaaaacagaccaaaattctgttttag

SEQ ID NO: 854837 - DNA, 502 bp, Homo sapiens
ttgtctctacaggaaaaagaaaagaattagccaggcatggtggtgcacacctgtagtcccagctccttgggaggctggggtgggaggactgcttgagcccaagaggtagaggctgcagtgagctgtgatcatgccactatgctctagcctgggtgacaaagcaagagcttgtctcaaaaaaaaaaaaaaaaaaagttctttaagcaagaggaatatgatatcacagaatctggtattatacacaaagcaaagaaatctacacacaaaaaatgaagatttctggaaatgactaaaattaaatataaaaacttttttacttttatttttgatctctataaaaattattgactttcaaaaagaaatatagtggaatgtattatgggtttattgcacatttataaataaaaacaatcatagaaaagattaaagagaagaacttaaagtgtactgttactaggttcttcktttttttgagacgaagtttcgctcttgttgcccaggc

SEQ ID NO: 854838 - DNA, 614 bp, Homo sapiens
aaaaatgatatagcacaagcaacattgagatatattctggttgtaactgaaccttaaatataaacagwtcttcactaatacaagcaagaaaaacaagccatttacaaggatgttttgttgtttgtttgtttgttttagagatgaggtcttgctatgttattcaggctggactcaactcccaggctcaagttatcctcctggctcatcctcccaagctgctgtgactacaggcatgcatcacacccagcttaggatttttttttcttggtagagacagtcttgctatgttgcccaggctggtcttgaacccctggcctcaagcaatcctcccacctagcctcccaaagtgctgggattgcacacatgaaccaccatgcccgacctcagttgattttttttttctttttgtaagccacattggcttcaagccctccctggtctcattccatgtcagaaggagtggaacatgcttataaagacaagttgtcattcatgaataagagaaacaagcaaacatctcaaatatgaaaatagacaagctcaagtcaaatagcacacataaaccctttgtggaaaaaaaaatccaatgatgactcaaactaacaagaaggcag

SEQ ID NO: 854839 - DNA, 354 bp, Homo sapiens
gctttccagcccttttcaacattcacacacacacacactaatccccagaagatcttgttacaatgcacactcagtttcaaagctttctacaaagctacagcaatcaagacagtgtggtgctggcatatggatagacatatagagaaatgagatagaactgagggtctaaaaataaaccttcacatttatttttcattgatttttagaaaggataccaagatatttcaatggggatggatagaagagtcttttcaacaaawggtgctgggacaactggatatccacatgaaaaaaatgaatttggaccccttcctcacactacacataaagattaactcaaaatggatcatagac

SEQ ID NO: 854840 - DNA, 507 bp, Homo sapiens
gcaatggccattaatcattttaaaatgtccaagtcattagtaatcaaagaaatgcaaagtaactcctaaggatccattcttccctctactacattaacatgacaaaaggtaagcattaagaatcaattagatgcccacactcccttatactctgcccataagtataaattggtactatctttttggaacagtttttgataatatgcttccaaagctttagaaaaagaattcatagtcatgcctcagtattacctcctttagtaatctattctatgggaaataattatccacacatgcacaaatttttagtagcggtattatttgtaatagcagaagatttaggagcaccttaaattttgaaggataaagacataaatactatgcagctatttagtcagcttcaaagaataatcaagaatatgggaaaaggctcacaacagattttaaatttakaaaggaagatacaaaattatatagctcacacagtcttctttttatttaaatata

SEQ ID NO: 854841 - DNA, 644 bp, Homo sapiens
ttgtgatgtctttattacctgtagtgtgtatctgtattagtttgttctcatgctgcaataaagacatacctggaactgagtaatttataaagaaaaaggtttaattgactcacagttccacatggctggggaggcctcacaatcatggcagaaagcaaaggggaagcaagatatatcttacgtggcagcaggtgagagagcttgtgcaggggaactgccatttataaaaccatcagatcttgtgagacttattcactaccatgagaacagtatggggaaaactgctcccagtagtcaattatctccacctgtccctgcccttaaggcatggggattattacaattcaaggtgagatttgggtggggacacagccaaaccatgtcagtatccatttaagtctctgctcagttttcttagtagtcagctaatacttggtggtcatatatttctttctgcttttttttttttgaggtggagtctcactctgtcacccaggctggagtgcagtggcatgatcttggctcactgaaacctctgcctctcgggttcaagtgattctcctgcctcagcctcytgagtagctgggattacaggtacacaccaccatgtccagctaatttttatatttttagtagagctaggg

SEQ ID NO: 854842 - DNA, 565 bp, Homo sapiens
ttaagaattatgtttttcgtgtagtatctgaaaactgcctggactcttgattctattccattgatctatttttttctrtctttatgccaatccgacattcttttgattactatagctttagctttacgatacgatttgaaattacattttgttaggctcctgccttgttcttcattttcaagattgttttggttatcttaggtccttgaaatttttgtatacatttaaaatcagcttgtcagcttctaaaaaaagctgactgggattttatttgggattgcagtgaatctgtactccatttttgggagaattgatgtcataaaaatagtgagtcatctcacccacaaacaagacatatcttcctaattatttagattttctttaatttctctcaatgttttatcttttacagtgtacagatttttcacatatttttgtgagatttatcccttagaattttatattgtcagtgctactgaaaattatagtttaaaacaaattttaatttccagttgttcattggtagaacatacaaatgcaattgatttttgcatattgatcttgt

SEQ ID NO: 854843 - DNA, 565 bp, Homo sapiens
ttaagaattatgtttttcgtgtagtatctgaaaactgcctggactcttgattctattccattgatctatttttttctgtctttatgccaatccgacattcttttgattactatagctttagctttacgatacgatttgaaattacattttgttaggctcctgccttgttcttcattttcaagattgttttggttatcttaggtccttgaaatttttgtatacatttaaaatcagcttgtcagcttctaaaaaaagctgactgggattttatttgggattgcagtgaatctgtactccatttttgggagaattgatgtcataaaaatagtgagtcatctcacccacaaacaagacatatcttcctaattatttagattttctttaatttctctcaatgttttatcttttacagtgtacagatttttcacatatttttgtgagatttatcccttagaattttatattgtcagtgctactgaaaattatagtttaaaacaaattttaatttccarttgttcattggtagaacatacaaatgcaattgatttttgcatattgatcttgt

SEQ ID NO: 854844 - DNA, 592 bp, Homo sapiens
ctgtcgaaagagacctttctgacccattgaaccctgtcagttgctagttgtttcttatcccatgcacatctggaggcctggaagcactttcccttcaacttgccctacatttttgaataggatagtacccctaatgaggctgaattcatgttctcaggtcctgctgtttctgctttgactacagagaccctcctaggtaggggaccgggcagaggccagctggaccctctaccactgattccacccattttactcccagaggaggccattgcgtccaggttcttggcacttccataagttgtctcgcatgctggaggctggctatcctgatgcaggttctgaggggcctcttggtgtctccatatgttgtttaatcatggctacaggttcgccatcttgatgctgaccctaagggctgggactctggagcaagggcagaaaagcttctttgtctcagtttytactgagtgagtaagttcttccctgcaccatccaagggacagggagatggagtctttccttcaggccctggaatctcattcccagaagctgggagtcacccagggggaatccggtggttctcataactcca

SEQ ID NO: 854845 - DNA, 516 bp, Homo sapiens
gtagtggcacaatctcagtttactgcaacctycacctcccaggctcaagccaacctcccaccttagcctcctgagtagctggggctagaggcacgtgccactgctcccagctaatttttgtattttttgtagaggcagggtttcaccatgttgcccaggctggtctcaaactcctgaactcaagaaatcctcccgccttggcctcccaaagtgctgcgattacaggcatgagccaccacgcctggtcatgctgcttttataatttcttgccagtgcacctaagctagggaaccttttaaagatgggagaacaatttaataatgcttaacagaataaggacgcaaaaaagctatttaaaatgcccttctatggaggaatacttcagaacccagctctttcaaacatgttccaccctattggctctcagcaccctctctctcccttgatcttccccagcacttaattaccaccattgccactcattgtcactgactcaaagttctttaccctgtgcat

SEQ ID NO: 854846 - DNA, 349 bp, Homo sapiens
catataaaactttgataatcataaaaaattaattttaggaagaaaacataccaactttgttgaaattaatctgggcatatgacccaggtcctgcttttaaaaatcatatgatccattatgatgaacaagacttsacaaaactacctatcaaacagcctacactgagaatgacactaccaggaataggagagtcatgacagtggcatagccttgctgaggatttgagaattcttatcaaaattcctgggaatagattggatctgtaggtcaggtatcaaagaaagaagcgggttccttaaaccaatgcagaacatagtttctcctgattggggtgggtggttgggggacc

SEQ ID NO: 854847 - DNA, 594 bp, Homo sapiens
tggatccaggtgcttacaagctatctcattaagaacctgtctcgctccctcttttgagtctgtatttcctcyctgttggcttttgttgttgttgtggttgttaacttcagttctcctcttgcggaggcaaggtggccactagccactcttgctcatatttgtctggttttaacagctccagaagaaagagaaagccttgctttcctattgttccagcaaattttttgggcctggatcttatttctgcaacttgagcatgtgtccctctctgaaccagtcaccagtgccagggagaaactgggctctgattggataagcccaggagcccaagagccttgtgcccagggatgaggttagccttctacaaataacatggactaagagagggggaatgtggcttcccaaaggaaaaatgtcaggaaggccatttctaaaagaagtagaagaggatgctagacatgcctttcctccttccccccaaaaagacacttaggtccccaatatctactctgtgcgatatattattttgggcattatgggaatgacatgataaacacgacatccctcagaaggcttagactagaatcatgtgat

SEQ ID NO: 854848 - DNA, 651 bp, Homo sapiens
gctttggcgtcccaaagtactgggattacagaagtgagccaccatsccttgtctattttagtattttttaatgtggctactggaaaacaaaattacatgaggcttgcatatttccattggacagcactgttctagaactgtaaaatacaatatttgaattcagagaggtgaaaatactaaaattaattaataaattaataagattccaggatgctactaggtcaatatacaaaaatcagttgcatttctaaccctagcaacaaacaattagaaaataattttttttttttgagacagagtctcactctgttgcccaggctggagtgcagtggcatgatcttggctcactgcaacctctacttcctgggttcaagtgattcttgtgcctcagcctttccagtagctagaattacaggtgcacaccaccactcctggctaatttttgtattttcagtagagatgggttttcaccatgttggccaggctggtctcgaactcctgacctcgagagatccacccacctcggcctcccaaagtgctgggattacaggtgtaagccactgcgcctggctggaaaataaatttttaaaaggccatttataatagcataaaactcagactttcaagaataaacttaataaaaggctaagc

SEQ ID NO: 854849 - DNA, 651 bp, Homo sapiens
gctttggcgtcccaaagtactgggattacagaagtgagccaccatcccttgtctattttagtattttttaatgtggctactggaaaacaaaattacatgaggcttgcatatttccattggacagcactgttctagaactgtaaaatacaatatttgaattcagagaggtgaaaatactaaaattaattaataaattaataagattccaggatgctactaggtcaatatacaaaaatcagttgcatttctaaccctagcaacaaacaattagaaaataattttttttttttgagacagagtctcactctgttgcccaggctggagtgcagtggcatgatcttggctcactgcaacctctacttcctgggttcaagtgattcttgtgcctcagcctttccagtagctagaattacaggtgcacaccaccactcctggctaatttttgtattttcagtagagatgggttttcaccatgttggccaggctggtctcgaactcctgacctcgagagatccacccacctcggcctcccaaagtgctgggattacaggtgtaagccactgcgcctggctggaaaataaatktttaaaaggccatttataatagcataaaactcagactttcaagaataaacttaataaaaggctaagc

SEQ ID NO: 854850 - DNA, 494 bp, Homo sapiens
cctaggtacttgggaggctgaggcaggaggatcacttgagcycaggagtttaagactgcagtgagctatgactgtaccactgcactccagcctgggtgacagaggggaccctgtctctaaaaataaatacataaataaaaataaaaataaattagattgcctctgggaggaggggattctggactagaagtaattaaagaaactttcagaaatgttggtagagtctataactttatttggctgatgattacaatgatatatatatacatctgtcaaaactcattgatctgtacattttattttatgtaaaataattgtgtaataaaatatgtaacataattttttaataaaaagcaacagagtggagtaatcctggcatggcagccccagcatgttggttgggaatgtaactgtacaatggagagagatgaactctgcgacacactgagctgagtttatatcctttctttactacttatcagtggtgaccttgg

SEQ ID NO: 854851 - DNA, 640 bp, Homo sapiens; identical to SEQ ID NO: 830011

SEQ ID NO: 854852 - DNA, 525 bp, Homo sapiens
ctccagattctaaatgatctatttttgtgttctcttactctctgcttctatttggctcaaaatttactgacacttcaaaggatattaaatwgcattttttttcagaaatgcttctcactttagccatattgaaggtattttctgtccttcacagggaaggggaaatttgcccagtgaaactgatctttccctaagtccctccagaaaagccactgtcctgattttcctcctgtctcactagccaccttctggctggatactccgctactgacctccaaaatacacatttattgatctttgattgaataaacagacccttcctgactaccttgtaatttcagcagcaaatatgacccaaaactggaagaccctctcaatctattctggtttgagggctgcccaattaaaaaggaaaaaaactggcccaaaatatcattaaatggtaaaatcaggatcttatcctcataaatccatagattattacatccactagcgacctagagaccacttacctttttttttttt

SEQ ID NO: 854853 - DNA, 597 bp, Homo sapiens
gagtgaagatttcagcaaaacataaagcacaggacctgtaaccaccaactttggagactgcagaaaactcatttgcacacgggacctaagaatatttcaggaaaacagtgttgatgtagttsaagagccactagaaaacagctgctactctttttggataaagctccttgctacagccattcaggatgttgccatcaccaggctgtattaccacaacatgcttgaaaagcatctggcagactcggctgggctgggaccagctgggacctgttgctaggagcaaaacaaacaggcccactggttactgtctgttcagtttcaggtgcgactggaggtgccactgacaatctctctgaggcctagagtgctgagatactgttcttgttactcctccgtttcctcttctgttacctatcaatccctgtcacctgcttcccgttcacccaaccttcacgcaggagctattcaattccctggagaattaccagtttcatactttaatgttgcccaatagaaatgtcatatggccaaatatatcactgaaattttccagcagccacattaaaaaggtaaacagcaacaggtgaaattaattgt

SEQ ID NO: 854854 - DNA, 642 bp, Homo sapiens
gatgcatctatttttccttgcagtttacttggctagaagtttgtcagttttgttgtaacagaaactgctgtacgtagaccgttagtattgtggtggtgaggcraagtgggaagaggatgattttatagttttttgattaggacttttagtgagctgatgcctctgattgtgaacttcacaagtgtttctcagtatttttcttccttcttaggtgaggctggatggcttgcgtgggctggattttggtatttttcctctcccaggtggaaggtctgagcggctgatggctggcgtttggtagttctcttcccccaaggtccgttaggctctgataaagccccagcagcctgggctctgattaactaactggattttcctgagggcagaccttgttaagaagaacgcagtgttctggttccttttctcttccacccccagaagtgggaagagattcttctccgtttactctaagaacctggtgaaactcctggaggtaaaactcacaaagggatggagacctctatgtctgggtcccctggagcttttaatgttcaggcttgttcatactgagtcaccaggaatttatcaattacaattaggtgggacactcactggtttctgctctggtaagttgcaattctc

SEQ ID NO: 854855 - DNA, 400 bp, Homo sapiens
ttgcttctgcttttattgaaaaacaattatttcttgcctggactattttactcctcttctgttgcatttcttggggcctgggtctgtagtaccctctcactgcagtgtcttagtgtcattgccaaagctgccctcagagaactctatgtagtgatttctagtttttctctccaggtccctggccatgcttcttattgcctaatgaaccaggatcaaggagttcgatctctgcattagcctctgatcacagcccctgaacggccctrtcttatccttcgtgcatcctctctgtgactctcagaaaggctgtcagtttcctggtcagtcttttccctaataacctagggctcatagcatgctccataatgccctttcttttccctcaagggatctttgaaaa

SEQ ID NO: 854856 - DNA, 413 bp, Homo sapiens
ttaattattttgtttattcatataaaagcctgttccatgcttgatttttcacgtgctttaagggacacattactcaacagaagagaggcctkctgttccctccctgaaactttcgaatcaaccacttcctccatttactgtagctctgtggagactgaaaggaacataaaagcccgtgcaacacaatgctgattctatcgaatattctgcctcatccaaccctccctagcccagagtaattgttctctcttttgagtcactaagctctcatttggcactttgcatttgaatctttttatttcatgcactgcctcagcaacaggattgtcattcacttcgactccactcagcttaaaatatttattttgtgcctaccacaggccagggactgtgaggcactggtgataaataga

SEQ ID NO: 854857 - DNA, 611 bp, Homo sapiens
acaggccagggactgtgaggcactggtgataaatagaagacaacttggtccctggcttctagtaaattaattcatayacaggtgaagagactggcacacaatccaagcacagcagactatgtgtaacaagaaagaatgaccaaggtaacaggtagcaaggcaagaagatacagggttcagggcatcccttaacggggtgtcacctgtgctaggctcagggctgagttgaagttccttaggcaggggcagtggaaaagaaaggaagggaaattatatttcaagtggaaggaaagcaagtaaaaagaaaggactggaatatgcactatgtgatccatgtagggaaatggaagtagtttagcaccaataaagcataaaagataaaatagtgaagatcagcaggaagtaatgcttagactcagatgacagactttagtttattttattacaggatctggattttatcctagggctgatgggaagttatgcgatggtttgggtaagttagcaacagacattattatgagttaaaacatggaaaatgaattagaggacgactaagacatgactaagatggaggcagctgggagttaaagacatgtttagctaacaca

SEQ ID NO: 854858 - DNA, 613 bp, Homo sapiens
aaagatagcatggagacctgtgtttgccaaagttatgaccctgatgaatcttcagacttgtaattgactcacccaccccaccgtggttcattttaaacccactcctgcatgggggagttgccagggcctgtattgatccttcctcgtttttgcctccacttccttcccacccctctcggggccacctgctttgccacatcccataatgttgggatcttttatctccttacatatgcatggggcggacagacgtgagcagtgtaaatgatcgcactggcatgggaagcacgttgaggattccccagcagttgccattcatcggtcactaaaccatgatgactgtgttctgttgcaacaatggcaagacttttggtgacaaatgatgggccagattttctttacgggggaaaaaaatcaacattttttttttctcatttcttgtacttgttccctctacttgacccactgatgataccatgtggggcccataggttttggagatagctgtggataccatccacacctaaggatcttgcagagtaaattctgatgggatccaaggggctgaggtgrccaccgagtgatagagtgagtctgccagtgtaagaccaca

SEQ ID NO: 854859 - DNA, 546 bp, Homo sapiens
cctggtacagcatgtgcttaggccttcttcatgtttgtgttagccgcttatcctctggtggtttttagtacaatcatagctttattctatatggcatcccaagccctgcctcagaataacaccaccacttctgaagtggacggctggtgaggacaaaggacgttttcagagagcattcaggatgacatgtcgcaagccacagagggctgtatcaaacaaggggggcaagtgagaaggcacaatccccaacagagacaaaattgtgtggacaatttattcagccaatgatgtcccaggaaagaaacaaggtccacttgagtccaggatctgaacagttttgctaacaagaaattggaacttgctactgaaccagcagaggggcttgtgggtgaatgatagcatcattttatctctccatatagaagagctcctggcttgcaaagcatggagaccctgatgcagtgagttatacagtacagtcatggagttagtgttccaaatctcaaactttgggtgcctaacartcaattgtgagcttgtaaaaat

SEQ ID NO: 854860 - DNA, 574 bp, Homo sapiens
agcatgaatccatccaaatccttccatttttcttttcttttytttttctttttttttgagacagagtctcgccctgtcgcccaggctggagtgcagtggtgcaatctcagctcactgtcgccactgcctcctgggttcaagcgattctcctgcctcagcctcccgagtagctgggattataggcgcgcaccaccacgcccagctaatttttgtatatttagtaaagacagggtttcaccatgttggccaggcttgtcttgaactcctgacctcaagtgatctgcccactttggcctcccaaagtgctgggattacaggcgtgagccaccactcccagccaagatccttccatttttctaaactataaattgacattccaaacctttaagtgcttactttaaataaatatcctgtttgaaaacttgcttagaaagcaattttctattagaaaattacattacaaggtccttttgctcctaaacttttatgattattttagtgagcatctaccaggcgcttaaaatataagggaagattgaggtgatggatatcccatttaccctgatgtgttatt

SEQ ID NO: 854861 - DNA, 609 bp, Homo sapiens
tgcatagctcaccactcttggccaggaactatattaatgttagtttggagcctatagttacagatttccacctttgatttccatggaaacagggaggttactatacctacctatgctctgattgtcaaacatgcatgaagtttttgaaagtgaggctcttccttcttgacctagccaatcaagacatacaagtatgtaattttttaaaaagttgatgaatcttataaaattgtttttgtaggtagaaaatcgtcaaatataggcagttttaacttaatgcctaaaaattgtagtagttatgtttatataatattctttatattatatattatataatataattaggtatatatatatatatatatatattatatatacctaatttataagtctttttggagatggccctgataaaatgggagagaaattgtcattcagttgcttgggtagtggttgaagaaaagatctaaagctgtggtttgtgaactatacaccatggcatcctagcaccccatggaaaaatcccagrggcctcatggaaaattgttttgaaagcaaacacagaactacctatactagctggacaccacatgaagtagtttgagatag

SEQ ID NO: 854862 - DNA, 609 bp, Homo sapiens
tgcatagctcaccactcttggccaggaactatattaatgttagtttggagcctatagttacagatttccacctttgatttccatggaaacagggaggttactatacctacctatgctctgattgtcaaacatgcatgaagtttttgaaagtgaggctcttccttcttgacctagccaatcaagacatacaagtatgtaattttttaaaaagttgatgaatcttataaaattgtttttgtaggtagaaaatcgtcaaatataggcagttttaacttaatgcctaaaaattgtagtagttatgtttatataatattctttatattatatattatataatataattaggtatatatatatatatatatatattatatatacctaatttataagtctttttggagatggccctgataaaatgggagagaaattgtcattcagttgcttgggtagtggttgaagaaaagatctaaagctgtggtttgtgaactatacaccatggcatcctagcaccccatggaaaaatcccagaggcctcatggaaaattgttttgaaagcaaacacagaactacctatactagytggacaccacatgaagtagtttgagatag

SEQ ID NO: 854863 - DNA, 592 bp, Homo sapiens
agcctttgccctggctgtggtgagtggataggggtggggtaagtctgagacgggagcagatagagtctaggtctttggaactgctcctaggcaggcctcctttcaggatgtgtggctrataacaggacagcaggctggatggacccttctgaactaaggaagtggggaagagtttaccctgcaggtagagaatttcatgctcttcccacaatacccttcctcttttccttcttccagttgcgttagcaacttggcactccacagtcctttgctcaccgccccctgccttcccagtgcctacttctgttctcagtctctgtggtctctgattttgagtatttttccagaccctatatagcaaatcccatgtcttcccagatttagcatttcccactgaccttttaggttttggttcctcaattctggctaaatctgatttttctgtaaatttgatcctgtttgctgtatctcttccagaaattcctcaaaatttcttattgattgatggcatccgttcctgttttctggctttttaatgggtttatttttatttttatattccttttgtcattcccttggaacttggagtgac

SEQ ID NO: 854864 - DNA, 592 bp, Homo sapiens
agcctttgccctggctgtggtgagtggataggggtggggtaagtctgagacgggagcagatagagtctaggtctttggaactgctcctaggcaggcctcctttcaggatgtgtggctgataacaggacagcaggctggatggacccttctgaactaaggaagtggggaagagtttaccctgcaggtagagaatttcatgctcttcccacaatacccttcctcttttccttcttccagttgcgttagcaacttggcactccacagtcctttgctcaccgccccctgccttcccagtgcctacttctgttctcagtctctgtggtctctgattttgagtatttttccagaccctatatagcaaatcccatgtcttcccagatttagcatttcccactgaccttttaggttttggttcctcaattctggctaaatctgatttttctgtaaatttgatcctgtttgctgtatctcttccagaaattcctcaaaatttcttattgattgatggcatccgttcctgttttctggctttttaatgggtttattyttatttttatattccttttgtcattcccttggaacttggagtgac

SEQ ID NO: 854865 - DNA, 608 bp, Homo sapiens
tttctccttctgtttcatattctctttttttccttcccggtctgttgctcaagtgaacacatagaagagggttatgttggaccaggcrtggtggcgcatgcctgtaatcccagcactttgggaggctgaggtgggcagatcacttgaggtcaggagtttgagaccagctggccaacatggtgaaacccgtctctactaaaaatacaaaaattagctaggcatcgtgggaggtgcctgtagtcccagctacttaagaggctgaggcaggagaattgcttgaacctgggaggcggaggttgcaatgagccaagatcgcgccactgcaccctagcctgggtgacacagtgagactctgtctcaaaaaacaaaccaaaaagagagctgcattcattgctgaagggtgagggcaggtgagggaagggagctggtgttggaggagctactccatgcagggcgcacttggctgagtgctccactagttttctctcattcatactgtacgagagaggcactttatccctattttacacgtgacgaaatgggagctctgaggggacgtggggaatctctcagctggtgaggagcaacgacaggctgtcactgtaccc

SEQ ID NO: 854866 - DNA, 659 bp, Homo sapiens
attttttttttccctcttccagaagcttatgtgctttgaagaaggcctctttccccatcttaacagaaaaattccttgcttttaaatttccagagtgtctagttatctctctctccagctcatcctggtttcacccatgtctagttcccgtgtcaggcacattcaaattcacttgccttggccatgtctcttccctgactcctgtgttctacaaccatctccacgtggtctgtggagaagatggctgagtaccctgaaggtgtccagctccctcaggcctgtctttctcattggcatcattctgggtcagctccttgtccacgaggcttgggtataaacctcctcgattggtggaagtggactcccaggggtgagccatggcttggagacagtttggttcatgggccccagcacaccaaacataaaaggcctcacttgtggttgggatacatttggcaggtcgggggtttgacctggctttgggcctgtcggctccctggccgccatcagggctcagtgaagtgcttgagttaggagagagaagccagctttgggaagygctgcagccacaaagcccaaactccagctgcacaggatggtgaaattcaccaaagcaaagtgaaagttgtgaaacttcaagtgacatagttcccttttga

SEQ ID NO: 854867 - DNA, 567 bp, Homo sapiens
gaaatgtctcatatcagtcagatcctgcaggttgaatgtgttgttcaaatagttcacatacttgttaattttcattctagtagtgctatgcccatagttctgagcaaggataaggtgggttgatgaagttcccaaatacgacttaacatttgtctatttttcctttcagccctattggttttgctttatgaattttgagactgtcttggcattttcccctcaccttcttaaaaaaaaaagcagcaagcaatatttctgaacaatagggcttgaataaagaacttgtaaatgtactttatcctgccttactgcagcagaggaatagtgcagtgaccttggcatacctaagaacaatgggcatatatctgtcatttgttaagaacaatggacatattggtgtcatctgtttccatgaaaaagaaaaattactacacrgtagtgttcgggggctcaggccacatttgggattttcttgggatcccttataatatgagtactcacaactggagtgccaaatgtcctggcataagcaggaattaggggcagggattaaaaagtggatctgcc

SEQ ID NO: 854868 - DNA, 509 bp, Homo sapiens
tggtcctggactttttttgttggtaattttttaactaccatttcaatctcattrcttgttattggtcattcaggctatctaattcttcctgatttaaactaggagggttgtatttttccagaaatttatccatctcttctagattttccagtttatgtgcgtaatggtgttcatagtagccttgaatgatcttttgtatttctgtggtgtcagttgtaatatctcccatttcatttcttcttgagctaatttgcattttctctcttctttttatggttaatcttgctaacggtctatcaattttattcatttttaaagaaccagctctttgtttcatttatcttttgtattttgtttgtttgtttcaaattcatttggttctgctctgatcgtggttatttcctttcttctgctgggtctgggtttggtttgttcttgcttctctagttccttgaggtgtgaccttagattgtctgtttgtgctctttcacactttttgatgtaggcat

SEQ ID NO: 854869 - DNA, 509 bp, Homo sapiens
tggtcctggactttttttgttggtaattttttaactaccatttcaatctcattacttgttattggtcattcaggctatctaattcttcctgatttaaastaggagggttgtatttttccagaaatttatccatctcttctagattttccagtttatgtgcgtaatggtgttcatagtagccttgaatgatcttttgtatttctgtggtgtcagttgtaatatctcccatttcatttcttcttgagctaatttgcattttctctcttctttttatggttaatcttgctaacggtctatcaattttattcatttttaaagaaccagctctttgtttcatttatcttttgtattttgtttgtttgtttcaaattcatttggttctgctctgatcgtggttatttcctttcttctgctgggtctgggtttggtttgttcttgcttctctagttccttgaggtgtgaccttagattgtctgtttgtgctctttcacactttttgatgtaggcat

SEQ ID NO: 854870 - DNA, 562 bp, Homo sapiens
atatggtctaccttggagaaagttccatgcactgaatagaatgtatattctatggttgttggatggaatgttctgtatatatctgttaagtctatttgttccaaggtatagtttaaatccattgtttcattgttgaccttcagtcttgattatctgtccagtgctgtcagtggagtattgaagtctcccactattattatgttgccacctgtctcatttctaaggtctgttagtaattgttttataaatttgatagttccagtgttcagtgcatatacgtttaggattgtgatgttttcctgttggactaggccttttatcattatataatgccctctttgtcttttttaactgctgttgctttaaagtttgtttgtctaagaataggtactcccgtttgcttttggtgtccatattccaaaaatgtctttttccacacctttaccttaagtttgtgagactccttatgtgttaggygagtctcttgaagtcagcaggtagttggttggtgaattcttatcaattctacaattctatatcttttaagtggagcatttaagcc

SEQ ID NO: 854871 - DNA, 661 bp, Homo sapiens
acatgtattactacatcacacatttgtttttaaagtattttaataactgcattaaagtattttagtaactgtattcagtggaattagtttcatttggagtcatatgtctgtgattgtatgcacttgacagtgttatcctgaaaaagggtccacaggcttcaccaaactgactgcaggcagaataatggctacccaaagatgtccctgtcctaatcccaagaaaccgtgaaatgttaatgttatgtcgcaaggaggaattagggttgcagatagaactaaggtggctaattagctgaccttaagatggagagattaatcctggagcatcaaagtgtgaccagtgtcaccacaagggtctttataagtgaaagagggaggcaagagagttggggtcagagtcagagaagatgatgtggtgatggaaacagagatgggaataaagtgattgctggctttgaagacagaaggcggccataagccagggagtgtggcagcctctggaagctggaaaaggcaaggaaacacctgctgatgccttgattttggccccacaagacttgtttggacttctagcctccagaactgcaagatagtaaatctgtgttgttctaagccrttgaatttgtgatcatttgttatagcagccataggaaacccatgc

SEQ ID NO: 854872 - DNA, 553 bp, Homo sapiens
ccgccctgtgctcctgtcctgacccccagggcatttgaggggacctgcctgcactgcccttccttccctcacccaggcggcctcttcmaacctcagcccacggcagtgtccaggctcagaggactggctggtccctcctgtcctccccatggggcccattgtgctgcatggggcccgtgcctctgggaccttggggatttgctagaagggcccttgggctcctcctctacccactccctggcagcctggcacatgggtgtgtgtcctgaatcctgggcatggcctccctaagtgaagaccccctctgcagcacctcttggtggttcactgactgatgggggccgttgcaggtccttctgcaactctggctcaactccgagggctcatgggtgctcgggctggctctgagcatcctgaagaagcagaccgcagcttagggggcaggacgtcagcttggccgggcagggtatctcagcatgaccaccaggtgggtggctcctgtggaggggctgtgggatccttcctggggccactacctgctccttctgtggcc

SEQ ID NO: 854873 - DNA, 533 bp, Homo sapiens
cccagggcatttgaggggacctgcctgcactgcccttccttccctcacccaggcggcctcttccaacctcagcccacggcagtgtccaggctcagaggactggctggtccctcctgtcctccccatggggcccattgtgctgcatggggcccgtgcctctgggaccttggggatttgctagaagggcccttgggctcctcctctacccactccctggcagcctggcacatgggtgtgtgtcctgaatcctgggcatggcctccctaagtgaagaccccctctgcagcacctcttggtggttcactgactgatgggggccgttgcaggtccttctgcaactctggctcaactccgagggctcatgggtgctcgggctggctctgagcatcctgaagaagcagaccgcagcttagggggcaggacgtcagcttggccgggcagggtatctcagcatgaccaccaggygggtggctcctgtggaggggctgtgggatccttcctggggccactacctgctccttctgtggcctgcg

SEQ ID NO: 854874 - DNA, 480 bp, Homo sapiens
ccttcccataatttaaagaacatatttccagtcaacactgttcatttaaggtagacctataattaaataaactgtaattctcttggcctgtatgttaaccccaggatcctatagaatgcacgagggaggcctggattaaatgtcacataggattagcacagtttacttctcagggaaggaatctggggtcgtgttttactctcatggtgcatttatattttgcttgatttttacaaatacatgacacaatcaatactgtttagttttggttttctgaaagtcattctaacggtggaagaggctgtggacgaggggactgacggtgagcatgatgaaggaagaactcggcaggtggactgggccttcgaggtcattggccagcctgtgtgtggccagatcagcttctggggagccgtgcaggagcagcacagaccgtgaggaggagctgkttgggaggaggcagagaatggagaagggtgt

SEQ ID NO: 854875 - DNA, 592 bp, Homo sapiens
ctatataaaaatatttcatgtaacatacaaatgtctacacctacatttgtacccacaaaaattataaataaaaattaacttaaaaagttaaacacrcatacaaagaaaatgtggtacatatacaccatggaatactatgcagccataaatagtatgaaatcatgtcttttgcaacaacatggatgcagctggaggccattatcctaagcaaagtaatgcagaaagagaaaaccaaataccacatcctctcacttataagtgggaacgaagcattgtgcacacatggacaatgaaatcgagggcaaaaactatatcattatttcaaaagactcagaaaaagcacttgatgaaatttaacatctttcatgataaaaactctgaacgcattaagttaaagattgcacagggggaaaaaaccctattcgagctaacaaacaaatttggtaaagttgaagggtacacaatcaacatacaaaaattagtagtatttctatatgctaataatgtacgatctgaaaaagaaattatgaaaacaattccacttttaatagttaccccaaaatacctagtaataaatttaaccaaggaggtt

SEQ ID NO: 854876 - DNA, 592 bp, Homo sapiens
ctatataaaaatatttcatgtaacatacaaatgtctacacctacatttgtacccacaaaaattataaataaaaattaacttaaaaagttaaacacacatacaaagaaaatgtggtacatatacaccatggaatactatgcagccataaatagtatgaaatcatgtcttttgcaacaacatggatgcagctggaggccattatcctaagcaaagtaatgcagaaagagaaaaccaaataccacatcctctcacttataagtgggaacgaagcattgtgcacacatggacaatgaaatcgagggcaaaaactatatcattatttcaaaagactcagaaaaagcacttgatgaaatttaacatctttcatgataaaaactctgaacgcattaagttaaagattscacagggggaaaaaaccctattcgagctaacaaacaaatttggtaaagttgaagggtacacaatcaacatacaaaaattagtagtatttctatatgctaataatgtacgatctgaaaaagaaattatgaaaacaattccacttttaatagttaccccaaaatacctagtaataaatttaaccaaggaggtt

SEQ ID NO: 854877 - DNA, 606 bp, Homo sapiens
gcacttgatgaaatttaacatctttcatgataaaaactctgaacgcattaagttaaagattgcacagggggaaaaaaccctattcgagctaacaaacaaatttggtaaagttgaagggtacacaatcaacatacaaaaattagtagtatttctatatgctaataatgtacgatctgaaaaagaaattatgaaaacaattccacttttaatagttaccccaaaatacctagtaataaatttaaccaaggaggttaagatatctgcaatgaaaaagataaaacattgatgaaaggcattgagaaagatacaaataaatggaaagatataccatgttcatggttggaaaaatatttttaaaatatccatactatccaaagcgatctacagatttaatgcaatatgtataaaaataccaattacattcttcacataaatttaaaaaatgtaaaatatatatggaactataaaagaccccaaattgtcaaaaagatcttaagcaaaaaatacaaagttggkggcaaaacctcaaaatattctacaaaattatagtaattaaaacagcatgataccagcatataaacagacacatgaccactgggacaaaat

SEQ ID NO: 854878 - DNA, 627 bp, Homo sapiens
atttatagttttaaatatcatcataatcaaaagcacaatattgtgtatgwgtaagacaacaattctaaaatttatatggaaattcaaagaactggaaatagccaatatatccttggtgaagtataaggtaaaagacttgatctatcaaatataaagacataatgaggctagggtaatcatgacaacacaatattggcacaaggatagttaggctaagggaatagaagataaaaagccctaatgtctatcaacaataaaatggaaatggtggtatattcatacaataatatatcacatggcaacagaaagaaactgatggatgaatctagaatattgaatgaaaaattacacaatatatatattatatttatactaagcacttttagagttatatattacacttcacactaaaaatattttaattactgtttttaatatatcaaaagattaagaaactaaaaataaatctccaaaaagttgtacaagaccttttaaagaaaatattagagtttaaagtaaaacttagaaagacattacaaaagacttaaataaatgaagaaatgtaccatgcttagagattgcatctctcaacattgtatatgtatcaattacctctgcattaatcta

SEQ ID NO: 854879 - DNA, 567 bp, Homo sapiens; identical to SEQ ID NO: 819895

SEQ ID NO: 854880 - DNA, 519 bp, Homo sapiens; identical to SEQ ID NO: 819896

SEQ ID NO: 854881 - DNA, 519 bp, Homo sapiens; identical to SEQ ID NO: 819897

SEQ ID NO: 854882 - DNA, 554 bp, Homo sapiens
gtaatttggtaggaataacaatgaatctataaattgctttgggcagtatggccattttagcaatacagattcttcctgttcatgagyatggaatgtttttctattgtgtcatctccaactgctttcagcagtgttttgtaattcttattgtagagatctttcactttcctggttggctgtattcctaagtattttacttattttgtggctaggaaaataataatgtgaataggattgcattcttgatttggatctcagcttggaagttattggtgtataggaatgctaataatttttatgcattgatttgtatcctgaaaccttactgaagttgattaccagtatctggagactttgggcagagacgatggggattttaggtatagaattaaatttgtgaagagatatagtttcacatcctctcttcatgtttggttgccttttattttcttctctttactggttgtcttggctagcacttccagtactatgttgaataggagtggtgagagtggtcatacttatcttgttctgtatctcaagggaaatgcttc

SEQ ID NO: 854883 - DNA, 550 bp, Homo sapiens
acaatgagatataatacatatccaatagaatggcccaaatccaaaatgcagacaccatcaaatgcttggaggatgtgaaacaaccagaagtctctcattcactagtggctggtggtaataaaaaagtacacccactttggaatatagtcttgcaaaactgagcatgctcttaccgcatgatccagcaatcatgctctctttggtgtttacccaaaagaattgaaaacctatgttcatacagaaacctgcatatagatgtttataacaactttattaataattgccaaaacttgagagcaactaagacatacttcagtagatgaatggacaaactgtggtacatccagacaatagaatattattcaatgctaaaaaaaattaccaagctacaaaaagacatgaaggaaccctaaatgcatattactaagtgaaataagccaatstgaaggctacctaatgtatgattccagctatgagacattctggaaaaggcaaaacaatggtgacaataaaaggatcagtagttaccaggggttaagtggggagggag

SEQ ID NO: 854884 - DNA, 627 bp, Homo sapiens
gaagctaattctgtcctgaaagctatcactttaaatctaagagaaatgatttttacacctgcaaatattttgctaaagacatatcagtccttgaagacatttaacagaagagatgtaaaacctttttggatataattaataaccatcaatatttattttgatgaaacatatataattaaagctctcattttcctgagggtgctttatacctatttttaatataaaatactaatgtaataaatgtcttaactgttttatatgttttcaatcaggaaggtttctcctgataattagttctccctaccgttgccagaaagacattttccattcattgttcagtgcttctccaaccttccttaccacaccagtaaaaatgcttttatcaagctctttctacaatctccttgaagccaagcctgttaggcacttctctttcttgatttgacagcttagcaacttggggcagagttaaatgttccctcctgcttgaaacactgtattttcttagcttccaggccaccactgtcacctaattacattcccacctcacagtctctcctgtctttctgttcttggcacatcctcctctgacctaccwctctctgacacagtgctgtagggcttggc

SEQ ID NO: 854885 - DNA, 613 bp, Homo sapiens
caaataataagtgcaaaaaaagaaaaatagaaatataaaaatcaccattttgcaactcctaatgaaataatgtatcaagcaacaatcattgaaggtcccaaaatcatcagatgaaaggttgatgggragctttccagtggaagggacaggtggacaccacctgaatgtatcagtcagttttggcatcagtaaagggggggcagctgaacactgtgtgtttcataatgtgatatactccctctgaagtactgccaaacaaacttgaatctgatcaacactcagtagcagtgtagaggaaatccaagggacagaggaacaaaccaaacaataccatgaggaagcaatcaaccaaatcaaaaatgtagaacctccttcaggtcacataacccgatatctctaccaaatcaaaggtattaaaaagaggtggtagatattaaaaagaggtggtagataagggagtttttaaagaataaaaaagacttaggagataaaacgaccaaatacaatgtgtggaccttgcttggatcctgatttgaacaaaccaactgcaagaaggctataacaaatcaggaaactgacgatggactggctattactatttatttttaaattt

SEQ ID NO: 854886 - DNA, 610 bp, Homo sapiens
tagttgcgattcaaaaacactgtttcaattttaaattcaagactttttatttgaaaaccatcagactcaaagaattatgaggctcagttaatatkattatgccacattatttacatttgttaactgtcatttacctgctctatgttaatctttttagaaaaaatttgcatttcagaaacaaaaagcacggatagatatataatatcaaaatattcccaaaggattttgatgttccatctatgcttgttaaaatgtatgattatgattaaactttttatcattcttattttccttggcatccataatcatggaaaattacaagcttgcagtaaacatcctaacttaacttaacttttaaacgatagcatttattgtatttggttttgatctgccaggcttatagatggtataaaattttcaggggataatttttcacatcaaaattccttctctcccacattatacattttaaagtatgcacaaggcagaaaatatagggtttgggtttttttccttcgttttattccacctgatctccttatagtcccagagaaggaagactcaatgtacatttctctcagaaatatgacaggtctgtgtttttgttggt

SEQ ID NO: 854887 - DNA, 529 bp, Homo sapiens
tcacagtctcatggaaaagatggacacataaacagacgatgacaacaccttgaggtccctgcygtgatggagcagcaccagaggcaggacagggaacacctaaccagactggggacagagagaactttccagagaaagtgagacagacataaagaacaaataggaacttggctgtcaaaagggggaatgagattatattaggttggtgcaaagtaattgtggtttttgccattgaaagtaatggtagaggagatggcatttcaaagacctgaacctgagagagtctggcatgtgtgggtttctggagtggggagtgtggctgaaatgtgagatgagaaggagaaatagggctagggtggccccttgaaaggtctcacaggccactagaaacaaacttaacaacacaaatttacatatttatggttcaaaattccttcacagaatatactgggagatcatgaatatcaaaatgatattttgcaaccttcaaatcccctcactcaaggcacaggcctatagagaaccccca

SEQ ID NO: 854888 - DNA, 446 bp, Homo sapiens
gaatgaggttttgctttgaagccattgtagggatgaggagtgggtgaaggtggacccgctcgggtgtggaggcaggcttaccgaatcccttagctctaaagaaaaagcatgtttccagggctatgtgttctccagagaactgaggcccttcactgagctgagaaggcctttttctcaagcacagggaacaaagcagcaggcagtgggaatgtgaacctgtaaaccaaggctcccatcagctgctgtgactacttggagaccttttcctgactgtgtgacaagcagaacaataagagctgataaagctcagagcctctgctggggcaaacgactgaatgtttgtgtgccccccagattcataagttgaatcctaacccccgatgtgatgmtatttggaggcggggcctttggatggtgctaaggttatgagagtggagcccttacaa

SEQ ID NO: 854889 - DNA, 567 bp, Homo sapiens
cacactttctgatattcacacccttggatggtccctcccacattgatcctagggttggcttgcaatttgccttcaccagtgggacattgacaagtgtaatataagcacaataattatcttttgggagtcagctgctatgctgtaaagaagcttaagctagactcctgaatgatgagaggccacgtgcagagaaaccctatgcaatgaaaggctatctttcatgtcccagccccattttacctctcagctgaacagccttccacagaatcctgagaaataataagccaatgttgtttccagccactgagtttttaggcagtttgttataccgcagtagaaatttaaataattggtgcaacgaatgtgtgcaaattccttgggcaatttatgtgaatgactttcttttcctttcttactatttgtgatcagccagaaaaagctaaggggaagattatgagcctcacagggctcatttattcattcattcaacacatattgattgcatgtctgctctgtgccargcagtgtgctggggtaccactgtgagtaaacagcccctgccttcgt

SEQ ID NO: 854890 - DNA, 594 bp, Homo sapiens
aaactgcattaagaatatctggggctgggcacagtggctcatgcctgtaatcccagccaaggcaggtggattacctgaggtcaggagtttgagaccagcctgaccaataaggtgaaactccatctctactaaaaatacaaaaattagccgggcatggtgacatgcacctgtagttccagctactcaggagagtgggacacgagaattgcttgtaccaggaggcagaggttgcagtgagctgagatcatgccactgcgctccagcctgggcaacagagcaagagtctgtctcaaaaaaaaaaaaaaaaaaaaaatctgagacatctatttgacaagagttttaatttcataattaggctaaatataattaagcaagctagaattatgttggaattctcaacaaatcagacaaaataaaccaaccaaaagcttgtcaaagctcaacatgtcaaaagacaagtttgtctttgtygctaagcagaaatatttaaatttcaattaatattattaaatgtgcacaatgttttggggaattgacagtaaaacaaactaaaacagaacatatgtgaaagtgctaagaaaaggaaataactga

SEQ ID NO: 854891 - DNA, 614 bp, Homo sapiens
  misc_feature 611, 612, 613, 614: n = A,T,C or G
tctaatgaagaacactgctatacaattctcctataaataaattrccagtgatttatttactggcttccttccttcatggcaatcaagtttgctacattgactgacgtttcctttcccaaaagatttctctgtggcgggtgacactcactgctggatagcattttacccatagtagaacttctttcaaaattgaagtcagtcctctcacatcctgctgctgcttcatcagttgtttatataacattctaaatcatttattgtcatttccatgttcatagcatcttcactagcagtggattccatttcaagaaacccccttctctgatcatccataagaagtaactccttaccggtttaagttttatcatgagattgcagcaattcagtcacatcttcaggcttcatttctaattctagttctcttgaaccagaagtaccacctttgcaggtacttcctccactgaagtcttgaacccttcaaagtcattcaggaaggctggaattgacttcttccagactcttgtcaatgttgatattttgaactcctctcatgaataagaaatgttcttaatggatctgaaatggtaaatgcttcagagattttgtcagannnn

SEQ ID NO: 854892 - DNA, 614 bp, Homo sapiens
  misc_feature 611, 612, 613, 614: n = A,T,C or G
tctaatgaagaacactgctatacaattctcctataaataaattaccagtgatttatttactggcttccttccttcatggcaatcaagtttgctacattgaytgacgtttcctttcccaaaagatttctctgtggcgggtgacactcactgctggatagcattttacccatagtagaacttctttcaaaattgaagtcagtcctctcacatcctgctgctgcttcatcagttgtttatataacattctaaatcatttattgtcatttccatgttcatagcatcttcactagcagtggattccatttcaagaaacccccttctctgatcatccataagaagtaactccttaccggtttaagttttatcatgagattgcagcaattcagtcacatcttcaggcttcatttctaattctagttctcttgaaccagaagtaccacctttgcaggtacttcctccactgaagtcttgaacccttcaaagtcattcaggaaggctggaattgacttcttccagactcttgtcaatgttgatattttgaactcctctcatgaataagaaatgttcttaatggatctgaaatggtaaatgcttcagagattttgtcagannnn

SEQ ID NO: 854893 - DNA, 576 bp, Homo sapiens
tacgttagaaagctaccaccttagtcgtttttcagagaggactgtcttcagaggtcccagttgcaggacagaaggggtgtgaagcccycagcacagcaataggcacactggaggtggcccaaaaatgatattttccctccttcccctctctcttatcttatgggagacacaatgaaagccttctgtctaccctcggggtgagaataacaggcagactaggagggtcagggtggacaagaagcatcaggacccagtgtgaggtaagaggtcagacactgcacaggcctgtggcaggactgaacccagcagggaaaagagagaagggccgggcctctcctacctggaccccctccccagagtactgatgctctaggcagaaacaggggaaaggaagagggagactagggagcaatgtggggtctagatctgaggaaagttagtgcaccagcttgaaaattcagagctcacactcgcagcccttcccagaggggcgcagtagtgcaagcaggcacgtgggcatgcacacacacatgccccaagatagaaacacagagacctagaacagatacacatgtg

SEQ ID NO: 854894 - DNA, 607 bp, Homo sapiens
gcagcccagtcttgacttgattatccttcaggaacaagcagctcactatcaaatgaggaaggcttcatcgttctaaggaagctttttcttaaattgaatggaaaacccatctctctttgaaatgacagttatctatctgaagacagtggccatgaaggcacatcaagtatatatctaacttatgagaattcaactcttaacagctgggcgaaataagcaataaaggcctctaaaatcaaatcagctatttcatctgacacttcactacaaaatcatattgtgcgtatgcactctttgtaaaatcactctacagtagtatatacagtatctatttacataatatagaatacatatataccatatctatacattcatattactgttcagggttataaacccatatgccatgctttatgagagactgggaagttttcacttcatctactgcccacagaatctaatgcccccaaagggatgtaacaccagtgtcctgggtccccagaggcttygctgctccaggttaaatatctccagtggcaaggaggccctgcttcatggaactcaggggatcagaagacagacctcttcaattcaatccaatgatcac

SEQ ID NO: 854895 - DNA, 644 bp, Homo sapiens
cattcacttactttctaaatacttgargacctgttatgtgctaggcattacagaacaaatgacaaaaacactgatgagcttggattaaagaaaggcaaagcataaaagctaagaatctgattttaccccttttcctatcagtaaatcaaaaaataggggagagcctaacttatctctataagccatccattttcttttaaaaaaatattttcacaaagggctaatatccagaatctacaacgaactcaaatgaatttacaagaaaaaaacaaacaaccccatcaaaaagtgggcgaaggatatgaacagacacttctcaaaagaagacatttatgcagccaaaaaacacatgaaaaaatgctcaccatcactggccatcagagaaatgcaaatcaaaaccacaatgagataccatctcacaccagttagaatggcgatcattaaaaagtcaggaaacaacaggtgctggagaggatgtggagaaattggaacacttttacactgttggtgggactgtaaactagttcaaccattgtggaagtcagtgtgacgattcctcagggatctagaactagaaataccatttgacccagccatcccattactaggtatatacccaaaggattataaatcatgctgctata

SEQ ID NO: 854896 - DNA, 644 bp, Homo sapiens
cattcacttactttctaaatacttgaggacctgttatgtgctaggcattacagaacaaatgacaaaaacactgatgagcttggattaaagaaaggcaaagcataaaagctaagaatctgattttaccccttttyctatcagtaaatcaaaaaataggggagagcctaacttatctctataagccatccattttcttttaaaaaaatattttcacaaagggctaatatccagaatctacaacgaactcaaatgaatttacaagaaaaaaacaaacaaccccatcaaaaagtgggcgaaggatatgaacagacacttctcaaaagaagacatttatgcagccaaaaaacacatgaaaaaatgctcaccatcactggccatcagagaaatgcaaatcaaaaccacaatgagataccatctcacaccagttagaatggcgatcattaaaaagtcaggaaacaacaggtgctggagaggatgtggagaaattggaacacttttacactgttggtgggactgtaaactagttcaaccattgtggaagtcagtgtgacgattcctcagggatctagaactagaaataccatttgacccagccatcccattactaggtatatacccaaaggattataaatcatgctgctata

SEQ ID NO: 854897 - DNA, 489 bp, Homo sapiens
gcaagacatatatgccacaaaacatcccatatgccctcacagagcttcaccacgcacatgggcattttaaaagccctgagaagttctgcaatagagttgcctaacacaacacttcttgaacttacttagtcatagtcctccttttctgcatactctttttagcatgcgatggaaccacaataaggaggctaccatcatgcctcacctaaactactgtaatacgcttccaatagtcttcacacattcactctccaaccactctccaacccacccacaagctattctccatccatactatagacccaatgtgctttctgaaattattcagactatgcctcactctcacttaaaacacttsatggcttcccttatcctaaggaattctattatattatggcctattaagaaattctgtataatgtagcttctatctatctctcaagcttcatctcatacatactcctctagctctctgttctacagccacac

SEQ ID NO: 854898 - DNA, 580 bp, Homo sapiens
cagttttcccctgacagtgccaaggagactgagaggtttagactaggtggaattcaccacagtgcagctaagtggccatggccagactgcttctctagatgcctcctcacagggcagggcatctctgcaggaaatccagcagctccagttaggggcttacagacagaactctcatctccctaggaaagagtacgttgagggaaaggtggctgcagtctcaggtttagcagatttaaacttgtttacctgccggcactgaagagagcagctgatcctgacaagggggattctcccagcacagcgcactagctctgctcagggaaagactgcctcctcaagtgagtccctgaccccatgcctcataactcagagagacctcccaacaggggtcgacagacgcctcatacaggaaagctccagatggcatcagaccagtgcccctctgggatgaaccttccrgaggaaggagcaggcagcaatctttgttgttctgcagcctccactggtgatacttaggtgaacagggtctaatgtgaacccccagcaaactgcagcagacctgcagaagaggagcctgact

SEQ ID NO: 854899 - DNA, 616 bp, Homo sapiens
acttctcactcctgggaaaattcaagccagaggtggaggctgcagtgagctgagtttgcaccactgcacttcagcctgggcgacagagtgagacttggtctcaaaaaaaaaaaaaagaaattgagaccttaagtactatttttgcagattcttggagctgttctagcagaggcagaaaatcatcccaggaaacagagaggttttgtagactgaaggatccagaattgataatttagagttgattgaattttaaggactcccaaagaaatacgtacaaataccaggaaaagatataagaaatactagtatataggaaacaaatactaggaaaagaatattctcaacacctctaagcttggcaggatggagacagtcaaacaattcggaggatattttctaactatctacaaatgagcacctacaacctgcctgacaacgttttaaagcaaatattaaataagtatttgcttttaaaatgtattttcttgtattataagatgcatgttggctgggtgtrgtggcttatgcctgtaatcccagcgctttgggaggctgcgttgggaggatcagttgagcccaggaattcaagaccagcttaagtgatgtagtgagacct

SEQ ID NO: 854900 - DNA, 612 bp, Homo sapiens
catgtagaaaaataaaactggatcctcctctgtcaccttataaaaaaaatcaactcaagatggatcaaagacttmaatgtaagacctaaaaccataaaaattctagaagataacattgaaaaaactcttctagacattgggttaggcaaagacttcatgaccaagtacaccaaagcaattgcaacgcaaacataaatatatgggacttaattaaactaaaaatcttctgcacagctaaagaaataatcagtaaagtacacagacaacccccagagtggagaaaatctttgcaaactatgcatctgacaaaggatgaacatccagaatctataaggaattcaaacaaatcagcaagaaaaaaaattatttcatcaaaaagtgtgctaaggacataaatagacaattctcaaaagaggatatacaaatggccaacaaacatattcaaaaaatgctcaacatcactgattatcagggaaatgcaaatcaaaaccataatgccataccacctaattcctacaagaatgggcatattaaaaaaaaattagatgttgacatggatgtcatgtaaagggaacacttttacactgctggtgggaatgtaaactagtaaaa

SEQ ID NO: 854901 - DNA, 547 bp, Homo sapiens
taacatgcatcaggttggttatttcctgggctacataccttggtaggatagcattatacaaacaagtttcttttagagtcctggtacacttataataaccataaaataataggactgtagcaatcttttgtcctacctcagtgacttgatgaatatactggaaacagttctcagtctgaggaaggtcagttgaagtccttactatacaagtccaaattttaaggaaaatgagtcctgtgatgagtttcctcatgtttcggccgcgtgtggaccagttagcttccaggtgtgactggagcagggcttgtcgtcttcttcagagtcactttgcaggggttggcgaagctgctcctatccacgtgcagctcccagtctactgatggtctcggtggttgggcccactagaataaactgagtccaatacttttacacagttatgtttaactgagctctctgataccaggagtaaggtggcrgggttagggtgttgcaaactttaatggttatgcggggattttcacagagcaagctttggtatctagttagt

SEQ ID NO: 854902 - DNA, 306 bp, Homo sapiens
cacagctccagacaggcatccctgcgttctcaggagcctgggaagtccctgctccccccacaggctctgaagtgcttgctcctgctccccggcctctccttgctcccagaggagcaagtttgtagtgcggagaaaatttgcagccaagcctggacactgttgccaggtgtgtgagcactcagggtggtgctgacatgctggtcccctgacgccttggccccctctggacttygggcaggggagggactgagggtgactctgcacaggcctgcagatgcctctctgcatgaacagcctgggcaccct

SEQ ID NO: 854903 - DNA, 555 bp, Homo sapiens
tccacagatctgtccaaatggaagtaatgcttttctctcagtctctcctcatcctgggagtgaggcatcttgtcttccctttgctgggggttcccatggcaaaagctgtgtcttcatccttcagaccaagtgctccctgaggttcaaggctgtgtctgctccttccatttctgcttccagctcttgtaacagtatttcaggcttaaaactggggaaggaccgagacaccgcatggcaatgcctctcttattgtcggtcacccttggcctgggccttttgcatctgagagtcccagaaactgcctcccgctccagctcccaacataagatatgggcaggtttgggtgcagtggctcacacctataaatcccagcacttcgggagtccaagataggtagattgcttgagctcaggagttcaagaccagcctgggcatgtggtgaaaccccatctctacaaaaattacaaaaatwtgctagacatggtggcataagcctgtggtcccacctactccggaggttgaagtggaaggatcccctgagcccagggaggttga

SEQ ID NO: 854904 - DNA, 601 bp, Homo sapiens
ttagatctcaaagaaccttgcagaacagaagggcactcactcagttcttcacacaccccgaatttttttttttttttttttgagacggagtctttcttcgtcgcccaggctggagtgcagtggcgcgatcttggctcactgcaacttccgcctcccaggttcaagcgattctcctgcctcgcctcccctcccgcctcccgaatagctgggacgacaggcgcacgcccccacgcccggctaattttttgtgttttagtggagatgggatttcaccgtgttacccaggctggtctcgaactcctgagctcaagcaatccgcccgcctcggccttccaaagtgctaggattacaggcgtgagccaccgcgcccagacacacaccctgatttctggctggatctgatttaccggacaaagactccaatatatagagagaggcaacatgtcattgtggttagaaatgtcaactttgccgtcaagctgtcctggttcagatcctcactccaccattcattagctgtgaacacaggcayattatttaactttcccctacctcatggtgaccatgactagagatggtgataatagtagctaactcagaa

SEQ ID NO: 854905 - DNA, 590 bp, Homo sapiens
gctcctacttccttggcctcagtttccaacccttctacctgacccccccctttcaggaaacagtgtcccaccgtgtccccaaatayagcttctcagttcctcattggatctgggaggctggggccccaacaccagaagatgtgagttacccctgccaggcagggctagtttgcccaaaagacttcagggtaggcagggggagcccatctgcctcttcccccaaggacagagaagaacagagccctgtgccaggcttgaggctgtggcagtagcaggatgggaaagtgccaacccccctcaagtggggaacctcccctcacttgtggcctctatttttagtgcttccctaggctctagctggagaaaccgtttagtcatcagggtgtttattttccggctgtttccgacgtcaggaaagcagaatgttgagactgaagagatccaaggctgctggaaaagacttcttaggatcaggcctgggaattcagccgtcagacccctgggtcccagatcacacacacacacaaaagaaagtgggcaggggtcagccaagcccccaggagaccaagagagctgggttctcagccacc

SEQ ID NO: 854906 - DNA, 517 bp, Homo sapiens
aggtttcccagaaagcaggctctggacaagatttgcatgcaggaagaggggatgctcttggctggatacctatgggagaatgaaagaaactggattgggctgaagggagcttgaactgccattcaatcacaacaaagtctctgatgatcccagtgagacctttgcagctgcaataactccttaaagttccctaaatgggaagcaaagggacaggcctttagacccttctatcacccagtcattggatgtgggctaccgccgggaaggagcatgactttgggtaaggcggttttcttgagctgaacatatgacccttagagggaatgtcactaagagctgttggtttctaaaacttcctgcagctggaggtgtaagtactatagttttggaggtagaaatttaggcagtattccatggtatccactacggtgtactccttgcaaccattcatacccgcttgcttcttayaataagttctaggccttcaggtggattagtgagatgagctacagctcct

SEQ ID NO: 854907 - DNA, 617 bp, Homo sapiens
gagtatctgagtgcttgttaaaaatgtagatttccaaaccctgtgctagagacttgaattcagtagctcttgggaagagtgaaatgctttgtcaacragctcccccaggtgatggggtgcctgtagttcatggaacacactatgaagacaaatagtttggtacttaataagcctctaataaatagttgttgaatatatgaatgtgactatatgaatatatgaatgtggctgtactaacagctttattcctgtcaacagaggcttttacctataaccacagaagcttatattcctaggaaattcttaccttttccttcccctcacctttgtccacctattttcggcaactcttgaagtcttgtttgggcagatcccttccattttcatgcctatcgtgctgctttagcacctcctgtctcgggcttgttaacaggttccccaggctccagactcttttgacttcaactcatctttaaaaccactaccagattaatcttcctcaaacctgtgcttatctgtatttaagactcttcatgatttgactcaacctacttttccccttaatttccttctcttcttctctttaaaataccagatcccactcttgtccctaattg

SEQ ID NO: 854908 - DNA, 578 bp, Homo sapiens
cttctgggttccctttcccttcgtggccctagtgaccaagatctccacaccatagccctaggggccaagccacatcataaaggaaaatcatatttttctgtttcaaggaaccacaggcaaaagcctctgaattttgcaagatgccgctcaaccggttgcatggaggcaccaaatatcaaactggcaaggctcaaacttgaccctgattgggccctgtcatctttaacccattttaaccaagagggactttactgaggggagggtctctaacccaatcccatcctttactcaggtaaatgtactccattacttatccaaagtcagcctattggtgcttcagcagtctatttcctttggatcaggatggtaactacgctaaaaggttatcagatttaatatttgagagtctttgttttaaaatgcacttcaatgcattgttgttcattcagaacattccattgtacgttgtctttagtaagatcttgccatttctgtaagactttgctgctttctgtgcctaatgcataagccagaaggaactcagttttccaraaattaaggatcccatttttacctaa

SEQ ID NO: 854909 - DNA, 513 bp, Homo sapiens; identical to SEQ ID NO: 834215

SEQ ID NO: 854910 - DNA, 628 bp, Homo sapiens
aaataactggcaaatgttagaatcatttacaagtaagaacacactacattaattcatgtgcattgaatgatgtggagtctagttattgccctgattaccaaatgaataaaaccttgagaggcagggtgaaataaagtacatggcctttggctacaaagagcctgggtttgtatcttgacatcgccatttatgagctatgtgatatgagtataaggtaacattataaaacttcagtttcttcatctttaaaaatggcattaaaatgatactacttcttaagattgttttgaggagtatatgatataaattctaagtacagtgccaggtacaaaagtgctcaataaagttaagctattattattaccttggtattcattaccattaccataaaaagttctaagaactaaaaattaagtattatatgaaattttaattttgaaaaatactttgattttattaatatctcaggacaattaaagcagtcaattattaaaatccaaaaagaattcaaattattttacaatagagatgtagaaaccaacttccakttgccatatttgttaactagcatataatggccacactaagtttcttttgatcactattgttatctttacaaatgaattac

SEQ ID NO: 854911 - DNA, 616 bp, Homo sapiens
gaacatatcagaatctgtgggacacagctaaagcagtgttgagagggaaatttatagcactaaatgcccacaggagaaagcaggaaagctctaaaatcaacaccctaatatcacaatcaaaagaactagaaaagcaagagcaaacaaattcaaaagctagcagaagacaagaaataactaagatcagggcagaactgaaggagatagagacatgaaaaacccttcaataaaccaatgaatccaggagctggttttttgaaaagattaacaaaatagatggaccgctagccagaataatcaagaagaaaagagagaggaatcaagtagacacaataaaaaatgataaaggggatatcaccactgatcccacagaaatacaaactgccatcagagaatactataaacacctctctgcaattaaactagaaaatctagaagaaagagataaattcctgaaccacatacaccctcccaagacccaaccaggaagaaatcgaaccctgaatagaccaatagccaggtatgaaattaaggcagtaattaatagcctrccaacaaaaaaaagcccaggacccaacagattcacagccatattctaccagaggtacaaagagga

SEQ ID NO: 854912 - DNA, 508 bp, Homo sapiens
cttcaagaatttatcattcttttggatgcaactccattcatagattgggccatgtaaggccctgtcatttattagggctacacagaggcacaaaaaagttatgtccttcatcctaaggaaacaacagtaattgcmgaatactgaagtacaaaattagatcttactgcacaacttggaaagaagtagaaattgatgggaactcttttttcgggtccatagcttttgcaccctgagccttcagataaagaacaaaagcagaataactcagagactcctctccaagcttgaagcagaccctaatgcttatgttgaagaggcagctcatatggccggaagctgcttggctatcccctcacaactgatgttcaaatatattaatgaaagatactggctggagtgtacactggtctaattatccttcttttttttttctgtagccatctaattacattccatttaaaagaatgttttttaccatgccatgtatacccagtattcttaaaaatag

SEQ ID NO: 854913 - DNA, 589 bp, Homo sapiens
  misc_feature 1, 2, 3, 4, 5, 6, 7, 8, 9, 10, 11, 12, 13, 14, 15, 16, 17,18, 19, 20, 21, 22, 23, 24, 25, 26, 27, 28, 29, 30, 31,32, 33, 34, 35, 36, 37, 38, 39, 40, 41, 42, 43: n = A,T,C or G
nnnnnnnnnnnnnnnnnnnnnnnnnnnnnnnnnnnnnnnnnnntcaacttatgcaaatcaatgtggcacatcacatcaacgcaatgaaggacaaaaaccatgtgattgttttaatttatgctgaaaaaamatttgataaaattcaacatctcttcatgaaaaaaaccctcaaaaaactcggtatagaagaaacatatgtcaacataacaaaagacataaatgacagacctacatctagtatcatattgaataaggaaaaactgaaagcctttcctctaagatctggaacatgacagggatacccactttcaccactgttattcaagatagtaccagaagtcctagctagaagagaaagatataaaaggcatccaaattggaaaggaagaaatcaaattattcttgtttgcagaagatatgatcttatgtttggaacaatctaaaagctccacaaaaaaaactattacaactgataaatttagttacaatcaccatacataaaataaaatatatgggaattaacttaaccaaagaagtgaaagctctctttaatgaaaactataaaacgctggtgaaaagatttgaagaa

SEQ ID NO: 854914 - DNA, 585 bp, Homo sapiens
tatataatcatttttaacagaagactttaaagaagaaataatgtgtagtaaaagaatttagcatagaaatagaccatctatgagaacamatagaatagaaattaccagggatttgaggcggtctaattactactattgaacactaaatttgtcttttttctggcagttaaagcaagaaaggaaacatgttgagttacatagttttatattctgactaaaaacagctttcacatttgtctgcagagaaaattgttattttgagctaaattcaacaaataatttaacacatacatccttgggataagacagttgacaatgtcttcaacacagttttgtgaaagtcaaagaagtgcttttcaattgatgatagctgaatgaaccctctagaatatcttgagttagtaaagtccttccttcttcccttcctcttcccctttcacttccccttccccttccccttcccctttccctttcccttccttccttcctgccttccttcctttgtatttgcttataactatatgctggatgcaatgttaagtgccgtgggtactgtaaggaataagatagcatccttgttctcta

SEQ ID NO: 854915 - DNA, 625 bp, Homo sapiens
tcccagctccccagctctagaggtactagagcagttgaaggctggttcctggacttgcccttcccgggcctgtggcatctgaaagggttattacttccagggtcattttgtttagwttctgtctcttattaacttgtagtccctcgcctctgtaccctgggaacggcagtggggctggggtcccagcggggcggatgcagaggtagaatgcaggctgtggctgggagctgagggccctgcaatctgggtgtgggatgtaaagaggtaactgaggctggaggttgtgggtgccgggtaccaaagtggggcacattctgagctgtgggcaaagcctgcacgttggggggaatggcagggcacagcggcattgcaggaggatctaagtcccccatgtctcagcccctctggggcacagctggcaggcttggccaggtgggacaggagcagaaaggggaaactgacagccgcaggcaagcagaggaggccgcagaggaagaggagggaggcccagcagaggcccttcccagccctatcctccccggatgcctggatgccggaggcaggtctccggtgtccaaccagcagcctggcccctctttagcctccaggcctggaaagcggatca

SEQ ID NO: 854916 - DNA, 605 bp, Homo sapiens
gtgccccacatctctggcacattagcccatggctcaggtggcactggccccrtggcataggcgagagggcaggctagggactgctcctaccagtgtgtcttgggctctgtgcccactacctggtggggagaggtgtccactttgtccacttcatggcatgggagccgatgcggcttcaatcctgactccgcagctgcctcctgaccagtcagcaatcgggagccccgacctcttccctctccatcctcactgcagcctgggcaggccggaggccaatgtccccagggcagagctgggacagtcccagtgggaaggaggcctggccgggccagacagcagcctgggaaggagccgtgtgttgcctgggagttccacggcaccggctgaacctgcatcttgaaggtttgattgattgcgtcgttcagagtgaatatattttttaataatcggtttccaaaattagtctttctctgtgtagcagctatcacaaacagcatgagacgcactccttttattttttttttacctgccagaggcagatatttgtttttccttcaagagagcagcaggtgaaggtgtggtccccggatcccagcacctggaag

SEQ ID NO: 854917 - DNA, 522 bp, Homo sapiens
ttttctgtggcctgtcatagggcccattatatgccgcagtcgtgatgggggcttaacaaataagtaagtaagccacgctatgctcagggtctgcagcttttccttcccctcctttctttgtggtttgcagttgtcttgggagggccttctgtctgggtttgacagtgaacatgagtaaagtgagcaggggctttggcaagaagagtggtgagcagaagctggtggagacttgggggctgcacaggacctaacttttgaaactgaaagcaaagtcaagtctaaaatacatcacattaaccctcttttggtctgtctgtctctttctcagacagtgtccctgctgagagtaagaagtgttctcaaagccttttccacagcaggaatggggcacgcrggactcgcatccattcattcacaaaatggtacctggtacagagtaagggattagagaatattgtttgaataaatgaacaaatgattctgccttatgtgccaggcactgtgctagctctttgggacact

SEQ ID NO: 854918 - DNA, 549 bp, Homo sapiens
tacctctagtatataattgataggccttaaaaaattcagaaacatctaaaaccccacaaggatggagttggtgctaaacaaatttgattctcagatgycagtgcaaattttcagtgacttcgaggtcttggactttcctcacaactgcactagacattctcaggttgtcgggctcccacatcatttcagcatgacacagacatacaagggaaaaacacactccagagaaatattagcatgagggccacacacagaggtcagtgtggcacggggctaatttaggcaatttagagttcagcctcactccatagtatgattgtttaaggatataaattattactgaattaatgaataaaattaagaatgacactgttctcaactggaatagttattgcctcacggtataaacaggatgttctaagctaaaatgaaagacacccttcctctctccagaaaaagctacatatattagacttatactctgatatcattttgcaagttatttattttatatttattcaatgaatgtctgtgttagccatgggggct

SEQ ID NO: 854919 - DNA, 525 bp, Homo sapiens
aatctcttgctgcgtctagtttataaattaaactttatcataggtatgtagrtataggaaaaaacctagtgtatatagggttcagtactacccccgggttcaaacatccactgggggtcttagaacatattctgaaaaataagggaagactactgtatgttcattttctcccctaaaaactatcttcccaaactaatttctgagcatttgcaggaaataagatgagaataaacgttctccctgtaccttcattcattctctgcgctcatgatctttgcccattctctaatatttgaggcaccgagatggatacacacacttatttacactagtcactcccttatgcctggcctgtgagctcccttgagagcaagggtcatgtctcatttatctttggagctccaattttgaatgcagtctctgacactcaatgaatctttgttaaattagctggatgaatatggaatgatatagagatgaataaaacatggtccttacccccaagacatttaaaatctaatagaa

SEQ ID NO: 854920 - DNA, 579 bp, Homo sapiens
tctgtttattcacagcagaggagcagagacaaggaaacctrtttcacacctggcatttaatttagaagggattgcttctccggctgaaggaaaagccatctgaactgcgcagtcctggctctgcactggggttcccgcagccagcgcgttatgtgccttatgaaacctagagccttatttttcaatgcactctgtaagactgtgtgtgcgtgcacgtggtggtgggggtggtgagtgtacaaatgtgtgtgcacatagccactcctatgggtgtaagcactggacatggcccacatggcaggcacccaaagcatatccggcccaatctctaagtgtcccccaccccttttcggcttagctccataaaagtcacgagggacagggcgggtggctcacgcctgtaattccaacactttgggaggccgaggcgggaggatcacgaggtcaagatcgagaccatcctggctaacatggtgaaacctcgtctctactaaaaatacaaaaattagctgggtgtggtggcatgtgcctgtagttccagctactgggaagtctgaggcaggagaatcgcttgcaccc

SEQ ID NO: 854921 - DNA, 525 bp, Homo sapiens
tctgggtgactgtgtatagggcatttcaaacattttcagcaaactaatgaatactagatggttgcttctattgtcactagacaaaggggaaataaaagaatgagctcagggattccaattcccaactcaagtatcacataaatgacctgaaaactcctttgtgtgccctcaagtaaacccttagcccaggtagcccctcagctgagattgctgaaaatcaaactcagaatctcatcctgtggctagctgaattataatgcaagttgaactatttggagttttgatgaagcatattcctcatttgggtgtgttgctccagctcatgtaacaagtgacctgaaaggctgctggtgttgagaacaagagaaggccgtgcagcaggtccaggtgtccgtgcatgctactctgccacagggaccatgtgacccagcagatccaatattgctcgaagcatcagtggcagataagtttggagcctttggcaggygcctataggtgagtcgcagcacaggcccttaagatttt

SEQ ID NO: 854922 - DNA, 614 bp, Homo sapiens
atttatcccaggtatgcagggttggttcagaattacaagaccaaccaatgtaatacacctaccaacaggctacagaggaaaagycatgtgattctatcagttgacgcaggaaaagcatttgacaaaatccaacacctagtcatgataaaaactctcagcaaacttggagcaaaggagaattttcttaacttcataaagagcatctgtaaaaacctatagctaacatacttaatggtaaaagactgaatattttccttctacgatttggtacaaggaaaagtgtccattctcacctctcttatgcagtagactactgcaagctctaccaactacaatatgtcaagaaaaagaaataaaagacatgcagattggaatgaaagaaattaactgtctgtatttgcagatgacatgacagtctctgtagaaaatcccaaggaatctgcaaaagaactaataagtgagtgtagcaagttgcagtatgtaagatcaacacacaaaaatcaatccatttctatacattaaaaaagaaggtgtgaaaacaaattaaaaatataatatcatttacagtcatttcaaaaacaatgaaatacttcattataaacttaaaaaaacat

SEQ ID NO: 854923 - DNA, 614 bp, Homo sapiens
atttatcccaggtatgcagggttggttcagaattacaagaccaaccaatgtaatacacctaccaacaggctacagaggaaaagtcatgtgattctatcagttgacrcaggaaaagcatttgacaaaatccaacacctagtcatgataaaaactctcagcaaacttggagcaaaggagaattttcttaacttcataaagagcatctgtaaaaacctatagctaacatacttaatggtaaaagactgaatattttccttctacgatttggtacaaggaaaagtgtccattctcacctctcttatgcagtagactactgcaagctctaccaactacaatatgtcaagaaaaagaaataaaagacatgcagattggaatgaaagaaattaactgtctgtatttgcagatgacatgacagtctctgtagaaaatcccaaggaatctgcaaaagaactaataagtgagtgtagcaagttgcagtatgtaagatcaacacacaaaaatcaatccatttctatacattaaaaaagaaggtgtgaaaacaaattaaaaatataatatcatttacagtcatttcaaaaacaatgaaatacttcattataaacttaaaaaaacat

SEQ ID NO: 854924 - DNA, 575 bp, Homo sapiens
aaaacacattgcaaatttcacaaaactaycattttctaaatgtcaacactctaaatacaccatttattttttaaagtagtatattcacttcaaattccattgctgtgtcaagagttagttgaacttaaaatataattaatagttactcagcaaaaatagaaagatgttagctgactgtgtcaaaagaaatattttaacactgatttcatttttactaaatgactgaatttttctttatgttttatgcttaagcttctctgctttctttctattttttgtggtttaaataaagaaccatgattatctgtataactgattgctcaaagtaattaatcatttttcttttgaaattaccagggtaaattaagaatcttataattacagagttttctcttgcctagaggaaacatactgagaaactgtgttaggaaattattatttcaaaacccagtctaagttcttagccactggacatttaaaaaatacatattacatatactttttctaacatgattgagaatatagtttgtttcagatttccacatttcttaaatgaaaacaataaagaattcaaa

SEQ ID NO: 854925 - DNA, 575 bp, Homo sapiens
aaaacacattgcaaatttcacaaaactatcattttctaaatgtcaacactctaaatacaccatttattttttaaagtagtatattcacttcaaattccattgctgtgtcaagagttagttgaacttaaaatataattaatagttactcagcaaaaatagaaagatgttagctgactgtgtcaaaagaaatattttaacactgatttcatttttactaaatgactgaatttttctttatrttttatgcttaagcttctctgctttctttctattttttgtggtttaaataaagaaccatgattatctgtataactgattgctcaaagtaattaatcatttttcttttgaaattaccagggtaaattaagaatcttataattacagagttttctcttgcctagaggaaacatactgagaaactgtgttaggaaattattatttcaaaacccagtctaagttcttagccactggacatttaaaaaatacatattacatatactttttctaacatgattgagaatatagtttgtttcagatttccacatttcttaaatgaaaacaataaagaattcaaa

SEQ ID NO: 854926 - DNA, 614 bp, Homo sapiens
attccttaagtgctcccttccactgccctccctgacacctaagcacacccttgggttcccatgtcctcaaagtgccatctgcctgactaccacacctgagagagaacagtactcatatcagaacaatttaaccttgctattgtttctcactgacaaatggagttttgctgcatatttgtcatcctctggcaacagatggtgctggtctacttcacagcaattctgctccatcctggtgccctcataatcctcctatagggaacaagctcagctgtgtgtgctcccagctcaagttctctcttcagtgaatacaaccatgctcagcaattgctcccaggacatagacactatacccatcagaatagctgcatttggaggaacttttataatagcatcagttttgtgctagtccaaaccagctctcttccacaaattctggggactgggctttagtcttggttaccagtttggacacccatttcctcaagataatttttgaaatagactttattttttagagcagttttaagttcatagcaaaatcaagcagaaagtagrgagttcccatctagtggtatacagaatagtttactgctcccagaatctttctatgt

SEQ ID NO: 854927 - DNA, 635 bp, Homo sapiens
aattcgctgtataaatgtgagaaaatcttaaaattagtattaatcataacttttaaaaaaagcaaaaccatcatctcttaaggcctatcttaatgctggtttcaaatttacaggcctygaaatgcaggaggttcataaaagcattttgctcacgctgagacttccattgtttgtcgagggaacatttcaaattttaaaagcacccgcccttctaaggagccatcttcatttttgaagagccccaagtaaaccctgcatgatttttatcatccatgtttatcactgtttctgcctcataattacagctttaaaataagctctccattatttgtagaaaccttttaatgtccaaaaatagcttatcttagaattcaccaacagcatcccagagccagcctgagggaaagctctaaaaacctaagataaactgctgtgttcttgctctgaggtggggttctcaaagtgtctttgattagaatctaaatctgattcaatttcactgactatctactaccaaaaagaaaccccactggtgaagagtttcttacagtcccagcactctctcatatgagaaaactttttggaagagcgagaaattttgtgcaaaaatataaactggttgtttttaagctatg

SEQ ID NO: 854928 - DNA, 616 bp, Homo sapiens
caaaaatgtggtctgcagaatccccagatccagtatcatgaagcagagtgtagaagggtggtttggtggctaaacttaataactggcccaggaggtgacttggctgcatgtttctcatcatccagccaactagctaggagtcttcaagttctaagagcagcatgcgggcaagcctcaatgtatgagcagttttgaagtctctgctcacattcatttacttttgtcatattcaccaaagtcatataactaagaccagagttagtatggaagaacatcaatacaagtaggcaagaacacagagaccgtcactgaaatcaatccaccacagtgttcctgctgattgagaatattcatggccctcccacatgcaaaatagaatcagctcttcccaggaccccacaaattcttatccaattttggcatcagtgccaaagaccacgatattgtgatatataatcattttcagaggcagcttctatgatatgacttcttttgattcagagattttttttgaaatgtcacttgtctctgacaacacacacacacacacamacacacacacacacacacacacacacagagacatgcaatgtaacagtggtgagacagggacaga

SEQ ID NO: 854929 - DNA, 562 bp, Homo sapiens
gaaggaaaattaagcttaaaggtcttggaaaaagcattattataaccaccagttagaagatcaattggagagtaattgtaaaagtgccatgaagatatgaggcatgtaagaagcaacataaaaagggtggccaaacagcagttttaaaacaaaactgaatttactgcttactggcaaaggaagaatgcaccacacagatgtaagttcagaaagttgttcaaagcagaaattaaaggggttaaaagatatatagagaaaaacaccaaatagggcacggtcctgattaatggatgtggattatgagctgggttgtaaactcttatttgtatctggttacctttagagttagcatcactagtatggagaaacaaggtttcaaataggtctggaaagaagagagaaaattttcagagagcctagggtcatgcttgtatacccttgstcaaagatttccaagattttaacttaacaggtgtcattatcatgtacagtcttacttagaagcaagaaataaagctaaggaatttatagaggtaccttccattgataagatttaagggaa

SEQ ID NO: 854930 - DNA, 648 bp, Homo sapiens
tttgtcaaaagacagtaattaagaaattggtaatgacaaattaaattaaattaaatctwaattgccaaaataaaggttaccatgtaaattcaattatctagcacattcagatcaaaataatagtacaactctcacatgacacacttcataccatgtaatatatactagctgttgagaaagaacttttaagaattaaagagtaggcttccacatggcaggcattttatttacagtatattttaatattggcactgttctggttctagaaacaatacaggcttaggagagccaagaggaagtatcaactatttcaagcaattaggaaatacttacttatgctcagcacagacaccaaggcaggtctgacacatctcacacgtttgcccttgaaacttcggatctgtacacttacagacaccacactcgcagatgccccggccattgcagatctgtccgttgctggcttcacaagtactagtatccaaagaacagtcacatgcactgccagtgtagttggggttgcactcacacacacgacacttgcaaacaccatttcctgcaattaagcatatcatttctcaaaatggtaaaaatatacaatcacagtattgactgaaaagtaaaataagcaacaacatgtgagaaagt

SEQ ID NO: 854931 - DNA, 625 bp, Homo sapiens
cttaattataacaatgagaatattatattacccctatcttcaataacaattaaagatattcactgaaaattaagcgatgtggcaagttaaactaaaaatctggccggaaagacactaggcaagtttccccaaaaggccatcataatgtacagcagaatgaaaggtataatggccaccctccaaattgcataatcacagcaaatgtgggctactcttattagcccaataacccggggaaggcactcacaggaagcccaagctaacatacaagcctctcattgtcatggtaggcacacacatacctgactgagcagctgcccatgaaatatggtattcaccacctttaagacctgtttggtgagcttcctctgggagaaggggatgaggatccggcgtgtggtgccctcagactcgagttcctgctgcaccttgtgcagcagctcgcagagaaattcctgcgcgtcctgttggtcgtagccgcggaaggcagggatcaggctccacactgagtgsagcatggcgaagggcgacactagggcccacttcccggaccacatgactcggaagagggtgtgcagttcacggcagagggaaatgtgctttgaactcggctccttgttctgga

SEQ ID NO: 854932 - DNA, 652 bp, Homo sapiens
cgccccatggtcgcggaggctcctgggaaatgaagtcgcgaaggcctcagcggcctgggcggttttgccggcgtaagaaatacagctcccaggttacctcgggccaccacagcctcgccccsacaaagcatgcgcgcctgcgtaccagggccgcccctccccctcaggtagcgcacggctcccggttcctgtgaaggtagaaagctcgaagttccagtgtgctttctgcggttctcggggagacactggaaagaagtgccttactctagtgggaaggggatacttcactgtaactagccccacgcagagagtatggaaagcattaaatcagcaccttgctgaagggttggctgcagtgactcgggaggcgagggctggtgaggacagttgtaccgcagcttgtttcttttctagggcagtgggtccgcctattgccccgccccccgtcccgctgctcattggcgggggctggagaatgacgtcctcgttggtgcgtgggtatccccaggctttggcttctttcccgctcttgattggtgattggatgtgctcggttcttcctgataggttgatcttttttctttacgatgcaaaaaccgtatttcaaaaactgaaccttcagcagtttcctagagcctgccttggccagagg

SEQ ID NO: 854933 - DNA, 590 bp, Homo sapiens
cccgtctcagcctcttaaagtgctgggattacaggcgtgagccactgcacctggcccataatgaattcttaatattatgtagctattcatgttaagacttcctggtcacctccttcaacaactgggaaacatcagttttggaacccatagtcatatctaataaaggcacattctcttgccttgtcttagaaataaaataaaacaataatcaatacaaagaattgctgtctttggtctccatacttttccatttttacaacaaacttcttatgcaaacctcacaatatcagcgtaagagtcaattttcatactttgacccaacactctaccttataggtagtcaatgaatatttttctgaatgaacaaacattttaattcattaattagttaattaagtagttctaaacctaagattattctggggtgcggaaggaactaacatgaaaactttagagatataagcagccatatcagtctttcccttttttttgaacttgcatcattgrctaattaagcacttttttttttttttttttttagtgtgtgtgactcactttattgcaatattcattttattgtggagtggtct

SEQ ID NO: 854934 - DNA, 629 bp, Homo sapiens
gtgtgtgatggtatcacactgtggttttgatttgcatttctctgatgattagtaatgtggagcatttttttcataagtttgttggctgcttgtatgtcttcttttggagagtgtctgttyatgtcttttgcacattttttaatcgggttatttgttttttgctttttcaattgtttcagttccttatagattctgaatattagacctttgttggatgcaaagtttgcaaatattttttcccattctgtgctttgcctagctaactcttactcaactttgaagtctcagcttcagtcatgacttcctcaccagaggctttcctgattttccagaccaggcaccatgtggtatataaaataacaccttatctctcagacccaggcaagaaagccccctgcctcgaacttaatgctttagaaggcatcatataatataaccacaaaggaaataaatccattaaaaacacagagatgcttctgtcccttgggattctgtgctcagcactggcacagaacaaccagtaacactgaacacacattactgagtctaatacagttcaggctccggaggtcacttctttatatatcttgttctgtctcatttatttaagttgatagataaacactgta

SEQ ID NO: 854935 - DNA, 563 bp, Homo sapiens
ttttttttttgagacagagtctcactcttttgtctaggcttgagtccagtggtgcagtcataccccactacagcctcagactcctgggctcargtgatcctctcacttcagcctcccaagtaactgggattacagatgcatgtcaccatgcctgactaatttaaaacactttttttgtagagatgaggtctcactatgttgctcaggctggtcttaaatttctggcctgaagcaatcttcctgccttggcctcccaaagtgctggaattataggcctcagccactgtgcccagcttacatttccttaatgactggtgatgttctctatattttcatgtgcttattagccatttatatatagtgaaatgtctgttcagttcctctgcccatttttaattggactgttcatttttattattaagttgtcagagttcattatatattctgggtagaagtcctttattagataagcaatttgcaaaaaatattttctcctggtctatagcttgtttttaaacttttctaaatgttgttttttgaagagcaaatgttttttatttgat

SEQ ID NO: 854936 - DNA, 576 bp, Homo sapiens
acaggaggactgcttgagctcaggagtttgaggttgcagttacctataactgcaccactgcactccaacctgggcaacagagctagaccctatctcataaataaatagcgctaaaagaaaacttytgacaaccaataattctatgttcagcaaaactatcattcaaaaatgcaggcaaaataaagtcatttccatatttaaaaaaaaaaagaggctgggcactgtggctcatgcctgtaattccagctttgggaggccgaggcgggcagatcacgaggtcaggagatcaagaccatcctggctaacacagtgaaaccccgtctctactaaaaatacaaaaaattagccaggcatggtggcaggcgcctgtagtcccagctacttgggaggctgagacaggagaatggtgtgaacctgggaggcagagcttgcagtgagccaagatcacaccactgcacttcggcctggacaacagagcgagactccacctcaaaaaaaaaaaaaaaaaaagactgagagaatttgttgctagcagacctgcaacacaagaaatattaaaggaagtgcttcaggtta

SEQ ID NO: 854937 - DNA, 583 bp, Homo sapiens
catatcctctcctgcatctattatgttttgactttttaataatagccattctaatttttttttttttgagacagagtttcactcttgttgcccaggctggactgcwatcgtgcgatcttggctcactgcaacctccacctcccaggttcaagtgattctcctacctcagcctcctgagtagctgggattacaggcatgtgccaccacgcccagctaatttttgtatttttagtaaagatagggtttcaccatgttggccaggatggtctcaatctcttgacctcatgatccacctgcctcagcctctcaaagttctgggattacaggcatgagccaccatgctcggccaaccattctaacttttattaaaaagtcaaaacataacagatgctggcaaggatgcagagaaaaaggaatgcttatacaccatgggtgagagtgtaaattagttcaaccattgaggaaaacagtgtggtaatttctcaaagagctaaaaacagaactaccattcaacccagcaatcccattactggttatatacccaaaagaatgtaaatcattgtatcacagacacatacatgcg

SEQ ID NO: 854938 - DNA, 639 bp, Homo sapiens
gcatgaaccacacttgacaygtgagcctctactcataggcccatgcaacctgcttttttttatttttaagttaatttgtaatttttaattgtaatgggttgaatagcagtccccaaaaagatatgtccatgtcctaattctcagaacctatgaatgacaccttatttggaaaaaggctccttgcagatataattaagtattttgagaggaaaagatcatcctgaattacccaggtgtgtcctaaatccagtgacaagtgtccttgtaagagacatactaggaagatttgacacagacagaggaggaggaggcaatgtgaagatggaggcataggttagagcaatgccaaggaatgcctggaaccaccagaggctgaaagaggcagggacctgaatctcccgtagcagcgtgacactgatgacactttaattttggacttttgatctccaaaactttgagagtcaatgtctgttcttttaaaccaccaagtatgtggcaatttgttatggcagcctcaggaatctaatacattgaaagagacaatttatcacatcatctaaaactgcaccagtgtactaaccagcagccaaatttaaaatgtagctggtccacactggatgtactgtaagtgcaaaatac

SEQ ID NO: 854939 - DNA, 630 bp, Homo sapiens
tttctaaccagtaatattccaagtaaagtagtaayattgtttattcattggcattaggcatctatggttagctctacagaattatagttgaaatctatgtgaaaatatcaatttttacacttcccggccataataggatacttacagaagagcttgataccagactgtcagccaaagattttctgatatttggtatgaattttctaaaggtggagtgtttgctcaaagaaatgctttgagtgctttagcagtcaagaactttgccaccttgcaatttactagttgcaaagataatctgatcacaaagtaagaaatctgatcgttgtaattccaatttatatcaataagaaataataaataatctttattttggaggtttgctaagtgactgaaagtttatctaaatacagacggttttgcatgaacgctagggactgaatgaaacactgtttgcctaccaattaaccaggcaggtgtgaaacataagcagtgaccgaccataacagacgatctctcagatattgatcactcttttaacagaaaaattcctatgggcagatagaggagggggagagggcagcattctcttgagattgtcttagggaaggatgatcatgaaactctttatat

SEQ ID NO: 854940 - DNA, 535 bp, Homo sapiens
tgttgcaggggagctgagtaagatagagcaatgtgacaagcaggtcttataagactaggtagaagatcaatactctgagaaggagatatggaggggtcagaayggtctgtggaaaaagtactgaatgtggtccagttgaagaggaagggaatcaatatattaaaaaagacccaaatgaaaaaaagaaataaagctgtctttatttgcagatagcataattttctatggagggacaccaaagagtctattaaaaaaaactttctagaacaaataagtgagtaaagcaagatgcaatatcaatgtacaaacgtctattgtttttctatgttccagaaatgaacaattggaacttgaaatttcttttcttcaacttttattttatctggggttcatgcactggatgtgcaggtttgttacacaggtaaatgtgtgctatggtggtttgctgcacagatcaatccatcacctaggtattaagccaagcatccattagctattttttctgatgctctccctcgcctgacccccaccctgg

SEQ ID NO: 854941 - DNA, 682 bp, Homo sapiens
ttgattctctatcttggctactgtgaataatgctgttatgaacataggagagcagatatctcttcaatgtactgattttattttctttggatatatatycagaagtagaattgctagatcacatagtagctctatttttagttctttgaagaacccccatactagttttcataatagctgtgctaatttacattcccaccaatggtgtacgaggtttctcttttcttcatatctttgccagcatttgttatctcttctcttttttatttatttacttttttctcatgcctgtaatcccagcactttgggaggccaaggcgggtgaatcgcgaggttaggagttcaagacaagcctggccaagatgctaaaaccccgtttctactaaaaataaaaaaattagcaaggcgtggtggcgggcacctgtaattccagctacttgtgaggctgaggcatagaattgcttgaacctaggaggcggagattgcagtgagccgaggtcgcaccactgcactccagcctgggagacagagcaagactccgtctcaaaaaaaaaagaaagaaagaaaaaattattcttacaggtgtaaggtgatatcatttgcactcttatacataaatgagaaatccaaaaagctttttgttcatatgaattatatttcttcatatttacaatattagaaa

SEQ ID NO: 854942 - DNA, 579 bp, Homo sapiens
gtcattgaaatcaagtggcaaacttacaatatactatatttaaaaataaaatatatgggtttcatgcaattctttaagtgaaaaactattcaacatatcagttttattccttayactcaggatcacttcagtcttattaagtagtatattcctgtttttttttttttttttgagatggagtcttgctctgttgcccaggctggagtacagtgacatgatctcactgcagcctctgccttccaggttcaagccattctcctgcctcagcctcccgtgtagctggggttacaggcatgcaccaccacctccagctcatttttgtatttttagtagagacagggttttagcatgttggccaggccggtcttgaactcctgaattcaagtgatccacctgcctcggtctcctagagtgctgggatttcaggtgtgagccacagtgcccagccagtagtatattctttattacaaaagataattctggctgtctatgatatctgagcaatgctctctataaaaaaaatttagaagtctatatcaaggaaatgtcataggcaagctctgtttgtcctgtagacaa

SEQ ID NO: 854943 - DNA, 571 bp, Homo sapiens
ttaattagaattgccacagttaattgttttctcaaaataatcttgaactaggcaatttaaataatgctgtggattaaaattatgtcaacaatttatatttcttaatgaaacacttgtaatttccgttcttaggaaagtacactatactggcctgttaatatcttgcagagtgcttccccttcattcaccaaagactctgccttgttcctaaataatcaaaaaaatcatctctatgtggtgcttaattcctgctagaaaattaaacagggctggacacagtggctcacgcctgccgtcccagttacttgagaagctaaggcaggaggatcacttgagcccagtgtgtggaggctgcagtgagctgtgattgtgccactgcactccagcctgggcacagaatgtatagaaataaaataaaatacataagtaaaattaaacawaataaagcttgcaatatgccctatgtgatggtaaactagaattacacattaaattcccattctgctaacaggcaagatctgccacaccagagaagaatccccctcttcagaagccccaccagcaaccgttt

SEQ ID NO: 854944 - DNA, 634 bp, Homo sapiens
caatgacatattcctcttctacttaaaataatttttttcttaatatctccagtgtctccccttccatggtctgcaccacttcacaaaaagtcagaagcagcagccattgcaacatccatayacacatacaaactttgagtagttgtcaaagtaatgtgccatatatagtaccatatatatttgttaaccacttaacatgtgcaaaatagtagtactcctttatattttttatctttgcttgtcattaatgaagttttttttaatcctgtgcctctcacataatattttcctataagctttgtgattttatttgcacaagtttgcataaaaatttttcaggaatgcatatgtctgtaaccgaagaactgtctacacttacaacactctcattatgcaaactcatgggtcttttcagtttttgaaaataattgttagttttttatttaaataatagtcattttatgttgttttgttaattttcttcagagatgtctgttaaacatattcagaaaatgaaaattaaatgacttaaattaaatcacctttaaaatgcataggaacatcaaatacaaacagaagaaaataattaaaacaaccatcatatagtaagtaatattgacaattttttataatt

SEQ ID NO: 854945 - DNA, 334 bp, Homo sapiens
caaagtataaggaatgttttagaaatatcattacattttagaacattctctagagacttgaatagtataggtttgtatcattataactgaatgcagatttccagtagaccttccacactgatctcagatatctaaaaggagagggatttgtgccatttaggcaaaaggggattaaagaagtgacagtaggaaaaactgaaaataaagaaatactccagcctgggtgacagagtaagaycctgtctcaatcaatcaatcaatcaatcaaggattatggtagtgctataaaccacatttgtataattgcatgggcaaacagttatgcttttggtgt

SEQ ID NO: 854946 - DNA, 388 bp, Homo sapiens
aactgccaacttgtccggtttattttagaagggactggatgcaacaagcctgagagytgtggcctggggaggagagagcacagattcatcctccttccaccactgcccaacaactgaaaaccatgaactgcagaccaccaactgaagagaaacaactgagggtaccaactgagggcactaaccaaaggcaaccaatgagggcacccactgaaagccaccaagtgaaggccagttgccctgccaaccagaacacatccgggttagaggaaacaatcaggcccagaatcctttgcatgtgtcccccccaacgtggaattcagagcttaagcaccaggcttacaaggccccaccctgccagtggacccgccccacctttcatttattgctg

SEQ ID NO: 854947 - DNA, 405 bp, Homo sapiens
gatggagcaatttcagtgacatggtgtgaatccaggcagaactgacccagaaagcaaatgggtakttagaaataatgccttgttcaattcccacctatgagtacatatgtaactaacctgcacattgtgcacatgtaccctaaaacttaaagtgtaataataacaaaataaaaaataaaaaaaaaagaaataatgcctcgtgaaagtagacaactctccacgggccaggatgaccagaagctcagtaaatgttgctgaggtaagagacagagcagctgtgacaagtgcgatgacttctttgctcttatacatttccttcattttgttcgcatattcttcctggtccaaatctgtatttactatgctgaaaactttaatataggatccatattctaaatgatccta

SEQ ID NO: 854948 - DNA, 405 bp, Homo sapiens
gatggagcaatttcagtgacatggtgtgaatccaggcagaactgacccagaaagcaaatgggtagttagaaataatgccttgttcaattcccacctatgagtacatatgtaactaacctgcacattgtgcacatgtaccctaaaacttaaagtgtaataataacaaaataaaaaataaaaaaaaaagaaataatgcctcgtgaaagtagacaactctccacgggccaggatgaccagaagctcagtaaatgttgctgaggtaagagacagagcagctgtgacaagtgcgatgacttctttgctcttakacatttccttcattttgttcgcatattcttcctggtccaaatctgtatttactatgctgaaaactttaatataggatccatattctaaatgatccta

SEQ ID NO: 854949 - DNA, 484 bp, Homo sapiens
  misc_feature 294: n = A,T,C or G
catccagatgaaattagagagagagaaagacatgctgtaaaaataaataacccataattcctttaagcatgaatattttgggggaatttttaaatgaaaatcttayaaaaacatattgctacagtctgacaattttcatccccccaaaattcctgtgttgaaacccaatcaccaaagtgatggtattagaaaatagggtctttaggaggtgagtcggtaatgaagcctccatcctcatgaatggggttcgtgtccttataaaagaggccgggagtatggagtccttcctgaacntattaattggagctcccacttttcacccctccttcaaaaaaaaaacacatattagaagattcatgttaatatttagcagaaaagctattatacaagaaagcatgtggtacctgttcctataaattccaatagggtgggctcttccatctgtaagctgatctgcccatatcccaaactaaagaggaaaaag

SEQ ID NO: 854950 - DNA, 639 bp, Homo sapiens
aagtttttatatacaacatttacattattgtttatcttgtagtattttcaaatttctgtgaacatttcttcgctgacttgtaaggtatttagaagtgatctttgaaattttttaagtatgtgggttttcatttgtctttttggaattgactaattaatttcattgtgttcagataatatggttgataatatattaggtttttgaaatggttttgcaaactttttatatgtacttaagaaaaatgtatatattctaattcttacttgcatagctccacatacatttttaaagactgtgtttggtaattgtgcaatttaaatattctttcctgacttgttctttgtttatcctattgaaaattgagagaagcatgttgaaaactctaactatggctatggatttgccaaattttcttatagttcacccaacttttggtttacatatttgaagttactttcttttgaattgttatatcttcctgataaacttaaacttttattattatgtacttatcttagtgattttctgatgttttgccttcccatcaccctttctacatgcttatggtaacagaatgtttctttcttgtgggaaatwcattccatgtgattcaagtgggcagcctaagcattcatcctg

SEQ ID NO: 854951 - DNA, 639 bp, Homo sapiens
tacaattttgtcaccaaaaagtagcttaacagttgagttggaaacattaatgttgctgacataggcagagagagactcacatcacgcaaactgtggctgaatacagtttgacaacactgaaattaaaattcactttatatttttcttgcccccaaatccatatgtctaaaaaaattaagtgcttggtctggcttattattatcaaaggccattaagaccactgataaaaaagttttaaaggttataatatttataaaagtatcatgaaactggagtgttactctgaggctaaactggtcattttagctttatcaattaaaatcttcagatatctgagaatttgctacaatgtggaagacacggaatgctgctcttcctaatgaaaaaaactatgaattataacagcttttacttttgtttggttgtcatacatacctggtttgcttttctgtttatgaaatgatctacttggtatgaaaccaaaaacaagcatttacaactcaaataatgcttatgcacggttggcacaacaaaygtggcttggcaggaagagaagttaactaacttaagggacagtatataggaaaaagataatatgctaaaatctacgatgataacattcatggaagaatagaaata

SEQ ID NO: 854952 - DNA, 583 bp, Homo sapiens
gagaggtgagtaggagttaggatccgtagtgcaggcagaagaaacagcaaggtggatgtgtggaaactgcatgacacccctaaacaaggaggctccagatgaggagctagagaagaagatgagactggagagtaggcagtgggtccaagtaaggggagagctggggtgctgttctaaggagctaggcctcattctactggcaaagagaaatctccatagggttttaggttaggagcatcatagtcagtatcaaggtttagatccaaccagatattagttccaggaaaacttagagcggagtaagactagaaacaagaaaagcacctagggaactgtagctttgtccaggggagagaagattcaagtctaacaggcaagagtgggatatcagtctagagagaaagacatggaatggaaacacacttaggaggaacatggccatgacttaatccttcacagtaagaagaagcaagaaagaagaaagaattaaacccacagaggtgggacaatgtgctraagggttctgaagggctgagcatatttttaacaatcaaaaccattttcttgagaactattaaaagat

SEQ ID NO: 854953 - DNA, 583 bp, Homo sapiens
aactgatgacaacttaactctgatagcataaacaaactgagaaacaagcaaaaagaaaactaataaaaactctacattttaactttcttttttttttttttttttgagatagagttttgctgttgttgcctaggctggagtgcaatggtgcaattttggctcactgcaacctccacctcctgggttcaagaggttctcctgtctcagcctccgaagtagctgggattacatgcatgcaccaccatgcccagttaattttgtatttttagtagagacagggtttcactatgttggtcaggctggtctcaaactcctgacctcaggtgattcacccactttgacctcccaaagtgctgggattataggtgagagccaccatgcctggccctacactttaactttgtctgcccacggttttactttttcttgtttttacttatatctttttgwactgtctggttttgtttttgcttttttttttttccttaagatggagtcttgctctgttgcccagtctagagtgtggtggcagcacgatctggactcactgcaacctccgcctcacaggttcaagcaattctcc

SEQ ID NO: 854954 - DNA, 588 bp, Homo sapiens
agacaaaaagaattagataatcatgtcacataccaagaggagaacatttataatacccatgagagtaaaacctttcagggctgaatggaaggttactcagtctccctgaaacataaagtcctgacaagaggaaacaaaaaagctagcaaaaccaacctggatagctgtatcatgctaaggtccccgggtgaagactataattgttccagtggatgaaatctacatcatatagtagcaatgaatagcatctattaaatacttcatatctgccagacatgctactaaatactgtatctgatttacccctgcaaacagtaccatgaggcaggaactattatcttcatattagaaacagagaaaccaaggtttagaaaagatatgaaacttaaccagatactaaatggcatagcaggaactctgttatccaagtctatactcgtttccatttcgtacatttcctttyttaggaatgtgaccccacttttatcaataatcaatgtattagttagctattgctccataacaaattgccacaaacttagtggcttaaaaaatgctaacttattatctgtaggacatgaatctggg

SEQ ID NO: 854955 - DNA, 634 bp, Homo sapiens
aattctcactgctgcaaaaattgtgttctttctcaaccctcttgacgtacactgyatccaaaaaagattttggaaatcttccagagcccggttacactggggggatgcaaacccacccatcttccatctccctataatttcttcaataacttcagcatagagtgacattggtttaccaaggaaaagctaacagatttttttctataaataactggttggcagtgctgtggtgacaatttatataatagaactcatgcttaaataataaggtaacagctttggactgagaattttaaaatgttttattgaaatgtagactgattaacaggcaagattcttcttctaattattttaattataggctcttaatgacaagaagccgtagaaataaaaacacattaaaattacatttttaatgaagtggcacctggaaacctcaacttctccaaagcaagtgagggtactctattgttacctagaaacaatgcacacatatggaggggttaagatgtttgtttaagggacagacttacgaccttgtttctctctgaatgcaggtaggatacaggagacatgaagtatggtagaaagaacactaggctcagagtcaagagacgatttctggtcctggctc

SEQ ID NO: 854956 - DNA, 598 bp, Homo sapiens
aaatttatagcactcaatgccaacaggagaaagcaggaaagatctaaaatcgacaccctaacatcacaattaaaagaaccacagaagcaggaggaaacaaattcaaaagctagcagaagacaaggaataaccaagatcagaactgaaggagatagagacaggaaaaacccttcaaaaaatcagtgaatccacgagctgattttttgaaaagattaacaaaatagaccactagccggactaataaagaagaaaagagagaagaatcaaagagacacaataaaaaatgataaagaggatatcaccactgatcccacagacatacaaactaccatcagagaatactataaacacctttatgcaaataaactagaaaatctagaagaaatgaataaattcctggaaacgtacaccctcccaaatctaaaccagaaagaagtcgagtccctgaatagaccaataacaaggtctgaaattgaggcagtaattaatagcctaccaaccaaaaaaagycccagaccagacagattcacagtcgaattttaccagaggtaaaaagagcagctggtaccattccttgtgaaactgttccaaacaatag

SEQ ID NO: 854957 - DNA, 497 bp, Homo sapiens
aggctggttcaacttatgtaaatcaataaatataatccatccatcaaataagcagaacaaatgacaaaaaccacatgatgatctcaayagatgcagaaaaggacttcgatagaattcacacccttcatgctaaaaactctctataaactaggtattgacagaatgtatctcaaaataataagagctatttatgacaaacccacagccgacatcacactgaatggttaaaagctgtaagtattccctttgaaaactggcacaaaacaaagatgccttctctcaccactcctatttaaccatagtattagaagttctggccagggcagtcaggcaagggaaagaaataaaaggtattcaaatagggagagaggagttcaaattgtctctgtttgaagatgacatgattgtatatttagaaaaccccatcttctcagccccaaatctccttaagctgataagcaacttcagcaacgtctcaggatacaaaatcaatgtgc

SEQ ID NO: 854958 - DNA, 660 bp, Homo sapiens
gcacccgccaccacgccctgctaattttttgtatttttagtagagacggggtttccccatgttagccaggatggtctckatctcctgacctcgtgatcggcccgcctcggcctcccaaagtgctgggattacaagcgtgagccaccgcccccggcggcgaaaccccgtttctactaaaaaacaaaaattagctgagtgtgatggcctgtgcctgtggtcccagctacacgggaggctgaggtaggagaatcgcttgaaccggggagacggaggttgcagtgagccgagatcgagccactgcactccagcctgcgtgatagagactcagtctcaaaaaaaaaaaaaaaaaaaaaaagaagccaaaaaactggacttcaatttccctaagctcccgtcactgcaggagaggtgttgggagtgagtagagctcttgatcattttgactaggtttctagtccattataaaagatctctggctctcctgtttcccaattatctctagtttaaggggtaaagagacataatatgtaattatacatatgtgttggcttgcactggattttgtatttagtaatagtgcctagttttaccctttttgttgtgtttgtatatttatgtaaaagcatcatataaacattttgtcagtttgtttagatggct

SEQ ID NO: 854959 - DNA, 563 bp, Homo sapiens
gtgaacttattttactgatggctcatctcattatttttattatgtttaccataaatttcaagaaagaaacatttctggtccctttccttagtttgggggattctccttagtttatttattattattattcttttaagaaggagtttcgctcttgttgcccaggctggagtgcaatggtgcgatcttggctcatcgcaacctctgcctcctgggttcaagtgattctcctgcctcagcctcctgagtagctggaactacaggcatgcgccaccacgcctggctaatttttgtatttttagtagagacgggatttcaccatcttggccaggctggtcttgaactcctgacctcgtgatccacccgcctcggcctcccaaagtgttgggattacaggtatgagccaccgcgccaggatgatgatgatgatgatkattattattattattattattgagacagtctcactctgttgcccaggctggagtgcagcggtgagatctcggctcactgcaacctctgcctcctgggttcaagtaattcttctgcctcagcctgccgagtat

SEQ ID NO: 854960 - DNA, 644 bp, Homo sapiens
ttttcactcgtttagcaatcataaaaataggccgggtgtggtggttcacgcctgtaataccagaagtttgggaggccaagacgggtggatcatgaggtcaggagttcaagaccagcctggccaagatgctgaaaccccgtctctactaaaaatacaaaaattagccaggcgtggtggcatgtgcctgtaatcacagctactcaggaggctgaggcaggagaattgcccgagcctgggcggcagaggttgcagtaagctgaaatcatgccattgcacaccagcctgggcaacagagcaagactctgtctcaggaaaaaataaaaaataaaaaattatatatatatatatatatatatatatatatatatatgtttaatagtatatgtagaaagttttactttgctgtttagaattatgatttggggatataaggtagacatcaagttatagtttccatatccagacaacaaattaaacatcatttattaaaattgatcagtagtttagttttcactaatgtccttacataacattaacagctrcgaaagtgtggcaatgttattttacctaaaaagtatatgtcagtatctgaaatggtgggttacatattaaattaaacactatatacttgctaataaaccata

SEQ ID NO: 854961 - DNA, 644 bp, Homo sapiens
ttttcactcgtttagcaatcataaaaataggccgggtgtggtggttcacgcctgtaataccagaagtttgggaggccaagacgggtggatcatgaggtcaggagttcaagaccagcctggccaagatgctgaaaccccgtctctactaaaaatacaaaaattagccaggcgtggtggcatgtgcctgtaatcacagctactcaggaggctgaggcaggagaattgcccgagcctgggcggcagaggttgcagtaagctgaaatcatgccattgcacaccagcctgggcaacagagcaagactctgtctcaggaaaaaataaaaaataaaaaattatatatatatatatatatatatatatatatatatatgtttaatagtatatgtagaaagttttactttgctgtttagaattatgatttggggatataaggtagacatcaagttatagtttccatatccagacaacaaattaaacatcatttattaaaattgatcagtagtttagttttcactaatgtccttacataacattaacagctaygaaagtgtggcaatgttattttacctaaaaagtatatgtcagtatctgaaatggtgggttacatattaaattaaacactatatacttgctaataaaccata

SEQ ID NO: 854962 - DNA, 542 bp, Homo sapiens
aaaaaatagtagaaagctggaaacatccagcattaggggagcggcaaaacaaatgataccactggtcgagtgcagtggctcacgcctgtaaccccagcactttgggagaccgaggtgggtggatcacttgaggtcaggagttcaagaccagcctgaccaacacagtgaaaccccatctctaccaaaaaatacaacaattagatgggtgtgatggtgtgcgcctgtagtctcagctacttgggaggctgtggtagaagaattgcttgatctcaggaggcggaagttgcagtgagctgtgatcatgccactgcactctagccagggcaacagggtgagacctgtctctcaaaaaaaaaaaaaaaaaaaaaaaaagaaactaccacagaatgaaatacatccaacatttaaaaaaaaaaaaaawagtaagtaggccgggaatggtggctcatgcctgtaatcccagcactttgggaggccaaggcaggtagatacctgaggtcaggagttcgagaccagcctggccaacgtggtgaaatcccatc

SEQ ID NO: 854963 - DNA, 578 bp, Homo sapiens
tgtgatagttctactggagcaaattaacacatttcctggcatttttagatgaaactattgacctgtaaaatggattttgttcaattctaattctaatgcgtaattacaattattagcaaatttatttattttttatttttttatattttagactgagtattgctctgtcacccaggctggagtgcaatggcgccatcttagctcactgcaacctgcgtttcccgggttcaagtgattctcctttctcagcctcctgagtaactggtggtatctgccaccatgcccggctaattttttttgtgtgtttttagtagaggtggggtttccccatgttggccaggctggatttgaactcctgacctcaagtgatccacctgccttagcctcccaatggtagggagaatagtatcccttcactgccttgactttgtgctatgctgactctcctgatatctattatcttacagtytggcagagcttggggatcttgatatatcacagaacatcatgctggtttgttatatacgtgaccttatgctaatttgatttggtaagcaggatgtaaaaagtggcctaca

SEQ ID NO: 854964 - DNA, 624 bp, Homo sapiens
tgtgaaaagtctacacatctgttaggaaaaatcctactccccccatgcccctgttgcctctatggtaatccaagggaaggtaagtctaagwaaaataaaaaagggagaagggaaaaggaactttgagcccttgtggccagttcacaacaaaagtctgttacgccatggtttgtagcctgttattcagcaggaaaaaatcttggaaaaacaagcatcttgttctgggaatgtcagggagaaggaaaacaattcaaaatccaatcagtgtctttgagcgaaacacagattcttttattctgctagtttggacaacagttcctcatgcagattttacagagctagaggttgtcggaatcatgagaaagtctaggaaaagcctgaatcacacaagcttataagatttggggccgctgcaggattgtggagcttcaccaagggagaggatgggagggcggagtgatatatgaaatggaaaactgcattctggcaaaggatgtgcctgctctgaaattctcatagcaggatgacacttgaaacctttgtttctacttttccttaaagtgcatgaggccacacaattgttccagtcactcttactgtataaaaatcattccacaacttaga

SEQ ID NO: 854965 - DNA, 304 bp, Homo sapiens
ttcaggaaacttacaatcattgtggaaggggaagcaaacatgtcctcttcacgtggcggcagcaaggagaagtgccaagcaaaaggggtaaaagccccttataaatccatcagatcacatgagaactcactatcacaagaacagtatgggaggaaccacccccaggattcaattttctccacctggtcccacccttaatatatggagattattacaattcaaggtgagatgtrggtgggaacacagagacaaaccatatcaacactataactcatttgttgaaatattttgcagaaatggatgt

SEQ ID NO: 854966 - DNA, 612 bp, Homo sapiens
cacacaacatattgtgacaagtctattrttttattgtagcattttgccatatgaagctaccatcattttcacttgtatcaaatatagccatttatctttttttcacctttactttccaaccacacttctgccattggctgatatgtgcttttactattattatgatttctcattatttctcttttactattattatgacttgatcattatttctgtcatctattgtttatagacataattaagctatgtgttaatttggtgcttttaagtgatattgagaattcattgtccccttataatatcatttccttgtgaaaatattttgaattctaataaactgctcttgcaatcaggtttgtatatataaagtgagcactgaagataatacataacttacagttgttatttgatatgttatattttcacaaatattaactatctgtttcttattataatgcaatcaattttttaaattactttttatctgatttatcctcctattgcgtacccaattctgctctgtagtttcaagactttataaacttcagttttgtgttcactcatttagtccacgagtacatatgaaatgttcaaactgaagcaggagataca

SEQ ID NO: 854967 - DNA, 612 bp, Homo sapiens
cacacaacatattgtgacaagtctattgttttattgtagcattttgccatatgaagctaccatcattttcacttgtatcaaatatagccatttatctttttttcacctttactttccaaccayacttctgccattggctgatatgtgcttttactattattatgatttctcattatttctcttttactattattatgacttgatcattatttctgtcatctattgtttatagacataattaagctatgtgttaatttggtgcttttaagtgatattgagaattcattgtccccttataatatcatttccttgtgaaaatattttgaattctaataaactgctcttgcaatcaggtttgtatatataaagtgagcactgaagataatacataacttacagttgttatttgatatgttatattttcacaaatattaactatctgtttcttattataatgcaatcaattttttaaattactttttatctgatttatcctcctattgcgtacccaattctgctctgtagtttcaagactttataaacttcagttttgtgttcactcatttagtccacgagtacatatgaaatgttcaaactgaagcaggagataca

SEQ ID NO: 854968 - DNA, 642 bp, Homo sapiens
ttgtatccatacagattgatatatttggcactccctcttctgagcaaaatggaaggacagggaccagattgatcctccagcyggaagcaaacaagtatctctattcttcagagatttccagagacacagaaccaatatgatgcatatatcaatatatacttatgtagaaagagatttattataaggaattggctcacgggattatggaggccaagtcctaagatcagcagaatgtgtcaacaaggacccaggggagccaatgtgttggttcaaattttttaaagggaccaaataaaagtggccaagacatgtttggacatcaggcaatgaagatcagtgacccccctgagagatgggaaacaaaagaagcaagccccaagatcgccccatctgaccacctcccattgcctactgtggcacagacggagcacagaggatggcctcagctaaggaggcttagctgagtcttgggagaccaaggcagcaagagtttgcaagactggggaccacggaagagagctacatagagacagagagggctctggagatttgcaggtggcccccttgagtattcagctgagaagtgactggcacatgcttgggagaagatgactcaagtctatagaaagactcacccaagga

SEQ ID NO: 854969 - DNA, 509 bp, Homo sapiens
ctcttccattccctcccttctactgctcctgcacccacggagataacccagaatctcagtcagtccagcccaggagctgttatccccatctatgttatccccatctatgtatgagaaagtccaaggsgggtatagacattgggtaaacattcctgctccaaaagggagaaattggccaaaagaaagagtagcaggcctcaggcaactcagaaacccagcaggacagtcttaaaccttaaaactccaaaattacctcctttgaccgcatgtcccacatccagggcacactggtacaagggatgggttcccaaggccttgggcagctccacctgtgtgactttgcagggtgcagccccccacccagctactttcacaggatggcattgagtgcctgccgcttttccaggcacagggtgcaagctgtcggtggctctaccattcttgggtctagaggatggtggctcccttctcacagttccactaggcagtgccccattggggactctgtg

SEQ ID NO: 854970 - DNA, 612 bp, Homo sapiens
gggtatgaaagaggatgtcaagtatgattgatatggtttggatctgtgtcctcaccaaatctcacatcgaattataatctccagtgttggaggtggggccaggtgggaggcgactggatcacggaggcggaagtctcacgagtggtttagcaccatcctcttggtgctgttctcgtgatagagttctcatgagatctggttgtttaaaagtgtgtagcacctatgtccctctctcttgctcctcctctggtcatgtaagatgagcctgcttccctttagccttccgccatgattgtaagtttcctgaggccttccaagaagctgagcagatgctagcatcatgcttcctgtgtagcctgtagaaccatcatctacttaaacctctcttctttataaattacccagtctcaggtatttctttatagcagaatgagaatggactaatacagaaaattggtaccaggaatggggcattgctataaagatacccaaatatgtggaagcagctttggaactgggtaacagacacacagacagaggttggaagaatgtggagagatcagaaaaagatakgaagatgagggaaaatttggaattttctagataattatt

SEQ ID NO: 854971 - DNA, 494 bp, Homo sapiens
acgatcagcttgctaattgaggtctttggtgctattaactgatcatgagtttcttggaatgaaaatcaaagggctgcccggtaaagcctacttgatttgtaaactgatatcaatacataaatgaataaatgaaagtctagatctggaaagcagaatgagcaagggagcgtgggagggacccagggggaggtaattgaattatggggctggtctttcccgtgctattctagtgatagtgactaagtcttatgagatmtgatgggcttatcagggctttccactttggcttcttcctcattttctcttgctgccgccatgtaagaagtaccatgtttctgaggcctccccagccatatggaactgtaagtccaattaaacctctttttcttctcagtctcaggcatgccttagtcagcagcatgaaaacggacgaatacacttccccttcaccttccaccacgattgtaagtttcctgaggcctctccagccatgc

SEQ ID NO: 854972 - DNA, 366 bp, Homo sapiens
gaaaacggacgaatacacttccccttcaccttccaccacgattgtaagtttcctgaggcctctccagccatgcagaaccgtgagtcaattaaaccactttcctttataaatcactcagtctcggatatgtctttattaacagcatgagaacagactaatatagaggagatgaatggatttcaagcagccctcccgctgaggtaaaatcctaagggatacttcagcaggcaccaggaaggggacgtttgttcttctgtggcatcaactctaccgaaaacaacctagcctccaacctcgagttccatsagattttctcttcccttcaaagcaaatctgacctgatgttgccatgacccacctggatcc

SEQ ID NO: 854973 - DNA, 366 bp, Homo sapiens
gaaaacggacgaatacacttccccttcaccttccaccacgattgtaagtttcctgaggcctctccagccatgcagaaccgtgagtcaattaaaccactttcctttataaatcactcagtctcggatatgtctttattaacagcatgagaacagactaatatagaggagatgaatggatttcaagcagccctcccgctgaggtaaaatcctaagggatacttcagcaggcaccaggaaggggacgtttgttcttctgtggcatcaactctaccgaaaacaacctagcctccaacctcgagttccatcagattttctcttcccttsaaagcaaatctgacctgatgttgccatgacccacctggatcc

SEQ ID NO: 854974 - DNA, 502 bp, Homo sapiens
tatctaaagtcaagacaaatgaaagaatattaagagctttgagaaaaaagcatcagataacctataaaggaaaacctaccaattaacagcagacttcttggcagaaaccttacaggccagaaaggattggggtcccatctttagcctcctgaaacaaaataattgttagccaagaattttgtattcagcaaaactaagcttcataaatgagggaaagataaagtgttttttggacaaacaaatgctgaaagaattaatcactactaagccagcactacaacatgcctaaagaagttctaaatctttaaggaaaacctcaaaatacaccaaagtagaacctccttaaagcataaatctcacagggcctataaaacartaacacaatggaaaaaaacccaggtattaaggcaacaactaacatgatgaatagaacagtacctcacatcttaataccaacgttgaatgtaaatggcttaaatgctccatttaaaagatacagaat

SEQ ID NO: 854975 - DNA, 638 bp, Homo sapiens
gggattacaggtgcccaccactgcgcccrgctaatttttgtattttcagtggagacggggtttcgccatgttggccaagctggtcttgaactcctgacctcaggtgatccgcctgcctcggcctcccaaagtgctaggattacaggcatgagccactgcacccagcctgttctgcctaattttttttaaaccatgcattaatgatgaaatagtcaccgctttcatgacagctttccttgctctccaaactgtgtattattaccatctcttctgtattctaggagaggaggaagagaggtgtatatgcctctttatagcctgtgtaacattctgttttgtattacagccatgtttgtacttgggatggggaccttagcatctcttgttgaacagagcgctttatacacaacagaccaacacgtttggttggatgaatggtcatattcaacctcttcagatgccactattcatggcaattgaccattgtccacagcctcatatcagagaatctcaaggttaaaaggtgcttaaaaataatgtagcccaagcatcccttaatgcttcaatctccttcacaaccctgcaccaaacacttatccagcccatgttccaaaacctccaaggcagaacccttcacc

SEQ ID NO: 854976 - DNA, 558 bp, Homo sapiens
tcagaagatcgagaccatcctgtctaacacagtgaaaccccgtctccactaaaaatacaaaaaattagctgggcgtggtggtgggcgcctgtagtcccagctactcaggaggctgagggaggagaatggcgtgaacctgggaggcagagtttgcagtgagctgagattgcgccactgcactccagcctgggtgacagagcgagactccgcctcaaaaaaaaaaaagaaaagaaaatattataaacttagattgtgttcatgcttgcacaaaacccacagcatattacacctaaggaggtgaattttatggtatgtgaattatatctcaataaagatttttaaaacaaacaacacaacaaacactataaaagttaggtctgggaagactaattctaacaacatttaactcacagaagatgggattcttaagggtcaactatacctacytccaaaaagggcagagataagaaactgtagtggaaaatagttgggtttctataacttttctgaaacactcaaaatgtcctccagtaatcctcacgattatcactttgaagc

SEQ ID NO: 854977 - DNA, 562 bp, Homo sapiens
  misc_feature 332, 342: n = A,T,C or G
catcctctatttttgcaacaatttgagaattggcgttagttctttacaggtttggtagtaaagccatccagtcctggtcttccctttactgaaaaaccttttattactgattcaatctcattatccattattgttcttttcaggttttttatttcttccttgttcaatcttggtaggttgtgtttgcccaagaacttattcatattctttaggttttgcagtttgttagccacatcattggtcattgtttgtaatagttgtcagtgatctttatattgttgtggtaacagttgtaaggtcttccggtttctgattgtgtttgtttgggtctnctctcttttnttcttagtctagccagcagtttatgaattttgtttatcttttcaaaagccaactttttgtttagttgattctttttttcttttttttgcccctattcattttgttctgctctgatctttatcttttctttacttttactaattttgagtctggtttgctcttgcttttctrgtttattgaggtgcataattggttatttgaaatctttctacttttctgg

SEQ ID NO: 854978 - DNA, 533 bp, Homo sapiens
cagtgaaaccctgtctctactaaaatacaaaaaagtggtggtgggcgcctgtagtcccagctggtctggaggctgaggcaggagaatggcgtgaacccgggaggcagagcttgcagtgagcrgagatagtgccactgcactccagtctgtgcgagagcgagactccgtctcaaaaacaaaacaaaacaaaacaaaacaaaaaacagtatattttgtagagtaataaaggcttttttattcctacgaagtcaaattttgccatatttcttttatggattgtcttcttatatctaaagactctttgcttaacccaaaatttttaaaatatttcctttgatgagttttatagttttacatttcattctatgatccattttgagtcaagttttgtatatggtgtgaggtataatttgatgatatctccaatttgctattgagtctcttcagtgaatttttcaattctaaaatttccattttgttcttttatatagcttttatttctttgctgagaacttctttccatttatttaaaa

SEQ ID NO: 854979 - DNA, 600 bp, Homo sapiens
aacaatcccttcttttggaatacctcctgaaggacttgcctgaggctgttttacagctaacatttgttttaataagtagaaagagtatattataaaatacagactaaaaatatagtaaatacataaaccagtaacagtcatttattatcaagtaatacataccatacataattgtatgtgttacacttttatatttttatttttattaaaatttttttttgagacagggtctcactctgtcacccaggctggagtgcagtggcatgatctcagctcgctgtagcctctacctcccaggctcaagcgatcctcccacatcagcctcctgagcaactgggactacaggcacacatgaccatgcccagctaatttttgcatttttgatagagatgaggtttcactatgttgcccaggccgatttcaaactcctgagctcaagctatccgcctgcctcgaccacccaaagkgctgggattccaggaatgagccagggtgcccagcctgtgcaacacttttacatgactggcagcgcagtaggtttgtttacaccagcatcaccagaaacacgagtaatgcgttgtgctatagcgttaccatggc

SEQ ID NO: 854980 - DNA, 612 bp, Homo sapiens
tttatttcattgattatatgaattctttccttttttttttttacttttgttactttgtaattcttttactagccacatgacttgaagtttagcttctttgcttttaatatttctttttgaagaataattatgtgtggctgggctcagtggctcacgcctgtaatcccagcactttgggaggccaaagctggtggatcacctgaggttaggagttcaagtccagcctggcaaacatggtgaaactccgtctctactaaaaatacaaaaattagccggacgtggtggcacaggcctatagtcccagctactcaggaggctgaggcaggagaatcacttgaacctgggagaaggaggttgcagtgagctgagattgtgccattacactccaacctgggcaacagagcaagactctgtctcagaaataaataaataaataaaataattatatttaaggttgtacttacctttctataggactttgctccatcygacaagttttgtcatgtggtacttttgttgtctttacttttaaatatttcatgacattgtcatttcttctttaaccaatgagctatttttagtgcattttttgtttccaattaaaggttgcta

SEQ ID NO: 854981 - DNA, 575 bp, Homo sapiens; identical to SEQ ID NO: 838876

SEQ ID NO: 854982 - DNA, 332 bp, Homo sapiens
ccctgagggtccgccctggccgcctggccaggctcccagctccaccgggtccggggcagggagcccaggggcggcaatgcaggggcgccgcccccgccactgccagcatcttccccggccacccggcaggtccgcgctggaccctcaagggcccccccaccgccaaccttggcgccgatccggttcccgcactgccccgtctgcgtgagcacaatctccctcatggccaaggygggactagggtggcaggagaaaagcgagaaggaggagcagacagacgcgcaatgacagggcccgcgctccaccaacgctgaaatagccccgcgcccacc

SEQ ID NO: 854983 - DNA, 626 bp, Homo sapiens
tgccagccagaggggccctggactaaactgcaatccctggcccattttagttcttcagagaattctcacccagctctatgtatgctgaccagcatgcccatcagcttcattgcccctttcagtgcggtggccttggctgccgcatctgtgagggcatttccttttacatggtcagtctctcttttgatgtcctctacaatgaattatagtcacttttttttttttttggcagcaaagcagcattctaacaaactcaaaacctgagtgatgttgtctagaaaagcccttggtggtcaggagtccctacccattccaaattgcagcataagtatgaaacgctaaaatatcacacttggaatcggtgtaaatgttaacttttaaatcccttcccaactgcagggctgtagtaagttcagttaactcagctttttgagctgaggttgaggccagcaaggcttgtgccttctcttgtgctgactaataatagcatatctagccctcctgttttcctgatgcataaaacaacttgcatttgttaacccctcttccttgggatggkgaaggggctcatctctcttcagtctggcctgctaaaataaatttgtttcataacctgtgacatggtt

SEQ ID NO: 854984 - DNA, 626 bp, Homo sapiens
tgccagccagaggggccctggactaaactgcaatccctggcccattttagttcttcagagaattctcacccagctctatgtatgctgaccagcatgcccatcagcttcattgcccctttcagtgcggtggccttggctgccgcatctgtgagggcatttccttttacatggtcagtctctcttttgatgtcctctacaatgaattatagtcacttttttttttttttggcagcaaagcagcattctaacaaactcaaaacctgagtgatgttgtctagaaaagcccttggtggtcaggagtccctacccattccaaattgcagcataagtatgaaacgctaaaatatcacacttggaatcggtgtaaatgttaacttttaaatcccttcccaactgcagggctgtagtaagttcagttaactcagctttttgagctgaggttgaggccagcaaggcttgtgccttctcttgtgctgactaataatagcatatctagccctcctgttttcctgatgcataaaacaacttgcatttgttaacccctcttccttgggatggggaaggggctcatctctcttcagtctggcctgctaraataaatttgtttcataacctgtgacatggtt

SEQ ID NO: 854985 - DNA, 519 bp, Homo sapiens
acagtctgatgagaatacagggattcctaaagggagaagggttagaaaaatagctcggtgcatttaaaggtggtcttaaattctaggatcagtttcaactttcctttttcttttccatgaccaccagtcaagaacagtttgaactttcataagcaatcaggagttacttaaatttgggaatagtgaaaagtaaaaataagcatttactttttttttttttttgtaaagacagggtctcactatgttgcccaggctagtttccaactcctggcctcgagcaattctcccaccttggcctcccaaagtgttaggactacaggcatgaaccaccactcctagccaagaattaacatttatagttttaaaataacagctaatatttacattttgtaaggaagagtttgtttctttggaccctcacgatagccctgtggaaaaagtcgtgttgaatctggaggcaggtatargatgaattgcagtgttgcccaactgttcatgtctcctgctcctgtggagccc

SEQ ID NO: 854986 - DNA, 663 bp, Homo sapiens
atcatttattcctcaaaaagccctttaaagtaggcattattagccccattttaagggtgattttaatataagccaggatgtgccatgaaagtaagatgttctttttttttttgttttcttgagtccaggcatttctcctgtatctagcgtccatcatttaaaatctaccactccttaccatattctacacctttccttttgtataaaagtgtgaggtataacccaggctgcaacttcagccctcaacagcaggaactattgtctaatgaaagatgtactccagatggaaaatttctcaagtgaaatggatggaattggtaaatccattgttttctaaattagcaaatatttgggtatgtaataatatacatttattcaagacaaaggctatgatcacagcttttcaaaatatgtatgcaaacggatgaggactaaagcatacacattttgatcattattagggaggtggatttaggagtaattattttctccataaattaaaaatcgtcaataatttttagcttatgtacatacccaagttcttttgcacattaattaaagaaagctgagaatcacctattttcagtcctaaaggattcttggcttatttaacccactaggtgagtggccattttcyctctgtcttcccagctccaatcaaga

SEQ ID NO: 854987 - DNA, 625 bp, Homo sapiens
acatctcacatggcagcagacaatagaagaaagcttgtgcaggaaaactcacccttataatcaccactggatctcgtgatacttactatcacgagaacagcacgggaaagacctgcccccatsattcaattacctcccaccaggtcccttccacaacacgtgggaattccaggtgagatctgggtggggacatagccaaaccatatcattccaccaacctcatgtcctcacattttaaaaaccagtcctgccttcccaacagtcccccaaagtcttaactcatttcagcattaactcaaaagcaagttagttacttcctagacacaatgggggtaaaggcattgggtaaatacagccattccatatgggagaaattggccaaaacaaagggcctataggcaccatgcaagtccgaatccagcagggtggtcaaatcttaaagctccaaaatgatcttctttgattccatgtttcgcatccaggtcacgctgatgcaagaggtaggttcccatggtcttgggaagctctgaccctggtttgccttactaatttccacccctgacttttctttcaggaggatcctgacagatcacatcctgtttacaaatttttttttctctccaac

SEQ ID NO: 854988 - DNA, 609 bp, Homo sapiens
caaaggcctcaggtggtaacggccaaagggtcaccgcctccgcggggcgctgcgtccacaacacgggtggggaaacggtcaaggtttgcggcgtttgggttcatgactgcaaaaacaccgtccactacgggccaagccgagtgccatgccctgcacctacgtctaagctcacagcagcccgcactggggcgaggaatcctgaggaggctcgccccggtctctgggactgggctctcgccgcgctgcctcagggcgcaagttccacgcgcttcgccgggcgcagaaaagcaccccccgctccgcggcgcccaggccgcctcccccgacaacgcacctccgcagcgacgcctgcgcctggaaggggctcggcatctagaccgcagccccgcgcgggccacactccccagcaagtgcctcggcagcgtcccaggagactcgccgcgctcgccggagctggacgtggcgccgaggtccgcgtcgccscccgcaccccggtgctcacctgtaccacgcagcagcccagggcatccttctgagcgtcaggagggacgatgttccggggcgtgtggcccgggtgcaagaaatgaaccatggcaaccccggcggcgg

SEQ ID NO: 854989 - DNA, 526 bp, Homo sapiens
gtgctttcctcccccacagactcatctaatggtgctacccacacttctaggctggtgtcatcactgatsacccagctgtgattttacagctgtgagattgcagtgcagggaggtgaagcacttggctgtgtttatccaatcattggtgagacttggattggactcccaaccacctttcccacttcctcgacctcatttcagcaaatgccagcctctgcggtaaggttttaccccagcagagtgaaacaaagtcagggttaggaacttgggctttcaagtcgacagggctgtgttgaaatcctggtctgtggggcagtgcagaggggcgggtgcattttaatacagccacatagaagcaacagtgtctgctttgtcactggccttggttccacaccagccctagcactccagtctcagccccacttccaggcaaggaggaattacttcctatatcatattatttgaagtgtttataaaactttctcaggaaaagtctcaaaaaaaaaaaaaactgggaaaaagaatt

SEQ ID NO: 854990 - DNA, 577 bp, Homo sapiens
cactgaaaaacaaaaattttataaataaaatataccagactttcagattgttggtgagtgttagtttttctctttggcttrcttttcagttatttccttactcaatatttccttttcagtatgtcattttcctaggctacaagctctcaaggtcttctttttccccttcagggaaaaagttcccataggatctaagggcaattgacaatgagggattatagattcgatggttggaaataaactatgattgtttcttattgccttggtaaaaccaaaatctcagattaaatatattgtcactattataattatactaaaaggtctagtagattttttataccctctgagtatccaaataaagccagaattaaaaaaaatcagacataatatgttttctgggaggaatttgacagcaaagacatttccatctaagtataattaacattaatttgtggaaaagtaaatggcaaaaatgattaatttatttttattgactgtattttgattcttttaaaatgattactgagtaagacatagaatttgcttttattaaagaagaataaatgtaatctgcctt

SEQ ID NO: 854991 - DNA, 540 bp, Homo sapiens
ggaatcaacctaaatatccaacaatggataaacagaataagaaaatggggtatatatacacaatggaatactatgcrgccacagaaaaaagaatgaaatcctgtcatttatgacaaaatagatgaacctggaggactttatgttaagtgatataagccagacacagaaagaaaataccacatatactcattcatatacagaatctaaaaatgttgatcttatagatgtagtaaagagtggttaccagagactgggtagggtggtggggagaacggaatgagaagaggttggtcagcgggcacaaagttataattagatacaaggaataagttctggtgtcctattatacagtaggatgattatagccaacaaaaaggtattgtagatctcaaaatagctagaagaaagtatttaatgttcccactacaaagaaatgataaatgtttgaggtgatggatatgctaattaccctgatttgattattatacaatgtgtacatgtattgaaacatcacattgtaccccataaatatgtataatt

SEQ ID NO: 854992 - DNA, 590 bp, Homo sapiens
ttctctttccttcttcccttgcttccttagagattcctcctgcaatggcttcctcaaaaaagcattttcataagcaacctcatgtcagcctctgcttccacagaagccaatctgagttaagcagstgtttaacttagcatgtccaacataaaattcttgttttcttctcatcccctgcccctgaactttctcctttgcctgtccttcttatctcattgaaagtaacaacacaagtatcaagtgaaaataaaagaatcttctctgatttctttctttctaatgtattattaaattctactgatattaccaatatctattcaaataccaacctagtctaagatactaacatctgtcttctagacttcaactgggttcctaacactgatggtattacacaatttttgcaatgaagtcttacccacctataatccattttccataaagcagcattatcattttctaagtcacacactgtagttttaatacaatcccaaactaacaagcttgaagaaataaaattattgttaaaattgtaaaaattacggagtcttatatttaactaatcatggtacctttcctcaatatcaatt

SEQ ID NO: 854993 - DNA, 396 bp, Homo sapiens
aattgaatatgcatcataataaacaytctccatgcacagaattagaaatgcatttttttagaaatacataatttatttaccccaagtgggaatagtctacaaagatttttcctgatttttacaataaataataaactatagattataatagccaaataatcaccaatggccccattaagaaatagaatttctttaataccattgagtcaagatgtattcctcttcctggtgccattccctgcatcatggaggaatttggaattttattttgcttgttgcactactttctttgtagtttcattaaatatgtaatagcgtctatataatatattagtttgcttttgtttgtattaaatttcatgaagatgatgctgtggaaagaactgtgtccccaaa

SEQ ID NO: 854994 - DNA, 620 bp, Homo sapiens
gtggatactgccaaatgaattaaatagatgttgatctacatattctgtttatctagagtttatgagaccttcattgtgagatcagtgtaacaagaattcctaagtttttaatgcattcagatcatgatgttatgtgctatagggagtattataaggttttatgtcccttgaaatcaacagctgggtcccattctttttggatctccccatactgaatagtgcagtgttaatcatttagtatgcacttgataattatgttggatttaaaagagtataataggaaatctaaaccagactcctacaggcaaggaaagctacagaatattgattcaggcttccagacacttatatagggagagcttagattgacaggaatggcattgaatagcagcagatattagcacctcatgtcacctttcctacagtgtgtatacgttttgaaattcattctagctgcctagctagaactagctggaaagatggtataattcataaagctaataacctttttggcacatagtgtgtgacatggcacctggattctaaacacctatatgatttgtgctgccaaaggtgactcagtgrctgggaactttttattcttcttacagtaaactgga

SEQ ID NO: 854995 - DNA, 635 bp, Homo sapiens
taacttgttcaaatttctcttcaattaggactgtactctgagcctgggcaacatagtgagaccctgtctcttaaaaaaaataaaaataaaaataagccattagttgggcatggtgactcactacctattgtcccagctactcaggagactgagatgagaggatcacttgagcctgggagtttgatgttacagtgcactatggtggcaccattgcctctagcctgagtgtcagagcaaggccatgtctcaaaaaaaaaaaaaaagccgaagattgtaccttgtgtactctgatctacaatggccagaaacatggttcctattgaaattataaattattggtaattatttatacatgaataatctccttaataggtaaacattttcattttcttgctcaaatgtccttacattttattggaacaatacttttgttgcatattttgcaataaattttgacttagaaaaaaacactttgctaaaattttttaaaatactttttagcccttttaaaaaygaaatagccaaacttagaatctatttgaaattttttgttaattttttggtaatattattagtaacacgaaacagttcacttcaaataactgtggatagcatcaattaaaaattaatttttc

SEQ ID NO: 854996 - DNA, 635 bp, Homo sapiens
taacttgttcaaatttctcttcaattaggactgtactctgagcctgggcaacatagtgagaccctgtctcttaaaaaaaataaaaataaaaataagccattagttgggcatggtgactcactacctattgtcccagctactcaggagactgagatgagaggatcacttgagcctgggagtttgatgttacagtgcactatggtggcaccattgcctctagcctgagtgtcagagcaaggccatgtctcaaaaaaaaaaaaaaagccgaagattgtaccttgtgtactctgatctacaatggccagaaacatggttcctattgaaattataaattattggtaattatttatacatgaataatctccttaataggtaaacattttcattttcttgctcaaatgtccttacattttattggaacaatacttttgttgcatattttgcaataaattttgacttagaaaaaaacactttgctaaaattttttaaaatactttttagcccttttaaaaatgaaatagccaaacttagaatctatttgaaattttttgttaattttttggtaatattattagtamcacgaaacagttcacttcaaataactgtggatagcatcaattaaaaattaatttttc

SEQ ID NO: 854997 - DNA, 463 bp, Homo sapiens
agagctcctgcccagcacacgtcgtagttgctcagtgatcggcagcctttgttaccactgtgggatcctgtcctgggacaggagtatggcaagtgccaaacaggccctgagcagctgtgtagctggaactgagggggcaggtccacagctcctccaaaaagctctatgactccacattaatggagactccttctcaagggaactaggatatttacttcactgtagaccaggcatccccaacccccagggcatggatggtagctagcggtctatggcctgttaggaaccaggctgcacagcaggaggtgagcggtgggtgagtgggtgaagcttcatatgtatttacagccactccccatcactcacattttactgccttagttcctgtcagatcagcatcrgcatcagagtctcataggagcacaaaccctactgtgaactgtgcatgcaagggatctaagtt

SEQ ID NO: 854998 - DNA, 535 bp, Homo sapiens
gacatggtgacatgtaggagaacacagttgaatgccaggtaagccccacgtgggcctcatgggttcagwggcttttttcagaattacttccagtagaacggttgcccgtcacagggagcatatccaagagggcgtgtgtgtgaagctggaaaagtggcttgtactgggaatggggtgtctcatatctctatagagagaccgcagggagctgaggactgaaggagaggttagagcagctcaggctcaagccctcttccccagaatcaccaggaacttgccagggaggcttttgttgctgttgttgcaaaatccaattgcaattacaacaataagtgaggaattaaactacaagtatgaatagcatgggcagcttaattcttaataagaaagcctaaggtgctttcaactaaaccactttctgaagttttttttttaccaaaaataaattatatcccaaaatttataagaaaaggtacaagataaaaaagtgcccccttttagagctaaagttgtcaagctgcagatatttgattga

SEQ ID NO: 854999 - DNA, 660 bp, Homo sapiens
ataaaatgcttaatcaaacctgctgggtgatgaccctggaactttaattcttacagacttcacactattggttgtcctggaaggcgacctacaatcatgagcagygaggtaatgagctgggaatccagctgtaaggctcaaggtggagtttcctaatgtgcacagacacaagcttgtacatttcaaactagctcctcctgagcacagacctagaggggcagaacttagcgctttggtgctcaacatggggtcctccaaccggcagcagagcatcaagtagaccccatgtctacttgatcagaacatgcgctttaagaagaaccccagaaggtcatgtgcaccctaacactgagccctggagggaatgacctttggcccggtgccagcgggcccctccccaactggcagtcacaaatgcaacaggttagtaattcataaaaccaacaggaaggttatcagttagaattcatgtggaaaaaataagtctggatggacatatgctgacctgttaagcatggtgattttgtctcagtaagctgacagcagactacctctgaccaggctggccttgtccaaacaactgggtacccaccaggactgtctgtcttactggcaggcacaaaacacaagctcaagactgcgaacatggtctcaatgcac

SEQ ID NO: 855000 - DNA, 476 bp, Homo sapiens
gaggaataggtaaaatctttctgtttgtagatgacatgatcttatataaaacctgaaagattatacacacacacacacacacacaactaatataaaaattcagtaaagttgcagaatgcaaaatcaaccacaaaattatttgcttttctgtacacttacaatgaacaattcaaaattaatatttaaaaaattccatttataatagcgcttaaaagaataaaatctttaggaattaaccaaggaggtgaaagatgtgtacaccaaaaactagaaaactttgttgaaaagaaattagggataaataaatggaaagacatcccatatttacggattgtgacttaatattgttaagatatcaatactacccccaagtgataatccacagattgaatgatatctctatcaaaatyctaacattgttttatgttgacaaatagaaaactcctacaattcatacagaacttaagggaccctga

SEQ ID NO: 855001 - DNA, 478 bp, Homo sapiens
  misc_feature 16: n = A,T,C or G
tttcatctatcacttntcctcccaaccatacctttttgctgtttttggaatattttaagcaaatctcaaatattatatcattttacttgtaagtacttcagtatgaaaaaaatgtatagcagagtctttcatgatatgcccaaagatgagttggagaaatagagattggataagaatgaactaaaaggattggtactaacataaaccatggccaaatcatgttgataaatagtttgaaatctaccttgaagaaaggtggtagggaaatatactacaagattctgtccttgttgttgtcttatgtggcacgatttatcaatgatatggccaaaaatttagaaagcatgcttagcagatttgctaacaatacrtagcttttagtgagactgcaatgtattacataaaaggatcaagtatcatcaggctggaaaaatgagctgaaaccataggttgacatttaattgatacacacaaggtg

SEQ ID NO: 855002 - DNA, 586 bp, Homo sapiens
taaagctcagcacagttcctggcacagagtaagctctggacacgccatagctctggttgtttattaccggtgataaaacagatgggtcctggtgacccagtggactggaggagatgcagggacaaacgcggccaagtctgaagtttcagatcaggaccaaagcccgggtctctgcagctggtatctgagcacagaccaggtctccaggtgctctcttccctgctgaccctaagggctggggccaggacaccccctcccctgccctcacctcctctgcccagctttcccttagcaaggcctcctctggcccctccagcatagactcccaccccccaggaagggtcaaacacaaactccatctcattccaacacctggtgccgtctaaccccgttcttttcctccaggagttcccagggtcgggaaggtgcagtgaatgagacaggcctcagagagtgacactgggagctccacttgggtttytaagtctcagagcaggaagtgtctagaccagcgtcccactgtgagtgagcgctggagcctccctgaagaggaatgcggtgggcaaggtggtgtgacaaaggtggg

SEQ ID NO: 855003 - DNA, 630 bp, Homo sapiens
ctctcaggcaaccaccatgaagccccctgccytgcaggagcaaggtccttaaccctagctaaagagacaccctcagggcagcaagtgccaaggccagctccctggagcaacggggcatgccccttggcatgggttccccatgttcaaatctggactctgccatttaagggttctatgacctctggcaagtctcttaaccaccttcagtcctggtttcctcgcttgtgaaacgagaaatatccacttcttaggatggctggagggttaaggccatacaagtcccgtggcagcccctcctataagacccaacaggactgcacgagttctcccactgcccagaaggttcttccctgagagctcagcttactccttttgtcatcggggaggccctccccaccacccccaccagatgaaacccttcagatctgggctctcactgccttcaggacacatgccttaattgcaattacacagtcacctgtaggacaattgcacttcagcctgtgtcctccactaggggaggagctggggctggttttgctcaccattacatccctcagcttagcaccatgcctggcatgtaactggctctaactgaagagtatcctcttctttgagaccaggttgtca

SEQ ID NO: 855004 - DNA, 616 bp, Homo sapiens
ctggggctctggaggaaatgtggggtggaggtgcacccctcacacaagcaaagggaacaggtgtggggaatgctgccttgtgccaggcactgagccctcacagccactctgtggggaggggttcctgcccatttacagacagggaaagagagtggggcaacttgcctgagccatcctacagaagggagcagtggccaagattctaatcctgcttcatccctgggttggggggactatccctgggagaggccagcactgtaccccaagaccctgagtgggtgtgaagagaggaagaaaggcccccacagagagcattccactcgccagttactgaacctggcagggactggggtggtggcctttacaccttaacgggaaccagttcatctgattccatgctgcccaacaggcttaagtgcagggctggggaaatggaatttacagggatggccttctgatgtatttggaagtccccagggcaggaagaggagggggtacagaggctggcttgttcccttcacttccatcctcctcactcacactgcccaagccagctgccacttgccaggatgaggcagragattccagggatccttgaagtgggctcttcccccta

SEQ ID NO: 855005 - DNA, 638 bp, Homo sapiens
atggaaagatcatatttaagagcagtttccataacttaccagctgcaacgtcacccagcagctttagtgttgaatgtttaaatggccagtgcaaataagaagaacaatgttgacattctcacatttgactttttaggatatatcttcatacacattatttcatgtaatcattcagtagagaaaatgtcattcacatatgtaggtagtatgtgcacatgttttaatataaacagcacaattctggtacatttctagagtgcacaccaaagaacatataaacacaacaaatttttggcatggtgtcagatgagtgattattgacccaggggcccatgactggggtctcagggggtgtgcgtatatgtgtatttttcaggaatgaagatacaaaagtttaatcagattctcaaaagaggaggaggagagcctgtgacctgagaaagattggaaaccactgtttcagagagatgctacagtaagcaattaaatacagatggttccattaaccaggagccccccaaatgcaggtttgttgcacagatctacttggatctgtagaattctgctaaaattgctcactttgtcttccatgctcccggataasagacagtaaacgtggttttttatttatttaggaa

SEQ ID NO: 855006 - DNA, 604 bp, Homo sapiens
cctactgtatacttcacagggttgttttgaggttcacctaagataaagtacttcataaaccgtgaaggtacgtaagaagcaggtcttacctctgagtcgcaggcatgttcaaagcamtggggcctctgacagcagcaacagaactgatatagcctctcaaggtgaccacagtggaagaggccgcctgggttagggtccgattatacattgctgtactcaaatgtattgtgtggcagtatggcctactgacaactttaagtacgaaaaggactagccaggaagccctgccagggcattgctaattgaacattctctacatggatctcactatttcttcttccctcttccctgtttcctagcctagttaagggcaccactatgtacatggtcaccaaaatcagaaatctgttgatcattcctgattcccagtagtccaagttaaaatcccaagagtttgtttctcactctctctcacccttacacacaaaatgatccacagacttgtctcccaaatctatgcccactcccaatcccctagccttggttaatgtcctcctagcctccaaactcgatgattgcaatcgtgtcccctgctggtcgcacc

SEQ ID NO: 855007 - DNA, 637 bp, Homo sapiens
taccagggatgtgcagataactcatgcctctgtctgaagctctgtataaaaagccagttttgttcattgattctgagatgatatccagtctcttgaatgcaaatgagaaagcatgtaggccggactattgctagcaacattttatgatggtgaggggaatcaacttggtgacaaatctaacacatggaggagaagagagctgagggaactgcagagaaattgatctaagcactgatcaagatgtatctgaagcccacagtactgatggaatttttggttatatgagcaataaatctcccttacttgttaagccagtttgagttatttgccacataaagcataacaattcgtatgcttacttctagaatggttgtgggggttgaatgagactgtgtgagtaaatttcttagcagagtgcctggtgtgatctaagacagtctccatcgtggcagtacaattactgtcacatagtaggggagaggtgggaggctacagataatgacatgtaaccaagccctgggaatagggtggtggtgatttctggtgcagaggtyaggaattaagaatagaagaaatcacttaaaccttctatttcatcaatctctccggctaattactaattagtttactatttaat

SEQ ID NO: 855008 - DNA, 480 bp, Homo sapiens
gaatataaataatattaatataatrtaaaaatagcagatcatctatgatttatgtctatcatcccaacagatcaactgtgtttatttttctgttctctagtccttccccatacatacatatataaacatattatttacagagctgtattcaagatgggttaatgtttacattttgctattttccaatgaacacaataggtgttaagatattaaactagccaaattaattgtattctggttgaaaattacagttcatcatctctcatttttaccaaggagctgagctgctgggatgatggttttcatggtgtgccagcttggtagacaagctgtctaggtgttttgcatctcattgctttcctcaaaaagggtagttaaaggactaaagctactgaatggattttaggtgtaatctgttattggagagaaaaggttaatccagttctgcattattatgttttttatttatgttattctttc

SEQ ID NO: 855009 - DNA, 493 bp, Homo sapiens
taagtacttgggttggtcaagggacaaaacaacagcaacaacaacaacaaaccggaaccaaagggaaactgctagagatgtgtgtacaagaggagtgaagtatcattaccttctattcttgattttaaggaaattatatgaagtgagaaaaaaagggatgtggtatcctcctcccaccctacatatactcttgataatgaaaagtttctttctaatacagtgtacttgaattaatgcaagtgaaatgtttatttcccttctattaattttggaaacattgtttttttggtaactttttatgggagcataggtgagattatcacaaaggttgccaaagtgatgtttgcagattgatggtctttgtttataacgtagttttaacttggtgatctatcwtgtctttgcaaatagtgtctcgtatgtagcaattgtgagatgtcttgtctttgtagatgagaatgattttagtaatcgtgaggagactgccctgtat

SEQ ID NO: 855010 - DNA, 558 bp, Homo sapiens
tttgctaccaactaggggtatgattttggaattttatgtaacttctctgtgcctcaatttattatgcatctgtaaaagaagaaatgtgtaatgggtcatttaaaaacttagcctcaaaactccttttgtttttttttaaaaaaatctgacctgagcctccacatgtaaagtgggaccttctaagcttgcctccctgacctccagatgaccttccttggtctcctacattgacctgagtcaccactgcctaaacctggagcacaaagtgactgggtgcagagtgctcacattctgctctgaaagcttttgattttcaacttcttgaaggaatccagcaataatgactgttttgccagaattgtatttctcagttttttaactaagatgtaaacaagcccaacatttttaaacctgtttttagttctcttaaytggctgtagtgtgaaggagggaaacctctgtttccttggaatacataaggtgtcattagaaaaagtgccaacaggtaagtatcttaccataagtaaaaaaattgggcctgcactcataaaaggatgt

SEQ ID NO: 855011 - DNA, 595 bp, Homo sapiens
tattagaggttaataaataaatagcacttgggagcttgcaatatagtggggaagagattctaaatggatagacaattgtaatacattctgataatgatgtaagttgctctcggaatacagaataagaagtccaractctgagggcttccgatagtggtgagggaaggagtagttccagggaaaatctaagcaggggattacacacattagaggaaggtcaagtcagtgggtgtggctgtagcaccaaagttaagctgaaaaggtagaagatgatggccttttatgccaggtcaaggagttggattctgttgttcagcaactggagctatgggagggtttgaagtacaaacataccttgtcttactgcactttacttttttctttgcaaattttgagataaacatcttaaacaacagaaaacagggttcgagagcagagaactagtctgacctcaaatttaccaggttggggtttcttccccaccctgataagcctgaggatactgcaggagagcagggcgtatttcagtccttatctcaactgcataagacagacactcccagagcggccatttgtagacctccccccaggaatg

SEQ ID NO: 855012 - DNA, 597 bp, Homo sapiens
caagaaaaggtcatcagaagatgaaaatgaaaataaaatagagtttaggaagaaaggaggatttgaagggggaggattccttggaagaaagaaagttccctatctggcatcatcaccaagtacttccgatggaggaactgactcacctggtactgcgtccccatctcctacaaagactactccatctcctcggcataaaaaaagtgattcttcaggtcaggagtacagcttgtgaaaactcaccaaaatgaatagttgtttcgttacatttagatgaaagttaaactttactgaatttcagtacattagtttttacactaaaactttacaagataaaattggacttcatttagtatctttttaacagaattacttggaataatgagatacaataatcatatctcttttgacattttggaaatttttttaattttacaagtacatttaacagatcatttataaagcaggagtccattttaacacttaccgactttttttggtttggaaacatattaccacgtcttwataggatggtgcccatataggtgagcatccctttagatcatgggaaccagcagactgcattcctaatcttca

SEQ ID NO: 855013 - DNA, 639 bp, Homo sapiens
ttttagaaaaggacttagcaaagagtgacctgaacatttagaacaagttgaacctgacattacattttttatccagaagatttatcattgtttgtgatagacaatgcattaaagacacattgaatttcaagtagctacaagcaaacagccttcaaaatatatcagaagactgaagaacaacttcagacagcactgaggagatgcttcagatgaaaattcctatattatgagaagtataaaactgtcttcacaagaaactaaggaggtttggagtgctctgactctaacagcagcataggcggccctctgcctatgcttggcgttgatgtacattgtttccataaaaagaactgactgcgttagaatgaaaggaagctatctgtgcagacctgtctttagaacctttgaagataataaaataatatttgattctatggtgatattctctagatgaagctatggtgaaaaatgttttggaaaggaaaaaaaaaaaaaaacagacaccgtagtagcagttcccaaagtggtgaaatcagtactaagagcaagtctgtagattctagccttgggggcctttcatagtccagccctgyggccagcctcaatacagattccaccaagagctcagaataaagcaac

SEQ ID NO: 855014 - DNA, 634 bp, Homo sapiens
atgcagtcagagagggagagacaaaagctccagtggcaactttaagtccttcctacagtgcactgagaaaagaaatgttttcaccaaatatctaaygtggagataattcactctgtaaagatagtgaagaagcctactaaaaaagattaaaagattaacacgtaaagagctgtacatttccaaaacatttttgaggaagaacataaatatttgggaaagtaacttcattcagaaaaataactcaaaatggatcaccagcctaaatgtaaaatgcaaaactataaattcctagaagagaatcgccaaggagaaaatctagatgaccttggatatgaaaatgaatatcacatcaagatccagtccatgaaagaaagaattgataaactggacttcattaaaattttttttaaaatatctgtggtctgcaaaagacaacatcagtgtagtggaaagaaaagccacagattgggagaagatacttgcaaagggggtatctgattctaaaaaacctgtaatccaaaatatacaaagaattcttaaaactcaacaataagaaaacaaacaatccaactaaaaataccagacatctcacccaagataatacatatggcaaataagcatgtgaaaagatact

SEQ ID NO: 855015 - DNA, 633 bp, Homo sapiens
aataatagataacacgtaaagagtgttttctagatggtagatattgtttaaagtgcttttcatgtattatttcatttatcttctcaacccagcaaaacatggttattattcttttgtttttaagttaasgaaacagaggtgcagagataggtgtcttttgccctagagcctagctatccatgaaccagcggcatccgtatcacctgggaacttgttagaaacgcagattctcaagccgcaccctactccccacacccacaaaatcagaatatgcaaataacaatattcttaggtattcatacgcacattaaagttagagatacactaacctaaatcacacagctatgagactttgaaaccagaattctcaaacactacaggaggttgtcttaatctcagaatgaaaaaatatttctgaatgagagatataatatatgccaatggattatgtgaaacgtaagtaggattttgcttttataaattatacttaatgaaaatatttctcataaattacttttgtatttggtgacttaccataatctaactttattattctactctcctccttccctttttaaattcattctttaaacattcactcatttattccataggcatttgtagagtgcctaa

SEQ ID NO: 855016 - DNA, 591 bp, Homo sapiens
ggagaatatttattttctgaggaaggaagagaactgttgggagattaagagyggcgctcactggattacctcacattaccaactgtgagatgctggggaaagctactcacgcaaatcagtattcctgcttttgaacactaacaattttagggagagatgaaacaaacaaacacgataaagacatcagaaaagagagggaataataagggagggcactctagtcatgtgacctctctggggcttagtttccccattcataaaataaaggggttggacagggcaatatctaagcaactctctagctcctctctagaggtctgattcaaatatagtaaaatggtctcctggtgaataccaaaccaatgtctaagatttgaaaaggtcacacaaatttaataaaatgcatcattttatttggttcctctggtttctgcccactttataatcaggttgacgacaaaactagggtataggtgggagaaaatactttagtattaattctttctcaccatcaaagagcaattgtccttaaatccttcttatttagctccatggaagtctattaactacctaacaagactcacccaatct

SEQ ID NO: 855017 - DNA, 645 bp, Homo sapiens
acaaaacccagcatccctttatgattataactcggcatacgagggacatacctcaatgtaacaaaagccatctatgacaaacccacagccaacataatactgaaaagttgaaagcattccctctgagaactggaacaagacaagaatgcccactctcaccactcctcttcgacatagtactggaagtcctaaccagagcaatcagacaagagaaagaaataaagggcatccaaatcagtaaagaggaagtcaaactgtcaccgtttgctgatgatatgattgtttacctcagaaatcctaaagactcctccagaaagctcctagaactgataaaagaattcagcaaagtttctggatacaagattaatgtacagaaatcagtagctcttctatacaccaatggcagccaagcagaaaatcaaatcaagaactcaacccctttatggtagctgccaaaaaataaaatacttagaaatatacctaaccaaggagtcaaaaaacctctacaaggaaaactacaaaacactgctgaaagaaatcatagattacacaaataaatagaaaaacattccatgttcatggrtgggtagaatcaatattgtgaaaattgccaaaaacaatctacaaattcaatgcaatcctcat

SEQ ID NO: 855018 - DNA, 574 bp, Homo sapiens
tgcacaacatagcaagacccccrtctcaaaaaacaacaacaacaacaaaatatatatatatataaaatgacctggatgtggtggtgcacatgcctgtaatcccagctactggggaggctgaggcaggagaatcacttgaacccaggaggtggaggttgcagtgagccgccactgccctccagcctgggcaacagagtcagactccatctcaaaaaaacaaaacaaaacaaaacaaaaaaacttaccatgacattacaataattttaaaagtataatgttattagggaaaagtgtactgatgtctgtaatttaattagaaatgcaccaaaaagaaggtggatcaatgtatggatagaatgagtgatagctgtcaggatacatgataaagggaagataatttcccactagtttgcatttatttctctggaaaattaaataatcacaataataagaaggcacaataataatattttgtaatgatatgtatctcagatatacctgatatctttttgtttggtttggtttttgttcatttttgatacaggcctctctatgttgcccaggttgattttaa

SEQ ID NO: 855019 - DNA, 575 bp, Homo sapiens
agtacaggtataaaataagacaaatgtttaagtttagttatgttcacagatagttgtcaattggtctgaaacaaattygctagggaatctatttgtgtagaactaattaatgtaaaaaaaatagacttcatctcgtgttgtgtgcactgtgatataatggtagtatcagtgcaacttaaactaatgattgtaattgatattaagtgttctcaactgagtaacttttaagtggaaaccaagtttagatttggggagtggtaaaggaatcagctttttctattgttaggggaagatagtaatttatcattcatggaccagtagattgttgaaagttggtgaatcggattataagcttctggctaacacaaggattcagaattaggtaaacatctgaaggtttagtatattagaaacacccaaaccagtaatatgctaacctgatgcactgctgaaagaaaatgtgaatttttcgtaataattgcattttagtgaattgtacagtgggtggaaagggcatttggagctcattagaatgagacatagtacaccccaatggccctgtttattaaatgtag

SEQ ID NO: 855020 - DNA, 601 bp, Homo sapiens
tcatactggctaacaaatctccatgagtaaacaaaatttattattgaattaccgtggtggcaactaattgagaatggcatatgtataaacaagttatyaaaggttattatcaaacactggccactgttgctttatgagaaaaataacaattgccctgccttgaatttaaaacgttatttgaaagtcagtgtccaaagtcttcttcacaacttttctatttctggttttagctttccaacagagaatctattcagcacatttttagtatttccccatagtgcaaaagctaaaatttattgactacagttctttacagaaaaagagccaacctacactatacctgtgattaagaaaaactttcacctatccaactgtgtgattacatataaagagaaatacataattctacagaggaagatacattcacttaagaaacaaattgctggctgtctttaaaaaggtaactattaatacatgacgttattaataagatcctcatatgtgctaatactaccaatattatcaattaatgtcatctgatttcacacaattgaaagttttcattaatgcaaaaaaacagctttctatattattaagttct

SEQ ID NO: 855021 - DNA, 207 bp, Homo sapiens
taataatttgtaattagtctccacatgaattcagattaaatactgttgaactgctgtgcaggaaggaacatgtctcttaagtgaactcaagggtggcaaacttctctaaagagccgaacagcaggctttgcaggtcttatggtctctgtctcaattactgtattctgctrctgtagtgcaaaaactaccatagacaatatatatgaa

SEQ ID NO: 855022 - DNA, 603 bp, Homo sapiens
cgtgagtcaccacacccggcccagaatggattattttctcaaacacaatctaccacaatttactcagcatgacatagataatttgagtagccccttagtgattagaaaaattgaatttgtaattttaaaactcccaaaaaagaaatctcaggcccacatagtttcactagagaattctatcaaatggttaaggaagaattaacaccaattttatacagtctatactaggaaatagaaaaggaagagatactttccaattaatatttttattgtggtataatatatcattttaatttactattttagccatttttaagtgtacaatgtagtgtcattaagtatattcacaatgttgagtgactatcactatttctggaactttcattattctaaacagaccctctgtatccattaaacaataactccctattctcccctcccactggcccctggcaaccatccttctactttctgtctctatgaatttgactactgtaggtacctgataygggtggaatcatatagtatttgtccttttgtgtctggcttatttcacttagcgtaatgtcctcaaggttcatccatgttgtaacgtgtcacaat

SEQ ID NO: 855023 - DNA, 570 bp, Homo sapiens
tgcagaatcccattctggtcccagcagcaatgtgccagccccaggtaacagccatgacccgggtaagacaagcttaataccaccacccctgctttcccaagtcacccagctggggtccaggagccagggtgcagcaggggatgggagagtttgcttctgtgaaagcagcagcagccacctccttcttccagactcgacgtgatggctggagctgctggagctgcagcagccgccttgcaacccgacatccacgcagcattagtctcgggagtgctgaggctccaagtccacagcagcagcccaccatgggcctcccggtgggaggggtcaagcccagtgtgttcaactctgggatcatgggttcctgtcttgctgacgtagaacacgttgttcccaagtcaccccggtgcacagccaccagagccggcccttgaggctggcctccctcacttgctcagtaaacgtctctccacactcatgtgatggtcacaggtgtggcggcaggaacycatcagggactcccctccaggccctgggaggctcccggatcctggcacctcctgggggctt

SEQ ID NO: 855024 - DNA, 546 bp, Homo sapiens
tgcgcctgtcctggccgcgaccgaaaagctgatgaggaccactaccgggagcagcaggccctgaacgagagctccgccaagaacggggccgccagcaagcgtggtgagcggccggccrggggaactggacgcgtgtgggaggagaaggggacacattggcaggacacaatgtgagcccgcgtcccagggacagggccagtccctgaacggccccccacgcccagactcctccctgacggagcctgagagcagcccccatataagtcgcttgtcctgggccaagggcacctcagaggcctgggtggcaccgcaggtttgcccgtccctgtgggttgctcaccaccggacccacctggagaatcgattggccccaagggtggggcaggtctccctcctcccggaaggaggcctcaccctctggtcctgcctgctcaccccgcctgccctgcctggccttccagccttcaagcagagcccccctgccgtccccgcccttggtgccggtgtgaagaagcggcggcatggagacgaggacacgtactacct

SEQ ID NO: 855025 - DNA, 486 bp, Homo sapiens
agttgaagccactgcccacaacgtggcctggggtttggctgaagattctagtcacgctggggttccctatctgcaggctgggatgcatgcaggtaaaaagtgtgctgcatgccccaagtggcggttttgatcagcaggagacgtttctcaggctttcctgtgtgtggaatggttcttatgcctctgctaagcatctctgctttgtctgatctcgagaatgtgtgacttacacaacaggtactggatcagcatgacattgcccttgtgtgaagccagtatttggaagggaggttggctctgatttagactgagccaagagcaagcctggggtcctactacttctaagcagtgggaccttgggccattcctgagctttcctcgctgyctggatgtcttaaaaatggagataattcttgtgaagccctgaggttgaaagttcagtaattgttagctagtcaccaaaattctttaaaaagctgttgcata

SEQ ID NO: 855026 - DNA, 621 bp, Homo sapiens
agaaagtatcagtagctttcaatgagtctcaaaagattctaggatccccgaatggttgagaaccgttgcaaaaatattttcctttagaaggacttgctaatttaaagtcatgcacrtttaacagtgatatttcaggaagttcaaggaagatagtctgaggcacaagggggttgggggagactccaggacttcttttagctactccacaattctggatgttcactgttcttcagaatctttagcttgctttgtttagaaaattttacttttagcaattttgtttggtgcatgccatgagaaaatgcagctagttcttacatgctaagtccctcaaggactcagtggtgtacactgtggatttggggacattgctgttctactgcaaactttaagttatttaggaagtagagggttgaagagaaggaaaacatcaatttttattccatgtatttgttcacttgaggaaaaggcatttttttctgaattgcttgaattgctgaaaattagtatctatttttcaaataaataaaagaaaaaacaaaaatttgctatattttttggattttaaagctagtaagacaataaaaatgacagattcaaccctttaaaacttttcccttc

SEQ ID NO: 855027 - DNA, 605 bp, Homo sapiens
tttcacacaatttctgagagttaaaagttcaggagtggcttggcttgatggttgtggctcagagtctccacagggttgcagccaagctgttggccaggaatactgtcatctgaaggcttgacaggggctggagctctttccatgctcactcacttggttgctggaaggcgttctcagtttcttgttagctattgtggcatgagacttacgccatatgcagtctgtgctcgtcacctcttcaagattttgcagacaataagagggtacttcatttagcattaattgccctgggattagggccaaagtcaggaaaaattataaaatggacaaaggttatgtattacttctttaagtctagtttgttgttgttgagtttctaatattcatctttattaattttatcagcaacgcacacatgaaacattatggatcagagacagatttcttatgaattacctcacagtaaataataagtgcattggtcttcttgcctcaggacttatccctgggacacagtgatgaaaaccaagtcaaataccctrtgtgagtagccagacactccataggttagaaatgaggcaaaaggatttttctgtgcttataaa

SEQ ID NO: 855028 - DNA, 653 bp, Homo sapiens
acaatggttgaaataattaaaagcagcaatttttatagtgtactgctcagattccttggtcrtagctgattgatccaggtgtaacaatagaaccaagcctaccaatcagatgctttcccctgctaatttgggacatttcctaagaaactcagatattgaagctcattggctctgaatattattaattgttcaagtttcaagagtttccctggttcctcgccttcctgaaattcatgtcttcttaggatttcattagctactatagtatccaatgactcctcagttttgtttaaattaactgttattttttaaaacaataaaagcaaatcttatgaactttcactttatgaaatgtatattttacttctatgaacaaaaataatcaagcttaggcatatttacttactacttgtcaatatcaagagatggaattaacagccctttggaatcagttaatcctgaatatcgcatattaattggtttctggtgttttaagatgcattgaaataacattattcacctcattgtgtcttgctagtcccaaagcaataagaatatggaaagtactggtacaaagagaagcacagttattatggaacaaaaagttgagttaataagaattggaaagttatgaaaaattaagtatgttgcat

SEQ ID NO: 855029 - DNA, 599 bp, Homo sapiens
ctcatctgcagagtccagctcctcaggaggctctttctgcagctccagctgtagtatctgttaacctctggtgctggtagtgatacatttgcaygctgggcaccagctgctgcttgcaggctgtgtggaggcagaggaagagtcaattattttaccacctaactaaaatccttccttccttccttccttgcttccttcctccctcccttcctccttccctcctttctccctttcgttctctttctttcttttctttctttcaattcttttaccaccataactaaattacgttttctttctttttctctttcttttcttttcttttttgttgacagggtcttactctggagttcagtgatgtgatcatagctcactgcagcctggaactactggcctcaagcgctcctcccacatcaggtctcccaaagggctgggatgacaggcatgaaccaccacaccccacttaaaatattttcaagactttctctaactgtttattgatggtacattgaattactatttttcacccattcactcaacaggcgtttgttaaatgcttaccatgtgtggtattgcaattctgtttctagaaagggatc

SEQ ID NO: 855030 - DNA, 616 bp, Homo sapiens
aaaaatcagccctttatgactctagtaagaactttttcattcaaccatcctcagtctcccatttgtcatgagtagcttataaactcatcatacaatcttgctacagaaaaacccaccagaattagaattaattctttcccagaaatatagagaaggaaaatcactcttcttcttccacataactagagtcttggaggacaatctcaatgtgtatttgtcagcgaaaatgggtgagtggatagaggttggagaataattagatttccctgaccctaattccttattctacatctaatattgtgtctggctaagccagagaaagtcccagcctctaggttatatggcagcctaagtaaaagcatgacctcaaggctgactctaaagagctattgcaggagatctttggcagctccaattctatccttaacatatgctggccacgtctactttcatactcacctgtcaaaactcatttccaccatcaccaaggggccawactaattattctgtagtcactttggcatattataagttttgtattattacttccaataagcatctcactggctacagcttagaatatctttttcattgttgggatttataaaagataaac

SEQ ID NO: 855031 - DNA, 490 bp, Homo sapiens
acaaaatttcatcatgtaaataatagaatttctaggctttctaaagctctgagcttactgtataaaaacactaatctagtcataccttaattgaaaatattttataatagtaatatatataaaaagatatatatgtactcgtacttaacacattaacttttacatatagttactaaagagttgatgatacaaatttaataagaattttccatactttggctttaatataattttgctttaaaaatatgtatttggacttttaaaggatgtgtaattccttgttatattggacgaaaaataacagctttttcatcattgtgaaatgtgaaaatatccaatacaacaaatggaagacgcctaataaatgttaatatccttctttgtctttacaaaactacaaacatgacatactcttgaacatgcccrtcttatcttctcagattaagctctgccacctgtgctgttcttcctgttctgaaccattaaaaca

SEQ ID NO: 855032 - DNA, 564 bp, Homo sapiens
ttttcatgtttaatagggtggaaacaaagttaaacagatttctctacggcagcaggactcagagcttttttgaattgyctgacgggcagattgctgggaattctttttctatggtcaagtaaagattacaaggctggaattccagcgaagctattttggcaaatactgacctacatgattgaaggggtccagaatatgccaccccaaaatatgccactttgacatacggcttattttgggctgcaagcgattgaaaatgagcagatgcaggatgaatcctctgctctctttttctacctgaaaccagggcgtaacattccctttgtggaaggtgttcctcgactcccatagcaggaagtgtagagcaactcttaccatcaaagatggacagtcagcattgagatgagtctgcataaacaaactttttttttttaaagtttgttccattaatctcccccatgtatttgctagtcactttcccacaatttatcatccctttcctttgttaaaatgatatatacgtccctgagcctaatcactttgcatttcactacttttctgtga

SEQ ID NO: 855033 - DNA, 637 bp, Homo sapiens
aatgggaaatagaatgtgccacccccaaatatgccactttggcgtaagaattgttttgagctgaaggcaattcgctgtctgccatcccctattctgtctaaaaacaggacataaatttccatttgtaagggtgtctccctttcccataccaggaagagaaatactccagagacaacttttagcacctgaggcgactcttacctgcctaacaaacgttattaaacaacacttgtttattatacattttctcccttcaccttcccataacttacctcccatctcagaagcccaaaatcccctttcctttgtccagcctaagatggtttatataagctccaaattctaaatgcctcttcgaatcacatttcgttgtgaattcctgtgccagcatacataattgtatctgttattctctcttggtagtctgtcttgtgtgaatttaattcctggggcccccaaccactgaacacaggagagcagagaacaaatgtttttcctcccctacaagtataattaaaagtataggagatcttgcaattaagaattggcgtctgaaccaatattcccaatctctaatctcraacctatttttttcctcctgaactgatggtatgttgacctagagatgataaagaca

SEQ ID NO: 855034 - DNA, 450 bp, Homo sapiens
cctgggatccttctctgcaagctcttctagctcttttcccaggagcctcctcagcccctacgttaatctgtttatgcaaacataacacagaaggcctggccctgccctcatgccyggcacaggttaggttctgacaaagcacctgccatgtaagctccctcatcctgtcctgagtgtgagattctagcatagggtagaaagataccaagaaagcacaaaagcttaatgtttgtggctctgttttatgaatatgttgaaatattcccaatttcaaaattgctgagtcaaaacgtcatgaatcccaggatctagtgggaattataatgcaaactggtccacaagggaaactgtatcaacggccagaatgaagcaaattagaatcacttcaataatcaaaagttaatgtaattctactgggtggctttataaagcttaaaaagtttgtttgaa

SEQ ID NO: 855035 - DNA, 525 bp, Homo sapiens
tgacctgctgtgtctggtgtcttccacttagcacaatgttttcaaggctcatcccattatagtacgtatcagtacttcattcctttttgtagctgaatcatattgtgaacaagtttttataattttttaaaaatagagaacctattcttggtacttctggctttctgcttatggattgctaatgtaccaaggggaactaaagacttgagatgagaaaggataacaggtttttttacaccgcctttcacaagaaggaactaataaagaggtacatacctgcaagggtatgaatgttacattcctacgggtagggagagcagaacagtaacacttaacaattaaaaagttgccctttaagtaaaatataaatcaagttcgcctcaggctcatgtgacaagttgcctttcatcaactttaaattaggttgctatgaaagaacttggctaagcattttytattgcctttcatccacctagccaactacagagcagaggagtgattggcctctgtaatgccatgcaaatg

SEQ ID NO: 855036 - DNA, 598 bp, Homo sapiens
tatgttgggttattttaatttaattgaaagcagatgtcaaatgatacccgtcaatacttattaaaataagacagttaaacccctgtgaacctcagcaactcaaaatttgcagttcagtcatagtatacatggatttcattgagccaaaagttagaaattttataaattacagttctgcgatatgattaaaaagtaatacaaaaaacaaattataaactggaattgtgtcaattgagttgacatatttcttgcaagatgattatatttatataggaaaatgtttggaaaggagcattaggattatgtacagcaaagttactttatgtacgcattcattttcccttttgaaaaaaatattgacatttaagtggattttagtctgcaaatgattgtgaactaaaaatgacagaaaagtattgctgaatattttttgtgcccttgtgtagattgtaagctcctagaggataggatttttcttttttataattttttacttccttgttgtccccgtarcttgtacagtgtcctgtatctagtatttgttgagtaattagcagtttgttaattgattttgctaattacaaattgggggaaaact

SEQ ID NO: 855037 - DNA, 373 bp, Homo sapiens
tatagagtttgttgttgctgtttaaaagttttttgcctccctatccttccaaattctctgatttacctcttttcaaatagcctgtcagatacctgagtgtgaatttgtagagcgtttaccaagtattmattgttagagattgcctggtggtgaatgatcctaatagtatattttgaaattactaattagaggcacatgttaatagatacatgggtggttttattagtgcttttagagctagtgaaggaagactaaatctgatgaggcttttttcattatcattccactaccttgttgctaccacatgaaagcttgttaattgagtctgttatgacacccaaacgtgccttcatttaccaaataatgaaatgat

SEQ ID NO: 855038 - DNA, 582 bp, Homo sapiens
aatgcctttccaatcagacttttcaccgatatcaacctccatctccaagacttgccactatttatggtcttacaaaatagtcctgaattcactcttgtttaagttattatatttttcatgataaatgtagtgcagattattgaaaatgtaagaaataaagaaaaaaatccactcgcaacacaatctcaacataaccatttttggtatgttggcacatttttcccatcatttttcccagcatgtgtagtagttgttgttattgtgtagttttaacagctttatcgaggtataacttatacactacaaaatgcattcatttttagactaagtattaatgttttggtaaatttatagatttatatatccatcacccccaaaagttcactcctgccacttgtcagtcaatccctactcccgccccaagccccaggctaccactgttctgctttatttctctatagatgtgccatttctggcaatttcacaggagtggagtcatatgatatgtgtttcttatgtctgtcttctttcacttagcatgtttgaggtgcattcatgttayagcatataccagtagtctat

SEQ ID NO: 855039 - DNA, 547 bp, Homo sapiens
tgatcagaaactcaaaagaatgcgatcgtttgtctcttatctacctatgacctggaagccccctccctgcttcaagttgtcccgcctttccggaccgaaccaatgtacatmttacatatattggttgatgtctcatgtcaccctaaaatgtataaaaccaagctgtgcccctaccaccttgggcacatgttgtcaggacctcctgaggctgtgtcacaggtgcgtccttaaccttggcaaaatcaactttctaaattgaccgggacctgtctcagacatttgaggttcacaccctttaggaccagcaggaaggcagactgtcctggaaggaggaagaaagaccacttctccagccctgctccccacaccctaaagagagggccacccgcccacctgtcacccccctgtcagatctgcctcatgcctgagttgtttctaagtcacctctgggcccagggtaggagcagaagagctagtcatcttcagattcacctgtttcttccttggcacctagtggatgcttgataaatgatcatttataaaggaa

SEQ ID NO: 855040 - DNA, 507 bp, Homo sapiens
tacaaagtcattggggaaaaataatgataaattaatcacatgtcaacgtgggttagataaatcatgacatcaataattataagaaaattaatatcaaacacataatactatagttgtaagtacacttcttacattaacttatctaatattcagagcaattctgagataggtactatcattgtccccatgtaaatatgaggaatctgatacaaaacaatgtcacttacttgtcccagatcatggttcttgaatggtggagtaaggttcatatccaggcattcttgattcagagtttgtcctcttaatcaaaataattaatagaggaggcaacttttaaaaggttgtaaagaggaggaaaaatcatttcacagaatgaaaaaagacaaatggaraggcaagtgttgtggcaaagaagctatggaagctgttgacagcaatcttcaggagtcagtctgaaggagttgatgtgaaacgagtaaaagtacagtgacaatctatcactttctt

SEQ ID NO: 855041 - DNA, 466 bp, Homo sapiens
ttttgctcttgttgcccaaacaccattgcaaacaagttttgctcttgttgcaatggtgtgatcttggctcactgcaacctccacctcctgggttcaagtgattctcgtgcctcagcatcccaagttgctgagattacaggcatatggcaccacgcccagctaattttgtatttttagtagaaacgggatttcgccatgttggtcaggctggtttctaactcctgacctcaggtgatcctcccgcctcagcctcccaaagtgctgggattacaggcgtgagccaccacacccagcccattttctttttctttttcttttcttttctttttttctttttttttgagacagagtctcgctctgttgcccatgctggagggcagtggcttaatctcggctcactgcaccctccgmctcccaggttcaagcaatcctcctgcctcagctcccgctagtagctgggattaca

SEQ ID NO: 855042 - DNA, 434 bp, Homo sapiens
tcctccataaaagtgaggagttgagatcactctagtcataataggcaaactcataaactagaaattgcaagctatgtcttaatcagatactgtggaaagacactgtatgccaggcaggggaagagggagtcacaaaattaagtagagggcacaaagaatccctatttcccaaggacaggaaatccctgctatcaaacgttgccagtcctcagtccttgacatccaggaggggctcaatgacggggagcaagggaactggtctctgggctgctaactgtgccattccccagcgcacagcactgctccagctgccaccattttacacacactgtgatgtgaataggggccatgaggtggcccggagattccctagaataatcctgcgattgaaatccatacctractgagtgacaggagcagtggctcagtgaagg

SEQ ID NO: 855043 - DNA, 617 bp, Homo sapiens
ccgaaaagctcatggggaacattgtgtgaatgagtggggcttatgatgttggacttcattcttggatgatgtkgttggtaacacattggatttgatttgtgaattctccaatgttggaatgttctctgcacagttacatttttccaaaaagagatgtctgcttagggtatctaaactttggctgtctgtattttgaaagcaggatagggaaagtgagttggggcaggccaggaaagggtagcatggttccttgccattcaatatttagccttttgtttcatctctggtttcagaccaatgaatctatcttcagaaatgcctgctatgtctgttactctttgtgggtttcaaaagttcaattgttctggttctgaaggcaggtagatgtttgttgactgtatagtcaggttggagatggggacacagggtcaaataattctctctttcgttagtcattcccccaccaggggcttctgtaattccaagactttaattcttgagcctttctccaggtttctgtaggtggaattggcttctctttgatattctcttctgcagacaaagtcttttaatttcttccatctatgttctatcttcaccgtggtttagaagtcaca

SEQ ID NO: 855044 - DNA, 622 bp, Homo sapiens
actaaggagaaaagaattaaagtattggaatcattctgccttagctaatatatctagtggtggcccagcacctacactgaatagtgattttgaaagcaagaagaggcactaagaagtgagactcagaatgtattgggagtgctcacaggagaacctgattgtgttatataatgaattgaaagagatcgtacagtaaagggtcttatcctcttcatgtccctctattttgtccaggtagaatatttcttctctaataatcagtaccttaaaaataccaaatgtattttattgtattttgcagagattctgaaaagcttcctccttgtaagaaacccctgtccccagtcagagataacatccaactaactccagaagcggaagaggatatatttaacaaacctgaatgtggccgtgttcaaagagcaatattccagtaaatgcagactgctgcaaagcttttgcctgcaagagaatctgatcaatttgaagtccctgtttgggaatgaggcacttatcagcatgaagaattttttctcattctgtgccattttaaaaatagaatacattttgtatattractttataattgggttgtggtttttttgctcagctttttatattt

SEQ ID NO: 855045 - DNA, 598 bp, Homo sapiens
aaatcacctcctaccttgtagcaaggtgtgtgtgcgtatgtgcagctgttggtttcaacactcagttgttgatttaaggttccaaaggtgctgttttgccctggggaactgtttgagttgtgtcaggttgatggttcagggcctgagtatgactcttgtcaaatttgggatccgaagccctgtatgaacccggtttagtattcaggaaacgtatccatagcagccgctgtcagggtaactatcactaagggcagacagttgatggcttccttcctgctatatgcctgccctaaagtcttaaaaatagtgccctccatcaccacccacttgcaagatagaataaagtctttccttctttccatagatagtagccctcctgcctcccttagttataattatatgataataatcaacacttatgttcttcctccttcttggaggccatccctattagaatctcttgttcactagaacaagagaattttttgttcatacctatcataaaacttgyacctctttgttcttactatctgctgatcagagagagacagaaaattaataagtagacaagaaacttttagtaagaagtactatgaag

SEQ ID NO: 855046 - DNA, 670 bp, Homo sapiens
cctggctatctcgctgtatccggggatccatagttggcaaaagccagtgattccaaggaacccctgcacctgttttaatgtcttagggtgaggataagccagwacaggctgtactcgttccttgctgagggccctggtccctttggctaagattaggcctaaatatttgacctgctgtaggcaaagctgggccttcaacctagatgccttgtacccttgattagctagaaagttcaagatatctagagtagcatgctggcatgaggcttccaaattggcagccaaaagtaaatcatccacatactgaaggaccagagtgtctggacttaagaagtggcctagatcttgggccagtgcctggccaaacagatgagggctatccctaaacccttgggacaagaccatccatgtaagttgggatgtgtggtctgtgggatcttcaaaggcaaagagaaactgggagtcagagtgcaggggaatacagaataaggcatccttgaggtccagaacagtgaactattctgcttcctctggtatttgagagagcagggtataggggttgagtacaactggatatggaggaattactgcctcattgatgagtctaagatcttgcactagcctccactgaccattcagcttttgtactcccagaattggagtgttgcag

SEQ ID NO: 855047 - DNA, 542 bp, Homo sapiens
gtaagctatggcagagtgagagttttggacttgaatagatagatcataaaggtattatatattttaccttggtgttttagtacctttgctctgggggtrtccatctgctatacaatgtggacacttaagcattcctttgaagagattcacgtggaaaggaaccaacttatcagcaacaacctgccagccatgtaagtgagtcaccatggaaacagattcaccagcagcagaaaagctttcagatgactgtagccctggtcgatgtgtgaagacaacatgaataacttagagtccaaactgccagccacacagctccagagcttgtgacccacagaaactgtaagagataataactgagttattattgttttaagcaactttatgatgttgcagtttggtacacagcgatagatatctgataccaatgtagatactagtaggtgggatgctgccataacaaaacctataaacgtggagtggctataaacatagactggctaggcattgagttaagctggaaaggcaggaggaaagtgttagta

SEQ ID NO: 855048 - DNA, 600 bp, Homo sapiens
gcatctataaggaatttaaacaaatttacaagaaaaaaaaccccattgaaaagtggacaaaggacataaacagacacttttcaaaagaagacatacacatggccaacaagcatatattaaaaagctcaatatcactgatcattagagaaatgcaaatcaaatgagataccatttcacatcagtcagaatggccattattaaaaaatcaaaaaataacagatgctggtgaggttgcagagaaaagggaacatttatacaccgttggtgggagtgtaaattagttaaacctttgtggaaagcagtgtggtaattcctcaaagagctaaaaacagaactaccatttgacccagcaatcccgttacttatactgagaagaatataagtcattctactataaagacacatatacaaatgttcattgcagcactattcacaatggcaaagacatggaatcaacctaaatgcccatcagtgacagactggataaagaaaatgtggtacatgtacaccatggaatactatgaagccataaaaaagaacaagattgtgtcttttgtgagaagataaatrgagctggaggccattatccttagcaaacta

SEQ ID NO: 855049 - DNA, 616 bp, Homo sapiens
ctgtgacatattaagggatactttttggccctgaataaggtaaaaatccacctggacatctaaaatcacacctgttgagtagggacacccatatctagtccaggatcagtctacataaaatgcttaaaatagttttagactttccaaaattccataactagaatatcccttggaaataataaaaaatgctctaaagcatttcaaaaccaaatttgaaaatcatgttaaagaatataatctggtctccagttaattctgagttcacattctataaacacatttgttttcttctgaaatcttttgactgtctgtaaatgattacctctttaacatgatagtgggatattcagttttgcatgacacatattttctcagtgccagtaatacagtagatgctcaataaatgtttatcattcaagtgaactgtactgtattcaacttcagcttgtctagcaaagtcacaatgaattcctttaaaaaacgtcttctattccaaggtatacatcagttcccaaagctcagtgtgtttcaaagaaacccaatccctaggattatasataaaagttgcagatgttaactttttgtcttgataacatggccctctaaactagaagtc

SEQ ID NO: 855050 - DNA, 569 bp, Homo sapiens
agccatggaagcctggatactagacatctagagtcatctctcatctggacatgcagcatatcttcccctatggctccccaattcacttttatcccatctccaagtcattttttacacagcaacgagagcgagctttttatactcataatttaatcatgtcttttcactcctttaaaccttttgattatgttccactgcccttgggataaaggtcaaagtccttaaaattgcctaaatgacccttcatgtactatgtacttctgccttaccactcacttctcccttccttatcttgagccagccacagctggccttttcccctatttctcagggtcattatacatacgttgcctggctaatacccacttttccttcaggtctcagctgaattgtgatatttttaagaatcctttcttcattggagcttatacgtccccaatagattgttgtcataatacatgtctaccattcatttgtagcattaaatgccagtataatgaaataatgctttgtttagtgtccatctactctgttagatsatacaaattcaggagggtaataactgtctt

SEQ ID NO: 855051 - DNA, 527 bp, Homo sapiens
atcagcaccaaggaaagccatctgcccttcctgtcacactgctatcgctggttcctgttaccccccccgcacccccaagttgcccacctacactctctccctcccgagcctggggccttctcactcaccagcctgtttacacaccaggtatctcatgctttatctgctctcattttgaatttgtaactttcacataaacttgaacaaagctccttttgttattgcaccccaccccaggatcccaataaactggttccatctgaggcgactgggccagggcacagaagccttggccaaaggactgcgtgtgcctgtgaacaagcatgttcgcacctgcgagggagtccgtgtgtttgcgtgtgagcccgctccggggccgatggagggagggtgtcgggaaagctgtgagccagcgaagtggacgggaagcatgggggccgagggagggcagagccaaggcaccacggcayggccatgggcacgggaggtcgtgggccacagacaggtgggtgttggggcagggggtc

SEQ ID NO: 855052 - DNA, 591 bp, Homo sapiens
tagctcaggaaactaacccattacatacactaaccagtcaggaagccagctatcatctacactaacctgtccaggaaactaacccattacatacacaaaccagccrggaagacagctatcatctacactaaccagccaggaagccaggtatcatctacactaaccagtctaggaacctaacccattacatacactaatgagccaggaagcgacctatcatctacactaaccagccaggaagccagctataatctacactaactagcccaggaactaacccattacatacactaaccacccaggatgccaggtatcatctacactaaccagtacaggaaactaacccattacatacacaaaccagccaggaagcaacctatcatctacactaatcagccaggaagccaaccattatctatactaaccattcaggaagccagcccattatctacactaaccagccaggaagtcagttatcacctgcataaaccattccaagaagtcagtccatcatctacactaaccatccccagaagccagctcatcacctacactaatcagccaggaagtcagttcatcacctacattaac

SEQ ID NO: 855053 - DNA, 583 bp, Homo sapiens
gtggtagagatgcagatagcaggtcccactccagaccctctggacacattgcatgaggctctctgcagggtggacgagctccctgggaatcctgaactgagcaccggctccgcagtgccgtagccattgcgtgaaaatgcctcccagaggcacagatgccagagcagtcctcttgaatagatgggctgagatggggtggacctgatcaaaaccccagcgtggtgcagatggaagaggggaacagggcctgggttccctgagcatgggttattagttgtggggggccatctgatgctcctgccaagttcagtgaggaagagcgagcatcccttgtcctagtcgaagtcattaccctcaagagatggcaaaaacatggaaattgcttcaaattccctgacaccagatccgtggtatatttctaagggaagccggcagccccgacctttggcgataggtcacagatggcggtggtggcatccctcacttgtcatcccgcccagcggccaggtcctgcactgrtcctgctggacatgtccttagcatctgaagtgccccacagtgttgagaaaatggcatggcacaa

SEQ ID NO: 855054 - DNA, 526 bp, Homo sapiens
tgaaaaaaacgtattccaaaagaagttaatatgtcctcaaatcacacagctttggagtccccaaaccatggattggacaggtctcatttcatatctcaaatccagccattgttctgtcatgtttgcaatatactagaaatatgctccctggttttagttttgccactaattgacggaggacttgagtaatttgctattgttatttcagctttctcatttataaacaagagtatagttctatttaattctgacttattttgactcaactctatttttcagtaattccagatgtttagaaatgggtaaatgtgtagaaacttacttaatgtctccttaaaggagacacatgctgtttgtttaactaattagcataattccgtgaaagattgggattatgttcttctttgtccaygtattttaaatggactgacttttcggcaatggtactgacaagttgtttcagaactttatgttccacaatctccgccctctctaaataaagataataaactgaagtgacattgca

SEQ ID NO: 855055 - DNA, 636 bp, Homo sapiens
gtgctcattaattcccaactccaggttcaaggttaattataaatcagtcaagccaggtgtatttagrtcacagaaatcagccaaagctaaaaatcagggctttttatcccagaaagccagtttttgaacattttccatcacaacaggtgaaatagttgactcttcagagtctcttctatcacaatgttttcacatatcagttattctatgtattactgattagtagtaagtaaaatggaaagctcctcactccagaccagaaaaaaactctttatgacagatttgcctcaggaatgaaggataagaaacaactggtctcataggaatcccagggcaaagaagatatttactaagtcaaatttcttagaaatttacaaagatcaaattagtgagattcatcctgtgattataccttattccatcattatccaggattaatattcttatgagaagaagggcaatgtagtccttttatttcttccaggtgaggcaattgtgcctgtgtatatctgtcagttcatacatgtggagtggaagtttgactacctctgtgcagggtgataaatgataaaagacactatgttgaaaccttggaataaaaagatgtttagacatggtgcttgatttaaatttcaa

SEQ ID NO: 855056 - DNA, 635 bp, Homo sapiens
caatctccacctcccaggttcaagtgattctcctgcctcggcctcccgagtagctgggactacaggcatgtgccaccacgcttggctaattttttgtatttttagtagagacggggtttcaccgtgttagccaagatggtctcaatctcctgacctcgtgatctgcccgccacagcctcccaaagtgctgggattacaggcaagagccactgcacctgccctcattaatttcctttattgtttttgtttttgttttttgagatggagtcttgctctgtcgcccaggctggaatgcagtggcacaatcgcggctcactgcaacctccacctcccaggttcaagcaattctcctgcctcagcctcctgagtagctgggactacaggcatgcaccaccacgctcagctaatttttgtatttttagtaaagacaaggtttcaccatgttggccaggctggtcttgaacacctgacctcatgatctgcccgcctcagcctcccaacrtgctgggattacaggcgtgagccaccgtcctcagcttctttattgtttttaaagtctctacacaacttggaatcacctgaggagtttttttaaattctgatcctggatcccatccccagagatgatgactgaa

SEQ ID NO: 855057 - DNA, 485 bp, Homo sapiens
ctgtgccccgagtcatcatgctgagcggtgaaccgatcccatggccgtcrtgacagtttctggagaaagcaggcgcatgctgattcattctcagcctcctcttcccatccctgtctccagcctagcatcctttttacgtttattcatgagcttatcactcggggcaaaaaaaaaaaaaaaaaaaaactatttgcattataacattacatttaaaagctataaattatgcagagctataaatactgccttttggtaaacaccataaaatctgtgtgtgtttgtgcacacgcaagcgtgaaatgtcatttggattttctcgctactcactgcatcttataactcttcaatcttcagcattccaaaatctagcagttaaaacagtgataatttaaatggataggaaaggatttagacctgttgtaaacaaactgtgattctgtgttaactatggcactgggctcactccatttggaaactgtcatcac

SEQ ID NO: 855058 - DNA, 454 bp, Homo sapiens
cagcctcaaactattatattgttttaaagttatcattatttcttctgcaagctgcaaaactaccaaaggcagagtgtgtagatttggggttcaaatcctgattctgccacttcactaactctgtggccttgggcaagtcgtttcacctttcatgatctacagcatgcaggtgataagagcgcctgcataccccggccccttacagggttgttgggggattaaatgaactaatccacttaaggtccttagcacagaggctggcacacagaaccactatgtatgtgtaagccattactgttaatgcgctgtctctacatcctcagtgctaggctgcctggaaacactatcctgygacttttggttgttgaagcctacaccaaatctaccttcccagtggaatgcatgcttgcccaccttgaaatccctgatgcagatcaccttgtccagggagcta

SEQ ID NO: 855059 - DNA, 631 bp, Homo sapiens
tactgctgtgaccttcaggatactatacattgttgtgtgagaaaagctaggtagaagaaagcrtgcactagagctacttttatctaagaaaaagatggcacgtgtgttcttgtgtgtgtgtatattggtctgtttttacaatgctcataaagacatacccgacactgggtaatttataaagaaaaagaagtttaatggactcacagttccacatggctggggcggcctcacaatcatggtggaaggtgaaaggcacatcttacatggtggcaggcaaaaggaaaatcagaaccaagagaaaggggtttccccttataaaaccatcagatctcatgaaacttattcactaccacaagaacagtatgggggaaaccgaccccatgactgaattatctcccactgggtccctcccacaacacatgagaattatgggagctataattcaagataagatttgggtggggacacagccaaaccataacagtgtgtatacacaaatacgtacatatttccttatacaaaaaaaatttaaaaataaaataaaataaacagcatcctaggtacctgaggatgaaaacatccatctaagcctgaatctctccaacaagacctccaaaaaaacatgcagaag

SEQ ID NO: 855060 - DNA, 631 bp, Homo sapiens
tactgctgtgaccttcaggatactatacattgttgtgtgagaaaagctaggtagaagaaagcatgcactagagctacttttatctaagaaaragatggcacgtgtgttcttgtgtgtgtgtatattggtctgtttttacaatgctcataaagacatacccgacactgggtaatttataaagaaaaagaagtttaatggactcacagttccacatggctggggcggcctcacaatcatggtggaaggtgaaaggcacatcttacatggtggcaggcaaaaggaaaatcagaaccaagagaaaggggtttccccttataaaaccatcagatctcatgaaacttattcactaccacaagaacagtatgggggaaaccgaccccatgactgaattatctcccactgggtccctcccacaacacatgagaattatgggagctataattcaagataagatttgggtggggacacagccaaaccataacagtgtgtatacacaaatacgtacatatttccttatacaaaaaaaatttaaaaataaaataaaataaacagcatcctaggtacctgaggatgaaaacatccatctaagcctgaatctctccaacaagacctccaaaaaaacatgcagaag

SEQ ID NO: 855061 - DNA, 631 bp, Homo sapiens
tactgctgtgaccttcaggatactatacattgttgtgtgagaaaagctaggtagaagaaagcatgcactagagctacttttatctaagaaaaagatggcacgtgtgttcttgtgtgtgtgtatattggtctgtttttacaatgctcataaagacatacccgacactgggtaatttataaagaaaaagaagtttaatggactcacagttccacatggctggggcggcctcacaatcatggtggaaggtgaaaggcacatcttacatggtggcaggcaaaaggaaaatcagaaccaagagaaaggggtttccccttataaaaccatcagatctcatgaaacttattcactaccacaagaacagtatgggggaaaccgaccccatgactgaattatctcccactgggtccctcccacaacacatgagaattatgggagctataattcaagataagatttgggtggggacacagccaaaccataacagtgtgtatacacamatacgtacatatttccttatacaaaaaaaatttaaaaataaaataaaataaacagcatcctaggtacctgaggatgaaaacatccatctaagcctgaatctctccaacaagacctccaaaaaaacatgcagaag

SEQ ID NO: 855062 - DNA, 544 bp, Homo sapiens
cagaccctgactgtttcagcccctagatccagccgtgcctgaaactggtccacttacatgaactaaaaaattccttatttttcttatggttgtttgctttggtatctatcgcttggagctraaagcattctgacataacctctttgtggtcccagattaagaatgtcttttttcctggcagcaactttcccttttttatgaagctgccaatcaagctctagaccaccatgagtggccccttgcagcctgagttgctcagccagagatgtttggttggaattcattagcctaggagtggtcttatcataactgtaaaggtatattctatgtgggttttctgaaatatttgtaatggcttaaggcagaatcagctaattatggcatacagaccaaatctggcctgcaggctatttttgtaaataaagttttattggaacaccattcatttgtgtattacctgtggctgtttttgtgctacagtggcagagttgagtggctgtgacagagaccacatagttcacaaagcccaagatatttatgatcg

SEQ ID NO: 855063 - DNA, 575 bp, Homo sapiens
tacgggattttttgctctgcattcagagaataatatcagagagatttttcatcccaaaatgttgaagcagagtgtaatattacaggctaggttgatattaaggtaacaagttttgaaaatccctggaatcaaatatcatctacttgagagttttgaaatgatttagaaaataaagtgatatcattggtcatttatttttttaacaggctttgaagcacttagtatatattgggcatcattgtgtgtttttgagatgcagtttctgttatttggtaagttataatttgtagagtcaaagacattcttataataatagtttgtggcaaagcaggtaagattctagtgattactcaggaaatccagaaaaaatggtgcagcatgattaggaagctgtaggaaggattctatgagtaaagtcattttaaatgaaaagtaaaaggagaccacaaaatcagaagcagaaaaacaataagtataaagcagagactatttacagatayagaaagtagtatgaaaaatgacttggttgtgtaaaaattctcactgctaaagtacatatgaaggaatctataatg

SEQ ID NO: 855064 - DNA, 588 bp, Homo sapiens
gcatgcagggcttaaaatttagatgacgggttggtaggtgcagcaaaccaccatggcacacatatacttatgtaacaaacctacacattctgcacttgtatcccggaacttaaagtaaaatgtaaaaaaaaaaaaaaaaaaaaaaaaaaatactagagttcttcaagttgtaacaaaaagatgttaaagccaggtgccgtggctcatgcctgtaatcccatcacttagggaagccaaggtgggaggatcatttgacctcaggagtgtaagaccagcctgtgtaacatagcgacatcacatctctaaaataaagaaatagataacatgaaacatttttaagaagttaatagttaaaaaagccactagtaaaagtaaatagtcaaatctggaataatctaatactgtaatggcactgtgtaaatcattttaaattctattataaaagcttaaaacacagaaatattgaaaataactatatctattctaatttggcaatgaatacacaatctagaaagatgtgaagtgtgayatgaataacataaaatgtgggcagagtgaagtaaaagtgtagagtttttgtatgcaatt

SEQ ID NO: 855065 - DNA, 619 bp, Homo sapiens
gaaagtcttttgggaaagcaatgaggcaaggctaagcaatgaccataagtttagatttcctcattgttttgaatagacaggaaatcatttgtccagaaggaggtattatgtagggaaacttttacctttctgtatataaaaacatataactaatacacacacactcatacacaaatatcaatggaggtatacattgtgtttactttttctatgtttatgtacaatagtaatatctttatagttatactaacgttattaaaataagtaattatattaactaagtttaggaccagtttctagtaagtaagaaagaaaaaaaatcatctccaaattctatgaatagatataatgaatttcaagaatgcctgatgaattaacttaggattcaggaaacaaaaaaagttgctattgaatagaaaaatggaaaagtaacagcaacaaaattctggtagcagatgccaataatttcccaagacaaaatgatgtagtaacttcagaagtatataaatgaagactggataccagcaagacatactggatgattttstatccagatagtgctttttttacttattaggttgggttattgaaaaatgttccagtgaaaaaaattaggcct

SEQ ID NO: 855066 - DNA, 602 bp, Homo sapiens
ctgacagtttttctggttgaggatgctactctattgtctttttagtgtgcatggtttctgaagaaatgtctgttacaattcttgtctttgtttctctgtatgtaatctgtcttttttctctgctttcaagattttcttttttccatcagtttgaatatgatatgcccaagtgttttgttttgtttttgttctgtatttaacttacttgatggtctttggctcagtagaaaattcctgactgttatttcttcaactatttcttctgagattccaattacacctatgttggacagtttgaggctgtctccaaattcttagaatgctctattctgtttgcttcattcttctttctctgtttcagcttgaataatgattcttttccaggctgtgttgagtgctatcaaatgcgttcctcatctctggcattgatgttacagatgttacatttccatttgagggtttctttcatgcccatctctaygctgtgattacccacccggtcctgcatggtgcccactttgtccactagcctttaatacatcattcataattattttactttccctgtcagatagttccaacttctgtgtcctctctgagtc

SEQ ID NO: 855067 - DNA, 500 bp, Homo sapiens
atggccccaggcacatgggagggagagttggggctgggattgaggagaggggaaggaagccacagggtgagcagggaccagagagccagattttataagttatataagaaactcagattttggccgggtgcagtggctcacacctgtaatcccagcacttggggaggccgaggcgggcggatcacaaggtcaggagatagagaccatcctggctaagacggtgaaaccccgtctctactaaaaaatacaaaaaatgagccgggcgtcgtggcggaggcctgtagccccagctattcgggaggctgaggcaggagaacggagttaacccgggaggcggagcttgtagtgagccgagatcgcgccactgcactccagaaaaaaaaagaaaaacaaacaaaaaaaaaaaccctcggattttagtyagaagcagtggctcaccctgtaatcccagcattttgggaagccaaagtagcaggatcccttgaggtctggagttcaaa

SEQ ID NO: 855068 - DNA, 606 bp, Homo sapiens
cttcctcctgccacaacacagaaactgttcatcccaaggaccatccctttatggctgatatgaagccttatggatcattcctttcctatcttgcatttgacccttctagaaccttctcactgactttgaaggaattaaaaacacaaaacaaaactatttgtttaattttttttaaaaaactaagtatgtaaataaaaaagtaataaaaaaattttcctcattaaaaaatatctttaggttgggcgtggtggctcacacctgtaatcctggcactttgggaggccaagatgagaggactgcttgaggccaggagtttgaaaccagcctgggcaacacagtgaggtaggttccatctccataaaaataaaaaattagctgagtgtggtggtacatgcctgtagtcctagctactcaggaggctaaggttggaggattgcttgagcccaggagtttgaggctacagtgagctatgattgcatcagtgcactctagcctgggtaacagagtgacaccttgtgtcaaaacaacaacaacaacaacaaaacacycacacaaaacaactttaagaggttgttactgtttaaagcaaaaataataacaatgtta

SEQ ID NO: 855069 - DNA, 576 bp, Homo sapiens
aataacatttttctagtgcatttcaaatgttgatgctttatataactcacyattaattaaaataaaagccctgagatatagacattaagttcccccattatagacaaggtaatgtaggtttgtagaagtggcaaaacaaggtttctagtacagacatatttgactataaagttttgactatttcactttatcaaaatattaacatccaggcagcagcttgccaaagacatcactgagtctatgggaattctgtgtcagtaagaaaactgaacctcctacaaaaaaaaatctctttcacctgtcaacatggagaggtaaccctagggagaagtaacttaaggacaacgaacctgaaaccttctgcaccatcagaaatatggttcccagaggacgtcacacacagagggtagaagccaggaataatgcaaagcctctgattttattcttgaggtagcaaagttggattgctcaggttcttgttattgattatctctttatgcctcaaattttaactcagtatttatcaatgccataccatagagtctattgtcataattatatttcaccagggatcag

SEQ ID NO: 855070 - DNA, 439 bp, Homo sapiens
cctccctgcttgttgtccctctctctgacttttcttcacyctgttttccccttggatcctgcccacttccacattgttttgttttgttttttttttgagaccaagtctccctgtgtcgcccaggctagagtgcagtggtgtgatgtcacctcactgcaacctctgcttcccgggttcaaatgattctcctgcctcaacctcacaagtagctgggattacaggaacccaccaccatgcccagctaatttttgtatttgtagtagagttggggtttaccatgttggacaggctggcctccaactcttgacctcagcctcccaatgtgctgggattacattgtgagccaccgtgcccggcccagttctcacttttcatggtgcctttcagtgccattagaggagaggttcctgttacctccatggaccttgcgtggtgagca

SEQ ID NO: 855071 - DNA, 344 bp, Homo sapiens
ggcggcttacagccgtaatcccaacactttgggaagccaaggcagaacaatcacttgagcccaggagttccagaccagccagggcaacatagtgatagcccatgtctactagactctactagaatgttaagtaattatctgagcattgtggcacatgcctatagtctcagctactctgcagacagaggtgggaggatggcttgagcctgggaagcagaggtttcagttatctgagattttgccaccacactccagccygggcaacagagaaagaccctgtctcaaataataataacaataataacacactttgggattgagtctaggggaagaaatggatccta

SEQ ID NO: 855072 - DNA, 632 bp, Homo sapiens
gggagtgtccttacagagagattagtgacttaccagatctggactcagtttggagggtgctcagacctcaggaagaaataagcaggaactccaggcttgaagactttgggtctcttctgtgggtctttagaagcttttattgacctttctaatcacaactcccacccacacccctccacgtatccactgctagcttccaatcaacaagtgatatctgattgcatttctgaagctccacccagttaatcctgattggggttttggctctccccagattaatggattgaatcagatatccattcatatcagatatccatattaagttcatgaatcaagaaattgacagtgttagggatagggtgggaatcaagaatgcattcattcaagaccgggcaaggtggctcactcctgtaatcccagcactttgggaagacaagttgggtgggtcacctgagttcagacattcaagacgagccaggccaacaaggtgaaaccccgtctctacaaaaatacaagaattagrcagggacgatggcacatgcctgtaatccagctactcaggaggctgaggtgggagaatcgcttgaacccaagaggcaatggttgcagtgaaccaagattgcaccattgca

SEQ ID NO: 855073 - DNA, 564 bp, Homo sapiens
taaattgaggaaattttcttaattactgctgggtctctctgcattgtggccatgttccgaagtccaggagagatgggctgatggccttgggatgcataaagtgacgccggccccatcagctcaggctgagggagaaaacagaggctcaggaatattctagagagcctaagcaagggcctcataggagctttggaatcccagtgtggattctgggagtggagaataggtcaggtcgtttcctgagatgggtttcgaaggttgctctgagcttggcagcagatgagcacctcgagaagaactggcgacagaacatggtagaaaagaccccaagtgcaggattctcactggggtgctgggggtgcgtactgcaccccttgaaatgggcaggaagagggagtcagtcagccagttctttccaatatttagcttattgaacaccttgggggttccactgagcccctcacctgaggggtttgccaatcatttgctrccagaacatgggaaggcttttcctctggccaaatctcaggtttatcgtgttagaaatggggaaaatagcaacgt

SEQ ID NO: 855074 - DNA, 547 bp, Homo sapiens
cagacacaagtccacagcttatcagggaygcggctctgtgaaagccaaataacccggccccctaccctgctgccatctctctcctctgtacttactctggcccacatcagctcctctgggccactccctttctgggccctgttcttttccttagtcctcctggctccatccagcctgcagcgagttcccagacctcccccaccccaggctgccacaagcaccttcttaggcatctactctgctttcagagtgagcttctcctcagatctttattggggaaaaaaggaggggcagcccctgatcttggaaaagacggtcacaaatgcgacctggaatgagatcctgttgaggactaaagaagtccagcagggcctgaacagtgatttctactgttagaaacatggagagggcaaacaccatgggcaaagaaagccctgactcagaaacagactcactgcattccaggtgcagcctcgtcagctctaagactgggcaaggggatcctagaagggatggccccctgcactgggacctgtcccaggctctg

SEQ ID NO: 855075 - DNA, 659 bp, Homo sapiens
ttgtggatcctttgaactgtcagaagacccccaccctggagcaccccctcctttctagacccctggtctttagcctctgggagaggtccaagaactggaagtttcttagcttcaaatggccttgcagaggctaagccacactgtctcgcccagcatctgttcaccttcctgggtcacaggctccctgctcactgtgtcttgtgggtctctggagagctgcaccccaacaggatgggcatgaccctgccccaggctccgaggtctttattgttcagaacctaggccagcaactccacctagcacaggactgaccattcttgaagtaacttcagagacacctgggtcccctccttgaacacagagggctaaagaccctcccacagacaccctggtacccacatctcctgacagctttatctcctgggagaatgggaatctatgtgtcgctctttttacaaacaaggactaagaacttgttcaaggtcagtcattgaggaggaaaaggggagccgggactcgggcccaggttggcctgcctcaacgccccacgctctcccgaggcctcgcctgctcacctrtctccctctgtctgcagcccccatgcccatagcaggtctggttcccaaccactcccagttccagtccccgggcctttgtcc

SEQ ID NO: 855076 - DNA, 524 bp, Homo sapiens
ttgaaggataagtaggagtttgccacgtaaaaaagactagaaaggcaatttcaggtgaaaggaaacaaacctaagtgcatttcctactgaggagaggggmttaattcagtatgatggaaatcagcaagggttgagtctggaaaaataaaattgggtcaaattagggaaggccttaatgtcttgttcaggactttgacttttatcctgtagggcaggcctatcattctcacaagtgtgatccgcagaccacctgcatcagaatcacctggagtgctttattaaaaatctcacctcacactctagaccatctgaatgagaatctctgtgcgtagaaataagtgattttaatacactcctaggtggattcttcactaagcttcactaaagtttgaaaactacacaccacagtatgggaagtcaagaattttttttaaggttttctgatccacccgcaagtggcatttgaccaggtccaggggcatgatggacatgtgtgtcagcccacagctcagcatccctcccag

SEQ ID NO: 855077 - DNA, 644 bp, Homo sapiens
tattcttgtttgatgtttctagtattttattgacctcagataagatataaaccctaaagaaaatgttactatttttaaaaaatgtaactcctctcattattttatgaagtatgtttgaacttcagagatttttkatgattccagtgccttatattattgacacagttgccttatcatggtgtgtaaaatattatcacttaatctatttttcttatgtttgtttgctaaaactttaataaagagaagaaaaagtaaagagagagactgtaatttcaaagctggaaaaaccatgtcatttacgtcacttttttgttgtagtctttttttaaaatcaaaataatgcgaaaatagaagaaatttgtttcatctttctgccatagcactggattgtattttcttcatttgtcttcatgctggatgggaagcactagaggttaaagaggtctctaaatatctttggattcctcaatgtttatcacaatgtctgacatatcataagcaatcatagtttctgtggaattaactaataaatgttgaatttcattttctaagctcatatccatcctgatactcatttccagttaaatctaacacttttttagccttttagtggaagaagggaagaagtcatatttcagtgagga

SEQ ID NO: 855078 - DNA, 599 bp, Homo sapiens
tgtttgtttgctaaaactttaataaagagaagaaaaagtaaagagagagactgtaatttcaaagctggaaaaaccatgtcatttacrtcacttttttgttgtagtctttttttaaaatcaaaataatgcgaaaatagaagaaatttgtttcatctttctgccatagcactggattgtattttcttcatttgtcttcatgctggatgggaagcactagaggttaaagaggtctctaaatatctttggattcctcaatgtttatcacaatgtctgacatatcataagcaatcatagtttctgtggaattaactaataaatgttgaatttcattttctaagctcatatccatcctgatactcatttccagttaaatctaacacttttttagccttttagtggaagaagggaagaagtcatatttcagtgaggaaactgaaataggaaaagcaatgcagccagtaactgttatcggtttatagaaacttttctattagcctgttagagataatcagatttctgcccactgaagcaaaaccaacctcagtaagaaacagagaattgattaaagctttgttctgctctggctgactttcggcatt

SEQ ID NO: 855079 - DNA, 618 bp, Homo sapiens
ctttgtagttatagtaaatagacacattcttgatttctttgtcatatagttcacwattggcacatagaaacactactgatttttataaattcagtttgtatacaacgttaccaattattagttctaacagttttttgtgaagtctttaggattttatatcatatataaattatgtatatataccaaatataaccctaaatatacacacatgtatttaaagttatatttttatatataactttaaacatataaatataaccttaaatacatatgtgtgtatatatacataaatgttatatatacatacatgtttttaggattaatctataaatataaccttaaatatgtatgtacatataaccctaaagactccagatataaccgtataaccttaagtatatatatgaaaccctcaagactccacaaaaccttagatatatatgattatatatatttataatatatattagtataatgatcattagtgtaatgaccataatatatatatatatttctggtctgcattcataatgtaaatagagtatctcaaagcatgcaaccttggatgacagtgtattgggaaaacattttaatatattttgttcagaagaattctta

SEQ ID NO: 855080 - DNA, 609 bp, Homo sapiens
attagatcgtagctggaggtgtaagtaaagtccagagaaattttttgagaaggaggtaataacagcataggtgtgtgctgaggggagtagcacaggatagagtggataatgttgaaaataagagagttgttaargaggtgtcctgagtgtgtgagagaagatgaaattaagcatcttagtgaactacatgaacagtttatagtttcaagaggaaggcagcatttgttggtacagaacagaatatgttaaatgagtgcaagtaatgatggaagcttatgaagaccctattttttttttttttttttgagacggagtcttgctctgtcgcccaggctggagggcagtggggcgatctcagctcactgcaagctccacctcccaggttcatgccattctcctgcctcagcctcctgagtagctgggactacaggcacccgccaccacgcctggctaattttttgtatttttagtagatacagggtttcaacctgttagccaggatgctctcgatctcctgacctcatgatctgcccgcctcagctttctgaagtgctggcattacaggcgtgagccaccgcactgggcctatgaagacccttttctatttga

SEQ ID NO: 855081 - DNA, 627 bp, Homo sapiens
gtgggactttgcgagctctgtgactgtcccacgtccaggagacaaggaaggtagggcacctgctgcacacgattctgtccagagtgagcactggatggtggagaccataggtcaccccagattccytgacctatttctgggacaccatatttccctcctcagtgtgcaccctttgaagggacccagcacagggtcttgggcctgggcagtctgaagactgataacttccccactccaccctacaagcagtgggactcctgagaacacggttctctcctatcctcagcccccagctgggtctcagaggagctgggggagcggtggccagcccattttctggggtgaggcttgacttggagaaaggcagaagagacgtcccgcttctgtgatttggtgcccccatatcagacaatgaatttggaagtggagaggggccttcatttcttatctacttggcatgaaagggtgccctggataggagggtgtgtacagggcaaaatgccaaaaagcactgtctagttgaaagttcccttctccacccaggggcagtgaaggaggaggggcttatagagctgggattggtggagggagcaggtgccagtcccctcactctctgggagctgtgaa

SEQ ID NO: 855082 - DNA, 561 bp, Homo sapiens
gttggtgctggctgttggctggactttgatccagcaggatagcttggccctttcacatggcagtctcagggcagcaagaaagtgaaaacagaagttgcacaacatcattgcgggtgtattctmttggtcaaagccagcgcagattcaagaggtagggaaatagacgccatctcttggtgggagaagctgcaaaggatttgtggccatttgaaatctaccaggctgttctgcagagcaaaccactacaaaaacttagtggcttaaaacaatggcaacatttcttttgctcaggattcttcaatttgggcaggatttggtgggggaaagatctctctactctgcccagcatcatctgggctggctgaaaggatgggggctgaaatgatctcaaactcgctattcacatatctggaggctgatgctggttatgggctgagactttgggctttgtctaaaacatgtggtgtctccatacagcctgtgctttctcccagcatggtgactgggctctcctgaaagacagacagacaaacagacagacccaggcagagctatgtgcct

SEQ ID NO: 855083 - DNA, 608 bp, Homo sapiens
gaaataaaccacaacacctttataaattgttgcttaaccaccaacggccataaacagtggcataatgttaaattctgtcctcctccatctccttgtctttcccgacagccttctaaaaatgctyagtcaagattgggttgaaagatggatgattggaaatccactctcatactgtctcatccaaactcatggtagataacctcagcccctacatgtgactatctggaatctgcaggaatggatgccctgggaacaagcctctaaagcttgagagcataggcgtactcatgctcttgggggctaacgatggtctttgggagatattagtacctgaagccatggaataaacttgatggtgcttgtcttgttgattttactcaaagatttggtagagggaattattttttattttaatgcaaacatggagtgtgtgtgtgtgtgtgtgtgtgtgtgtgtgtgataaaaaatagctgcaacgattttaaagataaaacaaggaacttctaaaaattatatgcctgcctctgcctgcttcaagctctgacctcagaacttaagaggtattccttcactctcctttgccactagggaataattcagaagaaata

SEQ ID NO: 855084 - DNA, 560 bp, Homo sapiens
tactagtatatatggatccaaaattaattgcttttttattatatttaatacatctatttgctttgtggttttactgatacttgaaaattgtaaacaattatgaaagattttgaactttaatcatcttaatttgcttaattaacataatttactagaggagagaaagagaaaacagacttggttacttatttatgtttgtaaccacctttgtatatgtagtaacaccagagcaggcacttcataattgaaaaggctttagggtaataagtcactgtctgtttcaaactgtgatgactttctggaaaaaatagcttttgtaatatttgtcatactggcccagatccagaaagtagtatgttcagtgtctaattgtactccatatggcctgaactcttgagcaatccatctgaagtaggaccctgttaagaaattattctttgttttyttttgagatggagtttcgctcttgtcgcccaggctggagtgcaatggcatgatcttggctcactgcaacctccacctcccggcttcaagcgattcttctgcctcagcctcctgag

SEQ ID NO: 855085 - DNA, 666 bp, Homo sapiens
tcttcttcaagaagggaactaggatcaggccctctgtgtaaactcttcatcacatgtgtgcaaataatgatttttagtttccacatctataaaatggaagttcataatacctacttcrtagagttagaagaattaaaatgagctaagtagtaatccttgagaacagtgtctgacacatataatgcagtcgttacattttagctatgacaatattattttctatttgaaggacggataaactaatatactttcctgcctgtcttcttcccccagctccccgactgatacttctacatttgttaagtaactagtaatggtagtgtttttcaaggcactagatataagaagcccctgctactaagaagttcagtttaggcaccttctccctctctagattgagtgtacatcacaaatccttggaaccaactcttcacaaggctcctgtaacaatctggtctcctccccagtggagaaatctttgtactgagttgaaattacctttattcctccttattagacacaatgcttgacctcacaggcttttactggatagtgtatcaattgatcctattatagcacttggcacatggtagatcatcagtaaatatttgttgaatgaacggttataatactttcattctgttagataaacttcataagcatggt

SEQ ID NO: 855086 - DNA, 574 bp, Homo sapiens
tctacaaggaacttaaatttacaagaaaaaaaaacattaaaaagtgggcaaaagacatgaacagatacttttcaaaagaagatatatatgtggccagcaagcatatgaaaaacagctcaacatcattgatcattagagaaatgcaaatcagaaccactgtgagataccatctcatgccagtcagaatgatgattattaaaaagtcaaaaaataatagatgctggtgaggttgaggtgaaaatagaatacctatgcacgttggtatgagtgtaaattagttcagctgctgtgggaagtagtgtggtgattcctcaaagagctagaaacagaactaccttttgaaacagtaatccaatttgtgggtatatacccaaaggaatataaatcattctatcataaagacacatgcgcgtgaatgttcattgcagcactattcacaatagcaaagatatggaatcaacctaaatgcccatcaatgggagactggataaagaaaatatggtacatatayaccatggtacaccatgcagccataaaaaagaacaagatcaggtcctttgcaagaacatggatg

SEQ ID NO: 855087 - DNA, 621 bp, Homo sapiens
atatatgtaatatatatgtagcacattttatttatccgttcatcagttaatgaacatttcagttgtttccacctttcatagtagtctgataaacgttggttaaaaagtatctgtttgagtccctgttcaattctggggggtatggaattgctgggtcatgtggtaattctgtgtttagtttttagagaaacacccaaaatgtcttctatagcagctacactattttgcatttctatcagcaatttatgaaagttccaatatctccacaactttgccaacactaattttccatttaaaaaagtgttawcacaattgcagtgaatgtgaagtggtatctcattatggttttgatttacacttccctaatggcttatggtattgatcatcttctcatgtacctgttagccatttgtatatcttctttagggaaacgtctgttcaagtccttgctatttttaaatgagttgttcatttttccattgatgagttttaagtgccctttatatattctggatactagacccttatcaaatatataatttgcaaatatttcttccattctataggttgtcattttactttcttgatagtgtcctctcatgcacaaaagtttttaatttc

SEQ ID NO: 855088 - DNA, 615 bp, Homo sapiens
ttgatcttatttcttatcatagctgatgctccataggcacacacaggtacagcttcctggatgtttgtagatggcatttattctggttggatggtgtctgccacacaggggcattacatttttttgaaaatcacctttgtctccatctactttccagtacaatgaccttgctcttccttgaacaccccagtcatgctctgccacagggcctttgcacttgatgtttctttgggtggaaatgtttgtcctccatatatctggttggttctgccctttactgttagcatctctgttcaaacaatatctcatcagacagaccttttatgaccacccgttaactgggagacagaaactgcccattattctttctctttaccttgcttcgtttttcttcacagtagttatcaccaccttccacaaactttacaaatattttaattgattttgtatatttacattatggtccccccatcagaatgtgagcaccatgaaagtaggggctatgtgtatgtttatttgataatgtaattatgtaaacatagttatttaacatagttaaattctacatcttcacggcttagaagagtgtcwtgcatgtagaagtccctcagtaaa

SEQ ID NO: 855089 - DNA, 629 bp, Homo sapiens
acttaagcaaactatgcattacggtctaaaagattawcaggatcagaaaaatgatatatgaacttttatgtaggtttaaagcaacattaaaggaattctttgagtgaaagaaataattttttactataagaatttagcacatctgacattaaatggtgaaagtgcaaactttttattctttgaatgtcattttattgaactctgttggctacctgtggtttcaaaagagttgtcctttttggtaggtagctttttgaaaaatcagctagtttctgctctattatttagagatgtaacttattaacttaatattttatagtttgggctgaattcatgtaattaaatcatcattttaaaaatctggtaaacagcagatcccttctagctaaaagcatatatgatcatataggtggcatgatttgagaataatgacccattttgtgctatagtttttttaagaaggaagttattcaaggaattctcatttccataaaactgttataactctatattctagagcttttaacaaattctgacctataatttttaagtccttagtatctttcaggcattgttttagatgcctaggtgtagcatttcatttctttctcaccactgccttgtgagat

SEQ ID NO: 855090 - DNA, 662 bp, Homo sapiens
aaggaatggaatcttgggacgtgtggtgcatgttatagctctagtaaaagctgtgggtcatggaggaacgaacaactccagacgcgccatcttaagagctgtaacactcaccgcgaaggtctgcagcttmactcctgagccagccagaccaggaacgcacgagaaggaagaaactctgaacacatccaaacatcagaaggaacaaactctggacacgctgcctttaataactgtaacgctcaccacgagggtccgcggcttcattcttgaagtcagtgagaccaagaacccaccaattccagacacagtagcaaacctcgtgttctctgacctagggttcttggcctcacggattccaaggaatggaatcttgagacatgcggtgcatgttatagctctagtaaaagccgtgggtcatggaagagaaccgtggaacccagtggctggtgttcagctcgattaggacgaacccgggcacttagccatgcaggaacaatggcaagcctctaaccccatcaggagcgacaatgggcacctcactggatcaggagcacagcggacaccctgccggatccgaagggatggaagtcagtggcgggtctgcgacgtcggcaaacaacagtggtggacagcaagtaaaagctcagctcgagccgtaacaa

SEQ ID NO: 855091 - DNA, 620 bp, Homo sapiens
acaagcaattccgactgagttttggaggggtttttttgtatttatttatcttaattatttaaaagamtattaattattattattatttttttgagagacaggttttcctctgttgtccaggctggagtgcagtggcataatcataattcactgcagcctcaaattcgtgggctcaagcaatccacccatcgtagccttctgattacttgagactaccaggagcacaccactgtgctaggctaatttttaacttttttttgtagacatggggtctccctatgttgcccaggctggtcttgaaattctgagctcaagcaattctcctgccttgacatcccaaagtgtagggagaacaggcatgaaccatcacgcctgaacagtattctttttgttttttttactataaaaagtagaacagtatttgattatgttacttcagaaacagagagcaataaaacctgtagaaaccaaacaatttgcctttttaaaaaataattccaagaaacttctatagatccctttataagaaaacaatttccatcaaaaatgaggccaattatattttggttgtgaagttgatgtctaattatacttttcttaccatctttgcctggttatct

SEQ ID NO: 855092 - DNA, 580 bp, Homo sapiens
atatatacattccagtggtaactaatttatcctcaaatcccctcttasaaggtaagtgctcaattttcaggaaaggaaacagaagcccagaggggctaatgtgcctaaggtcaggcagctagtgtgttgtgaagcacacactgacagcccagcacgtggctctggagcctgcagcacaaatgtctccgcccctcagcactaccatgctgccctatggagggagaaatatcatttccatttatgtagttgaagaaggtgaggcttggagaggttaagttcctgttccaaagccacaggtgttaagtggtaaagcaggaatttgagctgaaaacacacgcacttgacctcttgggtccctcctgaattttatgcccctctgttgttgcaggctcctataacttcatgtctattgtcccttgaatatttttaaggcttcaggcagaaaaacctcaatgcattgcacgtattacttttaaatttacatatttatcatttatttctaaagtgtatgcagaaatatctggttgaaacaggaggtctttagtaaaaagacatcaatttgaaagaattctcaaaaaaa

SEQ ID NO: 855093 - DNA, 607 bp, Homo sapiens
ctgttgtgatacagcaagaacatagttttccggaatcatactcccttaaattaatgatggcattaagatgtgtagaatctggtttgggggatgtctcagtcacttcacatgtttgaagcctagattatgctgtcgtctttggttttgtcatgtaatgtgattgagactgtccctcctgttgattaaatactttgttaaaagtcttgggggagagatgaagtagaaacatatacttaggtttgtgtcatactgatgaaactgttctaatttgaaatatgtgtgtgtgtgtgtatgtgtataaaatacacattcaagtatttgagtgtatttgtggcttgttaaactcagacttggtttgatgtacattccattcattgataatgatcattgaaaatgccacgctttggtactttcttttcttatacattatgtttgtttaaatcataccaatttatagaaaacgatagaaacaaatattttaagattaagtgctaaagtctagatttaacraaggaagcagatttaactaaaaatttaataaaaataaatttattttatttaataaataaagtttttattttatttaataaattaattttttattata

SEQ ID NO: 855094 - DNA, 610 bp, Homo sapiens
acagttttatatatgttaacatatataaatagttatatwtgttaactatatataaatacacttatctttgttaactatgtatacagttttatatatagttaacccatatatatacagttatatatgttaactatatataaatacagttatatatgtatacagatataactctgagtgtgtgtgtgtgtgtgtatatatatatatatatatatatgttaactataacaaccacaggagacaaatagtattataacttcatattacagaagaggaagctcaagcttggagaggttatttaacttgtgcaaggtctcagagttaataacagtcagagaagtgtttatacccaggcagtctgttttcacggtcttaaccctcatcatattctgcttcttcgtgttgtgagaatattagaataattattctgatttagcattattttatttccttgttgccaggtcattagtgccagggcaggggcacatatagcatttgattgtcagagagagatgttagaatccttcatggttttcactgacaaattctctgtttttttccaaacacataggcagaataaactggtacacctgtatatctggagagaagaaag

SEQ ID NO: 855095 - DNA, 610 bp, Homo sapiens
acagttttatatatgttaacatatataaatagttatatatgttaactatrtataaatacacttatctttgttaactatgtatacagttttatatatagttaacccatatatatacagttatatatgttaactatatataaatacagttatatatgtatacagatataactctgagtgtgtgtgtgtgtgtgtatatatatatatatatatatatgttaactataacaaccacaggagacaaatagtattataacttcatattacagaagaggaagctcaagcttggagaggttatttaacttgtgcaaggtctcagagttaataacagtcagagaagtgtttatacccaggcagtctgttttcacggtcttaaccctcatcatattctgcttcttcgtgttgtgagaatattagaataattattctgatttagcattattttatttccttgttgccaggtcattagtgccagggcaggggcacatatagcatttgattgtcagagagagatgttagaatccttcatggttttcactgacaaattctctgtttttttccaaacacataggcagaataaactggtacacctgtatatctggagagaagaaag

SEQ ID NO: 855096 - DNA, 476 bp, Homo sapiens
atatgtaggaaaaatcataaatggcctgcatgtactgataagatgctggagaaagaggtggggtttgttaaaacaaaaacaaaaataaaaatccggggtccaccaaagtctgtttctattctggtggttytgaaaattctgaaagcttagatttctgggagtcattggtaaaatacatttttggtcactagtgttcctatgatagtcatagttaaaatatatttttaacctgagcaacctctagggctttggttatattttgatttaaaaaattagattgactgaaaagtttatgagaaatataaacatcaggcaaagataagtaatatgctttatacctaaatttgtctattgcaaaaatagcagagctcaagctatttcgtgtcattatcctaatccgtaagcatttagcaacttgtgtcaatggtatttgcctctcaggtcacacaaagaaatctatcttaataaagtcagaa

SEQ ID NO: 855097 - DNA, 555 bp, Homo sapiens
agaatttgagctcattgtcaggtcactcgtcatatggcccgtgtcattcagacccttaccagctgttccacatgttggttttggatgctaaagctaaggaatggctggaaaaagcacagtggtcagaccatttagcagagtcaatttccaaaggtccaataggatgacaacaagtccccaaaagttcagaagacaggctcaaagatgccaaggcatgagccactgctctgttaattataattccttcagcattccaaaggtttgtggattggaataaaatccagcaatgccaccagaacccaaaggaattagtttgagattatttttcatgttttgataaaactttgagacaatattatgggatgtcagctgattgccttgagaacaataaaaatggcgcttattaaatgcaaactttcaaaacagaccagatgatgatttagccactcttgtaaaacaccacataacaaattgggccrtggtcagaactaaggaactagttaacttagctgaccaattatcctgtgctatgataaaggaaaaaaaaaacaaaag

SEQ ID NO: 855098 - DNA, 577 bp, Homo sapiens
agtcttatatccggtatctataaggaacttacacaaatttacaaggaaaaaacaaccccattaaaaagtgggcaaaggagatgaatagacatttctcaaaagaagacatacatgcaacccaacaaacatgataaaaagctcaacatcattgatcattagagaaatgcaaatcaaaaccacaacaagataccatctcatactagccagaatggctattattaaaaagtcaaaaaaataacaaactattcatctgacaagggactaatatccagaatatacaaggaactcaactcgacagcaaaaagaatattctaattcaaaagtaggcaaaaaatctgaaacagacatttctcataagaagacatacgaatgaccaaaaggtatacggaaaaaatgctcaacatcactaatcatcagggaagtgcacatcaaaaccaccaagtgatatgatcttattccagttagaatcgctactatcaaaagacaaaaaatarcaaatgccagcaaggctgcagagaacagggaactcttagacattgttggtgggaatgtaaagtagtacagccattataaaaaa

SEQ ID NO: 855099 - DNA, 452 bp, Homo sapiens
ttccccagcagacgtggccaccgtctgccctcctcagcgctgcgcttgcttttgtggaacaaaaccgagctttggttggagccatgagtgggatcagaagggttcgtgttctccttttaaaaggaaagaaaattcgtcaccccctgtgcggcagcagctcccaagcaggcctgtgctgcattcacgtggcccggggctgccaccagccccagcagcgagtcccaaggccactgacaccttctcccctctctgttcagaaatgtttctttccctaaaatgagtcacctagtcaccttcagcgtggctgctcaaaagagggcttggggactggcatgcarcaggacggccccagggacagcgtcctcgggacagaacccgccatgggcagaggtggctccgagccggtcctgtcccagagtcacctggtggccctctccctgtccctccgtctg

SEQ ID NO: 855100 - DNA, 640 bp, Homo sapiens
atttagatcatgggaggtaacatctcttacacaagatcacacccagagcactagagtcatttttggaaatcattttttttaacttttaaatgactgattttcttatttataaaacaggccaggtcgggcacgatggctcacgcctgtaatcccagcactttgggaggccaaggccggcagatcacgatgtcaggagtttgagaccagcctggccaacatggtgaaaccccatctctactaaaaatataagaattagccgggcgtggtggtgcacgcctgtaatcccagctattcaggaggctgaggcaggagaattgcttgaacccaggaggcggaggttgcagtgagctgagatcatgccactgcactccagcctgggtaacagagcgagactctgtctcagaaaaaaataaaataaaataaaataaaataaagcactggcagggcacagtggctcacccctgtaaccccagcactctgagaggctgaggcaggaggatcacttgagcccaggagttgaagaccagcctgggcaacacagtaagacctcatctctacaaaawaaaaataataataataataataataacaacaataataataatgtattacatccaaataggccgtgactttaaaaatg

SEQ ID NO: 855101 - DNA, 640 bp, Homo sapiens
atttagatcatgggaggtaacatctcttacacaagatcacacccagagcactagagtcatttttggaaatcattttttttaacttttaaatgactgattttcttatttataaaacaggccaggtcgggcacgatggctcacgcctgtaatcccagcactttgggaggccaaggccggcagatcacgatgtcaggagtttgagaccagcctggccaacatggtgaaaccccatctctactaaaaatataagaattagccgggcgtggtggtgcacgcctgtaatcccagctattcaggaggctgaggcaggagaattgcttgaacccaggaggcggaggttgcagtgagctgagatcatgccactgcactccagcctgggtaacagagcgagactctgtctcagaaaaaaataaaataaaataaaataaaataaagcactggcagggcacagtggctcacccctgtaaccccagcactctgagaggctgaggcaggaggatcacttgagcccaggagttgaagaccagcctgggcaacacagtaagacctcatctctacaaaaaaawaataataataataataataataacaacaataataataatgtattacatccaaataggccgtgactttaaaaatg

SEQ ID NO: 855102 - DNA, 629 bp, Homo sapiens
cctaaaatatttttagtgataaacaaatacttttgctgctaaaagtgcaaaaatcacacactctggctttcctgttcatgctttttyactttttcatcttttgttttagaatcaggagttagatgtgcaggtttgttacaaagatatattgtgtgatgctgatatttgaagtgtgaatgaatctgtcgcccagatagtgaacatagtaaccaaaagttagtttttcacccttgcttccctaccttcctcctcgtattgtattccccagtgtctattattcccacctttgtgtctatgtgtatccaatgcttaactcctacttgtaagtgagaatatgtggtatttgattttctgttcctgaattaattcacttagtattatggcttctagctgcatccacattgctacaaaggacatgattttcttctttttttatggctgcaaatttatttcaattataattttattatctatggaataggtaccctaatactcatatatgagcatgagtatttggaggaatttaggaggtaagggagatgttagaaaagaaaaatagctcagaccagtctgagctatgtcaggcatgaaaaaattgtcaggtccagaaatacatgagagtgggactt

SEQ ID NO: 855103 - DNA, 465 bp, Homo sapiens
tagactgtatttagctctgatactggaaagatttgaaaggaattataagaaatgaatgagctcaggaatgaactggtcaaattacaagcagaaatagatgggaatagagagatatgtgatcccacctatgaaggacaagcttgtatcagataaacccatctaacaaaatcagccacaggtcatcagagagcagcaggaagacaatacttgagtggatgttatctgatagaaaagagaaatggcttgtgatgagtccaatattctgcattgttttgctctacgtcggtcaatttttcatcagtgcaaacaaactgagaaactgaataaaaagaaacaaccrggaagcatgttaccttagcagaatttttacagtcttacaggatttggaagaaaaaaaatgaagttcaaggtacaaaggaaactaggattaaggagtcaaaattcagaaagaatagagatgaagtg

SEQ ID NO: 855104 - DNA, 465 bp, Homo sapiens
tagactgtatttagctctgatactggaaagatttgaaaggaattataagaaatgaatgagctcaggaatgaactggtcaaattacaagcagaaatagatgggaatagagagatatgtgatcccacctatgaaggacaagcttgtatcagataaacccatctaacaaaatcagccacaggtcatcagagagcagcaggaagacaatacttgagtggatgttatctgatagaaaagagaaatggcttgtgatgagtccaatattctgcattgttttgctctacgtcggtcaatttttcatcagtgcaaacaaactgagaaactgaataaaaagaaacaaccgggaagcatgttaccttagcagaatttttacagtcttayaggatttggaagaaaaaaaatgaagttcaaggtacaaaggaaactaggattaaggagtcaaaattcagaaagaatagagatgaagtg

SEQ ID NO: 855105 - DNA, 638 bp, Homo sapiens
tgctttctgttgttcctgcttcttccccatcagattagatcaaagtttaatcttkctttctcatttcaaaacctgactttgttggaggagagcctgtaagagaggaagtgagactagatcctatcaatagcttctcctgaagggtgacattacttctgggctaattccttattgaaggaactatggaagaaaattattacagtgcttgtctctttgaaggtgtttttcttaagtgaaggcagccccaaggagtccccaaaggagttgtaattgagttgctcttccttttactcatcactgttaagccaggtatgcaaataacactgaggcattttggaaggttatttgagtcctgctgtttgttcaagcaacatttgagaaacactattaggaaaatgtgtgcatgttctacatcatttgagatataatgaatcttgattattagattaatcatattatgtgtgtcaactagaaaaatgtgccttatttgaggggtgatatttttgtcagcaggtactagtgaggatgttttttggtaatctattgaaagatgaagtcacagatttttttaaggaggttttagcttatatttgactgaggttgaagaagccaatttggaaggcagctacttgtgaagc

SEQ ID NO: 855106 - DNA, 626 bp, Homo sapiens
tatagcattctaacccccaaattctagctgccttaacagccttgaaccaaattgctgtttccttagcacagtgagaccactgctatctgtttgggttccactttcctcttgcacagtgtggaagstgcccccgggtaccttccaagcctgtcatggcaagtgtactgtttcctttcttctaaaaatcacaaccctttgctctctgttgtctatgactgaaaacagctgcttcatgcattttgtccagttttgtgcttattattttggaagtgttaagtctgatacttcttagttcatcatgaccagaaccaaaagtcagctcaggagtttttagagctacaaatcttcatgtttgggggaagaaatattacattttaatttatttgtttttataatgtggcactgaaaaaatatttctactgttttcatgcttctctcttttccccttctctatatccagctccttctttttctaattatccttaataggagtgactcaagctttgcttatatgcaaactggaattctggcaactacaaaaaagttttatacaacactaaatctgcaaatactagaattttacttctgaggaatagagagggatttacgtttataaactatataaa

SEQ ID NO: 855107 - DNA, 663 bp, Homo sapiens
atggtggcatcctcttcatttgtctcccagcttctagatttattctgtttgctacagttagcatctcatctgttagattgcctcttgttagctcattggcatcagtgttaaccattagatgattcttcttcatctataaataagaattttgagacatcatctggttcaattgtttttctttatgaacatttttagggtcatcatattaaaatgtaagtggccatttaaaagctattgatctatacattctctgtgtatgtatgtatacatatgtgtatatatgtacacttgaatacatgtatatgagtatatgtatggatcatcacacacaaaaaattcacttagaatatctacttagaatatcatttctacttagaatatcatttctctgttacctgagggtatagataggtagtataatacgtactaatgttgtaacttatattatggtactaatgttatagctagtactataatataagcactagttatatgtactagtgttataacttactgcctctgcaaaagacaaagaagasgcaagcagattgggtggaaaagaatagtcatactatggtcaaaagcaagtaccagttagcatgttaggagctgttaaggtgaactactggagattgcctcataattcccttctgtatggaacag

SEQ ID NO: 855108 - DNA, 624 bp, Homo sapiens
aaataattattacaactcaataataaaaaggcaaataacacaatttaaaaatggacaaaggtgggcatggtggcacatgcctgtagtcccagctatttgttgggctgaggcaggaggatcrtttgagcacaggagtttgaggctgcagtaagccatgattgtgccactgcactccagcctgggtgacaaagtgagaccctgtctcaacaaaaagcaagggaggcaaaggatatgaatctccaaataaaatatgccaatggccaataaacacatgaaaagatgctaaacatcattagtcattagagaaatggaaaccaaaacctcagtgagataccacttacacacacttgagaggctataatgaaaaaggcagatagcgttttggcaaggatatagagaaagtagaaccctcatacattgctggtgggaatataaaatgtcacagcccctttggaaaacagtttggcagtttttcaaaaagctaaattgaaagttaccctttgaccctctaattccactcctagatatatatccaagagaaatgaaatacatatgtccacacaaaaacttgcacatgaatgttcatagcagcattattcacagtagcccaaaagtagaaacaat

SEQ ID NO: 855109 - DNA, 470 bp, Homo sapiens
tgcttattcaaacctttgcccatttttaaaaatagggtaatttgtcttatgattgagctatagaggttctttgtgtattctagatgtaaatcccttgttagatgtttgtattaaaaatattttttatcattctgtggcttgtcttttgaagaggagatgtttttaattttgattaattcaatttaccatttttttattctgtggtttgtatttagcctaggaagtttctgtttattccaatattgtaaaaattttctcttctgctttcttttagaagtttataattttagcttttatgtgtcggactattatctattttgagttaattattgtgtgtggkgtgagataggggttgaggttcattttttttcatgcagaagttttgttgatccatcacaatatgcttgtaggctatttgcatttattattttgtgggaagtgtctgttcaagtcttctgcccatttcttaa

SEQ ID NO: 855110 - DNA, 457 bp, Homo sapiens
ttatttgtattagttatctatcactgtgtagcatattagcccaaaatgtagtggctcaaagcaataaacatttatcatctcacagtttctgtggtcaggaatttgggacraggcttatctgtctgagggtctgtcatgtggttgcagtcaagatataggttgcagatacaatcatctaaagccttgactatagctggaggatccgcttccaagatggcgcactcacatgggtgttgtcaagagtcctccatactttccacagggatctcttcttacaatatggcagcagattacccccagagcatgcgagagaggagtagcaaggaggaagctccaatgactttcatgactgattctcagcagtcatgtactgttccttctaccacattccatacattagagggaagccactaagtataacccacattcaaggggcggggaattaggctccaccttg

SEQ ID NO: 855111 - DNA, 523 bp, Homo sapiens
ctgtcgaaaatggtgggaatgttttcctctgtatatactttctcaattaaaggcacttttatttaaacacacagccatttgatacacagcaaatgtttgcttacccagaactcaaccaaacacaatgtttcattagttcttccgttcatgtccatgatgagcctgttatcttataatatcttgaagtttcctttgaatcatcaatgaaagattaaattccgttgggtgtgttttcagtgttttgcacttgcatttgaattattttgtacattttgacaacataagtccaggatggcaaacgatatctcccagcatactttcagccctgccatttcccctgcttctgctcaggtgcacactgcggccattcttaattgatcagggaactccttcctccagatctcagtcctgscctttcacccgacaactactaaaggttgggtgatgctgatactaaaatatggaataacacttatttgccattacaaaacagataagtttttgtaaaaagaagattcagtta

SEQ ID NO: 855112 - DNA, 645 bp, Homo sapiens
accttctgagcgacatttttctgaccatccaatcaaaagtatttatctgtgtcaatctccctcatactacccttcttgatcctcttcatagcacttattattccaagcaaccttgtataattttacrgattacattttatatattgtccaccccttcccctactgtaagctcaatgaggacagtgaatttgtcttattcactgctgtatccctggttcctaggacagtgtctagcacatggaagctactgtataattatttatatgtttaaaactatatttattctttggaaatttatttgtgcagtactgtcttagttatgataactttagacaaccctacctattgcagatgtaacccccaatccccaagtctctgtggctttaatgcaacaaaagctcatttcttgtttaggtaagagtccaggaaaggtgtcctggttggatggcttttgtctaaagtcctggattcatggatccaacttccttacatcctgctctcacaccatttgcaatacctggcttccaaggttgcttggttcatctggaatgagtcaaagaagggaagatatatgggaaggtttatgggcagactgggaagtggtatacatcacttccttcatattccattgtctggaattcagtt

SEQ ID NO: 855113 - DNA, 535 bp, Homo sapiens
ggtcatttattatctatttaaaaaatcttctttcagtaaagatgttctgaaaaggtcagagctgctgtcagaccccagtgataaagaacaggatggtgctttgtaaaatggcagttcttgcagtgttaaggactgtaaactttttaaattgaattgtaaaagtttataactaataaagaaacccttttaggtgattttaatgttatttggtcgtttaaaatatcccacagatggaaacagatagtaaggtcatgaaatgggtgagtattcagcatcataaaatgcaaacacattttctccatgttagagatatagcaatgtagtcccgataatgctgtaggtcattatctagtttctactaagatcagttacatcacatgccaatataaacagaggaggggctgaggcttctgtttttagaaagggacttagaacagcyaacagatcttctttgggtaaaataaataaatgtttctcattttctccttcaaatgaccttgagcagttcatctcttgggatggctaaggtatagtt

SEQ ID NO: 855114 - DNA, 521 bp, Homo sapiens
aaaggaatcagggatgcctcccaggtttttggccaactgaagggatgaagctgccatttcctgaaatgggaagtctgtaggaggaggtagtttggtttccattttggacaaattgaattcgagatgcctatatgtcatccaagtggagacgccaagtaggcagttgaataattggatgagtctagaatttgggagagaagtctggactagagacatgaaattgggagttattaatatatatgatatttaaagctaaatatcatatgatctatggtatttaaagctaagagactggatgagatcactaaaggcatgagtatagatagaaaaaggaagaggtctctggattgactgtgactagttttgactagctcgataaaatttagytgagtcaatgaacaagatgaatgagtcataatagcaatcagtgcactcctccacaaaatgatagtgcagataaaaagcactaaatgtgtaattcatggaagtaacaacatggagtgattcctaatttgaaatgt

SEQ ID NO: 855115 - DNA, 521 bp, Homo sapiens
aaaggaatcagggatgcctcccaggtttttggccaactgaagggatgaagctgccatttcctgaaatgggaagtctgtaggaggaggtagtttggtttccattttggacaaattgaattcgagatgcctatatgtcatccaagtggagacgccaagtaggcagttgaataattggatgagtctagaatttgggagagaagtctggactagagacatgaaattgggagttattaatatatatgatatttaaagctaaatatcatatgatctatggtatttaaagctaagagactggatgagatcactaaaggcatgagtatagatagaaaaaggaagaggtctctggattgactgtgactagttttgactagctcgataaaatttagctgagtcaatgaacaagatgaatgagtcataatagcaatcagtgcactcctccmcaaaatgatagtgcagataaaaagcactaaatgtgtaattcatggaagtaacaacatggagtgattcctaatttgaaatgt

SEQ ID NO: 855116 - DNA, 594 bp, Homo sapiens
cagatcattcctgggaccacagagaagggaaaaaacctttcaacacacagtaagaaagttggacttccatatccgtgacaccgctcccccaaatctgttcaacagcaagaacatggaaaatttctccccaacttagggtttctacaataaaaaaaaatgagatgatgtggacaaccagcttcttaaccaccttgggtttcttggcagtaaacctgtctctgcctcaagccacaggaatcatcaggagtgcctaaagaaatatctctgaggacagagacaaagagcagagatgggaatactatctataaaactggaaacgtctctgtaactcagccaaaagagacatcaaatcagagtggctgttcaacagcaccatgttataggaggtttgtgtaacagcttccctggcacaaacccctagccagccttcccgcactcaagatatccgttttgggatatcctcccattcgagaagggaggcactctgattgcctagaaccaaggaaatcttggkcttaagctgccatctagtgaccaaaaggaggcagtgacctagctggggtgataaaaataatgacaattaacagctaaatt

SEQ ID NO: 855117 - DNA, 500 bp, Homo sapiens
ttgtgctttctcattttaggatggaagaagagttccaggaaactatctctcgagtattacctcctttttgacatctaatcaaataagaaagtgtgattttaatttattttggttaagacattttttccaaggaaaaaattcaacactactaaaattacagttttctcacaaagaaaaatgtaacattatcaattaattacaatagcttttagagctgattcataacaaactctaaatcaagtcttatagaaattattcagtattatcaaaatccatcaggacttcatcaaaatttgaatcttctgctcttcaaaatacactattaaaataaaacaagccacagactatgtgacaatatttgcaaaatatatatatgataaaaaatttgaatctaaaatatatactyttttacctttcaaaatttaacaatgaggaaaaaatagaaaaaatgagcaaaaaatttgaacaagcacttcaacaaagctaatatatagctggca

SEQ ID NO: 855118 - DNA, 636 bp, Homo sapiens
gtatagtgcaaatataacttttatatgaaccaggaaaattaaaaattatatgacttactttatttccatattctctttattatattggtatggaayagaaatggggttgtgtacttcctgaggtacatacctctctaaggtatgccagtataaaggtgatttgtaccataagaaaacacctagggcatctacagaaataaaaaaatttaaaaaaataaaagaagtaaaagaaacataagggagtatatacaatgaaccagatcttggggcatctgaaagattaaatgacataaggctactagggttgagttactacttaccatgtcacatccatatctgcagactttagataaagatgcgtaatcttacagactgaagtagtttgttctgtggctggtcaaatagcatacagggaaaaccactaatcttcacattcagcttttgctatcatcaaaatcaaactaaactagacaaaatttgacaaccttactttcaatttcttctcaccagtgaaatccagtgtttgtgttcaacccttccttaaagcttttccaataacctttggttactatgaatcaactaggtagttaaagccattgaggaattttttatctgaaaaatgaagttttgggtcag

SEQ ID NO: 855119 - DNA, 636 bp, Homo sapiens
gtatagtgcaaatataacttttatatgaaccaggaaaattaaaaattatatgacttactttatttccatattctctttattatattggtatggaacagaaatrgggttgtgtacttcctgaggtacatacctctctaaggtatgccagtataaaggtgatttgtaccataagaaaacacctagggcatctacagaaataaaaaaatttaaaaaaataaaagaagtaaaagaaacataagggagtatatacaatgaaccagatcttggggcatctgaaagattaaatgacataaggctactagggttgagttactacttaccatgtcacatccatatctgcagactttagataaagatgcgtaatcttacagactgaagtagtttgttctgtggctggtcaaatagcatacagggaaaaccactaatcttcacattcagcttttgctatcatcaaaatcaaactaaactagacaaaatttgacaaccttactttcaatttcttctcaccagtgaaatccagtgtttgtgttcaacccttccttaaagcttttccaataacctttggttactatgaatcaactaggtagttaaagccattgaggaattttttatctgaaaaatgaagttttgggtcag

SEQ ID NO: 855120 - DNA, 647 bp, Homo sapiens
gcctgtcggagggggtcattgcgggaagggagagcatcaggaagaatagcttatggatgctgaacttaatacctaggtgatgggatgatctgtgcagcaaaccaccatggcacatatttacctatgcaacaaacctgcacattgtgcacatgtactcctgaacttaaaataaaagttgaagaaaaaaaaacacttaaatgaaagaactgaaacttttaaaataccagacaaaaacttaaagaaaactctggatattgttgtagtcaaggaattcatgactaatacctcataagcacaggcaacaagtacaaatataggcaagtggaacttaaactataaagcttccacccagcaaaataaatagtcaacagagtgtatagacagcctgcagaatgagaggaaatacttgcaaccccagtgagatatcatctggcagtagtcagaatggctattataaaaagtaaacaaacaaaaaacaccaaaaaaacctaacagttgttggcaaggatatgcagaaagggaaacacttataaactgttggtgggaacgtaaattagtaagacctctatagaaaacagtatgaatatttcttgaagaactaaaaatagawctgccatttgatccagctctcactactactgggtatc

SEQ ID NO: 855121 - DNA, 612 bp, Homo sapiens
gacactggatactccttagagtggtagggtgagatgaaggtgatggatgagaagttacttaatggctacaatatacaccatttgggcaatggatatgctataagcccaarccactacacaatccatccatgtaacaaaactgcccttgtactccttaaatttatacaatttatttaaaaaataaattttaaaaattaaaagaaagatagacaaataggtcaatggattataatacattcagaaataggcccaaatgtacatggccaactgagattttacagaattggaaaggtaattcagtggagaaagaatagatttttcaacaaagggtgctggaaaaatttggatatccatgtggaggaaaatgaagtttgatccattgcttgcaatatatacaaagaaaaactcaaaatggattataaacataggtacaaaacctaaaatatataacatttctagaaaaaaataaatgagaagaaaatttttgtgttccttggatgggtaaagatttcttagatttggcactaaaagcatgattcatacaagcaaaaactagacttcatcaaaattcaaaataccttctcttacaaaacaccattaagagaatgataa

SEQ ID NO: 855122 - DNA, 612 bp, Homo sapiens
gacactggatactccttagagtggtagggtgagatgaaggtgatggatgagaagttacttaatggctacaatatacaccatttgggcaatggatatgctataagcccaaaccactrcacaatccatccatgtaacaaaactgcccttgtactccttaaatttatacaatttatttaaaaaataaattttaaaaattaaaagaaagatagacaaataggtcaatggattataatacattcagaaataggcccaaatgtacatggccaactgagattttacagaattggaaaggtaattcagtggagaaagaatagatttttcaacaaagggtgctggaaaaatttggatatccatgtggaggaaaatgaagtttgatccattgcttgcaatatatacaaagaaaaactcaaaatggattataaacataggtacaaaacctaaaatatataacatttctagaaaaaaataaatgagaagaaaatttttgtgttccttggatgggtaaagatttcttagatttggcactaaaagcatgattcatacaagcaaaaactagacttcatcaaaattcaaaataccttctcttacaaaacaccattaagagaatgataa

SEQ ID NO: 855123 - DNA, 552 bp, Homo sapiens
taaaaatagctacatctattcaccttatgcaagtaatacacagcatatttcttaaactacactttgtcaaattctattttaataaactttctaattttctaccttttaaagaggctttttttaacaccttcattgcatagagctgcccagcatcaggaccggtcttctttctaacaagaaaaacctaatagaaaattgaacaaaaaaaaaaaggaaaattcacatttctagtcattcttgctctacacaaacacaccagcatacacttatatccttgcattttctctaattttataaacatatgccttcccatagagggaagggagagatagtgagagatttgttgaaggatgcaaaattaccctgatctgatccccatacattatacgtattgaaacttcactatgtaccccacgaatatgtacaactatttgtcaatttaaaaaaataaatgaaaaaagttataccttctcctataaattaktctataatttacattattattttctcacttttcttagatttaatttagtttttaatcaaaaaaactgt

SEQ ID NO: 855124 - DNA, 631 bp, Homo sapiens
atggcatttaaaaatttgtctatgaagattctagttcttttcttccaggatgacttggaggccaagtggcttgagatgatgctagagatgaccrtactcactggtttgaaagagttggttgttagatccctccctactgtattcaccaacttgacattgccttttctactgcctttgaaattgatttaagctagatgattaataccggagttttgaaagatcccacttggttaattggattaatatagcccaccctatgttaattattttttgtctacatgtatatcaaatcctgaaaatgacatgttaaaatcacaatttatactaataaatgtgttggagtctcacttttttttttaatatagtgttatttggtatataaatgatcatttctcttaggtgttctgaatagcccatatattttattattctacatcttctgtcttatttgttaatctaacatatttgcacttccttttttcatcttaacatttcctagcacatctttgctccctcttacactttctacatctataatctcaaatgataaatggtaataaatgtgttaattacagcaaattcaattgcaatgctgggggactgctgataggagacaaatagactgtgggaa

SEQ ID NO: 855125 - DNA, 638 bp, Homo sapiens
gtctaggagaaataggctataccatatagcctaaatgcgtaggaggctacaccacctaggtgtgtgtacattcagtctgtgctgttcacacaacaatgaaattgcctaaggacacatttctcagaacatatccctttcagtaaaaaatagataaatgtatttcatttaagagtgtccttatttaaataaggtatgctgttatacattaacaaaaaagccatgggaatctacataagccctaccagatttaataagtttgttgaattaatggtcgaaaagaaaatattaattaaatttctatgtacatagcaattatcagtgaaaactttttttttttgagacagaatcttgctctgtcacccagtctagagtgcaatggcacggtcttggctcactgcaacctctgcctcccgggttcaagcgattctcctgcctcagcctctggagtagctgggactacaggagcatgctgccacaaccggctaatttttgtattattagtagagatggggtttcactatgttgaccacgctggtcttgaactcctgacctcatcatccaccygcctcggcctcccaaagtgctgggattacaggtgtgagccactgcgtccagcccgaaaactaatttttaaaagt

SEQ ID NO: 855126 - DNA, 600 bp, Homo sapiens
tgttttccattacttttttttactctttttttcattcattctccacctttctttgtttttactttttttgttgttttttctactatttgtttgtttgtctgcattgtcatctgtccatgcttctcattgccagtgattctttgtagcagatattgttattccattgggaattcacaaagctaaagaaaatgctgacagccattgtttcatattaacataggtttgaatgtacgagagaaacatcaatcaattaaatattttgaaaaataggaatattgggaaagttcttacacataagaaaatcaactatctcatgctacagctgtgaaaccccagagatgcttgatactttctatgttttgtgttgtcataacaaaataccacagactaggtaatttataaataaaatacatttatttcttacagttctgaagcctgggaattccaaggttgagggacccacacctggacaggaccttcatactgtgtcattccatggcatgakgcaaaagggcaaaagagcatccatgagagcaagagaggaaggcaacaaaattatcctcttatcaggcacgcactctggcaataaagccattaatg

SEQ ID NO: 855127 - DNA, 612 bp, Homo sapiens
catgttagaagtgccactgtttacacagcagaacctggaggttcatctccatgaagtggtttgtggaaaagctagagctgtgggatccacaygtctcggctcagtcctgtgccactcgctattttacttaagcaactctttccccttctgagcctcagtttcctcatcttccatctgaggaactggatgagagtagtgtctttcaaactgcaaattttgatccattcataaataataaaatcaatctagtgggttgcaaccttttcttttttttgagatggagtctcgctctgttgcctagactagagtgtaatgccgtgatctcagctcactgcaacctccgcctgccaggttcaagtgattttcctgcctcagcctcctgagtagctgggattacaggcacccaccatcatgcctagctaattttcgtattttgtagagatggggtttcaccacgttggccaggctggtcttgaactcttgacctcaggtgatccacctgtctcgccctcccaaagtgctgggatcacaggcgtgagcctctgtgcctgacctgcaaccattttttttaaaatggagaaatagaatagtttagaatacaaaatgccaggg

SEQ ID NO: 855128 - DNA, 604 bp, Homo sapiens
cttaggaagtgagtgtagtgagcatcatcagtaatgggacgaactgggattccacaccctgcgatgggaggcaacgagaacagtgccgcttctgcactatccctgcccaagatgcataactggaaaagtatcatgaagacacatcggataaactcacactgtgaggtgttctacaaaatagctgctcatgatcttccaaagtgtcaaggtcatgaaaatagtcaaggactgagaaactgtttcatgctacaggagactgaagagacatgacaactaagcacaatgattctaagcaggagtctttcaggactgaaaaaacgttatgaggctgttggtgaaacttgaatggggtttgagaattaaataatcatattgtatagatgttaacttcctgattttgatggttgcgttatggttatataggagaatatccttgcttgtaggaaatactcactaagtattcagggatcctaagccatcagactggtaacttatttccaaatatyttaaaaggaaaaaaatttctttgaattgtacttgcaactcttctttaagtttgtgaatattgcaaagtaaaatttaatttttaaatataagtacccaa

SEQ ID NO: 855129 - DNA, 638 bp, Homo sapiens
acagggttgcgacatctttgcaaccratattagctatctaatgctacgatacaaattactccaaacctagtggcttcaaaaagcaatcattatttgtgatctcactgtgaatttgttttttaaaaaatatatttaccagtttattataaagaatattacagagaatacagatgaagagatgtacgaaagaagaggcacagagctttcctgcctttctcaggcacaccaccttccaggcatttccgcatgttcgactatcaagaagctctttaaaccttgtccttttgggtttttatggaggcttcaatatgtaggcatgactgattaaactatcggtcattggtaatcaaattaatcttcagcccccctttcctctccagaggttggagatggatagaaaattcagacaaggcctatgggaatcaatgctcactttctcatcatgtttgaagcctcaactggaagactcaaaggctggaggctggaattatctgaagactcattcactcacacattgatattgactgttgcctgggtttagctgaggctgtcagaatggtttctccacatggcttctccatgtgcactgagactcatcacaacatggtggataaatttttagaacaagcatcctcact

SEQ ID NO: 855130 - DNA, 546 bp, Homo sapiens
gtagtcccagctactcgggaggctgaggcaggagaatggcgtgaacccaggaggcagagcttgcagtgagccaaggtcgtgccactgyactccagcctgggcaacagagcgagactccgtctcaaaaaaaaaaaaaaaaaaaaaaaaaaggagagtaaggggtcaggtctgaatttggtgaaatacgtaaccaaatcaacaatgttttaaatcaaaagaaactgaatgaccaagattaaagtcggtgtgtagatggtgagagggggtggttttgccctcaaaggatatgagttcagtgatttttttttttaatgagattgttttatgtctggtgtggacgtgaccataaatataaatgtgggggccgggcgcagtggcccacacctgtaatcccagcattttgggaggctgaggcgggcggatcacctgaggtcaggagttcgagaccagcctggccaacatggtgaaatcccgtctctactaaaaatacaaaaattgccgggcatgatggtgggcgcctgtaatcccagctactcgggaggctga

SEQ ID NO: 855131 - DNA, 553 bp, Homo sapiens
taatttggtaggaataacaatgaatctataaattgctttgggcagtatggccattttagcaatacagattcttcctgttcatgagyatggaatgtttttctattgtgtcatctccaactgctttcagcagtgttttgtaattcttattgcagagatctttcactttcctggttggctgtattcctaagtattttacttattttgtggctaggaaaataataatgtgaataggattgcattcttgatttggatctcagcttggaagttattggtgtataggaatgctaataatttttatgcattgatttgtatcctgaaaccttactgaagttgattaccagtatctggagactttgggcagagacgatggggattttaggtatagaattaaatttgtgaagagatatagtttcacatcctctcttcatgtttggttgccttttattttcttctctttactggttgtcttggctagcacttccagtactatgttgaataggagtggtgagagtggtcatacttatcttgttctgtatctcaagggaaatgcttc

SEQ ID NO: 855132 - DNA, 589 bp, Homo sapiens
cattcatttcttatatcatttttttagacttccttgcattgggcttcacctttctttggtgcctgatcagcttaataatctcctgaattctttttcaggtaaatygtggatttcttcttggtttggatcaattgctggtgaactagcgtgattttgggggtgggtgttaaagaggcttgttggttttctgattccttctcatttgggtaggctgtcagagagaaggcccaggactgaaggctgttgttcagattcttttgtcccacagcatgttcccttgatgtagcactcttccccttttcctatggatgtggcttcctgtgagcagtacggtgattgtctcttttctgggtctagccacccagcaagtctacccagctctgggctggtactgggggttctccgcacagagtcctgtgatatgaactatctatggatcgctcagccatggataccaatgcctgttctggtggaggtggcagggagtgcaatggactccatgaaggttcttagcttggtggtctaatgctctttttgtgctggttggcctcctgccaggaggtggtgctttccagacagcatcagctgt

SEQ ID NO: 855133 - DNA, 625 bp, Homo sapiens
tctccagccaattgatttttgaattttgaattaaaggcaccaagaacactcattggagaaaggatagtctctttaatatatggtgctgggaaaactggatayctatgtgcagaagaatgaaactaaactcccacctctcaccctattcaacaataagctccaaatgggacaaataaccaaatctaagacctcaaactgtaagaccactagaaaaaacaatagtagaaacacttcaggacattggtctgggaaaagattttatgaataagacttcaaacacacaggtaacaaaagcaaaaacaaatggggctatataaaactaaaaaagctctatataacaaagaaaataagcaacataaagaaaagacaacctacaaaatgggagaaaatattttcaaactattcacccaataggggattaatatccagaatacacaagaaactcaaatatctcaacagcaaaagaacaaacaattcaataaaaagggggcaaataatatgaacagacatttctcaaaagaagacatacaaatggctaataaatcaatatacaaaaacactcaacatcgctacgcatcagagaaatgcaagtcaaaaccacagtgagggctgggcgcggtggctc

SEQ ID NO: 855134 - DNA, 625 bp, Homo sapiens
tctccagccaattgatttttgaattttgaattaaaggcaccaagaacactcattggagaaaggatagtctctttaatatatggtgctgggaaaactggatatctatgtgcagaagaatgaaactaaactcccacctctcaccctattcaacaataagctccaaatgggacaaataaccaaatctaagacctcaaactgtaagaccactagaaaaaacaatagtagaaacacttcaggacattggtctgggaaaagattttatgaataagacttcaaacacacaggtaacaaaagcaaaaacaaatggggctatataaaactaaaaaagctctatataacaaagaaaataagcaacataaagaaaagacaacctacaaaatgggagaaaatattttcaaactattcacccaataggggattaatatccagaatacacaagaaactcaaatatctcaacagcaaaagaacaaacaattcaataaaaagggggcaaataatatgaacrgacatttctcaaaagaagacatacaaatggctaataaatcaatatacaaaaacactcaacatcgctacgcatcagagaaatgcaagtcaaaaccacagtgagggctgggcgcggtggctc

SEQ ID NO: 855135 - DNA, 589 bp, Homo sapiens
aggttgtttactctattgatagtttcttttgctgtgcacaagctctttagtttaattagatcccatttgttaattgttgtttttgctgcaattgcttttrgcatcgtcatcataaagtctttaccaggtcctacagccagaaatctatttcctaggttatcttccagcatttttatagattttgatttttgatttaagcctttactccatcatgagttattttttgtatatgatgtaaggaaagggtccaggttcaatctcctgcatatggctagccagttatcacagcaccatttatggaatagggagtcttttccacattgcttgtttttggtaaattttatgaaatatcagatggttgtgtgtggcattatttctgggctctttattctgttcctttgatctatgtgtctgttttgtaccagtactgtgctgttttgtgtactgtagctttgtagtatagtctaataatgtgatgcctgcagctttgttatttttggttaggattctcttggctattcaggctcttttttggttccatatgaatttttaaatagtttttttatacttttgtgaaaaatgttggtac

SEQ ID NO: 855136 - DNA, 517 bp, Homo sapiens
aggttgtttactctattgatagtttcttttgctgtgcacaagctctttagtttaattagatcccatttgttaattgttgtttttgctgcaattgcttttggcatcktcatcataaagtctttaccaggtcctacagccagaaatctatttcctaggttatcttccagcatttttatagattttgatttttgatttaagcctttactccatcatgagttattttttgtatatgatgtaaggaaagggtccaggttcaatctcctgcatatggctagccagttatcacagcaccatttatggaatagggagtcttttccacattgcttgtttttggtaaattttatgaaatatcagatggttgtgtgtggcattatttctgggctctttattctgttcctttgatctatgtgtctgttttgtaccagtactgtgctgttttgtgtactgtagctttgtagtatagtctaataatgtgatgcctgcagctttgttatttttggttaggattctcttggct

SEQ ID NO: 855137 - DNA, 563 bp, Homo sapiens
gttgtttactctattgatagtttcttttgctgtgcacaagctctttagtttaattagatcccatttgttaattgttgtttttgctgcaattgcttttggcatcgtcatcataaagtctttaccaggtcctacagccagaaatctatttcctaggttatcttccagcatttttatagattttgatttttgatttaagcctttactccatcatgagttattttttgtatatgatgtaaggaaagggtccaggttcaatctcctgcatatggctagccagttatcacagcaccatttatggaatagggagtcttttccacattgcttgtttttggtaaattttatgaaatatcagatggttgtgtgtggcattatttctgggctctttattctgttcctttgatctatgtgtctgttttgtaccagtactgtgctgttttgtgtactgtagctttgtagtatagtctaataatgtgatgcctgcagctttgttmtttttggttaggattctcttggctattcaggctcttttttggttccatatgaatttttaaatagttttttta

SEQ ID NO: 855138 - DNA, 612 bp, Homo sapiens
ggtttaaagctcacggggtttctcctaatccatgcccctgtaggacatttcatcaggagcctccacttacctagttaagtggcttgaaagatgaccccaattctgaaatgagatgccaccctgagcagagggccaagccaacctgtgcccagattcctgacccagggaactgtgagataatatattggtgttgttttaagctggtaaatttgtggtactcaaaaagcaatgcaactttaaataaaaatatcaactggaataaactaattttatttatatatgtgcatctatttgtgtatctgtgtatgtatacatacatcgacaaagaggctgtccctaaccaaactctagacaggctcctctgagctcatttttgactaggcctcatccttggtgtgttctccagcgcccagttttagtaagactcccgccaagttggtttagccagaatctcccacccttgagatctgatccaagtccttattttccaccatcccccaagtgattatctgatcaccccagcttgcattcagcaagaatcccgtcaagtccatttagccagaaatccttcacctcgctgtcttattkcagtaattttccatcatccactga

SEQ ID NO: 855139 - DNA, 657 bp, Homo sapiens
aagaactattcagtcagataaggtttatttctagaaacacaatttctagaaataaaaaataaaagttgaaatggataacttggtggttggataaatagcagattagattctacttgctagagaattagtgaacmgattttatatctaaagacagtatccagaatacagcacaaatggtcaaagagatggtagagagatgaaagacagattaagggctatgaaggagagaatgagaagggctagtatgtctcccagaatgagaaggcaaatagaatggaagtcagacaatgtgaaaaagaaaatgcctgagaattttctgaactaaaaaaaagtcacaggtaggctgggcgcagtggctcacgcctgtaatcccagcagtttgggaggccgaggctggctgatcacttgaggtcaggagttcttgaccagcttggccaacatggtgaaaccctgtctctacaaaaatacaaaaattagccaggcgtgatggcgggtgcctataatcccaattactcgggaggctgaggcaggagaatcacttcaaccaggaggtggaggttgcagtgagccgagatcacgccactgcactccagtctgggcaactgagtaagactccagttccccgccaaaaaaagtcacaggtaaagaaaattcaac

SEQ ID NO: 855140 - DNA, 652 bp, Homo sapiens
aaaatactgaagataatgactatatgttatataatttccagaatctagatttataacattattacaaactttatacagtataattttaagtctaggccgggcgcggtggctcaggcctgtaatcctagcactttgggaggccgaggcgggcggatcacttgaggtcgggaatttgagagtagtctggccaacatgacgaaaccccgtctctaccttaaccccggctaaaatacaaaaattagctggggatggtggcacacctctataatcccagctactctgaaggctgaggcaggagaattgctggagcctggaaggcggaggttgcagtggtccagcctgggagacagaaccagactccgtctcaaaataaaaaaataaataaataaaaataaatctatagctggaaaattaaagaactaaataataataacaatcatcataataaaaattaatcatccaaaaaagagaggaaattaagagaaagtggaacatagagaaataaaaaagtaaaatgatttaaaaatccaaatatttaaaaatccaaatatataaataatcactggattaaactcagtttaaaacacatacagacaggccgggcgcggtggctsacgcctgtaatcccagcagtttgggaggccgaggtggg

SEQ ID NO: 855141 - DNA, 502 bp, Homo sapiens
atctaaagtcaagacaaatgaaagaatattaagagctgtgagaaaaaagcatcagataacctataaaggaaaacctaccaattaacagcagacttcttggcagaaaccttacaggccagaaaggaaaggggtcccatctttagcctcctgaaacaaaataattgttagccaagaattttgtattcagcaaaactaagcttcataaatgagggaaagataaagtgttttttggacaaacaaatgctgaaagaattaatcactactaagccagcactacaacatgcctaaagaagttctaaatctttaaggaaaacctcaaaatacaccaaagtagaacctccttaaagcataaatctcacagggcctataaaacartaacacaatggaaaaaaacccaaggtattaaggcaacaactaacatgatgaatagaacagtacctcacatcttaataccaacgttgaatgtaaatggcttaaatgctccatttaaaagatacagaat

SEQ ID NO: 855142 - DNA, 638 bp, Homo sapiens
aatcatttaagaatcacagacacttctacatgttttatttctacttttgcctgygataaaagacatgataattagatcaaacctgaaaaactcaactctaaaataagtgaatccatcacttattaaccaaatcattgtttcctctggcgtaacttacaattttctttaaaacacgacttttacttcttaaattgtgtttgagagcacagttgaagttggcatgattaccagtgagactggaaattttgcaagcttagacatgaaatgaacttaagagttggggagaattacctcataaccttgatgacatattacagaaagatagcatatggtcctaaagatgtcagaattgaaatataaatgttaaaataactgagtttgcctatttatacaaagaggcaatttttgaaattcaattaaatttcaccggctacagaacaattctgtgattctaaattgtggtttttagatgaaagcttgaaacacagttcattcattcaacaaataactaatgggtacttattctgcataagatgcagaagattacaggatttaaaaaaaaacagattcaagattctgtcctatttgagcttatactgagtcacttctccaaatctctatatacctaagtgactata

SEQ ID NO: 855143 - DNA, 643 bp, Homo sapiens
aatacataaaactatttttataaataagaacaaagttggaagacttgccttatctgatttcaagactaactacagagttgtaaaaatcaagacagcttggtgttagtgaaaggccagaaataagtcaatggaacaatggagtacataatgggagatacccatactttcaatataaacctgcaggaaaaccatgccctaaaaatgttgagggcccatctaaaactttaatttggggagattgtgttaactcacatgcagtaatattaaggcaccagatatcgggcaaaattcacccccgatatttcatgtaggttcttttctattttccctaagtgttggccagtctgagaaataaagagacagagtacaaaagagagaaattttaaagctgggtgtctggcggagacatcacatgtcggcagcttccatgatgccccctgagccgtaaaaccagcaagtttttattagtgattttcaaaaggggagggagtgtatgaatagggtgtgggtcacrgagatcacacgcttcacaaggtagtaagatatcacaaggcaaatggaggcagggtgagatcacaggaccacaggaccggggtgaaattaaaattgctaatgaagtttcaggcatgcattgtcactgata

SEQ ID NO: 855144 - DNA, 673 bp, Homo sapiens
tctttccccacagagagcagcagggtcccagcaacagagggaagacaagtcacaragctatctgctctggactggaggaagagcctttgccccaagcccgtttcagaggtagctgccagaggggcattcctgcagactttagttgcactgcagctgggagtcagaagacaatgtctatatgaactgaagcttgtgagctctgcaacagggggatgataggaaagtggattgcattcctgtctgtctatggcaagttgcttgtgaggccccctgtgttacccctatcccagagacttcagtgcatcccaatataaaatctcctcaccactcccccacccatgatggtgggtgcttccactcattatcaacctacctaaggatgagccagatcttaactttaagcaccacctacctgactgaagattgaactgcaccaccaaacaaaaaactttctgtaagaagggcatagttctagtgtccaagaaaagcatcctgagacttctgcactcctagcctcacagaagatagtgagtcagctcatatatccaatacttctctataacaaggagcatttgagaaagccacttaacaaaagctacccataaccaaggaacccatacagagtcttggccctgaaagcatgcagaaacaaagtcaaatgatcagaaaaaac

SEQ ID NO: 855145 - DNA, 621 bp, Homo sapiens
aaacctggatggcaagtataaaacctagtaaagatagactccgagccttacacaatcctctatgttataagcagtggagatttgtgtaattttaattatacaggatgaacttgaatttgattctttctaaaagaaacacaagttagactccaagaagcattgaagtgactgggatgcttttcattctttatatcaaactgtatgataaccatgacattctggatacctgcagagaaagagctatttgactctttggtactgacatatttctgctaccaacagttaaatttctctgcttaggtagagtcagcagtgtttgtgcccagactggctcacaccagttgtgcttgttttggcaaatacacaatttattattagataaaccaatgaaatgagaagtgtgaaaagaaagagtcattgattgtattttaaaaagataaaacaagtttgaatgctttagaatacttgaaaatcacttaaactattgtttagttggtgtgggtgagacaackgttaaaatcagagattttatgaaaaacataattattacttaaattagctatttataacataattattaaacaaaaaacataattattacttaaattatgcccttaaatt

SEQ ID NO: 855146 - DNA, 590 bp, Homo sapiens
attaaaattgtaatattctagccaagaacctatggaagtgttactattctagtagaaagagaatgtagaatagtacctaaaagcatgggtcccaaaatcactgtttgatttaaaatctcagttctaccagtactcagttatataatttgaggtaagttacttaaataatcttagtctcggttttctgcaaaaaactgtaaaatgaaaataagcagagtaactgcctcagcatgttatggaaaggattaaatatgtgaatgttcatggagcaacaacagagtggaagagagtgcatacacacaccaataacacacacatgtgattagttttagtttcctctttttcacttaactacttggaaagaaaggaagatttttcactgtattacatatgttaccttttgatccgttaaaaattactcttcactatttgcttaaatatagctgcaaataccaatttataatggcatttaaaattacatgagaaatatggatggtgatattttattttttaggaaaaaaawatctaaaataatggaaatatatatctgcactgattataactactttgctgtgtctagcttccttcac

SEQ ID NO: 855147 - DNA, 657 bp, Homo sapiens
caggagttcgagaccagcctggccaacatggagaaaccccatctctacctaaaatacaaaaattagctgggtttggtggcgggtgcctgtaatcccaactgctccagaggctaaggcaggaaaatcccttgaasccaggaggcagaggttgcagtgagtcgagatcaaaccactgcactccagcctgggtgacagagcgagactctgtctcaaaaaacaaacaaacaaacaaaaaacactaagactctgcggtgcctgtcatacatccttttagaccaaagcttcatggaaatgtaattatagggagatgagatgacaaggtgcttgctttatagaaaggtaaaaatattccaagtaaataattaagtgggacattcttgaacagagtttgtgatagttctgggattagagaaaaatgagagggagacagtttctttctggaaaaattatcaaaagaaatgttgtcaataattttacatatctgatgataaatatgtttgaatcaaatcatttaggtatgtgaacttagaaagagctctatagaactgtgacaaatgttacagctcaatgtcttcctcattgttaaatgaaaccaccagaattactgggcttagaagaatcattgagtctgaaccccgttttagctcccaagtgaga

SEQ ID NO: 855148 - DNA, 590 bp, Homo sapiens
gtgttcccgtgaagaagcaaattgtttcttttaccagaatattcatcagagatttgtraaattttgaaaacaacacaaaaccaccagtgactttcttgtgattcttcccttggactgcatctaatttcagcttctttctttctgctctttaaaattgctaatatctgtaagagtatgcaatatcatgccagctttaattcaagtgaagcgaaaattagaggtaaacttgctgattaagtggtctcatatcacatatcacacagaagctaaatgtagacacttagatttaaattgttacaagggctctccaaaattgcattcacaaaaccttcattggtatgcatgagcagctgtctcgttatccattccacccagtagcaagctggtgacttccttatcaaaggctatatacatcgtggactaagactgtaattgccaattgataaagcattgatgcattgaccacaaaattgcaaccagcggactcttattcattgtgctgagatcaactaatctattttgacaatcaaccgtacactcaatatttgaacttttctgtaaagcctgcccttactctgacttgatggtgt

SEQ ID NO: 855149 - DNA, 535 bp, Homo sapiens
agcttcctcttgatccagcttccctggcttttgggatcatgtaaaattgtcagcacctgccatttgaatgtgttttagcacagcaggctcatgaaacgtggcagctggaagcaggtgtgagttgggagcagggttagccagcttctaagggaaaccaaggttttcccagggagggatttaaaggcaaatgtacattgccacctccagactaaacaaaaccaggaaactgttttgaccctgtcgctcaagaaaaggagagtagggtcaaagaccatcacaaaaacaaatgccacaaaaagatgacacccctatttgcatcaacagggtggggaggaggagcttgacaatagggaaaagctggagataaataatacagggaaggagtgtagcgggatttaatcatacagagcaactgacaagaagatggcattaaggacaaagcagcacttaagccatgtacctgaactcggsgggggaagttaggcagagcattattttaaaagacggtttgtaaacattttttttgtgtgtgttc

SEQ ID NO: 855150 - DNA, 538 bp, Homo sapiens
tgcctcaatatctgatattaactgagaatttttttgttttttgtttctttcctgacacatttctttgggcttaccaacctaattgtttttttccatctgtagtaccttcctcctgcaatatatcttctagactagtctggatttcaagggtttgtattatctgacctccagttctctttctgattttatctcctctagctcctcatggcctagcatgttctagttaaattgtactgctcaccattttcacatacaacttgtcctttggagatttggatgtcagggaaggctaggttttgctgtagaaacagaaacaacaatatatccatgtgggtcaactgaggactcatgtacctgacgaagcagctaccatctcagcagttgctggtcactgtgcagtggaaaagaragaagtgcatgaagtcagcaattatacttggcctggaagaaacatctgtccctttggttctcaacccactattcaaagcaagtcatatggccccacccaagaggactatggagtataagtgtatcatta

SEQ ID NO: 855151 - DNA, 538 bp, Homo sapiens
tgcctcaatatctgatattaactgagaatttttttgttttttgtttctttcctgacacatttctttgggcttaccaacctaattgtttttttccatctgtagtaccttcctcctgcaatatatcttctagactagtctggatttcaagggtttgtattatctgacctccagttctctttctgattttatctcctctagctcctcatggcctagcatgttctagttaaattgtactgctcaccattttcacatacaacttgtcctttggagatttggatgtcagggaaggctaggttttgctgtagaaacagaaacaacaatatatccatgtgggtcaactgaggactcatgtacctgacgaagcagctaccatctcagcagttgctggtcactgtgcagtggaaaagagaraagtgcatgaagtcagcaattatacttggcctggaagaaacatctgtccctttggttctcaacccactattcaaagcaagtcatatggccccacccaagaggactatggagtataagtgtatcatta

SEQ ID NO: 855152 - DNA, 618 bp, Homo sapiens
ttttttctctttgtttattgtaattgtaatttctgttgggagattaagagyggcgctcactggattacctcacattaccaactgtgagatgctggggaaagctactcacgcaaatcagtattcctgcttttgaacactaacaattttagggagagatgaaacaaacaaacacgataaagacatcagaaaagagagggaataataagggagggcactctagtcatgtgacctctctggggcttagtttccccattcataaaataaaggggttggacagggcaatatctaagcaactctctagctcctctctagaggtctgattcaaatatagtaaaatggtctcctggtgaataccaaaacaatgtctaagatttgaaaaggtcacacaaatttaataaaatgcatcattttatttggttcctctggtttctgcccactttataatcaggttgacgacaaaactagggtataggtgggagaaaatactttagtattaattctttcttaccatcaaagagcaattgtccttaaatccttcttatttagctccatggaagtctactaactacctaacaagactcacccaattctcaaggctaccaccaaaacagaaaacac

SEQ ID NO: 855153 - DNA, 575 bp, Homo sapiens
caaaacgcaccaactgaggtccgctgcacacttaaggctcaaggctggcagttctcactagtgcgcccgtgtgtgtgtttgctctcactggatgagctgtgtttgcccccaaacctgtttatgccagttgtatttggtgtgatgttattcaaataaatatcagattgaaatctaagtgagaaagccagaggattgtttctataaaactgcatcaaatgctttggtaagactttataaagaagtcttgtaaaaaaccatgaaattaaacgtggatgaagcaattacaaagcattgaggaaaatcataagaatcaagaaatattcagtcctgtggctgtttcacaagtatttttaatatcttgcttcactccaagaaatgttaactggaaatcataaatgagagattacagatagcttatgcaagaaagagccaataaactataattaatagatgtacactcaaagaaaaaaattaagcctttatcaaaaggttaaaaaacaaacttacattgatgttgtaagtaaaaatatttttgctgwgttttatgtattacttttattattctctgctttatc

SEQ ID NO: 855154 - DNA, 592 bp, Homo sapiens
gtctgacatgtcgcaggtactgaatgcccactgttactgtgattcattacagatgtgagctcatcctttctactctggctcctgtgactggtttggattctcagatcrgtgttctctctcattctgcatgctctgcccagcagctgtgacccactcttagttttaactatgccgacaaccaattccatgacttcagcccagacctctcctccaagcgccgtgtctatgcgtaaaatagcacagcttctcctagtgctgtccacatacttctgactccacactgcaaaactacagttaccacccttccgtcaaacctctgcctcctcactctgtctttctgcatttggttcacgtcaccatcttccttttcgatcatgctaaagaccagagagctggcgaggtgcagtggctcatggctgtaatcccagcactttcagaggccaaggctggaggatcacttgagcccaggagttcaagaccaacttgggcaacatagcaagacaccatctctatgaaaaattagccaggtatggtggtacatgcctgtagtcccagcagctggggaggctgaggcaggaggatcacttgagcc

SEQ ID NO: 855155 - DNA, 631 bp, Homo sapiens
tgtatcccctagaaatactcacacagaactatktacaagttgttagcatattataatagcaaaaataggaaatattgtattactattgtgaaagttgtcataatcaaaatgaagtcactaatgttaagataacttcaacaaatagagctgaggaaggccatgaagagagggttttcatggttgtatacctgatcacaataaagacggaaaaaaccacaaagcttcttggataaagttctcttgcacaaaggccatcacaaccctatacaaaaaatacttcctcaaggacatctgcccagcaactgcctgtccaaccacagactggtatcatccttgctgttgatctttgtggccaaggataattactgaaaacaattatgtaatcttcctcattttttccctttaaaaatctttgtcttcctttacctccctgaatacacacatgttttactatggcacacatattcctattgcagtgctttactcccaaataaacatcttttcttttcaggagctgctgtttgttattttggttgacactattcatagctgatacttgcataaggccttctatgggtgggcacttttctaagcactttacataaatgagctcaatcctccatgacaaccc

SEQ ID NO: 855156 - DNA, 521 bp, Homo sapiens
gccagaaatacgatttgacccagcaatgccattactggkcatatacccaaaggattataaatcattctactataaagacacatgctcaggtatgtttattgcaacactgtgcacaatagcaaagacttggaaccaacccaaatgcccaacaattataggctggataaagaaaatgtggcacatatacaccatggaatactatgcagccataaaaaaggatgagttcctgtcctttgcagggacatggatgaagctggaaaccattattctcagcaaactaacacagaaacagaaaatcaaacaccacatgttctcacttataagtgggaattgaacaaagagaacatatagaaacagggaagggaacatcacacactggggcctgtcagggggtggggggctaggggaggggtagcattaggagaaatacctaatgtagattatgggttgatgggtgcagcaaaccaccatggcacgtttatacctatgtaacaaacctgcacattctacacatgtatccc

SEQ ID NO: 855157 - DNA, 629 bp, Homo sapiens
cattttattgatcccttatttaaaactcccccaccagccaatgccttcatctgcaaaccaactacagtaacaggcttggattcagcaaaataggaaatttacaaatgtacactgactttgaaaacatatacatggcaaattgagaattcagcccaccagaagtaaactataaatgcaaacattcccaacagcaactttcaaataaataggctgcaaattggaaacatgaacacagcaaacttatggacctcagattgcaaatcacagcagcaattccctgaaaataaggcagtcctcttttcttttgtatagcatgttacgtatcttttattttcagaatcctggagaactgaataatgtttatagaaccttgggggagacagttttcatagatctggaatttaaaaaaaaaaaaagctatatttgtgacgtttttgtgaataggtttacatttagttacctacctcctctaggcagttctccttatactcttctgtrccccttgaggtcattcacatgagtgtggaagagaaaataaaaattagaaagaaaaaaaagctgaccgggcgtggtggctcactcctctaatcccagcactttgggaggccaaggcaggcagatcacctgag

SEQ ID NO: 855158 - DNA, 604 bp, Homo sapiens
atttgcatgactagatctctagcaaggccaaggaagttttccttgattattccaactatgttttccaagcttttagaattgtcttcttcctcaggtacaccgattattcttagatttggtggtttaacataatcyctggcctcttggaggctttgttcatattttcttattattttttctttgtctttgttggattgggttaattcaaagaccttgtcttcgaactctgaatttctttcttctacttgttcaattctattgctgagactttccagagaatttcacatttctaaaagtgtgtccaaagtttcctgaattttttattgttttttctttaagctatctatttccttgcatatttctcccttctcttcttgtatcattttttggatttccttgcattgggcttcacttttctctggcccctccctgattagcttagtaactaatctcctgaattctttttcaggtaaatcagggatttcttcttggtttggatccattgctagtgaactagtgtgatttttggggggtgttgatgagccttgttttgtcatattaccagggttggtttcctggttccttctcatttgcgtaggttctg

SEQ ID NO: 855159 - DNA, 626 bp, Homo sapiens
tctaacgcttagcctacattcagttacctaaagtggtcctatagccctctcttctggaaccccattcatctcagataatacttctgtcattggcattgaggaggtgaaacttcaagtggtatttacatttgattcccttcagctttgtgacccttaggatccagatatctgcctactttgtagatgtgatatttatgttctgctgattttcagtgaacagtgctcaattttggggaaagcagatcgggagctaccattcctgtctgagccttctcctggaggccgggagggtgtcaggacttagcagggaaaagagctccctgcctccaggagaaaggtttatggaagagtcttcctgccttcaggagtgggttctcctatcctgtgagtccttctcttcaaatataacttttccaagttaatttttttgaatagagaaattagcatgtgtgacttttatgcagaagaacttaggaaagagattatttatataataatataggcaaaaaatgctacaaactcayccagctgggttacattctaatttgaccaatgagctgagtcaagtagcattctttttttgtttttttaattaaaagtacttgtcctcaatgtgaaaaaacaat

SEQ ID NO: 855160 - DNA, 578 bp, Homo sapiens
ttctttagatttaatgacgtacctttgtcatgtacttaatcttcagcaaatatttacccttccaaaactggcagatttgcattttayaacttgtcatgtcaaatgaaatattttctcttttctttgcccctagaaggatttctgctcaaaattataatcttttaaaaaatagctgacacattctcctttgtggggaatattcaacatttctatcctgtgatttgaaactgacccttctcacttctctccagctttagcctatacatattgatatatttattttggatacagtttaatgtttttattcttatatctgggtcatagagagatgaatgggtaaatgaagagatggatgaatggataaattagatagaaagatagatagatagatagatagatagatagatagatagatagatgatagatagacagatagacagaaaagcagaccaaagtataccacagatgtgtggaagtacatgttcagataacagaaaatacactgcaagctttagtctcaagctccctagaccataaaagcttatagaatggtcagctttccaaagcagaggctaaat

SEQ ID NO: 855161 - DNA, 629 bp, Homo sapiens
tgttggaccatctcactttgacttccatatctcttatttttttctctatctctctctctatgctaaattgtaagtaatatcttcaactctgatttctattttctaattatctytccactggactctagtcttgttttacctatttgctgaggtataaatacctattactatattttttctttttctgtaatttaacattttctcattgtgctttttgtttatttttctcatttacctgttcattttttgtagtctcttgttcctaactcaaactttcaacttcccattttatttctttaacatattaagcatatttgccttatatcctgattgtgttaacgccaatatctgaagccaccatgggccttgtttgctggctcactttgcttactcccactcggtaaaggtagatttgttttttccctgtgcattttgagctcatgttcaatggaactctgtgtggacggtttcttttggtgtttggttgaaagtacatccctctaaggtttacgcttgctttcactagacatatgagggcatgtcagtctggaaccatattaaaataaatagctggcttagaggtttttagaccacaaaaatagtttcaatttgagcacaaacacatgtga

SEQ ID NO: 855162 - DNA, 604 bp, Homo sapiens
gttggaccatctcactttgacttccatatctcttatttttttctctatctctctctctatgctaaattgtaagtaatatcttcaactctgatttctattttctaattatctttccactggactctagtcttgttttacctatttgctgaggtataaatacctattactatattttttctttttctgtaatttaacattttctcattgtgctttttgtttatttttctcatttacctgttcattttttgtagtctcttgttcctaactcaaactttcaacttcccattttatttctttaacatattaagcatatttgccttatatcctgattgtgttaacgccaatatctgaagccaccatgggccttgtttgctggctcactttgcttactcccactcggtaaaggtagatttgttttttccctgtgcattttgagctcatgttcaatggaactctgtgtggacggtttcttttggtgtttggttgaaagtacatccctctaaggtttacrcttgctttcactagacatatgagggcatgtcagtctggaaccatattaaaataaatagctggcttagaggtttttagaccacaaaaatagttt

SEQ ID NO: 855163 - DNA, 667 bp, Homo sapiens
ggatataatgaaattggacccctcatatgctgttgatgggactataaaatggtgcagccactgtaataaacactttggcagttccttaaaaagttaaacatacaagttagcatatgacctggcaattccactcccaagtatacactcaagagaaatgaaaacatatgttgccccaaaagttgtacacaaacatttataacagcatcattcaaaatagccccaaagtagaaacaacccaaatgtccatcaacagatgaatgggtaaacaaaatgtggtatatccacataatgaaacagtactcagctatgaaaagaaatgaagtactgatacatgctgcaactggcatgaatattgaaaatactattttaagtgaaagaagccagacacaaacagccacatattatatgattatataaaatgtccagaataggcaaatcaatagagacagaaatacatcagcggttgccaggagctgagggagggggaatagggagtaactacttataaatacggagtttcttgctgggatgatgaaaagctttttgaaattagacagtgactatggttgtataactstacatagatactaaagtactgaattttacactttaaagggaagtatttcattgtgtataaattacatgtcaatgaagctgctattgtttt

SEQ ID NO: 855164 - DNA, 555 bp, Homo sapiens
actggttttttttttttcatgaaaatagacagttgattacaagattygtatgaaaatgcaaagggccaaaaatggcccataccatcctaaggaaaaacaaggtgggaagacctttttcagcagacatcaagacttaatggccagacacagtggctcacacctgtaattccagcactttaggaggccgaggcaggctgattgtttgagcacaggagttcaagaccagcctgggcaacatgatgaaaccctgtctttgcaaaaaatacaaaaaattagccaggcacagtgacacatgctggtagttccagctatgctggaggctgaggtgagaggatcacttgagcctgggaggcagaggttgcagtgagctaagattgggccactgcactccagcctgggtaacagattgagatcctgtctcagaaaacaaaaaacaaaaaaacaaaaaaaaaaacaaaaaaagaagacttattaaaaattaagaagatatggtgatagagaaagtgtggtgctgcttccaggaacaaatagttcagtgatatggaatggaccaat

SEQ ID NO: 855165 - DNA, 176 bp, Homo sapiens
tgcacaaagaatagagatagcaggtttgtgtgaagsatgctcttcttttttgccacctcaaattccccgcttcctgcctccagcaatttctggtctgttctctggatgtcagttcattaccacattagtgtgttcattgtatgttctgttgccaggaaggtgctgccacagcggcc

SEQ ID NO: 855166 - DNA, 586 bp, Homo sapiens
ctgagttaaggagagagttgactcattarccattgacagccttgatattctaggagggcgcctcccaaggggagggaagtgaacatgtaggggcaacttattggagaattggagaatcagaattgcaagttctttttgtcattgactttgtgccatttttataaaatgcctctggaactgaatgtgcttcctcactctcttttgcatatagcaacagagaggaatattattccatttacaggctttgtacctttgccaaattaagaggaagcttgcctttgtaatcagggtatggtagaaagcacaaagcatctactgcttatgatggtttcttctagatgaacttgtccatttcctgaacaattcagaaaactgaatttagagttgagatatattaagaggcctctgcctaagagtgcttttatgctggttggtttcaaaaaagagactagaaaagtaaaaccatttcttgttcaaagagtattccctagccaacatgcagcatgtcaccaaggctgtctagacactcaagggacttcacctatgccttgttcaagattctccagaaggtctaagtaggcccctt

SEQ ID NO: 855167 - DNA, 423 bp, Homo sapiens
ttgattaagaatctacatgaggaaagaacttgctgaaagatgtttgagagccacagaaaggacctcagaggaaggaggaggagagaaatgtctaggtggtarataggaccagttggaggtatgctggtgctgagccacggaaatggttgagctgtgggacaaggataggtatccaagtctgtggtcaccaatcaatgagtgtgaattttaagtcagcagttggaaaaggagaagctcctgggagtgcagttaatgaagaattggaaggatttagtctagacgtagaaaggaagtccaagataggattattagctggtagaagacaggaattatttgtaacttgctccctgtccttgtgcaaacaacaacaacaataaaaacaaccgaggtccagggatgggatttcatcccagaggtgcgtta

SEQ ID NO: 855168 - DNA, 423 bp, Homo sapiens
ttgattaagaatctacatgaggaaagaacttgctgaaagatgtttgagagccacagaaaggacctcagaggaaggaggaggagagaaatgtctaggtggtaaataggaccagttggaggtatgctggtgctgagccacggaaatggttgagctgtgggacaaggataggtatccaagtctgtggtcaccaatcaatgagtgtgaattttaagtcagcagttggaaaaggagaagctcctgggagtgcagttaatgaagaattggaaggatttagtctagacgtagaaagraagtccaagataggattattagctggtagaagacaggaattatttgtaacttgctccctgtccttgtgcaaacaacaacaacaataaaaacaaccgaggtccagggatgggatttcatcccagaggtgcgtta

SEQ ID NO: 855169 - DNA, 617 bp, Homo sapiens
gacctcaggtgatccgcctgcctcggcctcccaaagtgctgggattacaggcgtgagccactgcasctggcttatttatttatttttttgagacagtttcactctcgtcacccaggctggagtgctatggtgcgatcttggctcactgcaacctctgcctcccaggtttaagcgattctcctgcctcagcatcccaagtagctgggattacaggcatctgccaccacgcccggctaattttcgaattaggagaatcattttaaattacattatctcatttaatccttaccacagcttctcaaggagggtgttatcaaccccaattttactgattgggacaagactcagggaggtcaggttacttggccaaagtcacgcgacagagccaggttccacactaccacatgacgtctctggatgttacagctgagggacaccagcagagcaggaccaggggttcagaggcattgggggggtggggcggggggcagatgtctggaaggtacagctgtgagcacaagtagggcctgctcctgtggccaggagccttatggcagccccagctataaggattctttaaggccccagtgctgggctctgacagggcaagatggatg

SEQ ID NO: 855170 - DNA, 617 bp, Homo sapiens
gacctcaggtgatccgcctgcctcggcctcccaaagtgctgggattacaggcgtgagccactgcacctggcttatttatttatttttttgagacagtttcactctcgtcacccaggctggagtgctrtggtgcgatcttggctcactgcaacctctgcctcccaggtttaagcgattctcctgcctcagcatcccaagtagctgggattacaggcatctgccaccacgcccggctaattttcgaattaggagaatcattttaaattacattatctcatttaatccttaccacagcttctcaaggagggtgttatcaaccccaattttactgattgggacaagactcagggaggtcaggttacttggccaaagtcacgcgacagagccaggttccacactaccacatgacgtctctggatgttacagctgagggacaccagcagagcaggaccaggggttcagaggcattgggggggtggggcggggggcagatgtctggaaggtacagctgtgagcacaagtagggcctgctcctgtggccaggagccttatggcagccccagctataaggattctttaaggccccagtgctgggctctgacagggcaagatggatg

SEQ ID NO: 855171 - DNA, 553 bp, Homo sapiens
tctagtctctaaaatctgttaatatatttcacatatctcatttctcccatgaagactcctttatttaatatatatttatctcttttytaacctctacaacaccctcacttataatacactttatgttttctaaccctgctgtaacaaattaccaaaaatttagtggcttaaaacaacagaaatttattgttttacagctgtagaactcaaaagtctgaaatgggtcgggagggctatgcctcttatggaggctcctggaaataatccattcctttgctctttctagtttccagaggctgcccacatcctttggcttgtggccccatatcatttcaacctctgcttctattgtcacatcttttctaactccgattctcctgcctccctcttttaagtaccctgtgagtacagtaatcccactcaaataatttagagtaatcttcccatctcaagatctgtaacttaatcatatctataaagtccctttggccatggaaagtaacaggttctggggattaagatgtggacatcgtcggggaaccattattctgct

SEQ ID NO: 855172 - DNA, 654 bp, Homo sapiens
agtttgaaaaacacaaccataaagtgtctaaaatcctatagattataattaaatatttgtagtgccccataactccaaatgcaaataggccccacttagctatcataataagactttgcaccacattttttgggaaccgtctgtataggacaatcccatgccccagtggtctccccctttaatgaactcagggattaccagggatcttctaaatgcagattctgattcagagggtctggtgggatggaggttctgcattgctgacctgccaagccctgggaaaatgaggccatgccatgtgtggacaatacactcccaggtactgtcaatcatgctggtccagggaccccactctgagcggcaaggatgtggagcacctcttccaaaactgcctgcgaggcatggggcacagtgggcccaagcctggacccccttggtccttagggcatcggggcagccagactcagggggccagagcaacatcctttgattaccccaggtcatcacaaatacttgtcccataaatacatttttctttgtgtatcttgacatgaaggttggaagttctgcatagctctgtggttcttagcatttactggggcacagactccaatgaaagcaaygggatcccttaccctagaaggtaactcacaa

SEQ ID NO: 855173 - DNA, 558 bp, Homo sapiens
atttaccgcaggtttcttacaaacatatgttgcgtagcagtgacgactccaattttgagagaagttctattgtgggtaaaatgctatcaaacaayatcacatgctacagaaaaatattttgtgaaagggagagccaattgctgcagcaaactttattgctgtcttattttaagaaattgcaacagccaccccaaccttcagcaaccaccaccctgaccagtcagcagccaccaacactgaggcagatcgtctaccagcaaaaagatgatgagtcactgaaggctcaaatgatcattagcaatttttagcaataaagtattttttaattaagttatgtacattttttagatataatgctagtgcacacttaatagactacagtgtagtgtaaacataactgttatatgcactgggaaacaaaaaagtttgtgtgactcgttttattgcaatagtcactttattggggtggtatggaaccaaacccacaacatccctgaggtatgactttatatgtgcatatatatatttatatataagaggggatttatttgggggaat

SEQ ID NO: 855174 - DNA, 566 bp, Homo sapiens
agccccatggtagcttctaggggtgggtgcctgcaactcccaaagcccaagtaggcatgtgttaccatgcattcttttagctgtgctgcctgcagatagcttaagtgttaaccagctcagtgccctcatggtacctaggtccttgtccggcatccaggaagaatcaggtcacacacagacttgaggatggtgaatgcagggttttattgagtggtggaggtggctctcagcgggatggatggggagctggaaaggggatggagtgggaagatgatcttcccctggagcttggctgtcctgcagtctatctcctctctgacctcccccagctgaatttctcttggcgttcagatggtccctttcttctctctgccatgccattctgctgttcttctgttcttctgctcgttccctcgtctgcttctgaagcctagggtctggggtttgtacaagtacaggataggggggcacagcaggccaaaaggcaacttttgggcttgaaaacaggaakggctgttcccatttagggccacgggtttccaggcttgagggtgggatctttgctg

SEQ ID NO: 855175 - DNA, 511 bp, Homo sapiens
agcagtttatgtaatatgcactaaggggagggggtgctggacacctggagaagatcaaagaaggatggaggcacttgcagtaatccaagtgtraaggcagagcctcgagtcaggtcttgtagaagcagagccagagagaggggtgtgggtgcccatgactggagggaggactcaggaggaagagacggagggaagcagaacaagtcagggaaggagtgagatggcctcatatccgctgcagtcacacctcagcctggccccgctgggggctctggagcaggggctgcactgtggcattgatccaccttgactcacaggcaccatgtttgtaatgtggctatttccagccagcacacacaacagctgggggtgtgaccactcagtaaaatgaattgggcagggcacctgcagagttataatacatcaaccctggaacaatacacaccccttcgaatttactgacaggccaattttcaagccaaaaatacagtcctcaaaagggtgtcagtgg

SEQ ID NO: 855176 - DNA, 569 bp, Homo sapiens
ttgcttgagcctagaatttgaatctctgagttcatccttttctttcatcactttgtccagtgacattaggagcaaccaaccgatatcattatattccttagttttctacaaatgtttgaaagtatcgtatacagggtcactaagttatttgccctcttataagtggttaattaggtgtatacaatgcagacatttcgcttatctctataaacagttcatgccatgggctattagtgctttctgtactattggaaatagagtttttagcatttttaagtctaatcggattaaagagccaattcccaaaaccaattcaggagactcatccttaaaattctcttcctctacaaccactcttggtatcaaaatctatattagtcagagttctccaaagaaaccaaaccaatagaacggatggatagactagacagatagatacatagatagatagatagrtagatagatagatagataggagaggagatttaataggggaattggctcatattattacagaggctgagaagtcccacaatatgctgcctgtaagctggagaaccagggaagat

SEQ ID NO: 855177 - DNA, 535 bp, Homo sapiens
ccatgttggtcaggctggtcttgaactcccgacctctggtgatcttcccacctcagcctcccaaagtgctgggattacaggcatgagccaccgtgcccggcccatagtaactgttttataaatttgggagctccagtgtttagtacatatatgtttagaattgtgatatttccctgttggacaaggccttttaccattatataatgccctcttttgtctcttttagctgctgttgctttaaattttgttttgtctgatataagaatagctacctctgctcacttttggtgtctatgtgcatgaaatgcctttctccacccctttactttatgtgagtccttatgtgttgttaggccagcatcaccctaatatcaaaaccagcaaaggacataccaaaaaagaacattacagaccaattttttgatgaacacagatgctaaaatcctcaacaaaatactagctaaccagttgyaacaacataccaaaaagataatccaccatgatcaagtaagtttcgtaccagggatgcaggaaa

SEQ ID NO: 855178 - DNA, 457 bp, Homo sapiens
ctaagcagtttattttatctggcttttatgatgtcagtgtgaagcaaggagctcagcagtctttattattattaagaataggccagaacattccctaccaaatctgttcccatacatggaatagttaagcaactatggagaattctccacttgaccagatcaatgctaatatgtaatgttggctgtatatgttaagtgcatacttattaatgtgtgactatccaggtggcaggaagccaaggtttcctttggagagaagttttccaagccatgttcctgttgcaatgctttctttcctacacaacttgttacctcaggcctagtctgtcactgaattatgaagaagtataaacaatcccaggactcaggtatgctccctttgtgtcattattagtttaaactgaaagaaggccatcctgaatttctytttctcttaaggacccccagagtgctgact

SEQ ID NO: 855179 - DNA, 443 bp, Homo sapiens
tctcaccggccaaggtgttggcacggctgtagccctttctagagtctctagaagagaatctgattcccagccttttccagtgtctggagaccacccatagcccttgattcatgatcccttccccatcctcaaagccagcaacggtgcttctctctaaccattcttctctcgtcacatctccctctctgacctttctgcctccttctttcccttttaaggacacttttgattgctttggacccagctgcataatccaagatcctctcctttaattccatttgcaaagttaatccccctttgccacgtaaggtaacatactcacaggttccagggattgtggcatagacatctctgaggaaggggcattattctgccaccacatggaagaarggtgcatgatgagacagcgctggggcattttgagaaggaggtatcatggcatg

SEQ ID NO: 855180 - DNA, 285 bp, Homo sapiens
ttggcagataataacaacaacaaccgtaatcatgataatatgtactgagtacttactctattcagtccttactctaagcacctgagagacgttaactcttctaatcctcatgacatctctgtgaggttggtactattatcatcccattttatagaggaggagctggagaaayagtgaggtcacgaggtaagtgacagagctgagttatcccaggcagtcctctaaaccacactgcctccataaaggagattcaggagcatacaacatcaataaacagaaccatgt

SEQ ID NO: 855181 - DNA, 465 bp, Homo sapiens
aaaggattcatgcattcatcatcccaactgattctcttaaagtagtctggatgtatatattttatccatactgcacaggttctttcattcattcaattcaaatatgtattgagcacttcaattcaactagctttggagagagagcagtaatcaaaaagtatctcacccttgccttcatagagcttactgtagcagacaggacattctttaataaataatcacatgagtatgcaattacaaatggtactaagaactatgaatgaaaagtactgggaatgctgagagcatataatagggaatgacctagtcacacactctcagactcactgatagaactatcctggaaggtaagatgttcctgagaaagctcatttgagctgaagtctmaggacaattgagaattaatttaaatgcaacagtatcaataaaagcttcctaccatcctatttaaaattgcaagcattt

SEQ ID NO: 855182 - DNA, 516 bp, Homo sapiens
gtgactatagttaataataacatattgcatacttgaaatttgctaagagagtacatctaaagaattctcaccacacacacacacacacaygcacacacacatacaatagataactttgtaagatgatggatatgttaattagcttgattgtggtaatcatttcacaatgtatacatgtacagtagttcacccttaaccacagttttgctttctgtggtttcagttacctgcaaaaaaatacaataagatattttgagagagagagagagacagagacagagacaacattcacatagctttgattacagtatgtcgttttaatagagctactatattattagttattgttgttaatctcttactgtgcctaattaatgaattaagttttatcataggtgtgtatgcatatgaaaagacaatatatttagggtttggtactatccacggctttaggtatcttggaatgatattctgaggtatccactcagaatcttggaatgtatgccctacagataa

SEQ ID NO: 855183 - DNA, 397 bp, Homo sapiens
aaagcagatggctgagtgtaacagacctggcagattgtagaaaaccatatcgtaagttagcagtagggaaagcagagaagcaactggatttacatctcatctcagaacttcccaaagctgagggactggtggtatcagttgcccctagagtggagcttttagtgggcatacataacagaacatagagccactgtcatgtccacaggtgattcatatgttgagaaaattaaataaatgaatgttttaaagggagaactgggatacrggcctaggaatatgactcaccatgctgtgttttattcattatgtgtttagatatagtgtgtgtgcatatatgaatgtaggtgaaagagagaggctcttaacgtattatgtgctaataaaaaagaatcatgac

SEQ ID NO: 855184 - DNA, 397 bp, Homo sapiens
aaagcagatggctgagtgtaacagacctggcagattgtagaaaaccatatcgtaagttagcagtagggaaagcagagaagcaactggatttacatctcatctcagaacttcccaaagctgagggactggtggtatcagttgcccctagagtggagcttttagtgggcatacataacagaacatagagccactgtcatgtccacaggtgattcatatgttgagaaaattaaataaatgaatgttttaaagggagaactgggatacaggcctaggaatatgactcaccatgctgtgttttattcattatgtgtttagatatagtgtgtgtgcatatatgartgtaggtgaaagagagaggctcttaacgtattatgtgctaataaaaaagaatcatgac

SEQ ID NO: 855185 - DNA, 655 bp, Homo sapiens
ggtttgggaggaaattgccctacttctttactgaaagtatagccagattaactgcagaaagcaaaaatatcattatagacatttttagcttggctttgaaaatgggcaccattgcttctctgtaacaggtacaaagaactcaggtgtgaatgtttccaatgaattgaagtcttagcaagaaagtttctcgctctttctctctccctgtctaagtggggaagtatttaatcctctttgcaaacacagtcccagctttcaacctcacaggactgcctactgtgttgaattacattcaaaggtttatctgccatagaccactgaccctagggaccgggctaagactattcatattgtctagaactataggtcagattgaaacctgcatctctggcaaaaagccaacacttcattcaccacatcactcaacttttctcctcatgttatgtaattacaacacaagtgtccagcctgacatttcagtatgaatattagtgggcataaaaattcaatccaggcatacgacagacaaaacactaccaatttttactttttaaaatgcagggactgrcataaaggagagaatagaccattacaatttagtatactgacttagtagagttaagtcactgtaaaccatcaggaatggaacacctga

SEQ ID NO: 855186 - DNA, 580 bp, Homo sapiens
ttcaaaactctgccctacaggaccccttcttaagatttccatggctacctattttcccaacagttaggctttattatatctggcaagttttttctggagtaattattacacactaattgttcttgtgtgtttatttatttatgcctattttctccaatttcattgtcagcatctagagcaagggtcaacaaacttttttctataaagaggcagattgtaaatattttaggctttatgagacatatggcttctgttgcatctgctcaactctacccctatagcatgaaagcagctgtcgacaatacataaaacaattggtgtggctgtgctccaatgaaacattatttacaaaaaaaaaaaaaaaaaaaaaacagtcatttggctaaatttggcttgtaggccatagttttgtcagtcctctgtagggcccttatatgcttttttccctaccatatcaccctcagcacctcacacaaagcaggtgtttgggaaataccgaaagaatgaatgaatrgagttccttctattttccaagcactatatacatattcacaacctttcatccctactaaatccctgg

SEQ ID NO: 855187 - DNA, 609 bp, Homo sapiens
tttataaacctatgttagctaacacttactgattacaaaacacagacttcttattctataaaaccacygaatcgagaaatcattgtagtctccattgcactttgccaaaaggctttgagatctatctgaggcaccataattttatttgttctttacagggcaaagttaactcttcagggataaatggcctctgattacaagcttctcaaatccaaacaaatcaaatgttaagaaacaaaacatgctacaaatttagggcctcttttgctggctttaggttgcatgagggtcatagtcatcctaagttaacaagcgttgtgctgcctacatcactatcagagtaccttaaatacagtggacactcagcaaatatttgaatgagtttaagtataaaaggaaatgtactattttgatttaattctatttgaggagcttgtttttttataatgatgacatcaatttccacatggcgaaagtatccctaaatgttgcatacagacccaaggccttctattcttatttgtgggtattattcaatgttttcctatctgtctaaatcctgtacccttatatattgacaacttttctatttacagttatactgactaa

SEQ ID NO: 855188 - DNA, 464 bp, Homo sapiens
tacttacttgcccctcagatttagaacagagtgaatgaggatcattacctatgttatgagaaagagggcacrggttgggggagggagttgacagggggagggagcttttagtctgctataaatgtggaaggctgggagaagttgtcctcatgggctgcctctgcacccatgtggcactaggcaagaggaggaacattaaagcaaactcatagatatagttaagtaggtagttgcaggatctgacttaactttcccagattctcttcaatcccacgtggcatgcatgagacactaaacttccctctctgtttcctacatagatgcacattgccacagttgtattttgtgtttgttgttatttatctgtcatctgtatgtttgattttactgacatgctagctcagtatttacatttcgaataatcctcatgacatttctaccttaataggcaaatctggagttgt

SEQ ID NO: 855189 - DNA, 631 bp, Homo sapiens
gcattgtggctttaatttgcatttccctgataattagtgatgttaggcattttttttcatacgtttgttggccatttgtacatcttttaagagctgtctattcacatcctttgcccactttttgatggaattatttgttttcttttttgctgatttgtttgagttccttgtagattctggatattagtcctttttcagatgcatactttgtgaatatttactcccaatctgtgggttgtctgtttactttgatgattatttcttttgctgtgcttaagctttttagtttcattaggtccatctcttcatcattgtttttgttgcatttgcttctagtttcttggttacgaattatttgcctaagataatgattagaagaggttttccaatgttatcttctacagtttggatggtttcaggtcatagatttaagtctttgatccaccttgagttgatttttgtacaaggtgagagatgcaaatccagtttcattcttctacatgtagcttgtcaattattamaacaccatttgttgaatagggtgtcctttcctcactttatatttttgtatgctttgtgaaagatcagttggctataagtatttggctctatatatggtttctctattctg

SEQ ID NO: 855190 - DNA, 545 bp, Homo sapiens
cctataaaatacactcagatttgattttgttttctaatgttgatttcagtaggagggaactatttggcctataagtgatgtgtaaaacttcctctaaagagtgtgctctcccatagatagttatggttaatgacatctctacattttatccccatgtgtgagcagaagggcattcatgcttcctttttagggtatgttttctaagaactagagattcaataaaggggaaagggatgtattaaataattatttcacaaaaccagggtgcattacaagtaagatagtttgatactccattatgacaccatttgcacaaaaaagatgacctattgacctatcctgatcttcattttgaataaattgtaagtcagatatttttaaggctaatgagcccaaatggttattttcaagaaacctctgtttttaaaaaaatatgtcatgttctaaaaataawcactagaactttctgaaaaaaaaatgattccaaaatagtactcttctctagacaaagagtaatcaaacagtgtattatatcttccccttgc

SEQ ID NO: 855191 - DNA, 622 bp, Homo sapiens
atttgttttcaaattgtttatttctagtgtatagaattacaactaatatttatattgatcttgtagctgcaactttcatgaactcatctagtagctctaacagatttttttcttcatgaattccttacattatttcatttataagattatgatatttatggataaaaatagatttacttcttttacaatctatatggttttatttatttttcatgtctaatgccctggctagaactaccagtgcaatgttgaatagaagtggcatgaatgaacatttttatctagttacttattttagaggcaaaactttcaatctttcaccatcaagtattttttttgtgtgtgggtttttcagaaatgtctttaaacagttgaaggagcttccttcaattagtaggggttttttgagacattttttaatgtggaagattgttgaatgttttcaaatattttttctgcatctattatgataatgtgatttttttgttttattaacacgttatattactttcattgacttttatatgtcaaaccactcttttatttttggaacaaatcccacttagtcttggtgcatcrtccttttaatatactcctggatgcagcttactagtattttgtt

SEQ ID NO: 855192 - DNA, 577 bp, Homo sapiens
acgtcataaagtacaagggcacagtgacatactgcccctgtatctgccactgcatttgtttggggaaaaaaaataaaccacaaaatgagtaactgtgttttgcccatggaatgtcaatttctgtgaayaatttttacattttattttatgtatacatgtttgacaaagacacaagatgatttagcactggaatatattttcctctgatattttttccataaatgtggtggcatcctaaataattttttattccttttgctactgacacactagaagtagatattaagtcaaatctacatgtgaaaggaaaccaaaatttgatgtaaaagtaaacctactagaccttttttttttcctgaaccatttttgctcagaaaaaagggatcttattaagagtacagactggccattcaaagatataaaagtcatgatctcatctatgcagtaactgatgaagctgccactgaagaattaaaaacaaaaaaagtgtcatttgactgcaaaagcagcaaatatcattttaacatctattataatatattaaaatttacaatttagggcataagttaatatgcat

SEQ ID NO: 855193 - DNA, 630 bp, Homo sapiens
aaaataattcatgattcaaccttgacagcaagcacacatcaagctaacaggtgtccgtgatctactctaaccccacccctgccacagtgcatcccatctgtgccctcgcgcagagcagggacatgtgtaaaggttcggaggcagcaggtagaaggcacccgacggcacaggggcacagcagctacgatcttcctagctctcctctgcctctttgctcttgaagaaattgaaactcaaaagagaaacagtaacttgccccaaaacacagtggaggtgtcatgtaattagaataaacactatgtttccagaccccagggaatctgggaacactttccttctgcactaaattttcctaattacaatgtttattaagcattttaggtactaaaagaattttaacttttaataattataaacctgtaatggactagcaagaagtattaaaacctcaacatctagcaagaaaaagctgcagagaatacaaatgcataataattactaaagacaacmttatataaaactgctttctctaagaagatttaaaaactagtgctccaccacaagatttcattccaccatctgtcaacacaattaaatgctttgaaatgtgcaatgaatactgacaacata

SEQ ID NO: 855194 - DNA, 599 bp, Homo sapiens; identical to SEQ ID NO: 811385

SEQ ID NO: 855195 - DNA, 599 bp, Homo sapiens; identical to SEQ ID NO: 811386

SEQ ID NO: 855196 - DNA, 580 bp, Homo sapiens
tctctaagagacattcgtacacagcccatgttcatgacagcactacttacattagctcaaaggcacagcaactcgagtatccawcaaaagatgaatcaaggccagagacggtggctcacacctgtgaccccagcacttcgggaggctgaagtgggcagatcacttgagcccaagagttccagacaagcctgggcatcatggcgaaaacccgtctctacaaaaaatataaaaattaaccgaatgtagcagcgagcccctgtagtcccagctactgaggaggctgaggtgggaggatcacctaagcctgggggggtcgaggctgcagtgagctatgatggcaccacttcattcagcctgggtgacagagtgagaccttgtctcaaaaaaaaaagaaaaaaagaatggataaacaaaacgtggtggaagacagtggaatattactcagccttgagaaggaaggaacctctgacatgttacagcatggatgggacattatgccgagtgaaataagcagcacaaaaggacaaatattgtgtgattccacttatatgaggtccctagagtagtcaaatgcacagac

SEQ ID NO: 855197 - DNA, 611 bp, Homo sapiens
caagggaatggctctgttttacattcacagtgttatttyttacaaatgtaaacatctagccaggaacaacatctggcctgtgatactgctgtctcagagctgctgacataacctgcgggggaggcgggaggcgggtggggagcagccaacagttctgagaactttcccctcgttcccaaaccttctagcgggctttccaggaaaaagctaggatgagaaacaggagcccccaaccaatacggaatggtgattttcttacgtgttataattcagtagcttcccttaagggcctcctcaaacatcggacccctttctaccgctcctgctgccccgccacgaggacgaggtggtcctggctgggggaggcctctgttgggagctggtgggaaaagcctcatacaggcctggcagaggctgctcagaggaggggctccctttcagctccccctcacgtatgtgggcagcatacaagtccacatctcagctgctccccagctgccacataggagagggacaggtggaagcttgggggtctcaaggcagcacctgcacagagttccaacatttcctccacttaccacattcaatacccaaaacatcgacgggcatga

SEQ ID NO: 855198 - DNA, 618 bp, Homo sapiens
ctttgactgaaccaattatttcactgttgttacgttacaaaatgatacttttctaattctaaattcccttctatttttattagctggtattcacccataaagacgagctttttctcatcaactgtggatggactattttttctcccttaaaggcaggatacatgctttattcttttactttaattatcattttgcrgaataaagagttggagtaatagaaatctccaattatgaaacattattctccctttttctatctttctctctctttctctgggtataactttggattcacggatttttattcatttaataatttacaatcatcaagtaagtaatcgaattatcccaattttggcccatgggatttctttcaaactggttcctgtatccttttgcatttctccattaatctttgagcacttccttgtttcctggaacaactagatgccccagtatctctttgtaatttttacttttgccatctgatccctggaatcacatatttctccaaagacctccggttccttttagcagagtatgatatttagaaccatacctgggcacatcatgacacattatttattatcaaaatttttattgaatagttgtagacat

SEQ ID NO: 855199 - DNA, 641 bp, Homo sapiens
ataggttcatgtcccatcattacaatcagtaacaccggtaccacaaatctgtccaacatttccaatattttgtcatttccaaaattttatataaatgaaatcaaacagtaagtaactgttttgaattggcttttttctctcagaattatactctgagtatcatccaagttgttgagtgtattgatagttcattcttttttattgttgagtggtgtgtgtgtactataatttgcttaaacatttacctgtttaaggatatctcccagatttttagctatgacaaataaatattccacagacatttgtgtacaggtttctgtgtgaacataagtcttcattttgctaagatgaagaacgcgattgctagagcatataataattgcatatcttgttttataagaaactgccaaactatttttcagagtgactgtacaattatacattctcaccagcaatgcacgagtgatccaatgtctccatatcctccccagcattttgtgttgtcactgatttttattttagcaattctgatacgtatgtagtgatatctcattatgattttaatttgcatctctctcattgctaatggtgttgggcatcttttcaagtatttatatgycatctgtgcagccgtatgtctt

SEQ ID NO: 855200 - DNA, 521 bp, Homo sapiens
ctataaggaacgaaacaaatcaacaagaaaaaaaamataaccccattaaaaagtgggcaaaggacatgaacagacatttctcaaaagaagacatacgaatgtccaacaaacacttgaaaaaatgctcagcattgctaattatcagagaaatgtaaattaaaatcacaaggagagagataccatctcacagcagtcagaatggctattattaaaaagccaaaaactaacagatgttggcaaggatgcagagaaaagaaaacgtttatatcgtgttggtgggaattagtacgactcctgtggaaagcagtatggagatccttaaagagttaaaaatagaactaccatttgacctagcaatcccactactgggtatctactcaaaggaaaataaatcgttacatcaaaaagacacctgcactggtatgtttattgcagtgctattcacaatagcgaagtcatggactttgtgtccattaacagatgattgaataaagaaaaatatgctatatatacaccatgga

SEQ ID NO: 855201 - DNA, 588 bp, Homo sapiens
aacaacaacaaaaagaaaacagtagcaaatattaacccaatatagatattaatccaactatatcgataaccactttaaatgtcagtggtctaaactcatcagttaaaagacagagtgggccaggcatggtggctcacacctrtaatcccagcactttgggaggccaaggtggatggatcacctgaggtcaggagttctagaccagcctgatcaacatggtgaaaccccatctctactaaaaatacaaaaattagccaggtgtgatggtgtgtgcctgtaatcccagctactcaggaggctgaggcaggagaatcacttgaacccagaaggcagaggttgcactgagccaagataatgccactgcactccagcctggatgacaaagcgacactccatctcaaaaaagaaaaagagagagtggatcaaaattaggacacaacaatatgttatctataagaaatccactttaaatataaagacatgaatagaataaaagcaaaatgatggataacaatgtactatgctaacactaattaataaaaagccaagcttactacataaattgcaaacaaaacagaattcagagca

SEQ ID NO: 855202 - DNA, 533 bp, Homo sapiens
agccccttcccactctgcccgcccacagaagttggggctgcggagtgaggggcgctaggacccggaggcggtggrgagagaggttaaaggttcctctgaaaccttctccactatctctgtctctgagatgtctgcagccagctgcaccccatctgcttacactcgggaggcacctctaacgccaccaccgccccccacccccaaccaaagactgacagtgaatttggagttgggggcatcggcagttactagtaagttgtttaccccaggactttaaaatcatatgaggaggcaggaaagacacctgcgaggtgggagaaactgaggctgaagaagcgactggagccagatcccaggtgaactctgaactctcgaagttaagcccaggattttaaaaagaattttacttctgacggagggccacagtgcccgcagggcccgtacctgctatcctgggaggtttgagggttggggtggtggggagaggagagtctctttcggcagactgcacctccccaccccttccctattta

SEQ ID NO: 855203 - DNA, 632 bp, Homo sapiens
cagtgtttcaggaagcaatctttttacaactataatttaagatggatttaagcactgcctaatggtcaagtctactaatgaaatacaaagtactagtttaaaaacaaaaaggctgggctagctcrtgcctgtagtcctagctactcgagagattgaggagggaggcctgcttgggtctaggagtttgccttgagctatgattgcaccactatgctctggcctgggcgacagagaccttgtctatataagtagaaaacaaaaacaaaaacaaaaaagttgcagtattaaataaataaacatgcttcaatcactgataaaaagagatcagtcagtattaagttttttaaaaaataaaagtgtgtgtgtgtaaaatacactactgattgcctttgtattgcaacggtttcctggttgaaccccaatgcttcctcataatcattattttctggcttgccattaaagtatcttacacttggtatgtctgagaataggaaatactaggacagacaagtctttcatatatacttcaacatatgtaggcagctggatcagttatcatctgataattaaatgagcctttgggaagtgctcagctgtttcctgtttttcctttgcagtagggcagtcacagc

SEQ ID NO: 855204 - DNA, 521 bp, Homo sapiens
caaattcgaaaataaaggccccaaatgaataggtctcactatattttgtctaatgccatgtatatatatattgaaagctatagggaaggccctttcttttcccactttcttcctgagaaatgtggagaccaaagaatgttaaacaaagaacagagaactaactttttccaatatgtcacttcatggataaaaagtagagacagagtggtgaagcacctgttgctttagaggcaataaactagtgaaatgttttaacagaagtcatcagctttcaaagatctcttttatccagttcacatcactcattgctcttaattcctttgtcacattttttactgcattacaagtaatccttgaaatccatggagcattttatatataactagaaccatgtggatggttctcatgtgttcagtatagccccaaatcccagcatttcttctgctccyctttttccatatatttagtagtagatgcaggtttgagaagcaaatcatggcaatagaaggaatccatccctc

SEQ ID NO: 855205 - DNA, 612 bp, Homo sapiens
gatttcacccatctacaaattttctctgccacacggctactgccactttaattcaccaagccaagccyttgcactcaggaccctggcccaaccctctttggccaagcaaagaggaaacgagaacaggacagaaaaaaaagtgggaccggaccaggcacctggctgtccattgaggccttgctatgcgatccaggacggaaggtgccggcagcaagctcatacactctagctgcgtgtcatgtcattgaagagggcgcgtgatccagctggaagggtggataaaagtgtaactgcccagtgggttcaccttccctgttacctagacagccaatttatcaagaaagggcatttgcaacagagaaaaggtaattcacgcagagctagctgtgtgggagactggagttttattattactcggtctccctgagcatctggggtttggagtttttaaagataagctggtgggtggggggcagccagtgagtcagaagtacccattggtcaggtcagagatgaaatcacagggagtcgaagctgttttcgcactgagtcagttcctgggtgccacaacatcagatgagcctgggtggtgccaggtgacccaccaagtgc

SEQ ID NO: 855206 - DNA, 545 bp, Homo sapiens
ctggagtgcaggtggggaaatcatagctactgaagcctcaaagccttgaactcyggggccaagcagtcctcctgtctcagactcccaagtggctgggaccacaggcatgcgctgccatgcacagataattttgtggtttttgtggagatggggtctcactatgttgcccaggctagtctggaacccctggactcaagtgatcctaccctcccacttcagcctcccaaagtgctgggattacagggtgaaccactacacccggcctattagaattttcaacagcatgtaagatcaagttttctagaaagagttataaacttagtatttcttatctgtcagatatttgaagtaatctatgtagtagtcagccaaattatttctctgccaacaaaaggttaccccattttccctaagcaataatgtctaccgtctgttactatcattatggtacagctaatttgggatgctatcaatcagccaggttattagcaaccaggtcagtttggttttcttatattttctactttgtctatctagattataat

SEQ ID NO: 855207 - DNA, 472 bp, Homo sapiens
gccgaggcgggcggatcacctgaggtcaggagttcgagaccagcctgaccaacatggagaaaccctgtctctactaaagatacaaaattagccrggcgtggtggcacatgcctgtaatcccagctactcaggaggctgagccaggagaattgcttgaacccagtaggcggaggttgtggtgagccaagatcacaccattgcactccagcctgggcaacaagagtgaaactccgtccccctacccccccaaaaaaaatccatgtgtggtggtgcatgcttgtggtcccagctgctgaggaggctgaggtagctggatctcttgagtccaggaagtcaaggctgcagtgagacttgcattctgcattctagcctgggtgacagagcaagaccctatctcaaaaaagaaaaaaaatggtccagtgtacctggtctcagaaatacctgcatatgtgccaaatgtaggttgtgaaaa

SEQ ID NO: 855208 - DNA, 472 bp, Homo sapiens
gccgaggcgggcggatcacctgaggtcaggagttcgagaccagcctgaccaacatggagaaaccctgtctctactaaagatacaaaattagccgggcgtggtggcacatgcctgtaatcccagctactcaggaggctgagccaggagaattgcttgaacccagtaggcggaggttgtggtgagccaagatcacaccattgcactccagcctgggcaacaagagtgaaactccgtccccctacccccccaaaaaaaatccatgtgtggtggtgcatgcttgtggtcccagctgctgaggaggctgaggtagctggatctcttgagtccaggaagtcaaggctgcagtgagmcttgcattctgcattctagcctgggtgacagagcaagaccctatctcaaaaaagaaaaaaaatggtccagtgtacctggtctcagaaatacctgcatatgtgccaaatgtaggttgtgaaaa

SEQ ID NO: 855209 - DNA, 568 bp, Homo sapiens
ttatataactaccctgtgtcacagccagcactaggccattcagaaatacagaattaagaagtccctgtccaaaggagtagagtctagtcgccaaagagatatagtcaagtgttaagtgcatatgaggtcatggtttgcatgctggctgtgtgctgtcatgcaggcacacaaagataagggcacagcatgttcccttgagaagtttatggtccagctgaggagctaagccattcactaataaaaaacaccaaaccgcagctgagcatactcaggtatacagagatcccttagaccacagctcccaggatcatggcgggtagcccctctctggacccacaggtgtgtgagaactaccaatgggagaagagcttggcccttcctaatgcttggagtctgatggactccaaaggccactgtgttttggtgcagaactggagtttttctcatgggcctgggactgacctgaaccatcagtgctgctatggagcggaactgactcttcrgctaggccctgagagacccccccatcagggctccttggatgagggatgcccaggcctgggcttga

SEQ ID NO: 855210 - DNA, 528 bp, Homo sapiens
gtgatagggataacacagaaaacccatggtagagagcatggcgactaacttggagggacttctttttgtsctttttttttttttttttttttttcgtttttgcagagatgcaggtattgtcatgttgcctgggctggtctcaaactcctgggttcaagcaatcctcccacctgtgcctccctaagtgttgggattacaggcatgagccgctgcctccccgcagcatggggggacttcttataagcatttttatttatttatttggaattcggatgggatagatcatgttggcctgataatgtatgtgcaagagcacagactctggggtctcatggacaagccccactctgccccttgcttaatgtctctgagcctcagtttcctcatctgtaacaagggcagaaatgccatccgtgtgcagcagagtaccgacgaaaggatggatgcaatgctcttatggcagtgccccagccaaagcacaaggaaaaaccacgaaagcaattccaagtttacaccacgtcccaaact

SEQ ID NO: 855211 - DNA, 528 bp, Homo sapiens
gtgatagggataacacagaaaacccatggtagagagcatggcgactaacttggagggacttctttttgtgytttttttttttttttttttttttcgtttttgcagagatgcaggtattgtcatgttgcctgggctggtctcaaactcctgggttcaagcaatcctcccacctgtgcctccctaagtgttgggattacaggcatgagccgctgcctccccgcagcatggggggacttcttataagcatttttatttatttatttggaattcggatgggatagatcatgttggcctgataatgtatgtgcaagagcacagactctggggtctcatggacaagccccactctgccccttgcttaatgtctctgagcctcagtttcctcatctgtaacaagggcagaaatgccatccgtgtgcagcagagtaccgacgaaaggatggatgcaatgctcttatggcagtgccccagccaaagcacaaggaaaaaccacgaaagcaattccaagtttacaccacgtcccaaact

SEQ ID NO: 855212 - DNA, 578 bp, Homo sapiens
gcttcagtggtccatatcataccttctttcttattggttattgcaacccaactctggagtcaaaggtacaggtgagattcattttctgtacctcccaggaatcagggacttgagataaggtgtccttgtcttggcctcgccataccacctagctacctctccctaattttccttcctttattttggtagcactgggtaggaaatcacagcctagaataaaggtttctatgaacttggctcccaaaaatttggtatatatttgttaagagtgtactatttcaccataattcctggactaattagtaaccccaaagggtcaggaaaagatcccagtcactactttattctgatacatgtatataaattatcatctacaactgacctggcctataccaatgaatgttattttttcttggtgagctataacagttacatttctaaattgtatgtttgtctgtattaccaatataggatgtacacatacactgttctaactatttwacaaagattaacatgtttaaaccccacagcaatcctgtgaggcagttatcattataatccccaatttacaggtaagg

SEQ ID NO: 855213 - DNA, 622 bp, Homo sapiens
gtcttgtacagaggtttagacaagatgacataaagttcttagcacgagttcttctcaaaagacgctaggttgtttttgtttgtttgtttttgccttctccatttcctgtagccctatctatttctgattataaaaagaggactgtttcaaaaaattaaacataagcttaccatatgatccagcaattccacttctggtggtatacacacccaaaagaattgaaagaattgaaggcaggactccaacaggtattcatatgcccatactcatagcagcattattcacagtagccaaaaggtgggaacaacccagtgttcatccgtggattaatggacaagcaaactgtggtctatccttacagtggaatattattcagcctaaaaaggaaggaaattctgacacatgctacaacatagatgaaccttgaagacactgtggtaagaaaaataagccagacacaaaggacaaatactgtatgagtctacttatatgaagtatttagagtagtcaaattcatagagagagaaagtggaattayggttaccggcggggcaagaagagagggtatggagtttcagtttgggaagatgaaaagagctctggagatggatggtggcgatgg

SEQ ID NO: 855214 - DNA, 610 bp, Homo sapiens
taaatgtcttcttttgagaagtgcctgctcatatcctttgcccactttttgatggggttggtttttttcttgtaaatttgtttaagttccttgtagattctggatattagacctttgtcagatgagtagattgcaaaaattttctcccattctgtaagttgcctattcactctgtttgcaaatgatatgattctatatttagaaaaccccatcgtctcagcccaaaaactccttaagctgataagcaacttaagcaaagtctgaggatacaaaatcaatgtgcaaaaatcacaaacattcctatacaccaacaatagacaaacagagagccaaatcatgaatgaactcccattcacaattgccacaaagagaataaaatacctaggaatacagcttacaagggacgtgaaggacatcttcaaggagaactacacaccattgctcaaggaaataaaagacacaaacgaatggaaaaacattttgtgcttatggataggaagaatcaatatcatgaaaatggccatactgcccaaagtaatttatagattygatgctattcccatcaaactatcattgactttcttcacagaattagaagaaaactacttta

SEQ ID NO: 855215 - DNA, 564 bp, Homo sapiens
ttgtgttattgtagaagtattgtacacttagtggatgcttactaaatgctgacacgttatttattattaattgtcacaggaattttaaaaagtaattccatggaatgactgtattaacaagaacctaattacaagaattgagcaagaccatttgactctctagaatatagaatctctgtacgtcattttattttattttatttatttattttgagacacagtcttgctttgtcacccaggctggagtgcagtgcagtggcatgatctcggctcactgcaacctccacctccagggttcaagtgattctcctgcctcagcctcctgagtagctgggactacagatgcccgccactaagcctggctaatttttgtatttttagtagagacggggtttcaccatgttgaccaggctgttctagatcttctgacctcatgatccgctcgccttgscctcccaaagtgctgggattacaggtgtgagccactgcacccagcctaaaagtcattttaatttgtaagatatgtttactgttttagagagacagaggctaacttttcatttt

SEQ ID NO: 855216 - DNA, 599 bp, Homo sapiens
acaaattatattgtaggaaaatcctggttcttgtcatatggccagaaaagattagactcgcggacacgtagaagggtaggaaaaacggaacttcttgggtgaaaagggagaaagagaaaaacttacagcagagcgagaaggaagcctgtttactggctccggccccatcacacaggaacgcaagaggctgggctcctcccctctgcaaatggcgcgaacttccgtggctccaccccattctcccagtgcgcaggcccgtccgaggttcaccgggaagcccttttcacctggcggtctcaatatggttggaaaagcaaagaaaaacaactgaaaatctgtaaatataatacataattttgagaaatggctgggtaaacaatagtatacagaaagaaattgctttcatatagtcaaatgttaggcagccagaagaaataattgaaattaaaaatcacattttcaatagcaactttaaaagaaatagcaggagaaatttgaagaactatacamaatccctagaaagaaaactaacatgacactgaaggacaaaagaaaatttggacaaataaaaagcagatcatgttttgatatcaaaatta

SEQ ID NO: 855217 - DNA, 615 bp, Homo sapiens
gcctgttcacatggttttacttctatttcaccagtgctgtattgccattctttctgttttattttctttccatactgctctcggatcaaattttacatcctgagaaatgcctttttattactccggttatgtacaccaccttcacgatgcactcttgaatacaatacctgattttaatttctccaaattgcatgttaaaatatcaaatgtaattgcttattttgtttagtgtctcctactgagaatataaactctataagtagattatgaattagctgtggatcacttgaaagaggcaagggaaatgttaggacaagaggacataacctgtaaagaagagtagagaagaaaaggtctttaaacagccaaaagaatgtgaaagatataagaaaaaccctactcttcattttcccccatgtctatactttccttgcaatgtttattacaaatgcaataccatctgcccacatctgtacatgttcacgttgtcctacatttttattctcaaatgccatttccctagtaatgytttctaggatatcctggactaaagtaatgtcttttacttttagacacttgaaacctttttatctccattttgtttatctcctttgt

SEQ ID NO: 855218 - DNA, 501 bp, Homo sapiens
ctattctagtgtagtctacactaatcaacctgcatctgtaacatgctactaggataatacatttctgaccatggaackcgacttgctatatcccattgaagtcaaccttttggtcaagtgactttcttaagaaaatatgatgtgaaaagaaatgacatactttgtgtcactgcatattttttgtcacttttttaccactgcctcaatattggcatggcccagtttgagtggctttttcatccaaaggcctagaataaacacatgtgtagtacactggcagttgacacacagtaaatataaaacacaagtaagaagtatgtaatttaccaagatctggggattgctcgagtttccagaagtatttaattaaaactaatataaataaatttacaaaatatactttttgcctacaatattccagggacttttaaaatgttgaaatagagttgttaatatggcaagcaactcccctgactagcctcaaggagcttacattttgtg

SEQ ID NO: 855219 - DNA, 501 bp, Homo sapiens
ctattctagtgtagtctacactaatcaacctgcatctgtaacatgctactaggataatacatttctgaccatggaactcgacttgctatatcccattgaagtcaaccttttggtcaagtgactttcttaagaaaatatgatgtgaaaagaaatgacatactttgtgtcactgcatattttttgtcacttttttaccactgcctcaatattggcatggcccagtttgagtggctttttcatccaaaggcctagaataaacacatgtgtagtacactggcagttgacacacagtaaatataaaacacaagtaagaagtatgtaatttaccaagatctggggattgctcgagtttccagaagtatttaattaaaactaatataaataaatttacaaaatatactttttgcctacaatattccagggacttttaaaatgttgaaatagagttgttaatatggcaagsaactcccctgactagcctcaaggagcttacattttgtg

SEQ ID NO: 855220 - DNA, 519 bp, Homo sapiens
tagatatgtggcattatttctgagggctctgttcrgttccgttggtcacatttgttgttttatgactttttatcatagccattctgactggtgtgagatggtatctcactgtgattttgatttgcatttctctgatgattagtgatgctgagcagtttttaatgtttgtgtgtacttgagtgtcttcttttgagaagtgtctgttcatgtcctttgcccatttttgcaatggggttatttgttttgtcctcactgatttaagtttcctatagattctaaatattaggcctttgttagatccatagtttgtgaatatcttctccctattctatagcttgtctctttgctttcttgacagtttcctttgctgtgcaggagctctttagcttaattaggtcccacttgtctatttttggttttgttgtgattgtttttgaggatttagccaaaaattctttgccaaggcttatgttgagaaaagtattttctagttgtcttccagaatttttatagtttgag

SEQ ID NO: 855221 - DNA, 648 bp, Homo sapiens
ccaagtccccacccgactcaggagcccagctggcttcacctagtggatcccggccccggctgtgsgtggagctgcccaccagtcctgtgccatgcgcccgcactcctcagcccttgggcggtcaataggaccaggcactgctgagcagggggtggtgcctgtcagggaggctcgggctgcacgggagcccacggtggctgggggaggctcaggcatggtgggctgcaggtcctgagtcctgccccgcagggaggcggctgaggcctggcgagaatttgagcacagcatgggcgggctggcaatgctgggggacccagtgcaccctctgcagctgctggcccgggtgctaagcccctcactgcccgggccggtggtgccatctggcagctctgaatgtggggcctgccaagcccatggccacctgaaactcgctcgctagcccaggagcaccctgtgctgcccgggttcctatccgcgcttctccctccacaactccctgcaagcagagggagctggctccggcctcggccagcccagagggaggctcccacagtgcagctgcgggctgagggctcctcaagcactgccagagccaaggccaaggaggtgctgagagcaagggagggctgctagcacgttgtcacctct

SEQ ID NO: 855222 - DNA, 543 bp, Homo sapiens
gagcccagctggcttcacctagtggatcccggccccggctgtgggtggagctgcccaccagtcctgtgccatgcgcccgcactcctcagcccttgggcggtcaataggaccaggcactgctgagcagggggtggtgcctgtcagggaggctcgggctgcacgggagcccacggtggctgggggaggctcaggcatggtgggctgcaggtcctgagtcctgccccgcagggaggcggctgaggcctggcgagaatttgagcacagcatgggcgggctggcaatgctgggggacccagtgcaccctctgcagctgctggcccgggtgctaagcccctcactgcccgggccggtggtgccatctggcagctctgaatgtggggcctgccaagcccatggccacctgaaactcgctcgctagcccaggagcaccctgtgctgcccgggttcctatccgcgcttctccctccacaactccctgcaagcagagggagctggctcyggcctcggccagcccagagggaggctcccacagtgcagctgcgg

SEQ ID NO: 855223 - DNA, 541 bp, Homo sapiens
aaaatcaaatcatactagctgacaygcgtataacttcagagatgcttaaaggaaatttacagctgaaatcactgctttggaacctgaaactatggattcaactgagtggctagatgtagtccatttagaagcacttagaatagtcacaaacatgactaaagagattggaaaatcagatttatatgaaaatgttaaagcaacaagattacataacaaggaaaagagcaaaatgagtagttattactttttgaaatatacaaattactttttgaaatacacaaatcactttttgtgagatacactaaaagatgataaactacattttctgacaacataagaaacacatatagaagtagatacagaaaatgttgtcttattaaggaggttggtcaaatagtgaactacgttacagaagtggagagggagatcttatttcagttcatcagatgttttttaacatgtgaacaatcatgaagatactgaaatttttctagaaacttactcttttctcaagctctagtttcctctcttggccctctag

SEQ ID NO: 855224 - DNA, 555 bp, Homo sapiens
ataacccgccacttctactcttaggcattttacctatgagaaacaaaatcatatgcccacaaaaaaacttgtgcaagaatgtttataaaacctttattcaaggagaataagaactggcaacaacccaaatgcctaccaataggtgaataaataaactaattgtgataaattcatagagtagaatattactcagcagtaaaaaaaaacaaactatgggtatatacaacaatatggatgaatctcaaaagcatttttaagtgaaagaaaccagaaacaaaatagtagatactgtataattccatttatattaaatacaagaataggtaaacttaatctatggtgatggaaatcagaatagtgagtgcctattagcggtgggagttgatgggccaggaacaaaagaaaacttttaggatgattaaggttatgtacacaggagtgcatttgttaaacctcatcaaaatgtgcacctaaaatttgtgcattttagtttgtgtagattttacttyaattaacataatgaaatcttcaaaaccctccaatagcttatcattt

SEQ ID NO: 855225 - DNA, 555 bp, Homo sapiens
ataacccgccacttctactcttaggcattttacctatgagaaacaaaatcatatgcccacaaaaaaacttgtgcaagaatgtttataaaacctttattcaaggagaataagaactggcaacaacccaaatgcctaccaataggtgaataaataaactaattgtgataaattcatagagtagaatattactcagcagtaaaaaaaaacaaactatgggtatatacaacaatatggatgaatctcaaaagcatttttaagtgaaagaaaccagaaacaaaatagtagatactgtataattccatttatattaaatacaagaataggtaaacttaatctatggtgatggaaatcagaatagtgagtgcctattagcggtgggagttgatgggccaggaacaaaagaaaacttttaggatgattaaggttatgtacacaggagtgcatttgttaaacctcatcaaaatgtgcacctaaaatttgtgcattttagtttgtgtagattttactttaattaamataatgaaatcttcaaaaccctccaatagcttatcattt

SEQ ID NO: 855226 - DNA, 639 bp, Homo sapiens
caggatgaatgcttaggctgcccacttgaatcacatggaatgwatttcccacaagaaagaaacattctgttaccataagcatgtagaaagggtgatgggaaggcaaaacatcagaaaatcactaagataagtacataataataaaagtttaagtttatcaggaagatataacaattcaaaagaaagtaacttcaaatatgtaaaccaaaagttgggtgaactataagaaaatttggcaaatccatagccatagttagagttttcaacatgcttctctcaattttcaataggataaacaaagaacaagtcaggaaagaatatttaaattgcacaattaccaaacacagtctttaaaaatgtatgtggagctatgcaagtaagaattagaatatatacatttttcttaagtacatataaaaagtttgcaaaaccatttcaaaaacctaatatattatcaaccatattatctgaacacaatgaaattaattagtcaattccaaaaagacaaatgaaaacccacatacttaaaaaatttcaaagatcacttctaaataccttacaagtcagcgaagaaatgttcacagaaatttgaaaatactacaagataaacaataatgtaaatgttgtatataaaaactt

SEQ ID NO: 855227 - DNA, 612 bp, Homo sapiens
atatgaaaaaattgctcaagatcactaatcgtcagggaaataaatgttaaaatcacagtgagataccatcttaccccaaccagaattgccattattaaaaagtcacaaaacaatagayattgacattaatgtggtgaaaagggaacactgatacactgctgatgagaatgtaaattagtacaacctcagtggaaaacagtatgaagatttctcaaagaactaaaaatacatctacatttgatccagcaatctcaagtacttagtatctacccaaaggaaagtaagtcattatatcaaaaagatacctgcacacatatgtttataatggcacaattcacagtggcaaagatacggaaccaacctaaatgtccatcaactaataagtggataagaaaaatgtagtgtatatacaccacggaatactacacagccatgaaaaggaataaaataatgtcttttgcagccacctgaatggagctggaggctattatgctaagtaaagtaactcagggatggaaaaccaaataccccaaataccataggttctcttataagtgggagctaagctatgggtaggcagaggtatgcagagtggtataatggacattggag

SEQ ID NO: 855228 - DNA, 573 bp, Homo sapiens
actagttcaaagagaattctgtttaatctctggcataaccaccttcgactttaagaagagctgtgtgctccctttggttccggagacccctctcatagccagtaaaaatggccttggaccacagccttccagacatatttccttttagaagtcctgttccctgcaggcctccacaggagccaagatggcgggaagagaaaaacaacatccaggctcttacttaccatgtcaatgcttctcagccctggctaattccagaatcacctggaggctttttttctaattacagacttctgatactacagttgtccctcggtatcctgggggaattggttccaggactccctcagataccaaaatcctcagatgttcgaggtcctcaccccagtggcttagtatttgcatataacctatacacattctcctatatactttaaatcatctccagacgacttataatacctaatactatgtaaatgctataaacagttgttatactatactttttaaattttctrttattttttgttttattgtgattttccttgttttcaaaattttttcattcaaagt

SEQ ID NO: 855229 - DNA, 560 bp, Homo sapiens
tataaatattattgtttcctttcaccgaagaaaggcaccgtgaagggacagcacaaagtcttctagcaagggaaagatgagcagctgaacatgagatgctaaattctctaagcccagtgacttctccacttacttttatagtggtgttcattgtaaatggtggatgtagggtgacaaattaggtggtttagaggactgcaacgaagtaagaaaagaggacttcacctccagcttccaaggtagaactgcagaagtcccagtattaagtgacagtgactatctaggccccgaggaggcttgagcttatagcaggtcttcaatctgtcacaagttttgaagaactctcctatctaatagtcccagttaacgcatatagtggttatgatttctcaggcgacactcctagtccacagcacccatagtctcytctggcatccatgatgatgtctgatcttggtcattagttcctggaagtcatatcatagctcccctcattgcccaaatgcaaggccgttttggctctgctcaccccctcacagctactgcagagcccctcccaa

SEQ ID NO: 855230 - DNA, 499 bp, Homo sapiens
ttggacaagtcactttacccttctgaatcacagcttcctcatctgtaatatgagatcagtttaggtttctctctctctctctttctgtgtgtgtgtatgtgtgtgtgtgtgtgtgtgtgagtgtgttcttaaacacttagcactgacctagatttttccttatgtgtttatcatcaactcctcccaaggccactagagttttgcaggtctggttcacactacctcagggactctagatggaaccagatgaccatccattgaaagaagcagtatatgccaaggcatctctcctttatatgttttttcttggtgggtcaaatgactcaccatttaataatctaaaaatgtctactttctactatatctacggatacaaattttagtgcctggaaatggggtgctagcacaacaaaaatctaaaatgtaggattggcatttgaaccagacagtgarcagaagatggaatggctatacggactttaaggaaaacattaatgaa

SEQ ID NO: 855231 - DNA, 627 bp, Homo sapiens
aatgtcaaggcacttcagaaagttgctaaattaatacataatgtaagaagtatttattattactttacacctgaatgtttgtgtccccyccattcatatgttaaaatcgaaacctcaaagttgatagtattaggagatggggcctttgggaggttattaggttatggggtggggctctcatgaatgggatgagtgcccacatgagagaggtctgaaagaaaaccccttccccttctaccatgtgaggacacagaaggcactatccatgaaccagaaagcgggccctcaccagacatcgaatctgccagcaccttgatctcgcactttccagcctccaggacttcgagaaataaatttctgttgtttaaaagctatacagtttacggtattttgttgtgagccggagtgtactgagaggatacctttctgatattcatcataagatttggtttctggtaggcactctccaaatgctatatagtgctttattgtagctgcccttacttcagatagtgagtgaaataagatgtgctactagttacgctgagtacgtaccaagagccaggcacggagctaagggcttcgcatgtgatgcttccgtggatccttgcaatattataaaactga

SEQ ID NO: 855232 - DNA, 440 bp, Homo sapiens
gtttaaccccaatggatgatgacttccaaagtctgagatgggctagtctcactggtttctaccagtgagactcgtcctgagtgttaactctacctgacttgtcctgagtgttaactgtccagactggtagatacctgtggcttcaagtccctgtctgtaaaatgaagtcaacggtgcccactgcacagggctgtttgtgcgttaaatgagacagtgtgtatggagggcttagcattgcctgatatagagttagagctgggttactagtgagaatagcagtggaaattcttgttgttagggccgcccccgctccatcttcctcaagctcctcgaagggagctgcactggccacctcttagaagtggtgagagctggcctgaatgctmtgggccgttcggacatcctcagccttccttacaatgggacagcaggagtaggat

SEQ ID NO: 855233 - DNA, 617 bp, Homo sapiens
aacaaaatgtgtgaagtattttttcatttcctttattccattttaattatgatttctggatcaaatataaacgacttgggaaattttcctcatgaaaattttgaggtgccaaagttgacatstgcttttaattcatcctcaaaaattatgaaaaattccaaataggaatttttcttcgcaggcatcttggcttaaatagacttagttaaatactaaataaaatacttaaatacaattttgtctaatgttataaatactatgttaaaaaatttaacagactaaaatcataatttattttaatatcaattattttgccttttataatttaaattttataagtatgtgttgattgaaaaaaggatatgttcctctaaagttatttatccaacactttgtaaatattcctcaaaactataaatccatttccctgttcagttccttgaaaatgccaaataattggttttatagaaaaaaattagctgctttaataataatcattaattatagcagcactttatttggcaataatatacatttttatttatttccaaaggatattataaactttagatcagagagccaaaagcctgtatcacacagtttccattgctttatgt

SEQ ID NO: 855234 - DNA, 600 bp, Homo sapiens
gacattttccttcacttccaacagatctagcttcaaatattactttatcatgaaagccttacctgacctccctctttaatmgtagttcttattctcttatccttgttttctttttcttcacaacacttatcaccacttagtactgatatacttatggtatacttttttttgtctcccgtaccccagctacaatataaacaccatgaaagcagggatttttgttttattaattgttgagaccctagcacctataacagaggctcactaagtattcatcgaattagtaaataaaagattaagtaaagacatttcaaaagtgtaagaaaaggagaattcagggctgggcatggtggctcacaccggtaatgccagcactttaggaggccaaggcaggaggatcacttgagctcaggagtttgagaccagtctgggtaacatagtgagacactgtttctacaaaaaaattaaaaataaataaataaataaataatcagttgagtgtaacatctgtagtcccagctacttgggaggctatgacaaaaggatccctttagcccaggagttcaaggttacagtgagccatgattgttccactgccct

SEQ ID NO: 855235 - DNA, 467 bp, Homo sapiens
aaaaaggctgagctggccaggcatggtggctcatgcctgcaatcacagtactttccgagacaaaggtgggtggactgcttgagcccaggagtttgagaccagcctaggcaacatagcgagacctcatctcaacaataaaaataaatacaaaaaatttgccaggcatgttgatgtgcacttgtggtcccagccactcaggaggttgaagtgggagaatggcttgagctggggaggcagaggagctcagattgtatcactgtaccccagcctggttgatggagtgagaacctgtctaaagagaagagaagagaagagaagaaaaaaaaaagaaaaagactgagctgagaatactccctttaatctcctggaaacagtacgccaaccttcaatagtgcyttattgtccagataatatgcctcctactgatgaggtggagcagaagctccagggatcctacgtgttcttaa

SEQ ID NO: 855236 - DNA, 481 bp, Homo sapiens; identical to SEQ ID NO: 838594

SEQ ID NO: 855237 - DNA, 506 bp, Homo sapiens
gtaattttacatttatctctctgagttgtttttacaattgacagctcatagatgtgtatatatctggggtacaaagtggtgttatgatttttgaattcaatgtggaatggtwaaatcaagtgaattaacatatctatcacctgaaatatgtaacagtattgtgataagaacatttacaatttattctttttaatgaaatttaaatgtacagcactcaattattagctatatttaccatgttgtgtaattgatcccataaaaagagaaagaaatcaaatgtattcttcctatctcactgatagggccttgtacccttaaactgtcatcttcccattcccctcacccctcagtcctggtaaccaccttttttttttttttggagacagaatgttgccctgtcatcaggctggagtgcaatggcgccgtctcagctcactgcaacctctgcctcccgggttcaagcagttctcccacctcagcctcccgagtagctgggattacaggtg

SEQ ID NO: 855238 - DNA, 570 bp, Homo sapiens
tctcccacctcagcctcccgagtagctgggattacaggtgcctgccaacatgcctggctaattttttgtatttttagtagagatggggttttgctatgtttccatgagtccaattgttttacattccacatgtaagtgagaacattcagtatgagaacattctgtgtttggcttatttcacttagcataatgttctaaaattcccttgatgctggtgtttttgtttgtttttagctaatcttgaaaaaactattaagagtatgcttcagtatgaaaatagcaacacaaaaagaaaagagtggaaaggactctgtctctctctcacacacacacacacacacacacacacaatggaaaggagaaaattattgtgaatggtaactacatagataaatctaagtaagtagtgactataaccataatattcactacagccatttccatctatagaggatttttaaaaagctaaatttggaatattagacacttaaaaaatggaaactatcaggatataattttagtcaaggcattttaargtctttattttgttaggaggtgagtaattaactt

SEQ ID NO: 855239 - DNA, 570 bp, Homo sapiens
aacctctgaaagaacagaatataacacctgatataactttgcaactgatagaaacaaaagggggaaataaaaaattctacctatccaaaagaaaatgggaaaggaaaagataaataaaaatcatggtaacataaaaaccagggccgggtgcggtggctcacgcctgtaatcccagcactttgggaggccgaggcaggtggatcactgaggtcaggagttcgagaccatcctggctaacatagtgaaaccctgtctttactaaaaaaaaaaaaaacaaaaaaccaaaaaattagccgggtgtggtggcgggtgcctgtagtcccagctactcgggaggtgaggcaggagaatggcgtgaacctgggaggyggagcttgcagtgagctgagatcgcaccactgaactccagccagggcgaaagagaaagactccgtctcaaaaaaacaaaacaaaacaaaaacataaaaaccaaatacaatgggtgaaccttgattgaatcctagtttgaaaaaacaaataagaagatttttttggacaatgcaaaaatttgaatattaactcagtatgaga

SEQ ID NO: 855240 - DNA, 677 bp, Homo sapiens
acctctgaaagaacagaatataacacctgatataactttgcaactgatagaaacaaaagggggaaataaaaaattctacctatccaaaagaaaatgggaaaggaaaagataaataaaaatcatggtaacataaaaaccagggccgggtgcggtggctcacgcctgtaatcccagcactttgggaggccgaggcaggtggatcactgaggtcaggagttcgagaccatcctggctaacatagtgaaaccctgtctttactaaaaaaaaaaaaaacaaaaaaccaaaaaattagccgggtgtggtggcgggtgcctgtagtcccagctactcgggaggtgaggcaggagaatggcgtgaacctgggaggcggagcttgcagtgagctgagatcgcaccactgaactccagccagggcgaaagagaaagactccgtctcaaaaaaacaaaacaaaacaaaaacataaaaaccaaatacaatgggtgaaccttgattgaatcctagtttgaaaaaacaaataagaagatttttttggacaatgcaaaaatttgaatattaactcagtatsagatgatatcagggaattattataatttctcttaagtttaaacatgatgctttagatatatagaaaaatgcccttcaatttaagagatgaattttaggagataaactgtga

SEQ ID NO: 855241 - DNA, 576 bp, Homo sapiens
ttagatatatagaaaaatgcccttcaatttaagagatgaattttaggagataaactgtgaaatacttmtaagtgtaacttaccttgaaaaggtggccatgcaaatcagatcagagaatgggaggccagtgagccctatacgctggaaatggtaagcgactcttcactattattagttgcaccaagataactttgcaagtgctagtccgatgagctgcaggtggcttccacctagccctgcctgtgaagtcctgcatgctacataacataaggaaagagaggttctattacaaccgttctcctcaatgaagacttctttgatcaaccatctcccttctttgaagcatgttttatgaactatttgggtagcactgaacagactgtgatcatgcctggacctgtcatatcccctttctcacaggggcagtagtaaagtgcaggggttagtagagtgagctctagagtagatggccagggttcaaatcccaacaactctactcactagactgtggctttgggcaagttatttaatatctctatgtctcagttttctcatttgaaaaatagtgatgatgct

SEQ ID NO: 855242 - DNA, 627 bp, Homo sapiens
agactgtggctttgggcaagttatttaatatctctatgtctcagttttctcatttgaaaaatagtgatgatgctaacagtacctgtctcataggatgtcagatggattcattgagtaatgcatgtagggaacttacaaaagtgccttgttttgcattttttttaaatgtgggtgcttagaatgctatctggaatctaataagcactacatacatggtaactcattttatacataatacattttataattccatagagcctcaggcttttttttttttttgtgtgtgtgtgagacagagtctccctctgtcactcaggctggaatgcagtgacatgatctcggctcactgcaacctccgcctcccgggttcaagtgattcttctgcttcagcttcctgagtagctgggactacaggcgcgcagcaccatgcctggctaatttttgtatttttagtagagacggagtttcaccatattggccaggttggtctcaaactcctgacttcgtgatccgcccgcctcggcstcccaaagtgctgggattacaggcgtgagccactgtgcccagctgcttcaggctatttttttttaaaactctttgtgtttattagcacttgtaatattttac

SEQ ID NO: 855243 - DNA, 618 bp, Homo sapiens
atcaactggggataaaagacataaaatcacaaggtagtggtgcagtgtaaaaagtaaratacatctatacaccatctatccatcagtcatacactgggaccattaatgacatactagatatttgttctaattttctagtgcagagattattctcctgcaaaaacagaagttgaaaatgaattggaaattgagtaatatcttcctgtcttccagcattttcaaatattttgaaattttcttgttgtctttccagttttatttcactgtggtcagagaatatactcttgttttaaatttgtggaaatgtgttttgtggctatgttatctattttactttatgttctatagatagttgaataggttttctgctattgttgagtgaaatgttctgtaaatggtgattagatcttgttgatttagttgtctgtaagttctcatcactgatttttctctttagttgttgtatcaattgttgagaaagggggttgaagttcttaactataattccagatttgcctctttctccttctagttctatcagtttttgcttcatctagtttgcatctgtattgtttggtgcatatgcatttaggattgatatttttttcttgttagttt

SEQ ID NO: 855244 - DNA, 560 bp, Homo sapiens
gaaacaccaaaagcaatggcaacaaaagccaaaattgactaataggatccaattaaactaaagagctcctgtacagcaaaagaaactatcatcagactgaacagacaacctacacaatgggagaaattttttgcaatctatccatctgacaaagggctaatatccagaatctacaaggaacttaaacaaatttacaagaaaaaaacaaacaaccccatcaaaaagtgggtgaaggatatgaacagacacttctcaaaggaaaacatttatgcagccaacaaacatatgaagaaaaactcatcatcacatcattagagaaatgcaaataaaaaccacaatgagataccatctcgtgccagttagaatggctatcattaaaaaggcaggaaacaaaagatgctggagaggatgtggaaaaataggcaygcttttacactgttggtgggagtataaattagttcaaccattgtggaagaaagtgtggtgattcctcaaggatctggaaccagaaatatcatttgacccagcaatcccattactgggtatatacccaaaggatt

SEQ ID NO: 855245 - DNA, 599 bp, Homo sapiens
tctgagcagagggcctcaatagtgggcttaaaatatccaagaaccatgctgtaaataaaattattatcattcaggctaggwtgtttcatttacagagcacgggcagaaaagatttagcataattcttaagggcactagaagttttggaatggtaaatgagcattggcttcaacttagagttaccactggattaacccctaaaaaaagagtccgactctccctctgaagctttgaagctaggcactgatttctcctctctatctatgaaagtcctagatgacatcttccaaaaaaagggtgtttcatctctactgaaaatcttttatttagtgtagctatcttcatcaattatcttagctacatcttctgggtgcttgttgcaacatccacatgagtacttgctgcctcaccttgcacttgcacactccaggcaagcaatcaattttgcagtggacaccagcttggggtcctttgattcaattttcacactgtctatctggagacagcatcacgtaatacagactgggggctcagctccacaaaactgccctacttcatagactctcaagtcctggcctctggaacttctgaccaattat

SEQ ID NO: 855246 - DNA, 358 bp, Homo sapiens
ggaatacaggagaggcaccaaacccagatgctgtagagggttggggggtcagcggagggggcagcrgaaaactcaagaagacttcctagaatttgaagaatgaataaaatttacccaggcaaataggaagggaaaggagattggagctgagggaactgcaaggacaaagacccagagccagagaaagtcctaggcagtggatatggagaggggactggagggtgaagaggagtgtgagtggtgtgagaagaactccatctttacctgaagggctaggagcctttgactacagccaggccaacacctaaattctcagcagataagccaattcagaaaataatgaactttggtgtttttt

SEQ ID NO: 855247 - DNA, 601 bp, Homo sapiens
ttctcagcaaactatcgcaaggacaaaaaaccaaacactgcatgttctcactcataagtgggaattgaacaatgagaaccttggacacaggaaggggaacatcacacactggggcctgtcatggggtggggggagtcgggatggatagcattaggagatatacctaatgtaaatgatgagttaatgggtgcagcacaccaacatgacacatatatacatatgtaacaaacttgcacgttgtgcacatgtaccctagaacttaacgtataataataataataataataaaagaaaatcaaagctgtaattaaacgtctctcaataaagaaatgcccaggacttgatggttcactgctgaattttaccaaacatttaaagaactaatactaatcctactgaaactattctgaaaaatagaggataagtaatatttctcaacatattctataaggccagtattaccctgatacccacaccagataaagacacatcagaaaaagaaaactacaggccaatatctctgaagaatattgatgcaaaattcctcaacaaaatagtagtaaactgaattcaacaatmcattagaaagatcattcatcgg

SEQ ID NO: 855248 - DNA, 430 bp, Homo sapiens
ctattggtctatgatttttttttcctgtaatgtcgtctgatttcaataacaaagcaatgctggaaactgaataggttgtcacaaagagtggatttcatagaacgagctgggaagtattttcttcaatttctggaagagtttatgtggaaatggtaatctttcattcttaaatgtttgataaaatttaccagtaaaactatatgggcttcgagttttctttatgtgaaaatttgtaatataaatttaatttatttagctttgacagtttgtctttaaaatttttgttccatgttatctaaattgttgaatttcttggcataaaattgtaaataatatttactgattatcctttcagtgtgtrtgggagccgtagttatgtgccctttttaattcttgatattattaatttagtctttttcttgatcaatca

SEQ ID NO: 855249 - DNA, 604 bp, Homo sapiens
atttttaatagagatggggtttcaccatgttgggcaggctggtctccaactcctgaactcaggtgatcctcccactttggcctcccaaagtgctgggattacaagcgtgagtgagccatggcgcccggccatgtatttgttttataaccatgagaaactaaaatcaaaagtctatttgtagattctcccagtgggttataaaatctggaatatttctgaagaaattatttctgctacacacacacagacacatacacagagagacacacacacagcgcaggtgacagctctttggtaactcaactatgaagtatagtttttagaatattttcactgatgaaagatcaaactacagtgattctgtgtgaactctggtgtgtatgcgtgtttctgtgtgtgttgtataaatatatatatatatttcaccttaaaatcagagaagaacctgattttgaaagagcaactgacaaattttatttccagggagattcgctgccaaaagggaaaaaccatcctgtctggtctcaccaaataccayctcccgtctattcgccactcagcaaccagagtgatctcttagaaacataattgggtcatatcactc

SEQ ID NO: 855250 - DNA, 666 bp, Homo sapiens
gctcacttcgtcaatgaaatgcattttttaacattctttatgctaatgaactgtaccatggatgcacatttaaatagcaatatttgaagcccctgccatrgatactccagaaggtggatcgtttaacaaatgctctcagagcactccctaggtgatggcatggttccaagcactttgaactttacacatcctaacccatgtcattgtcacaacaatcccataaggtatgtacaatttttatcttcatgtcacaggtgaggaaactgaggcatggagaagatgaccatggctgaggtctgttctcccctctctatccacagagccaaactggatactgggaacacaataaataaatacctgttggtaataggtaataatcaccaaaatggagattggttccactgaatggcctgagattggactgtgtggtagaggatgggtagcagctgagagctagcctgtcatgactgatggaacccatttcacacttatcatgcttcccacgtgcctacctccaattctcttgcatccttcatgggtaggagttggccttggccagggcctggttgcctaagtgtctgcagagttgcctatttgggctttcgccaacagagacagaagtatattatgcatcttaggattctgtattacccagcactcaatcaa

SEQ ID NO: 855251 - DNA, 623 bp, Homo sapiens
actctatcccttagtgctatgtgaccatggacaaattacttaatttctctcttycttggcttctcgtttgtaaagtgaggaaaacattagtcctgccaaatatgattgttatggagattaagcaagttaatatttgttggagtgtggcagtccctggcacactcctggacttagcacattggcatagatgctttttgaggaggagcccatgaaacaagccacagaagacttgccacaggtttgcattgagtgtagcctgatggtgcagctttaggagagccacagggagaggtcactgaggaggctgtgaggtgggtgcacccttgactctactgtcttctcatcaggtggagtataagagagggcatgatgaacgcatctccaggttctccacggtggtggatactcctgagctgctacggagcaaggctggggcacagcttcaaagtgatgtaagaaaggagggaggccagtccatcactgatgggcatttgggttgattcctcatctttgctcttgtgaatagtgctgcaatgaacatacacgtgcatgtatctttataatagaatgataaaaaggaacaagatcatgtcctttgcagggacacagatggagctggaggc

SEQ ID NO: 855252 - DNA, 630 bp, Homo sapiens
tttcaggtgagatacacagaggactatgaacaacaaagagggaaaggcagtttccctgcgatgatcacacccgcctrtcagatagccaaaagagccaatgagctggcaagtgatgtaagtgtccttgacaatgtggtcatgttagggagaaagaggaatgtgaacctgggtctgaggagtccaacttcctgttgacttttgcatttaccctgaagccagggagtagttttcctttatagttttaagtcaattttaccaatgacaatgacctggcacttttatgtctgagacatacctactccctagatccaagcagaaaaagaacattccattaagacattcacttttactcttttggctcctgtgcatgggagtcaaattcaccgagtttgtcctttgccttaaaacaggtgaggtaccatcaacaatatcaaaaagaaatgaggggaatggctggtccagccattggagctgagggcatcttgacaagggaatgtgcagaccaatatggccaggtatgtgataaaatgatctcctgacctgctcttttccatgtttggcccattctaggctgtgacacagctatgacaatttaatcaggggtggggctttggtttatctttacctttt

SEQ ID NO: 855253 - DNA, 618 bp, Homo sapiens
tggtagctattttccctctggctttcaggagcccttcttttgcccttgaacagatcagaccccctaatcctgacagagctacaaagatgctgctcagaggggaaggggagagcacccccagccactcaagccaccctggtccctgctcccagcggcacctactcggtgcagtgggcagcagtgagcacccagcaggggtggatcagcgccccaccacagaagtggccctggggcatggagatggtcagaggcagcgaggactggagggacgcctgccatgggtgcttgcccgccgtgctcttaaagcctccatagattctcttgatcttcctctctgctatctcagtctttccacaggagtcaaaccccggaagcttggttgatggctcagtggggctttcctctgggtaggcaacgtctgtgggacacaagaaagataaattgtgctattcagcctccctccagttcctcagcagggctcaggcagaggtatgactctgagcccaasagctgagcaggggtccagagctgagagactgcactggtgcagacagggtgggcatgcagtaggtgcacagttgatatttgttgaatacattgcgtaacataaagcaagtc

SEQ ID NO: 855254 - DNA, 558 bp, Homo sapiens
atgtttcccttcatgggtgcgtggattgcctagaaggagcgctaggcgaccgtgactggccttgtcttcaagaacaggtagtgtcccatttcctckgcaattcctgtctcattgttgagggacacctctcctctgcttctgggtggactgtctccctggatcttttgcccgtaacgaaagtcagggaaccaaggtgactgggctgggtctggggctggggctggggctgttgctggtgctggggctggggcttggtgcaggggaggttgtgtgagggctacctgggcggtggagctttggccttggggtgaattttgcagaaacctatttgttgctctggcaggaatttcaaattttggatccggtcagtcacaagccgcctcctgtttcccaagtgttctttaatttttcattgctgtgatggaaatgtcacttgaccctcccttccaccgggcacatgcctagacagcatcgtttgtttcgccgtcgccccacattcctctggttacacacattcaagccatctgctgtgggattggtcagtgccacacgtcaacg

SEQ ID NO: 855255 - DNA, 548 bp, Homo sapiens
tagtaaatgtacatgcgatccattataataattagaaataatgaaatatgatgtatgattattatgaaatgtaccagagccacaaattttattgagcaatataaaagacaactagagaaaacaaagaaatatgccatacctggatggaaacagtaataataatgttgtgtgttcatctttgactaaatcatgtctcataaaatttcaataaaattccaattaaatttatttttaaaacatggcaaatacattgtaaagttaatgtaaaagaacaaacagggccaggcccagtggctcaacctataatcccagcactttgggaggctgaggtgggcatatcacgaggtcaggagatcgagaccatcctggctaacatggtgaaaccccatctctactataatacaaaaaatttgccgggcgtggttgcaggcgcctgtagtcccagctactcaggagtctgaggcaggagaatggcgtgaacccaggagaaggagcttgtggtgagtggagatcatgcsactgcactccagcttgggtgacagagcgag

SEQ ID NO: 855256 - DNA, 544 bp, Homo sapiens
ggtttcgccatcgcaacatatccctccggtgacacaaattcacaccatctactgagggatacgccagtgccacgcgtgatcgcattgtctccacctcggattcgcaccgaccctgtttgcacctgtcctggaaagcggtgtccgcttgcaggagccccagggcttttagaagcggggcacgccactgctctttcaacggaggagggaggcagagggctcacgaataagtgaactttcagctgacatcactccttgagggccatgggatcattctgtgctgcagcgaggccctacctgcgtcaccagatgtgctgagcacatcctttctcacccggaggggtccaaactcggatctgaagaggagcctgagaacccagcagtggctctgaagctccccctccctcagtggaagtcgggtaaaggacttsctgaagactggactcctgcgggtttggccttcggacagtatagttaaggccccctctcccatgccgccccaaactggaccacggatccagccgccgccgcagctgcagcaggagcc

SEQ ID NO: 855257 - DNA, 605 bp, Homo sapiens
acaaagatgagaaacaatcaaggcaaaaatactgaaaactcaaaaagccagtgtgcctctactcctccaactgactgcatcacctcaagcaagggtacagagctgggcagaggctgacatggatgaattgaataggcttcagaaagtgggcaataataaacttcactgagtttaaggagcatgttgtaagccaatacaaagaaggtaagaattacgattaataaaagggggctgataactattacagtcaatttagagagaagcataactgacctgatgaagctgaaaaacacaacacaagaacttcacaatgcaatcacaagtatcaacagaagaacagactaaggggaagaattaatatcagagcttaaagactatctttctgaaataagacaggcagacaacaatagagaaaaaagaacaaaaagcagtgaacaaaatctccaagaaatatgggactatgtaaaaagactgaatctatgactcattggggtacctgaaagagatggggagaaagstaccaagttggaaaacatactttaggatatcatccaggagaacttcccaaacctagtgagacaggccaacattcatattcaggaaat

SEQ ID NO: 855258 - DNA, 646 bp, Homo sapiens
gggaatcatggaagtggtttttcccgtcctgttctcataatagtgagttcttacaagatctgatggttttataaagggcttcccccttcactcggcacttattctctctcttgccgccctgtggagtggtgccttccgccatgattgtaagtttcctgaggtcttcccagccatgtggagctgtgagtcaactaaacctctgttctttataaatacccattcttgggtatttcttcatggcagcatgagaaagaactaatacagtaatggacactttgattgaatccatgactttgctattatgaatagtgttgcaataaacacatgagtgcaggtatttttctatgaaatgatttttttggatagatactcagtagtgggattgctgggttgaatggtagatctatttttaattctttgagaaatctacataccgttttccatggaggatgtaataatttacgtttccatccacagtgtatagctgttccattttctctgaagtgcatgccaatatctctgttttttttgacattttaataatagccattctgacttgggtataatagtatctcattgtggatttaatttgcatttytctaattagtaatgttgagcatttttttttcatatgtttgttgaccac

SEQ ID NO: 855259 - DNA, 625 bp, Homo sapiens
catctgaccatcatccatccgtctgtccatccatctctccctctgtctgtccatccatccatccatccatccatccatccatccatccatccatccatagtgttctgaaagaggaatcrtctgtataagactgaccccttggggctgcatattcctctaggagctgtcttctctgaggtcagccttcaatgctaagctgagaaggactcctcttttgtgtgacgcaaactgatccagatggtggaaatatggagcctttcatacaaagacgcgctgtcctgggggccttgttcaggactgggtgtcctcaccatgcagcgtggatctgcccattgcctatgtgggtcctgagaggggatgcttcctaagaatggcagggcaggagttgggaggacctgcagttccccctcctccaggagagagggcagaggcttaccccagccggccgtttccctcagtccttcaagacgtgctgactgcaccccaggccagcccttctttgaatccaggcaaacatcctctgtcccttcccttgcgtctcccactccagcttttgctctgtcacttgggaaacttcagccttcattcccatgaattaaataatatttgtatatttagatataac

SEQ ID NO: 855260 - DNA, 637 bp, Homo sapiens
tggtgctgcggaagcctgatgggcatgatacttggcacctggcttcaaaaagcggctgcatataaggaggaaacggcacggaccaccatggagcatgtgcgtctcagctrcgtcagagtggttcagagtgcttggcctcacgcagacctggctatgaatctcaggtaggattgttgcttacttgaagccacatcttcaaagcctcagttttgtaatctgcaaaatgggtataataataccgttatatatcttaatcctatttccaagatacaggcaagctaacaggttcaaatgagaaaatgcttctggggcaaagcctgaagtggcagcatttcttcctcttctaccttccaagtaggtcctttgcttactgggtaaagggaagatcgccggagccctgagagtctatgtggacatacctaggagagctggggtcgccaaggaaaactgtagaaggtgggagggaggagggcactaaagagaggagaggggaaggaggaggagggggtaggaggctgggaggaaggcctccagggtggactctggacagggcaggagggctccctggccgtggtgtgccagggatcccagcatacaagcttccatttgtctccaaaagcctgatctgcacaacata

SEQ ID NO: 855261 - DNA, 505 bp, Homo sapiens
ctgctgtgacccatctcccatggggctgggggcagactgtgcatgtgggcggtgctgcctcttcctacctgggctgctcaccactccacctccagcccccacagcagtgtctgcatgaagatgaggctccatacgtgtggaatgcaggcatgagcatggttcagaggctcacaggactcggcacgtgattccagtcagtccaaggggtactgatgtagctcaaaccagttccttcagaattcttcctgggaagcagaagggaagaaagcttcctctcccctttaggtcacgatctgtaaggacagagactttgggctgccagcagccgtctctccctccagatgaagaagcccatttgcggcccaagggcccagtggcagcrgaaggagaggagtggcactgagggatgaagacttggaaggaggaagagacagccccggaatccagctgttgtgaaagctgcccttggaagtacaaggtccctaaatcaatcaatttgcctctt

SEQ ID NO: 855262 - DNA, 415 bp, Homo sapiens
cgtggctcccaggctgcagaccacacagcgctgactgcacggaggcagttgtgacacagtggtagggatgtgtgtgtctaaacacatccaaatgtgagaaggtagagtaaaatttgatattataatctgacgggaccaccatggtatgtgtggtcagtccatggttgagagaaatgtcactctgcggcacacgactgcatatacattttacgatgccacgaactggttgagagcttctacaggcaaactctccagtgtctccaaggcaggcacactgccgcatatcacrctgcaggatggggaaacgttccccaagaccctgtggaatcctcacacagcttccgccaagctcccctggggcgttgcagggatccagaagacttgaccttgagccctagaaccttctcactgcgaa

SEQ ID NO: 855263 - DNA, 628 bp, Homo sapiens
tggagtgcagtggtgtgatctcggctcactgcaacctctgcctcccaggttcaactgattcttgtgcctcagcctcccatgtagctgggattacaggcacatgccaccacacccggctactttttgtatttttagtagagatggggtttcaccatgttggccaggctggtctcaaactcctgacctcaagtgatccgcccacctcagcctcccaaagtgctgagattacaggcatgagccaccgcacctggctcaatattgttaacatatttattttttaaattcaggtataatcacacacagtgaaatgtactgaccttaagaatacagtacaatgagttttgacaaatgtgcacacctgtataacacaaacccttatcatgatagaacacattttcattatttcagaaggtttccttttaactcatcctactcaatccctgctttcccagaaacaattgttttgaattctttcaccatagattagttttgcctgttctagaatttcacacaaatgactaacatccaactttaaaccaaatttacaacaatratttataatttagacttcaccggtttattgctcattttcaatccttttatagtacctcaacttccccatttttga

SEQ ID NO: 855264 - DNA, 644 bp, Homo sapiens
ctgggcttaagtgatcctcctgcctcagcctcctgagtaactaggactacagatgcacaccaccatactcagccaattttaaaattttttttatagaaatggagtcttgccatgttgaccaagctggtctaaaactcttggcctcgagcagtcttcctatcttggcctcccaaagtgctgggaatacaggtatgagccaccacacccaggcatctcctttttagaaattttaaaactagaatattgcattagctttcctgtgcttcaactgatttactaagaccttggagaagtccgttttcttcagaggcaacttatttccatttatgaaacaggaatgggaaatagctgtaaacagatctgtccataaagctctgaaattacttcaaatgaaggagtcacataatcagaaaacccccctagtggtgttgtttttattaggtgaccccagagaagcacttttaatgactacaattcaatctcctgttagacactggaagatactgtcaacacaaacgagtattgaactccagtctgggcaggcctatctcaytcgttgccaggttatcagagcatttctcaaggaagtgcgttgactctttcaagggaagtgatatattgaatgggaacttagtaacccatgt

SEQ ID NO: 855265 - DNA, 452 bp, Homo sapiens
ctgaaagtgcaacactcactggtaatagtaagtgcacaaacacagagtactataayactgtaactgtgtggtgtaaactactcttatcttgaatagaaagattaaacaatgggccagtcaaaaataataacttttcaagatatagccagtactataaaatataaaagaaacaagaaaaagttaaaaagtgtgggggatgaagttaaggcgtagagttttgtgtattagttttcctttgcctgtttgtttatgcaaacagtattaagttgctatcagcttaaaataatgggttataagatagtatttgcaagcctcatgataacctcaaatcaaaaaaaatactacagatgcatagaaaataaaaagcaagacattaaatcatactaccagagaaaatcaccatcactgaaagaaagatggaaggaaggaagggagggagggagggagggagg

SEQ ID NO: 855266 - DNA, 452 bp, Homo sapiens
ctgaaagtgcaacactcactggtaatagtaagtgcacaaacacagagtactataacactgtaactgtgtggtgtaaactactcttatcttgaatagaaagattaaacaatgggccagtcaaaaataataacttttcaagatatagccagtactataaaatataaaagaaacaagaaaaagttaaaaagtgtgggggatgaagttaaggcgtagagttttgtgtattagttttcctttgcctgtttgtttatgcaaacagtattaagttgctatcagcttaaaataatgggttataagatagtatttgcaagcctcatgataacctcaaatcaaaaaaaatactacagatgcatagaaaataaaaagcaagacattaaatcatacyaccagagaaaatcaccatcactgaaagaaagatggaaggaaggaagggagggagggagggagggagg

SEQ ID NO: 855267 - DNA, 575 bp, Homo sapiens
ataaaagaatgtgagccatattttgggttgagtcatatattattagaggttttttgtctatttttttctgagttaacaaggttactcacaaamaattcacaccagaaacaaaacatatggtcattggaaagggaattcatgggacttctcacaatctttagttatttacatcatacttcattacaattcagttacatgaaatccccattctagagtttcaactcttctcaaatatacaatatcaattgtcctgtggttgacaggaaaattgagctttcaaaaatcttgaatgtgctggagaaaaaggtgaaaaataaacacaataggataaacagccattattttaagcagaatctttttctctcacaactgtatttcacctgcttaacactaataattaaaaggatctaaaaatagtcctataggagccaaaggtttcagtaacagattagaattactggatgtccatttcttgtggttaataacagatctattgtgttgacttaaaacataaaagggtgattattcccaacagatattttcttctttacgttaaacacggaagtctacaaaaa

SEQ ID NO: 855268 - DNA, 641 bp, Homo sapiens
ttggcagttacccaagagacttcccccctgctccctctgtgcctgagttgtcttatctgtgttttactgtctgccctttctggctgcttgttgttaaaagagaaatgayagggtagtgaaagtctctcttcactatgcactttctagactcctgactacaggtatgtgtaactataacaaaacggttgttgttttatgcctctaatcttggagtgttttgctatgtggcaatagggccaggacaggggaataaagacaagctcttcttcagagtagaatgccaactaagaaatatagacagaaaggtagagttagaaaatcagcatttggcagtctatagaccctacaaagcaaccacacaatagaaactacagagcaattagctagtaacttcatgatagaaccaaagctcacatattaatattaaccctaaatgcaaatggtctaaacatccccacttaaaaggcacagaccatatagttggattaaaaaaaaaaagacctatctgtttgctttgttcaagagagccatctcacatgtaatgagaccaataggcttaaagtaaagagctggagagagatctactaagctaatggaaaacaaaaaagagcagggattgctattcttatatcaaaaaaacc

SEQ ID NO: 855269 - DNA, 492 bp, Homo sapiens
tcccattgctctatgtgtccgtgtttatgccagtaccatgccattttggttactmtagctctatagtatgatttgaagttaggtaatgtgattcctccagttttgttctttttgcttaggatagctttggctattctgggtcttttgtggttccatataaattgtaggattgttttttctatttctgtgaagaatgtcattggtattttaatagagattgcattgaaactgtagattgctttgggtagtgtggacattttaacaatattgattcttccaatctgtgaacgtggaatatttttccattttctggtgtcctcttccacttttttcattagtgttttagaattttatcacagagatctttcatttctttggctaagttgatttctaggtatttaattttattcatggttcttgtaagtgaggttactttttaaatttattttttagattgttcactattggcatatgatttttgcatattggttt

SEQ ID NO: 855270 - DNA, 582 bp, Homo sapiens
aattattttggcaaggaaactcagcaggaaacaatttgaccttctaagaacaccactagaattatgttatcagcagatttctttcccaggacaccatctttggtttgtacaaactacatacaataagcaggtcttttccagaatctttcttatgctcaaactgcaaactggattgaactctacaccctgtcccattcagtaaatcttcatggggatatattgcaaggtcaacagccaaaactcttttggtccatctaagccaccaaaccagccacagagaaaggaaaccgactaactagatgcaagttaacactgaagagacttagactgcaaataaaatgttgggaggtatgtacatttttcagctgatggtataactcaagaagaaataaacaaagaccatgaccataaaaacttttcactggtctatcttcccatttttatctattccttcaacgtatacattgtgttttgagtttttaacatttgttgatatgcatatgcttaaatttagaaagctaactgaattyttaacatgtaattctcaattataaatgctatttggtgggagtttggggattc

SEQ ID NO: 855271 - DNA, 611 bp, Homo sapiens
gaattcaattcccctagattaacttcatctacaaaccttcgctaatccttaaatgttttgaaaaacagcttgtcctatgacaggctgaccgycccccactcggcccctccccagcatgaagcaaaatctattcactatacattcccatgtcacttttaatttttctttcatcatccttttaattacttcatcatgcttttaattacttatttaacagctaatttcatccctctcctctaagcctattgggacagcgacatggtctctcttaatcatgcacatacctccatcatctggaataaagaaatatttgctgacttgatttgaaagaccatctgtagaaagatctatgtaaaaggagattgattattatgtttatttaatgaaaacaatggaagcaaagtgctcacaatagggaaaggataaataagttatagtacatccatactatcaaaaatttacaacaaatctatataaacctacttagatagatatgactatatattgttaaataaaaagcaagtttcaaactcactatgaagagtagtatctcatttttatgaaaattctatatggatgtatgtttctgtatatgtaggaaaaaattaaga

SEQ ID NO: 855272 - DNA, 555 bp, Homo sapiens; identical to SEQ ID NO: 843469

SEQ ID NO: 855273 - DNA, 504 bp, Homo sapiens
ctcttatctcataactcattagtggttctgtttctgtgattgaaccttgactaatgcaacaagtataaccttttaaayaaaacataaacttatgaaaataatgtcaatgaaatatatttttttggttacaaggaaaagaatatccaaaccaaactgatttttttttaagtgaagtaggggcatttattggctcatggaacttagtaaaaggacaacaataattctgagcacagcttgatctaagagctcaaaccgtgtcagcaggaccatgtctcctcatccagattctgcttccttctgtgttggttccaatcccaggaagccactcctatcatgcggacagaagagagaataaaatggccaccagcagcctcagacttacattctttacttctcaacgaaagcagaaatgaagagcttctcgcctataacaggttgaacaaaagtcctggaccttgattccattggtccaaattaggtcaaatgcctatctgtaaatcaatg

SEQ ID NO: 855274 - DNA, 471 bp, Homo sapiens
gacagccctttgttatttgatacttccctctgccttacaatcagacatgagttttacctayacagtagaaaaactttcttcgtttttgcacaccagcatgggctgtcttgttagatcatttgctaataatcctaacactctgtactctataacattatgtgacactacaatatttcatctattattttgtaacactacctatgtgacttagatcgtctaacctccatgagtaagaaaaatattttttaatacatatacatgacatatggcacagcacacactgttgtctggctaaccagcatccatcccctcaaccctccttccgaaaacaattacaatgttgcttccttatccaccctttcccgtgggtccaggtgattcaggggaggttggggctactacaaggcaaagcctcgaagccaaacttgacaattctgttcctctgcctggggttggtttaagccagtaatg

SEQ ID NO: 855275 - DNA, 619 bp, Homo sapiens
atcacagtaccaccagctttcagttaaaacagagcctagctagaagtccctgaaatggagtaatccccaaattcccactaaartatctttgaaagcaaaaacaaagacaatacacaatagcactgaaaactagaatcaactttatggaggaattttcattagttattaggccaatggatctgggttgagaaacacaggttttttcttctaattggtttagccataagaaatggaaaatttatctgcctaaaatgaggccaaaaagccattagtcctccagatattactttctagttcataaaacaaaatatttatttacctgaaaactgggtaactgttcttctgcctcaaagcagcgcttattgaggtagccccagtgagtacttgtctttctttgaatattggggaaacaaaatttgcaacaaaaaattgggctgcaaatgaaggccccagagatgggtgttgtacacttgctggcaccatccccaggcagaaggactgtcagtggaagtggaagccaaaatatctctagtgacacatggtgtatggtcttgtcaaattaagtctgatatggaaagggaagaaactatcttcatgagatagatatacatattcggtg

SEQ ID NO: 855276 - DNA, 669 bp, Homo sapiens
ctggatttgattctcaactccatcacttcctaatgacatgatcttgacaagttattaacatstccataaaatttgcttatctataaaatgaggaaataacattctactcatggttatgtgacaactgaaaaaaaaatgcctgtaaaatttagcccatagtaagcacttagtaaatgctagctttttaaaacaataataataaatagtaacaataagtactgagatatacactgaaaagtgtgagattcaaccctacttgcaagctgacaagggagcctgtcacagtttccgggatgctgggaaaagtcactagactattaagtcagacaatgggctttgttagagaagagccagtagcatgaacacagttccattcatcccccaaagtcccacaagggttgggtcacagttaaggcactctgagcctaggacactcaaatcttatataatgggctgcaagcaaacttgcccaacatttgttctgaaggtgaacattatccttattatactagttagtaatcatgcatgctctccgcttcagaagaagacactataacttctagggctatttactatataaacatccttaaaaaaaatagtccagaacaaagaccatcagtctctgttctcaatatgtgcaggaaacaagcaatccagagaattgccttc

SEQ ID NO: 855277 - DNA, 655 bp, Homo sapiens
ccctttagggatcctctcctgatcagttaagtgcttcttcctgtgcaagcatctagtgtcataagcagctaataactgatacattacaaatatagcaactgaaacactgctttaattatatttatatgtctctttgatataaatctttattagattgtgaaacccttaaaggtagggtaggatcttattctttgcatttttattgctcaccacgtaatgaagactttataaatgttggataaataattggctagatatatagatgaatggatggtttctagttatttgtctatattaacacaactcaagttgctaaaagaaatgttacaatagaagaggctttcaaaatggaaatatgctttcttagttctagcgcctcagtggcttaatctcttctttttaaatacacacacacatgcacacacacacacacacacacacacagagtaagttgtcttaaagggaaggtcttgttagacaatatgcttagcattcaccaaagacactaatcctaataaagatttaaaraatatttagctaacaacaattccatttatcaagtgcttacaatgagccttatgtatctgatcttatacataacagcaccctgtgaatttgatactactcccattttacagatgagggaactgcctct

SEQ ID NO: 855278 - DNA, 633 bp, Homo sapiens
gactcttgaaaactgtgtaagaaaatattttttgttttaagctgccacatttggtgaaagtttgtccaacagcaatacgtgcataataaagacactattcagaagtcccatacaacacttctgcttgmatcctactgctcaaagatgtagcttcccagccacaatttgataaatgttattaatagaataggaaaagtagtctttattctaggtggccatgcatcctgttaaaaatgacttttattaccaagggaaaacgagaagaggacaagagatattaagagagaagtagcagcctgtgggagatacactgatagcccccaactaaccatacctcccaatattcacacccaattaaaattccctcccatgtgggcttggccatatatttgccttgatcaatggaatatttgcaaacatgatacaagcagaggctttatacatcagctcactccctcttaagaggcttactgccatctgtaaggacgtactagctatcctgctaaagaaagaggccatgtgacaaaccaaggtgtcccaaccaagctctcagatgaatacggctgcatgagtgatcccagtcaaccctatgtgtgataaaagaatcactgcagaaccacaagaaagaatcaa

SEQ ID NO: 855279 - DNA, 554 bp, Homo sapiens
gaagtatttgaaaagacgcccacatgactgaaaagctctctttgaaatcatgtattctgttttgttmtgtggagcagaaaaatgtaaatgaaacagtgtccttgtcaaataatgtccctgactccatgaagcaggtcatgaattataggcagctatgctgtttgcctacacctgaatgaaaccatccagagcttttagtgcagaaaaatccttggttccttacataatacacactgatttgataagattattttggatattgtaaaggctatattcaaaacagcaaaatagttttttgccaagaaaatatctgactggaaaaaaatcatgataatctttcagaggctgagccataattctaattttcctcctttgttaaagaaagcagcttcacacattactggggtttgtttcttccaatagcatcacaccctagtatcaaagactgctaatatccctaaaaaaaaatcctcatatcgatctcactgaaaatctttaatatgaacaaatacaaggcttctactacacagaagttcattgatatttaagaggat

SEQ ID NO: 855280 - DNA, 615 bp, Homo sapiens
ctttgaaatcatgtattctgttttgttatgtggagcagaaaaatgtaaatgaaacagtgtccttgtcaaataatgtccctgactccatgaagcaggtcatgaattataggcagctatgcygtttgcctacacctgaatgaaaccatccagagcttttagtgcagaaaaatccttggttccttacataatacacactgatttgataagattattttggatattgtaaaggctatattcaaaacagcaaaatagttttttgccaagaaaatatctgactggaaaaaaatcatgataatctttcagaggctgagccataattctaattttcctcctttgttaaagaaagcagcttcacacattactggggtttgtttcttccaatagcatcacaccctagtatcaaagactgctaatatccctaaaaaaaaatcctcatatcgatctcactgaaaatctttaatatgaacaaatacaaggcttctactacacagaagttcattgatatttaagaggatatagtgtaaagaggcaacagaactggatttctatcccaaattgctcatttactagttgggcgatcttgaacaacttctgtaactcctctgagtctagagt

SEQ ID NO: 855281 - DNA, 615 bp, Homo sapiens
ctttgaaatcatgtattctgttttgttatgtggagcagaaaaatgtaaatgaaacagtgtccttgtcaaataatgtccctgactccatgaagcaggtcatgaattataggcagctatgctgtttgcctacacctgaatgaaaccatccagagcttttagtgcagaaaaatccttggttccttacataatacacactgatttgataagattattttggatattgtaaaggctatattcaaaacagcaaaatagttttttgccaagaaaatatctgactggaaaaaaatcatgataatctttcagaggctgagccataattctaattttcctcctttgttaaagaaagcagcttcacacattactggggtttgtttcttccaatagcatcacaccctagtatcaaagactgctaatatccctaaaaaaaaatcctcatatcgatctcactgaaaatctttaatatgaacaaatacaaggcttctactacacagaagttcattgatatttaagaggatatagtgtaaagaggcaacagaactggatttctatcccaaattgctcatttactagttgggcratcttgaacaacttctgtaactcctctgagtctagagt

SEQ ID NO: 855282 - DNA, 535 bp, Homo sapiens
aggtaccaatcataggcaaaaccaacttgaacaaacatgaagggaaaagaaagtacatttgattcatacaaggaacctgtgttcacacagggtgatggtgcagctgtttcagggcaactggaaataggactgggaagttggagaactctgccacttctctctgctcttcttactatgtgggctccgctccctctttcttcaaagtggctttctcctcatggtgggaaacagagctgccagcagctgctagctcacgtgtcccaacttcaccacctgagagagatactctcttcctaaacctggaccacttcactggccagggtatgctgccctgattgtctcgaccctttagatgtctctaacctctgtatccatcatggcctgaagggcaagagagaagcacacacaggccctctgggtgatctyggtgctctagaccaccacagatggtgtgcaatacaccatcctaagaaatgaaatctccttccaggcaaagcaaaagggaagaagcagaacattcaagggaaaaaaatag

SEQ ID NO: 855283 - DNA, 603 bp, Homo sapiens
taaatgtactggtcaatcctgaggacattttagtacttacatcaaattttcctaagcatttaaaagctgtttatatataagaacaaagatatattggaaacccttagcaagataaaaacaaagatgacttaaagaattatgtatggaccaacacaaggatatccttgacctctaagtaggtcttaccttctgtagcaatctggtacagcaagtgaaaagttagtaagaatcatatattgcttcattcagatagtggacaattatgatcaaaggtgtaatacagtaggcctccttcatctgcagtttcacgacccatggttattaattattcacagtcaaccacagtctgaaaatattaagtgaaaaattccagaaataaagaattcaaaagttttaaattgcacactattttgagtagtgtgatgaaatcgtacaccaccctgtcccactcaggacattattgttcctttgccagtgcattcatgctgtatgtgctacccttccctccccacccacacagtcacttttatcagattaactgacactgcacatagagttcagtactasctgtggtttcaggcatctactggggggtcttagaac

SEQ ID NO: 855284 - DNA, 617 bp, Homo sapiens
gcctagattttgaagtcagagagaggtgggtttcattgagcaartcatcaaactccccaagcctgcattccttatatataaattagggataaccatacccatcccataggattaaataagatacatgcccagcacaaagcccactgtataggagatgctcagtcaatattagtttccatgatgtgcccaattccgaacatctgagggggcaagcaaatgtagcagtgggtttttttctagaaaagcccccacattggaattagtcatggtttctggctacataatttcagattctcactctctgcctctcctggagattctgagagtttcctaataccctttcaaaaattcctttgctacttaaatgagccagagtggattccactgtctgcaacatagaatcaagaccattatagttcctatggaagttcacatttaacagatcatttagtccaaatcccagaagaagagcttcattggaaagaagtgtttgtctatccatgcagtgtagctcctagtcctgactctaatacggtttcgtattttgccttaatcaactcatgtgtaaattgtcttattagttcagcaggagcccctttagaaacagaggcagcctc

SEQ ID NO: 855285 - DNA, 596 bp, Homo sapiens
gaacttttatgtatgcaacatytagtgctcggttatttgactcagaaattctacaatctttcataactaccaaaggaaaaaaagatttaataaaagcattttaataacggcagttcaattttaaggcaaaaataactgtaattacttggagccttcataacatctaaaatctgattaaaatgtaccaccatttatgagctgtgatggttatcctgtttcacggccctgcaattactgccggtgcctatgcaacttatgcatgcaagaaactccagattgcttctttttcacacttgcattgtactctaatccctcaatatcaagggcaatttaaatgtacaacatacaaaacagaagaaggaattaacaggtgtcaagttactggtgtgcatcaggaattagtaggcagtttagaaacatggcttatgtggatattatcgtcatcatttaaaaacgaaaaccctgagatcgagagaagaaacctgtccaaggtcagagagctagaaaacggaagaggttagtgaggttggaacttaaagctattcagtggcagctgctgtggtctttcactacgctacaaaacggcttaactgggc

SEQ ID NO: 855286 - DNA, 596 bp, Homo sapiens
gaacttttatgtatgcaacatctagtgctcggttatttgactcagaaattctacaatctttcataactaccaaaggaaaaaaagatttaataaaagcattttaataacggcagttcaattttaaggcaaaaataactgtaattacttggagccttcataacatctaaaatctgattaaaatgtaccaccatttatgagctgtgatggttatcctgtttcacggccctgcaattactgccggtgcctatgcaacttatgcatgcaagaaactccagattgcttctttttcacacttgcattgtactctaatccctcaatatcaagggcaatttaaatgtacaacatacaaaacagaagaaggaattaacaggtgtcaagttactggtgtgcatcaggaattagtaggcagtttagaaacatggcttatgtggatattatcgtcatcatttaaaaacgaaaaccctgagatcgagagaagaaacctgtccaaggtcagagrgctagaaaacggaagaggttagtgaggttggaacttaaagctattcagtggcagctgctgtggtctttcactacgctacaaaacggcttaactgggc

SEQ ID NO: 855287 - DNA, 554 bp, Homo sapiens
aaagagcaggatttatatctcaacaatatgatttccttatatacagcaaatattccaaaaataataatgaaaatatcatttgattttcagagctgaaattcagaaaaaaatcatcctgatgggctagagtagcaccactgagacagcaggtaacagaatgaatcaggagcctcgcaagggccttctttatattcttaacctttagagtataacatgttcttaataaatgtttgctgaatgtgggaattttctgagccaaaactcaagattcatacttcagaaatttcaaatttacacaggaaataactggaccaaatatttgaagttgggaatataaaatctcagacttgaaggtagcataggggcatgactggaggaacctgggcataacatgtaaaaaccaaactggtgccagggccacatctcctcgctggcytagatcctgactgttttaaagtagacaaggaaagcaaggttaatttgcaataggcaattttagccgacaagtcacaggtaaaaaataaactgaaaataaatgtttaagacaatttaga

SEQ ID NO: 855288 - DNA, 615 bp, Homo sapiens
ataatatccattaacataaaattatatttctgggcatgtttatcttcactaagacatgaatgaaagattggcatcaagtaggaatagtgttatctcaggcgagagggagtgaaggcaattttcactttctaccctcatcctttactgaaccatttgccttgatttcaatgagtgtgcatggtctgatcagaggagcaatcatggctgaagcataggaggcactacttctgtggtctaggcactttctgtatagtgactcatttgggccttgcaagtaatattttatgacatcagtagtattttggtgggattatattttttactgatgtataatatatgtacatattttgggggttctgtgatattttgatacattcaaataatgtgtaaagatcaaattaggataatagggatagccatcatcttaaaaatttgtcgtttctttatactaggaacatatgaattattctcttctagctgttttgtaatgtacaatagattattgttaactgtggtcactctactgatctgtsaaacactaggtcttatttcttctaactgactatacctttgtacccaaaatcagcactattattatgcccagttttaaaatga

SEQ ID NO: 855289 - DNA, 541 bp, Homo sapiens
taataatgtcctaggccttcacattcactcaccactcactcactgactcacccagagcaacttccagtcctgcaagctccattcatggtaagtgccctatacaggtgtactgttttttatattgtataccacattttactgtaccttttctatgtttagatacacaaataccattgtgttataatggcctacagtattcagtacagtaacatgttgtacaggcttgtaacctgggagcaataggccatgccagagagcctaggtgtgtagtaggctgtaccatctaggattgtgtaagtgcactatgatgctggcacaatgatgacattgcctcataacacatttctcagagagcatatactcatgtaatgacatataactagttgctgagcacctggaggtggggtggtacctgagggaggtctgaaatgattcaaaagaattgtccaggtgrgggaacagtgtatgaaaaagttgggaagaaatgaccaccttttaggaaattgggcatgagaaaagaaaccacaagcacatcagaacg

SEQ ID NO: 855290 - DNA, 533 bp, Homo sapiens
ccgggtatggtggtgtgcgtgygcctgtaatcccagctactcgggaggctgaggcaggagaattgcgtgaacctgggaggtgaaggttgcagtgagccaagatggcaccactgcactccagcccaggcgacagtgcaagactccatctcaaagaaacaaacaaacaaacaaaatatatatatgtaaattatatatcagtaaaatcaatttctaggaaaaatatattgcccttacaaggagtacctttcatttgcttattaaataaagcaccttatagcttttacaaaggaaggaaagaaagaaaggaaggacgtaagaaaggaagagagggagggaaaggcagaaacataaatgattatagaaagcttccatttatgtttaataatacttggagtaaaactctataatacttactagtaagaggcttgaagataggcacctgggaattgatcaacaggtgtggctacacaataggcgtgtgctccctgaattttcaatagagggttatttatcaacacctggcagtcaaggtg

SEQ ID NO: 855291 - DNA, 364 bp, Homo sapiens
ggcaattggaaagattatatatatatataatatatattttgatgtgtgtgtatatatatgtgtgtgcgtgtatatatatatgtgtgtgtgtgtgtgtgtatrtatatatatatatatatatatatatatatatatcaaaaaagttaacaaacaactaataggtggggcaaaataaatgtttacccagccccaagtgcctggaaaaaggatattctgaagggaagatttcagcttccactaaatgatgaggtttttccccttagcatcgcaacctctcccagggaggtgaattattcttcttaggtcactgagggacctctaagtgcttagctcttatgtaactttgaaaaactgagtaggcatt

SEQ ID NO: 855292 - DNA, 498 bp, Homo sapiens
ggatcctttttacccagaatactgaaccagaatatttgttggttaaaaaaaaaaacaamaaaccaaggtcttgctaaagaggcagcagctcaactgactagagcccagagctgggggtgatctcgctgtcccgtctgcctgttccaggagctgaattaaaagcctcaaagctacctttggctcttcaggccagagatcacctcagccgccagcccaagcctaaacctgttaataaagattgatcccctacaatgtacctatatcccatctactcttccactaatcttacccatttacccttttcatatgaaattgccatttctgtcaaccaaaaaatggttgaatatctgtaatttcatatggtccatatctgtcattattggtatgcccattttacagatgaggaaactgaggctcctaaaaaagccctagatcttttcactattgcctcctgagccacttgaaggaaacagtccagcctgggaaacaccatttata

SEQ ID NO: 855293 - DNA, 432 bp, Homo sapiens
tgtgaggtgtttgtttcctggggccasggcttgctggggcgttcagcagcctgcacaccagctgctgctctgctccccagtgtgcatcttgtaacaacgcagctcctttgctggttgttgaataggtagaggggcagctgtgaagggcagaagaaagctgattatttcactttctttcttttcggaattctgctttgtgatcttgttccctcttagaatgtttcccgagaagcccgttctatttagctcttctcttgctagggagcattttctgacagttttccaaaatgtgtatattccaggcagttagttggaggtttcgcacatattctagttaggaaagctcagcctggcttttgtggcccagaagcccagaatttcagcaactcacaaagaactcaaatatccttatgtgtgatatttgaaggatag

SEQ ID NO: 855294 - DNA, 575 bp, Homo sapiens
agaaattggccaaaacaaaggggccacaggccccatggcagtcygaaatccagcagggcagtcacatcttaaagctctgaaatgatctcctttgactccatgctttatatccaggtcatgctgaagcaagaggtgagtttccatggtcttgggcagctccacccctgtggctttgtagggtacaagctccccttggctgcctttgtgggctggtgttgagtgtggcttttccaggtgcgtggtgcaaactgtcagtggatctaccattctgggttctggaggacagtggccctctccttatagctccactaggtggtgccccaatagggaatctgtgtggggtcttcaaccccacatttcccttctgcactgccctagcagaggttctccatgagggcccgctcctgcagcaaacttctgcctggacatccaggcatttccatacatctgaaaactaggcagaggttcccaaaccccaattcttgacttctgtgcacccacacgctcaacaccatgtggaagctgccaaggattggggcttccaccctctgaagccatggtccaagctctacatt

SEQ ID NO: 855295 - DNA, 422 bp, Homo sapiens
atttgggacatgtttttttttctttaaaaatttgccatcaagaccgttttctgacatatataaattcagagcttttaactttgaaattaagtacgcccaaattagctttaatttttcttcccctttcattaggcaggagaaatgagattgggatctcctgaggttcaactttcacacatggatatgcccagaaatatattctttgtttcaaatgaggaaagcttattgcaggtgtttggaaaggaaaaacttcatttaaagttagttatattggctacttatcttgtaaagattatatctctgtacttgcggctttgaatggagaacaatgaaatayaggcttttcccattctttctggtttctgagttgtatcattttttaaatctgaatcagcgtcatcttttcattttgaatatagtgc

SEQ ID NO: 855296 - DNA, 520 bp, Homo sapiens
gattaagaatttagctgccataaatttttgcctcaatatgtctaagacgaaatctcatgtgtccaggattggccccaaaagtatayaggagtggtgggccatatccaattaaagaggaaatcaaacttaaagaacataaaatgattcataaatggaggttttttcttgaccactcacttatttgttatttattgagcaggtgtcaaactgctaggcaccaagaattcagagaagaaaatagtgtttgtcttttttctctcaaaactgttttcatcactcatgctatatttgaacttctgttattgactctcttgaccggtgttttaagataatgaagctaagtttaggcttatatagaaaacataccaaagagcttatattgaacagaattagaaggcttcaggttggtagacttttaacatagcttttccacaactaggcaggtgcaatgccatcatataaaatctttatttcatcgattctcatctttcactttagcagcttttcaagctgctctacc

SEQ ID NO: 855297 - DNA, 506 bp, Homo sapiens
actcctctgtccgtggagaagcattcccagggtcactgaccaaccatgcctgaagctggggctctagcaaagttgggatagggcaggacagtcctcgggcctgtccaaggggcagctcatggccaggacaatgaccgccaagccccctatacactcaggggctcagtgtgagccctcaggaatgaaggagcgagccccgcctgtccaggccctggcctgggatgacccgggtctgtgtcaggcatccatgtagcccctcagccggcgcagtctctgcaagtatcatcaggaggccacgaagaaaacgccgcatctttctctttttgtctctgtatggttagaatgcacgcggtgtctggctcaggggaggtgtctgtaaacaatttttgaacaaacttatataatttttagaactacattcaggcatccaataattacattttggtaacaacrtactgaatatatgacagcaatctcctgaggttatcgtggagctgaaaacttcc

SEQ ID NO: 855298 - DNA, 642 bp, Homo sapiens
  misc_feature 368: n = A,T,C or G
cagactgaacaccgcgtgcaccccacctcacccggcaatgctaaggcctggtgggccaagccttgaaatgggtgaatttctgccaggctggagcctttccttggtgcaggggccggagtcctgggtgctatagcggtgtggctgagcggccccctgggacggaggagaggtcgggtctagaagtagcaagcccctggctaggagtcactgatgccactgggggcagggtaagatgtccaaagcccgggagacccagggacgccggctgggttggctgcaccccttcttttccttccgtggcacccacctgtccccccacctgccaaggccaggacggagggagagagctgaaaagggcacttttcctncagggtgactccaattcctttccactcaccctcaaggcgagttccttctctcccacccaacccggggctccccccagctgccactcgcctcacgtgtgagttgttaaacccgaaagcagaaatcccctgccctctcccttcctgtctccccctttccgcagcacccctacctacccaatttttatctcgctacaatcaggggttttctcaaccggggaaaaggtggtagtgscggtgggagggtcaggatccctcgaagaggaggccggggccg

SEQ ID NO: 855299 - DNA, 681 bp, Homo sapiens
gtataagatgaatatgttttggggatccaatgatagcatggtgactttagttaataatactgtattatttacttgaaatttgctaagagagtagatcttaagtggtttcaccatacacgcataaaatgtgtagtgacggatgtgttaatttgattgtggcaatcacttcaaaatgtatatgtatatcaacacatcatgctgtacaccttgagtatatacaatatttgtcaattatactttaataaagctgggaaaaaaatttttttaaaacccagcaatctcttctctatctccaacacttcttactgtgcttaattttttttcgatgcacttaccattatctaatagatctctctctctgcttcccctacatggaatgtaagtttcctaaaggcaatttggtgctgaatctcaagcacccagtacggtgtctggcacataataggcacacactacatatttactgaatgaatcaattacgcacataaacatgtttatcagaccacatgattaggataatctcaacctcaaaatcacccaactcagcttgtttcatttcaaatcccagttttctaagacagatgatgacacamtaagggaaagatctagaacatttttaactattaatgcacaggaagtctgcatttaaacagaaaatctggaaataataaattgatatta

SEQ ID NO: 855300 - DNA, 646 bp, Homo sapiens
tctataaaaacattttccttttacattttctcattttaaaataatctttcatgtaaactcatattataggccttttgaaagcctaagctagtcatcttcagtgatttcttcccatttatatattcagttagttctgaaagaatcggcatcagtcagaatgatttttttctcatagaaacactttaccttgttcacacttattatgtctgtttcattggcccatctattgatataactttcatatatttgtcaagtaagaaaatgatactcattaatctatatttctcagcttaacttttatgatttttttgaatttgattcatattagcaattccacagtcctatagcatgttagaggtggataataaattttacctcttagccaagagttttatatttacatatttgtatttttcaacctcctttcatggatatcatactgctctatgatagagtgagctttatactcagtcatacttttttcaacttctttttatttttcaacactttttctttttttttcgtagtgatagggtcttgctatgytagccaagcaggctggtctccaattactggcctcacgctatcctcctgcctccgtctcccaaagtgttggaattacagacatgagccactgcattcagcc

SEQ ID NO: 855301 - DNA, 525 bp, Homo sapiens
gggatacatgtgtagaatgtgcaggtttgttacataggtataaacgtgccatggtggtttgctgcacccatcaacccataatctacattaggtatttctcctaatgctacccctcccctagccccccaccccctgacaggccccagtgtgtgatgttcccttccctgtttctatatgttctctttgttcaattcccacttataagtgagaacatgtggtgtttgattttctgtttctgtgttagtttgctgagaataatggtttccagcttcatccatgtccctgcaaaggacaggaactcatccttttttatggctgcatagtattccatggtgtatatgtgccacattttctttatccagcctataattgttgggcatttgggttggttccaagtctttgctattgtgcacagtgttgcaataaacatacctgagcatgtgtctttatagtagaatgatttataatcctttgggtatatgmccagtaatggcattgctgggtcaaatcgtatttctggctcta

SEQ ID NO: 855302 - DNA, 603 bp, Homo sapiens
cagaacctacgcaaatgagaaggaaccaggaaaccaaccctggtaatatgacaaaacaaggctcatcaacaccccccaaaaatcacactagttcactagcaatggatccaaaccaagaagaaatccctgatttacctgaaaaagaattcaggagattagttactaagctaatcagggaggggccagagaaaagtgaagcccaatgcaaggaaatccaaaaaatgatacaagaagagaagggagaaatatgcaaggaaatagatagcttaaagaaaaaacaataaaaaattcaggaaactttggacacacttttagaaatgtgaaattctctggaaagtctcagcaatagaattgaacaagtagaagaaagaaattcagagttcgaagacaaggtctttgaattaacccaatccaacaaagacaaagaaaaaataataagaaaatatgaacaaagcctccaagaggccagrgattatgttaaaccaccaaatctaagaataatcggtgtacctgaggaagaagacaattctaaaagcttggaaaacatagttggaataatcaaggaaaacttccttggccttgctagagatctagtcatgcaaa

SEQ ID NO: 855303 - DNA, 507 bp, Homo sapiens
ggcaatacagcaagatcccatctacacaaaatatttaaaaattagctgggagtgttggcacaccccatgcattcttgtctgcatgcagtgcamtgtacaggccggcaggtggcacaattgaccacttgctggtctcccgttttggcgatgccatcttagggcatatcctctgcgggtggggcctggcattggcaccccaacctctgcctctggagtcagcctcagcctccaaggcagtgtgggcctgagggtctggcttccttgcagccagcctcacctgagttctcagatggttcgagccaggagcaaatctgacggagcgggtgtggtagcaggagccggtgctgagtgtgtggactgacccccggcgtctccccgactgtcccctcttccttcacttctgccaccaccacctagttgaagccaccgtcatctcccacctgaactgcttgccctggccctcttagcagcctcaccgtgtcccctcaggccacatttcctgaccca

SEQ ID NO: 855304 - DNA, 609 bp, Homo sapiens
caaaagctaaacaccctgctaagcctattaatttctgtgtgatttcatatacccagcaccttgcttagatctggtccttcacaaagacctgaaattcactgagtattgaaagtatttcagttcatctatgtctgtcaccttgaacgtgaaacaggtttcatgcaaaatattaataaagtagttttttagtatgtctgcctctccaatagagattgccaaacactggggctgtcttggtcagccagagccaaggggtgaccctacagtaaacaccatacctcaggcacttctgctgaagggtccacctttcagcatatctgctacacgggatcctcttttccgccctccctctctccccagggccctcctccagtcacaagaaatgacctgggatgtgctgttgacttagggtgatagataggccgtccagcaacttatgacatgacctagttcaaaatgataaacttgtctaggaatgcagctaaaaatatcaagaggacaaattactaggaaccagctcaaaagaggggacattcagaaacagataaagctgggaccatgccrggtccatgttcctggcattgaaagttacagggaagtaaaacccta

SEQ ID NO: 855305 - DNA, 576 bp, Homo sapiens
tatatatcatatatatcatrtatatcatgtatatatcatatatatcatgtatatcatgtatatcatgtatatatcatatatatcatgtatatcatgtatatatcatatatatcatatatatcatgtatatatcatatatatcatgtatatatcatatatatcatctatatatcatatatatcatctatatatcatatatatcatatatatcatacagcctatcatgtttgcttgttttatttccaggataatttgaaaaaatcttataaaaactgatgcagaaaaaaataaaatagattgcctttaacaaagggactgaagtcagttaaatgtttctttcatcagtactctattaccagatgatggagaaatgtttgctgagtttcaagaaaataaaggttgcaaaatcagattcctatatctagcctatttgttatttaggtgtaaggtaaacaggaagatagtcttagatgtgcaagaatctgtacattaaaaaataccaaaattctattcaactaaaaagttgggaaggatgtgtgctaacaggtttaccattgatattctttgggtggaggg

SEQ ID NO: 855306 - DNA, 576 bp, Homo sapiens
tatatatcatatatatcatatatatcatgtatatatcatatatatcatgtatatcatgtatatcatgtatatatcatatatatcatgtatatcatgtatatatcatatatatcatatatatcatstatatatcatatatatcatgtatatatcatatatatcatctatatatcatatatatcatctatatatcatatatatcatatatatcatacagcctatcatgtttgcttgttttatttccaggataatttgaaaaaatcttataaaaactgatgcagaaaaaaataaaatagattgcctttaacaaagggactgaagtcagttaaatgtttctttcatcagtactctattaccagatgatggagaaatgtttgctgagtttcaagaaaataaaggttgcaaaatcagattcctatatctagcctatttgttatttaggtgtaaggtaaacaggaagatagtcttagatgtgcaagaatctgtacattaaaaaataccaaaattctattcaactaaaaagttgggaaggatgtgtgctaacaggtttaccattgatattctttgggtggaggg

SEQ ID NO: 855307 - DNA, 594 bp, Homo sapiens
aataagcaactacaagaaccatgagagacagcaaatttgataaggcttctcaaagaggcatataattctgtgagggggtaaccaagtaaaaggggcccacttaaatttatcatgacctaattatagrcatattctttattattattattattattattattattatactttaagttttagggtacatgtgcacagcatgcatgtttgttacatatgtacacaggtgccatgttggtgtgctgcacccattaactcatcatttacattaggtatatctcctaatgctatccctccccctcttccctgacctcacaacagtccccagtgtgtgatgtttcccaccctgtgtccaagtgttgtcattgtacaattcccacctatgagtgagaatatgtggcgtttggttttctctccttgtgatagtttgctcagaatgatggtttccagcttcatccatgtccctaaaaaggacatgaactcatcattttttatacctgcatagtactccatggtgtatatgtgccacattttcttaatccagtctattattgatggacatttgggttgggtacaagtttttgctattgtgaatag

SEQ ID NO: 855308 - DNA, 613 bp, Homo sapiens
gtatacaacctgcgtttgtaacttgggagggacactttgtcttccctttctgaaggcaagccaaagtgggccccaggatctccagtggggagcactgttgtttgcacccacctgtggagtctgagagtcaggactgtcttaaagacaaagtttatctagttagatccttcttaagataggttggctgatatatccttttccttaattactactttctattgtatgcatattaagtagaactctaatgcttccttcagcaaaaactcttcaagacaaaacaaaacaaaaaacaaaacaaaacaaaacaaaacaaaaaaaaacaaaccaggatgcaagctgactaggctgtcaacctggctgatccatgggtgttttctctcactgaaacaaacagaattgtttacttctactacaaagttttttcaaagaaagatggaaagctgctttttaaatgaggctttattgctctctggccaaagcagaataggaaatgcaaggcttcgtaactactattattattactctcattatttcatgggctytaagttgcctattaaaagtgtgtatgtgtgcccatgtgccatttttggtagcaagatacagggtaggagaa

SEQ ID NO: 855309 - DNA, 621 bp, Homo sapiens
aacatttaaaaggacacttaatttaggaactatttgattaataataagagaaaataatggatatacaataattgtagttgattgattttgaaaaaacactagtaagccagagaatacagaaaaaaaagggatttgtggttgccataatcaatgatccatagttctattattaaagcaaaacagattgttttgttgttttttgagacagggtctcactctgtcacccaggctggagtgcagtggtgcaatcttggctcactgcagccttgacctcccaggctaaagtgatctgcccacctcagcctcctgaggaacggagactacaggtgcaggccactaggctctgctaatttttgcattttttgtagagaaggggtttttccacatttcccagctggtctcgaactctgagctcaagcaatacgcccrcgtcgtcctcccaaaggcactcgccaccgtgctctgccgcaaatagatcttgaagacccacagcttggttttctgtgaccatttgagcaaggtagtaacttcctttgaaaatcagtactcttacattattcttccattttaataacagtatattgcaaaaagaatgctaaaatttgtacccagtgtattaga

SEQ ID NO: 855310 - DNA, 589 bp, Homo sapiens
aaaaccttatagacactaacttctctgtgggaactgaagggtctatcaaagataccttttcttttgcatgactagagtgctacttttccaaattaattgaacgttttgaggacttaagaagaaaaaaggaagaagtgtattcataagtgggagctaagtaatgtgtatacaaggacagagtgtgaaataataaacattggaaactcaagggtctgagaaggatgagaaagtagtaagggagtgagtaatgagaaattacatcatggtacaatgtacactattcacgtgatggttacactagaagaccagacttcaccactaaacaatatatccatgtaaccaaactgcacttgtaaccccttaaattcatacaaatggaaaaaaaaaaaagaaataattgtagactctttttttgaaacatatacatttttaagtacccatatttctctggagtaccacatacctaaatcgytaactcatttatttaaatcttagcttacatacgaaaagtgtcttttaaagaaatgaactaaagcaatataatttagtgtgtgtgtgtgtgtgtgtgtgtgcgcgcgcacatgcatgt

SEQ ID NO: 855311 - DNA, 639 bp, Homo sapiens
cccagtgtattagactactatataatatgtattaaatgcaagttcagaaaaacaagaatataaaaccttatagacactaacttctctgtgggaactgaagggtctatcaaagataccttttcttttgcatgactagagtgctacttttccaaattaattgaacgttttgaggacttaagaagaaaaaaggaagaagtgtattcataagtgggagctaagtaatgtgtatacaaggacagagtgtgaaataataaacattggaaactcaagggtctgagaaggatgagaaagtagtaagggagtgagtaatgagaaattacatcatggtacaatgtacactattcacgtgatggttacactagaagaccagacttcaccactaaacaatatatccatgtaaccaaactgcacttgtaaccccttaaattcatacaaatggaaaaaaaaaaaagaaataattgtagactctttttttgaaacatatacatttttaagtacccatatttctctggagtaccacatacctaaatcgttaactcatttatttaaatcttagcttacatacsaaaagtgtcttttaaagaaatgaactaaagcaatataatttagtgtgtgtgtgtgtgtgtgtgtgtgcgcgcg

SEQ ID NO: 855312 - DNA, 609 bp, Homo sapiens
atagagccagagcaaagcaaaaagtaccgactcattcaaaacgtggtactgtgggagcagccaaaggcttgtcctattataggggaggrtttagattgaaattttcaaaatgggaaatgtagaaatgaaagaagaaacctttgaattcacataatagataaattaattcaagcttcatctaaaaatatgcatgcaaacatacaccttttcaaaaattatgaccacaagagtgcagaattattttgcgattctaattctttaacatctttcttttcctcaaaattagctgggaacttccagaatcaactgttattgatgaaatgtcataacagtagtgctattgcttactgcatagagtacctcaattcagtgaaaactggcccactatactgataactcattatcattatggttactctgaggcaaagcaatgtaataaatttctacttgaacctgcagaaaaaaatttagtacaatttaggaatgtgctatttattttgaaagtttgtttttcattgctatattacataagattttactaataattttaaattaatattctaaaagtaccatttccagatatattagctatagttttttgttgttgtt

SEQ ID NO: 855313 - DNA, 544 bp, Homo sapiens
ttttctagttgtatgaaggctttcccacacaagagtctgatgttgtaatagtggattgttatgctattgtgtgttttcaccagatggggaaaactttttatggtttgggtcttctcgaggcatcagacagggactgtccttgccatccacactgcagcaaaactttgagaccttgggctttgggttcatggtctcacaactgagaggggtcactccacaatcttggaactgtacacccattggaacccttggggtaaaacttaccagggaggtttctcccaggagaagggtgccatccttgatgtgaatatctttttccaggttcatggattaagacttctactctcatgaaactcttatccttgaatattttttcttgcttgtgcctctatgatcaaaagaagtgaaaaggaggtctcttatgtgcactaatggggtgtacttttatttgtgaaggagtgtgcagccagccatacacatgrataaccttatactttgatggataaaacatgagggcccaatgtatgtaagaaactttagcggt

SEQ ID NO: 855314 - DNA, 695 bp, Homo sapiens
ggcagacaggtacatgaaaagctgctcaatatcacttatcatcagagaaatgcaaatcaaaactgtgcgatatcatctcacactggttacaatggcttatacccaaaagataggcagtaacaaatgctggcamggatgtggagaaaagggaacccttgcacactgttggtgggaatatcagctagtacaaccactatggagaagatttgggaggttccacaaaaaaacagagctaccatatgatccagcaatcccactgctaggtgtatgccccaaagaaaggaaatcagtatattgaagatatgtcggcactcccatatttattgtagcactattcataatagccaagatttggaagcaacctaagtgtccatcactagaggaatggacagaaacgaatgaaaatgtggtacatatacataatagagtactattcagccataaaaataatgacatcctgtcatttacaataacatggacggaactggaggttattatattaagtgaaataagccaaatccagaaagattttgaatattttgaatattttcccttattttggggagctaaaaattaaaataattgaactcatagagatagagaggagaatggtggttaccagaagctaggaagggtagtggggcaagggaggaggagagggttaattggtacaaaatatagttagagggaatgag

SEQ ID NO: 855315 - DNA, 631 bp, Homo sapiens
ttttcttcttctttaaatgcccttccttcgtttgttttcttgtatcatcctttgatatttatctcagaaattcaggcctcctgcaaaacccccaaactcactgtgtcaggcaaacagtgcatctcctatgctcttaaagttatcattgtattaatcactttattaaagtaattcttttagacaatatgttcttcaatgaaggtgtggtgtctatctcatctttgtatattcaaagcttaacatactcctgtggcaatcagtaatgtgagttgattaaaatgattcaaggagcataaaattataatatcagtagagacttcatagcttctggagtagaaattccctaaatgacaagtaagaacatttttaccaagcttttaagaatcttttagtattatagctaaaattaactttagggttaccacatacaaggatggtaatgtattgcatattctacagagtcaggctttatgccttgggatatacacatggtatctcacccacttgaactgcacaggtcgtatgtggtggctcagattagctggayccaaatatgcttatacattgaagcaataactttttaagttatatattttattatggttacaaatttatagaaaaatagcaatct

SEQ ID NO: 855316 - DNA, 543 bp, Homo sapiens
atcaaaatgtcagcagactttttttaagagaaaaattgtaagttaattctaaaattcaaaagacctagagtaaaatttaaaagacctatagtagccaaaacagcttaaaaaaaaaaaaaaaaaaaaacaaagaacaaagttggaagaccaacactacctgatttaaggacttattataaagctacagtaatcaagatagtgtagtataggcattaagataaacaaaaagatcaatggaacaaaacaaagagtcaagaagtaaacatagttatatgggatattgatttgcaagaaaaatgcagaagcatttcagtggagaaaggataagtcttttcaacaaaagactgtaacaatggacacatccatgcaaaataaaatgaacttttaacttatgtcttgtatcatatacaaaagcttaactcaaatgratcatagacttaaatgtgaaatcaaaagctataaatcttctagtagaaaacggaggagaaaatcttcatgctcttgagtaaggcaaagattttttcaagatactataccaaaagc

SEQ ID NO: 855317 - DNA, 543 bp, Homo sapiens
atcaaaatgtcagcagactttttttaagagaaaaattgtaagttaattctaaaattcaaaagacctagagtaaaatttaaaagacctatagtagccaaaacagcttaaaaaaaaaaaaaaaaaaaaacaaagaacaaagttggaagaccaacactacctgatttaaggacttattataaagctacagtaatcaagatagtgtagtataggcattaagataaacaaaaagatcaatggaacaaaacaaagagtcaagaagtaaacatagttatatgggatattgatttgcaagaaaaatgcagaagcatttcagtggagaaaggataagtcttttcaacaaaagactgtaacaatggacacatccatgcaaaataaaatgaacttttaacttatgtcttgtatcatatacaaaagcttaactcaaatggatcatagacttaaatgtgaaatcaaaagctataaatcttctagtagaaaayggaggagaaaatcttcatgctcttgagtaaggcaaagattttttcaagatactataccaaaagc

SEQ ID NO: 855318 - DNA, 613 bp, Homo sapiens
ggcccaggctcccgcgcccctgcctgctgcactgataccttgctctcagctggcattggccarctccagggtttccctgcaattagctgccatgggacggaactgggcctgggcaacatagggcagccctgtgcgtcagcaccaaccagcaaaagtagactgcccatgcctgctactcacaaatccctggaggacgaaagtgaaggaaattcctccctgttggcagagctgtggccacactggaagttgaccaatctgtatggagaaggcacctgaggtgtgtacccacacagactcctggaggagccaaggggcagggctggccacccccatgacccctggggaatgtgcacttcctgccacagcagccttaggtttgggctgatcagaggccctgggttaggggtggcaaagggggtggaggtggtggtcaagggaaaagcttctactaagtgagcacaacagggcctctactcagcttaaattcgtgactctcacccggtcacctttgggccacagatgccagtgaaccaacaggcaagagggaactggtgaagggcctggatcccgatggctgtgaggagctagagtttccacttcctaatggattcaa

SEQ ID NO: 855319 - DNA, 607 bp, Homo sapiens
acgagatctgatggtttaaaagtgtttgggagtccctagcctctctcctgccgccatgtaagatgtaccttgcttccccctctgccatggttgtaagttttctgaggcctccccagccatgtggaactgcgagtcaattaaagctgttttgtttataaatcacccagtcttaggtagttctttatagcagtgtgaaaatggactaatacacttccttaatgaactctctcagaaaggattcaggaaatgtaagcttgcaagtttagaaatatccttattctacctttacacttgatattatcgctgagataagcgttttaggttcaaaatatatttccaggagtcctaaaaatatagctccatcttttcagagtcttccatcatcctatgttgttgacaagactgagaatggtctctgtctctcctttcctttgtaggcaacctttctcttcctgctcccacccatggaacattttagaatcttcttttttttttttttttttttttttttggtgttttgaaattttgcagtacctgtctaggtgtggagcagttccycgggcttccttttaatctgtagctctggaatactcttgctattgatgat

SEQ ID NO: 855320 - DNA, 607 bp, Homo sapiens
acgagatctgatggtttaaaagtgtttgggagtccctagcctctctcctgccgccatgtaagatgtaccttgcttccccctctgccatggttgtaagttttctgaggcctccccagccatgtggaactgcgagtcaattaaagctgttttgtttataaatcacccagtcttaggtagttctttatagcagtgtgaaaatggactaatacacttccttaatgaactctctcagaaaggattcaggaaatgtaagcttgcaagtttagaaatatccttattctacctttacacttgatattatcgctgagataagcgttttaggttcaaaatatatttccaggagtcctaaaaatatagctccatcttttcagagtcttccatcatcctatgttgttgacaagactgagaatggtctctgtctctcctttcctttgtaggcaacctttctcttcctgctcccacccatggaacattttagaatcttcttttttttttttttttttttttttttggtgttttgaaattttgcagtacctgtctaggtgtggagcagttccccrggcttccttttaatctgtagctctggaatactcttgctattgatgat

SEQ ID NO: 855321 - DNA, 609 bp, Homo sapiens
ctttgtgcatgtgggcttttcacaaaatagatgggtcccggagcctgggcttcgctggcaggtggtcacctggagcagccagcagcagatggcaccacaggacaagcacaagctgtgtccaagagartggctcaagaaatctgcccaaaatccaacacaaaaatgaacaaaggaactgaatgggagatgtgaccaaaagaagcgataagacaaacagctccaggaagggagctgctggctcaaagagcacttgtcttgggcgtcagttccaccggttcttggtcaggggtgagagccctatgccagaccccctttgcagaacctatgctggcttatgatgaggctcttccagggctctagcacatgaataccctgccctgggaggctatagtaggccagccactgtccactctgctggagggtcagtctgagccaacagaaccatgcggagacattccatccaatgcagcccaggagcagtcttgacatttctttccctgtaaggacagcctgtctggtccacacatagatgaagccttgggcctggttcagcatccagaggactaggccataacccccaaggtaagatattcacactcattggagccc

SEQ ID NO: 855322 - DNA, 609 bp, Homo sapiens
ctttgtgcatgtgggcttttcacaaaatagatgggtcccggagcctgggcttcgctggcaggtggtcacctggagcagccagcagcagatggcaccacaggacaagcacaagctgtgtccaagagaatggctcaagaaatctgcccaaaatccaacacaaaaatgaacaaaggaactgaatgggagatgtgaccaaaagaagcgataagacaaacagctccaggaagggagctgctggctcaaagagcacttgtcttgggcgtcagttccaccggttcttggtcaggggtgagagccctatgccagaccccctttgcagaacctatgctggcttatgatgaggctcttccagggctctagcacatgaataccctgccctgggaggctatagtaggccagccactgtccactctgctggagggtcagtctgagccaacagaaccatgcggagacattccatccaatgcagcccaggagcagtcttgacatttctttccctgyaaggacagcctgtctggtccacacatagatgaagccttgggcctggttcagcatccagaggactaggccataacccccaaggtaagatattcacactcattggagccc

SEQ ID NO: 855323 - DNA, 521 bp, Homo sapiens
cagaacatgtggcgagcaggtgtccaatagctgcctcttgctatgtgcagccagtgccacatccaggctgagtgctgtggggagtgtggctcatcccactggggccacccctggcctcgctcactggagactccagaatcagggctgactgagcagcttgtggcactgaagaatgttctaggaaaggaggtgtgtcctccttggaaggggaagcttcatggtgggtgagctgagggtaaggggtgggtgagggccatttgaagagtcacctcccctacattcttttatcttttggagcctccatccacgccacttcaaacaatgaacacacacatccaagtcagtaagtgcactttgtgtatatctatataagtgatgcgcaattactrtataacagttcactagctgacctgacattattcacatatcgtaggcatgtgacaaattgtaggtgtgtaatgaagtgttcacatcttattacatatttaattcctaaggcatttctacagttttatttgaga

SEQ ID NO: 855324 - DNA, 541 bp, Homo sapiens
ccaataaaaagacaaatatttttagactgtataataaggcaagactcaactctatgttgtctgaagacctctattatttaaaggcacaggtaggtcaaaagtaagaggatggaaaaaaatatacyatgtagcaccaattataacaaagttggaggggctagttaaatatcagaaaaagtaaacttcagaacaagaaatatgcagaacaagaaataaacgagaacatttcataatgataaatttatcagaaagagaaaaattgtaaacatatattcacctaataatagaacttcaaaatatgacaaagaaatggacagaaatgaagggggaagtagagaaatctacacttatatttacaaattgtcatacttgtttctcagtaacttatagaacaagtagaaaaaatgaataaaggggaaggacacttgaacaatactactaaccaacttgatttaattgatgcctatagaaccttctacctaatacagatttttaggtgtagtgtcctcataacctaggaatgcaaagtcagtttaatcaa

SEQ ID NO: 855325 - DNA, 537 bp, Homo sapiens
tctcacaaagattctctgaatttcttgaacttacaygtcaacttctttcgcaaaattggggaaattgttgtggattgtatcctcagatatgttttccaagttgcttactctctcttctctctcagacatgccagtgagtcacacgtatagtctctagagggtttgtctatttttaaattattcttttttatttgtttttgtctgactgagttgatttggaagactgatcttcaagctctgaaattctttcctcagcttggtctaatctgttattaagactttcagctgtattttgaaatttctatagtgaaattttcaattccagaagttgagtttggttcttacttaaaatggctctgttgtctttcgatacttggatcattttttgagttttcttggattgggttttaattttctcttgaatctcgttgagctttcttggccatccatattctgaattctatgtcagttgtttcagacatttcaatctggttaggatccattgctggagagatagtgcaatcctttagaggtaag

SEQ ID NO: 855326 - DNA, 619 bp, Homo sapiens
ttcatatatgaaagataattctgctggatacaatattcttgaatgtcagtttttttcttggagtactttgaaaatgtcattccactttctcctggcctgtatgattgccattgagaagtctattgccagacaagttggagctccttatttgtttcttgtctcttgctgcttttcagatcctctctttttcctggacagttgagagtttgattattatatgccttggagtagtcttatttgggatgattctgttcagtgttctcagatcttcctgtacctggacatttatatctttcacaagttttgtgaagatttttgttattatttctctatttttaaaatttatttttaatttattttattttaatttttttgagatggagtcttgctcttgttgcccaggctggagtgtaatggcatgatctcggctcactgcaacctccatctcccaggttcaagcgattctcctgcctcagcctcccgagtagctggcattgcaggtgcctgccacacctggytccttttttttgtatttttagtagagacggggttttgccaggtaggccaggctggtctcgaactcctgacctcgtgatccacccacctcagcctcccaaag

SEQ ID NO: 855327 - DNA, 561 bp, Homo sapiens
cctggaactaaattcaagtaaacatattgcttgaatccctatgtaaaatatattaaataatagatattgtcttcaactatagttttaaaaagaraaaaaatgggtcatagtgaaccctaaaacaatcccacaaaatcttgtgttctattaaattacaacacacctacaatatacaaatcataagcatataattttatcacttaaactaagtgaacacacttgtgtagcccacacccaggtcaagaaataatattttcagccttccagaagcctttatccccatgattccttgtaacaccatgatgagttacgcgtgtttttgaactttgtgtataccatgtaactcttttgtggctggcttgtttcttttgacattgtgaggtggatccatgctattgaatatagttttagttcattctcccatgaaaattttaacttattgaagcatttctacatgatgctaagagagtatgttcagggatttgctttatataatcttgcttttgataatcaaaagggttcgacttcaagaatctaaatggatggaaagttaaatgatta

SEQ ID NO: 855328 - DNA, 629 bp, Homo sapiens
gcctgtgagcagcaaccagctccgaggcctcgcctcggggcggaagtccctctcagtacttccggggcgtgtcccggaaatttctgggcggggcctggctgctcccgaggttgccaaacaggggttgaaacmtgcacctgtccccgccgcggtgtaggcagggtctagcccgggagcgatttgctccggcccgtcggcaatgctcagacttcctacctcacctctctcgaaggttgattttgcttcctgagttttatccagggcaggaccacccgtgtatgttggaatttaaagatagtgcagttggtgaaatttctcgtgtgggccctacaggatcccttaaagcgacacacggggccacagaactctggtcttaattattagtgatctgaaagccaacacactatatcctgtgtgctttcccaaagattagagacaagaaccaagaacaatattttcaaaacatgactgccatactgcaaaatttctccggctattcaattatttatgaaagaacttaactcaaagcactgtagtcagtaaatatactggtttggatataaagatgataaaaggagtaattcctaaaatgaatcattacaggtggaggcacaaagtttgaatccatc

SEQ ID NO: 855329 - DNA, 674 bp, Homo sapiens
acctatgtccattgcaggaggtagctgatggaaatggaggaacacttagagtacatggggcattgtctatctctaatttggctttatacaaggaaaaatttggccagttttcagagaatcaaaaaaaaaggcttatacattttaccatattctttaacttgtcatgacttgcaagtattgtcatttgcttgctgtgccatgaaaagaaaaaaggtaaggaaaaattgtgtggttaagccagtcatttatgacaaggttaaagaaataactcagggaaaatgagaaaatcccactctatttcagggtcattttggtgaaacactcaggacatatactaatgcagactcagactcccaaaaaggacaagctctcctaggtatgcattttattactcaatctgccccttatcctaggagaaagctataaaaagcagcaataggacctcaaacccctatgagccatttaaatatggcctttaaagtttacaacaatagggacagggcaaaagagatttaacaatagccaaaaagtgcaattatyagcaaatgctttaagtcccctgacccctgagggttacccatcctgaaatagtgtcacaagatgggtgtctggaatgcccagagaagagcccctgacttgccagcccaaatgtataggttatttactagccaaac

SEQ ID NO: 855330 - DNA, 448 bp, Homo sapiens
aaagctgtagagtgagtttttgtagaggaataggagctttgaaaagctattgtggatgagaaactagaaagccaagtgcacagctcagggcagtatgtgtgctcagaaaagacctgagaargccattagctttcacctctggcttgtctttaggttcaacacaaacaggaagtgaatattaaggtagatttataaaggccctgggtaagttttgaaggagtgccccaacagctaatcagtagagacctggcgagcattttacttttctttttctttcttttttttttctttttggtttatttgttttgaaatgtggtcttgccttgctcaggctaatcttgaactcgttggttcaagcgatccttccacttcagcttcctgagtagctggaattacaggcacacaccactgtacccatctatttttgtttttattttttacacattat

SEQ ID NO: 855331 - DNA, 645 bp, Homo sapiens
aaaagaaaaaaaaaaaccttgagtaggtatttaaaagtactctgctaaacatatttgtgaagaaatatatttaaatcatattttacattttcctctagagtcatgttttcaaaagactctatggtagcacttttcagaaaatcttaaaatacattttttatcataagctagtatacacatttataggtgtgtatataagtttcaacacttagactgacttgctgattgccctatgtgctgatattgtctattccatttatttttaaattctatttttagcccactgtagtaatttcataagctactcatgggtcataacagaagtttgaaaaacactgcttcaaagcacaattacttgcaaacctattcccacgttttggaattggtataaattccttaaatgtcaagccaataaatacgtcttaatgatacttactgtgccaggtgctgtgaataagacaaaaggcacaaatgatatcatctctgggcccaaaggcttggtgcagtggcctgaatacagtaaacakgtaataactgttgtctatttttattgttgttattcttattaaggagacatcaagagttcacatatttatatcatgactagtacaaaggtcttcatgaacatttcccgatttattaatc

SEQ ID NO: 855332 - DNA, 619 bp, Homo sapiens
tgcaactttggcaaatttgtttattagatttaaccgttcttttgtggagtttttggggctttctacatataagatcaaataatctataaacatagaaaattttagttctttctttccagttgkattcctttatttctttttcttgcctatgctctgattaggacttccagtactgtattaaatagaagcagtgaatattagcaaccttgccttcctcctgatcttagagggaaagcttttgtttttccccattaatacagtgctatctgtgggttctaatatatatgacctttattatgttgagaaagtttccttctagtgctaaattgtagtgtattttttaaatcattaagggatgtttattttgtctgcaattatcatgcatattagtttgttttgtgttgctataaaggaatacgtgagactgagtaatttataaagaaaacaggtttatttggctcacggttatgtaggccgtacaagaagcattgcactggcatctgcttggcttctggtgagggcctcaggaagcttttacatatggcaaaaggtaaggggagctggcatgtcacatggccagaggaggggcaagaaaagggtagggatgccatgctctttt

SEQ ID NO: 855333 - DNA, 585 bp, Homo sapiens
aagacatgaatagacagttctcaaaagaagatacatgaatggccaacaggtatatgaaaaaatgcccaacatcatctatcaggaaatgtaattcaaaaccacamtgagataacatctcatcccatttagaatggtcattatttttttaaaaataagtaaaataacagacgctagcaaggatgtggagaaaagggaactcttatacactgttggtgggaatgtaaattagtacaaccactatggaaacagcatggagacttctcaaaaaatgaaaaatggaactattacatgatcctgcaatctatttggtatctattaaaaaaaatcatgatatgcccagtctgtcctgcagaccctggtcaacagatgaaatgagcactcagacacaggtatgcagtgtaagagcagctaggtgactgcctggctgtagtggccagagagcagctccaagaaggtggagctgcttgcttttattcagtgcaggcacaatgccaaaaacctggagccaacacaacctgtaggaaattaacatttattgttcccctttcagggaatgtcacacacagatgatcaaagtcagttcct

SEQ ID NO: 855334 - DNA, 585 bp, Homo sapiens
aagacatgaatagacagttctcaaaagaagatacatgaatggccaacaggtatatgaaaaaatgcccaacatcatctatcaggaaatgtaattcaaaaccacaatgagataacatctcatcccatttagaatggtcattatttttttaaaaataagtaaaataacagacgctagcaaggatgtggagaaaagggaactcttatacactgttggtgggaatgtaaattagtacaaccactatggaaacagcatggagacttctcaaaaaatgaaaaatggaactattacatgatcctgcaatctatttggtatctattaaaaaaaatcatgatatgcccagtctgtcctgcagaccctggtcaacagatgaaatgagcactcagacacaggtatgcagtgtaagagcagctaggtgactgcctggctgtagtggccagagagcagctccaagaaggtggagctgcttgcttttattcagtgcaggcacaatgccaaaaacctggagccaacacaacctgtaggwaattaacatttattgttcccctttcagggaatgtcacacacagatgatcaaagtcagttcct

SEQ ID NO: 855335 - DNA, 463 bp, Homo sapiens
tgctctctacacagattaacaaagcctgcatgacagcatatctgtttgtgctatggtttactgtatattttaagtctacttttgagacttactgctcagaaaaagtcttttcaaaataattgctgttgatcraagatgcacctcgtcaaccaatagctctggagatgtataagtagactaatgtcgttttcatgactgctaacacaacatccattcttcaacctaccaatcaaggagtcattttgactttcaagtcttatttaggaaatacattttgtaaggctagcaaggtaactacaattagaagtagaatctgaagatgtgactgaattggggcaattttgtgataatacttgaatgactgagaaattgcttctatggatgagtaaagaaagtggtttcttgagatggaaactgttcctggtgaagattctgtgatcaatgttgaaatgacaataaaggc

SEQ ID NO: 855336 - DNA, 634 bp, Homo sapiens
caggataaaaaattaatatgcaaattcaattgtatttctataaaaaatgaacaatttgaaaatgaatttaagaaaacaattccatttacagtaacatcaaaattataaaatacttaggaataaacttaactaaggaggtaaaagtcttatacactgaaaattacaaaacctttatccaaaaaattaaagacacaaatacatggaaagatatttgtattcgttgattggaaaacttcagagtattaaaatgcaatccctatcaataaaaaaatcccaatagcaatttttacagaaatagaaaaaacaaatctaaaatttgcatggacccaaaaacggctcaaatagccaaagcaatcttgaaaagaaggacaaaactggaggcctcacactgcctggttttaaaacatatcactaagctacagtaatcaaaacattatggtactaacttaaagacagacatatagacaatggaacagagagcccagaaataaacccaagcatatatatataawatacacacacacatatatatgatgcggaagcaatgtaaatgtccatcagtgtatgaatgaatagagaaaatttggtatacacataaaattatggagccttcaaaataaaggaaatcctgtta

SEQ ID NO: 855337 - DNA, 566 bp, Homo sapiens
gaatcccattctggtcccagcagcaatgtgccagccccaggtaacagccatgacccgggtaagacaagcttaataccaccacccctgctttcccaagtcacccagctggggtccaggagccagggtgcagcaggggatgggagagtttgcttctgtgaaagcagcagcagccacctccttcttccagactcgacgtgatggctggagctgctggagctgcagcagccgccttgcaacccgacatccacgcagcattagtctcgggagtgctgaggctccaagtccacagcagcagcccaccatgggcctcccggtgggaggggtcaagcccagtgtgttcaactctgggatcatgggttcctgtcttgctgacgtagaacacgttgttcccaagtcaccccggtgcacagccaccagagccggcccttgaggctggcctccctcacttgctcagtaaacgtctctccacactcatgtgatggtcacaggtgtggcggcaggaacycatcagggactcccctccaggccctgggaggctcccggatcctggcacctcctgggggctt

SEQ ID NO: 855338 - DNA, 639 bp, Homo sapiens
caaagtgcctggtgtaatggaatgcactgtttagttggtcaacatgagtgggcctgggaagcctgaaaaaagatattttggctaggcacagtggctcatgcctgtaatctccgcactttgggaggcccaggtgggaaggttgcttgagaacaggagtttgagaccagctggggcaacatagtgatatcctgtctccacaaaaagttaaaaaaaaaattagctgggcatggtggtgcatgttgccagcagtctcagctactctggaggctgaggtgggaggatcgcttgagcccaaggggttgaggctgccatgagccgtgatcatgccactgcactccagcctgggtgacaaagcaagatcctatctctaaaataacaataaaaaataaaaaatagagaatttttattactgaattttcaggtatacacaagattagagagaatagtacaaatgaacccatgaacccaccacacaatgtcagaagatttcaacatgctgccaattttatttcatcttttgccatatcactttctttccttgcttcacttgttaccacagtattctaaagcaaagatcagagaagaaattctctaagtgcttctgcagktatctctaaaagataaggacattaaaaaaaa

SEQ ID NO: 855339 - DNA, 592 bp, Homo sapiens
agaaggtaggtggcttttctgagggccccttacagttttaacatagcttaatgtttaccctctaggatcacagagcttggaattcagtaggtagcrccaggtttggtggcttatgcctgtaatcccagcactttgggaggctgaggcaggaagattgcctgaggccaggagtttaagaccagcctgggcaacatagcgagaccccatctcttaaaaaaaaattagccaggtatggtggcacacacttgtagtctcagctacttgggaggcaagaggatctacctgaggcaagaggatctcttgggaccaggagctcaaggcttcagggagctatgatcatgccactgcactctagcactccagcctgggtgacagagtgaggctctgtctttaagaaaagaaagaaagtcagtaggtagaaaggtttaaggaaaaagaagacataagaggtgcataatatgtgtttactactttttaaaaattagagatgccaaatattaagcttctttcaattactatatatattttcataaagaataactctactgaacttatgaaaacaatatagctcattataaagaagtcaagcagc

SEQ ID NO: 855340 - DNA, 580 bp, Homo sapiens
cataagcatttacttcttcacctaaatcttaggttacatttgttgagtgtctcagaaaatccaaatgggattttgatttkgattgcattacatttattggttaatttgggggaaattgacttcatcaaaattaaaaatttctattcagactacacatatcttaccaaatactcatattcagaatacacaaagacagaaggataatatcacaatgcactaaaaggaaataacaagccacccagaggcacagagaaggcgcccacacctgcactggccagcaccccaccctacatcaataccacctcccgtgcaacagcacgaaccatccccttcctctcaatgcctgtggatgtaccaaagaagaagggaagcttgcaaggcctccagtctgctgggatcttcaggcctctttcttgttttccaattgtggggcagtgtctaggaaagttatgcaaatatgacttgctatttttaatttcttgaaaaagtcttgagggcttcctgggaggtatgtttaccattttgaggtgatggctggttggtgcttattgtcctgtgtatccaatggataaggggcctg

SEQ ID NO: 855341 - DNA, 578 bp, Homo sapiens
gggatctaagtggttagaacatttgaccaaagaggccaaggctgaactgcttcccacagagaacaatgaactttacagcccacatttctccctatctgttcttcttcactctctatccatccatttgtggttttcctgtctccccttccccctccccaccaccccagtttctgaatagtgtaccaggggtttaagaccctgtttctcacattagcactgtgcttattctgagagtttgtgtggagcttctggggtggggtggagtggggcatgaaccttctctccttgttttgaacccagcaatcttacatattgatctagtctttaggaaattaaacaaacaatgaaaaagctgacatttttatggcacgtcaaaagtcataagcaacttcccatacaatatttcatttaattcaaacaatttaggaattgttacaaccctagaggggctaagtgacatgcycaaggccaccgactcattgtgacacagcttttttgtttgtttttgttcttttgagacagccttactctgtcacccatgctgcagtgcagtggtgtgaacatggctcactacagcc

SEQ ID NO: 855342 - DNA, 633 bp, Homo sapiens
aacacgtgcttagggaaaacctaccaatataaggtgtcttgtgaggtactcagggtcctatttgccctacagaaggggaatcgcatattcttccaaaggccaaggggacaagckcttgtctttgtctcccatcccccatgcttcattcatgtagagtttgggcattcaccgcagagagagactcatcaccattagcttcattgtctttgaatgcgaggagcagaaatatctctaatgggagacactgatcaaacttatggaccattttgatgtcagctgagcatgctgggctgatgataagcaggatggaagctgggggagtccacagctttgggacagagatgttcaatagaaaccgatggaatggctgacagcagggctcataattacttgtctgtctttcaagtgaacttcaggactaaaagttgttagctagtggttcctaattgactgtctagagattgcttgatgatatccactgttttctgagttggcagaatttttcagagaactctgagaatggcccaaccctgtttgtgcagctaattaaactccccttgttaaaatgcaatgcaagattttttttttgctagactgttattataataagctatttcttcaaaagtccttgat

SEQ ID NO: 855343 - DNA, 639 bp, Homo sapiens
catattggacacagcagagacccagagacaaaggctttgctcccccttccccgcctccatgctaatctcaggcaattctttggagctctgcttttggctccagctcacctcatgttcctcaatggctctctgagtccctgcaagtatttcaggccaaatccaacaattcaggttctgctcctttcctgtctcacctgctctgctctgagcagcaggacgagggaaaatgacctcaaatatacttgaagttgggttttctttgttatccaataaaccatctcatgagtttttttgagtgttaagatcccagaaaatgtgtgttcaactctttggatagttattataaaaatactggaggaactttattttatttttatagctcataaactcctgggatggcaggcatttcagcgggagtacaatgtgaagggttgatcgcccagactgagttatttacccaagtgttacagggaatgtagattcagtggaccagtgaatcttgtcccacttgattstacacattgtgacaatgacagtgtctggatggaaagatgaaatacttgcatgtcattctatggcacaatagcatatgggttatgaacagcaggactcaccatgtaactctgcagcaggacggtc

SEQ ID NO: 855344 - DNA, 546 bp, Homo sapiens
aggacccatttaaactttccaactgtattaatttttaatttaaatttaatgaaactaattcaaattaagaaggtgaccattatcaattttgtttcctattagtttcttaatgctttggcaaattgcattctaaacttctccttcaatgagctggatacatattcatgggtttcctaagaaaagatgaatttgatcttgatatgctaatcccatagccatggcagcaatcaaggagcagctagggagagaagtgcattctggtattaattatgaatcaggcattaagaactggtaaataattaaagcttcatatgtcacaacacaagttaaggatcagtatgtttttccattaccaaatgcattttaggggctacttctagtcccatttcgatactgcttgaacataaaatgaaatgtagataggtaactctcattcgtagtaaactcatagtacaaatttttaacttaytgaacagctggtatagaaataaatttcatttcagaagcagaggcccagtatttctgggagattttgggtcattgacc

SEQ ID NO: 855345 - DNA, 387 bp, Homo sapiens
cacaaaacttatacaattcctttatctcttcctctttttctaaagaaaaatgtcaaaaatactgctgaatatactccacactgaacaaaccaattytgaaaagttttgtatcttaccatgtacattccgtaccaacaaaccataacccaaagtctacatttcccagccagaagattgagaatccatgcttgagccagagcctccattaaaaccattgcctgatgctgattcccaaccaattgctgcaccagaattagaaccactgtaagagttatttctagaaccaaagacctggtttggctccctttgcatgttgccttgactttggttattacctgatgggcctgactggttctgctggctggctaacatgctcatcctacccca

SEQ ID NO: 855346 - DNA, 387 bp, Homo sapiens
cacaaaacttatacaattcctttatctcttcctctttttctaaagaaaaatgtcaaaaatactgctgaatatactccacactgaacaaaccaattttgaaaagttttgtatcttaccatgtacattccgtaccaacaaaccataacccaaagtctacatttcccagccagaagattgagaatccatgcttgagccagagcctccattaaaaccattgcctgatgctgattcccaaccaattgctgcaccagaattagaaccactgtaagagttatttctagaaccaaagacctrgtttggctccctttgcatgttgccttgactttggttattacctgatgggcctgactggttctgctggctggctaacatgctcatcctacccca

SEQ ID NO: 855347 - DNA, 362 bp, Homo sapiens
agctaaggacaatctagtgtgtgtcttttgatgaactggacccaagagtgaagtgctgagtcatagggtgtgcatgtttagcctcagagggcattgccaaagrgttttcaaagtggttctatcaatgcatatcccatctcatcggcactcagtatggtctgtcttcctcctggtgccattctgataggtgtgtactggtataacatcctggttttgatttgtgtttctctaaaggttattgatgttaagcatctttttgtaagtttaatggccacttgaacatcttatcttgtccccagtttttcctaacttcttgactctgggggaactttgctttattttttgcttcttttattttttgt

SEQ ID NO: 855348 - DNA, 593 bp, Homo sapiens
tcacatgcatgatcttgagcacattaccaaatccctctgctcctcagtttcctcatttgtaaaatggtgttaataataattcccagcggcaaggcgcggtggctcacagctgtaatcccagcattttgggaggccgaggcaggcggatcacctgaggtcaggagtttgagaccagcctgaccaatatggtgaaaccccatctctactaaaaatacaaaaattagctgggcacgatgacaggtacctgtagtcccagctattcggaagactgaggcaggagaattgcttgaacccaggagttggaggttgcagtaagccgagatcatgccattgcactccagcctgggtgacagagcgagacttcttctcaaaataataataataataataataataataataataataatatccacctctcagagctgttatggccattaaataaattaatatgtgggcagtacccgatagagtgcctagcacatgctgggtgttatgtaactgattgctattattatttatcayggtggagaaccaacagagaatgctgaaactgaaaaaaaaaaatcaagaagtaaccattcaattatatt

SEQ ID NO: 855349 - DNA, 621 bp, Homo sapiens
caattcgtcttctatattttgccttcttaagaaaaaagaactaaagcctactaactagtttaaaagagatgacacaaasaaagcaggctttttcctcctcatgaactgtgtatataattacttgaataatgttgaatttcacccatatgccggggaagggaaaaaaacagcaaaaataactactgtgaattcaaaccgcaaatgaatggaactggcctcattcataaatgtcatatgaagctttggtttaaaaggcaagtctgtcattccagggacagcagctgttgttatgttgaacaaaatggatacaaatgggtattattttaaagtgaaatgcttaatttcaggcctaacaagcacactgtcctctgtgtagccccgtgtcacacaagccatgatctccagtagagggcttgattgcacaggaaatcaagctcccgggctgtggctgaccggaccagcgaacacactggcaatgtttgagttactatggcaatcacaaaataggaaggccttttcttcttttccccatctctgcatgcagccgcagcctgctcctgaataggccacatctgcaaaaagttttaacacggtactcagataaagaaaaggatcccaaaa

SEQ ID NO: 855350 - DNA, 574 bp, Homo sapiens
ttaatagttcatgttgccatattcctattcctaaagccacattcctattcgtaaagcattgccttctcctcttagacgcacttcatgtgcacaagttgggtactgatatgaatatttctaagacgtgtgtasgtgtatatgtgtgcttcctcactctcattttcttgtaacttacatgaaacacagcctttcttgatgccttccagccccttagtgtcctcctcgtagcagagcacagggattggcaagcagtgagcactcagccaacgccatcagccctgggatcgacatgcctgttcctagaacactgctcaatttactgcagtttattttctagaagatacaaaattcatgatttcataggattccagaaaatagcagtaaccacaggaagggaaaaggcagattattccagagggaagtctccagccaggcggaacccatgagagaaattaatgtgatgaagaacatgtgtgaaagttataaaaccctgtgaggtagttgccaggagactgggggaagggagaatgggagctgtagtttaatgagtacagagtttcggttttacaagagg

SEQ ID NO: 855351 - DNA, 370 bp, Homo sapiens
cccagagtccgcagatccacagctgtgagccaggtccgcgtggggccagttttcccaggagtgcacgtttcctcctctcggcttcccagggattcatttccggaagaccaagctttcagctttctagtctgccttagcgagcagcgggaggaaaaaagcaagcctccttgtggcgatcccagttgttgccaaggtggtgacgggagcgcagcgctggggacctggaggcggctgcggcgcaccagagctctcaagcatcccgccgccagcagagacygcgttcaagtcccagcacactttcgctcaaacactcctcaccctgcaacctctgacctgaatgcagaaacagtttgcgtcttgtgctgagctg

SEQ ID NO: 855352 - DNA, 607 bp, Homo sapiens
atctgtatgtaaaaattaaataaataatgaaatgtaacccttagtatatacataacttaacttgaaatagaccatatagctaactgtgtaagttgaaattgtacagttgctagaagaaaacrcggaataattttttggtaacctacactttgacaatttctacattttgaaattatacagaaagcatgaactaaaaatataaattaaatttgactttataaaatttgaaaagtttactattcagataacactgatatgaaattaaaaaggcaagccacagacaataagaaaatatcaagcttctatttagacaaaaattgcatcatgaatattaaagaacatattgatattatgactcaacattaagaagacaaactatcaagtaggaaagtaggcaaaatatttgaacagacacttcacagaagacacaaaaatggcaaagaagcacaggcaatgacattcaatatcattcaggaaattcaaattaaactacaaagaatgtttaatacatacctactaaagtggctaaaatttaaaagaccattctaaatgttaccaaggatatgcagcaactgaaattctcctacgttgttgattaaaatgtgaa

SEQ ID NO: 855353 - DNA, 629 bp, Homo sapiens
cagaaatgatggagttgccttcaaataagatgaaaaaaactgcatgtgaaatagtgtgagatgcaccttggtgaggaacatattgagtttgtgatgtttactagaaatccaagtggagatgtcaaataggmaagaagatactaaagttaaggagaaaagcctgagttaaaggtatatatttgggaatcattggtttgtgaatggcattgaaagcaaaaatactggttatgttcacgaagggagttagtgtagatagggtaggtttaaagactgagtgttggggaggtccaacattaagagatccggaagaggaggaacagaaaataagactaaaatggaacagccaatgagtataaagaaaggcataagcaagtatatagacattgtactacaatggaagaagtcaaatctaaactgtcccagttgcctcagttttcaggcagggcaggatggctttttcttcagcacctgatatggttttgcctctgtggctctgcaaggaacagccccacatagcacaatgcccctgtggctctgtagggtaaagtgctcacagctgctttcatgagctggtgttgaatgcttgcagtttttcaggtgcacagtgcaagctatcagtggatttatta

SEQ ID NO: 855354 - DNA, 568 bp, Homo sapiens
ctcaccccttctgcagaagctctattttactcaccayacctattttactcactcctgtaggagctgctaagggcaagggataagccctggtgctggcaattccttgcagtgttcctagctccttcccctttcatcatggggtctgcttttttcctctgtacactctcaatgccttctttctgaagatgtattcagagcgtgctggtgtacttgaccatctggtctctcttggtgggagaagctcttcctggttgcatctagtcagccattttagctcctccctgtacattccttttccatctctaccactttctagctatgcaaattcagtaaagtcacttcaactctgtgagcctgtattcctacataaagtggaaataataatactacttcatagcattgatttgagaattaagaatttatgaaaaagcacacatagcacattgttaagagcttatataattttcaaacatgttaaaaaacacgattctcatacaaatgtagaatggacatgtatcaagattgaactcattagtaaggataataaaactgattcaaagaacatttg

SEQ ID NO: 855355 - DNA, 644 bp, Homo sapiens
taaaaataagtttggcccttgcgcggtggctcacgcctgtaatcccagcactttgggaggcctaggcgggcggatcatgaggtcaggagaatgagaccatcctggcsaacacggtgaaaccccgtccctactaaaaatacaaaaaattagccgggtgtggtagtgggcacctgtagtcccagctactcgggaggctgaggcaggagaatggcgtgaacttgcgaggcggagcttgcaataagccgagatcgcgccactgcaactccagtctgggcgacagagcgagactccgtctcaaaaaaataaataaataaaaacaaaataaataaggttaatattttaaaaagtttatttgactgctggttgtatagagcttagatcagaagagaacaaaagtaaagagagatgggttgttcagtggggtgtatctattaagtggtgactgcagtgggctaggagagagatgatggtgatttagactgaagagttaaagaagcaaccctgaagatgacagaacccttagtgaaagttcaactgagagacttctgagtgacagttgtcataatttagaacagtggactaatttgcatccccttttctctgcatccttgaccacgtctgttattttttgatgttttaataat

SEQ ID NO: 855356 - DNA, 534 bp, Homo sapiens
aatgaacctgacaatggagtacgggaaaaacagcagataggaggcaggactaacttgcagctcccacttggatggacrgagcagcatgtggagacccacactgtgaacttttgctccaggaagtactgcaggaacataccaggaaagccaagagaatccacagaccctttgaaggaggtggattgctgctccaggctctgggacagccaaggaaatgtgagtctgcttgctttctcagcaggaggcttgtagcctggggcaagttctcagccctgctcacactccaaccctggggcatggtggaagtgagactggccttttgggctgtgggctgcatgagagctgggtgagtcctgtggctgctggcttcctcccacttctttggcaacctgtgtgacgcagtagaggcagccataatccccctgggaacaaaactgcattggcctgggagccgtaccaccatcacccacagcatctgcagcaagccccacccaaggagagtctgagctcagacatgcctaaccctgcctccac

SEQ ID NO: 855357 - DNA, 532 bp, Homo sapiens
gctccatggctccacccaccacctgatcctccctatacaatcacagctgatgcactcttgaaagcaccacctcctggctggaggccaacaaacaaaaccagctcacttaacaaaaatacaaccaaagaccctcacagagtccacctcagtctcctgctccctccaccagagcaggtgctggtatccacagctgagagacctgaagatggagcacatcacaggactctgtagacaccccacagtaccagcccagagtccagtagctcagctgggtggctagatccagaagacaaataacaatcactgcagttcgactctcaggaagtcccatcactaaggggaaaggggagagcagcacatcaagggagcacccccatgggacaaaagaatctgaacagcagccctygagtcccagatcttctctttgaacctatcagattaacagcagatttctcagcagaaatcctacaaactacaaggaattggagttctatctttagcctccttaaacaaaacaattatcagccaagaa

SEQ ID NO: 855358 - DNA, 630 bp, Homo sapiens
cccagaaactgccactgaaagactgaaaagacaatgtttagtaaagtgacacaacattttacaacagggaatcgagaccccgcccagtatgttccccgacagcatgttttataaacgtcacatactggttaatgtgaattctctggacattaagtgttgagggtacggaaaaaccaccgaatttctggtctcaggaagaaaaagcagagaaaggagtgcggctgggagaagcaggcggagggctggcccattttatttctgcacgactttgcctgatcacctgctgaggattctaaggcctgacccagacctagatgccagcccttagatgacaatctctaaaagcagagttcatgctgaggcaggtgccaagaaatcggttcacacccctgataaacggttgttgaaaatgtgtgtcacctgcaccaccagcgaccagaaccactcttcctcactggaacgagagcaatgtctggggttccacacgcagactccaccctgccctgggggtggcccgcgcgccgccacctcccggccattacccaaacccgcaacgccccgttccacacatcccggactctcgagcagccggggagggtcggatccgrgcgcggaggaggcaggaggtcc

SEQ ID NO: 855359 - DNA, 626 bp, Homo sapiens
gaaatattagtccctaatgggaataggaattcataaaacaggctcaatatggttattgacataatcagcacacttgcgagccagaacggcatgctgtaattgctccaacgtggttattrttgggtatttcaaatatccagctactttatttatttatttatttatttatttttgagacggagtctcactctgtcacccaggctggagtgcagtggcgagatcttggctctctacaacctctgcctcccgggttcaagcgattctcctgcctcagcctccagagtagctgggactataggtgcctgccaccatgcccagctaacttttgtatttttagtagagatggggtttcaccatattggccaggctggtctccaatgtctgaccttgtgatctgccagcctctgcctcccaaagtgctgggattacaggcgtgagccaccgcacctggccccagctactttataaataactatgttttttaaggtttactagttagatatttttaatcaccttaagtcctttcactcacttttacaacttttgaatgtttcctagcaacgcgcatttacttccctcatctacacacaaggcattcctagcctctcctcttctcattccgggat

SEQ ID NO: 855360 - DNA, 600 bp, Homo sapiens
aagctgattccgccatgtccaaattaagagcgaccacaactgtgtaaagtttttactaaattattatttattttcamacctcaatatagttgttttttaaatgattgcctcggagagacagcccccaaaacttactggtggtccggtaaatcctggaggcccaacaggaccttgaagccctggcagtcctggtgggccctagaatgcatgagaaagaaatgagttcagatgcgaactgggagggtgaggtggcacatgttcataatgattcagcaaatgcttactggagtccctgggattccgggaaatcctctttcacctttcaacagcatcccgggcacatggccaagtatctcacctggatcaccctagaggatgaagaaagaaaatagaaagttgcaaatatcgacattcatgtaaagaagctgaaaactctttgatagttggcatatattagtgttacaggactagcctaagtctgggatttagaccccgtctacactggaaatcaatagcctggccatctctcccatcatgattgccgtcttaatggccagcgttaaccactgcctggtcaactgagccgcagccgggactgaa

SEQ ID NO: 855361 - DNA, 600 bp, Homo sapiens
aagctgattccgccatgtccaaattaagagcgaccacaactgtgtaaagtttttactaaattattatttattttcaaacctcaatatagttgttttttaaatgattgcctcggagagacagcccccaaaacttactggtggtccggtaaatcctggaggcccaacaggaccttgaagccctggcagtcctggtgggccctagaatgcatgagaaagaaatgagttcagatgcgaactgggagggtgaggtggcacatgttcataatgattcagcaaatgcttactggagtccctgggattccgggaaatcctctttcacctttcaacagcatcccgggcacatggccaagtatctcacctggatcaccctagaggatgaagaaagaaaatagaaagttgcaaatatcgacattcatgtaaagaagctgaaaactctttgatagttggcatatattagtgttacaggactagcctaagtctgggatttagaccccrtctacactggaaatcaatagcctggccatctctcccatcatgattgccgtcttaatggccagcgttaaccactgcctggtcaactgagccgcagccgggactgaa

SEQ ID NO: 855362 - DNA, 586 bp, Homo sapiens
attttctactgcattgttatggttttattccttcttaggagtattttttttctgtcattcaaactggtgattgacaagagaaggagagggtagaccaaatttttccattattgaacattaattgacagaacaaacaagcctgaaaaataaatgtataatcttcatattctagccattgaaagttcaataaggggctctgcaacgtcacaattttccttaaacttttgaaattctttctggacatatttttctgaactttagagcaatgtacaggattcgagagtctaaatacatcactctccgcacacaggagcagcagatgctctgtggttaatgattcatggggaattactcagccaggccacacaattacaattaataacatcatctgacttctaggtgaacacttagtattttgttgtttaaaaaagaaaaacaacaaagaatttgttttgactttatttccaaataacaatatgtaccaagaagtaaccataacaattagagcagagatgtgaaaagacagsgcaaacgtgcctcccacgccttgcaaagctattcaggccgtgacattagcaagcaggtc

SEQ ID NO: 855363 - DNA, 644 bp, Homo sapiens
taaacgcagattgctggggcttagcccagagttgctaattcacaaggtgcaggatggggccccagaatctgcacctgtaacaagagcccaggtgatggtggtgatggtgatgctgctggtgcagggaccgctgtctgagaacacctggattaagccctgcacctgcctgtgggaggaggacagtaacatctcatccatatctgggagccagagctggcgttttgttttttgtttgtttgtttccaaatgcactgggtctgtgattgtgggagcccacctcaggcttctctgcctgggccttgccaggtgagcgagaagctggtcccgtgaggagcagtccaatccggcccatgttgcacagcctcgtgcccaggccctggagctagcaacttgcccgacacagcctgctccttcccagagggcagcccccatgcaggctgcttcccacggtgtctcagcaggtcctctgcagatttttcctcccaccttttttatggtgtccaagacatgaccacaaccaccaccaccaaactcttccatccctgacaaacagttcctatgttattttagaaaaagtctctccccacagkatggcaggagcacttcccatagtgcccccttcggctttatcttcaacgatatct

SEQ ID NO: 855364 - DNA, 605 bp, Homo sapiens
aatttttgactatttttggaccatctttattccacaggaaaattktgatttctgcaaaagcagctgcaaagtaccacacatagcagaaagacagaaatttatactggggggttggaagatatggctactgagtctgtaattccatttggaggttcaaaaaaccatttttacattgctattatttgtacagaccaagggacctaaattttgaaacagctagacagtgatataaacaaacatttatctctgggggtagaaaattaattataatacaagaatgaaaatgggcaaacagtatggaaggcacccacacctcctagcaccctttggttttctgatggagttctcacttcacacatcagtgcattggattgcagaaaatattgatattttatttcatcaaaagtgccatttggtatgccactattgaaagcttatcgctgtctttttctccttcagcaagtagaggtcaatgaagcagggtgtgttagttacgcaaattcctataaggcactttacggttttcatattggacagtgaggtacacaggatatatttctagggttcgttgctgttaacaaaaagaagaagaagtagcaccatgt

SEQ ID NO: 855365 - DNA, 600 bp, Homo sapiens
aaaatgtttaaaattagccagacatttggcatgaacctgtagtcctagttcttggaggctatggcaggaggatcacttgagtccaggagtttgaagctgcagtgagctataatcatgccactgcacactccagcctatgcaacagagtgagactctgtctcaaacaaacaacaaatgttcaggtcatatgagtagtaagtggtcagagctgcatgcaaacctgggtcttttaatttcatatcaaccatacatcagatcacatctcctaacaccagtttctaagaggcaacatcgtctcatgaaagcaggcctagaccagaagtaggaaaatctctcctcattcaaaggtcagcttgccatttgccagccatgctatcctcagcagcttctccttctgcaaagttgggataacaaaaaagtttccctccttgccaacctcctctggtgactgggataagcacacaagatgatgtacatcaagacacaacactcccagcaaacaatggcatcccagcrgactcttgtggactgcctgccacgtgatggctttagcttcaattctactgccgattctgctaaagcgagggaggagtcgcaggt

SEQ ID NO: 855366 - DNA, 624 bp, Homo sapiens
taaaaccagaattgataatttcactgaaatgctagttaataatctcataaaatgttgaggcctgagagtattcttgttagaattttatttttcacatatagacagaaaaagggtcctggggaaagctccaatgaggagttttcacttacagagactgaacacttgctgcaaactgtatgacagagaaggtttggttcagaaaggagttagcacaggtggaaaggcaggaaacctgtctcagaatagatcagtattttctttttcttttttttttttttgagacagtcttactctgttgcccaggctggagtggagtggtgtgatctcggttcactgcaacctctgcctcccaggttcaagtgattctcgtgcctcagcctcccgattagctgggattacaggcatgtgccaacacacctggctaattttttttgtatttttagcagagacggggttttgccatgttggccaggctggtctcaaactcccgacctcaggcaatccacccaccttggcctcccaaagtgctgggattacagacatgagccaccgtgcccrgccagatcattctttatggacctcatctcaggtattttctgatgacgtatgtctcaagaagagttc

SEQ ID NO: 855367 - DNA, 586 bp, Homo sapiens
ggtagaaatattttgtcattttaatacatttgtagtggatgttgtttttaaaacgacaagactgcctataaaaaaatagtgatttgtttaaaaaaggkaacattctttttccctattcttcctacttcttttcttttggttctcctatttttttttcctttctcttttctttcctctctcttctctgtccccataattatttttcaataatacaaaactgaacttgaatctttgttctatttatcaaaagatgttttctccaaattattttttatcacatttttaaagtgacttaaaatgttaaaaggatgtttactgggtgaatttactcctctgaatttccctcttagaagagtctttttcatctgtagttttgtgtatgtaggtctctgcagaatttctcccactctgagggcctgtctaccataaatcttaaagcaatggctccccctccttcccctcattcagttttaaagttaaacagaaatgacacctggtggcaagtctgttcaattacaagtttttgttgttttttttttttgcagtttattgcaggaaaagaataaaaagtgttctgggttggaga

SEQ ID NO: 855368 - DNA, 632 bp, Homo sapiens
ttcaccatattggccaggttggtattgaactcctgaccttgtgatctgccgaccttgtgatctgcccgccttggcctcccaaagtgctgggattacaggcatgagccaacgcacccggcctgcctgttggttttaatgtcggcatactggagggtgtgggcagtattgtgctgtggctttggtatgcttttcttaggtgactgatgatgtcaagcagcttcctcatattcgttctccatttgtatctctcctttggagaaatgtctattcagattatttgcccagttgtgagttgggttgtttgtctttctgttgttgagttttaagagttctttatgggctggacacagtggtttacgcctgttatcccagcactctgggaggccgaggcgggtggatcacctgaggtcagaagttcgagaccagcctggccaacatggtgaaaccccgtctccaataaaaatatgaaaaaaattggccaggcatggtggcgggcgcctgtaatcccagctactcgtgaggctgrggcaggagaatcgcttgaactcaggagacagaggttgcagtgaggcgagatcgcgccactgcaatccagcctgggcaacaggagcgaaactccgtctcaaaaaaaa

SEQ ID NO: 855369 - DNA, 504 bp, Homo sapiens
gagcctggaaggaggaagaggagagggtctgagcctgggaaggggggagaggagaggctctgagcctggaaggagggagaggagaggstctgagcctggaaggagggagaggagaggctctgagccaggctgtgacaagccccgagtgtcagggccatttgcacacccggactcaggaaggagaagagcctgattctgacatgagaggtgtcaaagtactccatgcctcagtttcccctctgaaaatggaatgaatatagcatggctgggttactgccaggacttagaggcctggcccagcatggggggctcgggttgggcagctgtgaccatagccacccacgaagcctgagacctctctgactgctccacgcaggacacacagcagctttggcctccgagcctctgaggacagctttaaggtccactgctgggtccccacgtggcccacagacgcagcaccctcttcccggcaggcagataactcatgcttgggagagttag

SEQ ID NO: 855370 - DNA, 504 bp, Homo sapiens
gagcctggaaggaggaagaggagagggtctgagcctgggaaggggggagaggagaggctctgagcctggaaggagggagaggagaggctctgagcctggaaggagggagaggagaggctctgagccaggctgtgacaagccccgagtgtcagggccatttgcacacccggactcaggaaggagaagagcctgattctgacatgagaggtgtcaaagtactccatgcctcagtttcccctctgaaaatggaatgaatatagcatggctgggttactgccaggacttagaggcctggcccagcatggggggctcgggttgggcagctgtgaccatagccacccacgaagcctgagacctctctgactgctccacgcaggacacacagcagctttggcctccgagcctctgaggacagcyttaaggtccactgctgggtccccacgtggcccacagacgcagcaccctcttcccggcaggcagataactcatgcttgggagagttag

SEQ ID NO: 855371 - DNA, 500 bp, Homo sapiens
catacccgagatttatggtaacaagaaagccatgcggagacctggggcattctctcctgatttatgaggagatgcacagcatgggagaaagggccagtgagagttctgctgcggaaagaataaggccttaaggactcagcctactcctgcctgagaagagggaagagagaaactggagtcacattggaccccattgcccacaactctatgttaagacttaggaagtagttctctctaaaacacaaattaactgtgctagacaaatgctgtccaccctcacatggtttctattcactcagattaaagctcatattgaggccaaggcactcagagttcttcataatctcttcccactggctccaccagtctcacatcccacagccatcccacatactcaacacgctggcttcatctttcttcaaaccaagactgtctttcacctgtcctgyttggtggcctggttccctgttccttgaggctggaatcacctgttccaccct

SEQ ID NO: 855372 - DNA, 500 bp, Homo sapiens
catacccgagatttatggtaacaagaaagccatgcggagacctggggcattctctcctgatttatgaggagatgcacagcatgggagaaagggccagtgagagttctgctgcggaaagaataaggccttaaggactcagcctactcctgcctgagaagagggaagagagaaactggagtcacattggaccccattgcccacaactctatgttaagacttaggaagtagttctctctaaaacacaaattaactgtgctagacaaatgctgtccaccctcacatggtttctattcactcagattaaagctcatattgaggccaaggcactcagagttcttcataatctcttcccactggctccaccagtctcacatcccacagccatcccacatactcaacacgctggcttcatctttcttcaaaccaagactgtctttcacctgtcctgtttggtggcctggtwccctgttccttgaggctggaatcacctgttccaccct

SEQ ID NO: 855373 - DNA, 429 bp, Homo sapiens
cagggatgccttagacagctcctagtttttctgcttttgttccttccccatcccccatttgtttcacacttagaatttatggacatcatatttttttytctttaaaagtaatgtgcagataggttgccgagaaaaaagcaaaaaaaaaaaaaactatttctgaaatgattgagattttcaacattatggaaatgtaggtaatcagatgaaatagtaaattttccactttagttttattggagtctactgttttcaggatgtaaaagaaatggcctttccagtttaaaaatgaattagtagactggacttctttgtgtaataggttttactaggataactctggtctactgggccatgtatttccccccaaaagtttgaggtgtcatgttggactcctttgttttcccttccagggaaaaccacaagcca

SEQ ID NO: 855374 - DNA, 591 bp, Homo sapiens
gttgccagatttagcaaataaaaatgcagatgcttggccaggcatggtggctcacgcctgtaatcccagcactttggaaggccgaggcaggtggatcttttgaggtcaggagtttgagaccagcctggmcaacatggtgaaaccgcgtctctactaaaaaaaaaaaaaaaaaagaaaaaagaaaaaagaaaaaaaaaattagccaggcagtagtggcgcatgtctgtaatctcagctactcaggaggctgaggccagagaatcacttgagcctgggagacagaggtggcagtgagccaagatcacgccactgcactccagtctgggtgactgagtaagaccctgtctcaaaaacaaaacaaaatgaaatgcagatgctctgttacctgtgagtttcagatagaccaaggaatagtttttagtgtaaggatgtctcaaacataggacccagcagttccacgcataggtatatatccaagggaagtgaaaacacgtgttcacatgacaacttgtgtctgaatgttgttaacagcattattcatgagagccaaaagatggaaataactcaaatgttcatcaacaaatgaatggc

SEQ ID NO: 855375 - DNA, 464 bp, Homo sapiens
cttttttatcttatttgcatgtcctggacttccagaacaataattaataaggttgataatgaatatcagaacttttttcctagtgttaatgagaacaactctagtatttcagggtaattagaatgtttaatgttagtttgagattactattttctatcatgttaagcaagaatgcttttgtaatgtgttcttaattagagtttttatagaaacaattttaggatatattgggcgaattatttatgatgcatcctatgcatgctttcccttactttcttgaataaaacttcttaagttgtagtattctaatattttaaaatactattggctgggcacagtggctcacgcctgtaatcccaacactttgggaggctgaggcaggcagaccacttgaggmcagaagtttgagaccagcctggccaacatagcgaaaccacacctttactaaaaatacaaaaattagc

SEQ ID NO: 855376 - DNA, 532 bp, Homo sapiens
ggatcccactttaacagcataagtgcctgtttattgcttttatagtgcccgttttctttctactgcctgggaaggataattcaattttaatctgtattacagactattaatattaataagtttatatattaatagttttagcattcttgtaaatgatataaataatattatagataataataagatttcatggctggggtggttggggagctgcagaaagctgactctagtcactcattgtagggatgtagtctacacagggtggaggaggggaggatgagaccctgaggggaaaacatgtcttggggctcagagtcagggaagaggccagacccaggctgggagagaagggaactaggacaccagaggccctttcttgctggggctgtccctgctcccagctctgaggtagcagygactgcactgtatctcagtggctttccctgagcaggtcagtcacaaggcctggtctctatccgcttccccacaactacatgggcaagggaagagggattttgagcccgtcgctgta

SEQ ID NO: 855377 - DNA, 519 bp, Homo sapiens
actgacttttctgcctcaaactctaggaccatgaacaaaccagacaattaatatgaaatttcagcagcttaaggcacttgctagggtttttacagctgcttggtgatcctgatcctgataagctcagcacatcttggcctcagtgtgtttgtccaaagccgtcaaagctgggtatcccgtaagttggaagtggtgcacatactacaaattcagatccatcggcagtgttcgcccttcacagtcatctatgcccaaaactcaaacaatgaaaaaccaaaaaacctactagccttttacatcacctttacacctacacttcatacttctggtgccacgctgccagtgccaggctgggtttccacccactctgagaaggccactgggaggccctgcactgagctctccctgtgctcctcgcccccatgaaggcttcagaagaaagaggggcagctcagccttgctgctmacccggccccaccccgagaggccagaatgaagcacaaaacctgaatctgcaaa

SEQ ID NO: 855378 - DNA, 519 bp, Homo sapiens
actgacttttctgcctcaaactctaggaccatgaacaaaccagacaattaatatgaaatttcagcagcttaaggcacttgctagggtttttacagctgcttggtgatcctgatcctgataagctcagcacatcttggcctcagtgtgtttgtccaaagccgtcaaagctgggtatcccgtaagttggaagtggtgcacatactacaaattcagatccatcggcagtgttcgcccttcacagtcatctatgcccaaaactcaaacaatgaaaaaccaaaaaacctactagccttttacatcacctttacacctacacttcatacttctggtgccacgctgccagtgccaggctgggtttccacccactctgagaaggccactgggaggccctgcactgagctctccctgtgctcctcgcccccatgaaggcttcagaagaaagaggggcagctcagccttgctgctaacccggccccamcccgagaggccagaatgaagcacaaaacctgaatctgcaaa

SEQ ID NO: 855379 - DNA, 517 bp, Homo sapiens
acatgtcacatgtcctccaaataggatcctcttccagtatttactagccggtgtgtgactatccacccagctgaccaggctaaaactgtggcaattctttcttattgttctttctcctttcttttttttttttttttttttaacatcaaatcaaataagcaagtcccctagagtctacctgagaaatacatctatatgtctctgtccctacggctacctccatcactggccacaatttttacaaaagctgcctcacagttcctgacatcactctggtctagcccttcagttcactctacacactgtggttagaggaatcttttaattttctaaacactgtaaactttatcaagctattctcttgaatggctacccactatctttaggagcagagtcaagccatatcgagtcatttatgagaggccacctgcctctccaatgcctccaggttcctcatcccaccctcgcaarccgagaggatttccaccatctaaatggtgtttttcaaattttgttt

SEQ ID NO: 855380 - DNA, 603 bp, Homo sapiens
tggcagagacacctttatgtttcctatgcaaatactgcttacaaaagccattaatgggaattatggaaggggaaagccaactaaatacatgggccagaataagcaggatgattcaactggtcttcaggggccttctcctctgctggtaattttattagaaccattaccagtgaagaaattttcagcttttcgaattgaactgtaaattgtttctgctttccatagtatcttaaagggatttcagggggaatttttgtttggtttgtggagtgatcagactaggggaagttttttggaaatttctgggttactgttgggaatttttccagaaatggattcttcttctttggaagtcttttggtcattagtttaaatactatattggaaaatttctacataaagatttgtaatgtgcccccaattttctgtttataggatttataagaatattattgtaatggtaacatcttrtaatggtgacaatatttctattaattttatgaaaccctataccactgctttaatctctgcagtaagaagtcattattttttaaagcgccaaacacagaatgtgtttattacaattcttcatgacccaaatta

SEQ ID NO: 855381 - DNA, 603 bp, Homo sapiens
tggcagagacacctttatgtttcctatgcaaatactgcttacaaaagccattaatgggaattatggaaggggaaagccaactaaatacatgggccagaataagcaggatgattcaactggtcttcaggggccttctcctctgctggtaattttattagaaccattaccagtgaagaaattttcagcttttcgaattgaactgtaaattgtttctgctttccatagtatcttaaagggatttcagggggaatttttgtttggtttgtggagtgatcagactaggggaagttttttggaaatttctgggttactgttgggaatttttccagaaatggattcttcttctttggaagtcttttggtcattagtttaaatactatattggaaaatttctacataaagatttgtaatgtgcccccaattttctgtttataggatttataagaatattattgtaatggtaacatcttgtaatggtgacaatatttctattaattttatgaaaccctataccactgctttaatctctgcagtaagaagtcattattttttaaagcrccaaacacagaatgtgtttattacaattcttcatgacccaaatta

SEQ ID NO: 855382 - DNA, 408 bp, Homo sapiens
aattgtaaaccatcagtattatctaatatattttagacccgtccaccaccacaggaccaacttgctagtttaactgttacactgccctcagagaatcctatttatctacttaatttttcatccactcatttattccattgttcattttctcaaaaacagtttggagaaggatataccacttaaggactggcaaacctataaaaagaattaatgaggcctaattgtgacaataagcatgcactttggtgagctggagtcattgactaatataagccaatcctcccytcacctctaattcattcacattgcattgtggtaacaaaatgaataaggggtttagtcatttatatgtgacccaggacgatgcttaagacatattttatttgacctagagaaaaaatatgtaag

SEQ ID NO: 855383 - DNA, 551 bp, Homo sapiens
ttctagaatgtggcttttgtttatgattataacttgaagcctagcacaatacctggcatattaacattcatcaaatgaaaagaacacagaccatccctcaaagaagtcaacacttattctgtacttgtctcaggagagcctttgagtgggtcacacctttatctaccctggagaacacatttcattgttgccacggcttctgcagcagagccctgaaccccaggtgagtatagtccctggtactcctgtatttccacttctttctagaaataacagaagtaataactgaagtttcataattcaataatatccattttatgaaaaaatgaaaagtaggatccctaactacttaagtcagattcaataaaatggaatcctctgtgattcactaaataatcttagctaaaaacaactttagaaataactagtctatttttttyttaagataatctgccatgaaaaagacaggagacataagcataaaaatagcaaaattattgacgcattagttaacatagatgttgtatattctggcacttcctgtcaaaatc

SEQ ID NO: 855384 - DNA, 475 bp, Homo sapiens
tgctggaccatttgcaagacaggcaaacagaaagctagccaggttaggcccttattcactccttccaccatcactactaccaccgcttcagatttacaaagaggtaaactgctaacctggtgtgtrggcatgtgttggcgagagggtcaagggaatgttctacccacaatctccatgctccatttctagcctctctagtcaaacctttttcttctctagtaatcccagtaagtcaacccccttaataaactcacccatcctgtcttgcaaagctctgccccgctccccctccgccagaacattactcagtagattaagtaagcatccagggtaagcacatgggccagcaccccaggttgcataaattctgcgcaccgcgaccctcaccccgcatgcattaaccagggcccaatcttggcggggccattcagcatcacccaccccggggtgttgcccccaactcgggcccatccaa

SEQ ID NO: 855385 - DNA, 513 bp, Homo sapiens
agcctggccaacatggtaaagcctcgtatactaaaattacaaaaattagccaagcttggtggcacgtgcccatagtctcagctacttcagaggctgaggcaggaggatcccttgaacccgggaggcggaggttgcagtgaggcgagatcccggcagtgcactccagcctgggtgacagagtgagactccacctcaaagaaaaaggaaactttcagacttaaagttgcggacattcaaagacaatatctaattagtcatccaagagcctcgtgagatagagttttgttaaatgtagagttgcaggcacagaaaggcaaattggtaacctaacaccacactatgtctttgttccataaacaaccttgtgatatttcttcgaataatatttattcatttatttagagaacagaatccaaaggacagtggagatttagcaccagrggcagtggctgataatctttgataactttggggttgtgagaccactggcagtgctctcaggatatcctctcc

SEQ ID NO: 855386 - DNA, 632 bp, Homo sapiens
gactggctttcttttggtggtaaaagcatggtcaccggcctgagccaaaagctaacttgccaaagcatggtcagagtgaaggctggtgctgactggctttcagaaatgcatagctgtcagattgggtgactttcataagcatgtgtactgaggagagattgtctgactaattgctttcaatgtctgattacttgtctcctatcaatttttgtggttacccattcatggcttgagactacggccaagaaactctcaggcttgactatggagaacctgagtattctcatcattaagagtattaaagtgttcttgttagtacgggctttatttatgtatttatttattttttctgacacccagactgaagtgcagtggcatgatcttggctcactgtaacctctgtctcccaggctcaagtaattctcctgccatggcctcctgtgtagctggttctaccacgcccagctaattttgtatttttagtagagatggggttttgccatgttggcraggatggtctcgaactcctgacctcaagtgaaccacctgcctcagcctcccaaaatactgggattaccaacatgagccacggcacccaactggctttattcttgataacagatttgtcacag

SEQ ID NO: 855387 - DNA, 632 bp, Homo sapiens
gactggctttcttttggtggtaaaagcatggtcaccggcctgagccaaaagctaacttgccaaagcatggtcagagtgaaggctggtgctgactggctttcagaaatgcatagctgtcagattgggtgactttcataagcatgtgtactgaggagagattgtctgactaattgctttcaatgtctgattacttgtctcctatcaatttttgtggttacccattcatggcttgagactacggccaagaaactctcaggcttgactatggagaacctgagtattctcatcattaagagtattaaagtgttcttgttagtacgggctttatttatgtatttatttattttttctgacacccagactgaagtgcagtggcatgatcttggctcactgtaacctctgtctcccaggctcaagtaattctcctgccatggcctcctgtgtagctggttctaccacgcccagctaattttgtatttttagtagagatggggttttgccatgttggcgaggatggtctygaactcctgacctcaagtgaaccacctgcctcagcctcccaaaatactgggattaccaacatgagccacggcacccaactggctttattcttgataacagatttgtcacag

SEQ ID NO: 855388 - DNA, 574 bp, Homo sapiens
tgatggcaaggatagagagaaactggatcatgcgtacagtggctagtggaaatataaaatggcatgttcacagcagttttatttttcatagcccaaaattggaarttaacccagaggtccttcaacaggtggatgattaaactgtgatatatccagccgggcgcggtggctcacgtctgtattcccagcactctgggaggctgaggtgggtggatcatctgaggttgggagtttgagaccagcctgaccaacatggagaaaccctgtctctactaaaaatacaaaattagccgggcgtggtggtgcatgcctgtaatcccagctactcgggagtctgaggcaggagaatcacttgaactcgggaggcagagattgcagtgagccgagatcttgccattgcactccagcctgggtaacaagagtgaaactccacctcaaaaaaaaaaaaatgtgatatatccataccatggaccactacttaataacaaaaaggaatgaactgttgacacatatacaacccggatgcatcaccagggaattgtactgagtgaaaaaagctaaccccaagaggtta

SEQ ID NO: 855389 - DNA, 553 bp, Homo sapiens
tagagagaaactggatcatgcgtacagtggctagtggaaatataaaatggcatgttcacagcagttttatttttcatagcccaaaattggaaattaacccagaggtccttcaacaggtggatgattaaactgtgatatatccagccgggcgcggtggctcacgtctgtattcccagcactctgggaggctgaggtgggtggatcatctgaggttgggagtttgagaccagcctgaccaacatggagaaaccctgtctctactaaaaatacaaaattagccgggcgtggtggtgcatgcctgtaatcccagctactcgggagtctgaggcaggagaatcacttgaactcgggaggcagagattgcagtgagccgagatcttgccattgcactccagcctgggtaacaagagtgaaactccacctcaaaaaaaaaaaaatgtgatatatccataccatggaccactacttaataacaaaaaggaatgaactgttgacacatatacaacccggatgmatcaccagggaattgtactgagtgaaaaaagctaacccc

SEQ ID NO: 855390 - DNA, 553 bp, Homo sapiens
tagagagaaactggatcatgcgtacagtggctagtggaaatataaaatggcatgttcacagcagttttatttttcatagcccaaaattggaaattaacccagaggtccttcaacaggtggatgattaaactgtgatatatccagccgggcgcggtggctcacgtctgtattcccagcactctgggaggctgaggtgggtggatcatctgaggttgggagtttgagaccagcctgaccaacatggagaaaccctgtctctactaaaaatacaaaattagccgggcgtggtggtgcatgcctgtaatcccagctactcgggagtctgaggcaggagaatcacttgaactcgggaggcagagattgcagtgagccgagatcttgccattgcactccagcctgggtaacaagagtgaaactccacctcaaaaaaaaaaaaatgtgatatatccataccatggaccactacttaataacaaaaaggaatgaactgttgacacatatacaacccggatgcawcaccagggaattgtactgagtgaaaaaagctaacccc

SEQ ID NO: 855391 - DNA, 479 bp, Homo sapiens
aggcagtatgattgaagtttctaagccaggtaagccttgtccagcatttgtccttgggggactttgtttgaattcatggatggcccaggccttgattctcagggaaagtgtgttatctgaaggtcagattgaaggttccaactaaatttactttgtccccttgtcccagcatccttggaataaagtagcttttgaggtaataaggagtagtccctaagaacccacgtggaaggtcacacttctgatctgagacctttcagcagagcctcagagcagagtggaaaaggccaggaaagagcatgtctggaactgcctgttcactgaagacattcttggcactcctgtacagttaaataacacttggtgatgtcagcacatgcagaaaccatggcagactgtccagtggatgggctttcaggaagaattaggctgccagcwtgagcaaggggcaggcagcacaggagaggacacgtcactgc

SEQ ID NO: 855392 - DNA, 601 bp, Homo sapiens
gatgcacagtgagggctgatctgtggcagaaggatttcccacatgcattacattcatagggcttctcccctgtgtgtgttctctgatgttcagtgaggtttgacttcacrcagaatgtttttccacattgcttacattcatagggtttttctcctgtatgtgttcgctgatggttggtcaggtgtggtttctggcaaaaggctttcccacattcagtacattcatagggcttctctcctgtgtgtgttctctgatgttgagtgaggtttgacttctcccagaaggttttcccacattcaccacattcaaaggttttttctcctgtgtgagctctccgaagctgggtaagatgtgacttcttgctgaaattactcccattttcattgtaatcataagactttccccccatgtgtactatttgatgttttaagagagctgacttttcccaggttttgtcactcactttatattcacggagaatctttcttgtgtaagctccctgatggataatgaaagctgaattgtcacagaagatttccccatattcattatattcataaggattgtcctttgtaagagctctctgatgtccaaaccttaa

SEQ ID NO: 855393 - DNA, 640 bp, Homo sapiens
atggagataattttgagtcctattaacttgtatttcaagcttgcctcaagcactaatgagaaaaaaaattcctgcttttctcacaaagaggaatacacaactccagcctcaaaaatacactcagtgtttgcattttattaaagcacactttggacatctgtgccactgacctacaggtatactgatctagagatgtattagtatggtgtatgagatcaagtttgagaatattgctttaccaatcaaatgaaagcatctctaacatttaaatgcttacctgtggcatgatgccaccaatgactactgcctcttcactccaagtatttgcagaattgcttacacaagccccccagattgcctgctgttgtatatttcaagatattcttatttatggtcttgttacgcaggtgtaagtaactgtgggctcaaaccagtgacattgtttgggacaggaggtgacagagctaagagtcggacatgggacacacctgtgctcagatgaacttattattattcatgggaatttaagcaattattttccaattttaaatctgtttccccatttgaawaaaattattccacataagtattgtgagcattaaacaaaagaatgtatgttaaacatttagctcagagcaag

SEQ ID NO: 855394 - DNA, 576 bp, Homo sapiens
ggctgaggtgggaagatctcttgagctccaggagttcaaggttgcagaggttaaatgtatatcctgcattctgaaggagcacatacagaccctgcagggtatcatctccagctgatgagcatcttagtcatctcaggctgctgtagcaaattaccacagactgggtggcttaaacaaaatttatttcccacagttctggaggctgagaagtccaagagcaaggtgttggtagatcacgtgtctgctgagagcccactgccttcataggtggccttcttgctgtgacctcacatgatagaaggggcaagggagctctctggagcctctgttataaaagcactaatcccatttgtgagggctccaccttgcctcccaaagactctgtctctaaataccaaaacattggggattagtaatttagccagggttttaagaagtcattccaatcttctattatgaaagcatcttttggatgatggagccatggactcaatgttgtccctcctttgctttgaaatgggcccaatggttaagaaaatatacatgggatccsaggtcagtctatgaggtactttg

SEQ ID NO: 855395 - DNA, 587 bp, Homo sapiens
cggcctcccaaagtgctgggattacagagatgaggcagcatacccggcctgcccctttttttaatatagggtctcactctgtygcccatgctggagtttagtggagtgatcatggctcgctgcaaaattgccctcctgggctccattgatcctcccatctcagccttccaattagctggaactacaggcacgtgccaccacgcctggctagttttatttgttgtacagacagggtttcaccatgttggccaggctggtctcaactcctgaactcaagtgatctacccacatcagtctcccaaagtgctgagattacaggtatgagccaccatgcctggccaaaattgtatatatttatagtgtacaaaatgatgttttgaaacatatatgtgtgtgtgtgtgtgtgtgtatatacacatatacatttacgtgtgtgtatatatatgtttatatatgtgcgtttacacccacacacattgtagaatggcaaaatcaaactaatatgcattgcttcacatagatattattttctggtaagaacacttaaaatctactctcttagcatttgttgagaagacaatatatta

SEQ ID NO: 855396 - DNA, 587 bp, Homo sapiens
cggcctcccaaagtgctgggattacagagatgaggcagcatacccggcctgcccctttttttaatatagggtctcactctgttgcccatgctggagtttagtggagtgatcatggctcgctgcaaaattgccctcctgggctccattgatcctcccatctcagccttccaattagctggaactacaggcacgtgccaccacgcctggctagttttatttgttgtacagacagggtttcaccatgttggccaggctggtctcaactcctgaactcaagtgatctacccacatcagtctcccaaagtgctgagattacaggtatgagccaccatgcctggccaaaattgtatatatttatagtgtacaaaatgatgttttgaaacatatatgtgtgtgtgtgtgtgtgtgtatatacacatatacatttacgtgtgtgtatatatatgtttatatatgtgcgtttacacccacacacattgtagaatggcaaaatcaaactaayatgcattgcttcacatagatattattttctggtaagaacacttaaaatctactctcttagcatttgttgagaagacaatatatta

SEQ ID NO: 855397 - DNA, 570 bp, Homo sapiens
ctgatgctctgaaaaattgcatgataaggtccttgagggataatttgtgatggagaaaaggagagttaacatagtcatgggacaagacgataagtatatattgctcttcacccaagtgaagcattgttgatctttttcagtcacataagcaatgtcctcactggctactgcctgtccccatagttaccactctggccctgctgtcctttatagtatttctacccactttgcttttgactgttagtgcttcctaatagaattttgtcatctccactggcatttgggagtccgtttcacaacgcatctcatgtcactatgaattgtggccaatagaagacagtcaacgcacttgtgcactctttatcactttggtgtcccctgggccctgtgggtagcacatcagtcaggagtcctctacccttatgtagtaaaaccattataaaatgtccatgactagagtcatctgaccctcacctcagtacagtcctcaatttcattttttaaggattactttagycaatgaatttattttcatctgaagggcctttacaatttaacttgttttattat

SEQ ID NO: 855398 - DNA, 603 bp, Homo sapiens
cctccaacaggggttgtcagacaccctattcaggagtgatgctactggcatccggttggtgtcccttgaggtaagaagtcccagaaggaggagcaggcacccatctttgctcttctctagcctccttgagtggcatctccaggcatgggagtgaatcagatgaatacgcctgaagtgaacccccagcaaactgaggcagccctacagaagagggacctgactacttaaagaaaaacaagcaagcagaaactgacaacagtgtcaacaacaacaacaaaaaaggccctcagaaaaaccccatccaagagccagcagcctcaaaactgaagctagacaaactcacaaagatgagaaagaatcaatgaaaaaatgctgaaaacccaaaaggccagagtacctcttctcctccaaatgatcacaacatctctccatcaaggccacagaactggatggaggatcagttggacaaactgacagaagtaggcttcagaagatggstaataaaaaactacaatgaactaaaggaacatgttctaacccaatgcaaagaagctaagaaccttgataaaaggttagaataagggaggagaccacccctcatat

SEQ ID NO: 855399 - DNA, 293 bp, Homo sapiens
tcttattgtctgttttccttactggaatgtaaggttcgtgagagcaagaacctcctatgtatttccagctacaatatcctggtatgttatgtcaactaaagaaaaaaaaacaggcttttaaataattaaagttaattttattcagaagtcctactgagtactgcaacctgggagaatctttcaaagagtttgttatattgctgcaaagcattgattcaccccatarcttaaacataggtggtggttgctctgcatgtgttaagaagttacatcaaatgtgctcagaaattaca

SEQ ID NO: 855400 - DNA, 543 bp, Homo sapiens
ttcaaggatcattagtggctgatatgagcagctatacgccaataaattgggaaatctagaagaaatgaacaaattctgagatgcatgccacttatcargaagaaatcccaaacctgaacagaccagtaacaagtaacaagatcaaaactgcaataaaaaatctcccagttaagaaaaagcctgggaccagatggcttcactgttgaattctaccaaacatttaaagaagaactactaccaatcatattcaaaccattccaaaaaatagaggaggaggaaataattccaaagtcattttatgaagccagtattaccttgataccaaaaccagagaaagacgtatcaaaaaaaagaaaactaagagccaatgtctctgatgaatactgatgcaaaaatcctcaaaaaaaaaaaaaaaaacaaaaaaaaacctagcaaattgaattcaacaatgcattagaaagatcattcatcataaccaagtgagatttatctctgggatgcaaagatggttcaacatacataaatcaatcaacatgatacatc

SEQ ID NO: 855401 - DNA, 604 bp, Homo sapiens
gctacctttttattactgtcctaatgtctgtatagttttcttaaaattccaagcattatgataggaatgaaactttaatctttaaggtctttagaacacatagcttctttaggttgggagagttttaaaaatacactatagtttagtgaattatgtgattggatttaataaatgtggtatgtgtgtggatgcatgcatttattattatatattttttcagtttcaggtatgtcccaaaagtctgtgtgtgtctactcctggacatcgcactgatctttttcagagggatcctaaaaatgtactgataactgatttctttggaagtgtacggaaagtggaaattacaacagagactattaaattgcaacaggattcagaaatcatggaaagcaggtattcatcttaaaccattatttgaatagaatactagtctcacagtttgtacatttttttgaaacattgtattaagaggcaaaagttggtgtttgtaartaaaattacacatttatacccagtcttcactttatgtaggctgtatgcttttcagatttatatgtaaaaactatcaatattagtggaaactaagatcatcgttaggattatg

SEQ ID NO: 855402 - DNA, 331 bp, Homo sapiens
gacaccaaaagcataactgtttgcccatgcaattatacaaatgtggtttatagcactaccataatccttgattgattgattgattgattgagacaggrtcttactctgtcacccaggctggagtatttctttattttcagtttttcctactgtcacttctttaatccccttttgcctaaatggcacaaatccctctccttttagatatctgagatcagtgtggaaggtctactggaaatctgcattcagttataatgatacaaacctatactattcaagtctctagagaatgttctaaaatgtaatgatatttctaaaacattccttatac

SEQ ID NO: 855403 - DNA, 550 bp, Homo sapiens
caccaggccttatggacattatacttacatttaaatacaaattatatctgaagagtgatgtaraagcctgcagccttagatcattatttgtcttataacatacaggaatacacagtcacatgctaactttctttttttttttttttttgataaatgcttgagcaatataaaattaaagaggaagaaaaaataatcgacccaaaattactagccttcttagaatacttcatcatcatcatcttatttgttgtctcaggtttacgcccactcagatttatttatttattaccatttagaagttgaggaccactttgataattggcagaagctagaaaatgttcacatatgcagagactgaaatatttgcacacagttttagagcgtttgtatttgctttcccctcccagcccgctgatagctgacccacaggtctccaattagaagtcacacttcacaagggggacatttaatctctctccctgtcctccaatatgcaaataaaaactcaactcatcactttcctttgctgcctatcagaagtatcacagtt

SEQ ID NO: 855404 - DNA, 493 bp, Homo sapiens
aatgggcagaagatgcaaaagcacagaaggttacatacagaayatacacagaacaaattgtgtttctatagtgtatacgaagaagggtatcttcagacaacagggatctaccccaagtcctcattctaaactcagttctccaccagattcagtctttacttatctctatatccctagcacttagcacagtgactgaaacatagtaggtatcacaaagattcatagttgtcccctcctgatccattctttacttcatttacagtaatagagacagacatcggctgctgggctaagatgaatgtcccagcttctcctgcaacttggatggccacgggactagattctggtcaatgggcagatgtagaaatggtatgtgccaatacccaagtcatgtgtcactgctgagagctgggacagccatttataatgagaagaaagctgcacattcaggagaagagagcgacaagacagacccaagtccctaggacagggg

SEQ ID NO: 855405 - DNA, 559 bp, Homo sapiens
cataaaaacaatgtggaagaaactgcacccattaaccagtcacctcccactgggtccctccctcgacaaggggggattatggggattacaattccacatgagatttgggtggggacaaagccaaactctatcagcagcctcctaactggtcaccccatcttagtcttcatccttcaacaatccattctccacattggaactgccattgtgattttttttcaagagcaatcatggtatttctctgcttaaagcccccagttggttcccattttctgagaatatgagtgcaatctgagcaatgttgctatgagacacttcttgatcaagccactgcttgtctccttagccttaattctcagcaccttcatcctctggagtcccccagtggcattgaatttcatacagtttcctaacaatcaacactcttttatttgcctgtgctcctccacagaggctgttccctggtctcggttaggtatccttgcttttcccstatcataacacttaccctaccttatcctaattatccctctagttgtctgcccatcttagaacttaa

SEQ ID NO: 855406 - DNA, 589 bp, Homo sapiens
aggaatgctttacgtttactggtatattaatttgaaacatattagaaattagttacagtttatattttgatatcataaaataaattataacagaaaagtatwttttagaacaaataaaaatcatacctaatcacacaccataatactattcacagtatagctaatgtccttctagtctgtgttcctatcaatacacatattttacatagctgcaactttgcatatttagtcatttgtgttctgctttttgttgcatattttacagtctattttctacttcctacacaaacattatgaaaatgcttagaaaatgtaataaatccataacccgtaactctatttaaatactattatttgaatataaataatgctataatgagcacatgcatacttagggcctttctgtatcttggataatttattcagaagttctcttagtccttccaggtagctataacaaactaccatagactgggcagcctaaccaacaaacattgatttctcacagttctggatgttgagaagcataagatcagagtatcagcaattttggtgtctgatgaaggcctgattccttgttcagaaatgg

SEQ ID NO: 855407 - DNA, 303 bp, Homo sapiens
cagtcaaacaaaaaaaaccacaytgttgctttttataatgaatactgtgtagttattggctggaattgatattatctaaatcctagacattggtcagaaccaaacctttttgcaagaaaactgcaaattgaatagttttcaggcttatagcatgttgcttaattttgtctactaggtaacatttactgataactggcttctttttttttttttgaggcggagtcttgctctgtttcccaggctggagtgcagtggcactatctcggctcactgcaagctctgcctcccaggttcacgccatta

SEQ ID NO: 855408 - DNA, 586 bp, Homo sapiens
tgggaaactcatttttgacactacatccttgggctgaactgaagaaccctgtagtgtccttcctgccagcaaagctttggaggcatcaacaggcctgttttctaccgtaagatgcctggagagagaaggggagtgggagagaggaagcaggtaggagggcaggagttgagaggtgaggagcagtcatgttctttagtgggatttgagaaaaggggtttctgttgaacccgtggctggcattgaagtctcttccatgaccaatggaggaattgtacctgcctaatgtccacttaaacagagggctttgctctgcagaaagttaagatgcccagctctaaccttgggcaatgcgaaggctcctggcagctgggcaaggcaagagaagccaactgcagatgccctcacccatctctaaaagcggagtcaggctgacacacccaggccctccgcaggcccaccaaggaggaaggtatgcaaccagctacctgttgcttggcagattcatcctggaagcaggtatgctggatgtaataggccccaatggcctggtayttctcatcctgggagctcaggtactgcacagcct

SEQ ID NO: 855409 - DNA, 510 bp, Homo sapiens
tgcccagtgcaggtacatgttgccacctgaattttttaaatgttaaaaaaatgtagtccaggtgcggtggctcatgcctgtaatcccagcactttgggaggccgaggcgggcggatcacgaggtcaggagatcgagaccacgatgaaaccccatctctactaaaaatacaaaaaaaacaaaaagtagccaggcacggtggtgggcgcctatagtcccagctactcgggaggctgaggcaggagaatggcatgaacccagaaggtggagcttgcagtgagctgagattgcgccactgcactccagcctgggtgagagagcgagactccgtctcaaaaaaaaaaaaagtaaaagttttggtgcccatcctcagagtagagacttccccagagatctggttaataatggtcagtatcccttataagctttgaaaagcagaaactgtgagcatacttcmatcatgccagtattaacaaatgtctatggataactgaggacaacttttctaagta

SEQ ID NO: 855410 - DNA, 667 bp, Homo sapiens
agaagtctggctggtaagaaattcttaccctttggccaccgtgccaggcttctgggatccctttccctgagcagccctggtgacccagctagctgcaccacagccctggggsccaagccacaacacaaagaaaaatgatcgttttccattctggtgagaacaaaatacatgcaacaaaacagacactagctgccctgcttagcacccaatatcaaactgctactgctcaaacttgtactccactgggccccgtcgtcgttaatccaaactccgaccagaaatttcaacatgtggtctctgggcaagatggtccccctgagtaatagaaaagataagaaagggaatggagagagagaaaagcattgcctgtggcagagtgggaaggcaaagcgttcagggaggccagggaaaaacccatccattgcagcaacacagaatcgaaagttcaggtggccatttgtcagccttgaggggatcttttctagtagttccatcagctctcaagtttccccttttggggagaaaaaagctccccatgtcccatgatcctgtaaatgcctagtcccatcacctacagccatcagcaaagagtctaaggtagattattccaaagagaatatgtgttaacatcccatagggccaaactcattcttagctgagagggact

SEQ ID NO: 855411 - DNA, 601 bp, Homo sapiens
ttggtggtgtgccaagaagatgttaccagaccccaccacttacccaaagttagcctttgggtgatgggggacaggggtgttccccagtattgtcccttccatggtcaccaggaagatgttactggaaagggatctcaatccaaaccccaagagaggattcttggatctcttgcaagacagaattcagggcaagtccatacagcaaagtgaaagcaagtttattaagaaagtaaaggaataaaagaatgaaagaatggataaggaagtgagaggtgacagcatgctggcagccctcgctggctcttggtgccttctcggcctcagtgctctaggtgcgcttgaggagcccttcagcccacggctgcactgtaggagcccttctccgggctggctggggctggtgctggctccctctgcttgcgggtaggtgtggagggagaggggtgggtgggaacctggctgcgaagtgcggccctcacrggccagcgcgagttcaggtaaggcgtgggctgggtcaccctgcactcagagcagcccgccggcgccactagcccgggcagtagagggcttagcacccgagccagcagctgcagagggtgca

SEQ ID NO: 855412 - DNA, 634 bp, Homo sapiens
tagatcagtgactagcatgtaagaaacactcagtaaatatgagtgttatcatttcccgtatcattcagctcagcatctgatacatyataaggacccagtgggttctgaatgcagaaatagacgatggctgtgaaggtgggtgcagtggactcaggatgcctttggtgctcctcctattgtgtggggctgtttgttacctccattgaatccaggctggcctgtgactgctatgtcgaatggaggatggtgtaagtgacacagttaccagttctgggtgactgaagccactgcattacatgtccaactacactgttggagacggagacgaacctgggcagacccacccttccatctgcctcctccaaggtaccaggcatgtgaagaaaggcatctggaacccctgagactatccagccaccagccaaggaccaagtgaacctagtctacatggtgtaaagtggacttgccatctaagctctgagcaaattcctgacgtgcaacatcgcaagatgtaataaagtggttgttacctcaagcccaagtttctaggaagtttgttatggaacagcagctctctccttcctcattgcccccaagagcctgctgcggggatccacagagcctggaccagtgc

SEQ ID NO: 855413 - DNA, 616 bp, Homo sapiens
ggtgggacccactctcagtccctgcagaccctgctccccaggagtgggawagcaagcagtttgtatcctcaggcagccttagctgggccctctgtccctagggggccaacagcttttcatactgaccaggacagactggccacccctccccaggcacaaagccctgctgcatgtggagtccgaagaatgcaggcgagtatgggggcacaggtttgccctctcggggcgcttttgtcaagagtcccatggactagagtggctactggcttccacgggaaggatggcagccccaggcagcccacccaacagctctgtgccttaagaggtggggagggcagaagactagggcacccctgtacccagggctcaggcctgtgacccccagtgctggcaagaggaacgtgggccaggagagttgtccaggtaaaagagatagcagcgggaaacaaaggtctttggctgaagcatcctaggacacctccccaacgaggagaaggcatggctgtgatcacagggagctcattaaagctcaaggggacaccacgctccgggacagggtgtgtctgacatgcaggggtctttgtgggttttctcctgaattccatgtgctccatcc

SEQ ID NO: 855414 - DNA, 558 bp, Homo sapiens
tcggttccatatgaactttaaagcagttttttccaattctgtgaagaaagtcattggtagcttgatggggatggcattgaatstataaattaccttgggcagtgtggccattttcacaatattgattcttcctatccatgagcatggcatattcttccatttgtttgtgtcctcttttgtttccttgagcagtgatttgtagttcactttgaagaggtccttcacatcccttgtaagtttgattcttaggtattttattctctttgtagcaattgtgaatgggagttcactcatgatttggctctctgtttgtctgttaatggtgtataggaatgcttgtgatttctgcacattgattttgtgtcctgagactttgctgaagttgcttatcagcttaaggagattttgggctgagatgatggggtttcctaatatacaatcatgtcttctgcaaacagggacaatttgacctcctcatttcctaattgaataccctttctttctttctcttgcctgacttccctggccagaacttccaacactatattgaataggaat

SEQ ID NO: 855415 - DNA, 636 bp, Homo sapiens
tgagtctttccaaaaatggacacagctgggaagtgacaaagtgaggattcggacatgagtctgtatggctccaaacctaagcctgtaaccataggacccccctgcctcccctctaggttctctataccttccccactgccctaccaggtggaggccttaggctaccctggctgctgctggcttggcctaaaggctgatgctcccagccagacctgagcaagatggccaacctccggggaggagctgaggcaagggccaagagctcaggactgtggctggcagcggtggctgtgctcagctttcccaggcagtggccaaactcaatgctgcagccagagaagctgatggggaggaggagcgaccaggcttggtcagtctggaaggtcccagatgcagccacgggctacccttgtcctttccccttcccaggcacttccccaaacgtgggaccctcagcctgggtcacatgggcttgtaggccgtgaggaaacaaccattctgggcattcctgagccttgggggaggyggctttccttccgcccactatgggaaccctccagggccctgtcggtgccttcgctggggaaggaggcctgccagggaccagctcgttccagttcctcctctgagagagca

SEQ ID NO: 855416 - DNA, 625 bp, Homo sapiens
tgtagcaattactccaaaacttaaaacagaattacgatttgacctagcartttcatgattgggtatatacccaaaggaatataaaccattttaccataaagacacatgcatatgtatgttcactgtggcactattcacaatagtgaagacatagaatcaacctaaatgtacatcaatagtagactggataaagtaaatgtaataaatatacaccatggaatactatgtaaccataaaaagaacaagattatgtcctttgcagcaacatggatggagctggaggtcattatcctatgtaaaccaacacaggaacaaaaaacaaaatatcacatattctacttataagtggggtctaaacaatgagaacagatggctactaggaggtgaacaacagacactggggcctacttgagggtgtatggtggtaagaggaagaagttcagaaaaaatacctattgcccaggtgattaaattatctgtaacaccaaactctcatgacacacagtttagctatgtaacaaacttgcccgtgtacctgtgaacctaaaataaaagttaaaaaaggaaaaacacacacacacaaaataaatcatagaaataatagtatggatatattttttaaaat

SEQ ID NO: 855417 - DNA, 553 bp, Homo sapiens
tagggaacagcagctaggattgtttttgaggttggtttaagggtcctcagaagaaaggtgcattcacgcatggttccatttgcatcaccatttggagcttgatagcctctatgtgaaaagaaacaatttgggttattagaggacatgtattaaaataagacaaggggggtaaggacagcttaaaaatcttgaagctgctgatacatttcgataactagtggctacagttatgcttgctaagatctgggtgcatgggacttagctttggtcagatttcttaattttatccttccaaagagacttttgggttatgggcactcgatttattcctattacccagcaggatctgcaggataattgcttagactagaatattgatccagatttttacattacacatctctttctgtctcctctgagccatagctggagattgctggttggctcacaggaagaagcatggttattttaaaatgtaagcaaaaagttaaaaataactgatgacactggaagttaatgatagaygtataagttttaaaacacaattttctct

SEQ ID NO: 855418 - DNA, 557 bp, Homo sapiens
agagagagaaaattgtgttttaaaacttatacrtctatcattaacttccagtgtcatcagttatttttaactttttgcttacattttaaaataaccatgcttcttcctgtgagccaaccagcaatctccagctatggctcagaggagacagaaagagatgtgtaatgtaaaaatctggatcaatattctagtctaagcaattatcctgcagatcctgctgggtaataggaataaatcgagtgcccataacccaaaagtctctttggaaggataaaattaagaaatctgaccaaagctaagtcccatgcacccaaatcttagcaagcataactgtagccactagttatcgaaatgtatcagcagcttcaagatttttaagctgtccttaccccccttgtcttattttaatacatgtcctctaataacccaaattgtttcttttcacatagaggctatcaagctccaaatggtgatgcaaatggaaccatgcgtgaatgcacctttcttctgaggacccttaaaccaacctcaaaaacaatcctagctgctgttcccta

SEQ ID NO: 855419 - DNA, 629 bp, Homo sapiens
tctcacttacaaacgtgggaggtaaaccctggatgcagatggacatcaagatgggaacaatagacactgggaactcaaaaagcagggagggggggagggggacaaagggctgagaaacttcctattaggttactgtgttcactatacaggtgacgggatcaatagaaacccaaaccacagcaacacgaaatacacccttgtgacaaacctgcgcacatgcccctgggtctaaaattaagatttttaaaacttatggactacctactatgtacatacacattgctgtgcttggctccgaagggaaagtgctttgacagcaatggcacataacatggttcctgccttccgatgcttaccatctggtaagaaagaatatctacatagacaggtatggggattccggggccaggcaagctagatgtcacatccctgttctggctgtgtgaccttgggcaagtcatttaacctctctaagtctaagttttcacctttgtacaatgacaataataatagtacctactttataggctaaattatacacacacacaactcacacacacaycaaactctgatcagttcatgacgcatattgagcaccatatacttgttaaagatgattattattgtta

SEQ ID NO: 855420 - DNA, 629 bp, Homo sapiens
tctcacttacaaacgtgggaggtaaaccctggatgcagatggacatcaagatgggaacaatagacactgggaactcaaaaagcagggagggggggagggggacaaagggctgagaaacttcctattaggttactgtgttcactatacaggtgacgggatcaatagaaacccaaaccacagcaacacgaaatacacccttgtgacaaacctgcgcacatgcccctgggtctaaaattaagatttttaaaacttatggactacctactatgtacatacacattgctgtgcttggctccgaagggaaagtgctttgacagcaatggcacataacatggttcctgccttccgatgcttaccatctggtaagaaagaatatctacatagacaggtatggggattccggggccaggcaagctagatgtcacatccctgttctggctgtgtgaccttgggcaagtcatttaacctctctaagtctaagttttcacctttgtacaatgacaataataatagtacctactttataggctaaattatacacacacacaactcacacacacaccaaactctgatcagttcatgaygcatattgagcaccatatacttgttaaagatgattattattgtta

SEQ ID NO: 855421 - DNA, 598 bp, Homo sapiens
agatgctatcatggattttaggtaagggagtgacactcagttttgcattctgggaggaacattttgacagcattgtgaaggaaaygtaataggactagatgcgatgtaggggccagttgggatgttatgcagtgatccaggtgagatgtaataagtcctgatttaagtctgaagtgatagaaatggagaggaggagacctaattgtgaggtattaaagagaatggatgaatagaccttggtaatttattgagtatgactgagaaaaaggtctctgaatggcccttgattttctgagttggatgactatgtagatatattatccatcaggatagagcagataggaaaaaggaatacatttaagaaatgtattcttaaatgatgaattaggttatgatatgttgaatttggttgatgcctagacagaattagtcaacagatggttggatatgtgtttggaattaaggagagaggtttgggttaaagatacacatttgtgagttagcagtataggtaatattaaatagttggagttgttagttgagatcaatgaatctcaaccagaggtgattttgatgtgtagaagacatttagcaatga

SEQ ID NO: 855422 - DNA, 583 bp, Homo sapiens
tgctgagttggtcatgatccctttggcctttttggctcccaacaraaagatttttgattttgactactaaggggctttatttacataacaagaccacctttttgctagccaggccaaactgaaagagcaatggctatacttctgaaataatagcaatttgtcctagctgaaatagggtaaagagatttaaaaagattttttaaaggagctcaatggttaaaagtcagcttaattaaaagctaacatccaagatgtgtgtgtgtatgtgtgcatatgtgtgtgtttgtatttaaaaggctttcatgtttttgcttttgcttttctcctaggactttgtctctttttttgagcaaaagtttatttcttctttgttgactaaattatgtctctcctttctcttgtaccctctgctgcatgtgggacctaaaatagtttataatagccttgggttccttaaagaaaatgaagaagatgatagactccctttgggggagaaacctgtttttccttatggcaccccaagaatgtgaacagtcaagtttctctcagctcttaaactgcttacttttgtattgtgttacct

SEQ ID NO: 855423 - DNA, 546 bp, Homo sapiens
aatgcttactaccttggtaccctgcaagataaatattacctgttgcaggcatagtgagttgctaatagatcttgtggagaagataggcctcaacctcatccccacactaaatcagtggttgatgggcgtggcccagtggagcagatgtaatctagttttgaccaatgagacataatgagaagtctgccagagaactttaggaaaaggtttcttcccacataaaagacagagcctcctcgtgaggagagaatcctattgtctccactccttgactctctgctttggctataactatgtgaggcattattttggacctaaggtggtcatcttggggccatgacttgaccagcctaacaataagaagccaatgttctcagaataacaaaggaaaacacacacacacacacacacacacacacacacacacacacacacacacacacagcctggatccggratgacattgttgagctgctccatcagtaccaccataacttgccctcagaatacttttttttttcttttttcagacagtctctctctgtc

SEQ ID NO: 855424 - DNA, 584 bp, Homo sapiens
ataattatttataccatggagtacagactagggaatgactgaagactatctaaaatcaaagaaagtagttctgggcaggagcctgaatacagagcatgrgctttagtggcaacacaattcctactgaaaccacagaaccatgataggccagtaaacagcctgtagagcatcactgcaaccagctgaccctaaactagatttgcctacatcaatccccttttcttgtgaaatgttgtgggtttagctttttataattataagccctgactttgcctttgttcaaggagaccgcctccacagaggctgttcttccttgtctataccatcaaatccttggtgctttaaatactcgtctctgagttgttatttaacctatctactttatatgcttacgtgtttctcacttcaaagacttcacttgtgttcaagtgcaggacacttaaggagcattcttaagtaatttctggataagacagctacagctatggaaagagagcttaacttaaaatgtaaagtgcacttaatgtatgccagaaatgtcctaggtgctttgcatgaaatttacttattccttaaggaactct

SEQ ID NO: 855425 - DNA, 532 bp, Homo sapiens
atatggtaagtattacctgtaaataatatagaatgatatgcctgtatattagtacacataaaataacatagggggatagtggcagcatctgcctcattagattcctgtgaagttttaaaaatttgaatagacatatatatgtgttgagtatcctgaatctagtttgatacagtaaagatttatgctgactcaaaatataaaatgacactaatttacccatggttttccagagtgtgaattagtaaactagcatagagcaatttttaaataaccattagcttgctttctcttaggatgaccttaagcatatcaaatatccagaagttttttaagggtaaagaagaaaactttacaagatgaaaaaaaatttagactcataacacacatgcataaaaaacttttaaaacaaaattatttttctcgatgtaatacagattttatcacaatgstaaaatagaaatattaggtgaagagctaagaaatgatgatttatacatcactgaatacaatgaaattccatcagtctgtcact

SEQ ID NO: 855426 - DNA, 541 bp, Homo sapiens
tgtggaatcaacctaaatgcccatcaatggcagattgggtaacgaaaatgtggtacatatacactatcgaatgctatggaascataaacaagaatgagatcatgtaggaacatggatggagccaggggccattactcttagcaaactagcgcaggaacagaaaaccaaatactgtatgctctcacttataagtgggagctaaaggatgagaacacatggacacaaagaggggaacaactgacactggggcctatcagagggtgaagggtgcaagaagggagaggatcaggaaaaataactgatgggtactaggcttagtacccgagagatgaaataatctgtacaacaaactcctgtaacacaagtttatctttataagaaaccttaacatgtacccctaaacctaaaataaaagttaaaagaaaaaagtaaaagaaatttttttaatttcaactaaatatatttaagtattcacttgatttttgggggagtataatttaggcttatgataaatttggaaatattgctaaaataagaaaat

SEQ ID NO: 855427 - DNA, 463 bp, Homo sapiens
gaagcaaaaaccatcttcacatagcagcaggagagagaagggaaagtgaaagggaaagagcccctcataaaactatcagatctcgtgagaactcactcactattatgagatcaccatggggaaaacttcacccatgacccaatcgcttcccatctcccacccttgatacgtggagtttacaatttgaaatgagatttgggtgcagacacagagccaaaccctatcacctgcagtttcagaaaatatattatttcagatcaaacaatgggtatatgaagtcctgcaaacttgatccatacaaaacatatcagtgtattctttcataaaagtcaaaatgctgttgagaaaactgattttcaggattggcaaatcaatatatatctttctaagagttrgacttatagttaaaccacataataataaaaaatgtccgtgtgtcaaaagccagaataagtgttgatat

SEQ ID NO: 855428 - DNA, 635 bp, Homo sapiens
aagcacacaacgtagctgcctattcaagagaagatttgctggccggctgtgaagaaatgaggtcggcagacagccttcagctctcagctcccttagtgtatgcctcagctgcagagagcyacctgcctagaggacatgctcttctcaggagcagcctacttctgatgactgaggaagacaagggtataaatgtccagtgctttcagttcaatataagacaatgcaggtgagcaactcctgacagattgactgtggtttgcttggactgcattatgttttaacttgtccctctgctctaacctatttcctccgccttcttttgcagatatttattccaaatcaatcctgcaccagaagctccatttctgcattcgcttccagaaaacacagcagccgtatgtgaatttgggagtggtcccacgaaccggttatgagacgaggttttggagctggatcacacctgacacaactggcattgaaaaccttattaccaagagcctctggcacaaggtagaagtccagttgtaaaaacattcattgctgatgaattgggacagtagaagttgatggaaaaacagaattaagaagtgtggtatatctggcacttcaaactttttgggaaaaaaagataactg

SEQ ID NO: 855429 - DNA, 514 bp, Homo sapiens
aatgatattgaacaacctttcrtataacttcttaccatttgtatgtcttcttttgaaaaatgtgtattcaaatcttttgcccattttttgatggaattgttagattttttttgagctatttgtatattctagttatgaatcccttgtcatatgggtgatttccaaatattttcttccattctgtgggttttcttttaactttattgattgtttcctttgtttgtgtggaaggcttttaacttggtatgataccacttgttcatttttgctttggttgccagagcttgtgggatattgctcaacaaaattttgcccagaccaatgtcctggagtgtttcctcaacgttttcctgtagtggtttcatagattgagatatttgctttaagtgtttaattcattttgatttgatttttgtatttgtgagagataggggtctagctccatttttctgcatatagttatccaattttcccaatactattactaaagagagtgtcttttctccagggtatg

SEQ ID NO: 855430 - DNA, 646 bp, Homo sapiens
gtctatccatcatatttattttctcaaagaaccaatttttgctttcattcatcttttgtatggttttttgygtcttcattctgtacagtttagctctgattttgggattttgttgttgttgttctgtctttgggtttgatttgctcttgtttttctagttcctctaggtgtgatgtgaggttgtttatttgagatctttctaactttttgatgtaggtgtttagcactatcaacttttctcttaacatgttgtagctgtgtcccgaagttcccagtatgttgtatctttagattttcccccaaagatttctacatataataaataacttcagcaaagtttcaggattataaatcaatgtataaaagtcagtagcatttctctaaacaaataatatccaagctgagagtcaaatcaagaatacaatcccattcataatagccacatccaaaaccagaaatagctaggaatactgctaacctggcaagttgaagatctccacaataggaactctaaaacaatactgtagaaaatcagaaattacacaaacaagtggaaaaatactctctgctcatggataagaagaatcaatattgttaatgtggccatactgctcaaagcaatttacagattcaatgcagttgttat

SEQ ID NO: 855431 - DNA, 646 bp, Homo sapiens
gtctatccatcatatttattttctcaaagaaccaatttttgctttcattcatcttttgtatggttttttgcgtcttcattctgtwcagtttagctctgattttgggattttgttgttgttgttctgtctttgggtttgatttgctcttgtttttctagttcctctaggtgtgatgtgaggttgtttatttgagatctttctaactttttgatgtaggtgtttagcactatcaacttttctcttaacatgttgtagctgtgtcccgaagttcccagtatgttgtatctttagattttcccccaaagatttctacatataataaataacttcagcaaagtttcaggattataaatcaatgtataaaagtcagtagcatttctctaaacaaataatatccaagctgagagtcaaatcaagaatacaatcccattcataatagccacatccaaaaccagaaatagctaggaatactgctaacctggcaagttgaagatctccacaataggaactctaaaacaatactgtagaaaatcagaaattacacaaacaagtggaaaaatactctctgctcatggataagaagaatcaatattgttaatgtggccatactgctcaaagcaatttacagattcaatgcagttgttat

SEQ ID NO: 855432 - DNA, 646 bp, Homo sapiens
gtctatccatcatatttattttctcaaagaaccaatttttgctttcattcatcttttgtatggttttttgcgtcttcattctgtacagtttagctctgattttgggattttgttgttgttgttctrtctttgggtttgatttgctcttgtttttctagttcctctaggtgtgatgtgaggttgtttatttgagatctttctaactttttgatgtaggtgtttagcactatcaacttttctcttaacatgttgtagctgtgtcccgaagttcccagtatgttgtatctttagattttcccccaaagatttctacatataataaataacttcagcaaagtttcaggattataaatcaatgtataaaagtcagtagcatttctctaaacaaataatatccaagctgagagtcaaatcaagaatacaatcccattcataatagccacatccaaaaccagaaatagctaggaatactgctaacctggcaagttgaagatctccacaataggaactctaaaacaatactgtagaaaatcagaaattacacaaacaagtggaaaaatactctctgctcatggataagaagaatcaatattgttaatgtggccatactgctcaaagcaatttacagattcaatgcagttgttat

SEQ ID NO: 855433 - DNA, 572 bp, Homo sapiens
ttttggatgacatttttttcttccatcatgtgagcagggctttttagttacaaacaacagaaactgattctggttgacttaagcaagggacaatttattaaacggtataagaagctcayagaatttccaaatgtctggagaattaggctaaaccaagtgtgcaagtgctgaaaaggttgagactctaatatcacaaaaacaaacaaaaaacaccgcagagtgtcattacaacaattttgtaaggacaatgaccctgcaaagcactgcacagtagacactaggactatctttagaaactagatgtcattgctattatatgacctcaagaataaattacctgctgtcatctcctttacttcaatcactcctcatcgatgactcaactcaactttttataggacgtgcaaagtctaggtactatgtgaggagcaggggaggcggggagaacattggaggtttatgatatatgaaggaagtgattatctggcactgttaacctcaaatctgagagttgtactgtcttccactagattcttaacatggagacatctccacagataaaaagagtcttt

SEQ ID NO: 855434 - DNA, 678 bp, Homo sapiens
attcatgtgcagaagcaccagtagacttaaatttacaagaatgtatctacattaatcttaactactgactagctattttcttttggattctctggacttcaatcactttataaaaaaattcaggaataaattgccttcattctaaagattttaagtatattaggtaacaaaagatctgtgaataagaattacatattttagagtgatttataattttagaagatgtttgtgaaatttctgtaaaaagggccgggtgtggtagctcatgcctataatcccagcactttgggaggccaaagtgggcagatcacttgaggtcacgaactcgagactagcctgtttaacatggtaaaactttgttacaattcaaggtgagattcggatggggtcacaaagccaaaacatatcgggacacttttccttttgcttattaaaaaaagataaacaaaatcacaaataacatatacgtatacaccaatgatgtcctactgaaactgccacaatgggctctatcacctagtctaccctccctatagtcccatcagtcytgctgatattcaccgaaggctataattattatttcagttttctatcccagcctttctctgatctgcattcccaataaagtcagaaactaattgatatcctgctctcccaaattcttcaatactttttcct

SEQ ID NO: 855435 - DNA, 640 bp, Homo sapiens
gttgaagttttcttttaattgaataaagtaaacaaacaaataaacttggcttgaaaatrctttttttttaatgttcctgtacttgagttttttgtttctaatttatcaagattgattgtttagtaatatggtttggctgtgtccccacccaaatttcatcttgaattgtaactcccaaaattcccacatgtcataggaagaaccccatgggaggtgattgaattatgagggtgggtcttttctgtgctgttctcatgataatgaatgagtcttacaagatctgatggttttaaaaagaggagatcccctttacaagctctctctctttgcctgctgccatccaagtaagatgtgacttgcttctccttgccttccaccatgattgtgaggcctccccagccatatggaactgtaagtccattaaacctctttcttttgtaaattacccagtctcgggcatgtctttatcagcagtgtgaaaacagactaatacagttagcattaatgatctggtaatagttttcttagaattataagaataatgaacaattattattccatacataattgataatatgattagaaagaaaaataattgttccaatttagttcctactgggcagacatttttatacaacaa

SEQ ID NO: 855436 - DNA, 620 bp, Homo sapiens
ctataaatctttatgcaaggcaagaagaattcaatgctgtttagtccagttacctgatactgtgtttcagatttgttagtagcctgtgatcaattctcacagtagagtttttmctttttttacgctggagatttcaccaccatcttcttacttaacatcacaaacatctagacaaactccctcctgtttcgtcaattttactaaaagaatttcattgtatgctctcaactcaagttctctcttattcaggattttgtcttatcccgtttctttattgtgtatctatttacttaatcctgatagatttaaattagccacttaggattctttaatagagtatcttttaatttctgctttttaggcagtggcaaaataaatgtaaaatttaccatttgaaccatttttaagtgtacaattcagtggcattaagtacattcatattgttgtgaaatcatcatcaccatccatctccagaactttttcatcatcccaaacaaaaatctatgcttattaaaaaataattccttatttccttctctttttaggccctcagaagccctatttctctttttgtctctacagttgacttttctaggtaatttatataaatagaatgaagc

SEQ ID NO: 855437 - DNA, 620 bp, Homo sapiens
ctataaatctttatgcaaggcaagaagaattcaatgctgtttagtccagttacctgatactgtgtttcagatttgttagtagcctgtgatcaattctcacagtagagtttttcctttttttacgctggrgatttcaccaccatcttcttacttaacatcacaaacatctagacaaactccctcctgtttcgtcaattttactaaaagaatttcattgtatgctctcaactcaagttctctcttattcaggattttgtcttatcccgtttctttattgtgtatctatttacttaatcctgatagatttaaattagccacttaggattctttaatagagtatcttttaatttctgctttttaggcagtggcaaaataaatgtaaaatttaccatttgaaccatttttaagtgtacaattcagtggcattaagtacattcatattgttgtgaaatcatcatcaccatccatctccagaactttttcatcatcccaaacaaaaatctatgcttattaaaaaataattccttatttccttctctttttaggccctcagaagccctatttctctttttgtctctacagttgacttttctaggtaatttatataaatagaatgaagc

SEQ ID NO: 855438 - DNA, 596 bp, Homo sapiens
cgaggaaaattttattgaaagaaaactataatgtgcactagrttaaattctagcagctttcaggttgtaaatgtcaagatttcagagcaactgaacacaaaactatctgccattgtgacctaaatattaggaatgtaattcattttggtcagcaggaattcacaaaaggaggattgcagtaagactgaatttcttttaggaacagtgatacaaaattcacataggatggcccttgatataattttctgacgtttaaaaaggctttcactactctttttaaataaaggattataatataatggaaaaaaagtatgccattgaagacaagccattgaatctatgaaaagatgctttcactatcaaagaaaaatgttactaatagaaatggcttggaattgaatacagtatttggagacttaaaaattccactttttaattgaataatgatctatacgatatatcgcacacaaaaaaaggtaggacatgtattctataccagccttgtacattggggcaaataaaattcagtcattcataaaatgctataatgcattaaaaattaaatgatactgtgattacacatatgaacttttcat

SEQ ID NO: 855439 - DNA, 613 bp, Homo sapiens
atgggcaatggagcgtataggaagtacttggaatttttgttcacatggaatcctgcaacccatatcctccctgtctccctgaaacatattctcagcagttactccactttccccaggtgcccaagactctacttggccttccctccttaccctactgccctcaagcgcctgagtgcgagctttgtcagggccatatttagtttccactccttggcatctcagcctggggaatggtggcagctgtccttgccctagggtgaattgccaagacattttctatagttatttcagctggaacaagcccctggccctcccttgatccaggataaacacatccctgaatagagattgtgatcctttgggggtcacctgtctgtcactggttggggtattgagaccacggaatgggctgagtgacttccttgccctttgtaggatcatagcacatttttctggcagctggcgggagaaggaatttaatagcaaccragccacaggcatgtgccaggccatggatgggactcccaacgcctgtcaggttcatacttgccagtgagtgttcactgtccgtgaaataacaaattaaaatagtactatcatagctcatgagaga

SEQ ID NO: 855440 - DNA, 538 bp, Homo sapiens
atcctgagactttgctgaagttgcttaatagcttaaggagattttgggctgagatgatggggttttctatatacaatatacaatcatgtcatctgcaaagagrgataatttgacttcctcttttcctacttgaataccctttatttctttctcctgctgattgccctggccagaacttccaacactatgttgaacaggagtggtgagagagggcatccctgtcttgtgccattcaggggaatgcttccagtttttgcccattcagtatgatattggctgtgggtttgtcataaatagctcttattattttgagatacatcccatcaatacatagtttattcagtttttagcatggagggctgttgaattttgtcaaaggccttttctgcattgatgggcatctgggtttgttccaagtctttgctattgtgctattgtgaacagtgctgcaataaaaatatgtgtgcatgtgtctttatagtagaataatttataatcctttgggcatataccgagtaatggaattgctgggttaaat

SEQ ID NO: 855441 - DNA, 634 bp, Homo sapiens
cagcttccccatccctgatacagatttcatgaacacataaatacataagactccagggctgacttactcaattgacattatattatttgtttatcatccttttgaatatcaaatcaacacagagaatcagaagtagtctacagttgatttgcacaataaaatatgacttttcaaaatttattccttctggtacgtacctctcaaactctaaataggtagcaatatagtatcttgaaatagtaattgtttgcttacttattggcactttctgtaaattactcagaggcacttaaattgtagaaggccaggtgtggtggcttacgcctgtaatcccagcactttgagaggctgaggcgggtggatcacttgaggttaggagtttgagaccagcctggccaatgtggtgaaaccccgcctctactataaaaaaaaatacaaaaattaaccagacgtgatggcacatgcctgtagttccagctacttgagaggctgaggcaggagaatcacttcagtycagaaagggaggttgcagtgagccaagattgcaccactgtactccagcctgggtgacagaaaaaaataatgtctataggagaaatatgattattagaacaaaatacagaaagaaacatgt

SEQ ID NO: 855442 - DNA, 634 bp, Homo sapiens
cagcttccccatccctgatacagatttcatgaacacataaatacataagactccagggctgacttactcaattgacattatattatttgtttatcatccttttgaatatcaaatcaacacagagaatcagaagtagtctacagttgatttgcacaataaaatatgacttttcaaaatttattccttctggtacgtacctctcaaactctaaataggtagcaatatagtatcttgaaatagtaattgtttgcttacttattggcactttctgtaaattactcagaggcacttaaattgtagaaggccaggtgtggtggcttacgcctgtaatcccagcactttgagaggctgaggcgggtggatcacttgaggttaggagtttgagaccagcctggccaatgtggtgaaaccccgcctctactataaaaaaaaatacaaaaattaaccagacgtgatggcacatgcctgtagttccagctacttgagaggctgaggcaggagaatcacttcagtccagaaagggaggttgcagtgagccaagattgcaccactgtactccagcctgggtgacagaaaaaaawaatgtctataggagaaatatgattattagaacaaaatacagaaagaaacatgt

SEQ ID NO: 855443 - DNA, 496 bp, Homo sapiens
agggttatttaggtcatgaggctggaagcttcatgaatgggattagtgtccttataaaagaggcctgagagaacaccttccaccatgtgaagacgcagtgaaaacawgccctctttgaggaagcaggccctcaccaaacatacgctgctgccttgatcttggacttcccagcctcaagaactgtgaaaaatgtctgtcattcacaagttactcagtctaaggtgttttgttatagcagcccaaatggactaagaaaaataccagacacaacccaaggtgaggggaactttaatgaaagtgtccaaagtggtttatttccccttaaactactgactgatatagtacaaggaagaatatacaattatttttgtaaaaatgataatacatttttcctgattctttgtaagtgaatagacaaaacaactggaggcttggctaaaattaatttttaaaaaattttcaaaaggttgcttcatattatatccagaaataaatg

SEQ ID NO: 855444 - DNA, 562 bp, Homo sapiens
ttttctctgcatgtgcagaaatttaattatcaggtcacctcagttctcagcagagtaaattacagtcttggccattcatttgtatgcaaatgccaccatagtaggaaaacaacacaacwcttgggtcctatcaagcaattcccttataggaggcatacaaatgagacagcagagcttaaaagagtcagagaggctgacagtttcacacttgcttttgtctaggtgaatctttttgcagtgatgaaacagcttagagtaatcatcaaagccaaatgttcagaaaacatcgttacttgagagagtccttgcagtgagaaaggagggcgcagtgaatctgactacagatatgaatctgtttagaatactacctgtggtgagggttttgtgatccctgcagtcagaaccaatcaccctacctgtcagtactttcatcatggctcttcttttatctttgatggatttggtctggcggggaaagaaaataagcctcaaagaggctagaggagcccttgatatagggtggatcccttaggtgaataatcagcaacacaaatccctgctc

SEQ ID NO: 855445 - DNA, 541 bp, Homo sapiens
  misc_feature 89: n = A,T,C or G
tggagaaacccctgtccacgtcctgtttagagctggcagagtggagctatgacaaacctggaagcaggataggaaaagaaaagtgaatngagggaaaatcgcttatttacamatccgtctgcttaatcaacagtggcacatattccatgattttgttgatcccagctactgtggaaagcaaggactccttgggtcccaggactcatttgttttgtgtcattttggttttgaggcccagctctctgtctggcctttatagttccctggaacctgaggaatggaacacctggcatttgtactttgtgttgacccagcaggaaaatgtgatggaaggactatgtacttgagaatcagaaagggctcacccacatgttacttaacttttctgggcttcagtaacttcatctgttgaataatgatttaatagctttctctgaggatattgtaagttttaaatggaatattatatgtaacatgaggagcacatgataatgcctaataaacgttgcgtagagttcttttgtgcctacaaagtgtttct

SEQ ID NO: 855446 - DNA, 521 bp, Homo sapiens
taagaaggccctaaaatccacttccacatattatgtatgctaggtctatgttgggataagagagggtagcattagctatgtgtgaggacgcaaggacatgcaacctgaagaaataagacattaaatgaataaaatgttaataaagatttaaatagctagtcaagatagaagacatcacaagatgatatatatttatatgcttaatgaatttaatacatttttaatgcattaagaatagagacagcatttattgcaggaattcagcagacagagcaatataaagttctttggccaagatttcataattatgtgttgacagaggcagatcttgaacagagatctctgaactctcacctctaatacttttgcacttcaccactatatgagaatacatctgggctcaagtgatggaagccaaattcagaggggcttaagcatacacacacacacacacacacacacacacacacacacacacacacgcacatacacactrgattttactgactcacattagtgaa

SEQ ID NO: 855447 - DNA, 278 bp, Homo sapiens
ttttgaatatgtaagatttcaaacttgtgactttcaaggtttttatgctgtctttctcacccaataagttcttrcagaataagaaaacaaaaaacaagactactgcagtcatagatttattgattttttctgcttctggtgttcttttggattatcctttttctatgttcaattatatatactcatatatgaatattttgaatgtactgcatgtaaaccatgctctttttaaactgagtattttccatcactagagcatagtaaattgtacacagtga

SEQ ID NO: 855448 - DNA, 600 bp, Homo sapiens
atggtgacttgtcaacaaagtatcttccctagttggatgccaacttgtaaccaagaagactttcttctattcaagagaaatttggttttagttttgatttaatacttggtccctctaattaatcactggggtgattaacatgaattctgttggtataaagagtattggttccctaattagcctgcattgttgaagaccacatagatgtattactgataagactatgaggctcatgtttaattactcaatcaaaattaggaagaaatgctttggaagaaactaaaaaattacaatttaggttaatttttaaaggcaatttagtatacatgatgagctagctttgaaatacagatttaaatgtttaaaaattaatttgagggcaagatttggtaccaaagtttcaaaaattttatttcactgcttataaaatactttatcagaacacttattttaaaaaataacatcttatttgaaaaactccaaatttgatgggatagttacaccatcatacaatttyaaaggtagaattagctttctaatactttaaaatattttctgaaatgaacatttcacttggtttaggaccgtgtctgtaagtaa

SEQ ID NO: 855449 - DNA, 616 bp, Homo sapiens
atctattatacgaaaggcactatttgttgaatttggggatrcagcaacaataaaagatacacataaaaacattttctgttgtcttttaccttacattctagtaaggaaaaataggcaataaatgatagcatagtaagcaagcaaaaatgtgttgtattatggaataaaggtgggtttatttaaggtaacgtttgagaaagactttaagtaggtaaagaattaaagcatggaaatatctgcaggaaagaagtctaagcaaagcaaatagcttggaacagtgaagaggccagtgcagctgcctgagtgaccaaggggtaaaattgtgtgagctgaggccagaaagattggattaggccaggtcatgtaaggacgttgactttatataatgagaaaaggggagttcttggagggttttgagctgagaagcagcataatgttaacttacattttatgtaatcgctctgactggtgtgcagcacatggacttagaataatggcctccagctccatccaagttgctgaaaagacattattttgttctttttaatgaccaagtagtattccatggtgtatatataccacattttatttatccactcatttgtcagtgggcacc

SEQ ID NO: 855450 - DNA, 587 bp, Homo sapiens
atatagaaaatactaaagactccattaaaagtctgttagaaatactaaacaaattcagtaaagttgtagaatacaaactcaatatacatttaaaaatcagggttttctttacacttacaatgagctatccaaaaatgaaatttttggccagatacatggcatatgcctctaatcccagcactttgaattttagattttttttttctaatcagtgaagaatgatggtggtattttgatggaaattgtgttgaaattgtagattttttttggcagtatggtcattttcgcaatattaattctacccatccatgagcatgggatgtgtttctatttttttatgtcatgtattatttctttcagcaatgttttgtagttttcctggtagaggtctttcctctctttggtaaggtatattcccaagtattttatttttttgcagctattgaaaaaggrgttgagttcttgatttgattctcagcttggtcactgttggtgtatagaaaagctactaattcttgtacattaattttgtatccagaaactttgctgaattcttttgtcagttctaggagctttctgtagtagtc

SEQ ID NO: 855451 - DNA, 590 bp, Homo sapiens
catcattagagcatttcatcccctgaagagagtaayatgttgttcagattagattacctgctgacgcatagctcccgcttgaggtagcaaggttttaaggaaatggtttctgcttgttaataatgacaccaactgggatgagagctaacatgttttgaaaggtttctatgcacccagctctctgctaagcactaggcatacatacttcacttaattattacaaatctgagggcaggaatttctatccctttatgtaagtaggagaggttagataattttcttgagacaacaagtggaaagcaaagccagaactgaaacccaggcagaaaagaagagatggggactagaaaaatgcccagcagaggcccatgagagccacagggagccaggaagaaaagccatgcctacatccaatgaaatattaacagaaacttcacctaacttcacaatcagaaaattgacaatggtacccccattttaaacaaattcagtcatcaaacgataaaaatccatgctgaaatcctaaagctgtgtatttaaacgagactaatttctatccatgaggccagcagtcttgaacattaacctga

SEQ ID NO: 855452 - DNA, 669 bp, Homo sapiens
gacttcagagcttgtgctttgccttccacatcaaatttctcattttaggacgagtttctcaaagccaagtaatatgtaaaaatctccactgtcctcaggatgatatactagagaagttaaaaacccaggtttgagagatgggccttgattcaaattcttctccattatttccttatagttcaagaatggaccaacacagaacctctgaaagtttctatttactcaactctatatgtgctcatgatttttcttgttccacattgttatcataagcataaaataactgaaataaaatgtatttcacaaatactatcacaaaattaagtgagcacttaactgttttgaataatagttgttgtttgaggtcttgtttttttttacggaaggacagtctctacttttgcaattagaaataggtaaacggcttgtaacagagaaaatataggtgactgacataatcaaattagttgatttttaaatttatgataaaattctggcaggtagcacattttcatttaatattatttaactttgtctggctatttcagtggatttcatatctttcgaccatccaatccattcagtctcttttttccaggattattcttccatcttcttycttgggaaacagacaagggagagacgattgctgccttgttattataccag

SEQ ID NO: 855453 - DNA, 626 bp, Homo sapiens
aagcttagaaagatccaataagttcattaaggtcatccttattaaaatggtagagtcaggattcaragcaaaactgagattccaaaccctctatggtcttttggcctagttacgattgataattttctccttcatgtgaaaaatctaaattccgattaggataaagaaaaaaagtctgagagggagggagaatatggaactaagaaagaaataaaaggaccatgaccagataaggattgtgagcaggctagagaggagccaactaccataagaggggtgggagggctgtacagggtttgcttgtcatatttgcctaaagctgttccatcaatgccccagggaagaaattgtgacctgacacagtgcatttgtttgttccagacactgtcctgtgtaccattgatgtgtcctctctccctctacattcactggtttaaggtattacaacaaaataaaggtggatatagtccaagggaaatatgcaccagacacaggtaaacaggcaaggaaggtttatttttacttttttaagatttatgttttacttaacaaataataatcgtatatatttatgggatacattgtgatggtacatgtggctcatgttattacatgcataggttgtg

SEQ ID NO: 855454 - DNA, 480 bp, Homo sapiens
tccttgttttcacatagtcccactgtttttaccttcagcatttatatayttactctattagttagtaattgttcattagtcagtttaaaaaaaaaggttttgtttttgtttgttttttagcactatcaatatttcctacactctgctatgtgctaatgtgttcggtttactatttaattatatcacttcccagttatgttataaatacctcaaaaactggaattgtgttccctaatttcttaacaattccccaaagactcctactctcagagaatgttgcaaagtcctggtagggaagagtcaactcttgactgatgagaagtgtacagtctaaggtagagatttgtaaatattacaacaatttaatgtttatggagcacttgttccagttcaggcaatgtggtatttcatttcaccctcctaccacacctacagttggggttatagataatattatgagccccacattacagatgaaaa

SEQ ID NO: 855455 - DNA, 480 bp, Homo sapiens
tccttgttttcacatagtcccactgtttttaccttcagcatttatatacttactctattagttagtaattgttcattagtcagtttaaaaaaaaaggttttgtttttgtttgttttttagcactatcaatatttcctacactctgctatgtgctaatgtgttcggtttactatttaattatatcacttcccagttatgttataaatacctcaaaaactggaattgtgttccctaatttcttaacaattccccaaagactcctactctcagagaatgttgcaaagtcctggtagggaagagtcaactcttgactgatgagaagtgtacagtctaaggtagagatttgtaaatattamaacaatttaatgtttatggagcacttgttccagttcaggcaatgtggtatttcatttcaccctcctaccacacctacagttggggttatagataatattatgagccccacattacagatgaaaa

SEQ ID NO: 855456 - DNA, 480 bp, Homo sapiens
tccttgttttcacatagtcccactgtttttaccttcagcatttatatacttactctattagttagtaattgttcattagtcagtttaaaaaaaaaggttttgtttttgtttgttttttagcactatcaatatttcctacactctgctatgtgctaatgtgttcggtttactatttaattatatcacttcccagttatgttataaatacctcaaaaactggaattgtgttccctaatttcttaacaattccccaaagactcctactctcagagaatgttgcaaagtcctggtagggaagagtcaactcttgactgatgagaagtgtacagtctaaggtagagatttgtaaatattacaacaatttaatgtttatggagcacttgttccagttcaggcaatgtggtatttcatttcaccctcctaccacacctayagttggggttatagataatattatgagccccacattacagatgaaaa

SEQ ID NO: 855457 - DNA, 235 bp, Homo sapiens
taaagagtgacatcaaggtccttcatgaatagtggatatttctctttatcactgtaccatcactagccarttaaggctccattctggaccctttaccgctatactcttgtgaggttactcaataacacatgatttcaactgctcagtattcctgcaccaactctctaacatctactgggtatcccaaaattcgattcaattctggcaataaccacctgtgactagtacagattcc

SEQ ID NO: 855458 - DNA, 528 bp, Homo sapiens
aacatgctagctcaggtctctcttcctcttataaagccaccagtcctactctcatgataacccataaatccattaattatttgactttctyattagggggataagggagtcaggggaaatgtagtgggaggacaagcaggagtggaacagtcttggattttgctaatgagggctacctggaatagtgtgaagacctctgcagaaagatgctaaagatgtacgaatatatgtccaagggatactgagatactgaggtcatcataagtgaccagccaaaggaagtcattcaaccctgtcaaggcacctgcaggtggagatccccagcaatgtatctctgaagaaaccactaaggtgccccaaggaagtctgatcactactaaattcagacagactcagcctaataccttcaaagtccagggaataacagttgagacctttcctattccttgcctctttaaccttggatgtgtcagatatcataactactgggagcagggagtaagaggaggtacagcccaaactaaacta

SEQ ID NO: 855459 - DNA, 604 bp, Homo sapiens
gcgcctgtagtcccagctacccaggaggctgaggcaggagaatggcgtgaacccaggaggcagagcttgcagtgagctgagatcgcaccactgcacttcagcctgggcaacagagaaagactctgtctcaaaaaaaaaaaaaaaaaaaaatacaaaaaaacagaacggaaaagtgttctccccccatcaatccagcttcagagacattccatgagtgacacatgccccatcccccaaaaacaacaaggaagtgttctgtgtgctaacaacatagcttaagaaaaaaaaaagtaaaacagaattctgcgcttttataaaacttgattttaaaaaatagtatttcaaactgtacagtcaccagaagtacacagtaatcaaaaatgcagacacttcacttggcatctccagtgccttcagctttctgggcttgctctgtttggcatctccattttctgcaggcttattcccctccttgccagcatcagcttttccttttttccctttgggtatcttttctcccttttttgcaggggcctttttaggcttgggctctggctttgraggagcaggtttagcagagacaaccttgcagatcttctctgtg

SEQ ID NO: 855460 - DNA, 618 bp, Homo sapiens
tgggaaaatatgggctattttataaatggcgttgggataatgggccagccatagcaacactccttattggggtaagaactctctgactyggtctaataagctcaagccatgaagaccacatggcataaatatgagtgaatattttgatcatcttaaggtggggaagattcttctaagtatgacgtgatatttgaaatcataaaagaaaagattgataaatttgactatatgaaaattaaacatttaagtaccttaaagaacattataagaaaattttaaaagaggggtatatacatatgtatgtgtatatatatatatatatatatatatatatatatatatatatatgacaacagtttaattttatttctaatgtacaaagagctcttacaaatcattaagaaaaagataaatatctcattagaaaaatgggcaaaggacatgaacaggcaattcacaaagaaaataactacaaatgcctgaaaaaacaaaaagacatttatttccccctccctataatcttagcaatgccaatagaaacaagcatcatttgccttctgttgatctggccaaacattaaggctgacaaaacccaggcttgatgagggtctggactaa

SEQ ID NO: 855461 - DNA, 617 bp, Homo sapiens
actggatccaatcagcataacatcatcaatgtaatggaccagtgtgatatcttgcggaagcaaaaaagcaatcamggtctctccgaataagattatgacacaaagcgggaaagttgacatacccctgaggtaggacaataaaagcatattcctggccttgctggctgaaggcaaattgcttctggtgggccttatggacaggaatggagaaaggcatttgccaagtcaatggctgcatgccaggtaccaggagatatgttaatttgctcaagtaatgaaaccacatctggtacagcagctgcaattggagacaccacttggttaagtttaatccactgtcattctccaagatccacctgtcttctgcacaggccaaatgggaaaaccgaatggggatgtgttgggaatccccacccctgtgtctttcaagtccttgatggtggcactaatctccgcaatccctctagggatgcaatattgttttttatttgctatttttctaggtagaggctgctctaatggcttcaatttggcctttcccaccataatagccctcaccctaccagtcaggaagccagtgtgggggttctgccagctgctaagtatgtctctgccaa

SEQ ID NO: 855462 - DNA, 629 bp, Homo sapiens
tgtgttgggaatccccacccctgtgtctttcaagtccttgatggtggcactaatctccgcaatccctctagggatgcaatattgttttttatttgctatttttctaggtagaggctgctctaatggcttcaatttggcctttcccaccataatagccctcaccctaccagtcaggaagccagtgtgggggttctgccagctgctaagtatgtctctgccaattacgcattctggcattaggaaaatgaccacaggatgagtctgggaatctactggacccactgtaagtcagacctgagctaaaactccattaattacctgacctccataagcccctactttaactggaggatcacagtgatgttttgagtcccctggaatcaacgtcaactcagagccagtgtccagtagtcaccgaaatgtctgatcatttccctttccccagtgcacagttaccctggtaaaaggctggaggtctccttggggaaggatggaagaaagattcactgcataaattatcagtaatgtagtggggtccttcctcaagaggacmctgcctccccttcattcaaggggttctgggtctgtaaactggctcaagtttacagacttgattgaggggccgtgat

SEQ ID NO: 855463 - DNA, 549 bp, Homo sapiens
gagttttgtcattagacttgagttccatccctaagatatgttatgtatatacaaatattccaaaatccaaaaaaatccaaaataggaaacacttctggccccaggaatttcagataagggatattcagcctgcataacattctatctaaccttcccaacaaacttctgaggcaggcactttcttatcacctccatctctaagatgaggaaactgaggcttggagaggctagtgacttgctgaaggccacagagcgtgctgggatttgaacccaggccccctgactgaggagtcactgtgtaagtacagtggcagcagatcatggtcacatagtgattctctgtgacagatgaggaagctgagcctctaagtcgcataccagggccacagagcaagtagtcagactgcggctagctggcctacagttctggggctcggactccttcacctcaagtatgcagcyaccaagtggcagtcccagaggcgctgggaaggccctctgccccccacaagggacccctcctacccactagatcaggagtcggaaaac

SEQ ID NO: 855464 - DNA, 567 bp, Homo sapiens
tcttggagatatagaatggacattaatatattgaagactgaaccatttcaggggcttagggataccttgcctaaatcagcacttctctcttaagctttgcttaaggatgctaattaactgtgtactactttgttacacttatttttatcattaactactaaactttttaaaactccacctacttccaggatgggaatgagatgactgttacatgaacacatgttaattcctcaaaaatagataccacatttctccagctagattacaagcagctcaaggacataactgacatacttctttgtcttccaacagcactatgacaactgcttataaaccgattcccacaactgaagtttgactggagtttaaaagaaaatcttaccatccatcactatcagcagcatttacatttacaccaaactgtaccaggaacttaacgatttctgtgtggcctgcacacacagcattgtgaagagccgtgatgccttcatcattgggsaggcttgggtcatcaacctatatcaagaagaagggtgagcatcactctagtttcttgtcacctgaact

SEQ ID NO: 855465 - DNA, 566 bp, Homo sapiens
acatactagggaggtaacttgccagctttgctttgggtcatagttcttacagctaacttatgtgttccagaaaatttaccgagaaatcgacgttgacaggtctggtaccatgaattcctatgaaatgcggaaggcattagaagaagcaggtaaccctttataactgcattttcgttcctagtttaatctgtctgtagaatatgtgaacactcatcttataccatataacacaagatttggtaaagctataaaataaagtaggtgctggtttaatacagacacctccttttcattcccctttcaaagactaattggtaaaattaaatgcagtaggatgctctgccctctgtgccttcttgaatccaagtttcctttggagccgcctggcacagtaagcaggcaaagccaggtctcaacagcctcctccaggtgcttcctttctggtgcagggttggttaggcagaaatcraatgtctcagctcagcccttagggtaagaccctagcagaattggatatcaataaaaggacacaagcaagtggtagaccagcaaagcaggagactgct

SEQ ID NO: 855466 - DNA, 566 bp, Homo sapiens
acatactagggaggtaacttgccagctttgctttgggtcatagttcttacagctaacttatgtgttccagaaaatttaccgagaaatcgacgttgacaggtctggtaccatgaattcctatgaaatgcggaaggcattagaagaagcaggtaaccctttataactgcattttcgttcctagtttaatctgtctgtagaatatgtgaacactcatcttataccatataacacaagatttggtaaagctataaaataaagtaggtgctggtttaatacagacacctccttttcattcccctttcaaagactaattggtaaaattaaatgcagtaggatgctctgccctctgtgccttcttgaatccaagtttcctttggagccgcctggcacagtaagcaggcaaagccaggtctcaacagcctcctccaggtgcttcctttctggtgcagggttggttaggcagaaatcgaatgtctcagctcagcccttagggtaagaccctagcagaattggatatcaataaaaggacacaagcragtggtagaccagcaaagcaggagactgct

SEQ ID NO: 855467 - DNA, 420 bp, Homo sapiens
aatgcttagcaatgagtttgtttgttcatgtaacttcaggtttcaagatgccctgtcaactccaccaagtcatcgttgctcggtttgcagatgaccagctcatcatcgattttgataattttgttcggtgtttggttcggctggaaacgctattcagtaagtggatatttggggaatgactcatttcagttctcttggtattaaagtggcctgcctttcacctcggtgaaatcatctaaactagagacatgtcttccaggagttgagaatgaaattccctctttactaatttgagggtgaggaagaaagcatgtatggtggtcartgaagtcagttgctgaactgaaaagaggataatgtgatctgtttcagctcactcacttgtgacaccctctttttctccctccacagagatattta

SEQ ID NO: 855468 - DNA, 670 bp, Homo sapiens
aaatgaaacgtggggtcctggatgggatcccggaatagagaaagaaccttaggggaaaactaagagaatctgcataaagcatggactttaataatactgcatcaatgctgattcattataacacgtgtaccacactgatgtaacatgttaataataggggaaactgggtatgaggtatctggaacttcctgtattatcatctcagcttttctataaacctaacactgttcttaaaaaaaagtctattaacatttttaaaggtacctattataaaaatgcatttttaaatttataatttaaaaattatttgccaggtgtggtgactcgcacctgtaatcccagcacttgggaggataaggcagaaggattgcttgagcccaggaacttgagaccagcctgggcaacacagtgagaccccatctccacacagacacacacaaaaattagccaggtgaggtggtgcgtgcctgtagtcctggctacttggaaggctgaggtgggaggattgcttgagcccaggaggtcgaggctgcagtgagctatggttttgttactgcactytagtctgggcaacagagcaagaccctgtctcaaaaaaaaaaaaaaaaaaaaaaaagaaagaaagaaaaagaaagaaaggaaaagaaataaaaattatttaaaacactta

SEQ ID NO: 855469 - DNA, 442 bp, Homo sapiens
cagttcagtaggaagaacaaatacatgtgattatattctaaactgtgacaatgctatgaaggaaatgagtggggtgacagagaaaaacaaggtggggaggtggctgctaagaagggtcagaaaagacctctttaggaagggaacatgtgactaagttgggaagaatgagagtgagccacactccaggtaacagcgtgccttgctggtgagaaggcctcatgcaggaaagaaccggctctttgagagactgaaaggaggccatgacggcagggcctagtgggccacaaaagagagaaaatatttaggcagcatgttttcttttagatgaagacatggaggcacagagaggttaaatggctcgttcaaggtcaccagcaggttagcaagaagragaacccaagtgctctgagtctgggctagggcgcttcctgcagcccttgct

SEQ ID NO: 855470 - DNA, 442 bp, Homo sapiens
ctcggccgcctcccggtccttcgccagcttggccgcgatgcccgccatgctgcggtcccgrcggccgtactgcgcagagaaaggtcggggcgactccgcgctgcgctcggctggggcgcggccagggcccggcgcgctgctgcggccactgcgggcgccgccgctgcgagcgatgattcaccggagggaagcggcccggcccgcggggtgtggcctcagccgctcccggcctgctgggctcccggcccgggaccaggccatcctgcggcctgccgagcgccgggaacgccgcgacccggggccggtgctgccatctgcggacagctcccgggatggcgcggcccggcgccggggaggctcgcgaatcgcggtccagagttggggctcccaccggaacccgaggccacctttgcagcccatagggaagaaggctaggatagtt

SEQ ID NO: 855471 - DNA, 645 bp, Homo sapiens
gtttgggttccccccacaacctgccttctctttaaggaaaggcaactgaaatctagcacctcttgctacttatatgagcaactctgtttctggaaaggaggttgtacrgcttttggcaaacagctacggtctacctgcagctccttatagaggcgatcaagctcagccactgcagactgattgtcatggtggctgtcgatcctgccgttcttgagcatctctagctgcctggtcagttcttctacttttgacacagccaggacgagctccctctgtttttgctggaacaaattattcatctgttcaatttcctccactagatgagacagagaacagcaacaacagttgaaaagaaaaataagaatggactacttcccaggcaaccgggctttacaatgaactttctaataaacagtagaaaaatttttcagaatgtcctggaagcaaccaacttcttttagaagcaagtgaaatcaacagagacatctctaaatctctgtgcttcaatatcaatgtatatttatcagaatttgcattaaaaatattattaaactccaaattttagaaacaataaaaatttctttagaactttcaattttataacattaggtggatctattaaaccacaaacattctgaataaaat

SEQ ID NO: 855472 - DNA, 604 bp, Homo sapiens
tgcgtgatctggccactgcctccctctccactctcagcctttgcactaactgttccctgtttgcaccagtcctaccactactttgcaagtccccgccccagtgctatgcacttcctagccraaggacctttattcatctccttcctgcagcctggaaccctcttccccgccttctttcccacaagaggaaggagtgcctatttgttctccgctgtttcctggcatgaagaagacatttgataaatatttaaatgagtaaataggctgtgaaagttcttcctgattctgacaaatgagtatgtcagataagccacgtgttccctcactcctgtaagcatccacaaccaacggtacttcaatccaccaccattcaacaccgtgggcccacctcctactgtacttgtaaattaagaacctggcacaccttactagaacatcgtcctccttttagagtggatgatggcaagctaccagtgttctagaagcaagattatagagaacatcaatccagggcatgacagatacccagaaaactcaaaaggccccaggtactgtgttctcagcagacggtggggtattggggtcacccaagaaagaaagtcac

SEQ ID NO: 855473 - DNA, 604 bp, Homo sapiens
tgcgtgatctggccactgcctccctctccactctcagcctttgcactaactgttccctgtttgcaccagtcctaccactactttgcaagtccccgccccagtgctatgcacttcctagccaaaggacctttattcatctccttcctgcagcctggaaccctcttccccgccttctttcccacaagaggaaggagtgcctatttgttctccgctgtttcctggcatgaagaagacatttgataaatatttaaatgagtaaataggctgtgaaagttcttcctgattctgacaaatgagtatgtcagataagccacgtgttccctcactcctgtaagcatccacaaccaacggtacttcaatccaccaccattcaacaccgtgggcccacctcctactgtacttgtaaattaagaacctggcacaccttactagaacatcgtcctccttttagagtggatgatggcaagctaccagtgttctasaagcaagattatagagaacatcaatccagggcatgacagatacccagaaaactcaaaaggccccaggtactgtgttctcagcagacggtggggtattggggtcacccaagaaagaaagtcac

SEQ ID NO: 855474 - DNA, 210 bp, Homo sapiens
ccaattatatgagtggctatgaccaataaaatgtggrcagaataaagtgtgtcatttcagtgcatgatcctgcacatctttttcctgcctggtcaaccatcaaaacatgtgctcagatggagcttccattagcctgaggccctgagtcattatgatgaactaagcttctttggacatcatgaacaagaactaaattttccctatcttaag

SEQ ID NO: 855475 - DNA, 662 bp, Homo sapiens
aaaatataccaccttggcatactgagtattttaagctaaaggaaattgagaaaacaatgaaagcccaaaastcactctctgaccttctcccatctttctcccctgaagcaggccatgaaatagttctctgacctatccccctgagagaaggtcacaagaccctcattccagagaggttatgacctataaccagaaggccaagaagaatctgaaagaacgggccttactaagctccccccaccacaaggttattaccattaaataataccttttggttttaccatcacatttcttcatgactgtctataaaaatatggttttccctggatcactgggtcttcatttctgaaggcttctgtgccaaataaaatattaaatgtgtgtgtgtaaagggtattgttagtgtaggggagaaaaagtaatatcttttccttgcccattgcaaggttcatggatgacaaccctgcaacaaaagacacctagcaaaaagagagtacttctacaatgtacccatgagctgatttgtaaactgatgtggtctagaaaccacatcattgttccaacggtttagttgctgttctacatcaatcaatcaaacatcaagtgcttgtgaaacaccagctgtttggataactgtgccagtcactttgagaattaactat

SEQ ID NO: 855476 - DNA, 539 bp, Homo sapiens
aatctctattctgttacactgattgatttgtctatctatgtagcaatagcacactgtcataatattactttatggttagttttgaatgaagtagtatacatcctttaattttgttcttcctcagcttgtcaatktcttcataagcagtctgctgggatttgtttgagaacgtattaaagagatcaacttgggtcaaatggacaaaagagtgttgagtccttcgatttatgaacatgaggtatcttttcacttatttaaatgctctttaatatctcttagaaattttgtagtttccgtgtaaaggtcttgtgcgtcttttgctagaatcattccaatgtgttcagcgtttagtgttgctattatatgtggtatgttttaaaattacactttataattgttttttgttaacatatagaaatacaattgatttctgtatattgacctaaattctgcagccttactaaattcacttgccagttctaatagaatttgtttttgtaaattccattggaatttcttttgatttttccttttttttt

SEQ ID NO: 855477 - DNA, 539 bp, Homo sapiens
aatctctattctgttacactgattgatttgtctatctatgtagcaatagcacactgtcataatattactttatggttagttttgaatgaagtagtatacatcctttaattttgttcttcctcagcttgtcaatttcttcataagcagtctgctgggatttgtttgagaacgtattaaagagatcaacttgggtcaaatggacaaaagagtgttgagtccttcgatttatgaacatgaggtatcttttcacttatttaaatgctctttaatatctcttagaaattttgtagtttccgtgtaaaggtcttgtgcgtcttttgctagaatcattccaatgtgttcagcgtttagtgttgctattatatgtggtatgttttaaaattacactttataattgttttttgttaacatatagaaatacaattgatttctrtatattgacctaaattctgcagccttactaaattcacttgccagttctaatagaatttgtttttgtaaattccattggaatttcttttgatttttccttttttttt

SEQ ID NO: 855478 - DNA, 613 bp, Homo sapiens
tgagatcatgccactacactccagcctgggtgacagagcaagactctatctcaaataataataataataataataataataataataataataataaaaataaaataaaataattttaaaaaatgatctccttaagtccagatttatttttattggacatttctgtgccccagacctggaatgggccatttttccaatgaaaaggaaattattccttttagtgtgtactggtttatttttggtgccagctgcttcctcttgttgttttcttcccccagcaccaatctggcactggagtcatacctccctggaggtttcaaaagccttttttttttttcttgtaagtgtttgccccttgtattctttgaataaaaacattatgtgggcagggaccatgctttattttttaattgaggacgtatattttatgtcttatgtcaccgagtggaaatacagcaaactacctggcctctcagatttctgccttcagttccataaatcctcttaaactaagagagtcacccggtcactttcggatgggacagatacctcagtttattyacatttttcctgacttttcttaattccttcttgtgaagtcagaaactgaaaa

SEQ ID NO: 855479 - DNA, 565 bp, Homo sapiens
aaaggggaggagttggtcaacaagaagcaggtggttgcttaggcaatcaygatgggtgaggggtctggctcctcattgtccagatgcagtgatctggtaagtttcagttccttgataatatctgggaggcctgatggttggcttcatgaggaaggaactcagattaagacaaatgtaactttctcaagttttaagactgggagggtcagttttctttcagtttctttcttttattcaaaagaaaccacaaataccagttctatcagacagttgggccattttcaactcaaggcatctgagttcctcctcatcaaggtagggtgactttaaatgtctacaaaggtgggatgtggattgtcctcagattctgtgtttgtttataggggtgtgtgaaaaatttcccctatcattcagccttcatgatggaagatctttttctcctttcttcttcctttaagtctctatttcctttcactttcccctgcaatcaagctgcttgttcttctatctccttcctattcccagctgtgattttatctagtctttgtgaattaagaaactggtt

SEQ ID NO: 855480 - DNA, 650 bp, Homo sapiens
tctatggctccttggatccccatatttactccaaagcagcagcctatagcagcttatcattataagtcttatgtgttcactcttaatataaaatatataagcagaatagacatattatatgtaacatgtaatatgtatatatacacatatgcaatagaggagtaagagtgccaagaaataaagataaataacgaaacatgagaagaatatgtgtctctataattttgtggctcaaatttctgattttaattacagattcatatttgaaggtctttgagaattggcattttaccaattactgaaaggcacattatctaatttctaaagaagaatagcatctgaaaattttaaagcactctattctacttctttttattcttttagacacagggacttactctgttgcccaggctggattcaaactcttgagctcacacaatcctcccccatgaacccagctgttctgtttctaaagaaatggtgtgccataggcaaaacttttaccttgctatatctctgttgtattttcacagtccgtagattctargttttattatttcatttagagtgtgatgacaaatacttgacgttccactaaattagataatatcagtagaacaatgttccgaaacaagatacttactggaaag

SEQ ID NO: 855481 - DNA, 456 bp, Homo sapiens
cggtggaaaactgaacctcccaaaaattaggagtgtgttcttctgaatatacttttggctgttctcttctgttctagttcactaaggtgatgactcctgttgcccttgacacccaaaacagtagccaatagacaacatctactgaggaagtctcccacatatcaaaatgtgtatagtaccacaggcatcaaagtctacactgaatgtctggcatgagggggccaagcgtccctcaggagggcttctatcttctgtagctactggggccactgccatgccatcttgtatcgtaaatgtctctgctgctgggttttttgggttttttcccccaagacggagtcttactctgtcgcccgggctggagtacagtggtgcaatctcagctcactgcaacctctgcctcccggrctcaagcctcccgagtagctgcgattacaagcatgcaccaccatactg

SEQ ID NO: 855482 - DNA, 538 bp, Homo sapiens
tttgagacagagtctagctctgtcgcccaggctggagtgcagtggcgtgatcgcggctcactgcaagctccgcctcccaggttcacaccattctcctgcctcagcctcctgagcagctaggactacaggcgcccgccaccacacccagctaatttttttttgtatttttagtagagacgaggtttcaccgtgttagccaggatggtcttgatctcctaacctcaggatctgcccgcctcggcctcccaaagtgctgggattacaggcgtgagccaccgtgcccagcctctcctctttcttaataattgccttacaaatggcttacaataagcaacagaaatcagatgtgatcgattctacagagtgactctctcaactctttattctatcctccttctagatggaaattagaaatctaaaaactacattccccagacacatttttggctagaattcttgcgaygtggaagtcctaaatgagatttggaagacaggacaaagcagaagctaccttcttgctaatgttgctacaggcaga

SEQ ID NO: 855483 - DNA, 635 bp, Homo sapiens
aagatcatgcttgtacatacttactatmtggagctaatggttattgttttgctacagtgtcactaaacaaaaatcaacatacaaaggtgaaagggtggcacatgtctgctgattacatttaagggcccccaaagtctctctttttgtccttgcaagtggtaggattgtttcactgcgatataaataaaacgccttagtaattacatcctgagaacaccatggctcagtactattcatgccaacttaactgaactgaaacatggcactggtgtcagtggcttttacttattgatggatttgtaaggtggcaggctctttcatgtccaaaagcggtagtttcccagggtctcaagaagatttaaaaatattttccttccatcacaacacaaagcctactgactttaagtaatgctgctgagggttaacatttgaaactgacaagcagcacatgtgtattacagagataaggcctggcacatgttgctgcagcctcctgagattttgaaatgctagcagctccagctggtggctatgctccattcctaatgtgcactttttagggaaacttgagcccctccttctgactgtgatagggacatgtctgattggaatagggttatttttaaagatattca

SEQ ID NO: 855484 - DNA, 511 bp, Homo sapiens
gcttgtattacattcgtattggatagtgctgactgaaaactatccaaattgtaaaatctgttctatttgcagccccccttccattgtattcctttagtctcagaacttaacacaacagtaggataaaaagtcatataagaaaaacgtcaaagaaaggaaaagtatttaccccattgccttctcccctttgatatatttaggaaaacaagactgttacgtacatttgaatcaattgcatggtgtagcctttttgtgctggttgcggcttcactgtttacttcctcacctgccacagcttaaagcagcactataagctgcactatrcttttcaatatgatgccactccttcctctaggcaccagcagtagtggtaaatgtgttacacatttatacttcccttttctacccacaccaccaccacccaaagctttaatatgtactaaatttccttaagttttgggatatagaggatttatgccccagaaacacaaatatctcagacttaaatttt

SEQ ID NO: 855485 - DNA, 579 bp, Homo sapiens
gttttcaaatatgcatagtgagaaaaagaaagcagcccctgacatctgggagctgccctgataccactgctaggccctagtgttgctactagctggcccagcactcatagagaggttttggtgttctgttaaacagaaacaacttcacacaacagaggaaactctgtgaccataatggagcaagacaaaaacaagaacactcctctgatcttacataaacagacaaaaatgtgaacattattcaaatctcagaaatgcctaaacattcccctagtctgataatatgagtgactgctacttctttggcaatcatagctttagcctaattctagtcttcactccttatagtcttcactcctcatactcaattattcctactttctgatagcatccaatccagagcagagcctgcttctttaaacccttctcaaaataacctaacacaagcccaatcctttactaagtccttctggcccctttttactgagataccccatggttgtccacggtgtgcattctgcctcrttgcaatgagtaatagggccaagatgctcaatgataggtgtgctcctggttatc

SEQ ID NO: 855486 - DNA, 489 bp, Homo sapiens
tagtgattcatcagatgtattaaatgacaggtgcaagcagctgtgcatttgaataacttacaaggttgaaatggctacattctagtttaaatactttaaactcacatgtagattgagaaatgatgaacttgctacattataaacctaaagaaacaaaatcctttccctcaagccttttcccccttgtgctatcaacacttactaaagctaaacctggaggatcttccttatttctcaagagatggggaccaaaggcaggtaaatgtgtctttgaaaagcaagtgggaagccagaagttttttctaaatctaaatcttatgtaaagttgaaacactcattgaaaaccaaatattaaaattttmcatacccagattatgatttctgcctcttcaagtggctttgttaattaatgatatatagcttaaggcaaatgatcctatcagaacaaagctgtctctagagctcagggtggttaatgtaaattcaagt

SEQ ID NO: 855487 - DNA, 589 bp, Homo sapiens
ttttaggaaatatacactgaagtattgagagataaaggggaattacatctataacatactgttaaatattataaataattaaattcatatgtacagaaagacagaaraaaggatgattaacatggtaaaatattaacatttggcaaatataggtaaagggcttgtggaaagtatttttttaaacttttctataagtctgaaattatttcaaaatggaatgataaaaatattaatcagtagaaagaacagaaagagtactagatttggagttggaagaattgagttttattctagccactatttcctagtgctcttaggcaaatcatttagactctctgagcctgtctcctaatctaaaaattgaagataataaaacctacctcattggatttagtgggcatgtaagtttctgggtgaatttataaagttgtagcacattatacaaataatacttttttaaaaaggacatatggccccatgttcccactctgaaactagtagcccaggatgggctctgctacaaatcagctacagtaaagcttcagggatgggttttctcagttatgaatgccaagcaagcagaggggaa

SEQ ID NO: 855488 - DNA, 565 bp, Homo sapiens
tctgttgatgtgtatttctttggatacatcttatttgagactatttgagtttcctggatttgagtgttcattttgtttcacagatwtgggaagttttcagctgtctgggggtttttcatatatgctttctggttctccttctcccccctctctctctcctctctcctccccctggaaaatctcttgatgtgaatataggtctgcttgatggtatcaaataagttccttcagctttcttcatgcctttttttttattatcgttttctctttcgctcctttgactgaataattttacgtggccagtctttgacttcactgattctttcttctgcttgatctagtctgctgttgaagctccctagtaaatgttttagtgcagttaatgtaccgttaagctccaggatctctgtttggtaccctttaatattttctatatctttattgaaattctcattttgttcatgcattcttttgttaaccttggtgaacatactttatggcacttattttacattctccatcaggtatatcatataactcattttcctctgggtcaacttctgga

SEQ ID NO: 855489 - DNA, 514 bp, Homo sapiens
ttcatttagaaagtttcagaatgggaagatctgttgttttgcattcatatttaatgtaattaattacttgagtaaaagaacaaaaaatgatttagtgtctcagtggatgaagagaggaacagtggtttccaatccatgctaccataatccctggagagccccaaaagtaataattggtatctcagacccagatgaaatatttcaaaaatgtaaatgatattttaccagaagctaaataatataccaaatttctttgcttttgcttgatgcaaaaccacgattacttttgcacgaacctaataatgctaactcatttgtgagttagtatctgtgagttagtatgggttagtttttgctcaattggcagttagttttatatgccttgaaaaattaaaattggaaattatatttactgcttaaaagatgaagttcctttggyagaaacagttctttcataagatgaagcctgcataagaaaaataattgaagtagccctttagtattatttattccc

SEQ ID NO: 855490 - DNA, 599 bp, Homo sapiens
acatggcataaaagggtgtggcagataacttggtctaagcccacctacaatcccaacatgctcaacaaagttgcggtattgcctcccaaatgtcataggcaaatgacacagcgcatgttgtgggtttgatcccatccttgctattcaaaggctacatgatctctggcaagtcaacctctcatggttttctcacctatgaaaggaacatcataacagtaatctcatatgctattgtaagaattatataaaataactgccagcatttagagggctcaacaaatattagccccctggtgtcttcctctgaccagaaacatctcaagatgccactgctgcaatcatatagttgcatggaaattatgtttttcagccaatccagatcagattctagtccaatatctatagctgaaaaaatgtagagaaataaatgttagaaacgtctgagctgggagtccttggctcttccctggttttatttgtgactttargaaattaattcagcatcctttggcttcatggaaacccctgggaataagaaaataaatactgttccaatgcttcttatatggttattgggtgagtcaaatgaatcatggagg

SEQ ID NO: 855491 - DNA, 616 bp, Homo sapiens; identical to SEQ ID NO: 823133

SEQ ID NO: 855492 - DNA, 572 bp, Homo sapiens
ctgccttcccactttgagtcctcccatggcaaactacaacctaactcagtgtgtaaacaaacttcagcctaactgaagagttgattcctgtaacaaacaggtgagtcttggccaatcacagatcacagattgtcagctgatcagaccatgtcaatatagggtaaatgctttaccacaccatccctaagtaaggcaaattccaagctgtaaccaaccatgctgtttctgtagaacatttcttttctataaatactgcccctgcccccatgttgctggttggagctcccagtacctttcctagttctgattactgtccaattcatgaatcattctttgctcaaataaacacgctaaatttaatttataaaaaaattttcttttaacacttcatttttttaaattttgaggttcagggttatatgtccaagtttattatataggtaaactgtgtgtcacaggcatttggtgagcagataattttgtcacccagrtaataagtatagtacctgataggtatttttttctgatcctcttcttcctcccattcttcacactcaagtaggccccagtat

SEQ ID NO: 855493 - DNA, 568 bp, Homo sapiens
tcttgtctcttgctgcttttaggatactttattttgaccttcggaagtttattaaatrccttgaggtagtcttatttgggctaaatctgattggtgttctataaccttgtacttgaataatgatataggtttgggaaattctatgttattacacctttgaataaactttctactcctatctctttctctaccacctctttaaagccaataacttttagagtagcccatttgaggctactttctagatcctgtaggcatgcttctttgtttcttataatttttccttttgtccccgatatggttaggctttgcatccccaccaaaatctcatcttgaattgtaatccccacatgtcaagggagagacaaggtggaggtaattgaatcatgggggcagattcccccatgctgttctcatgatagtgagtgagttctcatgagatctgatggttttataaagggctcttccccctttgcttgactcttctccttcctgccatctttgaagaaggtgccttgcttccccttcctccatgaggcctccccagctatgttgaactgtgagtcaa

SEQ ID NO: 855494 - DNA, 683 bp, Homo sapiens
ctgaagaaatagctcaggccataatggaaamggcgggtcacacataccctcatccctgtggagtttaggcacaagggaccagcattaacactaaactagagatcataaggctgacaaaacagattctttgtagcagtgagatacccaactccgacctgactctggtatgggatcacatgatagagagcaggccttgaaggaaatcaaagtattttgtcccaaaatatattctctttgacatattttgaaatgtccctgcaaagccctctctcgtaagaggaatttgtattctgtagggaatctccttcacttaccaggtctttcccagatttttttaagatctgataagatacatttaccatccattctctctgaagcctgttacttacaggcttcacggacataacaagaaccttggcttccactacccccctcatcttgactcaagcatttctttatgctgacttcaactcttctcaggcaaaacttaactttttcaacccattgccaatctttggaaatctttgaattcacccaggacctgaaaagccctctctcacaccctaccttctagatgtctcacctttcagggccgaaccagtgtacactttacatgtattgatttatgtctgcctgtaacttctgtctccctaaagtgtacagaagcaagctgtaacccagct

SEQ ID NO: 855495 - DNA, 577 bp, Homo sapiens
ttctgtgactcatcaagtcataaagttggacatgcacagcagcaccatcgtcaaatggaagtagtatgtacatgatccagcctgaagaggtcatgaagttacaagtaagttaaataaggaagtggccccaaatgctgatggtttgttctgctacaagaccttctctctcctagcctacacctgtggcctcatggagagtaccttatgataagttgagagaggaagagaagactagggcctggtttacagatgattctgcacgatatgcaggtacaatccaaaagcggacagctgcagcactatcccctcctttctgggacatccctgaaagacagtggtgaagggaaatcttcccagtgggcagatctttggtaagtccaccagcttttgcactttgttggaaggaaaaatggccacatacgttattatattctcatttatggactgtagccaatggtttggcatgatagtcagagatttggaaggaacataattggaaaattggtgacaaagaaatatgtgaaagatgtatgtggatatacctctccgaataggyaaagcatatgaagatatttct

SEQ ID NO: 855496 - DNA, 620 bp, Homo sapiens
aaatcacaaaaatctcaccattcagagataaacttccagatacctaaatgtatatagacacatatagctatgtggacataatgctttgtaaataagtttatgctacattgcaggttaattttttcacacttaaaaacatgctgagaggtcaggcatggtggctcacgcttgtaatcccagcactctggtggatcacttgaggtcggagttcgagactagcctggccaacatggtgaaaccgcatttctactaaaaatacaaaaattagcctggcatggtggcacatgcctgtagtcccagctactcgggaggctgtggcaggagaatcacttgaacctgggaggtggaggttgaggtgagcagagatcgcgccactgcatgcgccatagcctgggagacagagacagactctgtctcaaaaaacaaaaacaaagccaaacaaacagataaacaaacaaaaaacatgctgagattatgtttctacctcagtaaataaaaaaacacacactcttattttttaatggtagcagagtatctcatgtttttaaccaatcatccagtgrtggagattttgttgtttcttttcaatttcgcttttatgaatgctaaaataataagca

SEQ ID NO: 855497 - DNA, 230 bp, Homo sapiens
aagaaagagcatagaaagataaaaaatatgaataaatacagtaaagcttctcctcttaagttttctaaattatgtttgaggattgaagtaaaaattgtaacaattcctgatgtggttatgcagaggagataaatgagacaaatttttartcggggagaataaagggatgtaaaggagagtaagatttctatacttccctctaactgacaagtgttgacaccagcggactg

SEQ ID NO: 855498 - DNA, 617 bp, Homo sapiens
actgccaaccacagaactctatttccctaagcacagcaaacggactgaattagttgtatggctatctctgggcacatcaccatggccatgacaatggaggaccatgactggacagactcatgtcayaatttagaacatccacaagaatgttcctggccaaaagcccagttcttacaaaataggaagtggtctattcatcagacctgcatggatctcagtgaaggtcaaatttaaaccatctcacaccaattccaattggaatctatttattacttaaagtctcatgagaaacagatggcagagatatcctccttcagccactatccatatatcccaatctgacagaactgacacctggagttaaagacagatctgttgctttgcaatactctgatttatttctgatgacaatacggcatttatctaccacaggcaatgaaaaggagaatttcacttcttttccagtctcctgctaactctttttggtgctctgggtagatgactgtggtcaattgcctccaacagaaaatgtctgttgcttcagtcactaattccaaagactaatgttgacattctattttgaggcatcctcatctcatataaggacatatccttgt

SEQ ID NO: 855499 - DNA, 522 bp, Homo sapiens
gtggagcctttaggaggtgattaggtaggtcatagggctccacccttacgaatggattaatgttgttattgcaaaagtgggctyggattcccgaaagagtaagtttggccccatttctctctgtgtctcatttgcttgcttgcttgcttgcttgcttgcttgcttgcttgcttgcttctgccttctgccatgaaatgaccctcaccagatgccactgctatgctcttggatttcccagcctacagaaatatgagaaataaatttcttgtcttcataaattacccagtctgtgatatccacagcagcacaaaacagacaaagatacttggcctctgagatgctactctctcttggttttacccctaatgtctgacagttcctttggggctcttcttatgctgcctatcaatcacttaacatttgaaggaatatgtagtaagaatctactctaagccaaacaccttgcttggcacttgggtacaatgatgatcaaaaaagacatggtcgctgccctcatgaacc

SEQ ID NO: 855500 - DNA, 615 bp, Homo sapiens
aacagatgaataaagaaaatgtagtatatatacacactgaaatactgtgtggccataaaaaagaatgaaatcctgtcatctgtggcaaggcgacatggacagaactggaaggtcattctattaagtgaaagaaaccaggcacagaaagacaaattttcctatgttctcacttttatgtgggaacgttaaaagttgatctcatggaggtagacagtaaaatgataagatactagagggttggaagggtgtgtgtatgtgtgtggcaggagggaaggagagggatgaaaggtggttgattaatgtgtacaaacatacaggtagaagaaataaattctttttttaatttctaacttttaagttctggggtacatgtgcaggactgttacacagttaaacatatgccatggtgaacagctgcacaaaggaataaattctaatgttcaaaagcagagtaggaggctatacttaacaataatgtattatatatttctaaacagctagaagagatgacttgaaatgttcccaaaacacagaaataataaacactcaaggtgatacataccctaaatactgacttgatcattacacawtctatccatgtaacaaaatatcaca

SEQ ID NO: 855501 - DNA, 538 bp, Homo sapiens
  misc_feature 475: n = A,T,C or G
tactgaagatggctacatgaatcaagyatgttcaatgttcccttctttcttcaaaaaagccctttaggaaaaaaaaattctatttacttacttccaacacttgctttcttgttttgtcttttatgagacagtgtctcactctgtcgcccaggctggagtgcagtggcgcgatctcggctcactgcaatttccgcctcccaggtccaagtgattctcgtgcctcagcctcccaggtagctgggattacaggcatgtaccaccacgtctggctgatttttgtatttttagtacagatggggttttgccatgtcagccaggctggtcttgaactcacaatctcaggtgattcgctcatctcggcctcccaaagtgctggaattacaggcatgagctaccatgcttggctcccaacacttgctttctattcgtatctactacagccattaaaataaatactttctgatactaataatanatattagggtaactatgcctctttgcaaagttttagtagaattttaagtttcgatattttaca

SEQ ID NO: 855502 - DNA, 610 bp, Homo sapiens
ctatggacaaatactatggttaacagtaagtacggcagggttctcctcttctgccaacaaaaatctccccagctaacagttgaaattccactgggtttggaatagtgagagggaaagaaaaacagttataatatagaaggcttgaagtcctaatgtctaattaaagaaaatgctgtaatgtgaataatcatttcagaaggaatattttaaagtcaatcacccatttaaaaggataattaatgagtttttttggtgttttggctcaaagagggccagctgaagtgaaaaaaaaaagtaggttatgaagataacagtatttggggtggattttgaaaaataaattgcattccagtgtgggttggcagaggaagatcgtaggccaagaagattgcggaggcagaagacaatttgtattactttataaatttggacattgcataccttcaattagccacagcaaccaatagttatgcaggtggggattcttcctatggagctgcagatgcagccatatcttccatgacactttttattcttctgatttaaagccytaattcaaaagtttatggaagctgttcacaaatgtcataatgttaattactgagaattt

SEQ ID NO: 855503 - DNA, 528 bp, Homo sapiens
cttatacttccagatactgaataatgggtrttacatttgtgttcaaatttctactataattttttgtctgcataattctgtgaaaagtgtacttcccaccttccttgaccaaattccatgttttgaacttcctttttctatcctctgaatttgatcctaaccaaatgtgtttcttgaataacttgtgtacaataaatattgcgttgttaaattagggaaataatatgggatttaaattttaattaaggcaaacatctgagccaaatgttatgcagcttattaaagtaatatttatgaactgattgtgggataacagcagttaattactgcagctcacattgtaaaaaatatcaaagtctaagctttctataaatcataataatgaattttattcactcattcattcactctcttgcttactcaatttaaaaagactgttttctataatgaaatgtgctctcttaacattaaaatgagcgattgtaatctagggttacctcatgcttatcaaaagcactatttaactct

SEQ ID NO: 855504 - DNA, 510 bp, Homo sapiens
accattaatttaatctctacagtggcagccctgtgaagttagtattattttccaattttattgccaaggaacctgggacagaatgtaaaycaaggtactgtttccttcattgagaaagtctgactttggaaaaaaagtcagccaagttaagtagtgtgttgagtggcgtggctcattttattttctggtgcaagccccttatctcctcgcagcctcgtacagacagtttgggatccacacttggagtggcattggcttagaaaaggtcaactacagccaggcgtggtggctcacacctgtaatcccagcactttgggaggctgaggagggtggaccatttgaggtcaggagttcaagaccagcctggccaacatggtgaaacctcatctctactaaaaatacaaaaattagccaggcgtggtggtgagtgcctgtaatcccagctactcaggaggccgaggcaggagagttgcttgagcctgggaagtagaggttgcagtcagccaagat

SEQ ID NO: 855505 - DNA, 510 bp, Homo sapiens
accattaatttaatctctacagtggcagccctgtgaagttagtattattttccaattttattgccaaggaacctgggacagaatgtaaatcaaggtactgtttccttcattgagaaagtctgactttggaaaaaaagtcagccaagttaagtagtgtgttgagtggcgtggctcattttattttctggtgcaagccccttatctcctcgcagcctcgtacagacagtttgggatccacacttggagtggcattggcttagaaaaggtcaactacagccaggcgtggtggctcacacctgtaatcccagcactttgggaggctgaggagggtggaccatttgaggtcaggagttcaagaccagcctggccaacatggtgaaacctcatctctactaaaaatacaaaaattagccaggcgtggtggtgagygcctgtaatcccagctactcaggaggccgaggcaggagagttgcttgagcctgggaagtagaggttgcagtcagccaagat

SEQ ID NO: 855506 - DNA, 657 bp, Homo sapiens
aatcatgctggatccacctggccactctctaactgggtatcctggcgtcttccaatcgttagtcctctaatatctatcttcctcctccttttatttaggccttrtgtcttcccaattaaactctcaattcctatgaaactgcatccaggctatcactaatcactctatatgacaaatgctgctttgaacagccccacagtatcaccccttaccccaaaatcttacttcaatctaatctctcccactttaggttcccacaccgccccaatcctgctcgaagccaccctgagaaacatcaccctcacccctccataccgcccccaaaattttcaccccaagttttcactactctttctcgttttatttcttaattattaatataaaaagacaagaatgtaaggtcctctgagctggccgtaccatggtcaagccattgtgacattcccctgcccttgtgataatgtactctgtgatattccccatccttgagaatgtactttgtaacatccatcccctgcctgcaaaaaattgctcctagctccaccgcctaccccaaacctataagaaccaatgataatcccaccaccctttgctgactcctttctcagactcagcccactttcacccaagtgaataaacagctttgttgctcacact

SEQ ID NO: 855507 - DNA, 505 bp, Homo sapiens
aggaggtgaaagatctttataaggaagactacaaaacactgctgaaagaaataatagatgacacaaatggaaacacattccatgatcatggatgggtagaatcaatattgtgaaaatgaytacactgcctaaagcattctacagattcaatgcaattcccataaaaatatcatcatcattcttcacagaatgagaaaaaactcctataatttatatggaagccaaagtgagcctgtgcagccaaagcaatactaagcaaaaagaacaaatctgaaggcatcacattaccccactttgactgtactataaggctatagctaccaaaatagcatgagaccagtataaaaacaggcacatagaccaatgcaacagaatagagagcacagaaataaaacgaaatacttacacctacctgatcgttgacgaagcatacaaaaacataaattgaggaagggataccctattcaataactggtactggaaaaattggcaagccacatgtaga

SEQ ID NO: 855508 - DNA, 525 bp, Homo sapiens
agacttacctccctcaaccagccatttgtcctgactctgtgtataagctgatgctcagctgctggagaagagatacgaagaaccgtccctcattccaagaaatccaccttctgctccttcaacaaggcgacgagtgatgctgtcagtgcctggccatgttcctacggctcaggtcctccctacaagacctaccactcacccatgcctatgccactccatctggacatttaatgaaactgagagacagaggcttgtttgctttgccctcttttcctggtcacccccactccctacccctgactcatatatacttttttttttttacattaaagaactaaaaaaggaaaaaaaaaagcctagggcagatacaatctagtaaaagaaaatctttgatataccaaagtgttggataacaaaggctagaaaattcagataatttataaaggttaactatacttgtgcttrtaaatgtgcagattctacaatatttttccatgtcattctaaaagaatcttcagaaagaaa

SEQ ID NO: 855509 - DNA, 594 bp, Homo sapiens
tgcagataactttcactgtactttttttttttttttttttggctcaagggaagtaacctgaaattgtgcaactttctcccttctgtgccacactaggaaaggagtgaggcaagggtgtataarcatgccacaaattttcctaccattttccatgtgactttttcttaaatgagtgtttttacggttgctgtaaatctttgaatagttttgagagttcctgtaaagttttttatttagactattgttgtatatttgatgtttatatgtggtaacaagagtctgaagcttactctcaacttagttttttttaatgtaacataagattttgcatagttaagacatatctcattctctagttatatttttttcttaaggtataaaagcacttaagtagagcaaagaagtctcttaacataataccttggttggggcaatatagattgctagcttctttagtcttccctatgaaacacactctaaggagtgcttatctagttagatctatacatatatatgactgtaatctcttgagatacttggaatcaagtgtttttttcataggtggagtgttcattgctgcctatttggaactaa

SEQ ID NO: 855510 - DNA, 355 bp, Homo sapiens
ctctgctagtcaccagacaggatccccccagcttgggctcacagtgcagctgccccatgccaggctgatcatgctaattgattgcagttctgcatctttctgcaatggagccccaagtgacaagaaaagaccttgagccacagggtctccttccctgctgcttccaagctggggaagtaacataaagcctatgatcatttcagaactatggtgtgcagcctggatgcaccaagccaagatctgcagygagcactcaggtgggagaggagcctacactgacattcaaaacattgagaggaagcatagctgcaacccatgaggaaatacggaggagccacatgactgagcaggagcc

SEQ ID NO: 855511 - DNA, 540 bp, Homo sapiens
aataaggggagaaacagtttgaatatggccaaaaaaaaggaagagattaataccacttccaggaccagtatgagagttctggaagaaaatactaatctaaatgtttagatatttagtattttagtagagcatgtaggaaaatcagtattctccggagacagtctggataccattatgttatgaacaaagagaaatctagggatacaggggattttgttaaatatgaaccataaatttcagagaacagagtggaatgtggataagaagcaggtgtaggtgaatgaaacagaatagaaaatacatgtgaagattagactacaagacaacaagtggcacctggaaaaaaccgtgagtctcaagagcataacttcattaattgtgatttgaggcattcagtagtgtgaaactggtaatgttctgtactttgcaacagatggaagctggagttacctcttractgttgacaacagaggtgaaaatatcttgtaaacaatgtcttagttccaatgtgggaaacctctgttgaacctggaaccattc

SEQ ID NO: 855512 - DNA, 597 bp, Homo sapiens
tcatagctcactgcagcttcgaactccttggctcaaggatcctactgccttagcctctggagtataatttttctcttgaaaggtttactttccaaatttttacaaagarcatggtctttttgttgttgtttgtttgtttacaatgagaacaacaaaaattaaattggttttgaaagaattgactgaaagtctacccaaagaggaaaagacaatttaggattccatgccaccttggccaagaaaactccttgaaaataaaggtggttggagatgtcattgttcttttcagctcaaggcagccagagaaatgtggaggagagactataggggtgaagtggttctaggttcaagttgagctgaagctggagtcctctccttgtggtcttagcatatgcccctctgagtcaagcagccaccatgtctcaaggaaagcaacacatgtcacaggagatttaacaggctcaaagaccaggaggcacaaatagcagccagttttcaaaattgtcaaaatgcaagctgatcctctcactcctggctcaaaattcttccatggcttcccatctattgcatctagaataaaatccaaactctttcaga

SEQ ID NO: 855513 - DNA, 624 bp, Homo sapiens
catgtttgcgccactgcactccagcctgggtgacagagtgagactctatctcaaaaaaagaaaagaaaaaattttgaataaaaatgggcacaagatttaaacagacactttaacaattaagatggtgaatggcaaataagcacatgaaaatatgctcaacaccattcacagttgtggaaatggaaattaaaatcataatgggataccaccacacacctagtagatggctaaaattaaaaagaccaaccatatcaaatcttggcaaagatgttgagctacaggaactcttatatactgctgatggtaatgtgaaacagtgacagaggcaggcggcagacaaatgcctaggcagatcaggaagggtccctggagaatctctgacccaccccacaagtgtttataccagatgtttttgtgcagataagggaacctgcacagggtcttgcctgggcatgctcacagtggactggaggcccaaatgcactgtgggaatggggtagagctaccaggaattcaggccctatgcagtggaggagcctggtctcttcagctcatgtgtggtggcctggtattyagtctgtgaggtgagagcctgctggtggaaccccctctttttgctgacag

SEQ ID NO: 855514 - DNA, 635 bp, Homo sapiens
ctgtgttatctctaaatcttattctgctgattccttttgtgtccagaattggtaggtccttggtctcgctgacttcaagaatgaagccatggaccctcttggwgagtgttacagttcttaaagatggtgtgtccggagtttgctccttctgatgttcggatgtgtccggagtttcttccttctggtgggtttgtggtctcgctgacgtcaggagtgaagctgcagacatttgcggtgagtgttatagctcttaaaggtgatgcgtccggagttgttcattcctcctggtgggttcatggtttctgtggcttcaggagtgaagctgcagaccttcacggtgagcgttacagctcataaagggagcgcagacccaaacagtgagcagtagcaagatttattgtgaagagccaaagaacaaagcttccacagtacagaatgggacccagagcaggttgctgctgctggctctggtggcctgcttttattcccttatttggccccacccacatcctgctgattggcccattttacagagagctgatttgtccattttacagagtgctgattggtccgttttgacagagtgctgattggtgcgtttacaaacatttagctagacacagagcgctgattgg

SEQ ID NO: 855515 - DNA, 604 bp, Homo sapiens
attttgtacttcaacctgtaactatttcagtggctgccttcagaatcaacaaatttgagataacttttaatttctgcatccattgtggagaagaatcattcatatcttcacccattatttctggcrttccttcagaatatttctagcagaagaaatacaattttaaataccaaagtcaagttttagaaaaatgaattctacttttatcaggatttgattggcattatcaacagtattttcaaaaagaaaattgtgagtttgtgttaatgaaaatgtatgctaatgtctttttaagaattatttgccattatttttctctttagattgttatactactaaaagtaatcaataaaatctattgttacctgtagaatgctcagataagtactaggtatacatggctaattaaaaaatgccatttgatgataatagtggtgatagacataatgataaaatacttgttctttcagatgactgacttatgctgaaatgatatattcattcaatacaatgaatattcaatgcaatttaataaatattcattggacacctgtgctaggccctagggatattaagatgagaaagattcagtattttgggagat

SEQ ID NO: 855516 - DNA, 631 bp, Homo sapiens
ttattgtttaaattgacgaataaaaattatrtatatttatgatgtacgacatgatgttttgatgtatgcttacattgtggaacagctaaattgagctaactaacatgcattctctcacatacttatttttcacgtgtggtgagaacacttaaaaactaccgtctttggccgggtgcagtggctcacacctgtaatcccagcactctgggaggcttaggcgggtggatcacctgaggtcaggagttcgtgagcagcctggccaacatggtgaaaccctgtctttactaaaaaatacaaaaaattagccgggcgtggtggtgcgcacctgtaatcccaggctgaggcaggagaatcgcttgaacccaccaggcagaggttgcagtgagccgagatcgcatcactgcactccagcctgggtgacagagcaagactccatctcaaaacaaaacaaaaccaaccaaccaaacaaacctcacaaaactactgtctgcagttttcaagtgtgcagtatattgctattaactgaagtcaccgtgatgtagacttcttgaacttattctgcctgtctaaatgaaattttgttttctttgaccatcgtctccccggtccccccgctctccagtccttggta

SEQ ID NO: 855517 - DNA, 631 bp, Homo sapiens
ttattgtttaaattgacgaataaaaattatgtatatttatgatgtacgacatgatgttttgatgtatgcttacattgtggaacagctaaattgagctaactaacatgcattctctcacatacttatttttcacgtgtggtgagaacacttaaaaactaccgtctttggccgggtgcagtggctcacacctgtaatcccagcactctgggaggcttaggcgggtggatcacctgaggtcaggagttcgtgagcagcctggccaacatggtgaaaccctgtctttactaaaaaatacaaaaaattagccgggcgtggtggtgcgcacctgtaatcccaggctgaggcaggagaatcgcttgaacccaccaggcagaggttgcagtgagccgagatcgcatcactgcactccagcctgggtgacagagcaagactccatctcaaaacaaaacaaaaccaaccaaccaaacaaacctcacaaaactactgtctgcagttttcaagtgtgcagtatattgctattaactgaagtcaccgygatgtagacttcttgaacttattctgcctgtctaaatgaaattttgttttctttgaccatcgtctccccggtccccccgctctccagtccttggta

SEQ ID NO: 855518 - DNA, 611 bp, Homo sapiens
tgttgcaaagtgactttcaatttggctcttcaccatgtgactrgtgattagagtttttggtttaggttaaggggatttgatttgatttggcatggtccctttttaattttatgtatgaggcaaataactgaaatgtccctgattgtcataagtgaaaaaatatcattaaaatatttgaattttgttcaaggagattaatctctataaaccaatgttttgtattccctaattagaattatggtagtcaccagtatgatcaatgctaagtgtttatttggtaattaggaagtgcaagctctaaattttgataagattgatgaaatggcctcttctcatattttcattatgtccgtataaacataacttagaagttggaaatatgaattttgtctacataacagtggacatgctacaacaaacaaatatatagctacaaacaaagctatatatttacattgatatccccttgattatttttctcaatgagcagacattcaagagatttttttcccccacaaaatgtgatgtgaaacatctacaatgtatacttgccaagtgcataactattaacttactccaggtaccagatggtcttattaagatactaatta

SEQ ID NO: 855519 - DNA, 597 bp, Homo sapiens
ccaaatgagtcctcttgccctttggctggaaacacatcacacactgtgccaacctcaacatggggagagccctggcccaaccctgtcacttggtcatccctagcactgccaccattctggaaaacaagctgaatttccaagaaacctcagaggcagcagttagaaccactaaaacctgagcaggtaatgacagcccctgacaatgtgactaaggaaaaaaatgactacataagcttagaagccgtcttctgaagcaagcttaggacggacccaagagagggaaaaggtctaacggaccagccagtacaggctggaaggagggtgtgtccataagtgattccagaaaatcagaggaacatagcactgggctcagaaacagcagagctggccctgtaggctctggtacccagatgtcctggcctaaattcatccctcaccgcaccatttatctgtcatgctgggtaggcagttgtgrtctgtgctattctcagagctaattgagtgtgctggtctcatttgttagaattactctggtgagaagaaagaggtgtctgtctgttcatctttggctggaggatgctatcaaccatctttggt

SEQ ID NO: 855520 - DNA, 597 bp, Homo sapiens
ccaaatgagtcctcttgccctttggctggaaacacatcacacactgtgccaacctcaacatggggagagccctggcccaaccctgtcacttggtcatccctagcactgccaccattctggaaaacaagctgaatttccaagaaacctcagaggcagcagttagaaccactaaaacctgagcaggtaatgacagcccctgacaatgtgactaaggaaaaaaatgactacataagcttagaagccgtcttctgaagcaagcttaggacggacccaagagagggaaaaggtctaacggaccagccagtacaggctggaaggagggtgtgtccataagtgattccagaaaatcagaggaacatagcactgggctcagaaacagcagagctggccctgtaggctctggtacccagatgtcctggcctaaattcatccctcaccgcaccatttatctgtcatgctgggtaggcagttgtgatctgtgctattctcagagctaattgagtgtgctggtctcatttgttagaattactctggtgagaagaaagaggtgtctgtctgttcatctttggctggrggatgctatcaaccatctttggt

SEQ ID NO: 855521 - DNA, 589 bp, Homo sapiens
gtgacggggttgtggttttaatatctgaggcaagaagaaagaatttagtgcaagttaggattgatgtgggtaacatgatttcaatcctttattaaatgagatacttgttaacagcataccattatagctatttgattaacattttctattttgggtcatattttaagtactatcagccatttgttgtgggtgagcatatcagacatgattcttctaattatttgaattttcctcaagcctctttgcttttgaatatgccttctccatggtctgggttgtcctttccaaagatttaacgttaaaaaaaaaacttactcattcttcaagatgcacttctaattatactattgagagtaaattataaggtggaaaagtgacaaaattgtattagtgtgctcaagaacaaacagtaataattaggctagtcaaaatttgagaaaaagacacataataaagtagatgtgttttatattaagttgtgaacaatcagacaaaatgtaacagttgattctttggataagtttaacacagaagcataattctttstgtgtgtgtacacttgagagaaaagtcaattatcattaaggtt

SEQ ID NO: 855522 - DNA, 642 bp, Homo sapiens
cataactacttgctccaggaagttyttgcacaagaggcaaggttgcacatcatcaataactttactgtttcttttagaaaattattggaaaccattttttgggcagttttctcatctaggcaatcaagtgtctaattaaaatgatagtttgcacttcagtataaacagtttacttaaaatcacaaaatcggctttttaaaacttgtcacagaacacttttctcacaatcctaaaatattgtcttacaccttgtcaaaaacaaacccgtttctttcctttaaaccacttgatctcagaccccaaatccctataagtaaccttaactattttctctcttttaacatagtactaaaatatctcaagatggtgttctcacttgcttcagcaagttaaataaacagcttttctgattgatggggttctccagtagtttacacgaggaagtcagtatcaacaataaagacagagaaatatgctgagaagacatagcatactttggtcatgtgtctgagcctttccaatagactggatgggagatagaaagatagagttatcagtaaaaagatgatcatagatgaagaagatgaagaagaaaatagacaaaacaatgaaacaatgtaaccttctggtgaaaacatgttg

SEQ ID NO: 855523 - DNA, 600 bp, Homo sapiens
ccaagacccctaaacattcctttcaaatcttgacwcttaaatggtgacctgatgaaatgcttgcaactgcaacatagaaacaccagccaccccatgctgcctcacatacacttcttacttggggagtgagagaagattggcctccagatctggaatccagaatgtacagctggggtctgggccaaatatcctcaaaaatggaacaagatctgaaaataccatcccattctctgaacaggcagacacaatataagaaagaaatgaatcaagccatctgtgctttgttattttttttccaaattttccaaataggtaagtcagtcctcaatctctgttgatgagaatttggataatttggaattctatttgaagaattttgaaaaaaaatacagcacagatggttctacaaaagaagtcctagttaaacaagattgagaaggaagaaagggagagataagaggtggctcatttcactaaatactttgtatttgcagcaagatgtcgatctggaggtttctattgaaatgtaaaattactaaatattggatgtcaaaacagggtctaatacagacaacagtctagataaatcaaagtaaatac

SEQ ID NO: 855524 - DNA, 600 bp, Homo sapiens
ccaagacccctaaacattcctttcaaatcttgactyttaaatggtgacctgatgaaatgcttgcaactgcaacatagaaacaccagccaccccatgctgcctcacatacacttcttacttggggagtgagagaagattggcctccagatctggaatccagaatgtacagctggggtctgggccaaatatcctcaaaaatggaacaagatctgaaaataccatcccattctctgaacaggcagacacaatataagaaagaaatgaatcaagccatctgtgctttgttattttttttccaaattttccaaataggtaagtcagtcctcaatctctgttgatgagaatttggataatttggaattctatttgaagaattttgaaaaaaaatacagcacagatggttctacaaaagaagtcctagttaaacaagattgagaaggaagaaagggagagataagaggtggctcatttcactaaatactttgtatttgcagcaagatgtcgatctggaggtttctattgaaatgtaaaattactaaatattggatgtcaaaacagggtctaatacagacaacagtctagataaatcaaagtaaatac

SEQ ID NO: 855525 - DNA, 600 bp, Homo sapiens
ccaagacccctaaacattcctttcaaatcttgactcttaaatggtgacctgatgaaatgcttgcaactgcaacatagaaacaccagccaccccatgctgcctcacatacacttcttacttggggagygagagaagattggcctccagatctggaatccagaatgtacagctggggtctgggccaaatatcctcaaaaatggaacaagatctgaaaataccatcccattctctgaacaggcagacacaatataagaaagaaatgaatcaagccatctgtgctttgttattttttttccaaattttccaaataggtaagtcagtcctcaatctctgttgatgagaatttggataatttggaattctatttgaagaattttgaaaaaaaatacagcacagatggttctacaaaagaagtcctagttaaacaagattgagaaggaagaaagggagagataagaggtggctcatttcactaaatactttgtatttgcagcaagatgtcgatctggaggtttctattgaaatgtaaaattactaaatattggatgtcaaaacagggtctaatacagacaacagtctagataaatcaaagtaaatac

SEQ ID NO: 855526 - DNA, 563 bp, Homo sapiens
ccacccttgagaatgtgcaggaatttattggaggacagtggtacaattgctataggatgcacagcaagggctcaagccattcttcttgaatattctatttgatctcaataagacttacctgtacccaggaggcagacatatgaatcatgggctaggaagtcctcttgtccacttcttagactgtaacagcttagattttacttcactctcagaactcctctttatacccacccatcccacctcggatttatacttctatattctgtcatctgaaacatctgttttggtaaaaatatctgattaggtaccttttaaagtatttctaacaaacatcgtctcttttttattaaacaaatatgtgttatgtgaattgagaattattgccaacacctcggccagttatataagtgttgatctgtgaatcaaatttctgatttttattgttgataccctatttkcaggctttgcttgggctattctggataaatatgaagggagcatcagggtttgtgttaaggtctctatatggttaaggttcccaaaggaaggagaaaaatacgtgc

SEQ ID NO: 855527 - DNA, 623 bp, Homo sapiens
catcttggctgctccttactgtacattggctggcaaaaaagaagagaagatgaagccgccattttgaacacgaatggcacaactgctggcatctatgcctgcagctcgaattcacaggctgatttttgttagaaaagaaaatgatttggggctgcttttcattaaaagcaaaaccttaccaaagactccagtaccctcactatttgcctaagtgatttcttaactcctatatcagaaccactcttgattcttcctagaaaacgtctcttcttgtttaagttagagccagtttttagtacctgttagcaaaggtgggagaccatgctggtaaaggaggtaaagagatgaagtggttacttttttttcctgatggttcgcagatgtgcttttctgaggagtccaatgaaagacaggctattttatcattatgcttttgaagagctcaccctcgcagttggaataacatgaaaattgtccaggtatcacaatcwactttttaatattttctagctgcctatgacaaaatttaggccagtttccttctctgtgccaccacagctgagcatattactctagaaagcgaatgtgagcaacgcagagctgcttaaaatgaggtggtgaag

SEQ ID NO: 855528 - DNA, 609 bp, Homo sapiens
tgtagaaagttgttacttaaaactggagacttggtttttgggactccatcactgatgttatgtccttggtggataatcttagttctcttggggtctctttcagtcgttgyattaggctttgtaatctatctatcatatgtaattgcctgtatttcactgaaatagacttctttgaatacctcaaaattttaatagccttattctcatatcaagttggtctttttattttgataaatatccaatatttctgttcattaattttctgctactgaattcatctatggacaggcatgaatggtctttcccttcgtattttaaaaatgagatctgcaagaatcactataaacacataatttgtgctgagcttggttgttttaatctggggtgttactttatggtaacttaagttaataaaactttgttttaaaaagtattaatatcagatttcctccaaattataaaatcattattaatatcttactggcaatatataatgatatcttgttgacagatttggaatagaaaatgactggaaatctagactcaaagataccaacaaaatatctatgatagcaagctgtctttggtacttaccctgattttcaatgt

SEQ ID NO: 855529 - DNA, 535 bp, Homo sapiens
ctgaaacaagcaccataatttttaatatagtgagtaacataagcgttcaagtggagattgttaaatgataccatttctgaggtccttttccagaactcatgtaattcctttattttttcacaaatactgcttaaaagccaggcttgctttcctgccttaaggaggtgcagtagaacttagaagccaccagatgtcactattgcagatagcattccaaattccccagcttgcatctgataccatcagtgcagtacgagttgacaggctccaagaagtcatctaaactgtccctcctgacaggaagccacagtgaacaggtgacttggatggtttacttttaatgaactgctggagaagagagcaaggtttataaaaacacacatctctgtgggctacttgcaagacagtcaccaaaacaaccttgcctctaaagtctctaagtctctsaacatctgtgaatctgtgattataagccaaatagagatggtctctgcccaccactcaacatttgtgtgcttttgtttttgttaagatc

SEQ ID NO: 855530 - DNA, 679 bp, Homo sapiens
ggcccttgatgctcctcgagtcccctccaggaaaagaagctggatccattgctgacacaattgcagagaaaaggtcaatgtgctgccagaagccagacaccaaatcctcatggggtctttgtgaggaggtgtagagtagccttgggaaggagacttgaggcaaactgggccctgcgtctccagggctgctggcgcctggccctcaggaaagaaactctccctgtcaaggaagcaggagctgcagctatttgataagcttttaaaatcaccattcttcttaatcatatattctaatatcctgtatctgtagttacttccctgtacttccaagtctggaacactaatgttctcatttctgactcataaaaccatcattttcagctagaaagaatttaaggtaatttagtcctgtcactttgttttgagaaattttagcaacttcataactgaaaaaaggcaagtgacttccaatgagtagcggagctgagatctggacctttcacctttctcttcaagtgggttgtgaggccagcaaattcaaaacccacagaatagagcatggagagtggggagkggggcatggttgccttgctgctgtgaccctccggatttaccgggacggttgagcaatgtgtagtgatgatgttaacaggcagttcaatccagtgatttacatttg

SEQ ID NO: 855531 - DNA, 630 bp, Homo sapiens
gcagaggcaccctgaacacgctgtcccccaatgccagctacaagtggatccagctaagagtgcsgagggagaagccgtcctgcagctctgagatccacgaagtagaggtggtagtagcaccggaccccactgctttggagcctgcccaatcgaatttgggagccagcgaggttcctgactgcagcacattggccaccagaagacacacaaaggtagggaggcttcggataccacttaagtttaggaactcctctggttgctgctggcccaaagttcccccagaggcattcaaggcctggggctcctgcctcctgcccctagtttgctatcctaagcccaggcctcaagcaggaggactggctctgcctcacctccccaccccttcttttttccctgctgtgtgcagccagtttctttcctcctacctaccccaatgcccagttctgggcactccacttcttcccctaggctgtctgaaaaccacatttttaggatacaaaatgtatgctatagatttcattgctgtagaggaaatgtctgacagctgttgtatttaaacttaagtagccacactgggactcataatttcatatcttgagttctagaccagagccctctctcctaaagcaa

SEQ ID NO: 855532 - DNA, 594 bp, Homo sapiens
aaaaccctgtatatctcaggccaaataattttttacytttacaaataggtgagaaaagaaatataattgttgcactgcctcagttactttgaatttcagtttaaactcaattgaaaaattaattaacttttttgatgaatgttgatgtctgtgaaaattctgagcctacttggattctcttaatattattactgttctttagaatttaccagaaacttcaaaccatcacctttcctaaagttgatttctacagaacaagcaaagaggagacttagtatttttaccctagccctgagaaagaaattattacttgatatggagaaagatcactaaatgatttaaacttttaatttcaaattgtaagttactagtgttatattataaaaatttaaagaaagatgttctggttagtagaatttccacgagaatagattcacaagtcactacaaaccattcacatatgattcatgagaagatttgactgtggctactgagagttattgcaaggacctagatattgtgatgaaatggtaacaggttgtggattgagaggtatatgctattttcttttaagtttattttattttgcagaag

SEQ ID NO: 855533 - DNA, 587 bp, Homo sapiens
gcatctgagggaaaggaaaatgaggctcctaagcaaaaacactcaaggaagaaataatctggcaaatttagagaatatgacaatggtatgttagttggatgggagaagttagtgtgagctcaagagtgttgggagtacataacattagagagtctgaagtagcaatcatttattcagtcagtgtgctagttttatggagtaaataaaatagaaaatgtccctaaagacacagcattttcagtctgctgtgaaagactgacattaaataactgattttacaaatatgtgtaagattaaaaatccttaaaaaggaataaaaaatcagaaaaatgtgatgacgaattcacaagaaagctaatttaaagagtgtaaaggaagtcatttttgacaatgtgacatttaaactaagacccaaatatgaaagaattggccagaattaggtgaggaggaggagaaggaagggagtttactttctgactttgggctatatcctgtggcttsgctgagagatggagtagggaggttgcacagtcatagttgtgttttgaaaaggttatcttgggagtagaaaggataaattcaaatga

SEQ ID NO: 855534 - DNA, 538 bp, Homo sapiens
caaaactgtcaacttatttaaaaagacttagtaaaaacatgtttctaaaatcatttgtayttaccttgatgagaaaaaatcaagtataaatattaacgggaattataaaatcctagaactgcttttccttccattctacaaagagttaaccaagatgttgtgtatgcctttacaattctcaaacattttttgatgccactaatatataagtccacatctgccaaaatatactttttttataactgtccacgtttgaacaagtgtctgatattccatgtgtaagtttttaccttgctttttataactatcatgtttataggcttataaataaatattgaaaccataatttttgtttattttggttacagtgtttactttttaaaatatgccaatcagcgttaaccatccttctatccattaatttgcatttctttcatatatttttgttttatgataatctctgtaaaatttctgaaaacattttgctagattcattcaagcctcttctcttcaaagcaatacaagcacactgttacat

SEQ ID NO: 855535 - DNA, 538 bp, Homo sapiens
caaaactgtcaacttatttaaaaagacttagtaaaaacatgtttctaaaatcatttgtatttaccttgatgagaaaaaatcaagtataaatattaacgggaattataaaatcctagaactgcttttccttccattctacaaagagttaaccaagatgttgtgtatgcctttacaattctcaaacattttttgatgccactaatatataagtccacatctgccaaaatatactttttttataactgtccacgtttgaacaagtgtctgatattccatgtgtaagtttttaccttgctttttataactatcatgtttataggcttataaataaatattgaaaccataatttttgtttattttggttacagtgtttactttttaaaatatgccaatcagcgttaaccatccttctatccattaatttgcatttctttcatatattwttgttttatgataatctctgtaaaatttctgaaaacattttgctagattcattcaagcctcttctcttcaaagcaatacaagcacactgttacat

SEQ ID NO: 855536 - DNA, 521 bp, Homo sapiens; identical to SEQ ID NO: 848208

SEQ ID NO: 855537 - DNA, 556 bp, Homo sapiens
gtaattttttggttttcactggacaaagtgcttcatccttgtttatcctccactccattttactttatgtatgtatgtatgtatgtatgtatgtatgtatktatttatttatttatttagagacagtttcactctcgccccccaggctagagtgcaaaggcacgatatcagttaactgcaacctccacctctcaggttaaagagattgtcctgcctcagtgtcccgagtagctgggattacaggcgcccaccaccacacccagctaattttttgtatttttagtagagacagtgtttcaccatgttggccaggctagtctcaaactcctgacctcaggggatccacctgccttggcctccctctccacttctttttaatctttatttgtcatgccacttgattcccatagtcattgtgggctttttttttctctctgaacttctaatctatctacatttctttgctactgaagcagtttaaactgaatggcactttgatgcagttcaacagaattacataaggaaggctatcacccatgtgtcccatggtgtcatg

SEQ ID NO: 855538 - DNA, 612 bp, Homo sapiens
ctttttaacatgatatgatccaatttgtccatttttgctctggttgtctgtgcttgtaggatatactcaagaaatattgcccagaccaatgtcctggggagtttctccaatgttttcttatagtacttttatagyttgaggtattgaagtttttaattcatttgtttttttttaataagtgaagagataggggtctagtttcattcttctgcatatgaacatccagtttttttttagtgccatttaattaagagactctctttttcacaattatgttcttggcacctttttctaaaatgaattcactgtagatgtatgagtttaggtctggattttctattctgttacattggtttatgtgtctgtttttatgccagtaccatgctgttttggttaaaatagatctgtagcataatttgaagtcaggtaacgtgaggttcctctggtttgtacattttgctcaggacggctttggctactctgggtcttttgtggttccatatgaattttaggattgttttttctatttctgtgaagaatgttgttgtttttttgtcagggatttcattgaatctatagattgctttgggtagtatgcacattttaacaata

SEQ ID NO: 855539 - DNA, 619 bp, Homo sapiens
cttcaccaaacaaaaggagtatagataatagacaggcgaaraaatttatgtccatattatttaataataactgttgtgatctttatgcagctgaaaaactgcctccctcatataaatcaaattgttgacattataacttaatttgtacacatgcatattaaaaagaaaattctataaggaatgtacatttctacagaaacatatctcaagttctgcatgtgctgcatttacatcttagaaagtaaagccttctgtgtaactgaatcaacaattctgattcaatcaatgttgaaagaagaatagaggttgctcattttgaagatttgtataatactttgatttcaataataattagaaataaagatcaactagcagccactctacgatgaatagtgtatcaaataatcagaaagtcagcatattgctcatgaatactcacaagcatatatttttaagaaatcgatttattacttattacccatcaaaaaaagctatgactactatagtctcaaagtagcatgaggaatgttgtcagtaagcttgaatataaagcaatgatacaacctaaaatatactcttatttctctacttgaaacatctttaattctatttaatttct

SEQ ID NO: 855540 - DNA, 617 bp, Homo sapiens
gccatatgtggaaatgtggaaaagttaaattaaaagaactggaggatttggaagcacaaataaacaaggcaaagcagcttaytgggtgaatcaaattaatgataaacatcctacctgtgaaataactattcagggaaagaaatttaaaggtttggtagatacaggagtggccatttcaatcatttctctacagcactggccatccgtgtggccaattcaacccactcaatttaacatagttggagttggtaaagccactgaagtatatcaaagtagttatattttgcattgtgaaggacctgatggacaacctgggagtattcaaccaattacaacttctgtacctataaatttatgggggagagatttattacaacaatggggagcacacgttctaattccagagcaattatacagccctcacagtcaacatatgatgcatgaaatagggtatgtccctggtatgtgactaggaaaaaatttgcaaggtttgaaggaaccacttcaaacggaaagacaaagttcccgccaaggcttaggatatcatttttgattgttgccattgttaagcctccagaacctatacctttaaaatggttaactatcgggggaaattc

SEQ ID NO: 855541 - DNA, 366 bp, Homo sapiens
cacagaccctttgaaaaaggtgaattgctgctacaggctccacggacagccaaagaactgtgagtcggcttgttttctcagctgrgaggcttgtagcctaaggcaagttctcagcactgctcatgggctgcctggaaataaactcagtgcttctgggagtgagaccagccttctgggctgcaggttgcatgggagctgggtgaggtttgtgcctgctggctttcccctactcttctggtgacctgtgtgatgcagcagaggcagccataatccccctgggaacataacttcgttggccagagaactacacctccgtcccacgcagcaggtgcaacaagacccgctggaggaaggtctgagctcaga

SEQ ID NO: 855542 - DNA, 531 bp, Homo sapiens
attttaaaatgtgttacaaggcaacattagttaaaasagtatggcgttggcataaagacagacatatagatgaacaaaacagaatatagaacctggaaataaacccacacatacatggtgaactgatcaacattatggctgccaagagtacatagtggggaaataatagtttctttaaaaaatgatgctgaaaaaactgaatatctatatgcaaataaataaataaataaatatggatgtttataccatacaaaaaattaactcaaactgaattaaaaactttaatataagatctgaaatgttaacatttctagaataaaacacagagaaatatcattatgacattgatcttggcaatgatttattggatatgacaccaaaagcatagacaacaaaaataaaaatagataagtgggactacatcaaactaaaaagattctttacagcaaaagaaacaatcagccaaatcaaaatgcaatctacaaataaaagaaagtatttgtaaaccacatatctgattatggattaatt

SEQ ID NO: 855543 - DNA, 595 bp, Homo sapiens
ttggtgtgaaagcaaactacataaaaaataatactcagcracatattattcccccacttttattctttaaatctttttcacaatccccaatatttccaccctgttgccacctagcccaggttaggtaacttatctctttaatttctggcttgtccatctgcattatatttttgcacgataactactatatgaatattttcttatacaacctccttatgaaatatgctttctttctagatactttctgcatgttgtctttttcacttatcatatacctggaacttcccagtgtacactcataaagatatttctcattcttattttacaactgcataataatgcattttgaggatatactaaaattaattcaactattctcccatgtggaaatttttctctcatattttttaaaatcacaaacaactttgcgatgagtatcattgtgcatactcattttcatattgtctgatttatgtatttcaaggaaaattcctaaaactaaaatttcttggtaaaagggctaaacattgtagtctcctcaggcattgtcaaattttcctcctgaaatggtgtatttcttttctttcccaccaac

SEQ ID NO: 855544 - DNA, 572 bp, Homo sapiens
tcagtcacctggataaataatggttaaaatgattgagtagattgtgattagcaggtccgaggtggggcctaatgttctgcatttctttttttttttttttttttgagacagagtttcactgtggttgcccaggctggagcaccatggcacgatctcggctcactgcaacctttgcctcctgggttcaagcaattctcctgcctcagcctcccgagtagctgggattacaggcatgcgccaccactcctggctaatttttgtattttttagtagagacggggtttctccatgttggtcaggctggtctcgaactcctgacctcaggtgatccacccacctcggcctcccaaagtgctgggattacaggcgtgagccaccgcacccggcctgatgttctgcatttctaacaagctcccagatgatctctgtgcttctgctctctggactacctataagtagcaaggcctattgaastgaatattttggggaatggagacagagctaaagctactgatcactcactcaccctccctccccaccacacacacacacacacacacacacacacacac

SEQ ID NO: 855545 - DNA, 657 bp, Homo sapiens
caaggaaaataatcaaaagggatccatggaatatgaaatagagactttataaacttaattggaagataatcctgtctttctaattaccttcttagaatctagattttcttgatttgactgtagtgagaaaaatcccaccttaggaggcagggacattgattttaatttatatattgctatataatttagacaaatcatttagtctgtgatttgattgtatccactatacaaatgaattcataatctttcatttatctgaaagcagaaaactgatcttaaagtccactcctccaacagtaagatcaatgagctttcccttttcatttttgtagcatgctctaaccttagatagttgcccgtccaaatgtctagaatgctgattatggctagaattcaaaagtttaagtttctttttgcacattcatggaagttttagaccatatttttaaaaagctaacaaggcaaaaaaggaatcttgttaggggaaaaatatggaaaaatcaaaattgaactcagcactaactacaatatcatacattcatttatttatttaatagctctttattaaacaattactatgtgccaaaattacgaaaatgagcaaaacacacctggaacttrcccttgtagtatttcacagtggttaaggaaagaaaa

SEQ ID NO: 855546 - DNA, 532 bp, Homo sapiens
agccactgcacccagccatataaattaatttataatactttattttatacgcatcaagtatttaacctgagcacataacctatggaaaagcatggggcttccaagaaaataygaacttctagactcaaccatgatgctaactatgggggtttccttggaaaagtgacatatcaatctggacctcactttacttatctgcaaagggagcccttcaacaggatcatgtcccaggtgcctaaacccttaggaaaattgaatggctgtgtgtcagccgtgacatttgccaacccgtgccccatgcaaagttatgtctcaggctccagtgccagagagtcttcacgtagccacttcatttctcctctccatcatgagattgtgacagcccttttgtaacaacagcaccaaccccagaaacagcaggaaatcgagaatgctggtccttaaacaaaaacatccacatataaaagcctgccttggaaaaattaaggtaaacatcttttggacttgttgctattgacagtatgttttcaat

SEQ ID NO: 855547 - DNA, 634 bp, Homo sapiens
aaaaataactcttaaatttgttgattattttctattgttttatattttctatttcatttatctctgctgttatctttatttccctccttctgataackttgggcttaacttttttcctttctgtagttccttcaggtataacattagactgtttaatatatttcttctttttcaacatagatgttttttgctataaagttctgctatggtctgaatgtttgggtccctccaaaatttacatgctgaaatcctaagccccaaagtgatggtattaggacataggacattggagaggtaattaggtaatgagggtggtacctttattaatggaattagtgtccatatgaaacacaacctggagtgctcatccccttcccacccaacatgggagtctgcagcaaaaagacagccatgtaggaagtggcccttgccagacactgaatatgccagtgcctggatgctggaatttccagcctttagaactgtgagaaatttttgtttataagcaacacagttttttgctattgttgttacagcagcctgaatggactaagacaacttcctggttagtaatgactttgttgtacccaaaagttttggtatgttgtattttcattttcatttgtctcaaagt

SEQ ID NO: 855548 - DNA, 590 bp, Homo sapiens
cttcttcaaatcttttcaccagcgttttatagttttcattaaagagagctttcacttctttggttaagttaattcccatatattttattttatgtatggtgattgtaactaaatttatcagttgtaatagttttttttgtggagcttttagattgttccaaacataagatcatatcttctgcaaacaagaataatttgatttcttcctttccaatttggatgccttttatatctttctcttctagctaggacttctggtactatcttgaataacagtggtgaaagtgggtatccctgtcatgttccagatcttagaggaaaggctttcagtttttccttattcaatatgatactagatgtaggtctgtcatttatgtcttttgttatgttgacatatgtttcttctataccgagttttttgagggtttttttcatgaagagatgttgaattttatcaaatkttttttcagcataaattaaaacaatcacatggtttttgtccttcattgtgttgatgtgatgtgccacattgatttgcataagttgaaccatccttgcatccctgggataaaatctcacttggtcgtgat

SEQ ID NO: 855549 - DNA, 620 bp, Homo sapiens
tcctctttgtacctctggtagaatatggctgtgaatctgttgggtcctgggcttttttttgttggyaggctattaattactgccttaatttcatacctggctattggtctattcagggttcgatttcttcctggttgggtcttgggagggtgtatgtggttcaggaatttatctctttcttctagattttctagtttaattgcagagaggtgtttatagtattctctgatggcagtttgtatttctgtgggatcagtggtgatatcccctttatcattttttattgtgtctacttgattcctctctcttttcttcttgattattctggctagcggtccatctattttgttaatcttttcaaaaaaccagctcctggattcattggtttattgaagggtttttcatgtctctatctccttcagttctgccctgatcttagttatttcttgtcttctgctagcttttgaatttgtttgctcttgcttttctagttcttttgattgtgatattagggtgttgattttagagctttcctgctttctcctgtgggcatttagtgctataaatttccctctcaacactgctttagctgtgtcccacagattctgatatgttctgtc

SEQ ID NO: 855550 - DNA, 591 bp, Homo sapiens
attttacttgttacttcatatacaacttaggttaaagtaaaaaagagcaacatattaatattgaacatgtaagaatcagttaaggtagattgtctaagattgcctgtgtgaatatgtgatgtaaaaatacttatggatattatgatcaactgttctaactttacagcctacaaatcattttacccagtttcatttttgttctttcttttcttttatctattctacttctccttcccactttgaattgaaatttggaaaatttaacacaggaaaagatttctggataaggtgaagagtaaagcagccattacttggagcttttctcaacataatgttttactaaaccttgaaggaaggtgatgattacactaccttatatatttaactcctgtctatcttacaaactaattacctgtggagttgttactaagtgatcaatctaataattcaatttagttcttaaggtgaccaaaaatctgaactgtgctcaatttctttttyttgattgccccatatcataatcaaacaagttgttatgtataataaaataataaagattgccccccaaatactgtcagtaatgctcttctg

SEQ ID NO: 855551 - DNA, 555 bp, Homo sapiens
ctaacaatgacataaatatgacttcaaattyttttcttagtcagtagcataaattggtagggctaaagctgaagccaactccaaattctgagacctgctataaaacacaatgtgtgacgaacaatataattatttaaattatattttgcatggccatttgttaatgctagttctcacatgtctgtaaaattaggatttttaatatcaattaaatgaaggactttgttttgttcactgttacatctccattgcctagaacattgacatataaatatttgttaaacgaatgaatgaaataacattctgacaattgaagaagagattttaagaatagctgtaacacatcatacataaaaatgttaagcataaatatttgtaatatatgtaccgaaatttattgaccctcacatgtttggcagattcttaattttttcttactggctttacttagggacgtgcttccttaacacaagagaaagagaagtttgcccatgaacatgaagaaatgaagaacctagaagccattgttcaagaaataaaaccaactgccctcat

SEQ ID NO: 855552 - DNA, 470 bp, Homo sapiens
ctgctcagccagcatcatgatacatttacagtattaatttcaactgaatctgcaatgtctgctgactgaatccttttatgtttcatagtccgttggctctctagttctctacaatagttctttcagatctgtttttttttattttcctcaaacttccaatcctgttatttcaaagaaaataacaggattgttattttccttgaaaataacatttatttcaaagaaataaatatttctttgaggctattacatatattttttgttttcctcaaacttctgatctattgtttcaaagaaaaaaaatagaagctgttatataactttctgccacaggtaagaaattaaacacagagaggttatgtaaattggtcaaagtccatagctagtaaagggcaaagcaaatcagtgtgactctatagtcyaagctcttaacatctgcatttaacagtgtctctcactttatccatctc

SEQ ID NO: 855553 - DNA, 478 bp, Homo sapiens
caaaagcctaggctccatccttggctcctttctcaccttcactatcaacaactaattacctgtctacytctaacttcactggcactttcttagagcaagatgccaccatcatagatttcagcaacagccttcaaatgtgctccaattcaatcctgttctctagactgaagacagtgtgaataatctttccaaatgcaaacctacccaagtcaacctaccaactccttagttcaacactcaccaactctttcatgtttaattctttagaccaaaggttggcaaactcttttcatagaaggcaatatagtaaatattttagggcttgtgtgccattcagtgtctatcccagacttaattctgctattatggcatgaaagccactgtaaacaatatataaacaagtgggcatggctttgttgcaataactttacaaaaacaggcagtggctagatttggctcacagactgtactttgccaa

SEQ ID NO: 855554 - DNA, 263 bp, Homo sapiens
cacacctccaggacagtccagtctccttgacagcctccttctacgtggtcccaggtgtttctgggcactcagagtaaggaagamtagtgggtttaatgtttatcacctcaaagtgcagtgtcaggaatcccagggattctggactcttcacatacctccagggggcgggagtggttagggcagcgggggacagagggcaaacatccctcctcagatttcaactcctccagttttctgtgtgcttgcagggctagagtgagcgc

SEQ ID NO: 855555 - DNA, 405 bp, Homo sapiens
agcctttctcaggcgtctgccctatgtctctaagatccagctgatyttgactaaacaccttctatgcctagggctttccctatatgttattcaaccaacattcgctggaacactgtttattgagcagccacaatatgccaggggctgttctaggtgctgaacataacagcccaaatccctgtcagtgtggcaggcagacaacaaggaagtaagtaaaagcaatagaacgccaggtggcggtaagtacagcggggaaaaagaaggcagggaggaggacagggaggtttgcagttttaaatagaaagatcagagaaggtctcaccaagaaatcatttcactgtggccttgcaatgatcccacacaggccagaacgtgattcccaaatcacagataaggagggatagg

SEQ ID NO: 855556 - DNA, 648 bp, Homo sapiens
tcataacttattttagtactattttccttgggcggctgtaacaaagtaccacgaagtattgctgactgaatgccttagaagaaatgtattgtctcacaggtctggagactagatgtctgaaatcaagatgtcagcagggttatttccttctgaaagttgtgagaaataatcagttccatgccttttctctcatattttgtttgctgaaatcattggcattcgttgccatatggaagcttcatctcaatctctgccttagacgttttttgtttgtttgttttttgtttttgagacagtgtctcactctgctacccaggctgcagtgcagtggtgcaatctcggcttactacagcattgacctcccagatttaagcaatcctcccacttcagcctcataaatagtttgggctacaggtgagtgccactatgctcagctaatttttgttatgtttgtaaagatggggtttcaccatgttgcccgggctggtcttgaactcctgcgttcaagtgatccaccccccttagcctcctaaattgctggtagtgtttacatgtgttcttgtctgtgtmcaaaatcacaatcattctttcagcagagacacaaatcattctggattaggggctgccctaatgaatgcatcttaagta

SEQ ID NO: 855557 - DNA, 531 bp, Homo sapiens
acagctaaccaaggaggtgaaagatctctacaatgagaattacaaaacacggctgaaagaaatcggatatgacacaaataaatagaaaaacattccgtgctcatggattagaaaaatcaatatcattaaaatggccatactgcacaaagaaatttaaagattcaattttattcctatcaaactgccaatgtcattcttcacagaattagaaaaaaactattctaaaattcatatgtaaccccaaaagaccctgaataaccaaagcaatcttaaactaaaagaaaaaaagccagagacatcacattacccaacttcaagctatactgtaaggtgatagtgaccaaagtagcatggtactggtacaaaacagacacatagaccaatggaacagaataaaacattcagaaataaakctgcacaactacaaccatctgatcttcaatgaagtcgacaaaaacaagcaatgatgaaagcaatgaaactggacccttacttttcaccatatgcaaaaattaactcaaaatgcattaa

SEQ ID NO: 855558 - DNA, 671 bp, Homo sapiens
attcagtctctgcctcccaccaaatatatcttattttcttaacttgactctaactgcacatgctgccttttctttccttttgtgtctagaacatatttttctcctttggtctgactctactctgtaactcccccctcaacactttattgtctttattgacttttattgtctcctcttcatattagctagagtagaggtggggactttgtctcgcctctattcccatcatctgatatagtacctggcaaatgacaggcacttattaaatgcttgttggatggctgctggattgcatcattgctggttcagtggacgaagacttctgttttggggcttaaatttagtgacagttctgatgcaatgggttgattaaaatgctcccaaaccatctttttgttttgagaggcaggaatgtgatgtgactcatatgatccctgttatatatttttggctttctgttctttggtctagaagggatcaaagtgaagagcgtaagtttaagtatctctgtaatttaaggcaagttgtacattactggcttctgggtgttactaargaacaattgtgtggaactgttctatccttttgttttacttttcagtatcaataacatcagccatttcactgaatcattaaaggcaaaatgtgaaagggaaggggagcctttcatc

SEQ ID NO: 855559 - DNA, 586 bp, Homo sapiens
aagtgtataccacagattcaggcagggattccgtgaaggaacaacacctagacctaagacggcagctgttgcagcatccagttcatcttaagaatttcactccagcctgggcaacaagagtaaaactctgtctcaaaaaataaataaataaataaaaggaaaaaaaagaattttgatggttagtcacccaataaatgttctggttggccgggcrtggtggctcatgcctgtaatcctagcactttgggaggctgaggcaggtggatcatttgaggtcaggagttcaagaacaacctcgccaacatggtgaaaccccatctctactaaaaatacaaaaattagctgggcatggtggtgggagcctgtaatcccagttacttgggaggctaaggtagcagaattacttgaatctgggaggcagaggttgcagtgagccaagattgcgccactgcactccagcctgggtgacagagtgagactctgtctcaaaaaaaaaaaaagttctggtttttaaaaattaaaaaaaaaaaaatgatacaagacatgaagaacaataccagttagtattagaaaaactcagaaatta

SEQ ID NO: 855560 - DNA, 590 bp, Homo sapiens
gaccagcccaggtaacatagtgagacctgttgctacaaaaaataaaaaaactaagtgaacctggtggcatgcacctgtagtccctaatacttgggaggctgaggcaggaggattgcttgagcctgggagggcaaggctgcagtgaggcatgattgtgccattgcacttcagagtgagactctgtctcaagtaaataaatacataaataaataaaaataaaaataaatttaagaaaagagtgaaaacttgtgtttaagaaggaaaactccatgggaagcaggaccttgccagggcctaaagcagtgcttgctgcacagtgggccctgactccaagtgggtggcacatcctttgctgcgcctgtccatctcagtgatggtcacactgggtgtccatctccccagggagcagggccacacttaattcatctcatctcagtacagggcctggcacagcctctaaagaggcttggccactatttgtaggaaaaaatgcatttcttgttaatctcatgtgagcccyagttttgatgctgcccgcagctggtacagtggaaaagatggggaccatctttcagaccatcgtggactgg

SEQ ID NO: 855561 - DNA, 319 bp, Homo sapiens
gtgtcaaacagcaccttgccgaatggcactttccaccagttcccacctgctcactctcagcctactttccaccccttaaaccaatttatggcaggaataaggcaggcattagcaatcctgtcttacagatgaagaaatcagggcaaagagaggggaagtaacttacccaaggacacacagaattagcggcagggccattcgcctgcttgttgagccagtccctgmcctcagggggtcttttaattcagtggactccccaccttgcaccacacacagccctgccaccctgggcctgggtgagcagatgaacagtggtgag

SEQ ID NO: 855562 - DNA, 507 bp, Homo sapiens
caagagttggaaaggatcagagcaactattataatagaaatcttacacatgatatgtatgtcaattagtacaaccattttagaaaactgtsaatatctaagaaatctgaacataaacttaccctacgactaggtaattctacgccttgaaacccatacatatattcctcaaaagcattgtacaggatgttcctggcagtgctatatttaatagtcaaaacactggaaacaatgaaaatatccaccaacgggagagatggatagttaaattatggcacagtcacacaatggaatagacgacagcaaacaagcaaacaaacaaacaaaaaccctatcaatacttgcaacaatgtggaagaatttaacaaacattgttgaatgaaagatctagatacaaaatagtacatattaaagattgtcatcgttttacagtgatatcagggattgcagagctgccacctctcgctagagctggaactcaccggatcccgtgcccattgccatcctg

SEQ ID NO: 855563 - DNA, 553 bp, Homo sapiens
aagagcaggtctcactctcctttacaaatccgaagctaaggattaaaggatgccacaagatgaaatgtgagagagcttctcacccagtctgatcatgtgcacrtgaagtgggtgtggggctctactcgaggtcacactggatggaaaagcaggagcccaacctgacccctggctccctggcgctccctgctgccaccacgaaactggatgagcttaggttcatgatcagtgagactttatattcattccacattcagtatttaaaaaaaaatcaaggcaaaataaaaaaagtgtttaacgacaacaggtctttctcttaaaaagaatagtcttactgcaagctcctgcgtatttgctagcattatgttacaacaaattcagtagatttatcataaaaattgacatgtaaaatcttaaatacaaataaaaaatacaagagaaaagtttgagaataaaacaaacctaccctctctgtaggaaatttttcacccataaaatactaaaggctatgcccttaaaataaatttcaccaaaaatatctttattgatgact

SEQ ID NO: 855564 - DNA, 519 bp, Homo sapiens
gtccaagatcacaaggtggtacctctacttgagtctgcaagaactacagcataacttgacttgggattcccctaaagcagatgcagcttatatcacaacatctaagtcctttcaaatatattgaaagccttcccaagatggatgactaccaataagtccagacagtgaagactgcaataaatgcctaactcctcaatccccagacaccaaagaacatctgctagcatcagtgccacccagggaaacatgacctcaccaaatgaaggaaataaagcactaggaattaatcctggagaaatagagatacgtgatctttcagacacagaattcaaaatagctgtgttgaggaaactcaaagaaaatcaagataacataaagaagaaattcagaattctattagayaaattcaacaaggagattgaaaaaatttttaaaaatcaagcagaaactctggagctgaaaaatgcaattggcatactgaagaatgcatcaacatcttttagtagcagaactgatcaa

SEQ ID NO: 855565 - DNA, 566 bp, Homo sapiens
tattagttctactttacagaggaagaaactgagacttgtagggactagcagtttacccacttagctgcttgaaactagagccaagatttgactacaggtctacctgtaattagaactgagaaattcaccagctgagaaaagttcctgagagtctacataggcctaatgttgctttaatatagtttttctcaatgaggagagtttgaagcaaattttagttatgattaccagggagtggtaaggaaacaggatatggacaggcatacctcagagacattgggggtttggttccagaccatcgtaataaaggtaatattacaataaagtgagtcaaattaattttttggttttccagtatgtataaaagttttgtctacactttactgtagtctattaagtgtgcaatatcattacgtctttaaaaaacaatatacataccttaattttaaaatactttcaaaaaatgctaacaatcatctgatccttccgtgagtcaytaatcattttgctaagggagggtcttgcctcaatgttgatggccgctgactgatcagggtggtggttgc

SEQ ID NO: 855566 - DNA, 566 bp, Homo sapiens
tattagttctactttacagaggaagaaactgagacttgtagggactagcagtttacccacttagctgcttgaaactagagccaagatttgactacaggtctacctgtaattagaactgagaaattcaccagctgagaaaagttcctgagagtctacataggcctaatgttgctttaatatagtttttctcaatgaggagagtttgaagcaaattttagttatgattaccagggagtggtaaggaaacaggatatggacaggcatacctcagagacattgggggtttggttccagaccatcgtaataaaggtaatattacaataaagtgagtcaaattaattttttggttttccagtatgtataaaagttttgtctacactttactgtagtctattaagtgtgcaatatcattacgtctttaaaaaacaatatacataccttaattttaaaatactttcaaaaaatgctaacaatcatctgatccttccgtgagtcattaatcattttgctaagggagggtcttgcctcaatgttgatggcygctgactgatcagggtggtggttgc

SEQ ID NO: 855567 - DNA, 610 bp, Homo sapiens
gctagaagggatcctggagctcgatctgtccaatgccttcatttagcaaatgtctacactaagacctgggctggttacaacagtttacccaacattcacaccaggccaggcaagactaagacctggatggctgacttgtagcctagtgcactgtgcattgcatactgatgacgtcaaaggcctcgttttgtgttaggctgatctgccagtcatattctctgtggctggagtgccttcattaactctgacagagaggctgttaattagtcccagaagccacgccctgctcagcacctccaagagccacactctgcatggaggtgctgggactgagcccatacacagcttctcagtcaacacagtgtggccagaaatcaaatgagccaagggaaaacggacaatcagtctagtctctgcagggccagccttgtaatcatattactatgtagatgcctctgaagactgatagacttatcacctcacctscttccctctaccactcctctcctcagcactgtagcctggacaaacgtgaagataattcacatattgaaaggtaaaagcaagtatcaatacacttggccaacttcccagaagctcttcttgaatg

SEQ ID NO: 855568 - DNA, 644 bp, Homo sapiens
accgagggctatgacggtaaccttagaaataactaaaacagaaccggttctaagasctcacctctgggaggagatggggacattgctgcgtttttaaaagttcattattacactgtaattttcgactatgtatttgtaatactttttaaagagtgtaaaattaggccagatgccatggcttacacctgtaatcccagcactttgggtgggcctagtcaggaggatcttttgagcccaggagttcaaaaccagcctgggcaacatagtgagactccatttgtaaaaaagaaaaaaaaaagtttaaaaaaattagctgagcatagtggcacgcatctgtagttccagctactcaggaggctgaggcaggagtatcacttgagcccaggagtttgaggctgaagtgaggtgtgatttcaccgctggccaacagagggacaccctgtctcagaaaaaaaaggtgtaaaattaactttgttccaaggattgaagttgaattgttggataaatgtaaatgactgcctgaacccactgtgattccacaatcattccaggacagtgggcttgcctttgtgggcactgacactggctcctcctagattaagtgaaggcagcagaatatgaccccccagaatacgccactttgg

SEQ ID NO: 855569 - DNA, 576 bp, Homo sapiens
ccttagaaataactaaaacagaaccggttctaagagctcacctctgggaggagatggggacattgctgcgtttttaaaagttcattattacactgtaattttcgactatgtatttgtartactttttaaagagtgtaaaattaggccagatgccatggcttacacctgtaatcccagcactttgggtgggcctagtcaggaggatcttttgagcccaggagttcaaaaccagcctgggcaacatagtgagactccatttgtaaaaaagaaaaaaaaaagtttaaaaaaattagctgagcatagtggcacgcatctgtagttccagctactcaggaggctgaggcaggagtatcacttgagcccaggagtttgaggctgaagtgaggtgtgatttcaccgctggccaacagagggacaccctgtctcagaaaaaaaaggtgtaaaattaactttgttccaaggattgaagttgaattgttggataaatgtaaatgactgcctgaacccactgtgattccacaatcattccaggacagtgggcttgcctttgtgggcactgacactggctcctcctag

SEQ ID NO: 855570 - DNA, 578 bp, Homo sapiens
gcccaatgcatatgatcagtgaaataggagttttataaaaacctcagttaccatctatggccaatttataacagatgtggcaataaaaattgcaatgtgaaactaataaaaagattctccatattagcctttccatggtaccttttctggattagtaattctagagcaaataaaggaaaactaactctctgcaaaacaaaaccactcaaaaatttaaaaaatgaaataaaataaatttttaatatgaaataatttgacaattgtgtcatgagtgagaacttaacttttaaaatgtaggggctttgggctgggtatggtgcctcacgcctgtaattccagtattttgggaggccgaggcgggcagatcacgaggtcaggagatcgagaccatcctggctaacacggtgaaaccctgcctctactaaaaatacaaaaacttagccrggcttggtggcacatgcctgtagtcccagctactcaggaggctgaggcaggagaatcgcttcaacctggggggcagaggttgcagtgagccgagatcgcatcactgcactccagcctgggtgacagagcgagac

SEQ ID NO: 855571 - DNA, 626 bp, Homo sapiens
cgtctctacaaaaaatacaaccagctgggcatggtggtatgcgtctgtagtcccagctcctcaggaggctgaggagggaggattgcttgagcccaggaagtygaggctgcagtgagccatgattgcaccatggcactgcagcctgggtgacagagctagacccagaaggcaacccctcttgccctttccgttgatgccctgcagcaacaaaaaaccctgtctcatttttgccaggttaaaaaccacttctgtaacaacacttgatttaatcggatgacagttatgatcagattacatcaagcactttctgggtgtgcatcgtctgttaagctctctatgtccttgactttgctggactgtgaccttgtgagaggcatgccgtatgttattcttaggataaggatatgcttattgcttaagctagccggggtgatgacacagaagggaaactgaggcccagggagggtaggtgaatcacccaacatcaccctgcttgggagaggcagggacaggattagaactcaggcctcctgatccagacttgagcacgttctcctgcacactgccacacactgctgcctgcagagggcctgctggccagttcttaggatcaaagtcggggaaag

SEQ ID NO: 855572 - DNA, 614 bp, Homo sapiens
tgtgctggcaccgaggcccagccaagagctggagccggagaggccccagggcggccgagctgggggkgggtaggcaggataccaggtagcaggaaggtttccgcgcctgagggggcctgggtggtgccccagctacctggccgctccgggacctgtggggccccttctcctaagtatgcccaccccatccccagcatctccagtcccggccctctcacattcgcctcaccgcgcttctgctgcgcttagagaatcttaaatcaacactggggtgtgagaagctccatggagccccccaactcccccgccactgcagcgtacaccatgccgtggggatccttgctttacaaccagggaaactgaggccagagatcagggaggtgggaaggctgggcgtggaccagaactttcctccacctggttgccagctagtggcggttgtggggtgaggggctgtcccaggggccaagctcggggccctgacactgtaaacaagcctcccagcctcagtttttccatctggggaatggtggaatcaaggcggctgcggaggcgggagggctgtcctgtgagccagagagcactggggacctgccgttctctcacagtcccct

SEQ ID NO: 855573 - DNA, 507 bp, Homo sapiens
gacccccccccatctctttaaaaaataaactcattaattaaaactaaatcaatsaataaaaagttgtgtgggatgaaacctccaaagtactggaggtgccaccaccctggtgcaagggacacaacctgaggggtcatgagaacactgtaagctgaggacctgctttgtccagaaaaacaccccactcaaccacaaaaactttacaaccagttctaggcccttctaggaccttctgagacccatccacaaaccctttcctccagtttagagcccgttcctaaagaaatctcatggtcagcctttttggaataataatcatagtagataaagttgaacactaactctatttcaggcactgtgctgtgggatttctctgatttactcatttactcctcacacttgaggcacagagaagttgggtcactcacccaaggtcacacagccaggaagtggcaaagccaggatccagacccagtcagtcctgcccaggtctgcactcctaaccac

SEQ ID NO: 855574 - DNA, 631 bp, Homo sapiens
atatgctaattaaataattgcaacaagtgtagatacaaggatctttttcctttacttactcaagagaaactgctatcccctcctctctttcaagttcctccatctcatttctacttgtcctttcatctcctcaaggacccacagcctccactgccctccaaacagtgggagacgagaaagctccaggggaggtctatggaaggcttggtgctgcatgagctccactgaggagtgaacagtgacaggctattttggatcaatgtgcaggattaaaaatttgagtcaagatggcaaacaaacaaacaaacaaaaaatacctggaagtaaatgtttggagagcccaacttcaatcatgtaggaacaccagggacagcttggacaattcaagattaaagtgacactttttctttctctcttctcctcccattttctttttctttgttttcttgcactccactttgtcagaatatatagcatttacatactgttcttcctcacccttgttttagtcctagctctacaagtaaatatattagtgtgttccstcagtcctttggtggacttccaccattgtctctttcctttgatgaagtgtacctgtagtagattctgaggaaaaatcgtgtttaca

SEQ ID NO: 855575 - DNA, 587 bp, Homo sapiens
gaaaaaagcatttagttgtcagtcaacatttgtgattagagtaagaaatcccagtgctaagatgctgtgctgaattaattccagtccaaagcaaagacacctgacatttaacccacggctgagaacaattaatttgtgttgtgtcattcatctgtataaaaaaccctctacgaacccatttcactcaaagcaacaaccagctacctgggaaaacaggagaaacagggtgaggtgtttagttgggagggtggaacacatgcgaatgggactcaaatcacaggtgtcctctcctgtgagtgacaggatatggaagctactacttatccagtactggccacgtgctggcttggtgctgaggctttgagaacatcatgtcacctaatgtctctgcaactcagggaagtagctaaggtcatcgtcctcattttcctgacgggaaaattgagttttacaggatatagrgaacttgtccaagatcacccaacagtaagaagcagtgcaggagcttgcaaccaggtctgggatgaactcaacttgtgctctttcagaaaaattttatagcttgattttatttttaattaacatat

SEQ ID NO: 855576 - DNA, 564 bp, Homo sapiens
tcatgaagtataattagaaaaaccctccaggaggaaagtgrcagctatttttatttgcctgggtatagactccttcccaccctctgtctgactttctggatcctcatggatggtcacctgctgtcttcttcccagggagaggtcattcctgattcttcccatctgatataggacttattttgtaaacagtgacttaaatagtcatttacagttaaactgacctgtttacagtttaaaaacccttctaccaatttcacttagcaactgatctgtttcagtatccttggaacagaaagatcatgcagttttgtttggttttattgcaaactcttactagcacctagcaccactaaggacaggtttctgtctccagccctgctgtacttatgactgagacgatcttgcctcgattttttttggcccaccttaaatgggattaagaaattttttgttaatttaaagccgcaaattttgaaatacaaagtaatttggatcagagcaagaaaaaagcttatatctcatgctcatgctcttgaatttataaaaataaaatatttattatgt

SEQ ID NO: 855577 - DNA, 564 bp, Homo sapiens
tcatgaagtataattagaaaaaccctccaggaggaaagtggcagctatttttatttgcctgggtatagactccttcccaccctctgtctgactttctggatcctcatggatggtcacctgctgtcttcttcccagggagaggtcattcctgattcttcccatctgatataggacttattttgtaaacagtgacttaaatagtcatttacagttaaactgacctgtttacagtttaaaaacccttctaccaatttcacttagcaactgatctgtttcagtatccttggaacagaaagatcatgcagttttgtttggttttattgcaaactcttactagcacctagcaccactaaggacaggtttctgtctccagccctgctgtacttatgactgagacgatcttgcctcgattttttttggcccaccttamatgggattaagaaattttttgttaatttaaagccgcaaattttgaaatacaaagtaatttggatcagagcaagaaaaaagcttatatctcatgctcatgctcttgaatttataaaaataaaatatttattatgt

SEQ ID NO: 855578 - DNA, 656 bp, Homo sapiens
ttttggctgggtgtggtggttcacacctttaatcccagcactttgggaggcaagcargaggattgcttgagtccaggagttcaagactagcctgggcaacatggtgagaccctgtctctacaaaaaattaaaaaattagccaggtgtggtggtgcatacttgtggtttcagctatatgagaggctgaggcaagagaatcacctgggcccaggaggtcagtgctccagtgagtcatgttcaacataggtaagattgtaaagtgaaattaacatttggtaccttgttactttttttctcctatcccattctcatttttacttcttggtattacttttctgtgtctgcacactgtctcctgactgtctagtctcagcatcctttcttattggcacacactatcacttggcatttttccattgtgtaataggtgggtgtcaggaaagttatttgattaatctgttctatactaggttatactatactgatgtgaggaattatcactgctaaacctactcagggatattttcctcttaacttcctgtgtgaccccaaataacagaatttcaagcaaggctgtaggaacttttctgcaagtcacgccgttaaacgtattctgcctaatgtaaatgattctggaaagtatgaggaagatgtta

SEQ ID NO: 855579 - DNA, 537 bp, Homo sapiens
aattgttatgcttgtgcacgtggcaggccagaggcccagattgtctgctttccactaatgtggtcctccagttgaccagrcatgggctgcatggtagctcttttccaggattctatagcctggagtaataagtcatgccaagctctctctctgctatatcctgaagttcagcaccctgcgggtcagcccccaagggccatccagcttccgtctcccaacactaagttcacttcatgtctctcatgacagggaggaaacttagcattccttggagacctgaaaggatgcagtgaacttaagaactttcaagagctcaccaataagtcagcccttgttcatccccgagcggatgtgtggtggtattgtggtggacatttactggacactctgccgaataactggagtggcacttgtgctttagtccaattggctatccctttcaccctggcatttcatcaaccagagggagggcaggtgatagaaaaagggtggatctggttatcggatggaagaatagcaatgccacaactgctagga

SEQ ID NO: 855580 - DNA, 629 bp, Homo sapiens
agaacactgtttaatacagaaaacaaactataaaggtcaagagcagaagcggggagagcagttaagagatcactacaatagtccagatgagaaattatgatgtaaggtaagaaaatcatattatagttattattatttcatttctaataggtttctaacctgagcaacagaaatgaatggtggtatcattcaattaaggggaatactgggggaggaatacagttttttatgtcgttatttgcttggttttgtgcttggagggagaggattagaaattaagattttagttgggacatgttaagtttgaggaatctggatagaagggtctgtagttcagggttagaggaaaaaaagacttcagaaatcatcaatataccatcagatgacaggattaaaaattaaatgttatcaggttttgtgtatgctacacaggaaaaaaaaaggtgtatatataggcagacaactactgaatcccagtgacaaatcaacttatttgacacttaccctttggtccacrgggcttaacccctgcgcagttttccccttcttactatgttgcaaattatcacaatcatattcaacttctggctttccaatatctctacaaaatgtgcatatccagtccccac

SEQ ID NO: 855581 - DNA, 645 bp, Homo sapiens
ttgcattaggttcttcttctcttgccataactcagtttcaaatctaaaacttacaaaatgtgtttggcagacactaaattacaacagaactcccgagatgagaagattgggaaatacagtttggattatctagccttttcagtacaggatagcacaccaaaaagtgattggaatggaggttgtgtgggagccaaggcacagtacctacaaaacttctgctggaaatatttgtcatccgtacatacccttcatcccaaatttaagcttccaaacaggagcatttggaaacacaatatgatgccagctaacatgatgcaatatctctctataaattaaaatgagttctagcaagcactgatttcatctctgtgtgatcatttctcctctaattctgtcacaaccctgaaccaaggataaaattataaagttaaccaccacccacactgaatataaaattataggagaaaggaagagatgaaggaaaaaagtaaagttagctaataaaaatatacacataacagaacaaggwacaatatgttagccactgaagacctcatttgtacagctggtagtgatatcatagttggtatttataattttggtcctgctccttcaagtccgttttctacttgcttctcatccagt

SEQ ID NO: 855582 - DNA, 430 bp, Homo sapiens
  misc_feature 424, 425, 426, 427, 428, 429, 430: n = A,T,C or G
ctattggtctatgatttttttttcctgttatgtcgtctgatttcgataacaaagctatgctggaaactgaataggttgtcactaagagtggatttcatagaacgagctgggaagtattttcttcaatttctggaagagtttatgtggaaatggtaatcgttcattcttaaatgtttgataaaatttaccagtaaaactatatgggcttcgagttttctttatgtgaaaatttgtaatataaatttaatttatttagctttgacagtttgtctttaaaatttttgttccatgttatctaaattgttgaatttcttggcataaaattgtaaataatatttactgattatcctttcagtgtgtrtgggagccgtagttatgtgccctttttaattcttgatattattaatttagtctttttctgatnnnnnnn

SEQ ID NO: 855583 - DNA, 556 bp, Homo sapiens
taatccacttccctcaagcatttacctttgtgttataaacaattcaattgcactcttttagttattttaaagtgtacaattaaattattttgactatagtcaccctttgtgctatcaaatactaggtattgttyttttttttctattttctttgtacccattaaccactcccacctgcctgccacactgcactaccttttccagcctgcagtagaaggatgttagccatccttctactctctatctccataagttcaattattttgattttcagatcccaccaataagcgagaacatgtaatgtttgtctttctctgcctggcttatttcacttaacacaaggacctccagttctatccatattgttgcaaatgacaggatctcattcttatttatggttgaatagtactccattgtgtgtaagtatggcattttgtttatccactcatctgttgacgcttaggttgcttccaaatcttgcctattgtgaacagtgctacaacaaacatgggagtgcagatgagtctttgatatactgatttatttcttttgagca

SEQ ID NO: 855584 - DNA, 604 bp, Homo sapiens
ttctctgcatttactgattagttcatgtaaccacacatatttaatattagttgatgtaatgtgttattcgaccctacaagtccaaaattaatcaatatgttcrtcttctttccagcaataaaattacatttaagcactttaacttcatttgccacctttcctgtgtctacaatactcttaactttgcaagatattattattgttgtttataaagtcaaaatatatttagattatttatatatttatcattttaccaggctcttcatttttttctggtttcagacttttcatctgggatcactttctgcctaaagtacatattttagaatttcttttagtgagtaaaggaaattcctttacctgctcttgataaacacattcagtttttgtttttttgaaggtctacatttcacatacatgctaaaagatattttccaccacgtgtaaaatgttacattgacatttattttctcctaccacatcgaagataggcaacagtcatcaaagatgtgctgttgtcagtcaggcatctactactagctgttgagaagacagttgacaatctgttgctttttaaaagttaatttgtctttttgttctcaca

SEQ ID NO: 855585 - DNA, 623 bp, Homo sapiens
  misc_feature 1, 2, 3, 4, 5, 6, 7, 8, 9, 10, 11, 12, 13, 14, 15, 16, 17,18, 19, 20, 21, 22, 23, 24, 25, 26, 27, 28, 29, 30, 31,32, 33, 34, 35, 36, 37, 38, 39, 40, 41, 42, 43, 44, 45: n = A,T,C or G
nnnnnnnnnnnnnnnnnnnnnnnnnnnnnnnnnnnnnnnnnnnnngagtatcatattgcctgaactgagattacaagagacacttttgaaatacaaaagtttctgtcttctcagtggcaggggcttgaattattctttgcattagttttcttctgcctgaggaaatttcttaaatgaacccttaaattgttcacatataaggcaaatacatactccctatttagaaggaaaaacctggaagaaacctgtaacttggatgcaaatattgttctcaaataatgtcccaaatattctgtggggtatgcattttattatggttcttgttttaaatgagagagttctctctgcagaaatagtgtcttatagaatttttcttgttctaaatatggaatttgatggttctgtgctatgcacttcaactcacttttgtgaagctgtgttcttttttcagtagttaattgcgggaggtgcagagcagaggcacaagttgctgaagaaggatgtatggatctcactttcatctgaccctgcagggggtaaagtggaggggaaaatagtgatccaggcaaagctcastctgtactgggttgttatggatgactgtatccataatttattgctac

SEQ ID NO: 855586 - DNA, 534 bp, Homo sapiens
gcaggggcttccccctgcatatttattcattcagacattgttctagggactggtggcacagcagcaaacaaaacatgaaaaaagaaattcctgctttcatggagtttagattctaccaggggtcagggagggagacacaataaataacataaataaataaagaaatagtatgtgagttgatgataagtgatgtattagtccatttgtgttgctatcaagtaatacctgaggctgtgtcatttatccagaaaagaggtttatttggctcacagttctgcaggttgtacaagaagcatggtgccagcatctgcctctggtgagggtctcaggctgcttccactcctggcagaaagtagcgcctgcatgtgcagagatcacatgatgagagaggaagtgagagtgagcgagggggaggtgccaggctctttctaacaatcagctctttaggaaactgatagagtgagaactcatgcaccctacargaacagcaccaagccatccatgagggattcgcccgcatgatccaagcacctc

SEQ ID NO: 855587 - DNA, 634 bp, Homo sapiens
attcttcatcccccaagatggcaattgctcaaacttttttggttgtttktttttgagacagagtcttgctctgtcacccaggctggagtgcagtggcacgatctcagctcactgcaacctctgactcccaagttcaagcgattctcctgcctcagcctcctgagtagctgggactacaggcatgtgccatcatgcctggctaatttttgtatttttagtagagatgaggtttcatcatgttggccgggcaggtctcaaactcctgacctcaggtcatctacctgcctgggtctcccaaagcgctgggattacaggggtgagccaccgagcccagctgttcaaacattttaaattgagttacccttccctgatcacatagccagcaggtggcagagttggaattcccaccttatctattcccacatgtcagagcccatgctttttttgctcctccccgatgtcaaaatgttgtctgttctgggggacttggcacgtttaaagcagaacttctttgttctgtggcataggttgtacactgtaaaacataggttgtaccaggttgaggaaacaaaagtctttctctaatttgtccaccagtagtatgcatctttttctccactagccaggggctatg

SEQ ID NO: 855588 - DNA, 661 bp, Homo sapiens
agaattggatccaagttgctcattaagttccttagggagttgttggacatcttgctactgtatgaacaaacagatggacctggctgctggctgcaaggatattttagaaaaagcaggtctgcctacccattatgaagagtaaaatattatactgggatggggtgcatcatctccaagctggtttgggggtgaggtcagtggttctcaaaatgtggtcctctgaacagcagcatcagcatcacctggaaatttgtttgaagtgagaatgtgcccgggtgcggtggctcacacctgtaatcccagcattttgggaggccgaggcaggctgaggtcaggagttcaagaccagcctggccaacatggcaaaatcctgttatctactaaaagtacaaaaattagcagggtgtggtggtgggcacctgtagtcccagatactccagaggctgaggcaggagtatcgcttgaacccggaaagcggaggttgcagtgagccgagatcgtgccactggactccagcctgggcgacagagcgagactctgtctcaaaaaaaaacaaaaaaaawaaaaatgaagaagtcaggatgcttggtccccatcccaaatctgctgaatcagaaactcaggggaggggcccagcaatctgtgctttaacaagcattgt

SEQ ID NO: 855589 - DNA, 521 bp, Homo sapiens
gccgaccttggacgggccggggaagaaaggagcgccggggattagcgcggtaccgcggccgggcaggcagagatagcatcggcgccgctgcggggctgaarccgcggagggctcggccgcgctcggagaaaggacggcttagctcctggagccggggattctgaagccattaggtggggattaacacccaagttaatctgctttggtcgctcaattgtcagcagcgaacgcgcgggactgaggaagcctggctcccagcgaccacagggccttgccacccagcagtccagagctacgagctggtatcagtttccccagctgtcacccggccaaggcgggccttggagccaaaagggagatgcacaccttggtgggctggccaacgggtctggatgagtggaccccctgccccgccagccttcctgggtaatcagggaactcagagaaggatgttcctgccccctcctgacccagaccacttgtggaccctgacagccagtgcagccctgggtgccacccac

SEQ ID NO: 855590 - DNA, 604 bp, Homo sapiens
gatttctagcctggtgctccacgtttccccactaaccaggatgctcggccagtgctggggagagccccaggaggtggctaagtgcacatcggaggagtggatggagactccaggtcaccatgtcctgctccagccagagccacggtgaccagttaaagtcacagtctggaatctgaaccttacggactgtgcccaggagagacaatggcctcagagaaaaggaaaagggagctggtgaggtcgtgaccacacctagggcagggcttggctaacctccagccttgtcctcactgctgtgggactgaggcctccaggcagctaccccgctccatcttcccgctccccagattccttgacgctccccagattccttgacattcccctcacacactgctgcgtgccacgtcccccagaccgggttttctgtccctgtgtagatgatgaatggcagtcagagcttagtattcaaaaaagccaatgactcctgtggatgggtctgtctcctcttcrccaacaaagagaatgctggtccgtctcagcactcacaacaaacactatcttggtcgaggatgcaagagtactattttcctcactttttatttcc

SEQ ID NO: 855591 - DNA, 564 bp, Homo sapiens
tgacagtgaccgaaatctcttcaggatcccgtgtttctgacaatgctgtctgtaccacctggttttaaaaagcatttgaaagaacttgattaaagtcaattcaagactgtatctttgaagctaaacagaagggaaggactcctccaagatggtctggaatagacacagagaaaatgggagacttcttaatgtaacaaaggaagggttttcaaagttaatttcaggaaattctgtttgctctgttttgacaattagtttttctctcatatcaaatatgctacagactcttactcagctccaatgaccagtgcaccaggcattttgaaatgaatgtctccttttagatttgtctcttaaagccactaatagcaaatatggctccacttctctaatgaagacaccgcaggggcttccagcagcctcttactagaagagagcactgccactgctgtggcacagtccacagccagagctgtggagccacgtgccttcacaccggatgmcactcagaaccacaatctgaaggaaagaccaacaaaagactggctgtgccacccctcctcc

SEQ ID NO: 855592 - DNA, 634 bp, Homo sapiens
attatatgtaggaccacaagatggcatcaaaggtggtccaagcacctaggyaaagactcattggcaatggaatcacgctaagacttaaccatatgaaaatatgctaagagagggaattgtaaccatccaaagatacagaaggatacagaaaaccacaaccctggccttaagactgcattcctcatccatgtagcccatgttcttatgttataggataaactaaataaatcaagggactcttgggatagatcaggaataagtctgcaataaattccattaaacttacttgtcagtgccttgcctggaaacttcacttctttttgaaaattaaaaagtattattgaatgctgtggagatgtggcaggaactgagagggaaattcccccctgaatttctagctaatttttgagaaagttaaataattggagacagttcatttttttgtgataattcatcacacagtggattcaaatgggaccaaaaaaattctacacattaaacatttgcagtattattaactagaaaacagtatgcaattgctcatttaggtctctttagttgttgacttactaattgctaggacagtacacaaagtaagcactaaataaaaatgagttgaataatgaataaagaa

SEQ ID NO: 855593 - DNA, 472 bp, Homo sapiens
acagagtcctagggagccatgacatttactgggtcattggaggaagaacagagcaaaagcatcatcacagagsttgggaaggagcagcactccaattcttacaaagtaggtcaggagagattatctaggactacaagcttctgtttctatcataaccaggaaaacaacagcagccgcaactacatccacaaccaaagaatgattcttttagaaagggaaatatcgatgaaactccattgcaacactgcaaataaaacaaagggagaattaaaattctgtgcacaatattgcagtactttctggagggatgagctcaaaagagaaatcacaggatgggccatgcaactacgtcttcaggtccagctagggttggccaaagcaaattgaaagagatgggagtgagtgggagaggaggagctccagggagaaaatgagaaggactcttccaaagaggttggtaatgaaagataag

SEQ ID NO: 855594 - DNA, 568 bp, Homo sapiens
tggcacttagcactagctgattgtcttacatacacaactattgtctgtctcccttcaccaggaaggaggctcctgaagggcaggtacttttgtctcttgttcatttccaaattcttagtgcctagaacagagcctgataccttgtgtgtgctttataactatacattaagtggatgaatgacttaaattagtttagctaactccaaattgttcttggtaaggaagatatgccatatgttatctcttgcagacagtgatgatattggccaggaacctctatatggagcttactaggtgttaagaactgcatgcttgttccccttaaaattcatatgctgtagttctaactcccaatgggttggtattaagagataggggctttgggaagtacttaggtcatgaaggtggagccctcatgaggagattcatgtccttataagaagaggcatgagagaacgtgcactgaagcattctctctctctctttctctcccttttcctttttctctacmccatcctccaccctactctcactctcccccatgaagaaatcaggaggagggccctca

SEQ ID NO: 855595 - DNA, 615 bp, Homo sapiens
agaaaactaagcagtatgattagcatatttttttaaagtcagaaasagcaggaagtcaaataataagcaaaaggtgacttgacgagtgtggaatcagtataatgtttgaatgttgaattgcatgaggctaatccacgctatgctcgtcgccataatacagctatgaatgtcaatggcactataatacccaaccattggctgaaactccttctgacctcacatgtgcttggatgatcaatatgtatatttgttctataagtatttgtgtctcaccaaattttcttctgattgtctcatctttctttagttaatgaaaattaatcagattttaattaagtataacccatctgagaagattgctaacattgatacaatatgctccactttatctctcaaggtataaacaagcctggaagttcaaaatctgccttggttctgtgtcttgcctgctgtcaaacatcatttttaatttcttaaagcaaaacgaattttttaacaattaacataaagcaataaaagtagccaataatgtatatagatatgttaaatgcacatatttaaaatatcaaagtgtctccaatattttttcttctatataaatacaggtagggtcag

SEQ ID NO: 855596 - DNA, 580 bp, Homo sapiens
caaatacctatgttaggaatgtttcttttaaatcactcgtgtagtgtgagtaaaatgagttgagatattgctcaaattcaattacataaggtattctaatgtataaattgtactttaaactcatatatgaaattagatttgatattaggtgttacaatgtctttgtaatacatcaactgaaacatcatattgaagttttttttttttttttttgagacggagtctcgctctgtcgcccaggctggagtgcagtggcgggatctcggctcactgcaagctccgcctcccgggttcacgccattctcctgcctcagcctcccaagtagctgggactacaggcgcctgccactacgcccggctaattttttgtatttttagtagagacggggtttcaccgttttagccgggatggtctcgatctcctgacctcgtgatccgcccgcctcggcctcccaaagtgctgggattacaggcgtgagccactgaagttttttagaagraattttttatgttaaaacatcgtgaaggagtcagaaacctcaaatgtcttcatttaattcagtgttatttttagttgaaa

SEQ ID NO: 855597 - DNA, 630 bp, Homo sapiens
gaggactattttataaagtgtatttacatttacttaattttccacttttgtttttccattcacttcagtgattgttactgaggcttgctcagagcttctcactagaccgatacttttggcttgggaaaggccatagcttttcttggcttctttaggaataagatcctcctatgtgtttgcccatgcctctgactagcctaggcatgaattgtccctatggctctcaactgaagtctgccattcaggcatgaaaataagataataatgtggctcaggagaatgtgttggactcaagcgagagcctctgagcagataaatgaaggatcaacgacagttgcttttcctttattctatcaataaacttttggcagggagattttattcttttgtcctagagataagctgaccaaaaaaagttatatggcccaaagttcaaccatctaacatttaagttttgttcattctggcagttattaataatgctgctctggcctgatctaaatatcttacccagtgattttcagataacctttaaagagtggatctgtgtatsctggaaaatagtagcaaagagaaaatatctttgcttctgtttaaatttcaatgaaaagtaattataataacaaaata

SEQ ID NO: 855598 - DNA, 629 bp, Homo sapiens
caacagtcgttgatactgagtaaaaagggactacccaggggatttcaagtcaaaatctaagaactaaacttatttctgttaatgatatgaatgacatgtcattggtgaatggaaagaaaatgctctcaatatatggagctataggaataaatgctagaagtgaggctaagtttttgccagctgtatcctactgatcatattggccattatgttagaattgccactttccctctccttggatgaaaagaggtcttattttatttttccaagaaggagtcttgctctgtcacccaggctggagtgcagtggcgcgatcttggctcaccgcaacctctgcctcctgggttcaagcgattctcctgcctcagcctcccaagtagctgggattacaggagtgtgccacctcgcccagctaatttttatatttttagtagagaaggagtttcaccctgttggccaggctggtctcaaattcctgaccttgtgatctgccagcctcggcctcccaaagtgctgggattacaggtgcgagccaccatgccctgccatgaaaagaaatsttataaaagtacaaaccacttgtgctttattttatgggtgagtctacttgtggtggatccacttgtctc

SEQ ID NO: 855599 - DNA, 683 bp, Homo sapiens
tgattgtaaggacaatattaaataatatcactgaaaatgtctcacaaattgtgtatcccaaggtggatgccccataagatgaccccaatagagatacaaaataaagagaatgttccttatcaaaatgattctsttagaaaatgatgaataattctgtacagtaagacactagctaggactccatagtagctacaacaacacttaagctaaaatggctttaacaggcaaagaaaacagaatttgcaactgcttagccagccgttctgggcaaaacattctgcttcattacaaaccatccttctggctttccagaaacactggccctaaatcaaaagattagcactcaccaaaatgctgtcttgcagattctggtcattacattgaggtcaaaagtcctaccagatactatctacttgctttcaactttgacacaataattacactatggtttgtaaatcacagccacacccagcagctcatttaattctcacagcacacctggatgtagtttatagcatctgtctgtaggtaatattaatattatcctcatgttgcaggtgaggaaacattcttacaaaagttaactgaatcaagtcttatgacaattataataatagctaacattgactgttttaatgttaattgttacatttactatgtcatacattaataatgttaagata

SEQ ID NO: 855600 - DNA, 456 bp, Homo sapiens
ataaagtggaagcctctggaacttcccattactacaaagatagtaaaccagaagtgatattgcatccctgggatgaattgcagagacttgtgccactgccaaagacttgaaatgtactgggtgatacctaccacatacccattttacttacctgtttggtctctacagacattgaatggatcttggagaatgactgtgaaccataaatttaatcgggaggtaattctaatttcaactgctatccaaaaaatggtatctttactggagtaaataaacacagcccttggcacttggtgtgtagctagtgacctgaaaaatgccttttcttccataccaataygcaaaggccactggaaacagtctgcttttatctggcacagccaagagtagacttcacgctcttgagtcagagctatgtcaattctttcttctattatacagtccacagagaaattg

SEQ ID NO: 855601 - DNA, 616 bp, Homo sapiens
aaactatcctgtctgatactctaataacagatatgcaacaytatgaatttgtcaaaatccacagaaattaacagcacaaagagtacaccttaatgtatacaaatttttaagaagcattgaggaaatgaggaatcccaggagataatgcagtgtgacaaaagaatataactttattacaactgattaaaacaatctcattgaaatgggatgaaagaaaaaggtactgagctaagtaactttggaaataagtagagtcttcaagactaaaggaaaaaagaaatgtacataagcactgtattttatttgatgaaagtgtttcctatggactatgggttaacaattgtgaaaccaccatacatgtgtacaaaaattaaacaaagaatggtggactgcagtacccaaatttctcacgtcgtttaactaggggtaaagttaaataaggagagaaagcaagaatgatatatatgtgtagtaaaatgttataattttatgctgcctcagcatccattttgcatataagtgggaatttctcatatcagaagcagggtatagtcacctttgactaaactttccagttctctacttattctcagtttttcaatatggtggatccaaa

SEQ ID NO: 855602 - DNA, 625 bp, Homo sapiens
atagcaagaaggtcctcacaagrtgtcagcaccatgctcttggacttccctacttctagaactgtgaccaaataaaaccctattctttataaattacctagcttttgttatgctgttacaacagcagaaaatggattaagacacccactcacatatattttcttctttgtctttttaatactgtgaaacagaattttttagttaatttagttattcttatattagacttttccatttatgaaagaatgagttcttacaatggacctctttgataccattgacttgaatgtgtaataggaagaactctaaggcttctgaaataatccaactgtttatctgcaaaaccacctgcagccagaaagtgagataacaaaatcactgaagaaatcaaaacatgagagttgaatcacaaaacctcactttatcttgatgattttctatggaaggtatatacctcagcacatcgataaaaggacaattttgtgtactaaaacaaaggaggtcattataaggatataaaaaccaatggtgttaaaagcagcactaatgctcagcagactaaaaccaagtaatccagtgtaataaaatggttaggttggagtcttaatagattgtaattgttagg

SEQ ID NO: 855603 - DNA, 588 bp, Homo sapiens
gtagttgctgtatcaagttttatagagcagaaaaccattaatagggctcatctgaattgccctctactcagactctgacctgctattacactgtacaaagcctttcaaattcattctctttgcattgttatgaaaagtgctatgtaaaagacaactatttactcactactgatgtatgttctacacaggatctttggtggataaagaagttttcatttggcagtctggacaatggtgcccattaatgaaaaaggcttagtataggatattgaagatctggaatcaagtcctcgcacaacaaatttctagttatgtggtctcacacttcaaattcttggtttccttgtgtagatatttaagcaataatttcatgtttatgataaggagaattagactgctaaagatcatttattgaaagttcaccgtcctagatacccgtatgaactaaatgtcagtcatttgattactaccttcacaacttgtgctgtttttttgtactagttaggcagctactgatwtttgtacgtcaatatttattactattttaataaatttaaaaataaactttttatcatgaaaatctaccac

SEQ ID NO: 855604 - DNA, 583 bp, Homo sapiens
attattttgtttctttttatggctgaggagtattccatgatgtacctatacattttctttatccactcattgattgatgagcattggcactggtttcatatttttgcaattgtgaattgtgctgctataaacatgcatatgcaagtatctttttcatataatgacttattttcctctgggtagatacccaggagtgggattgctagatcaaatggtagatctactttcagttctttaaggaatctccacactgttttccatagtggttgtacagtttacattcccaccagcagtgtaaaagtgttcccttttcaccacatccacgacagcatctattactttttgattttttgattatggccattctagaaggagtaaagtggcatggtatctcattgtggttttgatttgcattcccctgatcattagtgatgttgaacatttttttcatatgtttgttgatcatttgtatatattcttttgagaattatctattcatgtttttagcccattttttgatgrgattatttgtatttttcttgctgatttgtttgagttccttgtagattctggatattagtcc

SEQ ID NO: 855605 - DNA, 411 bp, Homo sapiens
ttaattattttgtttattcatataaaagcctgttccatgcttgatttttcacgtgctttaagggacacattactcaacagaagagaggcctkctgttccctccctgaaactttcgaatcaaccacttcctccatttactgtagctctgtggagactgaaaggaacataaaagcccgtgcaacacaatgctgattctatcgaatattctgcctcatccaaccctccctagcccagagtaattgttctctcttttgagtcactaagctctcatttggcactttgcatttgaatctttttatttcatgcactgcctcagcaacaggattgtcattcacttcgactccactcagcttaaaatatttattttgtgcctaccacaggccagggactgtgaggcactggtgataaata

SEQ ID NO: 855606 - DNA, 613 bp, Homo sapiens
ccacaggccagggactgtgaggcactggtgataaatagaagacaacttggtccctggcttctagtaaattaattcatayacaggtgaagagactggcacacaatccaagcacagcagactatgtgtaacaagaaagaatgaccaaggtaacaggtagcaaggcaagaagatacagggttcagggcatcccttaacggggtgtcacctgtgctaggctcagcggctgagttgaagttccttaggcaggggcagtggaaaagaaaggaaggaaattatatttcaagtggaaggaaagcaagtaaaaagaaaggactggaatatgcactatgtgatccatgtagggaaatggaagtagtttagcaccaataaagcataaaagataaaatagtgaagatcagcaggaagtaatgcttagactcagatgacagactttagtttattttattacaggatctggattttatcctagggctgatgggaagttatgcgatggtttgggtaagttagcaacagacattattatgagttaaaacatggaaaatgaattagaggacgactaagacatgactaagatggaggcagctgggagttaaagacatgtttagctaacaca

SEQ ID NO: 855607 - DNA, 605 bp, Homo sapiens
gtaaagggaaccaaagccacatgtttttacatgggaaccgtagaagtgcacatgtactrtctttcctctaggctgtgtcagttctcctgttctttgtcacaacgtattctgtaaagacttggatcatcttgtcattctgaaaactaccgtgtttagccaccatattaatcatatattaaaatgctctagtgagcagaaagtggcaagtattcttgataccctgaaaaggtacataacatgccagagggcactatgtactctacaaaattaaaattcagacacctgccactttcgtaatgttcacaagatttcattaatctggagcatgctgtggtactctattctatctaagggaaagggttattgaaccatacattccctaccactaagagaaacatggccacaggcttagtagttttatctgtattttggaggtagcataaaccatttttgcacaaagtgccctgatcatttatgaagtgactcagaggctgccggttttaagggcaaagaatgagagagaactttgtcacaggtccagactgtatgacctggcagatccaatggggctagagggatctatggtggataatgtactaacataa

SEQ ID NO: 855608 - DNA, 593 bp, Homo sapiens
catctacaggtaccaactaggaagggtagtcttgaattaaatggctttagaacacgttataagagcaaattgaagcttccaggtattagaaccacttcaatcacagagcatctctgggttctatctgtggccagcatcaggtatctgtctgccctccccgaatggttcctctcatcatgtggatcttctagatggttttattcttccccagccagccaacctgaccaacaagcctgggtatattatgtatgtataaagttggttcttaaataaagtccatttctatatctaggtaagtaatgtcttcagactggcaatttcattgttatctagaaagagtgactctagttagcttctagtgtcagtttttctagcagcttctttaaaaaaaatcctctctggaacaaagcttccttgcaagcattgctgttggcaatattcctctttactgaaatgcttatccrgtgaaacttgggctgtgccagtgagcctgcaggttgacagtccttttgttcaacttctccattataagcaacctctctgatcacccttttaaaactaaagatcaaagaatcaaatgaggtcaggaagtg

SEQ ID NO: 855609 - DNA, 501 bp, Homo sapiens
atctgctagtgtatatttggatcccttttaggcctttgttggaaacgggaatttcttcacataaaaactagacacaagcattctcagcaactgctttgtgatgtgtgcattcaactcacatagttgtaactttctttggatagagcagttttgaaagactctttttgtaggatctgcaagaggacatttgaatctctttgaggcctatggtgaaaaaggaaatgtcttcacaggaaaacttcacagaagcattctcagaaacatctttgtgatgtgtgcattcaactcacagagttgaacttttcttttaatagagcagttttggaaaacactttttgtagaaactgcatgtggacatttgtagcgctttgaggcctatgatgaaaaaggaaatatcttcacatatawacgagagagaagcattctcagaaacgtctttatgatgtctgtgttcaactcacagagttaaacctttgtggtcatagaggagctttgaaacac

SEQ ID NO: 855610 - DNA, 570 bp, Homo sapiens
ttgtttccattctctgggttgtttcttcattttttwaaaattttaatttaatttaattttttttagacggagtctctctctgtcacccaggttggagtacagtggcacgatctctgctcactgcaagctctgcctcctgggttcacgccattttcctgccttggcctcctgagtagctgagactacaggcgcctgccaccacgcctggacatttgtctttttaatagagatggggtttcactgtgttagccaggatgctctcgaactcctggcctcgtgattggcgcgcctcagcttcccaaagtgctgggtgtacaggcgtgagccaccactcctggcctgtttcttcattctactgactgcttcctctgttttgcagaagctttttttttttttttttttttttttttttttttttgagatggagtctcgctctgttgcccaggctggaatgcagtggcatggtctcagcttactgcaagctccgactcccgggttcacgccattctccagcctcagcctcccgagtagctgggactgcaggcacaggttaccaagcccagcaaattt

SEQ ID NO: 855611 - DNA, 597 bp, Homo sapiens
tggttcctggcatctccaagtttccgggatgtcaccacattccccggtgccagacgggaaagcygcttgcagtgaacccggtccagccacagcctcacagagagatggtgctcacgccagcacctggagctgcccacaccatagcagcagatggtgtgtctgaccgcacagtgggcggaccccacgtttgctgacacacacccctcaccactccatgcctgactccagactccctttgaagcacgggatccaggctggtagcatgagctgagcgcagcctgccagggcgagtgggtggaacaagcccagcaggtccaagcaaaactcaggcaagggcaccaccagtcacatgtttccggccagaaaagtgacaccccaaagaccccatgacagtatgacttatatcctgttatattgtctcatcacaattcacatagggttgaatctgctattttgactgtttgtgatgttttggctagcatctgaacagatgggcagtttttcttcagtatgactatttgccaacaattggaagggtgtaaaactcattctcagagcaacccaaacataactacaaggagtctaacagataaaata

SEQ ID NO: 855612 - DNA, 606 bp, Homo sapiens
gttagagtggaactgggaaacagaaccatttctagtctttttacagctttgttattttgatttttaaatttacatttggaataaagagaaactctgctataagaatctcatactaacctctgaataaagtggagatatgcaagtactccaagaaggcaacagaattaaatatattttctatgaaagatattaaaaccaaaagtgtttaataatcttcattaatgaactttaaagctcaagaagaccttataaatcatctagttcatcttccttggtttcaaaatctactcttgaatttatttagcattatgagattattagatgaggttatttattctccctaattttaatattgataattaatctttaataaatgcttgtgatttttgacatattaaattctaaacctcaacatttcaaacagtcttagatcatgaagaatattaaccaagtccaacgtcccatatactttgtagtaaaatggtagaccctgaggtgaagtggggcaataatttcatgagaacacatcacagtacatggttagatgtactttccactttttcttctactasaaaactaagtttctgttttgggaagtgctggctt

SEQ ID NO: 855613 - DNA, 626 bp, Homo sapiens
accagaataaaaactgcaactcctttggcttcgacaataaattggcttcacaagaaaatacctacattcatgacagaagaaactggctcttgccttaacctatatagttaatgcagatttatatataaataacattatatactttttagaacatatatttttataaatgtatatttatatacaaaataactaaattattttctgaaacagccttgaacattgtgtgtaatctcattttctgtaagtcattttccttctactttctctataaaattggagcactgtcctctacccctccgaaaagacatttgttaaaatcacagtgaaggttcagcataccttagaaaatcagacattttaaattctatgaagttcagacaaaatattaatacaatatgatattcctatttaaataaactcctatttaagtgattaatgaatcatttatgtattattgtactatacttagtacagataacatatttttgttgagatagcrttcttaaagatcacagagattctgaaaatgcttctaggttgaggaacttaggtagaggaagctaacaatcgatgaatacaataaaggaaactcatgagtgatagagatttgaggaaagtgctagata

SEQ ID NO: 855614 - DNA, 678 bp, Homo sapiens
agagatttgaggaaagtgctagataatcatccagactttaaatagtttgggcaatgattcagggacataaatggccagcagttagaaatagagttggaactcaggagggggctctgacacagagacaaaaatttactcattcacaattaagtaatagttgaatctatttagaaaaacaatgtgaaaaagaaagtaagaaagagaaacaaggaccatctttgagagatgccaacatttaaagatccatggaggtgaaacaaacaaggtgacagaggtatcttcaaagtcataaaagaggagtttcattaaggaaacagtcaacaatatatgcctcagaggagtcaaacaggacacagaaagagaacaaaatactgtattcaacatttaggatgtaactagttacgtgagtgaattcacttcagtacggtagtagaggcagcagctagcctacaatgggttaatgagttagcagggaaacaacgcatccaagaatttgtcttatattctaagatcaagaaccctcaacgaacaaaggtaagtgattcaggcttacatcataacccttcctaagttaaaaggacaagagcatttgttcaataaggmcagaacctgaaattactggcttgtaatgaaaacgtttttaaccctaaacaagaataaatttcttgactagaatat

SEQ ID NO: 855615 - DNA, 609 bp, Homo sapiens
aaaggtaacccagagtatgggagaagatatttgcaaaccttatatctgataatggatcaatatcaaaatatataattaagaactcaacaatagaaaagcaacatgattttaaaatgggcaaaggacttaagtagacatttttccaaagaagatacgccaataagcacatgaaaagatgcttagcatcactaatcatgacggaaatgcaaatcaaaactacagtgagataccacttcacacaaattaggatgactgctatttaaaaaaccccagaaaataagtgttggggaggatgtggggaaattggaagccttgtgcactgcgtggacgtgtaaaactgtatagccactgtggcaaacagtatggcggcaactcaaaaatttaaaaatagaattactgtatgatccagcaattccatttatgtgtatgtayccaaaagaattgaaagcaggatctcaaagagatgtttgtatgccagtgttcatagcagcactattcacaatgactaaaatgtagaagcaaccctcatgtcatttatctgaaaacaaaatgtggtacatacatacatatcataaaatgtcattcagcattaaaaaggagggaaatgaa

SEQ ID NO: 855616 - DNA, 567 bp, Homo sapiens
cagtcataccgggttagggggtggattcatctgagtgcattcatcttcacttgattgcacctrcaaaggctatttccaaagaaatcacattcacagggaccaggggttaggacttcaacatgtctttgtaggggacataattcatcccttaacaacctgagactgcttcaacccgtagaatgagcaaaagtggcactgggtgactcccgagggcaggtcaaaaaggtgatgcctctttgtccttgcccactgccaccttctcactcagagactcgagcggccacacatggagttcagccagtgagagaggccacctggttgcctggggtcagcagtccaggccctcgagtcctgccaggcctgggtgacacatgggcgtgaaggagccttcaggtgattccagccctgccttcaggtcgccccgcatttgagtcttcccagtcaaggttccagatgttgtggagcagagacaagttactctcactgtctgaattcctggcccccagtatctgagcataaataaagtggtgttgttttaagccacaaatcctggggtaatttgttaca

SEQ ID NO: 855617 - DNA, 494 bp, Homo sapiens
gaaaagatgttcaacagcattagccattaaggaaatgcaagggaaaggcacaatgagataccactacacacctattgggatggataaatttaaaaatactgtcactcctgtgctggcaaatatgtggatcaattagaaccctcatatgttgctggtgggaatgcaaaatggtatagtcactccagaaaatagtctagcagatttttataaaattaaacacgcaattaccatctgacccagcagtcccactcttaggcatttactctagaaaagtaaatattttggctcataaaaccgatatatgtacattttactgtagctgtattcataataggcaaaacctggaaataatccaaatgcccttcaagggatgaatggataaaccarctgtggtacgtccacgcaatgaactgtaactcagaaataatagaaatgaagcattcattcttgcaataacttgtgtgaaactcagaggcattatgctgagtaaaaga

SEQ ID NO: 855618 - DNA, 541 bp, Homo sapiens
gaattattggtggacaactttgttaatgtcaatctgtccaaagctctaattaagttcttcccttcctygactaagatggtccaaggtgagcagacagtgttatatattgtgaggaagctccctttccccaggctacaagatgtaggcagagaaaatgaagagcccagttttccagaatcctaattcaggaaatccctcagacatggcatggttccattcctgtattccagtgtcagacattcagtggcatggccacttagttttcagactgagaccagatttggtggtttttgtgtctttcatagaagtagacagcatgaagaaacttcttgatttagtgctacctggaatgaatgattcttaaatacaacacagattacaaaatggtcaggatttgccatcacatgctttaaaagtttcttctttatatcactggaagttgttgatggcaatgaaaatatgcaatagtaactcttcagttactattcttcagaaacttctagacttgcaaacacaaccctgagaggagagactgttgtca

SEQ ID NO: 855619 - DNA, 465 bp, Homo sapiens
taagagatatatgtgtatatacaaactcatgtatgcactcatctttacaactacttctgtatctatccatctgtatctatatcaagctaaatatgagtttaccttgatgtctctgactctaatccagtaccacatgggtcagtccattctaatctccccttgcttatctggaaccttcctcaccaacagtgagaagactggctcaaccactcatttatttatttgctcatcctagtatacatgtacagccatgttagaattattaacccgtacccctatgacaagcaaccttatcaactagactatagtgttcatatatcatcccttttgtttttggtcttacggtgtatggtgaaacaccatttttcaaagtgacttagrtcgggatattttgtctccattctcttccatgaaattatggcttacgtttgtaacaccattagattcttctgtcatagtctacat

SEQ ID NO: 855620 - DNA, 617 bp, Homo sapiens
aaatgggacaccatcactactcactagcatgtcattggccaaagcatataacatagcttttcctgagttcaacaaggctggatataatccttttgcaagtgaggaagcaaatttttgtaaatgataatgtattatagtaaattccttacacacttcttaaatatgtattatgtctcttttaatgccaggactgtgtttaatgctgggattaaaacagtaaagaagacctttttgccagttaatgagctaggcttaggtggttaaaagagtgaacaagactttttacaagtaaaattacacaatctagccattgagacagagtttaagataaagtaattgtacaaatatctaaccaagaataaatagtataccagcttccaaattccattaatggcagaatagattatattagacaagctgtctgtcagataaagtaataaactctatatgaaatatttaaaagataactagttgaaggcactgaagagtgaccaaaagtaagtagaaactgaacaggaatcaatgattgaatgtcactgtgtgacactactatttatttggctckttgcatgttgacagtttatgcagcattgtgtgactagaaatttgacataaac

SEQ ID NO: 855621 - DNA, 574 bp, Homo sapiens
tccactcttgtgccaatcactgagttttggccaatcaaatgtggccaactgttcaaaccatgttcaaataaaaaaatcaccaagctaaacttaatctggctgtttctgtacctcacctccattttctgtaagtcacttttttttttctgtccataaatcctcttccaccatgcagcttcactggagtctctgaacctactttggctcaggaggttgcccgattcatgaatcattcattgctcaattaaactctgctaaatttaattcagctgaactttttcttttaacagatggtatcagaagtgggatctgaagtacagcttctaacaactcccaggagtgctgagtgaccaagcaaggtacccattgggttcattgtgttcattgctctctcggagcagctggggatgatggtaagttttctctcggattccaaagctccgtgaatttgtgtattcggctctccaattttctttgcgcaaatttttgatccaaactgggttggaattcatgacaaaaactggactsggtccgggatactgacttggatccagttacaggcgtcttacttctg

SEQ ID NO: 855622 - DNA, 603 bp, Homo sapiens
atcgaaaagaataaacttcttaagaataaacgtaaccaaggaggcaaaagactttaacactgaaaactacaacaattaataaaagaaaaattaaaagatacaaataaatcggaaaatatctcatattcatggattgaaagacttaatattgataaaatgtacatagttcccaaagtgatgttcagattcagggctatccccatcaaaatcccaatgacattttttgtaggaatagaaaacacaatgctaaaattcctagggaaccacagagctacataacagcaaagatgttgaaaaagaggaaagctagtgtcaccacatttgctgatttcaaaatatattacaaagctacaataagatagtatagtattggcctaaggatagagctatagacccatggaacagaaaagagagctcagaaataaacccacacatatatggtaaatggttttcaatgaggttgccgaaagtacacaatagargatagccttttcaaacaaatgattctgggaaaactgaatatatccacaggcaaaacaaattgaaccactaccttcactatatacaaaagtaactcaaaatggattacaaactagtgtaaga

SEQ ID NO: 855623 - DNA, 585 bp, Homo sapiens
gaaaaaagcatttagttgtcagtcaacatttgtgattagagtaagaaatcccagtgctaagatgctgtgatgaattaattccagtccaaagcaaagacacctgacatttaacccacggctgagaacaattaatttgtgttgtgtcattcatctgtataaaaaaccctctacgaacccatttcactcaaagcaacaaccagctacctgggaaaacaggagaaacagggtgaggtgtttagttgggagggtggaacacatgcgaatgggactcaaatcacaggtgtcctctcctgtgagtgacaggatatggaagctacgacttatccagtactggccacgtgctggcttggtgctgaggctttgagaacatcatgtcacctaatgtctctgcaactcagggaagtagctaaggtcatcgtcctcattttcctgacgggaaaattgagttttacaggatatagrgaacttgtccaagatcacccaacagtaagaagcagtgcaggagcttgcaaccaggctctgggatgaactcaacttgtgctctttcagaaaaattttatagcttgattttatttttaattaaca

SEQ ID NO: 855624 - DNA, 643 bp, Homo sapiens
gtcttgtcttaggcgaaagagtcctggttgggtatatcaaccctgtgcctagatttccaccagttcccttctattttcctggtgttttacagtttctagggcatcttcacatttgtgccaggcaacaactctgttcaagtattcttagcagccaacccttctgtctttgactcttcacccacaactcttacccagggagacagccaggacccaatgtccggaagagtcagtaaggaccagatcagcagcacaacctggcttgacatttgggtgaaggaccacaaacagccacagtggagggcgcctttgctctgtgtcagacacagtgctgaggcattgcctgcattatctgattgacttctcagctaagtatcaatgttatctctctttcatagattaggtaactaaggttcaaaggttttaaccaacttgctcaagatcacacagctggaaactgctggagctaggatttagatccaagcatcaatggacatcaaagaagtgtcccagctctcccagaytggagttgcagtgtaactgacttagagctccaccacgacccgaccagcccatagcaacaatgacttttaggagagacaatttacctgctttctgcattcgtgtaaatttcaggcttttgtcc

SEQ ID NO: 855625 - DNA, 651 bp, Homo sapiens
acttagtagctatgactttggataagttatttaactgcttgtatgaggtttagagggaattagaaataatatttatgtaaagcacatagccaggtgtctggaacttaaaagaggctcaaggaatgtagctcttccacctccacctccaggaattatattatccagcattgaaagtgcatcatctacctctggactgggattccacagctgtgcaacagctgcatagaaacacaattacagaggacaggaaggaagacggcggctgtggcccattaaaattctgcctctggtggggttgtgcacagcacccacactgcaacaaaaaatcttgggcttttcagggagggtgatgatagcagtgccctagtctgcagttcccccaaatggccctggtttgttcgaagcggataaggaatgtgcaggctaggccagtcccttcactctgcattacagcagcagacaagcatgtctttaagcatccagggcagtcctgaagaggaaggaaatctcgaagtgaggtgagggcaggccgttctaaccagtcyctccatccttcccatcccaaccctcaggatgctgtcggcgccagcgctggatgcctcttgcttttatttgaatgaaagataagacacgttgtgtcaatctcaggtt

SEQ ID NO: 855626 - DNA, 629 bp, Homo sapiens
aaaaatagaaagcatattgcttcctgatgtagggatactcaacatagtaaagatgtcagaactccctaaaataagctgtacattcatgcctttctgatttaaacaccaacatttatagatatatacgtacatgtgtatgtatgcatacatatttttagaacttgaacaaatgatactagagtttatctggaggaacaaccatgtagaaataatgagagagagagagagagagagagagagagagagaaaacagtaatgacagaggtagctatctaatggtctaaccaaacatgcagaatattaaaatgcaaaaggaagataataacaaaacagtttggaacttaagggaaaaatagatatatacaaaaaagggtccaaaatgaatatacctatacacaaatttgggtaacattttaaatgagtgggagaaagatcaattagtcaattgggatatttgaatattgggataatttagataactctctgtgaaaaaaaaaaaagctggactcctacctcacttcttataccrataactattctagctagatcaaagatgtaagtattaaagaaaaaaatggaagaaagaaagaaaaaatcgaagagtataggaaggaaacaagagtagattt

SEQ ID NO: 855627 - DNA, 555 bp, Homo sapiens
tggaaaccagtgaggggctgggagggcagggagatggcttgtgttgactgaagctttggacagtcttaggacctgcgctagcagaatctgggggaatgttttctccagcagtttcagccgcacgccctctgcagatagagcacctccggccctcttgtcgctgatacatccaaggagaatcaggacaagagtggaagaggcagatattgggggtgggaggtgtcaggactgggctgtgagtctggggagctggtgtgcagctgaggcgaataaagggggtgagaatcagctagggacaaggatgctacagacagcctgtttcctctttcgggcagtgatcatggatgatcaagtcagttgaggtccaggcagcaccctacagctggagtgctagtcaggcatgcctacgtctgcaccttaggctggaaggacaccctggggcacacaagccattcctgagactcccctccccaycccagctgagctgggggtctcaccttgagaatagtactggtgtagctctcacctgatcaggcctttggggtactggaagga

SEQ ID NO: 855628 - DNA, 465 bp, Homo sapiens
tctttaaggagggacccagacacagtrtgcagaggcctgaatcctctagatcattctctctccaccatgagtcctgccgtggggacttttccagctccctttggccttatgagccagaaaatcaggctagagcctaaagagaatagaaatttcagaatcaggcttgttctgcgactgtatgggggagctgaaggacacaatgggctttctatattggagactacccatcatactctctctgcccagggagaaaggacagatgctgtgtgattttgtagtctgtgatttggcttctcattctcgctgctctctacacctcattgtttacttcactcccctgaaaaaaatgctccctaacaggctcagtacccaacttctgggtattgctgcccacatttgccttggttctaccttttcagattgcaggatcctgaggttttgcttggagcagctcagattctccac

SEQ ID NO: 855629 - DNA, 465 bp, Homo sapiens
tctttaaggagggacccagacacagtatgcagaggcctgaatcctctagatcattctctctccaccatgagtcctgccgtggggacytttccagctccctttggccttatgagccagaaaatcaggctagagcctaaagagaatagaaatttcagaatcaggcttgttctgcgactgtatgggggagctgaaggacacaatgggctttctatattggagactacccatcatactctctctgcccagggagaaaggacagatgctgtgtgattttgtagtctgtgatttggcttctcattctcgctgctctctacacctcattgtttacttcactcccctgaaaaaaatgctccctaacaggctcagtacccaacttctgggtattgctgcccacatttgccttggttctaccttttcagattgcaggatcctgaggttttgcttggagcagctcagattctccac

SEQ ID NO: 855630 - DNA, 264 bp, Homo sapiens
gacatgcatacaccagaaatccagagaacctctgttatayactataaagacagccatccccaagacacatagtcgttagactatccaaggttaacacaaaagaaaaaacaaatctcagacacagctagagaaaagagcaacactacctacaaagggaacccatcagactaacagtggacttctcagaagaaaccttacaatccagcagagattagaggtctatttttagtactctaaaaggaatgacattccagcataaacatt

SEQ ID NO: 855631 - DNA, 544 bp, Homo sapiens
tacctctagtatataattgataggccttaaaaaattcagaaacatctaaaaccccacaaggatggagttggtgctaaacaaatttgattctcagatgycagtgcaaattttcagtgacttcgaggtcttggactttcctcacaactgcactagacattctcaggttgtcgggctcccacatcatttcagcatgacacagacatacaagggaaaaacacactccagagaaatattagcatgagggccacacacagaggtcagtgtggcacggggctaatttaggcaatttagagttcagcctcactccatagtatgattgtttaaggatataaattattactgaattaatgaataaaattaagaatgacactgttctcaactggaatagttattgcctcacggtataaacaggatgttctaagctaaaatgaaagacacccttcctctctccagaaaaagctacatatattagacttatactctgatatcattttgcaagttatttattttatatttattcaatgaatgtctgtgttagccatgg

SEQ ID NO: 855632 - DNA, 655 bp, Homo sapiens
actggatccaatcccattgaaacgggttgtaaaaaaataaagtttccatgctgctaagctgcttttatgtggccgtggcatctctgcacgcagcttgtatgtgtgggatgcttcagttccaagtcaagcttgtgcaaaggtagacctcagatctgctgtctgcacttaggcgtcttccaagagaaacacccgccaactcaatcattgtctgactaagagaacctggagtcctcagatagggaaaaacgaaaagttaaatcaagcagtttcatacatacctgtgactcattgtgaaacccaagctgcagaaaactgacagcaggaacagagaatgctgacctagtttgccagaacaaaggtaggatttacttttttggttgtgaatttttgtttctttatcaaaacagaggagtttaatgaacattagttcttaaggaaacaggaggcagataactgagggtggagccgggtctcctttatcctccctcttccctgcctggcccagtcactaggcctcagctgaaaccttcaaamcccttatctgcccactgaagtggcagacttctttaacctttgacctaaattgtgtttgaactttcatcttgaggaagcaaagttttaacattaagccactaaagacttcaaaagccctgga

SEQ ID NO: 855633 - DNA, 586 bp, Homo sapiens
cctacgcctgtctttactttaatctcttaatcccatcatcttcgtaagctgaggatgtatgtcrtctcaggaccctgtgatgattgcgttaactgcacaaattgttcgtaaagcatgtgtgtttgaacaatacgaaatctgggcaccttaagaacaggataacagcgattttcagggaacaagggagatacagtctggctgcctgtgggcccggcagaacagagccacatttctcttattaccaaaaacgggtaagagaaatatcgctgaattcttcccccagtaaggaatattaataattaacagccctgggcattcccaccaatagagtcataattttgattcagttccaaggtttagacatgtaaagaacagagaccaggacagcctgcctagttgagtttaatttctgatcagaatgttatacacgtggaaagcatttcctttatttttaaagccactttaacctccctgaactagagacaatgtaacttaggagaaagaggactgacttgtgtgcagagccatgtgttctagtcctgccttcctaccagcttgctgtctatcgtgggcaaggcagctctct

SEQ ID NO: 855634 - DNA, 586 bp, Homo sapiens
cctacgcctgtctttactttaatctcttaatcccatcatcttcgtaagctgaggatgtatgtcatctcaggaccctgtgatgattgcgttaactgcacaaattgttcgtaaagcatgtgtgtttgaacaatacgaaatctgggcaccttaagaacaggataacagcgattttcagggaacaagggagatacagtctggctgcctgtgggcccggcagaacagagccacatttctcttattaccaaaaacgggtaagagaaatatcgctgaattcttcccccagtaaggaatattaataattaacagccctgggcattcccaccaatagagtcataattttgattcagttccaaggtttagacatgtaaagaacagagaccaggacagcctgcctagttgagtttaatttctgatcagaatgttatacacgtggaaagcatttcctttatttttaaagycactttaacctccctgaactagagacaatgtaacttaggagaaagaggactgacttgtgtgcagagccatgtgttctagtcctgccttcctaccagcttgctgtctatcgtgggcaaggcagctctct

SEQ ID NO: 855635 - DNA, 573 bp, Homo sapiens
catggtacttcaactattcttactttctatcctttggttattgtaattacatgtaattttgtgacggattttgtattttttaagaaatcgcacttttgtaccggatccagctaacaggattttcttacattacttcataaagagaccatcttttaaacttctaatgttatttcttattcattagtacatttgcctgtggggtatgttcataaatgggttaaagttacaaagttatgcttataaaagctcatggtaatttggagtatcaggaggatttattaattttgaaatcttaaaagagcaaaagctaaaatgagattggattaaatatattcttgcatgcagttattctaaacacccttaaggaccaaagactaacttacagaggacattatgcaaatgtgaatatatctccaagtgcctcgtaggcttgctgatgtaatattttacatggttagttaagtacatcaagtaaaasgtttgaccttgatagagtataaaggtgcttatttcaaaacaactcagtgattttccaggccattgcagaataatcaacgtaaggtgaatgaaatc

SEQ ID NO: 855636 - DNA, 605 bp, Homo sapiens
gggggccagaaaatttggtttctggtagtcgctctyttcctggcttgcagagggccacactttcttcctgggtgcattatgcacatgcagagagagagaaagctctggtctctcttcctctccttataaaggcaccaatcctattaagttagggccctacccttatgacctcatttaaacttaatcatcctcataggtcctatctcaaaatcagtcacattgggtgttagagcttcgacaagggtatacccttggaaggggacacaattccattcgtaacacacaacattatagtcaccagtgtgacatagctacagaaaacacaaactcacatttaaaacattgacacattattatgttaaaagaaggatggtgctgtgaacactatatcttatctcatttggctaggggtgcctcactttaaaatgggaagggaaaataaacattgagcatatcctacctatgataccttatttaatcctcatgacaaccctgtacattgttggtattagaggtcccacttgaaaaacttagtgagcaatctgttacctaaaatcgccctgggtatcttgccaggttagccagctaagtgagtggagaagctg

SEQ ID NO: 855637 - DNA, 605 bp, Homo sapiens
gggggccagaaaatttggtttctggtagtcgctctcttcctggcttgcagagggccacactttcttcctgrgtgcattatgcacatgcagagagagagaaagctctggtctctcttcctctccttataaaggcaccaatcctattaagttagggccctacccttatgacctcatttaaacttaatcatcctcataggtcctatctcaaaatcagtcacattgggtgttagagcttcgacaagggtatacccttggaaggggacacaattccattcgtaacacacaacattatagtcaccagtgtgacatagctacagaaaacacaaactcacatttaaaacattgacacattattatgttaaaagaaggatggtgctgtgaacactatatcttatctcatttggctaggggtgcctcactttaaaatgggaagggaaaataaacattgagcatatcctacctatgataccttatttaatcctcatgacaaccctgtacattgttggtattagaggtcccacttgaaaaacttagtgagcaatctgttacctaaaatcgccctgggtatcttgccaggttagccagctaagtgagtggagaagctg

SEQ ID NO: 855638 - DNA, 639 bp, Homo sapiens
ctattttcaaacaaggtcatgttctggagtaccaggggttaggatgtgtataaatcttttaggagacacagttcaactcataacaaaggggcatctcctctttgtgtctcttttaataagaraggaactatttcccagaaagagcaagaggatatctcctcacagttcatcggccacatcgggttacatgccctcatttcacccatcaccagcaagggagatgctgtttctacaattaattaggatttgttcctgatcgtcacaggccagaactatctacatggtcagcgcagcaatgcaaaagtaaggatggtttggggtaggctgcccaaagtttctgccacactgacaattagagccagattgtaccgtgctgagcaaattacatacataaataaagcaggtaaagagccatcttgtataaatctgcacacagggaagtcatttacttacttctggatatgcaatagggtcaaacgtcatcactgttctgcctgacgtggctatctcaaagctctattccttctacaatgagcccacgttgtcctcatgaagcacagattaccacccttcacttccctccaataagaacagatcctctgtagaaaagaaatccaagctattcagcatgtcctttaa

SEQ ID NO: 855639 - DNA, 561 bp, Homo sapiens
gtaccctagaacttaacgtataatttaaaaattttaaaaaaaagaatgcaccagagtctctttatagcagaattgttcaacaagatgatggaactatagtatagtatgtttgaaataagtatgattaatatgctaaacactctagtggaaagagtatacaaaatggataaacaaatggaaaattttatcaaaaagctgacaccataaaaaagggtagaatagaaatgatgatgatatagttactgagaaagctccttcttaggctcatcagtaggattgacagagccaaggaaagaatttgtgaactttaagataggtcagtacaaactactcaaactgaaacaccaattttaaaaagtgttaattaaaaagaagaaatcatccaaagatgtgggataatatcgtgtaaaataacacgtgtaaatgaaatgtcaggaagaaaggaaggaattatagaaggaaaaaaaatcacagagaatttttgaaaagtaatgaatgacataraaccacagctccaaaaagctcacagaaggcgagaaacaatagaagcctaaagaaaca

SEQ ID NO: 855640 - DNA, 515 bp, Homo sapiens
tagaaattagaaaaataatctcttacaaaccagcctaacacctaaacacaaaatatcacttgaaaaaaawttaagtctgtggtaaccatagcaacagaaacctcaaatccagtctaactcctatctagatgaacacaaacccctatacttcaggtttaaaagaaggaaaggtggacagatctgcaagcataaaaaatatttacctcagtatctactgctctatacaagatatccagcttttaacaaaaattgtgaagcatgggaaggcaagaaaaacacacctgtaagagacaaagcaattatcatatgacacagatgttgaaactatcaaacaggggattttaaaaaactataattaatatgttgaaggctctaatggacaaggtagacaacaggtaatatcatgtggacaatttcagcagagtgatggtaaccataagacagaatcaaatagaattactagaaataaaaaacacagtaagagagataaagaatgcttttgaagtcctgtgagt

SEQ ID NO: 855641 - DNA, 494 bp, Homo sapiens
tattacgttccactgctttttaaagaaatattcatgtctyactcatttttcccttataaacagaataacgaatttgttcaataattcatccttcattgagggggagtctatccttacgtcagaagtaactcgtgattagttgaaaccagttattataatctcaatcctattactagtgatttgatttaggcatgaacagatgagttaattctgagcaatgagaattaaatgaaatttgccagggaatttgagaaattttttttttcctttagaagaaagaaaaaattcacacagaaagaaatactgtcttcttcctctgggtattttcacatcagaatatgctacctggaatgctggcagccactttgcaaccatgaggggagcaaacctgagaacaaagttaacacatcagagagatcagagtagagcgatagagaaagcctcaccttctatttacctacctacagacttcttgttatatgagacaataacct

SEQ ID NO: 855642 - DNA, 494 bp, Homo sapiens
tattacgttccactgctttttaaagaaatattcatgtctcactcatttttcccttataaacagaataacgaatttgttcaataattcatccttcattgarggggagtctatccttacgtcagaagtaactcgtgattagttgaaaccagttattataatctcaatcctattactagtgatttgatttaggcatgaacagatgagttaattctgagcaatgagaattaaatgaaatttgccagggaatttgagaaattttttttttcctttagaagaaagaaaaaattcacacagaaagaaatactgtcttcttcctctgggtattttcacatcagaatatgctacctggaatgctggcagccactttgcaaccatgaggggagcaaacctgagaacaaagttaacacatcagagagatcagagtagagcgatagagaaagcctcaccttctatttacctacctacagacttcttgttatatgagacaataacct

SEQ ID NO: 855643 - DNA, 494 bp, Homo sapiens
tattacgttccactgctttttaaagaaatattcatgtctcactcatttttcccttataaacagaataacgaatttgttcaataattcatccttcattgagggggagtctatccttacgtcagaagtaactcgtgattagttgaaaccagttattataatctcaatcctattactagtgatttgatttaggcatgaacagatgagttaattctgagcaatgagaattaaatgaaatttgccagggaatttgagaaattttttttttcctttagaagaaagaaaaaattcacacagaaagaaatactgtcttcttcctctgggtattttcacatcagaatatgctacctggaatgctggcagccactttgcaaccakgaggggagcaaacctgagaacaaagttaacacatcagagagatcagagtagagcgatagagaaagcctcaccttctatttacctacctacagacttcttgttatatgagacaataacct

SEQ ID NO: 855644 - DNA, 598 bp, Homo sapiens
tcttgaatgtaaatagatgaaactctccaatcaaaaaacatagagtggctaaacggattaaaaaagacctaactatatgctacctagaagagacccactttagctttaagagcatacataggctaaaaaatgaaaggatggaaaacagtaccatgcaaaagagagcaggggtagctatacttaacatcagataaacttagacctcaagtcaaaaactattataagagacaaagaagtttattttgtaatgataaaagagtcaactcatcaagaggacataacaattgtaaatatatatgcactcaactttggagcacctaaatttataaagcaaatattaatgaacataaaaaagaaatagagaacaatataataacagtgggggacttcactatcccatgttcaacaattaatagattaacaagatagaaaattaacaagaaaatactggacttaaaatgcactttagaccaaatggatctaacagacatacatagaatttttaattgaacagaggcagagcatgcattcttctccagtacacatggaatattttccgggacagacaakgcattaggccacaaaacaagtcttaaca

SEQ ID NO: 855645 - DNA, 598 bp, Homo sapiens
tcttgaatgtaaatagatgaaactctccaatcaaaaaacatagagtggctaaacggattaaaaaagacctaactatatgctacctagaagagacccactttagctttaagagcatacataggctaaaaaatgaaaggatggaaaacagtaccatgcaaaagagagcaggggtagctatacttaacatcagataaacttagacctcaagtcaaaaactattataagagacaaagaagtttattttgtaatgataaaagagtcaactcatcaagaggacataacaattgtaaatatatatgcactcaactttggagcacctaaatttataaagcaaatattaatgaacataaaaaagaaatagagaacaatataataacagtgggggacttcactatcccatgttcaacaattaatagattaacaagatagaaaattaacaagaaaatactggacttaaaatgcactttagaccaaatggatctaacagacatacatagaatttttaattgaacagaggcagagcatgcattcttctccagtacacatggaatattttccgggacagacaatscattaggccacaaaacaagtcttaaca

SEQ ID NO: 855646 - DNA, 612 bp, Homo sapiens
ctaacaagggacagtgttacatagagagatgaatttacaggcaacatgtaaaacatatataaatggatccttctcatgtagtaaggactttaaaattcagttgtttaggaaagggtcatgtttgaatcagagcaacagaatcaagagagaatgcctttgtggtgacaatatacctcatattttctcaacacaattaaaataaacctgcatgactagaaatgccaatatatccttcttcagagactaatccctctttaaaaacttaccactcttggttgtaatttatgatattataaatgcattaaaaggaattcacatttcagcctccaaattacttattatccaaaccaagtacacttaataataaaaaaaactagtcctaaaaattaactcagatagaattctaatatttcaggttatgtgcccaaaatacttattgcttaagagagatatatttatgtatgtaaagttgaaattttgaaaatatttggtcttyaatattgttcttttactagaaaatgcctgttaactttagaaacaattttaagtgaatgaaatatcccaccttcaaaatgggaactttaaatctagtttcgatctgatagcatcata

SEQ ID NO: 855647 - DNA, 601 bp, Homo sapiens
ttgcatcctgtactgcatcacaattacaaccttgccaaagaagccatagatagattactragtctcccagtgcatgagttaaaaacctcaactctcttatattttgtatattagggaattagggaagagaaacatgcattattcacttttttctatatatttatatgcaggtaactggctctaagaatatacaacttcagacccacaaagaggcactcttaagtgataaactggaaacaaagggaatactatgtgcttattttatatgtatgacacataacctatactattaggttttgaggaaaggatgaaatgtcatatctctaagagaaaatggaaaagggacaagttcaaatgtgtctgctcctgttaaatctcttcctattttagtattaatcatccaattagatttgaatatgcttttgtttctttgtagtactcattgctctttatgactcaaattctcattcttagctggtatctggtaaggctgacttgcaaggactcataagtgattgtatgacagcaaaatctgcttaattctcaggctaatcttttaaaaacttttctactctgagtttaatagaattgacatcatcca

SEQ ID NO: 855648 - DNA, 601 bp, Homo sapiens
ttgcatcctgtactgcatcacaattacaaccttgccaaagaagccatagatagattactgagtctcccagtgcatgwgttaaaaacctcaactctcttatattttgtatattagggaattagggaagagaaacatgcattattcacttttttctatatatttatatgcaggtaactggctctaagaatatacaacttcagacccacaaagaggcactcttaagtgataaactggaaacaaagggaatactatgtgcttattttatatgtatgacacataacctatactattaggttttgaggaaaggatgaaatgtcatatctctaagagaaaatggaaaagggacaagttcaaatgtgtctgctcctgttaaatctcttcctattttagtattaatcatccaattagatttgaatatgcttttgtttctttgtagtactcattgctctttatgactcaaattctcattcttagctggtatctggtaaggctgacttgcaaggactcataagtgattgtatgacagcaaaatctgcttaattctcaggctaatcttttaaaaacttttctactctgagtttaatagaattgacatcatcca

SEQ ID NO: 855649 - DNA, 582 bp, Homo sapiens
tttgtattctagttagtaaattaattcctgtataattgatatttctgatgttattgttagaggtatcatttttttcaaatttcaattttagaagttcttctttccttaaaaaagaaataygattgatttcaaatattatcttataggcacataccttgtaaatgtattcatataatagtttatctgtaagttattcatttttttggtgaaaaattagcttaattacttctcctcaagttcttatatcttttttatttcttctttactttctcactagcaattttgtcaggtgtaaggttgaacaaagttgatcatagtatcattttctcattcccaatgtcagcaggaaaatgttcatcacagtcattttggaggtagcctttaataatttaaatatttttttcatcattgcaacttaggtaataggttttgtcactcatagactttggagttttgtttttttttttagttatagagaatgtcatataatttttggcttttattctgttaagaaaacacactgcagttttaaaattttgaatattaaaacacgttcattcctgtaacaagcccaacctatgt

SEQ ID NO: 855650 - DNA, 653 bp, Homo sapiens
gtagtccacccctacagccttggaccataaaagccagttgtgtgtgactttgttctcacattttgaaacccctgcacagggccacccatgctggtttgaggcccagctataatgtggtggtgtatgtgggtgggctggtggcaggggtggggaggaggaggtagggaattctttcaccaattcaagggaagctaactactgtaccattttaattctgcaataacattgtataatttgagagaaagccttccaaatttccaagttgatttctgcagttactcatattttcctctgctttgtagcactggcccctgatgctaaattgcagatcagaaaggccagtgaagcgtgaggggaaagctgcaggatgtggacccatgcacgcttcacccagcacatcccagcactgcagacccttgaggggctcatggggtctgtggtctgcccagcttctggacactgccactccaagctgaggagcacaagctgaagctccacagcatcctctttgttcttcctataasactgcaccctgcctcaaggatgggagttttatgagctcttggctcctctctcaatttcttccaaattgtattaaatctgtctgcaagatttagagtttgtagtgtgtggtaggaataattccttagttt

SEQ ID NO: 855651 - DNA, 646 bp, Homo sapiens
tctattttatttatatgtgtytgtgtttctgagtatgtcctgagttgcacgataatactatatttcttactgggtaacatgtcagaaaagtttctaaaaactttctctgctgcacttattttatacattttatttatgttaataatctcacatttaacacacttatgatttattctcaacagaaaaaggtggtatttctttcatttagtcttttaaaaagctcacattatcaaatgattgctcaatcatttaatctctttgcttctcttatatgcattgatttaataaatatgtatactagtttctccatcgattctttagatttgaaccttattttccttttattcttacaaaactgacttgtctataggcccacttctacttcctttattctatcatcttcctcaacttattctgtggtcaaagaatggagaaataatattaataatatgtttttctcatcaatgacttccacctgttctctgagaaattcagcttcaagaactttagtttgatatgactgcaaagataatacacagtctaaatcataaaaatgtctcaaaggttttttttttatttgtttctttgaaatatccatgaacaggcatgtttctcccctgtagtgcaatttgtgtgaaattctggc

SEQ ID NO: 855652 - DNA, 646 bp, Homo sapiens
tctattttatttatatgtgtctgtgtttctgagtatgtcctgagttgcacgataatactatatttcttaytgggtaacatgtcagaaaagtttctaaaaactttctctgctgcacttattttatacattttatttatgttaataatctcacatttaacacacttatgatttattctcaacagaaaaaggtggtatttctttcatttagtcttttaaaaagctcacattatcaaatgattgctcaatcatttaatctctttgcttctcttatatgcattgatttaataaatatgtatactagtttctccatcgattctttagatttgaaccttattttccttttattcttacaaaactgacttgtctataggcccacttctacttcctttattctatcatcttcctcaacttattctgtggtcaaagaatggagaaataatattaataatatgtttttctcatcaatgacttccacctgttctctgagaaattcagcttcaagaactttagtttgatatgactgcaaagataatacacagtctaaatcataaaaatgtctcaaaggttttttttttatttgtttctttgaaatatccatgaacaggcatgtttctcccctgtagtgcaatttgtgtgaaattctggc

SEQ ID NO: 855653 - DNA, 643 bp, Homo sapiens
aactgagggagactcacacaaacctctctctgttgaggaatgcagcacttgcctaaggcggaatcactgaaagaawtcttgagattctatagggtatgctcatgaaaatctttaatgaaggcaaaggacacaggactgcaggagaaatatctgtctctgatacagtaaaaacagttgactgagacttccaaacatagctcccagggtgctgtcccagtcaacaggacatccttcatcttcagataatgaaccaccaagaaatgtgagagatgcccttgtcacaggggagccgacgtctcatctggtgaggggtcttttatacccacggagggtataaaagttacaagatcagactcaacagcagaagccaaaacaacaacaacaacaacaacaacaacaacaacaacaacaacaaaaaccttacaaaccaggtgcagaccatcaatctgaccatcttgcataaacaatgttgacaagttaatagaggttacccccttgggagtaccagtccctagcacaggattatactaatcattggtcagtacatttcattcaggtttcaccaaggcttacacaattccagtcatctccagaggtaagcacagagttgcagcagaccagctgatattaaccctttgtttgc

SEQ ID NO: 855654 - DNA, 563 bp, Homo sapiens
ccaccgcgcctggtcatacatctttagatgttgggtcatcttaatatgaggttcaccagcaatgtggtcgcatcatgttagggggcagggcacaaaactagcctagctgtgccggggcctcccacccactgcctgaggcctgcagggcccacccgctgcctggcaggagtgaagcagaagagtcctctttccatggactctaccatcccagccctttaaggttccagcccagcaggcctggaattccggccctggtgacctaagctgctgctcagccaagccaggcaggagaggacagatccagctgtgggagccaggaagctcaaagctggaatttaaacagctgcctgagacctggggtccccactgcgtgggcctcctccccgtggtgacatggcccagctggcctgccttccacctggggagcttatgttggacactgggccaggagctcagatccctcmgtccttaggccatacctggtgtctccagctctctcatgtacacaggctgagtctgcaggattggacgttcaggacaagatgggatggcacagtcattgc

SEQ ID NO: 855655 - DNA, 606 bp, Homo sapiens
tttttcctccttgcctttgttaaatgcccaggcatgccacagtaccaagcgttatcagtaccagctcacattcctttccttatttggaaagaggactaactttctagctcattacagacaccccttccccttcctctccactttcttttacatgcccaccctatctaaaaaaaaatcaaatgttcagtcaactgggattagtttagattgtatgaccccggccagtggggaaagggtacaggggcaggacttgcatcaggaataaaggctctcgtgcccctttgttcaggtgtgctctcatggcaactggccaaggaggtacccctctgcgcagaagtacaattgctttgctaagaatcctttgtttgagtgttcagtttccttaggattttgagcgttattcctaacatgctcacagataaaccccaagtgcccagaataatgtctggcaaacagtaggacttcaacaagtatctgctgaatgaatgagtgggattctagtaatattttagtaacattaaaacgatgtctaytgatggaaaactagcaccggtgcagcattgatggatctgtgtcagacacagagcttcaaatccaaatgctgag

SEQ ID NO: 855656 - DNA, 557 bp, Homo sapiens
gccgagcccttgattttatagtgacaaaaataatggtgctcataagagcaatgaaggctcacatgcattacgcccatattcaggcaccatactcaaactataatccttgttaccctctaacaaccctaaagaataaacatgatttacatattacggataaggaaactgaggctcataggggttaagttagttgtcctagagggtaagggaatcaggatttgaatctagacctcattccaaatcaataacactttccactttcaaatgtctctgaaattgtgccatatcactctctgtctttttactctgctatattttccttcttagtacttatctgacaacatgtcgcatttttgtacaatatacaatttgcgtattgtctctctgctccattagaatataaacaccatgagtgcagagatttttgcctatccacctacctctgacagtccaaacacttactgagcacgtgcaaaggacaggcaaaaagaaatactctaaagcagggctgtggggtcagaaaatgactcacrataataccaaggatcctctgttca

SEQ ID NO: 855657 - DNA, 480 bp, Homo sapiens; identical to SEQ ID NO: 835979

SEQ ID NO: 855658 - DNA, 603 bp, Homo sapiens
ggagtcaggagacccacctgcattacagactggtgatggtgatcacataaaacagygcagtgggaaagtgctttgaaagccatgaagaagtctaaggctgcctattattgctgtgtagctggtttattctatcataaacccattgaggtctgtttaaattgtgtgttggcccaccagaatatcagcatccttctcagtgttgttattcacggggtctaataagaatactttctatgacttcatttaagccattgatagaaatgaccgacaagacagggctgagggcaaaggccgtggcacatacttgtggggtgacttggatctatcatatcgctccatcctttgctagttcagttactcaaccgacagtgcatctccttgattgtactaccatctagcccatgtgccttcatcaaatttacagggataacatgatggcctttgctggctgccttgctgaaatccagaggcactgccgtctatggaaatgcaggttctatcaaaagagggaacgtgccggtttgccatgactcactcttgacgatgctgaacaggctcctggaggccacagcttctccctaagcgctccccaaacctgtaatg

SEQ ID NO: 855659 - DNA, 606 bp, Homo sapiens
catagcaaataaataaaacatgtttgaatatttatacatcattgtttgctcttcatccatgagtccttttcacataactaccatatttaatctattccaagaagcacactctcactatatattaatctctctgaaattagcatgcatcttactatggatgacatatcagtttattcacatacttttctctttctaagaaacataaaatactggtgtgcctcaccatcagtggcatctctgatatgactgacacattactctgccattattttgccctgagaagtaatactggcagcccagctagacagaaaacttttagacaatgactattctactgtagccaaacaccacagaaaaaaatgaggggtacccagccccatctatgtcagcaaaggctgagaagggaacttagactttgaccctcgagaggctgtaacaaggcgacacacctcctagggtgttgtcagggaaggccaagtaggaagctgagccttttattcctatcagttggtaacaagtggaccccctccacccccactgtggtgtcagcaaagaacacatrgagagccctaacttccacctgcacttgggagtagtgggcaccct

SEQ ID NO: 855660 - DNA, 614 bp, Homo sapiens
cctgtgcaccaagttcatccaaatgaatgctctctcctggagcttgaaacatgatggcaggaacatggattggaggttattcattgtagcaggctcgtactcatcagactgaccctatctagaactcatgcagtgattcctattacaggccgtactgaagtccactggtttccagtgatttccaattcctgtccattccttggtattcccccatacaaattcctttttacttaaggaaacctgagtttctgttccttccaaaaaataagccctaaataaaacataaattagtgccattagaagggtaaatgcatgtggcaggttaaagctggccacaaattcttcattgcttctcccatggatgaggggtctctttccttccccttagacgtgggacagcctgtaactgctttgcccgttagaatgtaacatatgtgaagctctgttagtttcaggcttagcctttcataccaatggctattagcttgcttttggagccctgagcagccatgtaatgagattgaccaccccaaggtgatcatgctgtgataagcccaagctatgtggaaaactccamgaagagaaagacactatgtgaagagagagaaaggcca

SEQ ID NO: 855661 - DNA, 511 bp, Homo sapiens; identical to SEQ ID NO: 854025

SEQ ID NO: 855662 - DNA, 579 bp, Homo sapiens
tcccaagaactctttatccagcacaaatgtgtacaacaatgttttgagaaaagtgactcgaggaataatgctccttgtctttgtttagcaacctctcccacaacatcaagcagcagcacacttcaaratgtgaggaccaagggtgacctgtctgccccaattcttttaggctatgctgctgtgaaagggtgcacaggctaagtcttctcaggcctcaggatactcttgagagctacatcctcagtgctcacattgccatggtcacctcattgtgcagatgaggacagctgggtcctttaccaaaaccaaagaaaatacttgtttctttcgatggctgagtctcagtgttttgtcgtagagcatcattcccaatccttatggtaactgctacagccacgattgcatctctcacagtcagatgcgatgaccaagcagtcagaacctgtcacttctacttcctcacctctccttgcctcctaagcctttgtattttgcttctatgacaataaagcaatgaaacttgatctctgcaaaatcatcttctaatcattttttgaagaacgtctccactcttggttt

SEQ ID NO: 855663 - DNA, 508 bp, Homo sapiens
ataaaagtattaatttggggaactaataaacgtccatgaaatcttcacgatttatgttcttctgccgyggcttcagccattccctccgttcggggtccctgacttcccacaacatcctgacttcccacaacagaaaggaaaggaggggaggggaggggagagaggagggaaaaggaaaggggaaggggaagggaaagggaaagggaagggcattaggaggaaatagaaagtatgcaagaaaaaaaagcctcaaaaatataattaatatcctcagatagagaagatccttgaaatcaaaataggatactactttaaaaagggaaatatcaaaaataaaaaaagattatcttggaaattaaaaacatcataactgaaatgaaacagtcaatagaatcctggaagagaaagttgaaaacatcttccaaaaagtagagcagaaagattaaaatatgggagaaaagatcaggggtcctatccaggacgaactactgtatatcagaatagaaag

SEQ ID NO: 855664 - DNA, 508 bp, Homo sapiens
ataaaagtattaatttggggaactaataaacgtccatgaaatcttcacgatttatgttcttctgccgtggcttcagccattccytccgttcggggtccctgacttcccacaacatcctgacttcccacaacagaaaggaaaggaggggaggggaggggagagaggagggaaaaggaaaggggaaggggaagggaaagggaaagggaagggcattaggaggaaatagaaagtatgcaagaaaaaaaagcctcaaaaatataattaatatcctcagatagagaagatccttgaaatcaaaataggatactactttaaaaagggaaatatcaaaaataaaaaaagattatcttggaaattaaaaacatcataactgaaatgaaacagtcaatagaatcctggaagagaaagttgaaaacatcttccaaaaagtagagcagaaagattaaaatatgggagaaaagatcaggggtcctatccaggacgaactactgtatatcagaatagaaag

SEQ ID NO: 855665 - DNA, 612 bp, Homo sapiens
aggaccatggtcttgggactctgcagtgccatgtggaaggcgactacatcggtctgttagagaagtaacataattttaaagtcttatccatttctttctctgtatccggacaaaagcaattgcaagattggttctcatgaggataataataataacaataattactatttgttaagaattccctggaaaatactactatatgaaacagctcatatagaaactaatttaatgctcacatacacctgtgaagttggtggtattatttttggctttgcaggtgagaaaaattgaagttagttaccagtaaatcaatatttaaatggtgctccatctaactcgaagcctgggctcttccctgctatgcaatactgcatttgcccttttattgctagaagtccacattgctaatgatgctaaacttatgaggtgttttttttttgtttttgtttttttgtttgtttgttgtttttgcgggggggarccactaaagaaattacaggtttgggtggtaatttgatgatattggagtctttgggcttatgaaagcaatggcctggcccagaagactcgtgcagattcctgagttaatgtgtgtttctttgtgttacaggc

SEQ ID NO: 855666 - DNA, 529 bp, Homo sapiens
attccctcaggtgcccctatcttgtgagtgaagagaaagaaagaaatacagctccttcttgacaaaggtttacttctactaaaaacagcccctctcttcactctcccttgttagctgtcttgatatagacaagcaggagtgggtgggcatttgctatgcagattactctggaaatcccccgcaccccaaccttggcaaacccttttatggacctgtctagagccttttgttttgccaggtcctgtagcaggtgggatgcctctgtagttggtgacaccaagggtgtcctcacactgtcatgtcacacttacctcccatgctcagttaggtggttcagtacgtccccaatgaagagcactccattgcatggctttccttctgaatactccacgctgccctatgctctgctgctctgcactctctcttttctccttcaattggggtgacaactttygctattccatccacacccagccctttgccttagaataggagcctgtctacttcagtctggtcttgccatcacatc

SEQ ID NO: 855667 - DNA, 503 bp, Homo sapiens
gtaaggtatgttcagaaacggaaaatgcagagcaccctgctcactttgaccccatttcgggtggaaattaagaacctgcattttcagttaaggtaggctaaagggctgaaggacagacccagacagaagtttctcacccacataatagttcaagtgaggtgttcctagtgggcatgtctcctccatgtggggattccagaactcagtctccttttcatctcacagatgtaggggagctgggaaaggaggtccctggaagagcagatgcatcccaaatagaactttacactggattctgggtgaagccggccaggtcttcttcactggccctgccccatagccctcagtgttcccccaagtcttcctcattatctccccagaaagtgctcttgtaaaatctcagaaaagctgaagccagactatgagcaagataaaggaagcagctcrgctcctgggagcctcgtctaacagtgggaaccttgccgtctcctaaccagctgggt

SEQ ID NO: 855668 - DNA, 503 bp, Homo sapiens
gtaaggtatgttcagaaacggaaaatgcagagcaccctgctcactttgaccccatttcgggtggaaattaagaacctgcattttcagttaaggtaggctaaagggctgaaggacagacccagacagaagtttctcacccacataatagttcaagtgaggtgttcctagtgggcatgtctcctccatgtggggattccagaactcagtctccttttcatctcacagatgtaggggagctgggaaaggaggtccctggaagagcagatgcatcccaaatagaactttacactggattctgggtgaagccggccaggtcttcttcactggccctgccccatagccctcagtgttcccccaagtcttcctcattatctccccagaaagtgctcttgtaaaatctcagaaaagctgaagccagactatgagcaagataaaggaagcagctcagctcctgggagcctcgtctaacagtgggaacsttgccgtctcctaaccagctgggt

SEQ ID NO: 855669 - DNA, 554 bp, Homo sapiens
caaaaccctacagtgagcaatgagcctttatgtattttttgagttcttctcctattttttttttaatttggctctttccttctacatacaagtgcctgtggacacagcattgtccttgtgctgttgccatttacagcagtaaaacaacagctactatttcttaagggcttatatttggctctttattaacactgtctgttttaagccttacggtaactgaggttggtatcattgtccccattttacagatgagtaaactaaggcttgtgcaatgttaattgagctgcggagaggatatatcacagctaataaattagaggggcagcattcaaccccaggtcttcctgaatgcaaagatttgtgctagtaagctctgtgttctcctctgaggtcactgtggtgggctctaggcacttatgctaccccatttgtgtcagaatacagcatgtgaacacacatgtctatagaatttwaaacccaaatatttacttattactgtctaagttccagacacacaccataaaagatacaaatcttaaaagataaactggaag

SEQ ID NO: 855670 - DNA, 588 bp, Homo sapiens
aagtgaatgctggaaaaaacctgtactgctgttaatggagagttsagcataattttggtgagggataagaggaagagaaatactgtagtgagtctgagacttcttagaggatacttaagtggttataatcacaatgttggtagaaatatgaacagtaaagaaaattttgatgacgtgttacacaaaaatgagggacaaggtattaaaaactaaattaaatattactcttgttataaattggtaaataacttggctaaattttgtttacacactaggcctttatgtgaggcagaatttaagaataacaaactaggaaatacaggggagaaatttctaagcagaatgttgtgggaactacatggttttttttaacttcttacagcaaaatgagaggaaaaaatatttaaatatatagtttaaaagagaagcaaagtgaaaagatttggaaaatttgcagcctggccatgtaaaaaataaaaaatcatgttctggaaagaatattaagggtgtagcgtagctaagccaccatttgctataaagattaatatggatagaaggaagccatattctaatcaccaagacaataga

SEQ ID NO: 855671 - DNA, 502 bp, Homo sapiens
tgaaatacaaatgaatggcagattttggggtacagtgagtagaaatggtgagttcagtatgggatgtgttgtgtttgtggtgacggtagtaggtagttggaaaaatgggagaggcctgacttagagatctggacgtgggagtcagcagcatttaggttgagaggcacaaaaggctggaaccccatggactacctacgtttaacttatgaacagagtaagaggcatccgcttaggaaactgagcaacactgagctcagctaacagagctgggcaatggacctgggctgccacagaaatcgatttttaaaaattattggtattttgaaataaaaacaagtttaagaagaagatattgggtgtgaaggaattcctttcagtaggggaggamtctgtctctcaaagaaaaagattgctcaggcaatctaagttcatctgttcatgctgaatgtctgaacagacttatattctattcacaaaggggaagaaaagtgtggattgtggg

SEQ ID NO: 855672 - DNA, 640 bp, Homo sapiens
ttaagaaaagttgagtttttaaataaatttaataagaactatttaagcacttatgatcaggcatttgaggcatttaaaataaaatttattgatgttattaatgcagattaaaatgtttaaggagagtgaagctagggaaggaaaatattgtaatatcagattaaaaaaacctgaattaaggtcatgttaatgatacacgatttgagaaatattaaggaggtaaaattggtgaacaagtcatagaacaaaactaagagaggggataaaaatttccccaggattttctttgaaaatgtaagtggatagcaagaccatttactaagtagttaagtcttatcagtcagaataggcaagattattttgtggtaacaaacagcttcttaatctctgtagtttaccaaaaggtttattgctcatactgcacgtccttcacaggtttgctgtggctgtgcgccacatagtcttcacctgagacccagcccctaaatagaatgttgctggtatcctggtgaactacttgctgatctccattccattttatggaccaacacaaggcacatggccaaacttgccatcagtgttggggggttataatarcagctactgtttgagcccttaccctgtgttcagacactgaggc

SEQ ID NO: 855673 - DNA, 559 bp, Homo sapiens
aggaaaaaaaaagaaataaacagaaattgttcatgaaaaaagactcagtggtagatctactaaatacagacttaaaaaaaaaaaaacaactcctggggctgtgaaagaaaacagagactttaaaacaactctcttaaagatgctcagaggaatgaagtccctgaccatccagctaaaccattgggtacagcccatgaatctgtatgtaatcacacatctggccatttctacttccatgcagagtacacaaccagttgcactgcttgaagttctgcccactgggaagatttcccttcactgttgtccttcaagaatgtcctagaaagggactgtagtgctgcagctgttcacttttgggtgatgcctgcatatcatgcagatccatttgtgaaccaggccctatcttctcttcctgtgtcaactgatcatagggaactctccatgaggccataggtgcaggctgggggagagaargcagggtggcaggagtggagactatgggcatttgagccacttcctcatgtaacttacttgtgcctgcaagacctgctcaagctcg

SEQ ID NO: 855674 - DNA, 641 bp, Homo sapiens
tcacttcttttgtgtccagtcttctgtattcagccacttgctagaacacagaaaacacagtcactgaatgtgtgctcttttccctagagagagaatttgttttaagtgccttttcatgtcctgagggrcaactcattcttgacagttatttgaaagacttaggccttgcctcacagcctagtacaacagacagaaaagtaacccacagttaaaacaaagaaggccatgctaagtgctatgatggagtttatgtgggaggccagggtaggaatacctgagcaagcatagggaagtcattgagtgcttaggaaaatatgatgcttgaagaagtagaagttagccagaagaaaaaaataaatagaaaagtatcttcgagacagaaggaacagcatgtgcaaagcccaagcacacacagattagaggaaacggaaaaactgtgattagagaggtagcttagagaagagactgcatgggagagtatctgaaaatgagactaaaaatatatgctactttgcaagtaccgttatatgccacgctagagatttcacattttattctgaaaggaaagggaaccattgaaggattttaagcaggggataaccaaaactatagtaataagaatgagacctggaagctcagtg

SEQ ID NO: 855675 - DNA, 641 bp, Homo sapiens
tcacttcttttgtgtccagtcttctgtattcagccacttgctagaacacagaaaacacagtcactgaatgtgtgctcttttccctagagagagaatttgttttaagtgccttttcatgtcctgaggggcaactcattcttgacagttatttgaaagacttaggccttgcctcacagcctagtacaacagacagaaaagtaacccacagttaaaacaaagaaggccatgctaagtgctatgatggagtttatgtgggaggccagggtaggaatacctgagcaagcatagggaagtcattgagtgcttaggaaaatatgatgcttgaagaagtagaagttagccagaagaaaaaaataaatagaaaagtatcttcgagacagaaggaacagcatgtgcaaagcccaagcacacacagattagaggaaacggaaaaactgtgattagagaggtagcttagagaagagactgcatgggagagtatctgaaaatgagactaaaaatatatgctactttgcaagtaccrttatatgccacgctagagatttcacattttattctgaaaggaaagggaaccattgaaggattttaagcaggggataaccaaaactatagtaataagaatgagacctggaagctcagtg

SEQ ID NO: 855676 - DNA, 575 bp, Homo sapiens
atggcgaatagctagcacatctgcagctaggactcagctcagtacagtgaagagggtatgggatgcagagtcaggcatattttttactctacagattatgttttaaggaagattatgaatgctaatctagcattggttcatgcctgtgttgatttcattacatagatctagcagcatctgtgaaagtagtattaggcctcacttttaaaatgctacagatttctacattttgcatgagaaataggtcagaagagcattccattgaagtggcagagctccagtttgagtccataattctcctcctatcatgtccttcctaatctaattatctgtacttctttaggttgcagtattttttaatatccttagacatagccttggtatattagaaacactttcagaagactgtaaaagatggggaaataaatataagaagtcaaaggaaatcagaagaaatacaccagaaagaaaatagccactatcaatgccccacctgcctcccccacctacttcccattaagcatatattgcttttctaaaaytatgtggactatattctaccttaccataggaat

SEQ ID NO: 855677 - DNA, 565 bp, Homo sapiens
gtaaagaccctctttcctaataaggtaaaattctgaggttttgagtcaaattaaattttgggaaacacctttcctaccagtacaatggtggagctgaatgctctcttcaaacacaaacatactgtagagtctgtccccttgaatgtgtatgattgtcccagatacaatgatcggtacatatttcatttaataaccattccaaccctctgagtatatgttctcttttttacatataagaatgcccaaggtcatgtgacatagagcagtattatttaagttaagtgattttttttttctttgagacagagtctcgctctgttgcccagggtggattgcagtggcactatctcggctcactgaaacctccaggttcaagtgattctactccctcggcctcccaaggaggagctggatctacaggcacgcactaccatgcctggctaatttttctattttttagtagagatgggatttcaccatgttggccaatctggtcttgaattccaggcctccagtaatctgtctgcctcarcttctcaaagtgctggcattacaggtgtgagcc

SEQ ID NO: 855678 - DNA, 609 bp, Homo sapiens
ctcttctgtcttctattacctcttgtttcaaagaagaaagatttctycattcataattcctgcccttcccctctgttttcctctgggatcttaccttcatccattcattcaacaattatttgttgagcacctaccatgtgccagatgctatactaggtacccagaatagaactataggcaaatcaaatcccttttattcaagagtttatactcttcctctataatatctctgcagatgctctcaaatctttatcttcagcttggatacttttccaaagcttcaaactgtaatattccgagtttcttttggtcatctccacatggatgttccatcaatccctcatatcatttgtagcatatcccaaattaaactcttctcaccaaactgtttttttcttcttatcgagagtcttactttggttaatgattctatcatggtctgagccactgatatttgagaacctagagttataactgctttccttagtttcactgtctgtacaaggctgaaatggctttccaaaagatattcacatcttaatctctggaacctgtgaatgttacattatatagcaaaaggaactttgcagatgtgattaagactcttga

SEQ ID NO: 855679 - DNA, 603 bp, Homo sapiens
tttccactggctaagaagcagatgcagtggtgagaattggagaagccatcctggatccaaagatgaaaaatccttgttgatgatggcaaagccactctacmagattgggactgactagatctggatccacacataagaggtaaataaatggctatctttctgaagttactacatttttgggtgccccccactctctgcctgttttttctagcagcttagactgtaacctaagctaagatctaagtgagctatgaaatttgagcccaagtctgaaaatgtatgttactctattaacaactattaattagtttaatgaggtagcatatataatatatttataggaataagacttggaatagctcaagccgggcgtggtggctcacgcctgtaatcccagcactttgggaggctgaggcggacagatcacttgaggtcaggagttcgagaccagcctagccaacatggtgaaaccccatctctacgaaaaatacaaaaaattagccaggtgtggtggcacatacctgtaatcccagctacttgggaggctgaggcaggagaatcgcttgaacctgggaggtggaggttgcagtaagccaagatggc

SEQ ID NO: 855680 - DNA, 425 bp, Homo sapiens
gatagggactgagattctattactgaatgaaactcttataagggcttgggagtgcagatagggggagttctcaagaaattttacaagaaagtgttatgtattatgaagcatgggttattgtttgtttgtaagtaaaaaaaaataagagagagagagagattaagcaaaataaacattaagcaaggagaagctgctctaaccatttaaatgatacttttaaaatgaagattaacagcctttggcagactagaagaaaaaaaataaaagaaaaatgtcaagcagaaaacagttaccacagatttgatcagtatttactatcaactgtaagaccgttctaggcaggtggggtctatgggaaayacaaagataaatgagagagaatcccctaaaaccaataatattgctttatgtttaatttatcactt

SEQ ID NO: 855681 - DNA, 599 bp, Homo sapiens
gcatgagtgtatatgtggtrggtggagataaatcttaatggtaaaactagacaaattatttcttctaaccctctaccaaaaatctattagcttatgatgttttgtccacagctttttaagtcaatagaaatgaatatcttctcctacatctgattgtaccatcatggaggcaaaccagataaattactgtcaatatctggccaattaacttactcaacagagagctaataagcacatactatatgccaggtacttctctaggtactcagggaataaaagatcaatatgagatactcttctgttctcaaggagcctgtggtgtactaacatacttggggatgggaattgaaagtgaatcaaacattctcttgtgcaggatcccagctaacccatcctggcatccagtactttagagctttcaaagcactttcacatccaccatctcactttgatgctctcaggagccctgtgaggtaggtggggaagatttcatgaacttctttttatagatgaggaaactgaagccttattagaaattaagtgactcaggtgctggttagcgagtggcaaaaccagaacctacattattgggttatgtt

SEQ ID NO: 855682 - DNA, 583 bp, Homo sapiens
taaggtttctaaaataaaaattaggagaatacattaattatatkagaataatcagaaatttcttaaacacaaagcacagtcagaaaaactgataaattgaactttataatattaaagatttttgttcatcaaaagatacaattaagagagcaaaaaggcaaaccaccaactgagagaagatattcatgaaattggcatatatacacatgcatatcctgttacaagtctataagaaaaagacagaaacttccattttaaaatagtcaaaatatttgttcagggccttcaataaagaaaatatttaaatggtcaataatcatgtaaaaagacgattaacatcattgctcattagagaaatgcaaactgaaaccacaatgaaatagcactagacacccactagaatagctcacattaaaaagggctgaaaatatcaaatgttggcaagaatgcagagcacctcaaattctcataccttgctagtgagactataaagtagttcaacaatgatatggtttggctgtgtcaccacccaaatctcatcttgaattacagctctcataatccccaggtgtcttgggaggta

SEQ ID NO: 855683 - DNA, 588 bp, Homo sapiens
cctcctccgtagactcctcaacatgaaggcaaggaggatgaagccctttatgatgatccacttccacttaatgaagagtaaaatatattttctcttccttatgattttcttaataacattttcttttctctagcttactttattgtaaggagacagtatataatacatataacataaaaactatgtacctaatgactgtattatcagtaaggcttccagtcaatagcaggctattagttaagtttctggggcggggagggtcaaaagttttcatgggttttcagctgtacaagggacagcaccccaacctctgtgttgttcaaggtcaactgtacttagaaactttttagaatgtactacatactgtgagccaataaaaatgttcatgtaggctgggcatggtggttcttccctgtaatcctagtactttgggaggctgaggtgggaggatagcttgaggccaagagttcgagaccagccagggcaacatagcgagacttcatctctaccaaaaacwcccagccaaccaaacataaccaggcatggtggtgcacaccataaggctgagacaggaggatcccttgaacc

SEQ ID NO: 855684 - DNA, 473 bp, Homo sapiens
ggccttactaaaattatagctgtacatgcaaaacaacatattcatgagtggttggttaaaacctgaaattatggagaaggctgaattgacatatacagcattatcggcaaaaaccttcacacrctgtgccctctaaaatgaggctttattttctgtctgaaacattgacaagggatattcaatatgggatatgccaatgcatactcgtttatctgtcatgcatttttcttattctaatttctccatagagtttagcagtcatgacttttgtaattattattgcattattccctccattcatataaaattataatttctctttagtaaaataaagcatgcaatttgactaatttgtatttaatgcttatataccagcagtagaatatttagcagattgatataacaccataattcatgatacagtattccatatataatactcatgatcagaagtgagaacttgcaattttact

SEQ ID NO: 855685 - DNA, 616 bp, Homo sapiens
acgatatgggtgaaccttgaggacatcatgctaagtgaaataagtcattcacaaaagaacaatactgcataattccamgtacacgggtacccagattagtcacgcttgcagaaacagaaagtagaatgatggttgccaggggctggggggatggggagttattgcttaaggggtacagcgcttcagtttggaaagaagagaagttctggaaatggatgatggtaagcatcccacaatgtgaatgtacttaatgccactgaactgcaaacttaaaaatggttaaaatcagccgagcacggtgtttcacgcctgtaatcccagcactttgggaggctgaggcaggtggatcacctgaaatcaggagttcaagaccagcctgaccaacatggtgaaacttgtctctgctaaaaatacaaaaattagctgggcgtggtggcgcacacctgtaatcccagctactcggaaggctgtggcaggagaatcgcttgaatccggaaggcagaggttgcagtgagccgaggtggtgccactgaactccagcctggatgacagagtgagactccgtctcaaaaaagaagaaaaaagggccgggcgtggtggctcatgcctgtaatct

SEQ ID NO: 855686 - DNA, 541 bp, Homo sapiens
atgttacacaatcaaggatgagtaagagatccaaagtacaaaatagattttaatgaaacagagtataaagaggacattgatgtggtttcagattccacattgcaattaacctttatgacgcaaccactttcaaaaaagaatatccataattatctgtagaggctattaaaatgttcctcccttttctaactacatattgtgtgaagctgaatgtttttcatgtacttcacccaaaacaacaaggacagtgccatctttctcattccttttttttgtttgttttggggaatatagttatctttcataagatatgttatacataataaaataaatctatttatttatttaatagaaacaggggcttgctctgtcatccaggccagagtgcacgatcatagctcactgcarcctcgaactcctgggctcaagcaatcctcccacctcagcctcccaaagtgctgggattacaggcatgtgccactgagcgcagtgattgttatttttatacttgatcttagccaaaaggccgagaaatgatgtg

SEQ ID NO: 855687 - DNA, 604 bp, Homo sapiens
gttaaaaataaaagacttaggctgggcacagtaactcacgcctgtaatgccagcactttgggaggctgaggtgggcggatcacctgaggtcaggagtttgtgaccagcctggccaacatggcaaaaccccatcttgactaaaaatataaaaattagccgggtgtggtggctcatgtctgtagtcccagctactggggaaactgaggcatgagaatcaattgaacccgggaggcggaggttgcagtgagccaagactgtgccgctgcactccaattaaagatggcaatggctaatttaattgtagcactcaattaacaacagtcatatttaagtagagaatcctgggtgagaccctgtctccaacaacaacaaccagaaaaaagacttagcagcctgcttatatggcatcattgaaaaatgaggtattcaatcaagtgactttcacaaataactaatccatcaatatttatgagttaaaactgcttaamttttcaaaggttttccatttttttgtttttttctaaagatggcatagacccttcttcaaatgaaaatcccatttggaatctgatatatattttaaaaagtagagctgcaccagttg

SEQ ID NO: 855688 - DNA, 608 bp, Homo sapiens
ttgttgaacatttttattaccactatctctttttgtataaagttttattggagcacagccatgttcatgcatttacatattgtctacagctacttttgcactgttagcagcagagttgagcagctgttacagaaactatatgacccacaaaacctacatatttactatctggaactttacagaaaaaatgtagtggccattggtttagaaaagaaaggggtaggcctgctggaagaagagcatcaatcaagcttgcaaagggatattaaatggaagagaaatagaggaatcagattatggaggctgagaaaactgacacaaatgaaataaataaatgagccattataggacacccagaagggagtgacatcaggaatatggaaggcaaggagaggtgtgaagaaaagagcagcccgggaggatttgcaaacaatcctggtgtctagtcctagacagggaggtgagcctgtgggtggccttccaaggaaccccatggctggtgctgggaaagggctgtgggcgaggagtcaggasccctcgttccagtcttgacccaggctctcccctgggcagctccttccatcaacccggcctcagcttcctcagca

SEQ ID NO: 855689 - DNA, 610 bp, Homo sapiens
gtgatcaatttctcttccccacacttaagccacatccacagactttctattttcatcacaacactataaatatcacagtaacattttaagtacctccttaggttttctctcctcatctgctgtccctaaggagcaggtggggtgcaggagaaaagatggaaaccatgctcaaggagccccagcctcctctgctctcttcaataaatgctgatgtcctgcccataagcctggcactggattgggactggctcctggtcctatcaatttgaactttctacctaatactactatattatgtcaaatcttctaggcttcttttaaaactctggatgagcataggagctcagacacacatgtacgcagttgtgcatgcacacgtatgctcacatccactcaccatcacccctcactctcagcaggtgatgcctagatgacgtctcctgcttcgtacagacaataggaaccaccatctggaaagtccttcagagtcacacattcagagctacaatccacccacatccacrtgcattctcttttcctttccctctcctgtaagaaagttcaatcaaagcaatctgaggcaagttctcttacctatttttggatgcca

SEQ ID NO: 855690 - DNA, 588 bp, Homo sapiens
cctgttgccacccctgggtctgaaggagcaagaggaggacaatgcagctgtaggagaggggcctcctgacagcagctgtgatccccaraagaggagcacaccaccactaaactgtagcccaagggggaggaggccaggctagaaacacttctacccctcccctttcactctcttatctctcgctggtgtctcccattggccaaacccacccaaaagtcagagggcaagagccacagtgttgtggctctctagggatcagaacaactagaagaggttgctctgacctggagagcaagtggagcatgttgcgcctaccttctctcttcaccctcattcagctctctttgatatacgctgctttaacacagcactctcttccttcatagttattctccccatttgtatgtttcctatgttaataatttgattaacatcaaattattatcaagtaattattaattatttgatacggataatttttcatatcaaatgatggacacgatgtgttcataagctcatgaggataagcaccacttggattgccagtgcctggcacagtgcccagtgtggagctctgcaaacatctgt

SEQ ID NO: 855691 - DNA, 596 bp, Homo sapiens
agacagacagtacagatgaggatccccatcagagtgtcagggaggtccagaaccttcactccayattcagtcgaaagtcttaatgaagcctctggaccaaagctccagcttttctcctgccccatagacagaaatagtgagagggttccaactggacaatgggccagatggggcaataaatggaaatacaaaacaaaggaaatacatcagaatttagagttaaggaatccatgtcctcccctgctctgacacttactttcctctgacacttacttggctgtgtaactttgagtaatcatgcaactccctggctctcagtttcctcgactgtcaagcaggaataacgactaaactttccattacagttgctgggaggaccacatgaggacatgtgttacgtgaaatgtagtttataaattcttaagcactgaacaattcatcccttggtttcagagtcacacaagatggttctaataaagctcatttcctaatttttgtatggggagggcactcattctggaagcaaaatattcaccacagatactcctgagcctcatgggacctcattcaccagggcggttcctcagagtggccct

SEQ ID NO: 855692 - DNA, 620 bp, Homo sapiens
catgtataggagtgaaaaataagcattggttgttataagccactgagatgttggggatatttgttaccacagtgtagcctagtgaaaactggcaaacatgtgagacatggagacagggctgcagaacacagagcaggtcccacatggggggttatggcacgaaacagccatgaatgtcattagttgtgaaaatgtctcaacatatatacatcctggaggactcttcacatataaatggggggacaagaaggatacagatacctcttggtagatttggggaggtttcttagagaaaatactctctttgaaatgaagggaggacatagcaggacaataagagggaacatgagggtgggtctggaagcaattaatatagtgaattattctaattcactgtatttggtgaataagagggcttgagtagatgttagatttgaagcccaacttcagagttagattgtgggaggggacagagggaggacaagaagtggctgagggtgttgatgaagagtgacaagtttgtttctttagtaacaccaggtcttcmagatgtctcttttctgatctccacagagaatgcatctgaggccactttcaacttctctttagttatagtttag

SEQ ID NO: 855693 - DNA, 378 bp, Homo sapiens
agtaaaccggagaaaatcaggaaggagaaaaggtgctgtgcttggaagtgaaattatgacagcaacaagtggagaaatggttatttgacacgttaagatactttaaccgaaaaagtacttgatttttcttgtttatgaccagaaaggggcatcgctgtgatactgggttaggcagtgtggtatagcagatatgtggttaacatcattgctgtgtcatttgtttaatctgtgactttagtcaagttactaagcctctctgaatgtgttttctgaggtatacagttggaatattggcacctacctgaggggcttgttgtgagaactatgttagttaaagtrtaggttgggtgctgaacagagcgccaggcctctcagaga

SEQ ID NO: 855694 - DNA, 623 bp, Homo sapiens
ggagggatgaagggggaacccagcgctggacgtggcgcttagcttcacccaggtcggtccctgaatgtctttctaatttgtgtccgtgagcagctcgccagaaacttctgggatcttggcaaagcatccgtcttcgcgagtaaccttcggaagtgacatggggcgtacagtccaatttgggggtagcaaagagaaaggtcttctgtgatcattttatgataaaccttctggggtctgtccagaactgacttgacttttgtaccccagatcgttttctctttgactaggtagattttggccctagatcatcctctgaagaaacctgatctttcagacaaaagcctccttcccccacagcaccgtataaaattttatcaaataaatttgaagagcaaaaatgggggaagacctcttctttatagacctagctcccagtttccctgctgttgttttttatgtattcataaaactcccgatgtattacaacagagaagttcccagacacaagtaaactttacctaccgagtgagggartttgggggtactcttttagagacaactgaactaatcatgttaacggaattgtaagtagtcacacgttgcccagcttgacacacctttat

SEQ ID NO: 855695 - DNA, 643 bp, Homo sapiens
cctgatgggagcatgcgctttagctctgacatcattttcaagaaagagaagggcaaactggcaccaaatagctacagaaaaagggaggggaatctgtccttttttttttttttttttgagcctgtcacccaggctggagtacagtgtcgtgattttggctcactgcaacctctgcctcccgggttcaagcgattctcctgcctcagcctcccaagtagctgggactacaggtgtgtgccactacgcctggctaattttttgtatttttagtagagacagagtttcaccatgttagccaggatgctgttgatctcctgacctcgtgatcctcccgccttggcctcccaaagtgctgggattacaggtgtgagccactgtgcctggccgagtctgtccttttaagtatagaacagaacaggacaccactttggggctccaaggactggtggcttcctattgcttttccttctcagagagtgagaaagatgtaaccatttgacattgtggtaattaatgtttggagtcttagcctgccttyccaaggcccaatgaggtggagtgttatttctgccccttaattgggaggcaggaggaggccccatggacatatgttttgttcatgcccgtggcctcaccagaagtc

SEQ ID NO: 855696 - DNA, 570 bp, Homo sapiens
tctgagcaatggaagagccatccaaggtgttaaggctgaacttgataagaactgtattacaataaatcacactggtagcagcatggatggaatgggattgtatcagaggcagagaggctagcatagtgtagaggctctcattctgcaagtaaaaaataaatcatctaagaattaatgaggatctgagctgaaattgtgattgtggggatgaagaggaagagagcaattgaaagtatatttttggaataaattggcagggctcaggaatgtggtagaatgaagaagataagagaattcttgcactctctggaaaagctttcagcacaaggagaatggagtttagctttccctatactggatgaccctcagtaataattaaggtatttgaatgttctgtccttaacacctgagcttgataaagaacctactttcagttctttgatctgtgtgtaacccagcaatgcctctcatccctagtgttcamccgagtttatagtctttgccagagaaaagaaagcatcattagagaaacaggccaccagtttcttctcctgacacttggatacttca

SEQ ID NO: 855697 - DNA, 494 bp, Homo sapiens
ttaaagagtgaaaggcatgagatcttctaatccttccytgtcacttagtcgcctccactcctccacagaaggcgggacatggagccattaggaactgttgtggtggttttaggaaggtgagggctaaaggctttgatgtgagaagtcaggatttccttgaagccatattggctattttctagaagggaggcatgcagagaaatcatgtggcttcactgacagggaaggactgagctctggcaagacacagatgtttgataatcttcctcaacatgtgggctttctatgcttctgcatttataccctcttatctgagagccaagggacaaaagccacccagggttccctgatacagtaatcaggccctcaaacctgtgctctttggctttggatattttgaattcagatatctgagataaatctccctttttcaggggctgcttttagctggcaaaacaaattcatgaagatggtttaatagcttaaccttttac

SEQ ID NO: 855698 - DNA, 613 bp, Homo sapiens
gatgagttcctttgagggctgygccatcctgggtgttatcattgtctgcctggccatttcccctcttgaggacatgttaccaactgctgtgattgagaattcaggggaccacactaacatcagaggaaactagtgcacactaacctcttgcataaagtgaaaggaaattgatctaccaccaagattcttataagtgatgtttttcccaatccctgaccatggccagtgtcatgaagttgtcattgcaattggactcagaacattaggggcctggagaaagaaatacagaattaggtcttctaagcctttgtttataccctgggtccttttaaaattcctatttcagactctgggcctgtggtccttcctaaaatgtacaactaaagcaattctctaagggttgaagtttttttagagggacattaaatggtttttcttcaaaaatttgactcaaagaaggaagggaccaaagatatacacatattctttggtaccgttacttgcacttagaatctgcatgaaaatgtttaaatagctaccccaggcttacagcttgtgggctgagctttttatccctatctcctggtgctcacctctttgtctaattccttcc

SEQ ID NO: 855699 - DNA, 628 bp, Homo sapiens
caaagaaggaagggaccaaagatatacacatattctttggtaccgttacttgcacttagaatctgcatgaaaatgtttaaatagctaccccaggcttacagcttgtgggctgagctttttatccctatctcctggtgctcacctctttgtctaattccttccccttgagtatgggcaggacctgtgattgcttttaccaatagatacagcaaaaagagtgggccattgttcccatggttctattatgtaaggttatgttttggttgccaacatgagagactctccttgctggctgatgaagtaagcaggcattttgaggaagctatgtggcatgggttacaggcagcctctaggagctaaggacagcctcccaacatcagaaagaagcaaagggcctcattctcacaacctcaaagaataaatgctgccaataactggagtgagcttggaagtggattcttccccactccagcctccagatgagaacacaggctggtcaataccttgattatagctctgtaagaccctgagcagaagacccagtaaagttgtgtccagattcctaayacctcaaaactgtgaaataattaatgcgtgctgtcataaacctctatgtaggggtaatttg

SEQ ID NO: 855700 - DNA, 584 bp, Homo sapiens
ttatctatgggaatggagcatcctyggattttggtatttgaggaggatcttggaaccaatccctcgtgtatactgaggggcaactccgtatgtgcatgtgttattcctagtgctcggcccaccaggtgtgcatttggaagggttgccaattcaggtgaggaaaagtgagctaagagacatcctcaggggaggatgaggacttggggggggaatttgtgggttccctgacagcctcacactggttgccaaacccttccctctttggaatgtgccatggcaaggcatttatttcctcacatggtgatcattttcactcacacatagggtgtgtccgagggtattccactctacaatgattaataatgattagccatcattgggggttgggagggaccaggctctgtgccgaatggcacttatttgcactctctcattcgatactctcagcaagcaggcaatctcatcccattttaaaaagtgagaaaactgaagttcgacttggttcagaggcttgctgaaatttgaatagctggcaactggcagaatgggatttgactccatattgggtgaccctgtgacccccc

SEQ ID NO: 855701 - DNA, 555 bp, Homo sapiens
ctagatcttttctgcttttttgatatgctgcctttgtaatacagctttgaagacttaagtcggtaatgttattctttgctctctctgctttctgtctttttaaataactgtcagtgataaattgaaatatgcctgcaatttcatatacacattctttttttggcagtggctattttgcttcatgataatcatgctgatttcttctgttttagatattacaagaagacacaatgcattctccctggatgagcaacacattacatgtattttgtgcaattagtggtacatcaagtgaccgaggttatggttccccaagatacgctgaagtgtgaggaaatgcagatgtacgtgacaatgagactgacctttctcaggaatatttggagctgtgcaaatgttaaaatttaaagatttgatatacatggagtgtttcttctcgacaccaaaattttcatgtgttccarcagggtgcttacatatttgtaaataagcaacttgaaagtgcctggaaaattgcaccactgtgcttggtttgtacttttttaggtaaatcta

SEQ ID NO: 855702 - DNA, 498 bp, Homo sapiens
atttcaattatttctccaactccccatcattcttaagatattctcatttcttgcacgcgcgcgcacatacaccacacacacacacacacacacacacacacacacacactgtcctggttgagttataggacatcctggtaagagtgtctgcataaagcaagaaactgcttactacttgtttattattatcgctttacttctttatgaaagaagattgttttgggaccagctcctaaaagtcatagggaaaccaccagaattatttgcacatttctttgcaaaagaattgcagaaagtataaagcttattctaaagatccagtattggtcacaggcaaatcatgaagagggtctcatttgtctttgaggcccccattccctacttccactgctgcttttccagmatcctcatcttcccttctcactaccaacgctttattttattattattattattattatttttttttttttttttttgagacggagtctcgctctg

SEQ ID NO: 855703 - DNA, 658 bp, Homo sapiens
tattttaacaatattggctcttccaatccatgagcatggatttttccatttgttgatgttgtctccgatttctgtcatcagtgttttgtaattctccttatagaggtctttcgcatccttggttaaatacattcctaagttttaaaaaaawgtgttgtaaatgagattgacttcttgattaggtccttggttagatcattattggtgtacagaaatgctactgatttctgaatgtcaattgtgtatcctaaaactttactaaactcattgatcaaatgtaagagtatttttattggagtcttcagatatttctggatacaaaatcatatcatcagttaacgggaataaattgacttctttttcaatctaaatgcttttttttcttctttcgtgattgctctggcaaggacttccagtgctatgttgaatagagtggcgaaagtgggcatccttgtcttgttctagttcacagagaaaatgctttaaacttttctctattaagtaagatgttgactgtggccttgtcatatatagccttttttatgttgaggtatgtttcttttatgcctagtttgttgaggatatttctcataaaggggtgctaaattttattgagtgctttctctctctctatttagatgatcataaaatttttgtc

SEQ ID NO: 855704 - DNA, 618 bp, Homo sapiens
tgagaatcaaatcaagaactcaaccccttttaaaatacctgaaaaaaaatacttaggaatatacctaaccaaggagatgaaagacctctacaaagaaaactataaaacactgctgagagaaatgatagacracataaatgaatagaaacatatcccatgctcatgaatgggtagaatcaatattgtgaaaatgaccatcctaccaaaagcaatctacaaattcaacgcaattcccatcaaaatatcaccatcattcttcacagagcagaaaaaaccatcctaaaattcatagaaagccaaaaaagagcccacatagccaaagcaagactaagcaaaaagaacaaatctggaggcatcacattatctgatttcaagctatactataaggccatagtcaccaaacagcatggtactggcataaaaataggaacatagaccattggaacagaatagagaacccagaaataaacccaaatccttacagccaactgatctttgtcatagcaaacaaaaacataaagtggggaaaggacaccctattcaacaaatggtgctgagataatcggcaagccacatgtaggagaatgaaactggatcctcacctctctctttatacaa

SEQ ID NO: 855705 - DNA, 483 bp, Homo sapiens
tttgagccaaaatctgagaaaaaattagcttctagacaggagaactatagagaatactttatctcacatcctttatcacagcaagttaccctaacgctggcttttttytagtttgtgattttttccagtttatggttaaccagttatctgtttcctatgacaaatcccctgccttaattttattctactctgaatccttcagtgatttctaataggaaatataagtcattagcaaactctacagggcaaataatttcaggtttcactcttacactctttaaatagtatcttgttggtaatgcacattgtattttaaaagaattagaactgaaaatgcaaataaccaacacgtattagtgattgctacaagccaggcactattctaagcactttacttatattaactctttcaatcctgacaatcctattaagattggtactgttattatcaccattttaataatgaagaaactgaggcataga

SEQ ID NO: 855706 - DNA, 447 bp, Homo sapiens
ccaccgcacacttggactgtggcaaccacagagggccagtgggattcagaagaatgcaggattcccataggtctaactctcagggcagactgctcctaggggaagggagaatacagtgttccaaaggagtaccccttggaacaaaggaaaccagagtgcacacactcctgtgcctgagagtttcctgcttgtgaactgaaggtgactgtgctccttccagcagacatgtggacacagcactgaggtctgtaggggaagagtgtggttctagcccactaacaggcagctctggtgctcaggaagagacatgaagatgggaccctctcctcctcacccctgcccactgtggtggatgcagctgtaactgctcccccaggcggtttgcatargtatacttgcagatggcctttccagtgctattaggggctgttgcatccctactagtgg

SEQ ID NO: 855707 - DNA, 638 bp, Homo sapiens
ggtggatattttggcttggggaacttatccatgggaaaaaaaaatggggaggagaacttgcaattaggcaattttaagtcccccttgattttaccagatgtcaaagaagcacaaaatatggatttttaattttaggtcttacctataaaaccagtgcaaaaaaaaccccacaagtaaataaatgcatatataaataataaataatataaaaatagtaaaaaaaatgcattatttatacatgaaatgttacctacacaaatattttaagcatgatttacaatagaaccagtaagttctcccgttttcagatattaaatagttataaaatagataacaaattatagtaaactagaaaatgttatttttattttgttcaattttagaataggaacaaaaacagtaaaaatatcagaaggaaatctaacaaaagataacacatttatggagataattacaaaagtctttgatagagtgtagcagaaagataaattaggtcaaccaccactttttaaattttctggtaaatgtgcattattatattgcattaattaaaaaaaactgaaaaccacatttctcacattccyttgcagtttagattccagaagatatttaagctctatcaatccaacttggatttg

SEQ ID NO: 855708 - DNA, 448 bp, Homo sapiens
aattttacaaaatatttgaacagcactgctcaaacctatcaaggttataaaaagcaaaaaatgtctgtgaaactgccgcagccaagaagaccctaaggagccataactaaatgtaattttacrttatgaaaaggaacttaaaaataactacataaaaaaactaagaaaatctgaataaagtatggacatgaaataatcataacacactaatattagttcattaatggtgacaaatattctagcataatatgtcagtagtaggagaaactgggcatgatatatgtggaaactccgtggaatctttgtgacataaccgggtatcccagcctcaaaatacatttaaattgttttttcctctctggctctcagccttgaaacatactttgaaactctttgtttttcccttttcctccagccacctctgtgaataatgctcacttatctaatt

SEQ ID NO: 855709 - DNA, 623 bp, Homo sapiens
caatagaggaatataaggaaggttttcttctccagtttttcccctttagccttcctatcctcttattccctacctaactctaccacccccaacccctccgagggagactgcaacccagcttagtgaggtatgagcctgggagaagatcagaaagtatcaagtccttgaagatgtggtatccagagatgtttggagctctggaataatatgtgaatgagcttcacatctccttagccttctaaagtctaagaaatagctagaaggatacattgagtctaccctgctactgaagtttgaaaaatacaaaacaattttggaacacagatgcttgtttcaagggccaggcactatgtcccagtctatgacagcagatattgctttgtttttcatcatttaataacaaatcttgacccaaaaagcagaaagctctgcaatcatagaggagagcaaagaggaaatagagagacagagagagagagagagagattggaaattgtgaaataaagctgcagagrgatagaaatgacattgtgaacaaacaataataatatgtgcattttctggtattcaggagaaaaattcacaaaaataattatggaggaattaaaggaagaaaacaattg

SEQ ID NO: 855710 - DNA, 589 bp, Homo sapiens
tttttaaaaacaaagtgacttaggacatctgctagccatttccttgagtatcttggagtatttgctggtgatatatgtattctgtatttatttatttattttgagacagagtctcgccgttgttrcccaggctggagtgcagtagcacgatcttggctcactgcaacctccgcctcccaggttcaagcgattctcctgcctcagcctcccaagtagctggcattacaggcacccaccaccacgcctggctaattttttttttttttttttttttttagtagagatgaggtttcaccatgttggccaggctggtctcaaactcctgacctcaggtgatccacctgccttggcctcccaaagtgctgggattacaggcatgagccaccgtgcctggccccctgtatttatattttctgaaacttgtttcttccatgttacatgttcatgactatttttcaaggtcctacttcaagatattttgtgtcattattctaaagtcagtgctaagaagtcacttccctacggaagtggattaaaattacgtttttttttttttgtcttcttttaaaaaaagatagacatggttgat

SEQ ID NO: 855711 - DNA, 513 bp, Homo sapiens
agctgccttctgagaagtccttaactcgggctgcgaagcgctcatgtgagcctgggggaatcatttctgcctcccagatcctggcctaactcctggtactttaaggacaaccacaggaagagacatgaaaacataaatcactgtgttgttcttcacagggtgaagacagggtccatggaccacaggtcagccttgtcagcccgcatctatggtgtcctcaccatgtccctcccgctctccatccctccctgggccacttctcttgcactggttgtgagcgtcccccatcctaggcactggttcctggcctcagctgctgtgggaatcctccgagagcttggtgaatggccaacactggagtcctggggggcgcaggcaccccyggctccctacacgataccaatacgtgaccagtgaagaactgcagtgtgatcaggtgggaaccccggggttggggtcctctcaccattgctccatcatgcccattcctggctgggatccaacagccaccca

SEQ ID NO: 855712 - DNA, 513 bp, Homo sapiens
agctgccttctgagaagtccttaactcgggctgcgaagcgctcatgtgagcctgggggaatcatttctgcctcccagatcctggcctaactcctggtactttaaggacaaccacaggaagagacatgaaaacataaatcactgtgttgttcttcacagggtgaagacagggtccatggaccacaggtcagccttgtcagcccgcatctatggtgtcctcaccatgtccctcccgctctccatccctccctgggccacttctcttgcactggttgtgagcgtcccccatcctaggcactggttcctggcctcagctgctgtgggaatcctccgagagcttggtgaatggccaacactggagtcctggggggcgcaggcacccccggctccctacacrataccaatacgtgaccagtgaagaactgcagtgtgatcaggtgggaaccccggggttggggtcctctcaccattgctccatcatgcccattcctggctgggatccaacagccaccca

SEQ ID NO: 855713 - DNA, 583 bp, Homo sapiens
aaacttcacccagaagaggcctcacttctcaagactttctggtttttcctcatttaaataaatatttttatgaaggccagttgcggtggtgcacacctgtaatcccagcactttgggaggctgaagcgggtggattgcccaagctcagcaatttgagaccagtctgggcaacacggcaaaaccccgtattacaaaaaatacaaaaaattagccgggtgtggtggcgcacctgtaatcccagctacttgcgggggctgaggtgggagaattgcttgggcctgggaagtcgaagctgcagtgagctgttattatgtcactgcactccagccagggtgacaaagtgagactgtctcaaaaacaaaacagtatttttatcaagatactgtttacatagttgaaagatttaagtagtattaaaaagtgtatcatgaaaaccactagagccctggggcatccctccccaccccagggcttccagcccccggcatctccctcctaggctagtgatgggtcactgtgcctatggcgactgattgaacrgaggaagaagctaccccttcggggcctccgcagggccccagaa

SEQ ID NO: 855714 - DNA, 584 bp, Homo sapiens
gacttggatttactatcttcatactccataaagtaacagggatcatattccagaaatcaacatgaggaaagacgtttttgtgtgtatgagtttacttacttgggtaataaggcagaatgtttgaaatgagaactgtttcaggaaataccaagagcaacacagttccatatgcaatgaatatttcttcagtggccttaaaagtagtatgagctcctccctccaattgaatctgtttgagaatgtttttattctcttagttaagacgccttctcaaatcctgcttctaatttaggacaggaagataaagaggcatgtcttcagagctgtatagggagcaattccaacccagccaaaagttcataatccagtggatctaatttagaagagggaagaatggcttctagggttcccaggyacacactgttgtttttttgagcacttttgtattcagtacagctctttgacaaactgtccaagtaaagcccaaaagcaggttaaggttttgccactcctgcagtagtgggacaaacgtttgtgaagactgacgaggttggaagaatggaataaaatcccagtaggcccat

SEQ ID NO: 855715 - DNA, 536 bp, Homo sapiens
atgagaggaccagactaaggtttcttccccatccaacattttcatcagcaaattaaaccaagagtgagaatctttcctccagatcttcttccaacctctraacacagcaactttgattgttgttaattacccaaacccctgcctagctgaaggatggatggctctgtgtttacaacttgaatgtcttcaaacataacgtattcaaccagggacagaacaatgccaccgcagactggaaagcaaagatattgtttatacaggtaagatgtcttgaaccagctgtctctccagacattttttgctttgtagaaaacaatgaggaacaccgttatagacataaatgaaagctcccaagatggttacagggagccaaaggatctgggagaggcatggctgggctgctgctaattggacaggtggctcttcctgccagctgtcctcattcaacaggcattttttaatgagaaatatttctctgcaattgaagtaatggtcctaatagaatattatggccttgcataaggaaaagaacacaa

SEQ ID NO: 855716 - DNA, 522 bp, Homo sapiens
ctcaacctgcaagatgagaggaccagactaaggtttcttccccatccaacattttcatcagcaaattaaaccaagagtgagaatctttcctccagatcttcttccaacctctaaacacagcaactttgattgttgttaattacccaaacccctgcctagctgaaggatggatggctctgtgtttacaacttgaatgtcttcaaacataacgtattcaaccagggacagaacaatgccaccgcagactggaaagcaaagatattgtttatacaggtaagatgtcttgaaccagctgtctctccagacattttttgctttgtagaaaacaatgaggaacaccgttatagacataaatgaaagctcccaagatggttacagggagccaaaggayctgggagaggcatggctgggctgctgctaattggacaggtggctcttcctgccagctgtcctcattcaacaggcattttttaatgagaaatatttctctgcaattgaagtaatggtcctaatagaatatta

SEQ ID NO: 855717 - DNA, 550 bp, Homo sapiens
agtggaattaaagcttcctgaagcctatttgaattyataatgaaggaaattcagaagtaaagcagtgtcgacttgatattcccaatgttgtgacccttcctaaaactctttgggtttctttatcatataaaatttgcttgccgcagaaatattggcagtatatgaaatctggacggaatccagaacctagtacagtccagggaaaaatgttctttcgggcgctgaatatatagaggcatgacacaaacaagccttcatctatttatcatagttcatggtctggtcatgtcccctgccaaagcttttctgggaagccgtaagacgaaaatgatttgctggcctagcttctgacttgacttcattcctctctgtgggggatcactttacattttcttaattgcagggacagcttgtgtggttggcagttgtttgaattgagaaatggactttaaggaactacggtttctttggctcagctggaatttaagtagtcatagactaaattaacagccacggtcaaagcccagatgacagctgtgtcacagaaaag

SEQ ID NO: 855718 - DNA, 612 bp, Homo sapiens
atgcattatatattaaatatatattatttgtatattattatattatttagtatattatataattatatataaagtatatattgtttaatatgtaacatatcatatrttattaatatatataattatatttatatataatgatatatttactctgaaaatcagcaatgaaaggaaaagcttaaatatgtatcctgtctttcccacaaactgggaaattatctatttcaagataattaaatagcgttagttgacaaggaaaagttattttcagaagaattctagctaatcggtggaagaaatgagagtattagaaaatcagcactttgtaatctttaatgaaatcactggttaaggcaataatcatcaatggatcgattcatttgatcaaagatcagtggtgaattttacaaagaaaacatcagatttcaccacctaaacctactggttaacctcagtaccactaaaatgggataacccagtattgtgtacttgttgttgagaagcaatataaagtatacaggaccaattatgaagtattatcaaaaaagcagaacctgaatctaattgagcctctagagcaaacttccatttatagaaaatatagagacacag

SEQ ID NO: 855719 - DNA, 547 bp, Homo sapiens
ttggtataaactaaaataatgattgtcatagtaacatgattcaaagataggcaactgttttataggtgaactctgattatgtaagctgagtttctactgaggtgcasattatgaattatgaaaagtattacttcatagaaattatcaccttcaaaaagaaaatggtcaatcaaaatttactaactcaatgcaaataggtgttctcacaactaattattatttagattttggtgatctcctccaatctttttattttagcccaaaaataaaaggtaatttttagaccatttctttcttacttaaattagtcaaggttttgcataaagagctcaagctgcctccaaaatactgcaatactacttcagactttttcagtaattaaatgtttcactgtataagccattctctagatgccatcctctacctgtaaaattataactattcctaattcttgctgaaagtccagttggcacagtagaagacaaatttagagagattattagaaaggtctttgggaagatttgaatctcatacccaataatctgga

SEQ ID NO: 855720 - DNA, 551 bp, Homo sapiens
aaaatatttatgtgcattttttctaattttgacacatcgtaaatattgcaaaataaaagatgtgtacatttccattaagaattgtatgagaatgcttgggttaccaaactataggcattattttgtraatctgatagaagaaaatgaactttcagcattgtcttagttggaatgtctactcctcagtgtaagtagtctcaaaatagtttgttaattgaacataaatacttcttggtaaatttattttcctggaaattttcccattgcatttttggcattgttgaattaatgggatttattgttgtttcaagaataattgtaattgctgatttgaaagtggtgctgtggccaaaaatgccatgtgtctcaattaatttgaagaattatttcagaaataatggacagtgtatacataaaaactgaaatatattttagctataattatttataaatagtgcttattaacacatttaataatgcatgcaaccattacagtttacaaagtagtaagtattattaatttcatttgtaaatcctaattatattaccaa

SEQ ID NO: 855721 - DNA, 340 bp, Homo sapiens
agtttcctgaaggaaaaaaatagcaattagctgccactttttatttaccaccaccactgtcacccctggctctatgtaacaactaacttaatttctgtatgtatatgttaccttatyctggatattacatgcatgttgaatcatgtaatatatatttttctgtgaatggcatttttacttaaagtgatgaaggtccatttctgtattaacattcatcagaacttcatttctctttatggacaaacagtattgcatagtagtgatacaccacattttatccattctcctgttgatgaacatgtggatcatttttaccttttggctattatgaataatgggt

SEQ ID NO: 855722 - DNA, 629 bp, Homo sapiens
ggcaacaggaatatgataaaatgcttaaaagcactaatcatcagggaaatgcaaataaaaaccagagagatatcacctyactcttattagaatggctattatcaaaaagacaaaagaggcatggcacggtggctcatgcctgtaaagccagcaatctgggaggcagaggtgatagaaccaattgagaccaggagttcaacatcagcttaagaaacaaagagagacccctgtctctacaaaatataaaaattaaaaaaaaaattaaccaagcatggtggtgcatgcctgcaatcctaagtattcaggaggctgaagtgggaggatccttgagctcaggaggacgatgctgcagtgagctgagattgcaccactgcgctccagcctgggtgatgtagctagcgagactctgtctcaaaatagaaataaataaataaaataaagaacgtggacaaaagggaactcttgcatactgttgatggaaatgtaaattagtgaaactattaaaggaaataatattgaggttctttaaacattgaaaatagaactaccatatgctccacagatcttactactgggtatgcagttgacccttgaataacatggatttcatctgcatggatccacttaca

SEQ ID NO: 855723 - DNA, 539 bp, Homo sapiens
aatttgaggcaagaaaagagttgcagagagagggcaaatattaaaggatatttgattgtggcaattttgatgcagagaagttaatatttcattttaggaaatcaatagatattgaaataaaaaaaatgtaaacttaggctatataactgaaagtaaatacaagaacaaagagatgaaatttgaatttggggagataaattccatcttatcaaatatttgtaaagctattctactttaacaaatacgtrtagacatttccttagtttaaagcaatcaaataaaaaaacccacaagtacaatcagaatatagtaccataaactactaataaatggcccccaaatttttgaaatgtaagtagaaggtacatagaaatttagtctctaaaataataaattatatacagaaaactgtaggcatttgattacatcaacataaatatggactattatacattctaaaaattacattattaaatactagcattagtttaggattcttcatatttattcagtggtcatttataaataaataaacaaaa

SEQ ID NO: 855724 - DNA, 547 bp, Homo sapiens
acacagaccctgactgtttcagcccctagatccagccgtgcctgaaactggtccacttacatgaactaaaaaattccttatttttcttatggttgtttgctttggtatctatcgcttggagctraaagcattctgacataacctctttgtggtcccagattaagaatgtcttttttcctggcagcaactttcccttttttatgaagctgccaatcaagctctagaccaccatgagtggccccttgcagcctgagttgctcagccagagatgtttggttggaattcattagcctaggagtggtcttatcataactgtaaaggtatattctatgtgggttttctgaaatatttgtaatggcttaaggcagaatcagctaattatggcatacagaccaaatctggcctgcaggctatttttgtaaataaagttttattggaacaccattcatttgtgtattacctgtggctgtttttgtgctacagtggcagagttgagtggctgtgacagagaccacatagttcacaaagcccaagatatttatgatcg

SEQ ID NO: 855725 - DNA, 615 bp, Homo sapiens
atcaggcaatgtgatgggtcccctgaagcctttcagtgactactttttcagaactgggaccagatgagaatagcaatcatggggttaagattctcccagacacagggacagaccgcccaactcacactggcctaagcaaaaagcgcaactttttttttcttagacggagtctagctctgtcgcccaggctggagtgcagtggcgcgatgtcggctcactgcaaccttctccacctgctgagttcaagcaattctcctgcctcagcctcccaagtagctgggactacaggtgcatgccaccacacccgactaattgtttgtatttttagtagagatggggtttcaccatgttacccagactggtctcaaactcctgaccttgtgatccacccatctcagcctcccaaagtggtgggattacagtcgtgagccaccgtgcccagccaaaaagtgcaacgtcttggctcaaggagctgaaaactycaagggcagatctggacaggctcagtgggatccaggggctcatgcagtgccattggacatagtctctgctttccactgtgctggcctccttctcaggtgccctcccctcatgttggcaagaaggttgccagca

SEQ ID NO: 855726 - DNA, 610 bp, Homo sapiens
cttgtgagtgttcctgttagcactgaggaattcactggccccacactggtgagmaggatgaggactttagaaatagcttggggtttaaattcagtcagacccgggacttgctgtatctgtgccctcagcccagtgaatgtaccctctgggcctacttcctcacctgtacagcacagacaccgggactcggcctgcaggggttttgtgaggatgaactcactctgaaatgagtttgaaacagcacacggcacagtacctcatacacagtattgctaaatgctcatttcctctctgctgtcccccagcaccccatccccatcccattctcccagcaggtgaaatctcactgccctgatttgtaggctgtcgggacagacttcaaagatggtcagcaaggccagatatgacccacgggtgggctgtccagattcctccccagggggcaggcatcccggccggcctctgcatcaccccatctgggggagccccaaaccactatagccgaggaaaagaacacagaggcctcaaactcccccacctttcactccattgtggcagggattcaatcccatcctggggacacttaggcttagccatttaactcctgtta

SEQ ID NO: 855727 - DNA, 626 bp, Homo sapiens
caggagctcttcatttagcagataatgcactctgccaggactgggtccttcccttcaaggcagcaggtttgcttctggcccaaggaaagtctagaaatgtcatcccggaggtagggcctgaaatggggstctcacaactctgaccgatgccctatcctgttgtggctgagctggtatccaagatgcaagacaaagtcctccccactcttctctctcctcaagcagaatgaagggtctcttttggagctgcgggctgtgcaacctgggattggaggagggatgatgccagcactcccttagctacaccagctggtgtctcagtatgtcacattgtgatatactggaggcaacacaagatggagtctcgtcgtgttgccaggcctccagtccactgtctctgggtccagttcagtactaggacttgcctaagacttgtagtccttgtgacctagactacctttcaagttttcttagagacccagagccccttagccctcgatggtgaggtttgtgggaactcaagttcggaccgtcgggattggtgattccttcctggctagggctagtttaaatgctctctctgtgggcaggagtcagctgagtttggtctgggttttcctttctgc

SEQ ID NO: 855728 - DNA, 556 bp, Homo sapiens
gagtgggaaaagtagggagtgggtagaggggtagacattagccctaaacaggaggagaggtgtcccttcctcctatggaaagaaagagtggattacagktacaggacagtttgaggagtgaaaaggaagtcaaggactttcactctgtgtatcaaccatttcttacacaccagttcaggatcctcgtggcattatcgtctcaggggcccttggctattgcttcagtctcagcctctgcttttgagtgggctctgactgacttatgtgggggttcacagtcagctctgcattgcatgcccactctgcctttggctggggtgctgttgcagagtgcagcctagagatgcaggggaattaacactgcctccctttagcgcaaacctttgattcataaaagatgggggccaggtgtggtggctcatgcctgtaatcccaacacagaggtgagaggatcccttgaagccagaggttcatgaccagcctgggtaaaaatgtaagaccctcatctctactaacaaaatgaaataaaagtaaaagttgggcatggtgtacatgc

SEQ ID NO: 855729 - DNA, 559 bp, Homo sapiens
tgacggcacacacctgtaatcccagctactcaggaggatgaggcacgagaatcacttgaaccaagcaggtggaggttgcagtgagccaagatcacrccactgcactccagccttggtgacagtgtgcctttgtctcaaaaaaaaaaaaatcattcatctgtgtcagatattcaggctaaaatgtgctaaatatctaaaggactaaataagagcagactaactcctacatgtaggagcaagtaagacccataccagcccttgggaaagtggttgaaacatagtaggaagggtttaaattactggtttacggtactactctggaaagcagaacatttcaataattaactaaaatatattatgaacaaaagcacagttatagaattttagatttgcactgaatcctagtaatcaccttgttcagcttctcattccaaagacaaggtaacagagctagagaatttaagcaacttacctaaaatcatattagctgctgatgttagagctaaaactaaaacccaggttttttgattcccaatggaatgatctttaattcaattac

SEQ ID NO: 855730 - DNA, 559 bp, Homo sapiens
tgacggcacacacctgtaatcccagctactcaggaggatgaggcacgagaatcacttgaaccaagcaggtggaggttgcagtgagccaagatcacgccactgcactccagccttggtgacagtgtgcytttgtctcaaaaaaaaaaaaatcattcatctgtgtcagatattcaggctaaaatgtgctaaatatctaaaggactaaataagagcagactaactcctacatgtaggagcaagtaagacccataccagcccttgggaaagtggttgaaacatagtaggaagggtttaaattactggtttacggtactactctggaaagcagaacatttcaataattaactaaaatatattatgaacaaaagcacagttatagaattttagatttgcactgaatcctagtaatcaccttgttcagcttctcattccaaagacaaggtaacagagctagagaatttaagcaacttacctaaaatcatattagctgctgatgttagagctaaaactaaaacccaggttttttgattcccaatggaatgatctttaattcaattac

SEQ ID NO: 855731 - DNA, 559 bp, Homo sapiens
tgacggcacacacctgtaatcccagctactcaggaggatgaggcacgagaatcacttgaaccaagcaggtggaggttgcagtgagccaagatcacgccactgcactccagccttggtgacagtgtgcctttgtctcaaaaaaaaaaaaatcattcatctgtgtcagatattcaggctaaaatgtgctaaatatctaaaggactaaataagagcagactaactcctacatgtaggagcaagtaagacccataccagcccttgggaaagtggttgaaacatagtaggaagggtttaaattactggtttacggtactactctggaaagcagaacatttcaataattaactaaaatatattatgaacaaaagcacagttatagaattttagatttgcactgaatcctagtaatcaccttgttcagcttctcattccaaagacaaggtaacagakctagagaatttaagcaacttacctaaaatcatattagctgctgatgttagagctaaaactaaaacccaggttttttgattcccaatggaatgatctttaattcaattac

SEQ ID NO: 855732 - DNA, 559 bp, Homo sapiens
tgacggcacacacctgtaatcccagctactcaggaggatgaggcacgagaatcacttgaaccaagcaggtggaggttgcagtgagccaagatcacgccactgcactccagccttggtgacagtgtgcctttgtctcaaaaaaaaaaaaatcattcatctgtgtcagatattcaggctaaaatgtgctaaatatctaaaggactaaataagagcagactaactcctacatgtaggagcaagtaagacccataccagcccttgggaaagtggttgaaacatagtaggaagggtttaaattactggtttacggtactactctggaaagcagaacatttcaataattaactaaaatatattatgaacaaaagcacagttatagaattttagatttgcactgaatcctagtaatcaccttgttcagcttctcattccaaagacaaggtaacagagctagagaatttaagcaacttacctaaaatcatattagctgctgatgttagagctaaaactaaaacccagkttttttgattcccaatggaatgatctttaattcaattac

SEQ ID NO: 855733 - DNA, 523 bp, Homo sapiens
ccattttcagataagaatatcaagacgcaagtccgggtacagttgctcacacctgtaattccagcactttgggaggccaatgcgggcggatcacctgatgtggggggttcaggactagcctggccaacatggtgaaaccccgcctctactaaaaaatacaaaaattagctgggcgtggcagcgcatgcctgtaatcccagctacttgggaggctgaggcaggagaattactggaacccaggaagtggaggttgtggtgagcagagattgtgccattgcactccagcccaggcagacaacagtgagactccatctcaaaaaaaaataaataaatcaaaaaataaaattgcatagcttttaagcagttgatccaatactcaaaaccaggtctttccactctaactatagtgtccattttattatacttcaccaatgctatccaagctttttataacagaggatacyttatgggacagaagacggaattcatgctgccagggtgatccagtcatattgctagaagt

SEQ ID NO: 855734 - DNA, 523 bp, Homo sapiens
ccattttcagataagaatatcaagacgcaagtccgggtacagttgctcacacctgtaattccagcactttgggaggccaatgcgggcggatcacctgatgtggggggttcaggactagcctggccaacatggtgaaaccccgcctctactaaaaaatacaaaaattagctgggcgtggcagcgcatgcctgtaatcccagctacttgggaggctgaggcaggagaattactggaacccaggaagtggaggttgtggtgagcagagattgtgccattgcactccagcccaggcagacaacagtgagactccatctcaaaaaaaaataaataaatcaaaaaataaaattgcatagcttttaagcagttgatccaatactcaaaaccaggtctttccactctaactatagtgtccattttattatacttcaccaatgctatccaagctttttataacagaggataccttatgggacagaagacggaattcatgctsccagggtgatccagtcatattgctagaagt

SEQ ID NO: 855735 - DNA, 466 bp, Homo sapiens
taactggaattttaaagaaaaaagattattctatggwcaaaatctgcaatttggaatggtctctgtgatgaatgagagtgattacacaccataacacataaggatttattactttttattttattgtggtaaggataattaatatgtgctttatgataaagtcatatcctatgaaactaagtaatatctaagtggtctaaaagaatggatttaagatgcaccacatttgctcaatgaaactgatttaattaaaccatgttataaagatctttaagtagtttacattatgatacatattatataaattttacacaaaatcataagctctcgatacattagtgaactaaggactgcttttattacctgccattggccagggattatactaaccatcatacacacattacttcatttaatcttcataaaggcctaatgaaatacaagtagagtttttctaatttttcta

SEQ ID NO: 855736 - DNA, 617 bp, Homo sapiens
ttcaaattttagatttgtgacaatatttgtaatgatatgtattttatacttttgcccatggatattaatgacatttttactgtgattctcaaaagcattaaaaaagaagaaaggttaggtcatataaatggtatgattagttttgtttctttaattctttttcccttggtgtttttttagacgcagagttttgctttgaattgctcttccagtattattttgagagtgctctactagtgcttactcattttccattctaataacaattctaagccagaacaaataggaatttatcagaaaattatggtccactctcaactacttctaaatatcaatctcaaaagttcatttaataattcaactttcttaggtatagtaataaacaatgtataagtgccttttaatatacatcttaaagtattatttttatatttattaatacttgtattcatttataaatttacttatttaacaaacttttattgtactcatgtagcaggcattcaaactgatttartggtttaaaatatatttaattgtatactaagaatttatgagaatttacaaatattttctttttttttttttctaagtaagtttgttgtgctttaaaggtt

SEQ ID NO: 855737 - DNA, 526 bp, Homo sapiens
tgaggtacattatagtattctctttagtgtggaatatgtctgaaatttcctataataaaaattttaaaagccccttaggaacacaaarggacatttaaatgagacgataaggaccaaatgatggactattagacttcaaaaaaagtgttttcatagttcaaagaaaaggaagtccaaataagattttgaaatcctaggtatctagtaaaattatttccaattctgttcaaatattaggtgtccctaacaatctacaataacaggtaagagcaaagttatttcttttaactttggaatgtatttccttcttacagttaaaaaggcttatctgatagattgacaatttccctaaacatttatcaaatcatagctttacaatacgtgtggctgagaatgattcactttagcccttttgggagctggggcatctgagctcctgagctaagacttccagcctctagctgcgtgcagccttgtcttttttatcttaatgaactatacagatatgtcatttctaaatccctgt

SEQ ID NO: 855738 - DNA, 506 bp, Homo sapiens
cttctatactaaccccctgcccccacctttatttttacttgggttttgtgagtttatttgaaccttgcaactccaaaagcaccgattagaacagtagtgcgtttggccctgcgactgcrggcagtgggaggcctgcctacaagcctgccctccagctccttgaagagagagactattttaaacttccctttcctccccagcatgcccagcacagcgaggagaatgtcgcagctgtcagtaaatgcctactgcattaatgcttgaggtgtccctcattgcacccctgcagcaaggttggccagctgtgatttacaatttgcctgtcagcagtgggaaagtaactttgtgacagcagcaaacaccagcttctcagaggattttgagacctgggttctgacatttttacctagatgtgattgttgtcagcttatcatcccctgtcaagttctaggcttccttgagcagaaaatgaagtttattaactcagttatgggatgctctgactc

SEQ ID NO: 855739 - DNA, 622 bp, Homo sapiens
ctgcccccacctttatttttacttgggttttgtgagtttatttgaaccttgcaactccaaaagcaccgattagaacagtagtgcgtttggccctgcgactgcaggcagtgggaggcctgcctrcaagcctgccctccagctccttgaagagagagactattttaaacttccctttcctccccagcatgcccagcacagcgaggagaatgtcgcagctgtcagtaaatgcctactgcattaatgcttgaggtgtccctcattgcacccctgcagcaaggttggccagctgtgatttacaatttgcctgtcagcagtgggaaagtaactttgtgacagcagcaaacaccagcttctcagaggattttgagacctgggttctgacatttttacctagatgtgattgttgtcagcttatcatcccctgtcaagttctaggcttccttgagcagaaaatgaagtttattaactcagttatgggatgctctgactctttagccacatgggtgctaactgcttgatcagtgcctctccttagtgtgttcacattggcctgaggcgagccctgtcacactcattcttccttcttcaaataacacaatcattgccttccaaaaagcagaat

SEQ ID NO: 855740 - DNA, 608 bp, Homo sapiens
tctacattaaaggctctttccttcctctggcttctagaaatgatttttcttcttagctttgaactgggacaatttaactatgatgtacyccagtagagcacagacttttcctctttagaattctatatctgagtcattgagcttcttgactctgtgacagtttcttgttttctggatatttgaaaagttgtcagccatcatggcttcaagtataatttctgtcacagtatctctttcctctccttctgtgacatgcttaacatgtatatgaaatgtttggatgttttcatagatgtcgttgaggctctgttgattagttggttcagtctttgtgtgtgtgtgtgtgtgtgtgtgtgtgtgagagagagagagagagagagagagagtgtgtctatcctgtggtttgtctagtttctattgaattattttctagtttacttttactattgtaatgtctaaggtgatgataaggccatccagtgagttcttccttacagattgccttttctcagttctttaatttctatttggctctttaattctttttctttctcttgatattctgcaattgtttctctcatggtcaggttttccttacatccgtgaac

SEQ ID NO: 855741 - DNA, 588 bp, Homo sapiens
gttagtttatgtgtctgaagctatctcctctgcagtgcaggcatgcagtgactgctgaaatctgagaatcgattaggaacactgagaaaactcctcaacatcccaggccccactctaagcaaaatatattaatagtagcccatcactggaggaatttaaacccttggtgcacttaagataaaagtagcaaacccaaatcccaaattcagctcaaccagtgactacattgactcaattacccacaatgtatatttgcaagagaagaagggtgcccatatcaaagtataaataatacttactgcaatctctactgttcttccatttataatgtctagtgattgattaaagaatgacaaggcacaccaaaaatccaaggggggaaaaaggcactgttgaataataaagcaatcaagagacccagactcagagaagaccccatctgacaactatcagattgaaattgtacgatacttacgttaatatgttaaaggattttgtggtaacagtggacagtatgcatggataggtagakaatttcagcgaagagacggaaactatagaaaagagtaacatgaaaatgctaggaag

SEQ ID NO: 855742 - DNA, 558 bp, Homo sapiens
ggtcactgtcatcttttctctgaagtcactgttgcattttctctggattcactgtcatcttttctctgggttcactgtcrtattttctttggggtcactgtcatcttttctctgggtgcaccttcatcttttctctgggttcaccatcatcttgtctctgggctcactgttgtatgttctctgggtccactgtaattttttctctgggttcactcttgtattttctctgggttcactttcatcttttctctgggtttactgtcatcttttctctgggtgcacctttgtcttttctctgggttcactgtcatttttttctttgggctcactgttgtattttctctgcgttcactgttgtattttctctgtgttcactgttgtattttctctgggttctccgttgtcttttctctcggttcaccatcatcttttctctgggtgcaccatcttttatctggccggaccatcattttttctctgggtacactgtcgtcttttttctgggttcactgctgtattttctctgggtgtattgttgcctttcatctgggtttactg

SEQ ID NO: 855743 - DNA, 558 bp, Homo sapiens
ggtcactgtcatcttttctctgaagtcactgttgcattttctctggattcactgtcatcttttctctgggttcactgtcatmttttctttggggtcactgtcatcttttctctgggtgcaccttcatcttttctctgggttcaccatcatcttgtctctgggctcactgttgtatgttctctgggtccactgtaattttttctctgggttcactcttgtattttctctgggttcactttcatcttttctctgggtttactgtcatcttttctctgggtgcacctttgtcttttctctgggttcactgtcatttttttctttgggctcactgttgtattttctctgcgttcactgttgtattttctctgtgttcactgttgtattttctctgggttctccgttgtcttttctctcggttcaccatcatcttttctctgggtgcaccatcttttatctggccggaccatcattttttctctgggtacactgtcgtcttttttctgggttcactgctgtattttctctgggtgtattgttgcctttcatctgggtttactg

SEQ ID NO: 855744 - DNA, 475 bp, Homo sapiens
aggagtatcttcacacaaatgcgttttccctattttttttttgtcttccaaagaaaaaatgagagcaaacccagttcccagataaaagaatcagaataccctcccacacacctgccctcatgtgactgaggcacttggccagttcataaacaagccatggtgatgacctataacagacgcgtcctgacctggcagaccgcaggggacgtgaagaagcttggcctgaaatattctgacgtgtcccagcctcacactcacatagttcctgggcacccagaaagatggggcctaggaatactcttattgagaatctggcatgaatgaatcacaccaaagactgccagctaagtgagagatttacagtctccagccttgagttctgagtgttttcagatgtggacagggtctgagactctcacgtgacaagccatgggccctatgcygaggcagactcctgctctgtgctgctcctagg

SEQ ID NO: 855745 - DNA, 649 bp, Homo sapiens
catagtagtgggcatttgtgaggtccacacaacagaatgtagagagcccccaagcacgtcgactgcagcacaaagctggggtgggaggagttgctggaccaacamtgtggtgggattcagggctcctccaggttgggtctctgacctcaaagtccagcatctgtgtggtcagtcaccaggaggttcaaagcgcatctccaagcctttctatgtcgggtaaccaggagtccatggagaactcaaagcaaggagagaactgagccccatgtgaaatcagggaaataatcaaaggggacaacggatggtttggggaaatgtgtttgctcctagtgctcactttagaaaaaaatacatgtttataaaaaatgcacactgcatatttttcttgccgaagtgcccttagcaatctcctctcatcttgatagctttgcccttcttctgccagattcccaagcagagagttagcatgaagtctcggaggcacaggtgtaacatctccagttgaagggacaaatgaaacatggctgagtaaatgcaggatttacaaatcaccacaccaggtgatctgggcccaggtgctcttgcttgtgctggattgctttcatcggcagtgcacgaagcccaaataaaataaccccacccatctacc

SEQ ID NO: 855746 - DNA, 480 bp, Homo sapiens
ctttaatctcgtgtttttgtttttgtttttgtttttttatattgggaagagaaagaatgggtggttcrctcaccaaagctacctccacattgctagaaggatggtcacatcttggacctcaggtgcttcacttatcagcaccatgtgacagacagaggtcaccccaccccctaccttcttccctggcctcccggacaccatccctccccagctctcttcctgccatgggtcacaccttgtcagcttccagtgccggttccttccctcccctaaccagcaaatgctggagtcctaccgcattgcaacctctggctgctgccttatttacaccactttcaagatgatttcttctactttcatgggtttaagcaacccctacactctaaacactgatgaatcccgatatcagatgaggccctgggctcctaccagcatcttaccagcatgcctgtgaggcatctccccttgtatatctaataa

SEQ ID NO: 855747 - DNA, 570 bp, Homo sapiens
tgtctgatacctgtctgtatgcttctatttgaacattcaacccacccgtcaagttcccacattccctgccatccgtttttattcctgtgttctccttcatcagtgaacatcatcaccttttacacaaatcagaaacctgggttctgtactccacctctccctattccttgcctaccactccatccccacttcccaatccaatccatccaagtccatccttggccacctgcttccctagacactcatcaccattatcctggttcaggccactgtcaccttgcacctgcattatttcaacattctcctaactgaactcctacccacagcattaccctactgatatgtcaacccaatatgtcactctctggtatgttgtaaagactttcatggtctgatcttggtttacttctccagcttcacattttggcaatacccatctcacaggcactatcagttatgcttatatcctccaatatgggtgcctttcaawtagctctagatcttacaaatattcttccctctgcctgaaagattattccatccccacgccctcagccaacttttctcact

SEQ ID NO: 855748 - DNA, 622 bp, Homo sapiens
atctttactggagttgaccattctttttctgtgtatttgcatcatcctgtgtgcttgctctccccatgcagccctctccacacagacacatatgcagttgactcttgaacaacacgggtttcaactgaatgggtccaattatacatagactttttttcaatccatccctcctgtctccccttccacctctttcacctctgccacccctgagacagcaagactaacccctccttttcttcttcctcttcaacctactcaacatgaagataatgagaatgaagacttttatgatgagccacttctactaaatgaatagtaaatatgttttctctttttcttaataatattttattttctctagcttaatttattgtaagaataaggtatataatatatagaacatacaaaatatgtgttaattgaccattatgctttcagtaagacttctggtcaacagcaggctattagtagttaagttttgggggagcagaaatcatatggaaattttcaacagcatggtggctctgtgcccctcaaatatgtaagctattcatttcttcatatacatcctaatttatgacatgaagaaaatgtrttctctgtgtagatggataagcagttc

SEQ ID NO: 855749 - DNA, 619 bp, Homo sapiens
tttgatttcttcctgctttagtcttgggagggtgtatgtgtccaggaatttatccatttcttctagattttccagtttatttgcatagaggtgtttatagtactctctgatggtagtttgtatttctgtgggatcagtggtgatatccctatataattttttattgcatctatctaattcttctctcttttcttctttattagtctgactagcgatttatctattttgttgatcttttcaaaaaaatcagctcctggattcattgatgttttgaagggtttttttgtgtctctatctccttcagttcttctctgatcttagttatttcttgtcttctgctagctttcaaatttgtttctgttgctttgctagttcttctaattttgattttagggtgtcagttttagatatttcctgctttctcttgtgggcatctagtgctataaatttccctctaaacactgcttcagctgtgtcccagagaatctggaacrctgtgtctttgttctcattggtttcaagaaacttctttatttctgtcttaatttcattatttacccagtactcattcaggagtaggttgttcagtttccatatagttgtgtggttttgagtgagt

SEQ ID NO: 855750 - DNA, 560 bp, Homo sapiens
atttaatgagcccatacctagctctagatgagttactattcagattaagttctgaaatccttcattttacaggacattatcttcttcaatatttcccattgacacttttccagctttttaaatatcttgtgtttttctttcttctacagaaaaaaaggtttcttaaagatattactctttcaaatgtcctttatatttttaatgtattatctcagttatccttgattttaacagacaatttttatattttgccccaatcatcttacaaaatataaaatcacaaatacaaaataaatatgtagataaaacctacctttatacatacttttataatcctaactcttcagtctaatctaagagcatattacttgtgtctgcattgtttagggagaataagtaactagaggtacattatatgtactggcccttttacatgagattatttgcttcatatcttgtagcaagaaggtccagagtttgttttgatacagaatttttcrtctctattgcatcagactttgtagcaaagatatatacccaaggaaaatacccaaacaact

SEQ ID NO: 855751 - DNA, 620 bp, Homo sapiens
tctccatgtaaggaaatgttttctctgggcctgaggctcacttctatgaaaccttgtaaaggttgtcaggccatgtgtgactgtcaatccccaaaaaaacacttttggccctggattggctactgaaatagcagataaagtacataaaatttggtagggccacctcttgtccccaaatttgtaaggagagttgtgtccagtgaacccctgaacaacactttatagatgcagtttcctcacagaccctctgtcattttgagacatcagggtcactaggagaaccagacccaggaggatgatgaggcctccctggcagataattcttaaccaggaaccccaagtgcctgaattaaagcaattaaatagatcacaaaatgagcttcacaggtaggaggggtgtacagctgatgatctccagcctgagcatggatctcctccagctcagtttctaccttctctaaactattgatatttacacagcaaagggtgttggtaaaagcacaaatgccaaccygttctgctagcagacaatgaggcctgttcaattgtccattaccacattgactagtgagtttattgggttttgttgatcttgtatggactaagtaggattattagct

SEQ ID NO: 855752 - DNA, 650 bp, Homo sapiens
cagtggtgggttagcaaagtggatcccaattgcaccccctctcaagccctttatgtaattttttaacatgaactatgggccctagggctcaaaggcaataagattctttgcccaagggcaaacactctgttgcccactaaggtccacagagaaatccataacccggaggggtgcaggtgacccccatcagggatttgtgattatcctgtgtagactcgttatatacagtctcagttcgttttgctatgtggtagcagggaaagaaaaaaaggcacatccaagcctgaaatgccaacatagatcagtaatgtgtgttccagcctagggattctttcctgtcatatcttttttttctttttgagatggattctcgctctgtcgcccaggctggagtgcagtggcacaatctcggctcactgmaagctctgcctcccaggttcacgccactctcctgcctcagcctccgtagtagctgggactacaggcgcctgtcaccacgcctggctaatttttttgcatttttagtagagatggggttccacatggtctctatctcctgacctggtgatctgcccacctgggcctcccaaagcgctggaattacaggcgtgagccaccatgcctggcccatatcttaagtcatattaaag

SEQ ID NO: 855753 - DNA, 564 bp, Homo sapiens
taaaacaaacatcaaaaaagaagctcaccaaaagatgctcaacattgttgggcatcaaggaaatataaattattactataatgcaatatcactacaatttcaccacaatagctaaaattagactgataatataagtgttagtgaggatgtgatataatagacctctgatacattgatggcaggagtacaacatggcagaaaaattttggacaattactagacagtttcttacagagattaacataaccaccatatgacccagcaatcccctctaggtattcatctgagaaaagtaaaaacatattttctcacaaaaacatgagaatgatgcttcaggacagctttatttgtaacagccaaaaactagaaaactctaaaatggctatcaaaaagtgaaatcataaacttgtgttgtatttatataaagggaaattaatcaccamgttaaaaatgaatgactgatatacaaacactgtgggtaaatctcaaaacctgtaaggtgaaaatgaaagaccagacaccaaagtcttcattctatataatttcatttatgtgaaattccag

SEQ ID NO: 855754 - DNA, 599 bp, Homo sapiens
tatatgacccagcaattccacttgtatttgtccaagagaaataaactatttatatttacacaaaaacattgcacaagaatgtttattccaattgtattcataatagccccaaactggaaacaaccgaaattttcaacatcagcaggatggagtaaggtaatatgatataatcacacattgaaatgttactaagcaataaaaaggaacaaaccactgatacttacaaacacattaataaacctcataaatgctacatagccatagagctgcattcaaaatagcatatacagtgcaatttcattcatagaaatgcaaagaggcccagaattactttttaaagtggggcagttactgtgtatcttgataagggtatctgtatatttgttaaaacttattgaaatgagtatgtgtatttcacagtaaaaaactttttctcagaaaacaattatttaattccagctaatgggtttgcttttcacrgcgatgttatttagcaattttgaaattacttcctttgttttttatacttgagcaaatgagtaaataaatatgtggaggataactggagacaggattctaactcttggagaagagagtta

SEQ ID NO: 855755 - DNA, 599 bp, Homo sapiens
tatatgacccagcaattccacttgtatttgtccaagagaaataaactatttatatttacacaaaaacattgcacaagaatgtttattccaattgtattcataatagccccaaactggaaacaaccgaaattttcaacatcagcaggatggagtaaggtaatatgatataatcacacattgaaatgttactaagcaataaaaaggaacaaaccactgatacttacaaacacattaataaacctcataaatgctacatagccatagagctgcattcaaaatagcatatacagtgcaatttcattcatagaaatgcaaagaggcccagaattactttttaaagtggggcagttactgtgtatcttgataagggtatctgtatatttgttaaaacttattgaaatgagtatgtgtatttcacagtaaaaaactttttctcagaaaacaattatttaattccagctaatgggtttgcttttcacggygatgttatttagcaattttgaaattacttcctttgttttttatacttgagcaaatgagtaaataaatatgtggaggataactggagacaggattctaactcttggagaagagagtta

SEQ ID NO: 855756 - DNA, 631 bp, Homo sapiens
ctcctttgactccatatctcacatccaggtcctgctgatgcaagaggtgggttcccatggtcttgggcagctctacccccgtggctttgcagggtacagcctccctcctggctgctttcatgggctggcattgaaggcctgcgggtttttgaggtgcacagtgtaagctgcttgtggatctatcattccggggtctggaggatggtggcctcttctcacagctccaggagggactctgtgtaggggtggtgccccagtagggactctgtgttggggctccaaccccacattttccttccacactgccctagcagagggtctctcatgagcgccccacccctgcagcaaacttctgcctgggcatccaggcgttgccatacaccttctgaaatctaggcagaggttcccaaacctcaattcttgacctttgtgcacccgcaggttcaacaccatgtggaagctgccaaggcctggggcttgtatcctctgaagccacagcccaagctctacattggcccctttcaaccactgctgragcagctgtgggacacagggcaccaagtccctaggctacacacagcgcagggactctgggcctggcccagaaaaccactttctcctcataggcccc

SEQ ID NO: 855757 - DNA, 607 bp, Homo sapiens
acaagctctactccactcagatgtaacyttcccaatccatttccttgaaaccatgaccccagttgagtttggattttttgttttgtcttcatatgagacagacaggttagaggagctggaatgggagaaatgtaattctcccaggtaggataagggtcttacaaagtcttctcaaaggcagagtatattttttaatggagaagcctctgggtgtatttcacaatggttatgctttatctcatcctgccagaattatgaagagatcttttgcatttcttctccattaatatctgacgggattctgagagaagtacatgaaagtttgggggccctacaaagattgcaacctccaagtagtttctcaatctatgctaatccaaattcaacttcaactttatcaaatgtaccttgcgtatgttcctgtcagttgatggctccagtggcttctgctgcagataagcagatcttggctatgtctctctggatgatcctgcctctcaagatttcagcatagccatttccctgtgacttagttttctaaaaggtctcaataagtaattgtgctttcagtttgtccaactctttattgtaagtacaggagtgatgc

SEQ ID NO: 855758 - DNA, 607 bp, Homo sapiens
acaagctctactccactcagatgtaaccttcccaatccatttccttgaaaccatgaccccagttgagtttggattttttgttttgtcttcatatgagacagacaggttagaggagctggaatgggagaaatgtaattctcccaggtaggataagggtcttacaaagtcttctcaaaggcagagtatattttttaatggagaagcctctgggtgtatttcacaatggttatgctttatctcatcctgccagaattatgaagagatcttttgcatttcttctccattaatatctgacgggattctgagagaagtacatgaaagtttgggggccctacaaagattgcaacctccaagtagtttctcaatctatgctaatccaaattcaacttcaactttatcaaatgtaccttgcgtatgttcctgtcagttgatggctccagtggcttctgctgcagataagcagatcttggctatgtctctctggatgatcctgcctctcaagatttcagcatagccatttccctgtgactyagttttctaaaaggtctcaataagtaattgtgctttcagtttgtccaactctttattgtaagtacaggagtgatgc

SEQ ID NO: 855759 - DNA, 571 bp, Homo sapiens
agttgtaatatgtaaaaaatagtccacattttgatggatccttattacttattaaatgtttaatagrctgcagggctcacgctaagatctgtttcatttcccttggtgcatatagtattacttgatagcggaaggatactatccatttttggaaagttttataaatagtattagggaaaacttcaagatacttattattttctcctatttaagttacactgagttgaatttacaagtataataactttaatggggaaaattattaaagttaaaaagaaaatagtggagagaaaaatcattacctgtatatagaaaactaaagaattaaagaaacatttttcgtgtgtgtgatttacactatcttcagtgtaatcggaatagggaaaggtcacagggctcaacaggtaaccccctgctgcttttctcatcgctggtttcctgttcactctatacacgggtctcttctctttttctaatacatattgactttcttatttcacaaaccctgtgatattttgcacaaggttggtaaccctgaagattttctttcactgcaaaacaaagggtcatt

SEQ ID NO: 855760 - DNA, 614 bp, Homo sapiens
aatttgggagaactgaagctgcataaagtaactctatacaataattagtcagaggcaataaaagaataccataggcaattagagcacactaattttcaattgtcgcacacaaccaaattcatcatcattttgtttcgtctctaaaaatattgccattgaaatacttacaattcaactgcagatttattcatcctaacaactcattaattttaaagattctatcatggaaaatatatataaaatcagaaatatctgtcttcaaaccaataattttaaattgagtgtcattttgttttaacttgctagagctttctttttttgtttttgtttttgtttttgtttttgtttttgtttttgagatggagtctcactctgttgcccaggctggagtgcactggcatgatcttggctcactacaacctccgtgtccttggttcaagcgattctcctgcctcagcctcctgagtagctgggactacaggcatgcaccaccacgcccrgctaatttttgtatttttagtaaggacgaggtttcactatgttagccaggatggtcttgatctccttacctcgtgatctgcccaccttggcctcccaaagtgctgggattacag

SEQ ID NO: 855761 - DNA, 614 bp, Homo sapiens
aatttgggagaactgaagctgcataaagtaactctatacaataattagtcagaggcaataaaagaataccataggcaattagagcacactaattttcaattgtcgcacacaaccaaattcatcatcattttgtttcgtctctaaaaatattgccattgaaatacttacaattcaactgcagatttattcatcctaacaactcattaattttaaagattctatcatggaaaatatatataaaatcagaaatatctgtcttcaaaccaataattttaaattgagtgtcattttgttttaacttgctagagctttctttttttgtttttgtttttgtttttgtttttgtttttgtttttgagatggagtctcactctgttgcccaggctggagtgcactggcatgatcttggctcactacaacctccgtgtccttggttcaagcgattctcctgcctcagcctcctgagtagctgggactacaggcatgcaccaccacgcccggctaatttttgtatttttagtaaggacgaggtttcactatgttagccaggatggtcttgatctccttacctcrtgatctgcccaccttggcctcccaaagtgctgggattacag

SEQ ID NO: 855762 - DNA, 728 bp, Homo sapiens
agaagaattccatgtagtttaaatagtatttcacccccaaggaggtggtacatgactcataactcctctagtttgagtttttcatactgacttcctttcaaataatataatacagaaagggggaaaaagagtaacttcacagtagataaatctgacaaacactacttcagccaggtggtcaaggttaacactaataatgataagttatgttgatactatctttgatatgatgtgatgaaaatggcatttaatctctgtggtcttcctccataaaccttataaccgcagtcaaatcatgagaaaaatataagacaaatctcaattgagggacattctacaaaatgccttaccagttctcctcaaaactttcaaagtcatcaaaaacaaacaaagtttgagaaattgccacagctaagaagaatctaaacagaaatgacagataaatgtaacatggtatcctggatagaatccttgacaggaaatgcacattaggtaaaaaccaagcaaatctcgataaagtacaaacgagttaataatgatgtaacacagttaattagtgatagcaaatgtaactaatccaggatgttcgtaaaagggaaaaccagatgtaaggtattaaaaactcattttttttctgaaaatataaaagactgtttcaaaataaaaaagttatttttaaaaagcactactrgagaatttctgcttaacataatggatccctgtggaga

SEQ ID NO: 855763 - DNA, 527 bp, Homo sapiens
actgcgagttgtggaggtttggctacagaatattttgtcattcacataataagcatagtacccaacaggtagttttttgatctcagtctcctttcaccctcccacctcarattggctctgatgtctactgttcccttctttgtgtctatctctactcaacgtttagctcccacttataaatgggaacatgtggcacttgattttctattcctgcattagttcacttaggataatgtcctctagctccatccatgttgctgtaaaacacataatctcattcttttttatggatgtgtggtattccatggtgtacatgtaccacattttctttatccagtctactgttgatggacatttatgttaattccatgtatttgctattgttaatagtgctgtgatgaacatacaagtccatgtttctttatggtagaatggtgtattagtctgttttcacactgctgatgaagacatacccaagactgggcagtttacaaaagaaagaggtttatttgacttatagttccaca

SEQ ID NO: 855764 - DNA, 481 bp, Homo sapiens
atcatgagaacgcatgggaaagacccattcccaagattcaattatgtcacactgggtccctcccacaacatgtgggaaatgrgagctacaagatgagatttgggtggggacacagaaccaaaccatatcaaatggtttatatccttttgagtatatacacccaaagatgagattgctgggttgaatggtaattctgttttaagttctttgagagatgaccaaattgctttccacaatggctgaactaatttatcttcccactagtggtgtttaagcattccctttcctccgcaaccccaccagcacctgttattttttgactggtgtgagatggtatcttcttgccattttgatttgcatttctcaaatgattagtgatgttgaggattttttcatatgcttgttggtcctgtgtatatcttcttttgaatagtgtgttcatgtcctttttagtggggttgtttctttttttgctcgtaaa

SEQ ID NO: 855765 - DNA, 506 bp, Homo sapiens
gtgaaaaagcaaacaacgggctttatcagaagcaaattcctttctagtatcttcttaatgaccctgtctttgatgcagctattttcctgcagttttacatttytatggtagcaaccctactgctgaaaagccctttaaaaaacattctgatcctctgccatagaggcaacctgttattgagcaagtgattgctcttaggacaacatgatgttaccataagagggtcagatgttgagtgcaagccatactctgtcctgtagagagaattcaacatttcagaacaatagactaagaacttaggaaagagtatcattacaaattctggaaccgtgtttccctgtttgctttttagatagacatgtcatgattttctttgaccctgatcctccttgtcattatgggatgtgggtggacttatcaggtacttggctagaatatggataaggtatacaggtctcaagagatcaagacttatcaggtacttggccagaatatggatgaggtat

SEQ ID NO: 855766 - DNA, 620 bp, Homo sapiens
gtgagaagagttgttttaataattttatstagtttttagttatttttaataacaagaggatacttttgatcccagttactctaccatagccagaagtagtagtactacattattttcagagatctaataatttggtttactaattcacctggtatttagacaagaggtatagattcatcttgtaaatatattttatacttagaatatgtaaagttttattcttgtccaatttagaaaagccgttttttaataaaggagtagaaaaggaggtgctactatctattaaggattgttgatcatttttagacacaaagacataaattaagcccatgaggtcttttgagaagcatcattatcaacattctaagcaattttgtgattttcttatgaatttaccagtgtaggctttaaaactttttctttcattctctaaaaatagtaataatctttttttgttaattttatttaaagagtcctgaagagatattaatttgggatcattctatcattggaagtcttgcataacagtgaacaaaagttgaccagtgcatgttagaaatttcatttccttccattcaaaagctttgattgtgaaattgatattggtacaaatgctaatc

SEQ ID NO: 855767 - DNA, 620 bp, Homo sapiens
gtgagaagagttgttttaataattttatctagtttttagttatttttaataacaagaggatacttttgatcccagttactctaccrtagccagaagtagtagtactacattattttcagagatctaataatttggtttactaattcacctggtatttagacaagaggtatagattcatcttgtaaatatattttatacttagaatatgtaaagttttattcttgtccaatttagaaaagccgttttttaataaaggagtagaaaaggaggtgctactatctattaaggattgttgatcatttttagacacaaagacataaattaagcccatgaggtcttttgagaagcatcattatcaacattctaagcaattttgtgattttcttatgaatttaccagtgtaggctttaaaactttttctttcattctctaaaaatagtaataatctttttttgttaattttatttaaagagtcctgaagagatattaatttgggatcattctatcattggaagtcttgcataacagtgaacaaaagttgaccagtgcatgttagaaatttcatttccttccattcaaaagctttgattgtgaaattgatattggtacaaatgctaatc

SEQ ID NO: 855768 - DNA, 576 bp, Homo sapiens
ggggaagatagaaaactttgagaatccctacttggtggaagatagaaagctttgaaaatccctaacgtgagggcagaaggcattgagaagaaaataacacagcaagaaagaagcagatctccacatccacccccacgatgtagtctatgttgggatcagcctgggacctgaatttaaagccagtttgccatgcgtgacagccactactgatgagagggatagcgtagatggtcctcttactgattctcaggatcttctaagcagtaaatctgccccagtatacattgtgctcagttccaccaaatcatcctctttttaaaaatcaaaaatagtactttgtgtctgaagatagtgtcttgcagtatttttctatttagatttttatggaagttgttaagtttctaaacacctgacctctcaggaatgacaatgaaatacatcactgagctactgactcataaatctatctgtttttctgtttttgtgagactccttattttggaatgcctaaacataatccacagagttctgttgcattmatttaatttcgtaaaagctttgatgtggtgggatagg

SEQ ID NO: 855769 - DNA, 646 bp, Homo sapiens
ggagacttctggtgaggccacgggcatgaacaaaacatatgtccatggggcctcctcctgcctcccaattaaggggcagaaataacactccacctcattgggccttggraaggcaggctaagactccaaacattaattaccacaatgtcaaatggttacatctttctcactctctgagaaggaaaagcaataggaagccaccagtccttggagccccaaagtggtgtcctgttctgttctatacttaaaaggacagactcggccaggcacagtggctcacacctgtaatcccagcactttgggaggccaaggcgggaggatcacgaggtcaggagatcaacagcatcctggctaacatggtgaaactctgtctctactaaaaatacaaaaaattagccaggcgtagtggcacacacctgtagtcccagctacttgggaggctgaggcaggagaatcgcttgaacccgggaggcagaggttgcagtgagccaaaatcacgacactgtactccagcctgggtgacaggctcaaaaaaaaaaaaaaaaaaggacagattcccctccctttttctgtagctatttggtgccagtttgcccttctctttcttgaaaatgatgtcagagctaaagcgcatgctcccatcagg

SEQ ID NO: 855770 - DNA, 646 bp, Homo sapiens
ccttttgtcagttggataggctgtatccctaaatactacaccaagatgctgacaacatatgcttacatatttgctgaaattcaagcaaacatctttaaaaagtcatgctaataaccattccttacaagttaaacgatgtgactttaactcagaaacattattaaaatgtattctcccaaaggagggattttccttttcctagtcagttcttagaatgcttctctttctgcaaacagtgtacatatgccagaagccatatatttgacatatccttaattaatctcatttcttgaagggaaaatgaagcatcaagattatatgtctattagccccctgctgtaactctcctgcagagctcactgttgacatgctttagaagtttccatttttgtcatatacctctacatcacctcagttcgctgccaccttaaggctagactccacagccataatttgtgaaccctttcaagttctcactaaatatgaaaacaatgtttctatctaggtcccgttaagaaagtatatgacaaggctgcttaaaagaaacagatggaatactatttggcgtttattttctagrcgctagtagactttgaaatagaaatgtcccattttggcccattttctctttagtaaattatatgtc

SEQ ID NO: 855771 - DNA, 603 bp, Homo sapiens
agattctgtaagtgagctcctcttcactctctgggaagagctaccattsttttttattacttacacctaaaaattattattttaataaacgtaacatgatttgtcttgtaaatagacctgctgtgcaataccattctgcagatttttttttttgctttgactttgtgcaaatcagtttacattacagatgttaataattgctaggcatgagagtgttgtctctccctgactcctctttcctcttccaaaaatgttctttaaggtcaaattgaacagccccccaccttttttttttaaagtggcttaccctgactaattctactctatcctgtttgttgttttcttaatccttttgtacagtttgtactacaaagctgcatgcttgatcctatattgcctggaacttgtctgtctcccagttttctgtaagtacctaagcacagggtatgtcttaacatatatcccaagtttccagcacagcaaggatttgtggaagaattatgcctggtacttattaaataaacaataaatatttgttgaatcagaagtctgagtaggcttacaataaatgcatacatgctacccgagtgacccaatgaatga

SEQ ID NO: 855772 - DNA, 592 bp, Homo sapiens
tagtgggagggtttactacattttttattgcacctaaatgtaaagaatcttgcctacgattatattaggttggtgcaaatgtaactgaagttttggcattgttgaaatttgccatttgatattggaatgcattcttaaataaatgtggttatgtcatacatcattttatgcttttttgccaatgacttattactttatgcttttttgctaatggcttattactttatgcttttgtgctaatggcttattacttgctgtttattttatgcttattttagactatggaaatgatgttagacaaaaagcaaattcaaaagatttttcttatttgagtttgaagtgggtcctaaagcagcagagacaacttgaaacatcaacaacacatttggcccaggaactgctaatgaatgtacagtgcagtggtgtttcaagaagttttgcaaaggagaggagaaccttgaagatggagaacacagtggctggccatcggaagttgacaacraccagttgacagcaatcatctaagctgatcctcttacaactacacaagaacttgccaaaaaactcaacagtcatttgtcatttgaagcaa

SEQ ID NO: 855773 - DNA, 540 bp, Homo sapiens
tttaagaaaactggaaagagttaatttctgtaagacaggtgaaaatatcaggcatttttcagttgtttaaaaataatcaactgttttctttttaaaaaaacttacataaaagtagtgctgatatttcagcttgaagaaagtaaaccaatgctctatagaggctaagaaattttccaatatcacaaagcttatgcataatggaaactgtcaagcagttaaaaagatctcattttaaattcatgcttattacacaaagcaacagttattccctcaaaggagggaaactgatgtttattaagcaccttcatgtgccaggtgcatatagcatgtatataagattcctggtctacttaattatctaaatcaaggtttggcaaaaattatctgtaaaaagtaagacagcaaatattttaggctttgtagactaagatgctgaatcaagaatatcatttgggtatttacatcacaaaaaataaaataaatgtctttttcttattttttcaagcatttaaaaatstactctaagggtgaggggaaatt

SEQ ID NO: 855774 - DNA, 680 bp, Homo sapiens
attgaacatcacacagctgcaaagttaagtggcaaacattcaaaccctgtcagtctggtgtctgagttcaaatatgcttaaacaaagaccgctgtctaagctcaaattcactgtcttatggaaaaagtcagtaagggtagaaaaatagaatttatgtaataacaacatttgtcaacttggatagagttttgcttctagttggatcacagatgttataaaatttaattgcttgctacttctctactccaacagtgtctttctcagcactgtaacacagcaggtagttataaaaaatcattgaagttgttactatttttatatttattagaactattatttttttcatcagaaatacccgggtctattacattagttttttctagtgctttctttggcttgcagtcttaagtaaatcattctgttttgtaattttgtaataatgacaactagtcagatccatgccttacagcagctcctatatctttttcataaatttctccaatatagaaaattagctatagaattacaagtaacagaacatatacttcttactttaaaaatagaaayctttacgagttgtttatgaaaactatagtgattttgaataacaaatcatgaaagtttttactcaattataaatttacacaaaagtgtttctgttgtcatcctgacacaggatc

SEQ ID NO: 855775 - DNA, 519 bp, Homo sapiens
cacccagctaatttttgtaagtttagtagagatggggtttcgccatgtcggccaggctggtctggaactccccccctcaggtgatccacccacctcagcctcccaaagtgctgggattacacgcacgagccaccgcccccgaccccatcattgtttttttctacatttctttttcttctcttctctaaatactgcaaaaaattcctgaaccccagcatctctctctctccttctattccactctgccacgatcaatcactgagctcctgagatacctccatgtttcccattatttcccgcatcaaacacataccctccaaccctgcagccgggtcatgatgttggcatgtaaatcacgtgatgccatgtcgctcctgaacacccatcctcaacactcctaagcactcagaaccgactgcgaagcagctttggtctgygaggttctgcgtggcctggcctccgtcaccctctcctcacacgggccccatcatctcctgactctctctgctactgtccttc

SEQ ID NO: 855776 - DNA, 588 bp, Homo sapiens
ctgagcccgggggtgggggccatgccttggttgcttgtgtcggcctcgggtgcggtgctgtttctttcccactcagtcgcagtcctgagsgggggctctgccttggggactctatctgttctcatggaacatggtgggggtggctgtgtcccagacgcatgatcgccgccctgtgggatcgctgacgggggctttatctcaacctgcgagggactcttccttgggtgctgatgtcgtccgtgaggcacatttgcccttggatgtcgctcactctcagctaggatgtgttggcttttctttggttctgcttatccgcgatgtggacgcttaccggatgctttgtcttggtggtgggtgctctctcccggtgctgcgggggaatggggtgctgttccttggattctctaagcctatggtgggactcagggagctctgtgtcagccatgagggaggccacgtgaccttgggaactctgtctctacccaggttggggtgcttttcctcggtgggttgatctcaattctgaaggaactcttcaccgggactctatctgacctttcggccacagcctcaggtgtctgtgtggga

SEQ ID NO: 855777 - DNA, 615 bp, Homo sapiens
ataaatgccgtgctgtacacagcaggaagcgagactaattgagccctccttaacctgcctcctttctacctcaaatattctgaaaaaatrgaggtggctattggagttgaacactcttatctccactccatcatcacacatctgtgttttttatgattctacagatccttcccctttgtctagaaaaagtggctttcttttcactccaggtctgacacctctttcatttattcatcatctgtggcaggcagcatgccaggagctgggaatcagcagtaaacagcccagagagcaacgttccctgcccttgtggagctcacatcctcatggggcagtcagacaaaacatgtacaatgagcaaatgaaacaaacagcgctgagctggtgttggggaagcagtccacgggcctgtgggaggcagcagcagagggagccccaggggctgcagctggtttggcagggccttctgaagaggtgccattgggcagcgcttggaggaagaagcagagcgtcctgtgcagaggcagagggagagttccaggctgcagtgaggccaagggtagggaatggagtggggatggaccgggcactacagaggtgaaggacagaggcaga

SEQ ID NO: 855778 - DNA, 587 bp, Homo sapiens
tcaaactatactacggggctacagtaactgaaacagcgttttcctggtacaagaacagatatagaccaatggaacagaatagagaactcagaaataagatcacacagcgataaccatccgttcttcgacaaacctgacaaaaacaagaaatggggacaggattccctatttaattaatggtgctgggagaactggctagccatatgcaaaaattgaaactggaccccttccttacaccttatacacaaattaattcgagatggattaaagacttaaatgtaaaacccaaaactataaaaaccctagaaaaaaatataggcaatactattcaggacataggcacggggaaagatttcatgacaaaaatgccaaaagcaatggcaacaaaagcaaaaattgacaaacgggatctaattaaactaaacagcttatgcatagcaaaatgaactataatcagagwgtacagataatctagagaatgggagaaagcttttgcaatctgaccatctgacaaaggtctactatccagaccctacaagaaacttaaacaaatttacaaaaggaaatcaaacaaccccattaaaaag

SEQ ID NO: 855779 - DNA, 577 bp, Homo sapiens
ccaccttcaacatttggaattacaattacacctgaatctttataggtacacacagccaaaccatattattctgaccctgatatcccagaatctcatgtccttawcacagagcaaaatacaatcatgccttttcaaaagttccagtagccttaacacattccacgtgtaaaaagttcaaagtttcatatgagacaaggctactgtcccttctgcctatgagtccctgaatttaaaagagatttcttttctttcaaggtacaatgatggtagaggcattgtgtaagctttctcagtccaaagggaagaaatttcccagaaaaataacacaaatgggcccacaggcccaatgcaagtccaaaacccagcagggcagtattcactcaatctctcagctccaaaatcatcaagagaactcactatcatgtgaacagcattaaggagagcgtgtttatccatttgtgaaacatctgcccccaccctcatctttcactcccacccacaaaataatctcccctattctccccactcccttacctccaaaccccatgcttctccatgattaaatcacctcccccca

SEQ ID NO: 855780 - DNA, 577 bp, Homo sapiens
ccaccttcaacatttggaattacaattacacctgaatctttataggtacacacagccaaaccatattattctgaccctgatatcccagaatctcatgtccttatcacagagcaaaatacmatcatgccttttcaaaagttccagtagccttaacacattccacgtgtaaaaagttcaaagtttcatatgagacaaggctactgtcccttctgcctatgagtccctgaatttaaaagagatttcttttctttcaaggtacaatgatggtagaggcattgtgtaagctttctcagtccaaagggaagaaatttcccagaaaaataacacaaatgggcccacaggcccaatgcaagtccaaaacccagcagggcagtattcactcaatctctcagctccaaaatcatcaagagaactcactatcatgtgaacagcattaaggagagcgtgtttatccatttgtgaaacatctgcccccaccctcatctttcactcccacccacaaaataatctcccctattctccccactcccttacctccaaaccccatgcttctccatgattaaatcacctcccccca

SEQ ID NO: 855781 - DNA, 575 bp, Homo sapiens
ggagtcccttttgtcatcctctyagatcctattttcttatgtagaagttactttttagcttcatgcacttatattcttcctacaaatatttaaatatatttaacatgtagtattgtgtttcaaatttatgtgatattttagtacatacattctataatttgaaaaatgacatttatgttgatatatgtgtattattattattattattatttgaaacagtcttgctctgtcacccaggctgtagtgcagtggcacaatcttggctcactgcaacctccatctcccagtttcaagtgattgttgagcctcagcctcctgagtagctaggattacaagtgtgagcccctgcacctgccttacttcattaattttaatagctatgtagtattcagttatatgaacgaatagtacacagttttagtcctttattgatagttgttatcaacaaataaacaaatgtaaaatttttcctcaaattgggtcaagctatatatattgttctaaattagctctttttctcccaataataatagtgtgcaggtttgttacatgggtgtattacatgaggtttgggg

SEQ ID NO: 855782 - DNA, 530 bp, Homo sapiens
gtttttccacagtatggttgcctagcaaagcgactataccatcttatttgaggttccttgtgttctgaggccactggagcaatttatgtggaattaaatttctttagtaaagaacaaatatgatcaactggtcgtaaaaaaggctattagtgtgggagtcaacttctttcaggaataacggcaagaacaatctctgtggaccacatggtttaaagagtttttccatgctgatgcattctcacttggaaaggttatggggtatattgtataattaaatatttgcagaaatgacccctgtcacgtcttcctttacagctatgatgtagctgatcttcagcaaaaacctggcattgaagagctttgatcctgaaaatgatagctgacttcaacatggtcatagtttcttccagtctttcaycacaggcaactacagctagatgcattttctcaacaggctgtattttcagacgacacctgtcccacccaccaggatgcacagcgggaccagcgctgcccgcgcctctcacggc

SEQ ID NO: 855783 - DNA, 506 bp, Homo sapiens
ctccgaaaatcctgctcgtcactttatattttgagtcctactagagactttgatgaattgcactcaagaagacgcggcccccactacgcagtggctacgggagatggcttccagggcaactgttctccaagttcatttctgagcgccgggtaaccatggccagtaattaatccaattctaagcgttgctatcaattctacgcgttgctatcaattctactgatttccctgatcgaccagagtcttcccattgcaggagcttttgtcacaacttaggctttacctgtacaaccgtcatctccacagaggagcgacaagcctttatgcaatatggacaccaagaaaaccgccttcgaagacacgcaaggcaaaattcttgccagtgtccggaaatacccgtctctggaacccaaaagtcaaactaaaattaaaagttcggcttagcaacaccgcgaaaggcgatgtaggcgtccacckggagtttagctgcctcaacctccgccccgg

SEQ ID NO: 855784 - DNA, 750 bp, Homo sapiens
aatatctatcgacttttgctttctggtaactaagaatatggcagaatgggaaaaaaaaaaaaccttatcaaatgagcacacactgaagtgtcattgatttggtatctcccaaccttaaatattccagmagctgtttttattttaaaacaaaattgttttttcaaccaaaaaattacttactattgggccatctgcccattatcaagatatagcaaagaagatattgggagcagagctgctttcctaagttaggacatctagcaacctgtatcactccagctccagaaaccatgatatttaaaggaaacttggggcagctttgtgccctccctggtcctttatagcagtagaaatcagctccagaaatgttattttcttcccagcctttacaactcctgtactgtctccacacctcctgcctcaggctcatttcattattttcccaagagttagatacacttgggtagctttggtcctatcctggcctcctgaattactgcctaggattagtcagtcacacctgtttcccaggtcctgatctgggagaaccatcttagatcttgccctggctgaaactcacctgtgggaatagaatgtgaatttaagtcagagaagagaagatctcagaacgatggattccttacagaaccaacaaccaacaacaacaacatatttcctgagaatttcactatttacaaagtaccatcccatacattatcttatttgctctttctaatcaccctgtgagga

SEQ ID NO: 855785 - DNA, 507 bp, Homo sapiens
ggttgaatttgcgaatgtggaacccatggatatggagaaccaactatgtatatagcttcatcttcagagctgtacttsacctaaattctttccatttatggaagttaaaatacttgggccaggtgtagtggttcacacctataatcctagctctttgggaggctgagttgggcagatcatttgggcccaggagttcaagacaagcctgggcaacatggcagaaccctatcactacaaaaaaaaatacaaaaattaactgggcatggtggtgggcacctgtaatcctagctactcagggcactgaggcagaagaatcacttgaacccgggaggtggagattgcaggcaagactccatctaaaaaaaaaaaaaaagcaaattattagctaggcgtggtggcacatgcccatagtcccacctactcaggaggctgaggcaggaggatagcttgagccctgaggtcaaggctgcagtgagcacttgattgcaccactgcactccagcctgg

SEQ ID NO: 855786 - DNA, 507 bp, Homo sapiens
ggttgaatttgcgaatgtggaacccatggatatggagaaccaactatgtatatagcttcatcttcagagctgtacttcacctaaattctttccatttatggaagttaaaatacttgggccaggtgtagtggttcacacctataatcctagctctttgggaggctgagttgggcagatcatttgggcccaggagttcaagacaagcctgggcaacatggcagaaccctatcactacaaaaaaaaatacaaaaattaactgggcatggtggtgggcacctgtaatcctagctactcagggcactgaggcagaagaatcacttgaacccgggaggtggagattgcaggcaagactccatctaaaaaaaaaaaaaaagcaaattattagctaggcgtggtggcacatgcccatagtcccasctactcaggaggctgaggcaggaggatagcttgagccctgaggtcaaggctgcagtgagcacttgattgcaccactgcactccagcctgg

SEQ ID NO: 855787 - DNA, 601 bp, Homo sapiens
ctgcactccagcctgggtgacaagagccagactcygtctcaaaaaaaaaaaaaaaaaaaaaagacaaggaaaagaaaaaaagggggaggagaaactgtcaactgattaagagactcaagacatcaacagagtacaatgtgtggcacttgtttggatcctgattggaacaaacagacatatatactgagacatatatgagacaagtgagggcaagtgaactgagggggcatttgaaatcacagaataaatttaaatctgtgaccactttattgtggtattttaaaaagaaggaccttatctgttagaaataaatgctgaggatttaaagataaaatgtcttcgagttgttttaaaataattcagaaaggaggtgagactgtgagtaatggagagtggatacatatgaagacaggatgaggttttgaaaaattatttttttaatgatttcttgctctggcatttaaaaaacctaagtttcactagttgtgcaacatttgagtacacgagctcatttctccaacatgtttcctcaccagtaaaataatgctaatgataacatatatgtcacagtgttaaagatttaataactcctattaaacca

SEQ ID NO: 855788 - DNA, 544 bp, Homo sapiens
tgtaacagatggctgccgtcaaggctccgtcacccctatttgcttaaccacatcagccaagggrgcaggctagggagcacaccccttctgggggctcgagacctccctgggtggagcagaactgcagcggctgcaggtcccggagagtctgggagaggtcgaggttgacagaggaggtgggtagggggcgcgggcgccaggggcgatggaagcggcgatgatgccaggccgggtgggtgcgctccagtgtgaaaaaacttacaagtctctgagcacacaaagagataagattccaagggaaaattaaagaaccgaagaaaaggagagtgaaactccaggaaactccgaggtcaggaatttgggggaatctaggggaaaagggacttctccgagaactggtagcgcggaggaggggacgcctgaggagccgcagtctccaggagagcggtaagccccggcctgcgcgggttcccatccctgttctcaccagtacgagggctgcggccgccagcgccgcgccgagcaccgccagctgcaacagaag

SEQ ID NO: 855789 - DNA, 604 bp, Homo sapiens
ataacttttcccttaagattgaaaataaaatatttaaagtattctatggactttacttttttctgctttacaaaaattatattgcttacactgaaaataattatataaactagatgaatgattagtattagattgctgttataacaatagactattcataatagatggtgaaataatacagatggaaattatctcaggatctttattctttattttattttattatttatttatttttgagacagagtctcgctctctcgcccaggctagagtgcagtggtgcattcttggctcactgcaactctgcctcccagtttcaagtgattctcctgcatcagcctcccgagtagctggtattacaggtgcacgccaccacgctgggctaattttttgtatttttagtagagataaggtttcaccatgttggctaggctggttcaggatctctattctttggatcaggttaaatatttaaatcagtttggcctttttgataatacacagatgaaatackgataactaatgttagaattaccattgagttaaacactattcagattatgtctgagattgtacataagtgaactgacaaaatgacaatgct

SEQ ID NO: 855790 - DNA, 649 bp, Homo sapiens
agaaagatgtatactgaaaaggactagaattgttgagaaacaaaaaaagcaagaaaagatgtcattcacaatagcaaccaaaaatatataatgacttggaatattttaaataagaacagtgcagaatgtatacgaagaaaactatagaacttcactgacatgtgaaatgaaacaccatgtttctgggagggaatgaagtatacattttttcagttttcatcaaataatatgatatgtttctatctaatcaaatgccagcatattttttaactgaaaataattctatagaacaactggaaggaaaaacatacagaatagtcaatatttttaaaagtactttttaaaaagaaataatggaaatatatatcacattttaaagtgtgttctgaggcaagaataattaaactgcacacaaaattagttcacaaatggtataaaatgtaaagccccaaaacatatttacataaatttaagaatttatacatggtaaaggtcatatttcaaatcagtagggaaagtatggattggacaataaatgatgctgtgataatcatttgaatatttagagaaaatagttgactcaatacctcataccrtatagcaaaattaaactcagatggattactaggctgcatatatgtacaatata

SEQ ID NO: 855791 - DNA, 558 bp, Homo sapiens
aactgtgggtctcctctcagctgagagctgagcagatgtagagayaacctgcctgcagagagaatctacccactgtgggtctcctctcagccaagagctgagcagacagtgggatggcctgcctgcagttaggagctacccattccagatctcttgagagctgtactgctgctcagggaagcacctctttgtcttattcatgctccggttgtctgtgtacttcattcttcctggacacaggatgagaacttgggacctgcttaatggtgggactgaaagagctgtaacacaaaaagagctgaaacatgcccctcactcgccacattgcaacaaggagagaattgctgcagccctttggggagcccagacctaggagctccctgagcaagggctctgacacctgtttggggctctgcagttcctggcatctccaagcttccggacaccactgcattccccggtgccagcagtggaagctgctttcagtatgcctgtccagtcgcagcctcacaggaagcctggagccgcctaccccacggcagccggtgtgccctgctg

SEQ ID NO: 855792 - DNA, 639 bp, Homo sapiens
tcatcacatggccctcagcttatcagctttctctagagactgtgccctagttagattgcatgttctgcagacacccgtgctctcccactgtcctccatgtcttgcccgcagcagatgcttactaagtgtctattcacgatgtcatggtttgtgacatagtgatggtgattcctatttttagagagaccactgagatgttgcaggcttggttccagaccactgaaataaagtgagtatttcagtaaagcaagtcacacacatgttggtgtttctcagtgcatgtaacagttatgtttatgctacactgtagccattaagcatcatgtccaaaaaacaatgtacataccttaatttaaaaataccgtattgctaaaaaaaaaaaaaaagtgaatgatcatcggaggcttcagcaagtcataatcttcttgctgatggagggccttgattctatgttgatgattactgactgatcagggttgctaaaggttggggcggctgtggcaatttcttgaaataagacaacaatggagcttgtagcattgattgacccttcctttcatgaacgattttttggcactatgtgatgctgtttgatagcattttacccacartagaacttccttcaaaattggagtcagt

SEQ ID NO: 855793 - DNA, 653 bp, Homo sapiens
tatccagacaaatattttgcctgaaggggacattttgtgtgaagacttgatttctccccattatcaccatggtaacacttattatgtattaggaaccaygcactctgtgctttccacatagtactttatgtagtaagtcttacaacaactctgagaggttggcactattatccacacgacagataaagaagatgttacatgacctgcccaagttgcagagctgcacttgaacccaagccatgggattccattgtgagaacacttaaggatgacattatcactgcctttttaagccttacaagctagggatatggcccacagtttgtcaagcagatctgcaaatgaacaaacttgtacagataggctttcgtgtatatacagaagaactaaagatacaatattttgctctctcctaggcagaattttggcttgatatattagtctgcaagggctgccatgacaaaacactatagaccggcttaaacaacaggaatttgttttctcacagttttaaagaccagaggtccaagataaagatcttgacccttttggcttctgatgagggctcacttcctggcttgcggatggctgccttcttgctgtgtgttcacgaggcctttccttggttcgtgtgctcagagaaagagagctct

SEQ ID NO: 855794 - DNA, 628 bp, Homo sapiens
tgaataggattaaatcacgtatttacaaaatgcagcatcttattagtggtttatcacattagtggtttacgttggtccatttcccacctaattgaatacaaatgacaatgggagcaggagggtgaagtacacgatagatggcctccagggtggcgaagggtgatgaaagtggggctggggacttggtgcccaccctgcaaagcagcccttttatcagtgacagccactccattccaactgcgcttggatttccacattgggtattataggaagtaaggatggaagaggccaaaaaatgtaattccatggctcatgttttgcctgaatcctgtcttttcctctctccactttttggttaattagcaatggttcctataaaggcacagagctggggataacggcagccgggagctggggatgaaagcagtcaatagattcttgtttggtgggaagaatcttttaaggaaaaaagttggaaactagagagtatgagttccttaaggtagaaggctccaagttgattcaagaagataaagaagagagaaaaatgcaaaggaagataagaaactccaccwcataggtagtgtgtaatcaacaagaggctgtggtttcctctctttcaaagata

SEQ ID NO: 855795 - DNA, 562 bp, Homo sapiens
ttgaaaataaaaaaaaaattacattatttctaaagaagacgtcacttgttaatattggtgcaaatgtaattgtagtttttgtcattacttttgccttttcacaaacctaataactggcaactcaagagccaataataataagatgatgaacatggatgtatatggaggtgatatcttttttgaacattccaaaaaattttcgtattcacagttcttatgtttctattatttttttttttagctgactgagtttatacattcacttctgggacctaagctgtaagagaaactagggtctcaaaatatatttattctgggtgaaatgacaaatgactgtcatttggttgataggcagatgcttctttttttcttttctttttttttttttttttttttttttgagacagtcttactctgttgcccaggctggagtccaatggtgagaacttggctcactgcaacctctgtgtcccgggttcaagygattctcctgtctcagcctcctgagtagctgggactataggcatgccccaccacacttagctaatttttgtatttttag

SEQ ID NO: 855796 - DNA, 593 bp, Homo sapiens
ctcactcttttgcccaggtgggtctcaaactcttgggctcaagcaatcctcctgtgtccagagttggttcctgccagtgggttcgtggtctctctgacttcaagaatgaagccgcggaccttcgcsgtgagtgttacagctcttaaagatggcacagacccaaagagtgagtggtagcacggtttattgtgaagagcgaaaggacaaagcttccacagtgtggaaggggacctgagcaggttgcagctgctggctggggtggccagcttttattcgcttattgtcccttcccatgttccatttctgtcctatcagagtgcacttttttcagtcctccccgcaattggctccttttagaatcctgctaatttgcgcgttttacagagcgcagattggtgcgttttacagagtgctgattggtgcgttttacaatcctcttgtaagacaggaaacttccccaagtccccactcaacccaggaagtgtagctggcctcacctctcaatcccccctctaaacaggacacccaaactgccgttgggaactgggtgatgactgctctagctacttcctgctggatagggcaaagaaggg

SEQ ID NO: 855797 - DNA, 575 bp, Homo sapiens
ttttcccaccattgcttctgcrccatcagtcaaatgtcaacattggtgaaaagggcaactagcatcttagtattctgatgaaaataggtttgactttaagaaccactgttacaccacatggctcatctgtgattacatttacttagttctaatgatgtaaacaaatatttagctaagttaactagaatataactacgttggaagaatagagggatggagaaacaagggtcagaaggcagaaaaagagcgaaattatcaccttccagagagaaaagtccacagaaaatgtctttttttttttctctcactctgtagcccaagctgaagtgcagtggcgtgatctcagctcactgcaacctctgccttggggactcaagcaattctcttctctcagcctcccaagtagctgggaccccaggagtgcacaaccacacccagctgattttttgtattttagtagagacagggtttcactctgttgcccagggtggtctcgaactcctgagctcaggcgatctgcctgcctctgcttcccaaagtgccgggagtacagggtaagccactgcgactggcca

SEQ ID NO: 855798 - DNA, 551 bp, Homo sapiens
agaattgggctgccaaaaaagatagtgtaagcttaggtatcatcagtgaagtacagaatccagagggaagggaagaggtgttcttaccatttccacatggttcaagctacacctggagtattgttttcaattttaggacacatttaaagacggcgttaataaaacatgagccttcccagctgaaaatttgtgttgaaatcatgttatataagaaagatgaagcgaaagaactaaagagaaatatgatagctgccttcaacaattggaaagaatttttctgacctgttcagaaaccatatctagaaacaaggggtagaagaattgtcattcagatttcagcttaagtgacactgcctcagcagtgtcttgccttgaagtagccacccagtaattagtatataactgttttagccttctgtataataggtatcattatctattcacttaattttttttctgtaaacttaattcattaatttattgtctgttggtctgtttcttctcactagaacataattttcctgawagtaagttcccctctgtcttgttca

SEQ ID NO: 855799 - DNA, 647 bp, Homo sapiens
ttgccctgatgggagcatgcgctttagctctgacatcattttcaagaaagagaagggcaaactggcaccaaatagctacagaaaaagggaggggaatctgtccttttttttttttttttttgagcctgtcacccaggctggagtacagtgtcgtgattttggctcactgcaacctctgcctcccgggttcaagcgattctcctgcctcagcctcccaagtagctgggactacaggtgtgtgccactacgcctggctaattttttgtatttttagtagagacagagtttcaccatgttagccaggatgctgttgatctcctgacctcgtgatcctcccgccttggcctcccaaagtgctgggattacaggtgtgagccactgtgcctggccgagtctgtccttttaagtatagaacagaacaggacaccactttggggctccaaggactggtggcttcctattgcttttccttctcagagagtgagaaagatgtaaccatttgacattgtggtaattaatgtttggagtcttagcctgccttyccaaggcccaatgaggtggagtgttatttctgccccttaattgggaggcaggaggaggccccatggacatatgttttgttcatgcccgtggcctcaccagaagtc

SEQ ID NO: 855800 - DNA, 511 bp, Homo sapiens
ttgaactcctagactcaagtgatacacccactttggcttcccaaagtgctaagattacaggcgtgagccctgagcctggcctgagagtcaacttytccactcaggcaggcagcagtctttagagatgatgtccctccagcctgagcacgggacagttggcctgtgagttcaaggggcttaggagaaatgggtggaagttgcacaggggaggcacaaagacagccacagtctaagctgttccctgcagggaggccaggaagagaccaaccctcctacctgtaccctacattggtcagaacactcctctgtgggcttctctgtaagggatgcccttcagcaaccaggaaacccctctcctctcttccttcctccaggcccatcaaagggcattcattcagcatacctgggacaagaaaatcaactttcatgaattacaagagaaagtatattttaaagacaggggaaagggcaaggaggaggagagagaagactctcggggcctgagaggttt

SEQ ID NO: 855801 - DNA, 646 bp, Homo sapiens
tgttgggtacacctgcagaaaggctgttgcttcacacttggaagattgmacagcggccaggcagaggtgctcctcacttcccagatggggtggcagccgggcagaggcactcctcacatcccagatgatgggcggctgggcagaggcgctcctcacctcccagacggggtggccgggcagaggcgctcctcacttcccagacggggtggccaggcagaggtgctcctcacttcccagacggggcagctgggcagaggcgctccacacttcccagacggggtggccaggcagaggcgctcctcacttcccagacagggcagccgggcagaggtgctcctcactttgcagatgaggtggccaggcagaggcgctcctcacttcctagacagggtggcagccgggcagaggtgctcctcacatcccagacaatgggcggccgggcagaggtgctcctcacttcccagacggggcggccaggcagaggcactccccacttcccagacagggtggccgggcagaggcgctcctcacttcccagactgggtggctgctgggcagaggcgctcctcgcctctcagacggggcggccaggcagaggcactcctcagttcccagacagggcagccaggcagaggtactcctcacc

SEQ ID NO: 855802 - DNA, 646 bp, Homo sapiens
tgttgggtacacctgcagaaaggctgttgcttcacacttggaagattgcacagcggccaggcagaggtgctcctcacttcccagatggggtggcagccgggcagaggcactcctcacatcccagatgatgggcggctgggcagaggcgctcctcacctcccagacggggtggccgggcagaggcgctcctcacttcccagacggggtggccaggcagaggtgctcctcacttcccagacggggcagctgggcagaggcgctccacacttcccagacggggtggccaggcagaggcgctcctcacttcccagacagggcagccgggcagaggtgctcctcactttgcagatgaggtggccaggcagaggcgctcctcacttcctagacagggtggcagccgggcagaggtgctcctcacatcccagacaatgggcggccgggcagaggtgctcctcacttcccagacggggcggccaggcagaggcactccccacttcccagacagggtggccgggcagaggcgctcctcacttcccagaytgggtggctgctgggcagaggcgctcctcgcctctcagacggggcggccaggcagaggcactcctcagttcccagacagggcagccaggcagaggtactcctcacc

SEQ ID NO: 855803 - DNA, 646 bp, Homo sapiens
tgttgggtacacctgcagaaaggctgttgcttcacacttggaagattgcacagcggccaggcagaggtgctcctcacttcccagatggggtggcagccgggcagaggcactcctcacatcccagatgatgggcggctgggcagaggcgctcctcacctcccagacggggtggccgggcagaggcgctcctcacttcccagacggggtggccaggcagaggtgctcctcacttcccagacggggcagctgggcagaggcgctccacacttcccagacggggtggccaggcagaggcgctcctcacttcccagacagggcagccgggcagaggtgctcctcactttgcagatgaggtggccaggcagaggcgctcctcacttcctagacagggtggcagccgggcagaggtgctcctcacatcccagacaatgggcggccgggcagaggtgctcctcacttcccagacggggcggccaggcagaggcactccccacttcccagacagggtggccgggcagaggcgctcctcacttcccagackgggtggctgctgggcagaggcgctcctcgcctctcagacggggcggccaggcagaggcactcctcagttcccagacagggcagccaggcagaggtactcctcacc

SEQ ID NO: 855804 - DNA, 600 bp, Homo sapiens
tgaagttggtaatgtaatgccttcagatttgttcttattacttagtcttgttttggctatgtgggctttttttggttcmatatgaattttataattgtctttttttgttttagttctgtgaagaatgatgatgctatctttatgggaattgcatggaatttgtagattgtttttggcatcatggtcatgttcacaatagtcactctacttatccatgagcatgaaatgtgtttccatttgtttgtgtcatctataatttatttcaagtgttttgttatttaccttgtagagatcgtttgcctccttggctaagtatattcctaattattattattattattattatttttcagctgttgtaagaggggttgagttcttgatttgattcctagtttgggttgctatttgtgcatagcagtgctactgaattttgtacattgattttgtatcctgaaacttcactgaattcatttatcagatctaggggctttttggatgagtctttagtgtcttttaggtatacaatcacatcatcagtgaacagtcacagtttgacttcctcttttccaatttggatgccctttatttctttctcttgtt

SEQ ID NO: 855805 - DNA, 649 bp, Homo sapiens
aaaagtgctgggattacaggcgtgagccactgcacccggccataattgtacattttaaaataagtaaaagtgtacaattggattgtttgtaatacaaaggataaatgctagaggtgatggataccacatgtatctcgatgtgagtattatgtattgtatttgtgtatcaaaatatgccatatatgccataagtatatacactcatgcacccacagaaattaagaaaaacaaattaaatgattaagaataaaaatttaacctacaggaacaatattctttaacttatttgcagtttaaagccactggcaaaagagatgactaaagatgttagtccattatgttaccaaatagtatattgttaacattttttacctatatttttgggcaaagtggaaaaggttaatctttgtggtaaaataacacttcattgaatgcacaatagtatttaacatgttaaaaatgttgaaacgattaacttcacacataatctaaaatttttaaaatgtactgcattttatcatataaaagtacaattagtacaatatatgaataatatactactagttttctcrtaatgcaaagaatatcactcttaacacctacctcgtgcatcactcaatagtgtaagttaaccacaaagaatctctcc

SEQ ID NO: 855806 - DNA, 604 bp, Homo sapiens
ggagatcctgggcatgaaaaatataagtatagaaatgaaaaactcagtagatgtgttgaaaaactgaatggatacttccaaagactaaactagtaacctggaatttcaagttgaggaattstcccagagagtaccaggaagggttaatgagatgaagagaataaaattaacattgagagacatggaagacagaaaagtatcagcattgattcaatgcatgttccaggaagaaatagaacagtaatgctttatgcaagaagacagtgaaataatattttttcaatgctgaacatagacatttttgaacctagaactttgtaaccagttaagtttttatttaaatatgattgtgagataaagatattttcaggttgacagggcctaaaaaatgaatcatacttcaagaacatatttgaaagaaatactctagcaaagagaagagattaattcaggagagaaaaatgaggtataggaagtatgggttagtagataagttttattgttgcttagatgtgcaatgacctcctgtacttccttcttacaaaaaccaaagcatagccatgacaatacaaagtaaacactctaaatgagtataaatttagtt

SEQ ID NO: 855807 - DNA, 601 bp, Homo sapiens
acatgtattatttttgtgtgtgttgggaacattccaaatcttctaggtattttgaaatatacaataaactattgttaaccgtagtcgccctattgtgctgtcaaacaccagcacttaatccttctatctaacggtatttttgcacccattggagagtgatgataggagccaccagtttattcactatgaaggcaacataaagggtctgctggccagattttacttgttaaatccattagcctcatctcccggaacactgaccacatgccagaagctgttctaaatgctttgcatggatgaacacackagctcatttaatcctcaggatcccatgggctcattcccatcatcattctcatgttaccaaggaagacaactgagacccagagcagtctatggcttgtaggtagcagggccagaaggggaacagtcggtgggatggcaaggtcatagtgcctctcgtcatcgtgctggcagtgttgtctttcagttatggcttttgggcatgagatttcacctatctgatatgcgttacttctgctaagtggggtataattgtgtagtaatatccacttcattagggtgtgctgaagatgaaaat

SEQ ID NO: 855808 - DNA, 601 bp, Homo sapiens
acatgtattatttttgtgtgtgttgggaacattccaaatcttctaggtattttgaaatatacaataaactattgttaaccgtagtcgccctattgtgctgtcaaacaccagcacttaatccttctatctaacggtatttttgcacccattggagagtgatgataggagccaccagtttattcactatgaaggcaacataaagggtctgctggccagattttacttgttaaatccattagcctcatctcccggaacactgaccacatgccagaagctgttctaaatgctttgcatggatgaacacactagctcatttaatcctcaggatcccatgggctcattcccatcatcattctcatgttaccaaggaagacaactgagacccagagcagtctatggcttgtaggtagcagggccagaaggggaacagtcggtgggatggcaaggtcatagtgcctctcgtcatcgtgctggcagtgttgtctttcagttatggcttttgggcatgagatttcacctatctgatatkcgttacttctgctaagtggggtataattgtgtagtaatatccacttcattagggtgtgctgaagatgaaaat

SEQ ID NO: 855809 - DNA, 601 bp, Homo sapiens
acatgtattatttttgtgtgtgttgggaacattccaaatcttctaggtattttgaaatatacaataaactattgttaaccgtagtcgccctattgtgctgtcaaacaccagcacttaatccttctatctaacggtatttttgcacccattggagagtgatgataggagccaccagtttattcactatgaaggcaacataaagggtctgctggccagattttacttgttaaatccattagcctcatctcccggaacactgaccacatgccagaagctgttctaaatgctttgcatggatgaacacactagctcatttaatcctcaggatcccatgggctcattcccatcatcattctcatgttaccaaggaagacaactgagacccagagcagtctatggcttgtaggtagcagggccagaaggggaacagtcggtgggatggcaaggtcatagtgcctctcgtcatcgtgctggcagtgttgtctttcagttatggcttttgggcatgagatttcacctatctgatatgcrttacttctgctaagtggggtataattgtgtagtaatatccacttcattagggtgtgctgaagatgaaaat

SEQ ID NO: 855810 - DNA, 616 bp, Homo sapiens
catgtgcaaaggaggctaacgcagagccrtaaccaatccagctgtttctggacctcactgttgttttctgcaggctcctttttttcccctctgtccataaatttgctctgaccatgtggcaagtgctagaatctctctgaatctgctgtgattctgatggctgcctgattcgtgaatctttttctttttcttgctcagttaaactctgttatatttaatttatttaaagtttttattttaacactgtgtatctggtccatcagtcctcaggggacagtcctttggtatttagtgataagagagttttaggggtcatgagggtagccccagctatggaatctcagcatcagggcggccttcagaactcagcactgcctcctcacctgtccacccctctcatgagcctcaccctctgcactttgctcacatttccccctaaagttttccttgtggcaggagatgcttgacgtcaagaccttccttctgaacatcagtcagtagtgtgaaaactgaaaatagataatatattttagaagaagacttctgatctctgagagacaaattatgaaaattctaactagccctatctttaaggcatagaaaaattatgttgtca

SEQ ID NO: 855811 - DNA, 602 bp, Homo sapiens
cagcttctattgctaattttgtaacctccacaactctattcctaggaacccggaggagtaatgaaaagtagtatttggtgatcaatgtgctcaacaggtagttcaggcacaaacaatgaccctcacaaaaatcacattattcttgcatcttgggttagttctatatatggggtgataaatccatcccaatttgctttagtctttcctgcttagtaataaatgttgggtatccctggacctcttcaatcccaggtaattcctggttgatcactagcaatgagtttcccaagaacaacctcagattcagtcatttgttggacaaattaacaagactcaaattacagttataaatatagtctttattattactattattatttgagacagagtctcactctgtcacccaggctagagtacagtggcacaatctcagctcactgaaaactctgcccctcccccacttcatctcggactgaaacaatcctctcacctccgtctccccaaatagctaggaccacagatgcgcgctattatgccrgttaaatttttgtatttttggtaggtacggggtttcgctatgttgcccaggctcaagctcccaa

SEQ ID NO: 855812 - DNA, 618 bp, Homo sapiens
ttttaaacaacaaagccatgaatagaacaattttctattttaatatgagtatttcagaagctttctattttcaatgatattaaaaggaactagatgccaggtctcactgccttcccctrataccagccctgatcttctctttgctgtggaggcactcaaggtttaccaaggctaaagcttccatgttgtgcttttccttacttccccctcatgccaattttcattacaaagtaaaccgctagtgttgatggtcttcaagatgtctctctgtaaattcttacaatgtacagttgagaaaagtgagacaaattttatatgactagtccttattcaagcacttagtagccttggaatacacgttttcttccagtatagaaatagttcagtctagaaaataaagtctccattttgcctactttcatgtcaggggaccatccataccattttgatacaaatctgatgcatattaacatggaccaaaaatctaaaatttctccttcgaggttctagttttttcttaaagttatttttccttttaattttcctagaggtgaaagttgtacatgggaacttgtattaagtccaagaccagtattattactctgtcatgctcaaggc

SEQ ID NO: 855813 - DNA, 618 bp, Homo sapiens
ttttaaacaacaaagccatgaatagaacaattttctattttaatatgagtatttcagaagctttctattttcaatgatattaaaaggaactagatgccaggtctcactgccttcccctgataccagccctgatcttctctttgctgtggaggcactcaaggtttaccaaggctaaagcttccatgttgtgcttttccttacttccccctcatgccaattttcattacaaagtaaaccgctagtgttgatggtcttcaagatgtctctctgtaaattcttacaatgtacagttgagaaaagtgagacaaattttatatgactagtccttattcaagcacttagtagccttggaatacacgttttcttccagtatagaaatagttcagtctagaaaataaagtctccattttgcctactttcatgtcaggggaccatccataccattttgatacaaatctgatgcatattaacatggaccaaaaatctamaatttctccttcgaggttctagttttttcttaaagttatttttccttttaattttcctagaggtgaaagttgtacatgggaacttgtattaagtccaagaccagtattattactctgtcatgctcaaggc

SEQ ID NO: 855814 - DNA, 618 bp, Homo sapiens
ttttaaacaacaaagccatgaatagaacaattttctattttaatatgagtatttcagaagctttctattttcaatgatattaaaaggaactagatgccaggtctcactgccttcccctgataccagccctgatcttctctttgctgtggaggcactcaaggtttaccaaggctaaagcttccatgttgtgcttttccttacttccccctcatgccaattttcattacaaagtaaaccgctagtgttgatggtcttcaagatgtctctctgtaaattcttacaatgtacagttgagaaaagtgagacaaattttatatgactagtccttattcaagcacttagtagccttggaatacacgttttcttccagtatagaaatagttcagtctagaaaataaagtctccattttgcctactttcatgtcaggggaccatccataccattttgatacaaatctgatgcatattaacatggaccaaaaatctaaaatttctccttcgaggttctagttttttcttaaagttatttttccttttaattttcctagaggtgaaagttgtacatgggaacttstattaagtccaagaccagtattattactctgtcatgctcaaggc

SEQ ID NO: 855815 - DNA, 515 bp, Homo sapiens
gcttgagcagccctccagcctactgctgcactgtgggagcccctttctgggctggccaaggccagagccatctccctcagcttgcagggaggtgtggagggagaggcatgggtgggaactggggctgcgcatggccttgtgggccagcacgagttccgggtgggcatgtgctcagcaggccctgcactcagagcggctggccagcctgcaagcccagggcagtgaggggcttagcacctgggccagcagctgctgtgctcaatttctcaccggaccttagctgcctccccatggggcagggctcgggacctgcagcccaccatgcctgagcctctccaccgtccgtgggctcctgtgtggctggagcctccctgacgagcgctgccccctgctccacggcacccagtcccatcaascacccaagtgctgaggagtgcgggcgcatggcacgggactggcaggcagctccacctgcggtcccagcatgggatccactgggtgaagccagctgggct

SEQ ID NO: 855816 - DNA, 508 bp, Homo sapiens
atcgcttgcagcctaagagttatgttgcctgcattgagtcatttttagctaagtctttttgttgtgttaaagtactgttagctgaactgtatggactccacctggcaaatgcagttaaagttcygatgcccagagggggaagaccaggaaaggagcagattttcccagatgggaccttgacatggcttatgtttctgcttgggagtgctaccaggaccacattcgcagccgctctcacatttgctcctcacagctgcactgagcaccaagccgaggaggtattattatccccatttcagaaatgaggaaacgaaaactgcaagattaaataagttgatttttgttcctcctgcctggggcccccaagataacagcagcagcttcaccaatattcctgcacctgccttagtccagtccctcctatggtaatccccaaattttggagctaagaggcttccgtaatgatctgcctcaagcctccgtgtttcacagtgaactcatgttttta

SEQ ID NO: 855817 - DNA, 507 bp, Homo sapiens
ataagcttatctgcaacaatcccatcattacgtctttctttctttttgccaggatgtcattcttcttgtctacagttaacsctttagcctgtgccctggatcacattctctgattttctcttggctcatgttgcaccaattttcctttcattcttctgcatctttcactattcttactctttattcttggtcattgtcatatgcagtagctcaagtctttatcatagaaaacctttcatcgaccatataacatccttaacttattttctcttcttctctcctcagccaagattcttgaaagtattgtttacaatacagtaatctttttgtttaatggaattaaattccttctgaaactggattctgcttttaacatcacactgaatttgctccagaaaaaaatcatcagtaacctctgtacataccatgtatatcaaatctggtctttctggacatttctccatcgttggaccctggagatgattttttttttcgacagctcccttt

SEQ ID NO: 855818 - DNA, 526 bp, Homo sapiens
ggggctccacaggagcaggagacatgaacagttgggcaacactgcaattcatcytatacctgcctccagattcaacacgactttttccacagggctatcgtgagggtccaaagaaacaaactcttccttacaaaatgtaaatattagctgttattttaaaactataaatgttaattcttggctaggagtggtggttcatgcctgtagtcctaacactttgggaggccaaggtgggagaattgctcgaggccaggagttggaaactagcctgggcaacatagtgagaccctgtctttacaaaaaaaaaaaaaaagtaaatgcttatttttacttttcactattcccaaatttaagtaactcctgattgcttatgaaagttcaaactgttcttgactggtggtcatggaaaagaaaaaggaaagttgaaactgatcctagaatttaagaccacctttaaatgcaccgagctatttttctaacccttctccctttaggaatccctgtattctcatcagactgttcactg

SEQ ID NO: 855819 - DNA, 631 bp, Homo sapiens
gcaaggaacacctggcctacccagagtggaaaactgctcaaaccacaaacaacagcatgagcggcctgttccataacaacatgtttttgctgcagatgatcatccagggactgtttctctgctcctcactaagaatgtttgtttcctgtaaagaatgcttttagctaatctataacctatagaaacaatgcttatcactggcttattgtcaataaatatgtgggtcaaactctgttcgtggctctcagctctgaaggctgttatccccctgattcccactttgcactttatttctgtgtgtttgtcttcattcctctagcactactgggttggggtctccacgaccgagctggtctcatcaagtggcgtccaacaaggggctcaaacccgggttgaggggttgctggagcgacggagaacgtggaactacactggaggacaccagagtactcttaagcaatcccttggtaagtaagacggggagcttggaagcatcagggtaacaatgggacaagggtcgagcaggcatgagtyttatttgagtctgttttggcagctcctcagaaaagggggaaggaaggttagtactagccgacttatgcagctttgtagtgtggtagagaaatattgc

SEQ ID NO: 855820 - DNA, 538 bp, Homo sapiens
gcagagcttgtagctgtaattgaggtattgactgcttttgatatgcctattaatgtgatttctgattcttcatacgtggttcattccacacagttaattgaaaatkctcagttacgatttcatacagaagaaaaactgatgactttatttacccaattgcaaacagcagttagaagtagaatgcaccgattttacatcactcacataagggctcatacacatcttccaggatctttgactgaagggaatcaaatggctgatcgcctagttgctactgcagtatctaatgctagacactttcacagtttaacccatgttaatgcctctggtctcaaacacagatacagcattacctggaaagaagctaaagctattatccagcgatgcccaacttgccaagtggtacattcctcatcttttacaggaggagttaatcctagaggactggaacctaactcttttggcaaatggatgtcacacatgttccctcgtttgggagactagcttatgtacatgtatgtgtggacaccttttctca

SEQ ID NO: 855821 - DNA, 524 bp, Homo sapiens
accgatgcccaaccactgacttcttccgctgtacctgctgcctctcattttaacccattaaaaacactaaaactgttttccttgtagaggtctttcccctccttgcttagttagattcttaagctggttttttgtttgtttgttttgcagctgttgtaaaggggttgagttcttggtttgattctcagcttggtcgctgttggggtataacagctactgatttgtgtacattaattttatatccggaaacttttctgaattcatttatcagttctaggagttttactggaggagtctttggggttttcaaggtatacgatcatatcatcagcaaacagcaacagtttgacttcctagttactgatctggatgccctttctttctttctcttgagtgattgctctggctgrctaggtcttccagtactatattgaattggagtggtgagagtgggcatccttgccttgttcctgttctcagggggaatgctttcaacttttgccattcaatattatgttggctgt

SEQ ID NO: 855822 - DNA, 357 bp, Homo sapiens
tgtttttaaataataacttttttctctttctgagactgggtctccctttgttgcctaggctggagtgcagtgtgcaattatagttaactgcagcctcaaactcctgagctcaagcratcctctgcctcagcctcctgagtaggtaaaactaaaggcacatgctaccaagcctggctaatttgttatttaacttttttttaaaattttattattattatactttaagttttagggtacatgtttttgtagagatgagctcttgctatgttgaccaggctaaaaataaacaaattttaattaacttaaatatttctaacactttgggcattcatgaaaacagctccatctatgttgtga

SEQ ID NO: 855823 - DNA, 611 bp, Homo sapiens
gcctgcagaaccatgagccaataagcatcttttctttataaattacccagtctcaggtatgtctttatagtagtgtgagaatgkactaacataccatcccttcaaaatgctgggcatagtggacatcttatcttgtccctgcctgagaaagaatgcttgctttctggggctcacagatatgtatgttttgctgcagttatagacctttatcagttggggtcctaccagacaaacaaccactaggacatacatattaagagatttatttcaagaattggtttatatgattgaggaggctggataggcatgtccaaaacttatagggcaggtggtcaggaaggtcctgagctgtagctgtagtccagaagttgaatttcttctggaaagtctcaatactgctcataaaggctttcacctgattgattcaggctcacccagattgtctaagataatctcgcttaattaaagtcacctgattatgaactttacttacagctataaaatattctcaccacacctaggttagtgtttgattgaataactgggactatagtttaaccaaatagactcataaagctgaccatctctggatcctttatctggctaaggaa

SEQ ID NO: 855824 - DNA, 588 bp, Homo sapiens
agtgtattgggtgtgttttgcrtgtgtataagctttaggaagataagcttaaaaaacttttattgcgtataaattaagaactgcttcatttacaatgacacacttcttccctaatgcaacaatatcttcagagtcagcttgtgacaccttggagaaacatcagaaatgtataggaaaatataattgccttaagtaatctaatgttcccacgtgtaataggataaaatcaaggcccactcaagacttgacgagttctcagggacataagacagaaaaagaatttataccaaaaataacgtccagttttctttatcagcacaaagtacaaattacaactatttgaatcaggttcaggaaaaaagcaaacatgcacacctaaaacttaaaagaccgtttcatcactatgcatacgtttatcatttgacatccatcaactgtatacctggtttcaaaagtaaatttaacttgtgatctcagcatagctcatgttcacatttcatgcagagggtccaggaaactcaaatcacactttggtaagtcaccatgttcactcatttttagaagcgtaccctggatcgtttcagagat

SEQ ID NO: 855825 - DNA, 492 bp, Homo sapiens
gtagaaaagttctaattgtattcatagagagacactttaaactgcaatattgtaaaagttgggacctgaaaatttaatgcctgggacttgaacgtattgacatatctttattgttcagtatagatctgaaggaacatttcagcagaaagaaaagcatgaggaataggaaaccttgtgggagtataataacaagagtattggttgagtagtcttttgaaaaatataaattatattttcacaaatagaactccttgagtccccttatggcagtcaagctacagcagcatgagcgtcaaatcatagtgatgtattttaaggtcacaacggcggaaagacatagaaagtatctgacctcttagaaacaagcagctgctgcctggtggtaacagcaaagggtrgaagtcaataggtagattttatctgatattttattagacagaaagactttaacacttgtttgctttcatttagatgtgacataatttttttctt

SEQ ID NO: 855826 - DNA, 658 bp, Homo sapiens
actaggcaagatctctatgtgaaatttttttaaattaattaagttaataagacaattgaaatattagtagtgtgagaatacagtattatctcttttctgcccaaattaytaactcaatgaaattccaatcaaaatccttgctctgcagagctttgtgtattgattataaaatgtatatggcattttccctctcttctctttctgagcatttttattcatgagcatggagataaaacagaaagctatggttgtccagagtgaggagttggggcctggagacaatgggaaagacctaagtgtgggagcaccaccctgcacaatgttaacaatcaagtgagagcacccctgaatggtgggtgaaatagaataaaatatcaaaaactgaatagagtcaggaggcatccatgcagagatggagaaggacagcctagcatgggttttcagcacctgagcaggaaaaatattctgtgtaaaagggcagcttggcacaaaatatctgagaaagcatggggtgaagacagagggaaagcagcagaggtaacctgatgaaggatgctgaagtcccagagggagtgagtactcgcctaagggcagggacacaagagactggtcacacagaatggtattgaacaaataagtgaggatagcaggtccttga

SEQ ID NO: 855827 - DNA, 590 bp, Homo sapiens
ggagaaaggtatccatattcaagtataagaaggttatagaataccaagcagatttaacccaaaaaagactacctcatagcatttaattatcaaactcctaaaggtgaaggataaagaaaggatcctgaaagcagcaagagaaaagaaacaaataacataacaatggagctgtatacatctggcagcagacttctcagtggaaaccctacaggctagaagagagtggcatgacatatttaaagtgctgaaggaaaaaaaaacaccttttaccctagaatagtatattcagtgaaaatatccttcaaacatgaaggagagataaagactttcccagacaaacaaaagctgagggatttcaacaccaggcctgtcctacaaaaaatgctaaagggagtacttcaatcagaaagaaaagaacattaataagtaataaataatcacctgcacatacgaaactcactggtaatagtaagtayacaggaaaacacagaatattataacattgtaactctggtgtgtaaataactcttatcctaagtagaaagactaaatgaagaaccaataaaaaataataactatgacaacttttc

SEQ ID NO: 855828 - DNA, 715 bp, Homo sapiens
ggcaggtgatttgttcatggggatggatccttcatgaatggttcagcagcatccccttggtcctgtacttgtgatagagtcctaacaagatctggttgtgtaaaagtgtgtagcacctccccgactctctctctcttgcccctgctctggccacgtgaaacatccctgctccacctttgccttctgctatgattataaatttcctgaggcttccccagaagccaagcagatgccagcttcatgcttcctgtacaagctgcagaaccatgagccaacgaaacctcttttctttataaattacccagtctcaggtatttctttatagcaatgcaagaactgactgatcatatagtaaagaaagtgccttcaaggagcttatgggttagtaagttatacttgataaaaataaatgtgcaaacgaatataatttctagaaaaataaggtgcagcaatccttcaagactccaaatttgtaactttactctttatagactttaacagttgtcttttttattttgtttttaaatttatttttactacatttaattgtatatttgaggtttataacattatgttataggatacatacagataatgaaatagttactatagggaagcagatgaayatatctgtcatctcattgttacttgttatgtgtgacaagagcagctaaaatatttaacaaaaattcctaatacggtcacatcagtatgg

SEQ ID NO: 855829 - DNA, 558 bp, Homo sapiens
gtacatacaccctctttgaaagagaagagagtaataatttgaacagatttctgctactagcagaatcctagtctgagaggatttttaaaagcattttgctcttaatcatcccaagtatatagtaccttgttcctggaatttcagcattttctgtggggaggggaacaacgtcttttcatcatctgcaggttttattccagtcctggggctatcatccctgtgtgatctgaactatgtctttctagactggaataactttaaatttctaatactttggttgctttttagaataaattcattttaaaatgtccccttctatttgttactttagtgcagtaaggatctttatggatttcttttcccccttatggaaaccatttgtagtattgagagaatgggttcaggttttcttgcactgttgggaagaagaaaaattcttcaaattccactgctcggccttctagggactctactctacagatggaartcctggaagatcctatcaggaagtgaaacttgtaaataatgtttgtgctcgtttggggcattatgcgttaa

SEQ ID NO: 855830 - DNA, 558 bp, Homo sapiens
gtacatacaccctctttgaaagagaagagagtaataatttgaacagatttctgctactagcagaatcctagtctgagaggatttttaaaagcattttgctcttaatcatcccaagtatatagtaccttgttcctggaatttcagcattttctgtggggaggggaacaacgtcttttcatcatctgcaggttttattccagtcctggggctatcatccctgtgtgatctgaactatgtctttctagactggaataactttaaatttctaatactttggttgctttttagaataaattcattttaaaatgtccccttctatttgttactttagtgcagtaaggatctttatggatttcttttcccccttatggaaaccatttgtagtattgagagaatgggttcaggttttcttgcactgttgggaagaagaaaaattcttcaaattccactgctcggccttctagggactctactctacagatggaagtcctggaagatcctatcaggaagtgaaacttgtaaataatgtttgtgctygtttggggcattatgcgttaa

SEQ ID NO: 855831 - DNA, 575 bp, Homo sapiens
tgcagtgagccaagatcgtgccactgcactccagcctgggcgacagagtgagacccgtctcaaagaaaaaaaaaaaaaaaaagaactaagtgaaamcattgttttaacgaaaacgaccgacattatttgttgtcaaggataaaattcatgctttcaagtgaacattagaattttttaaaagttgtatctaccaccttgagcttgacaccttcccaatacttaaaggctttctgaaaggttggtggtggtatcactgaatatgattttttaaatattgtgccataaaactgatcaatatttggaaaatctgcattttatataaaaactagtattttccaaataatgccgatattacaaaataatatatggtaaaaaagatccattcaaagtgcaagacatactaatgggttttaatataacagtacaaaaagtttatcaatatacaaaacatatggagatatgttactgcttttttcatttgaagacttcaaatctggtgtgtaatttacacttacagagcacttcaattcaaactatccatgttttaagtgctcaacagtaacatgtagctagta

SEQ ID NO: 855832 - DNA, 622 bp, Homo sapiens
tagtacagagagttgctatataccctgcagtcagtttcccgtattaacatcttacattagtatagtccagttgttacaattaatgaatgagtactgatgttattaataactgaagttcataacttatgcagttttttttattttctccctcatgtctttcttctagaatctcatcgcatccaggttatcacatttcatttcgttgccgcgtcttcttaggctcctctaggctatagcagtttctcaggcttttcttgttttcgatgattttgaattttgaggagtactaattacggttttgtagactgtctctcacttgggatttttttatttttatttttttctcattattagactggggtgattggtttcgtgaagaggaccgcaaaggtaaggtgccatttttatcacatgaagtcaagagcacattcatactatgtatagatagtacatactatcagtatgactgttgaccctgacttcaatcacctgattgagctagagtttaccaggtttctccaatgtatgatyacttgtcctctccccctttccttattatacttttgtgtccggaattggtgggttcttggtctcactgacttcaagaatcaagctgcggacc

SEQ ID NO: 855833 - DNA, 622 bp, Homo sapiens
tagtacagagagttgctatataccctgcagtcagtttcccgtattaacatcttacattagtatagtccagttgttacaattaatgaatgagtactgatgttattaataactgaagttcataacttatgcagttttttttattttctccctcatgtctttcttctagaatctcatcgcatccaggttatcacatttcatttcgttgccgcgtcttcttaggctcctctaggctatagcagtttctcaggcttttcttgttttcgatgattttgaattttgaggagtactaattacggttttgtagactgtctctcacttgggatttttttatttttatttttttctcattattagactggggtgattggtttcgtgaagaggaccgcaaaggtaaggtgccatttttatcacatgaagtcaagagcacattcatactatgtatagatagtacatactatcagtatgactgttgaccctgacttcaatcacctgattgagctagagtttaccaggtttctccaatgtatgatcacttgtcctctccccctttccttaytatacttttgtgtccggaattggtgggttcttggtctcactgacttcaagaatcaagctgcggacc

SEQ ID NO: 855834 - DNA, 506 bp, Homo sapiens
caataattaaaggctgccccaatgtctctacttagctatgacaccataaccataattattttaggactgaaatgaactatrgtttttctctagtctaacctatcatttaacagttgaagaaactgaggcttagttagataaatttgctgacccaagaccacttggcaagttggcaatggaaaagggaatgcaattcacatctcctgccactcataacaacacccttgcccttgaacattggcatcttgcaataatggaaaaggtatacatcttgagcattttgttcaactacttttcctttattttctctagaaaatataactatgaagaattataatgtaactgaagataatgggaatctggattaatttttactttcagtttgcgtatattctgacccatataagaattcatctttttcctcccccttgaaaatctgttatatttttctcttcctcttaaaagttttaacaaataataaatgagtatctcagaaacatacataa

SEQ ID NO: 855835 - DNA, 632 bp, Homo sapiens
aaaatttttaaattttccacgggggtcacatcaggagattgtagtaatttactatctcaagaatcttattaargcaattcaaacattgtttagttacaaatcaaaaataatgagaggacataattgaagaacttttatcattcatctcactgtgtcagaaagatttcccagaaaaataagtgaagcagatacaatttatttctcatatttttcaacataagggcatgtaaacaacatatgtatttagataatttcaaattcaaacaacaataagatactactacaaacctgttagaatggctaaaatccaaaacactgacaacaccaaatgctagtgaggatgtggagcaacaggaactctcttatattgttggtggaaatgcagaatgtatagtcactttaaaagagaggttggcattttcttacaaaacttaacatgctcttaccatgtgatccagcaatcacactcttgaaacttctgtcaacacaaaaacctgcacacaaatgtttataatagctttatttagagttaccaaaacttagaagcaaccaagatatccttcagtaggtaaatggacaaataaattgtagtacatccagacaatggaatattatagcactaaaaggagata

SEQ ID NO: 855836 - DNA, 614 bp, Homo sapiens
acagccaaaatagccagtttagagaggaacaaaactgacctcttagagctgaaaaacacactrcaagaacttcatgatgcaatcactagtattaataacagaatagaccaaggagaggaaagaatctaagaacttgaagactatccttctgaaaaacgacaggtgaataagaatagagaaaaaagaatgaaaaggaatgaaaaaaaactgagaaatatgggattatgtaaagagattaaatctatgatgaattggggcacctgaaagagacaaggagaatgaaaccaggttagaaaacatacttcaggatatcatccaggaaaacttcccccaaccaagcaagacaggccaacattcaaattcaggaaatgcagagaaccccagtaagaaactccatgagaagatcatccccaagacacaaaatcatcagattctccaaggtcaaaatgaaagaaaaaaatgttaagagcagccagagagaaaggtcagatcatctacaaaaagaagcccatcaatccaacagtggacctctcagtggaaattctacaagccagaagaaactgggatccaatattcaacattcttaaacaaaagaattcaaactcagaagttca

SEQ ID NO: 855837 - DNA, 563 bp, Homo sapiens
acatagtaagactatgtttcaaaaaactgtgtaaaaaaaatttaaaaacataaataagtaaatcaatagataaatttttgcctatattatatagattcaaatactggtytcccatcagtctatctctttatgtcgccaattacttttgttaaaatctgtgtaatgttgtacatcctgtctggcaaaagctttttttaaaacatctttggaaaatattgtaagggggacttcatacgtatcattgtatttacaaaggaaaatgacatgcatattctagttgggtgttagtcagtattaatcaacgatagttcaaaaggtttttattctctttgttgtttcaaatctcatcccaaacaacttccaaagccagcttctatggctgaattttaaaactatgatctgacaagaaaatgttacctggatggacatttttctatttaaaatcacattttcatgaaatgttaatatgaatgcttttctctgttaccttgattaatatctaagttctggttccacatgtcagaacatgacgtaaatccatggcacagacataggaatactta

SEQ ID NO: 855838 - DNA, 482 bp, Homo sapiens
tcatttcctgatatggcctagtaattagttactcgaattacttaaattctgagtctttttacacgcaaccaaggcatcatcatcatgtgaacacctgtgtttactcgaccttgagtagacataatagcaaaagagtctgtcccctatgaagtttaaaaatccaggccgcgtgtttcaattccttatttcctgtcccatctttgaactcttcccaggtttatcgattgtaggaaatgccattcccttcaggagaaacccaactcccaatcatactgttggggtattcgcctttggcctaaaggacacaatcacatcacaacacaataatccaagtttagtgtttgctcagtctagttccttttcatagtctctttagggttgaaataaagaacagccttcatcactttcctaagattcttccatcmcagcttctcatttacaaacagctgctcaaaaacagctatatacaactccattagaaa

SEQ ID NO: 855839 - DNA, 458 bp, Homo sapiens
ccttagattgcctatttgtgctctttcagactttttgatgtgggcattaatagtatgaaccccatgtgattcaggaattccattactaaggatgtatccaatttaattgggcatgtcaaagagatatctgcactcccatgttcattgcaacattattcacaatagtcaagatatggaatcaacctaagtatccatcaatggatgaatagatatagaaaacaagacatatatccacagtgaaatgtaattcagcctttaaatagaagaaaatcttgttcatgtgtcaatgttctatattgtgttgtatatatcaaaacattataattgtatatataatacatatgtgtrtataatgtatattatatataatacataattacaattatatgtgtaatatatatgtgttgtatatatcaaaattgctaagtgggtacattttaaatgtctcaccatgaaaa

SEQ ID NO: 855840 - DNA, 631 bp, Homo sapiens
caaacttttccaaacaattaaaaagggtgcactttccaacacattttttcatgcattaccctaacaccaatgtcagacaaggacggtataagaaaattacaggccaatttattttatgatcatggatgtaaagattctcaacactagcaaactgaattcaatatgttcaaaagatcatttagttgaatgttttctttcttctgaaattcttcattttgcttccaaatgtcatttttccttatattttattttttcattaatcaaatttaattttaaaatttccaactaaaaaaatctgtgggtttaataaacatatttttaattaacatttaaaaaaagcacaagtttgtaaattgtatattttctgtccattagattttggtttgagtattgggccaattgcacggtaagctttttaatttttttccagaagtaatcccaggaccttaaatctccactgaaactctcgaagtttaattggtcagctgggattgtagtccctggggtgttgaaagcataaataagccataccttaagtytggaccatttatccctgtagggagtccctcttctcctctgttctctttcagaactacttattactttaggttcagtgtatgtagcatatggt

SEQ ID NO: 855841 - DNA, 646 bp, Homo sapiens
gtctgttttggaataggtgctatattttaggcattggaaagacactagtgataaaaatggtaaaatgctttatctcctggatcttacattctatggtagagaagagataataatcrcaaaaaaactatcaggaatgataaacattataaagaagagtaaaatagggtgtgtaggagataattactgttttatattcactgctcagagatgtcttctctgataatcaagagagcagagaagagagacctaaatcagttgaagaaatgggtcacaacgtatcggaaaagagaccaccaggcagagagaatagtaatctttttttctttattcagtgtattaaatgcattgtgtttattgatataccccattagtttaatcatattccctcacactttgttattacctttattttaattgccatttttaaatttttgtgatgaacaaataaaattgtatatatttatcatgtacaatgtgatattttaaaatatgtatattgtgtggaatgggtaaattgaggtaattaacatatgcatcacctcacatacttataattctttgcagtaagaagacaaaatcaactctttgcctttatttcaaaattatttcattgtgtggtatttaatattttctatttaacaaaatg

SEQ ID NO: 855842 - DNA, 646 bp, Homo sapiens
gtctgttttggaataggtgctatattttaggcattggaaagacactagtgataaaaatggtaaaatgctttatctcctggatcttacattctatggtagagaagagataataatcgcaaaaaaactatcaggaatgataaacattataaagaagagtaaaatagggtgtgtaggagataattactgttttatattcactgctcagagatgtcttctctgataatcaagagagcagagaagagagacctaaatcagttgaagaaatgggtcacaacgtatcggaaaagagaccaccaggcagagagaatagtaatctttttttctttattcagtgtattaaatgcattgtgtttattgatataccccattagtttaatcatattccctcacactttgttattacctttattttaattgccatttttaaatttttgtgatgaacaaataaaattgtatatatttatcatgtacaatgtgatattttaaaatatgtatattgtgtggaatgggtaaattgaggtaattaacatatgcatcacctcacatacttataattctttgcagtaagaagacaaaatcaactctttgcctttatttcraaattatttcattgtgtggtatttaatattttctatttaacaaaatg

SEQ ID NO: 855843 - DNA, 646 bp, Homo sapiens
gtctgttttggaataggtgctatattttaggcattggaaagacactagtgataaaaatggtaaaatgctttatctcctggatcttacattctatggtagagaagagataataatcgcaaaaaaactatcaggaatgataaacattataaagaagagtaaaatagggtgtgtaggagataattactgttttatattcactgctcagagatgtcttctctgataatcaagagagcagagaagagagacctaaatcagttgaagaaatgggtcacaacgtatcggaaaagagaccaccaggcagagagaatagtaatctttttttctttattcagtgtattaaatgcattgtgtttattgatataccccattagtttaatcatattccctcacactttgttattacctttattttaattgccatttttaaatttttgtgatgaacaaataaaattgtatatatttatcatgtacaatgtgatattttaaaatatgtatattgtgtggaatgggtaaattgaggtaattaacatatgcatcacctcacatacttataattctttgcagtaagaagacaaaatcaactctttgcctttatttcaaaawtatttcattgtgtggtatttaatattttctatttaacaaaatg

SEQ ID NO: 855844 - DNA, 560 bp, Homo sapiens
cttattccagtctttgcagacttgttttatcctgaaacattcttcaatagtaagcctgtctagagattctgagcaggttgtctggtgtggtccctaagctctagtttgctgtggtgggggcagccctaggtggtgccctaagcctgggactgccacgactggtgcagtgcagtgctgtaatcccatggccactggaactggtgtgggtcccagatgatatcctgtggccactggggctggtgcagcactgatgcaagtctgaagcccatgttcactgaggcctgcctgccagtggatactttccagagcttaaggccactctgggtgggtggcagtgatgatgactgcaaattaattctgctttgcatgggctgcaggtttctgcctagtgttggtgtagatctggaggctcggtctttgtgtactggcctggagtcagtggttgtgggggctgcctggttttcagttyttctgtggtgggcctagtgttgggcaccaagaccaagtcccacacttacttccgtttttattctccaagtgtttggtatttctccctgcac

SEQ ID NO: 855845 - DNA, 560 bp, Homo sapiens
cttattccagtctttgcagacttgttttatcctgaaacattcttcaatagtaagcctgtctagagattctgagcaggttgtctggtgtggtccctaagctctagtttgctgtggtgggggcagccctaggtggtgccctaagcctgggactgccacgactggtgcagtgcagtgctgtaatcccatggccactggaactggtgtgggtcccagatgatatcctgtggccactggggctggtgcagcactgatgcaagtctgaagcccatgttcactgaggcctgcctgccagtggatactttccagagcttaaggccactctgggtgggtggcagtgatgatgactgcaaattaattctgctttgcatgggctgcaggtttctgcctagtgttggtgtagatctggaggctcggtctttgtgtactggcctggagtcagtggttgtgggggctgcctggttttcagttcttctgtrgtgggcctagtgttgggcaccaagaccaagtcccacacttacttccgtttttattctccaagtgtttggtatttctccctgcac

SEQ ID NO: 855846 - DNA, 560 bp, Homo sapiens
cttattccagtctttgcagacttgttttatcctgaaacattcttcaatagtaagcctgtctagagattctgagcaggttgtctggtgtggtccctaagctctagtttgctgtggtgggggcagccctaggtggtgccctaagcctgggactgccacgactggtgcagtgcagtgctgtaatcccatggccactggaactggtgtgggtcccagatgatatcctgtggccactggggctggtgcagcactgatgcaagtctgaagcccatgttcactgaggcctgcctgccagtggatactttccagagcttaaggccactctgggtgggtggcagtgatgatgactgcaaattaattctgctttgcatgggctgcaggtttctgcctagtgttggtgtagatctggaggctcggtctttgtgtactggcctggagtcagtggttgtgggggctgcctggttttcagttcttctgtggtgggcctagtgttgggcaccaagaccaagtcccacacttacttccstttttattctccaagtgtttggtatttctccctgcac

SEQ ID NO: 855847 - DNA, 560 bp, Homo sapiens
cttattccagtctttgcagacttgttttatcctgaaacattcttcaatagtaagcctgtctagagattctgagcaggttgtctggtgtggtccctaagctctagtttgctgtggtgggggcagccctaggtggtgccctaagcctgggactgccacgactggtgcagtgcagtgctgtaatcccatggccactggaactggtgtgggtcccagatgatatcctgtggccactggggctggtgcagcactgatgcaagtctgaagcccatgttcactgaggcctgcctgccagtggatactttccagagcttaaggccactctgggtgggtggcagtgatgatgactgcaaattaattctgctttgcatgggctgcaggtttctgcctagtgttggtgtagatctggaggctcggtctttgtgtactggcctggagtcagtggttgtgggggctgcctggttttcagttcttctgtggtgggcctagtgttgggcaccaagaccaagtcccacacttacttccgtttttattcyccaagtgtttggtatttctccctgcac

SEQ ID NO: 855848 - DNA, 537 bp, Homo sapiens
gcttctaatcttattattttataacaagatgaaaattgtatcaccaggttctatgatctctcacatgcctttactagcttttgtgaaggtatgttgtgtaagaatagttattaaaattgatgtttctatggggatacaattgttaaagaattccgttctgccagctttcccactctcctctcttttcacttttttgattgagacctttgaagcacaaaaattttgaagttagatgaggtccaattatttattttcttattgctcgttctttcggtatcatgctaaaaaaaatgctaaacttaaggtcttgaatatttaaccttatcttttctcatatttttataattttacttcttatgtttaggtccctgatcaatttgagtttaagtatgatttgtaatgccacttcattcttttgtttgtggatatcttcttgtctgagcacaatttgttaaagtgagtattcttttcccattgaatggacgtggcaygcttgtcagatgattattgaccatagacacatgcgtgtatttctca

SEQ ID NO: 855849 - DNA, 605 bp, Homo sapiens
aggctcaaggactcaacttttgtttttcatgctctctgccactacccttaacttctccccaaagataatatccctttgagcatcacttccgtttacaaccagccaaagagaagttaaatgaatgcagggtaaaargccataaacacacccaaggaaaagttgaatttctgatcacaagttgtcaacaaagcaataaagtgacaacatgaagttaataattttccagaaacacaaaattctccctaactcttgggcaattctcagtcattacacacctgcctgcaggtgtctggctttatactgaggtacataaaaaaaatctcatcaaatgtaccccaagaaaggtcttacaaatgccactcacacacgtcactgttgtgcaattgcagagggcaatgactcatctcccagcagacatcataaagccccattcaataggcatgtttcctgcacagcatcaccgctgtcaacatgaagccctgtacgtactattccctgttggggatctgagatttgaagatctctgtaatgtggcagagttcacttaaggagaaaattccaatgtttctagcataaagaaaatacaaatatatatttaaggtaat

SEQ ID NO: 855850 - DNA, 572 bp, Homo sapiens
aaaacactcacctagcactgggtgagctatgaagattgatagaactgacaatattcttaaggggcacatagttaagtttgattaatgtatcatatcaaaaatcctcatagaarcagatcattttaagtctaaagtggggatttctaaaaatgaaaatatattggggactttttaaaggtgtttagccacaaataacagctaatgccattgtgctttgctcagctgtcaaattgctctggggatgacacgcatagttacttctccagacctcagtgttctttcagtaaaagaatggcatgtcaccaacatgttactaatcctaagtgccacatagctctaagagtcatcgattatttgttcctgaatgagaaaaagggggccaaggatagtatattgggatctttctgctttgattaaagcttatgagagaagataatggtgtggaaggcactaagagacggaggaagagaaacaggaagtttggtattccccaaaccataaaccaatagggctttacgtgtgccaggtactttagaagttttacatacatgaagtcatagcaaaccagaaga

SEQ ID NO: 855851 - DNA, 474 bp, Homo sapiens
ttgttcctgaatgagaaaaagggggccaaggatagtatattgggatctttctgctttgattaaagcttatgagagaagataatggtgtggaaggcactaagagacggaggaagagaaacaggaagtttggtwttccccaaaccataaaccaatagggctttacgtgtgccaggtactttagaagttttacatacatgaagtcatagcaaaccagaagatgctatgcatcagtttgagtagtggacaaaggtacagtttccccttatcagtgggagacagttttcaagacccccactggatatctggaactgcagacagtactgagccctatatatataccatattttatcccatgcatacatacctatgatcaagttgaatttataagttaggcacagtaagagattaacaataataaaatagaatacctaagacaatatactgtggctataactttttcagtttgatgtgaca

SEQ ID NO: 855852 - DNA, 556 bp, Homo sapiens
aatcttggcatctctccagagagattttaaaggcagtgatgtggggataagagcctcgctctaaattgaaaattagattttaaatttctttagaaatagaggctatgacaaactaaaaaagctctttctcaaaagtcactagcctcttttgtttggggagaaatctttaaagttataaataagtgtgaatcaaaaagcattggagccaagtctcaatcaatgtagatgtttctggtgccaaggttgaggatgcacctgggaaaaaggaacacaagatgacaggagcatctgagatttgtgcttcttccaaagacggttgggagacttcaatatttaaaagggaaacagtgggcattagaggaaaaaagaaaaaggaagtgtgaataaatgaagtagtttccttctttccaggctttaatcagtgttgactgaattcgcactttagatgtgacaggagagggtttagaggaacactcaactgggcgttcatctcctgctcagtgaatctggattgtatataagataaggtrcacaatagaggaagcagtcaaatatg

SEQ ID NO: 855853 - DNA, 642 bp, Homo sapiens
aaagggaatatcttgagaagacagggctaaatggtgaccctgactataagacatttaattctctgtacaatcagattcattatgtttcctccccagcagtattttcacatgaagtgtcacttctagaaaatggcttttcttccacaactaaagtaaaatcacttggggaatctttagaacgatagagaagttttgattaaggccgagggattgtcttgaagcagaccaagggcatgatcaccttcagtctctacagaagttgaactgagttcttcccctgtctattcctaacccttgaaacattcttggcatgtttaatgttcacaatgctacatgacatggtttttaatcaaagctggctttatattctatcttcatcactgataagcttctggacgtctggcaagccactcacattcttttcagcttctgggaacttctaagtattaagtatgctgcaatggtttctcggagcaggatatggagggtcttcctaactaaaccatttttagagatgcttatgaggtacctaaacaaggtggaatactacgatttagataagctctttatraagattttaaaattataggtgaatatatgttgcaatgataaaatctgttggaatcattatgcagacagatc

SEQ ID NO: 855854 - DNA, 642 bp, Homo sapiens
aaagggaatatcttgagaagacagggctaaatggtgaccctgactataagacatttaattctctgtacaatcagattcattatgtttcctccccagcagtattttcacatgaagtgtcacttctagaaaatggcttttcttccacaactaaagtaaaatcacttggggaatctttagaacgatagagaagttttgattaaggccgagggattgtcttgaagcagaccaagggcatgatcaccttcagtctctacagaagttgaactgagttcttcccctgtctattcctaacccttgaaacattcttggcatgtttaatgttcacaatgctacatgacatggtttttaatcaaagctggctttatattctatcttcatcactgataagcttctggacgtctggcaagccactcacattcttttcagcttctgggaacttctaagtattaagtatgctgcaatggtttctcggagcaggatatggagggtcttcctaactaaaccatttttagagatgcttatgaggtacctaaacaaggtggaatactacgatttagataagctctttatgaagattttaaaattataggtgaatatatgttgcaatgataaaawctgttggaatcattatgcagacagatc

SEQ ID NO: 855855 - DNA, 634 bp, Homo sapiens
gtatacctaatttgttgagagttttggaattttgtcaaatgcttctctccacctaaataatcataaaattgtatcattcattctgttamtgtgctatgtgatgtttattaattggcatctgttgaagcatccttgcatccctgggatgaatcccattttatcatgatgaatgctttttgaaatgtgcttttaaattcagtttgctagcattttttgaggaattttacatccatgttcccaaatgatattgacctgtagttcctttttcattcccatgtccttctctggctttggtattaggataattctggccttgtataatgaatttggaagtattcccacttcttcaattttttggaagtgtttgagaataattggtattagttctttaaatttttgatagaattttgcaatgagtccatattgtcctgggcttttttttttttctggtgggagacttttattactacttcactgcattattcattattggtttgctaagatttactatcgtaggatttatgtatcagtcaattcatgtcttccagcttatctaatttttgacatgcaattattcattatactttcataatcttttgtatttctgtggcctcagttgtaatatttcctttgt

SEQ ID NO: 855856 - DNA, 634 bp, Homo sapiens
gtatacctaatttgttgagagttttggaattttgtcaaatgcttctctccacctaaataatcataaaattgtatcattcattctgttaatgtgctatgtgatgtttattaattggcatctgttgaagcatccttgcatccctgggatgaatcccattttatcatgatgaatgctttttgaaatgtgcttttaaattcagtttgctagcattttttgaggaattttacatccatgttcccaaatgatattgacctgtagttcctttttcattcccatgtccttctctggctttggtattaggataattctggccttgtataatgaatttggaagtattcccacttcttcaattttttggaagtgtttgagaataattggtattagttctttaaatttttgatagaattttgcaatgagtccatattgtcctgggcttttttttttttctggtgggagacttttattactacttcactgcattattcattattggtttgctaagatttactatcgtaggatttatgtatcagtcaattcatgtcttccagcttmtctaatttttgacatgcaattattcattatactttcataatcttttgtatttctgtggcctcagttgtaatatttcctttgt

SEQ ID NO: 855857 - DNA, 634 bp, Homo sapiens
gtatacctaatttgttgagagttttggaattttgtcaaatgcttctctccacctaaataatcataaaattgtatcattcattctgttaatgtgctatgtgatgtttattaattggcatctgttgaagcatccttgcatccctgggatgaatcccattttatcatgatgaatgctttttgaaatgtgcttttaaattcagtttgctagcattttttgaggaattttacatccatgttcccaaatgatattgacctgtagttcctttttcattcccatgtccttctctggctttggtattaggataattctggccttgtataatgaatttggaagtattcccacttcttcaattttttggaagtgtttgagaataattggtattagttctttaaatttttgatagaattttgcaatgagtccatattgtcctgggcttttttttttttctggtgggagacttttattactacttcactgcattattcattattggtttgctaagatttactatcgtaggatttatgtatcagtcaattcatgtcttccagcttatctaatttttgrcatgcaattattcattatactttcataatcttttgtatttctgtggcctcagttgtaatatttcctttgt

SEQ ID NO: 855858 - DNA, 634 bp, Homo sapiens
gtatacctaatttgttgagagttttggaattttgtcaaatgcttctctccacctaaataatcataaaattgtatcattcattctgttaatgtgctatgtgatgtttattaattggcatctgttgaagcatccttgcatccctgggatgaatcccattttatcatgatgaatgctttttgaaatgtgcttttaaattcagtttgctagcattttttgaggaattttacatccatgttcccaaatgatattgacctgtagttcctttttcattcccatgtccttctctggctttggtattaggataattctggccttgtataatgaatttggaagtattcccacttcttcaattttttggaagtgtttgagaataattggtattagttctttaaatttttgatagaattttgcaatgagtccatattgtcctgggcttttttttttttctggtgggagacttttattactacttcactgcattattcattattggtttgctaagatttactatcgtaggatttatgtatcagtcaattcatgtcttccagcttatctaatttttgacatgcaattattcattrtactttcataatcttttgtatttctgtggcctcagttgtaatatttcctttgt

SEQ ID NO: 855859 - DNA, 614 bp, Homo sapiens
acacactcatctgagggtaacttttcgtcactattcagcactgagccccggagtctcctctcagctccttgtttgaactcagatgtcacagatagaattagtgtgtccttatgagctgcacccttcacacgagtatcaaaacagcttatttattttcttacatttgtttgcataaacaactacatgtatttttcaaactccttggtaaaagccatgtgctattcaaaatttaatcttatttaactatttttaattataaaatagtacaaaatgcttgttaaataaatgaaggattgaatgttgatgccatccctctgcttgtttgtataacaagttacatgtttgaaatctcagctcaggaatcaccctgggcaggtaaccttccttaaaactccttccactcaggtgtcatattttttctgcagtcacttatgtggtcctacatcctcaatacaccacatggcagtaattatttcggagagataaatccactagacgccatcagaattggaccatgcagaaaaatgtagccctcaataaagaaggggcgatgactggattttctyggtaatgattagatataatgaaatgagcatgatttctaagatgtcaca

SEQ ID NO: 855860 - DNA, 623 bp, Homo sapiens
aacctttacgtctagctaagggattgtaaatcaccaatcagcactctgtctctagctcaaggtttgtaaacacaccaatcagcaccctgtgtctagctcagggtttgtgaatgcaccaatcaacactctgtatctagctactctggtggggacttggagaacctttgtgtccacactctgtatctagttaatctagtggggatgtggagaacctttgcgtctagcttagggattgtaaacgcaccaatcagcactctgtcaaaacagaccactcggctctctgtaaaatggaccaatcagcaggatgtgggtggggccagataagagaataaaagcaggctgcccccagctggttagtgggaacgtgtatcgggtcgtctcgcgctttgtgggagttttgttgttttgctatgtgggactatattgcctttgtgagctatgacactccctgcgaaggtttgtagctttactttcgaagctaatataagctgytgagccttggtgggaggaaaaagctccaaacgcaccactttaagagctgtaatagttaccgcgaaggtccgtaacttcattgctgaggtatcaagaccactaaacccacctagaagaaaaactcggaacac

SEQ ID NO: 855861 - DNA, 613 bp, Homo sapiens
acgtgctgccctctaatggctcctgccttgtgggtttccaggctccccggggaaggggcgccccaggcctgccttcctggagggtctgcggagggtttccttcctccgggtaagcgggcccctttccctgcagcctgctcaagcgtcggggaaagatgtccgaagacaggtagctttgtgtggctggctgtgagaggagaacggtcctacattccactccagaccaggagcgtttcttggagccatgtaccctaccagcttaggaaggagttgctcatcctccctcgcagtccctctgtgtctacaaaggaaagcacagcgcatggcaaaggccggtcagcaggctcgtgcacgcaaacaggcttccttttcctgtcctgctggccagaggggatgcgggggatggggtaaaatgctgctgatacccccctcagactttccactggcagcctccggaacctactcaaaagccgaacacaaacctcttgaaaaaaaacatcagagttaatgtttgcagaaactgaagacattggttggacatrgtccagttctgtttagaggggaaactaggatttaatcaaggaacaaagttcataggtgtgggaggaaaacc

SEQ ID NO: 855862 - DNA, 449 bp, Homo sapiens
tttggtcacttgctcagattcggaaaggagaggttcagtggacactggccagccaatggattgcactggcctcaccaggagcccagctttaatgctttaataccaggcagaatcatggtattaacatcgattcctgggtgtggtccttcagcagcagctattgggaaggtgcattccagatgggctgtttgggggttccctgttatagtctactgcagtgcttcctagaagctgggtgaaggactggtggcatgtccagaacgaagttcttgcctttttgtgatgaaatgagaaaaacaagcatgtaagtatgtgagcgtgtgcatgtgtgtgttgggaggagaaatgatatgttaatataaagycccagatgtcctttttgggaaatactgcctacacagcaacaacatccttcctgcttagggaagctagcatgtccttttatttac

SEQ ID NO: 855863 - DNA, 634 bp, Homo sapiens
tttgggcttgaataaactctatactttgtgatattctataaatttaattatttaagtttgacaacacctaaatcattgatttaaatgtgtcttacttcctcttgctgcttaagttttatgtggtttacagattacatgtagtcaaaaggtacagtaactcaaaaatctcactatgcacagttaggctcttcaagtttagctttccttctagtttctgacttttttttttttctgggcttacttgtatctcccatcctgttttataataataaattgttagatctttatctgaaattctggacaggggtattctaaagtccttggaattttctgagtgataagagtttattttttaagttagtgaggtgactaatgatgtatccataaatagctacaggatgggggctgatcactacagagaccaaccatgtagcgccagggttggttcttgaccatttatctctggggaggggaaaggggatagagattgagctcagtcacatarccaataatataatcaatcatgcctacataatcaaacctcaataaattttgagacacaaagtctaaatagagcttcctggttggtgagcacactgatgtgttgagagagtgattctacaagaagaaggaa

SEQ ID NO: 855864 - DNA, 608 bp, Homo sapiens
taaatagctacaggatgggggctgatcactacagagaccaaccatgtagcgccagggttggttcttgaccatttatctctggggaggggaaaggggatagagattgagctcagtcacatagccaataatataatcaatcatgcctacataatcaaacctcaataaattttgagacacaaagtctaaatagagcttcctggttggtgagcacactgatgtgttgagagagtgattctacaagaagaaggaatggaagttctgcatttcctccccgatctcattctatgcatctcttcacttagttggttcttgtgattgtgcactttgtaacaaaactgtaattgtgaatacagcagttttcctgagttctgaaagtcattctagtaaattaaacctgagagagtcataagaacctacaaatttacagcttgtcagtcagaaatgcagatggcctaggaacccctgatgagtggctggaatttgaaacaagggtagcctggttgggaactgcytgctttaacttatggggtttgcagtaactccaggtggttagtaccataattgaattgtgatgcactcagttggggttgaaacagaatacatgtata

SEQ ID NO: 855865 - DNA, 595 bp, Homo sapiens
cacatagttactgtttgttgtctgcatgtatgtgtatatgattagaacttttaaggtctactctcttagcaattttcaagtaactaattattattagctatagtcrccatgccccacactgtaccaccaaaatatatgcatactgtctaactgaaacattttactctttgaccaacttcttcccacccccacatggtttctttgcttatgtgaaaatgcacactttctttttttttttttttcctttttcttttttttttttttttttttgagacggagtcttgctctgtcacccaggctggagtgcagtggcctgatctgggcttactgcaagctccacatcataggttcaagggattctcctgcctcagcctcctaagtagctggaactacaggtgcctgccaccacggctggctacttttttggaaaatgtgcactttcatatagagaatggattttgataaatccaaattgaaagctattcaatggggatttaaaaatcacaaatacacccgaatgttttacttatcacagcttctgagacataaaatatgcaagtattttcagttccacggttttacatcatagatttta

SEQ ID NO: 855866 - DNA, 520 bp, Homo sapiens
catcttcactagcatttgatattgtcagtgtkttgtattctggccatcctaatgggtaggactatggaacaagactgaattctaagatgtaggcatgcctttccctctggttttctaactaaactcaatgtaagagagcattcagagagtagccactaataactgaaatccaccaaaactccccagagtaatttagtattgaaaagcactcataatcaccatccatgaaatatttagcaagctcattcaacctccccccacaatctttgttatagctaataaaaagatagaaggatttactgaattaaattgccttagcttaataattctgcagagaatgaaagaacttgtcaagagaccagaaaatacgagaaatagaaataaaaccacctttgcaaagattatgacagtgagagaagtctagcatggctgactctatcttgcttctagcctcagaggctggctgtcctcactcattcctagaagtaggccaagctaaccacagaaggaattcagttta

SEQ ID NO: 855867 - DNA, 520 bp, Homo sapiens
catcttcactagcatttgatattgtcagtgttttgtattctggycatcctaatgggtaggactatggaacaagactgaattctaagatgtaggcatgcctttccctctggttttctaactaaactcaatgtaagagagcattcagagagtagccactaataactgaaatccaccaaaactccccagagtaatttagtattgaaaagcactcataatcaccatccatgaaatatttagcaagctcattcaacctccccccacaatctttgttatagctaataaaaagatagaaggatttactgaattaaattgccttagcttaataattctgcagagaatgaaagaacttgtcaagagaccagaaaatacgagaaatagaaataaaaccacctttgcaaagattatgacagtgagagaagtctagcatggctgactctatcttgcttctagcctcagaggctggctgtcctcactcattcctagaagtaggccaagctaaccacagaaggaattcagttta

SEQ ID NO: 855868 - DNA, 580 bp, Homo sapiens
cagttttatacctcccagaagcaattaattttcgttgatacaataacatttaatatagtatcagtttctgctccagattaatatttatttttttaaattattattattattttttgagacagagtctcactctgtcacccaggctggagtgcagtggcatgatctcagctcacggcaacctccttctcccaggctcaagcaattctcatgcctcagcctcccwagtagctgggattacaggtgtgtgccaccacacctggctaatttttttttttttttttagtagagatggggcttccccatgttggccaggctggtctcaaactcctgacctcaggtgatccacatgcctcagtctcccaaagtgctgggattacaggcatgagccactgcgcctggcctagattaatatttaatagcattttcaccattgagtaatagacctggttatgaattttggatatcttactcaactattgtctgctattcagccaattttcttgggtaatttgaatttcagtttttatatgaacaaaatgcaggtaataacatgtatcttagaggatatttcaagtagtta

SEQ ID NO: 855869 - DNA, 571 bp, Homo sapiens
ttttccttagaatgaatgatgtaaagggagccatgaagctctaatgacctaacttcgtaagtcacacattacttctgtgggcacacagaccagccaaatgtgggaggatatctrtgttgcttgacttttggactgactggttcagaaagggatgaggggttagtgtgattttatttgctcatattttcttttttcctaaagtaatcttaattgaagatgtcttttttgtttacttactaacttcaataagtcataaaaggaaatctgtgaaaaaacaaacaggttgagttaaactacttacctgaaaaacttctgaagtgcctactaaatgtttgcttaaaacatagttaattctgtgatatttattcatccagctgcctatctaagacttcaagcacttttatttttatggatttaggggtctgggtgaagcttacaataataagcttcaagaacataaatatgttacatcatcaaatgttttttgaaaaagctgttgaagaatgctatttatgaaaaaatctcttgttcaaacagaaacctgggaggctgaggcaggaggattgcttga

SEQ ID NO: 855870 - DNA, 574 bp, Homo sapiens
cccaggaagaagacaaacttctccccatttctactgtcagtagactgaggctggaaaccagtatgcggcctcagtgtccttttctagtataccacatacayaataaaaacccaggcagataccaggtgcctagccttttcagtcaaacatacacattttagttaaaggatgagaagttgtcagtgagaatttgtacagagttcacagtaagaaggtgaactactaccacgacaaaagctccctaaaatccagcttgagaccccagggtactatttaaatatacttatccctcagtatccatagaggattagttctaggacccactacagatatcaaaatccacagatgctcaagtcctttatataaaaatggtgcagcatttgcatataacctacactcgcctacagtatcctttaaagtcaggggacctcaactcccaggccacagaccgctacgaacccactatgaatctgtggcctgttaggaaccaggccgcacagcagaaagtgagtgacaggcaagcaagcattaccacctgagctcacacctcctgtcagattggtggtggcgttaa

SEQ ID NO: 855871 - DNA, 546 bp, Homo sapiens
tcacgaaaacatgggaaaagtgtaatttctgcctctgaggaactcacagtctagtgggagacaccatttattcatccattctttcatgawatacacattgagaatgtaacacaccctgggcaaaggagaggtcatttgactatgacacaagacaatagtcatagtctttgccctcatggaattcacagcctagccatggagattaaaaataaaaagatctaatagaataaagagtagtagatttaaaaacactggaaacccagtgtgcagtaaaactaaaaaagagggctacctaacctagtgtgagaggtgaggtagaggttagggtgagaaaggatggtataggaaggctttctggaaaatttcaagataaatcttgaggataagtcagaattatacaggtgaaaagtagaatagtgcctgctaccttgcaattgttcagcaaacatctgcaatgattactaactgtcagtttttggctctgcttcaatcctcacagtccaagctcactgcagttaaatcttcagtctccagcactgcacttgg

SEQ ID NO: 855872 - DNA, 606 bp, Homo sapiens
tcaaagaggacgaagatgaaaacaaaaacagaatatatcacaatttgtaggatgcacttaaagtagccatttggggaaatgtgatagtattacatgcttatattacaatgggaaaarttctgaaatttgtaaatttcaaatcattcatgatatgtcaagtcttctcaacttgtttttcttaaggactgttttggcctttattgtgtagtttataagttccacaaaatgtattgggaatttattggaattttgtcaaacgtatataattttgtcaaactcaagcataatataaatatgtttgagaattaacattattataaaagtgagacatttagcctatgaacgtagtacatatcacccctcattttgatgttattattgtacaaaagttttatattattgtatataaagacttcgtacactatttttaaatttattcttaaattttacacttttcacgaaatatgaagttaatcttataaattattatttttaacattattgctggtgtaaagaaatacaattcctttggacaatgaattttgtatctagtaaactcattgaatttgtttattaatttaattcatgtacaaatttttggatttt

SEQ ID NO: 855873 - DNA, 296 bp, Homo sapiens
acttatctgtcgaaacctttgagcccaaatattctgacgtttatcaattaattcacattctggtgaagaaggcaaggccactacctggttgcaaaaggcaaattggaaggattttcaagcagaacatgaaaggttcacattttagccaaatatgtgcatgttgccattccccaggtccttcctaaaaatatagattggaggataattcagcaatgtactaaaaagccagacaaatctgtctttgcttacttaaaatggtttgagrgccaggcgtggtagctcatgcctgtaatccc

SEQ ID NO: 855874 - DNA, 562 bp, Homo sapiens
ttggatccctactgcgcaggacctaaggggctggtgcccttccctaccctcccygcctgggtgtcttcagcacccatgctcacccagaacgttactgcctgccagagagagcgagaggaccaaggagggcggtgggtgcagtgggaaccagagtcaccgtgtgcctgtgcctcgtgggctcctcgcagattgaataaacgccccctgaagcttctctgcaggtcacagggaaggggagggtggctgccgacccggcgggagaagcgtcaagaagcgtcgggaggacctgaccctacccctggaccttgaagacaggcctggccaggctgattttaatggataggcccaaggaaaaggctcaagggcggcccaaaccccgaccctgagattaaggctttcaaatgtctgaacgttttgatgttggtcagtagaatccatcccacctttatcacgagactcctttgccaaaattcagagatctgggattcctgctggttgccgcacagaaagccaatcaccgagacgcttatcgccaaggaaggcactttaatagggtgctgca

SEQ ID NO: 855875 - DNA, 566 bp, Homo sapiens
ccctactcttactaagccactcattcttctatagtgcagagttgtcatgatcaataactacagctattccagacctcatttcaatcgctcctcttcacatctagcatgtcctgttgttttaacccattctctctactctccctagttttctgtctccaacagttcctctgctccacaggaagctgtgctctgttgctcctactctgttttcactgctgattatccttcttcacctcttttcctcctgattttgatgccatgatttatcggtataactatgaccttgtatatatactcgactcacttgtccctccctccttccagcacattcatctagcaaaatccaactctgcttcaaccaaaacaactctacttcaacccaaatcttttcctgcttcatatcattcctaagcagctgaacataactggaggaagaatacagacacacacacatacacaaccttatggattggtctcaccttcaagttgtgaccactaacttcagktgagccctggtgctgcccagtaattccactccatttccttttattggtcacttcaccaca

SEQ ID NO: 855876 - DNA, 619 bp, Homo sapiens
ttttttctctttgtttattgtaattgtaatttctgttgggagattaagagyggcgctcactggattacctcacattaccaactgtgagatgctggggaaagctactcacgcaaatcagtattcctgcttttgaacactaacaattttagggagagatgaaacaaacaaacacgataaagacatcagaaaagagagggaataataagggagggcactctagtcatgtgacctctctggggcttagtttccccattcataaaataaaggggttggacagggcaatatctaagcaactctctagctcctctctagaggtctgattcaaatatagtaaaatggtctcctggtgaataccaaaacaatgtctaagatttgaaaaggtcacacaaatttaataaaatgcatcattttatttggttcctctggtttctgcccactttataatcaggttgacgacaaaactagggtataggtgggagaaaatactttagtattaattctttcttaccatcaaagagcaattgtccttaaatccttcttatttagctccatggaagtctactaactacctaacaagactcacccaattctcaaggctaccaccaaaacagaaaacaca

SEQ ID NO: 855877 - DNA, 637 bp, Homo sapiens
tggctttcctcttggtctaccctcagctcagcctggaagtacagaaaaagtggaagctggttccaggcaagccaacactcccaactctgaaaagttgggggttgttacagagccctttcccagaaagcctgacacccatgtctttagtccagcagccatgctagtcacttttaactggccgacaggtgcccggtggttagcccctgaattctaagtaaaaaaagacagaatagcaagtgaaaggggtccaatgggactcaccgcatggtgatatcctagacaagcccctaagatgtgtccagagttggttccttccagtgagttgtggtctctctgacttcaagaatgaagccgtggaccttcatggtgagtgttacagctcttaaaggcggcatggacccaaagagtgagcagcatcaagatttattgtgaagagcaaaagaacaaagcttccacagcttggaaggggacctgaacggatttccactgctggcttgggtggccagytttattccctatttgtcccctcccgtgttccatttctgtcctatcagaatgcccttttatcaatcctctctgtgattggctacttttgggatcctgctgattggtgtgttttacagagcgctgattgttg

SEQ ID NO: 855878 - DNA, 594 bp, Homo sapiens
actctttgggcatctcagtattaccatgccctgtgaataagatcagtaggaaactacaataacccaatccaggcagaactacaaatggccagacccttcaggaatgaaggtttgggtcacttcaccaggtamaaattcacaacctgccgtggtgcttgctgaaggcaaaaggaatacacaataagtagtagaatagggtagtcatcaataccagctatgaccacgtaaccagttgcagaaacaaggactgtaattgtcaggtgtatttcctccttattttgttaagaccatgtttgtgtgtgtataaacttgtactaagaaaatatcttccttttatttcctttctttttcctttattacatgacataagatttattgacttcatatcagtatttaagtgtcattaactttaggtaatagcattgaggttatggattgatgaatttccagttgtacaaaggataggtatattatgttaggcataattataaccttacatgttatgtgaagtgttatagcctcagcttaccactgtgctttggccaaaaggcattgtgtgtgcgtgtgtgtgtgtatgtgtgtgtttgtataaag

SEQ ID NO: 855879 - DNA, 620 bp, Homo sapiens
cttttgtctgccacctgccaataccatatacctgcttgcagctctcaccagaaaataatggctttgggtttcttcagttttcctaacctyttgtatctgtaattggcaaagttaagcccacactatgctgacaaaagattctgaaaaatatgtttcccagatttcttctttaaaatctacagggcaatgtaacaagagatttgataatatacaatcttgcacagcggctaaggagcttctagacttcagggcttaataagccttatagggtttctcagaggtcgatacgatgttcctgagatgatcacctcatcagtggtcttgagcctttagaaaagctaattataggcttatgggggaaatactttcttcttccctacctagtcaggaagtaaagtaagtgctccctcctgccccacatacacgtgaggaggcacttgtaaaggtggacgtcgccgcataaacatctcaaaccctgttccagagcttgctgagcagctgaaattagtcaacccttactgggtgccatttgagttgaaaaagtgaagtgagataatttttttttattgatatgttcggccctcctcctcaaccctgtctttgagggcatgcgcctgctt

SEQ ID NO: 855880 - DNA, 428 bp, Homo sapiens
tttcttccagtaatggctctgatcatgagaatatggctgtcctgatgcacagaacctttattatttgttagtgaaaatgcacattatccctgcttttgacttgtcagcttttatgttgggacaaccttagtgttatcattttgtataatcagtttgactggaactttcaaacttttgtgtccctttgctgtgaacattttaatattttgtaatgatattgttagaattgggagatttgtaatgacagaacttgaagatgaaccctgtgtgatttataaaatatgactacaagcattttwcataccaatgttgacaacagacaaaacaagatattgttctaaaaatcaaaaagtgacatgggatctcctgtgcatgactgcagtcatgaaaaaaaatactatcttcaagttgaataaaaatgctttcat

SEQ ID NO: 855881 - DNA, 632 bp, Homo sapiens
agaagaaacaaattgtcaatatcagaattaaaaggtcattcatcactggtgatcccgtgtgatcccatggacattacaatgataaaaagaaacactaagaactactccacgtcaaaaatttaataacttcaatgacatgggccaattccttgaagaaacaaaactaccaaaactcatgcaaggagaaatagactatttggacagcctgtatctattaaagaattaaactagtagttaaaaacaacccaaaaaataaatcagggagccaaaagaagtttcactggtgaagtctaccaactctttaaagaactaattacaattctatacaatctgttttaggatacagaaaaaagggactagtttctgactccttttattccatcattattacactaataccaaaaccagataaagacattacaagaaaaggatattacagaccaatatctctcataaacatagaggcaaaaattcttaacaaaatattagcgaatcaaatccagcaatacgaaagataaataaataaatacatcaccaccaaatgacattcgttccaagaatgcaaggctgtttcaacatttatawatcagtgagagtaattcatcatataaacagaatgaataagataaaca

SEQ ID NO: 855882 - DNA, 649 bp, Homo sapiens
agatagttctaatgtgaaaattagtaaacaggaatatatatcaatggtaaatattagatgaaaccatcatgagaaaataaaagaggaaaaaaaaacaaaaaacaaaaatgagagtcatacatgatgaaaagatcttgcaggcatgcaattgcaactccaaaatgtaagacgataacaaatgagatagaagcaatctgtgaagagacagaggccaagaattgctcaacgctggcaaaaaatatcaaggtcccaattcaagaaataatgaaaataacaagtaagatattacaaagaaaatgaaacttggaaacatcaaagtaaaagctttgaaactaaagaaaaagacaacaatcttaagggaaatcaaaaaaataaacaatcatttaaaaataacaataggattaacagctaatttactaacataaataataaaagtcagaaaaaatatgtatcttcaaattctgaaggaaaattctcacctaagaattctatatgccacaaaaatatctatcctgaaaatgaaggtgaaataagtatattttcaggcaaattaaaaaaaaaaaaactaaaatcatccctgaagaccttgaataaaaggagtttwtaaagcagcaagataacaatctagaaacatgcatgaaaatgtgaa

SEQ ID NO: 855883 - DNA, 652 bp, Homo sapiens
acaaatgtttttgagtcagatcttamtgaaatagataagatttttgcctagtttcctgaagaacctgaacttaattgatatttattgtttgttatatcattcttaaagctaaaaagaaaccttaggtgtccttatgatttcagccgcatttagatctcttaactgaataaaaaacgcgtattcgcttttaatttcagtcaaggacgtttagctctattgtatattggttttttactaacagtatgataagtagtaaattggagtaagtagaatgtagagaggcccaaacattttaaccgaaaaatagatgagtagttaggcttctaatacttgtatcttgttgccctccttcagaagtttcaaatgtcaggtattggcaaataaattatctaggtggggagggctttatagaatgcttaaacaactggaagcagagatgcttttcaaggacacctgagcactattttgctttctccaccaggatgaaaatatcacttttttaatagtatatttggttcaagagccggtcgataactaatgtttgtaaacctttctttaactggaagcatgtaagttattaaatatttcctccagactactgcagcaccaatatgaagaggcaaagagagaaagaattgagtttttctagatc

SEQ ID NO: 855884 - DNA, 611 bp, Homo sapiens
agaatttctgcattacatcatttgacataaaatgttctgaatgacagaagtagaagtagaacttactacyatttgaagacaggagttgagcgctgaaaaccacacacatttatagaaagaaaccaaagtttcacagggaagacctgtgatctctggctacaggagctgaaattaggaacatgaaagaaacttgaagagagaagacattcaatactctaaaatacttcagcaaaaatagtcaaacatctgtaaacaacttgtaacaaatctttatatgttgtgttgctatgcggtaaatattcttaactgattattattcaactcaaaaaagtgatttttattgctcacgaatacttccctctagattagataaaagcttgctttcttttcctggagtcaagagtaaaatgtaattagggcttactcagtgattgtttttgaatttcttagactggggcattccagccacttgcttggctgtttgcaattttcacccaaaaaacggtcaaaataaattgtaaaaccagaacgaataagtttggctccttgttaacatttttatttgcaggatggatgaggaaactgatgaaactggctgtggattttaatta

SEQ ID NO: 855885 - DNA, 581 bp, Homo sapiens
gaactgagttcagtactgatccaaggatgctggcatcaaagcccttacacggaactatccctaaaggttccgtatttccgtaatataccaycaatcactctaaatttataataccctgtctttaacttggtatataccatcttttgggaaaaaaattattaatattttgagatgagatacaagaataaagtcattcttgaggttccacctctaatatgaaaaaatggacgctgtttgcacatagcagctagtttgatacctcctgttctgttaggctagccttcacacaatgagcatgcatatacagccacagttcactgcatctgttttgaagttgcaaagtgctgctcattcaagtcacagatgctaccatgttatgcaatgaaacagtaaaattgtatgtccaccatgagaaaaggaaaataaacaatgaaaaaaatgcagcaaatataggcagttggcattcagaacacgccaaaaagctaacactcatgaatcgtcattataaggttttcctttccttaaaaaaaaagtctttctttgcatatttcaaaatgtaacggtcccagagaatcatgaag

SEQ ID NO: 855886 - DNA, 501 bp, Homo sapiens
tgctaaaacatttttttaattaaaagtaatgtatatcacagattttacaacactcaaggaattctttaatataattaagagaaactacaaaactccaattaagacacttgaggccgggtgtggtggctcacacctgtaatcccagcactttgggaggccaaggcgggagaatcacttgaggccaggaattcgagcccagcctggccaacgtggcgaaaccccgtctctacaaaaaaaaaaaaaaaaaaaaaaaaaaaaattagccaggcgtggtggcacatgcctgtaatcccagctacctgggaggctgagagcaagcagaggttgcagtaagccaagatggtgccactggactccaacctaagtgacagaggaagaccctgtctcaaaaataaaataaaataaaakaaagacacttgacattcttcaaaaggttaatgtcatgaggaaaaaagtgtggggttttctagagattaaaaaggctaaagagttgtaagaatc

SEQ ID NO: 855887 - DNA, 609 bp, Homo sapiens
agcatgatctcagctcacggcaacatttgcctcccagactcaagcagtcctcccgcctcagccttctgagttgctgggaccaaaggtgcacaccaccacaccaggctaatttttacaatttttttattttagaaatgaggtctcactatgttacacaggctggtctcaaactcctgagctgaagtgatcctttcaccttaccctcccaaagtgctgggagtacagccgtgggccactgcgcctgctgcattgattttcatatgtcattatccttgcattttaaaaataaatcccactagataaaggtgtataatctttttatcataaatttgtttaacatcattgttgccttggcatccatttttaggcctaacataagttgtttaaaactgagttataccacctcatctttggcctagttaaaactttccctccccatgtggctgtttgcagtgtgggtcacttgttctacatctcactgacccaacatatcccayagctgcttaccacaataaaaccagaatcaacaccagagtcatgcaaataatttcccccctttacacatattttctttaaattagccagttcacaacccctgctggaaagcct

SEQ ID NO: 855888 - DNA, 598 bp, Homo sapiens
ctttttgtatttcgttgtagagacgaggtctagctatgttgcccagyctggtctcaaactcatgaccccaaggaatcctccctcctcggcctcccacagtgctagaattacagttgtgagacgccctgcccagcctattttcttaaatccaattatctgaatccagttttcacagacaacaactgtactcagaaaagtctaagagcaatatttttcacttcttcaggtatgttaaggtttactttacagacatggtttttaaaggcaaaatctgctactctcatttatagctataatctcaaagaatatttaagttttaataagttacttactttgctagttccataaaaactagcgcatctctaagagacacaggcatatcactgcttattttattcggtggtggtttttgcagatctacaataagcacaccatcttcttctctaaaaactttcattgaaacagccttgttatttaccattttcaaaaattccactttagcttcctcttcccagccttcattctgtgcaagaaagtaaaattccatagtaattaattgtaagtatcgctaatgttacaatgttctggatttaggttt

SEQ ID NO: 855889 - DNA, 661 bp, Homo sapiens
tgttgctaactgtaacatttaaaagaattagtttgtgtattattccctgctttaaagtgacataagaagagtacttaagtttggagttccttttctaagctctccatctagtaatactggtaaatgataaagttttacttatcaagacaacagtagagcaaaataataaaacgtatgtcttggaagttaagaatgacaaattactcctctctacctctaatttcctttattctttaactccacctccctccaaaatgtttctaagcaggccaaggatacatattataaaatatcatacccagtgacaatcaggacttcagaatttccaaaatctaccatgaatatttgtattagtgcaacttcatggacaaataatctggttggactacaaggttttctggtatttctaccctctattggaattaattctgtgatagttcctcgacaccacattccatttttaatactgctgacaaatattcttgcacctaaataatgagggaaacaaatcgttataaacatttatcaataaaagccacttcataagtttacagacacgttagttctaccacgaaaaagtcttaattcrtttatttaatgatgatatagcactgtgttcaagtgctataagaaagatataatacagcatattatgatagtt

SEQ ID NO: 855890 - DNA, 506 bp, Homo sapiens
tgatccaaaatattttacatatttattgggtacatgtgaatatttgtcacatgcatagaatgtgtaatgatcaagtcagggtatttgaggtgctcatcatcctgagtatttatcatttctatgtgttggtaacatttcaagtcctctcttatagctaatttgaaatatacaatacattgttgctaactatcatcaccccactctgctatggaatattaaggtttatttcttctatcatcaacctctctttaccccaccttcctactcatgtactcctcccagcctctggtatccatcattttactatttccatgagatcaacttttttagcttctacctttgagtgagaacatgtggtatctgtctttctgtgcttggcttatcttgcttaataygatgacctccagctgcacccatgttgctgcaagtgacaagatttcattcattcttatggccgaatagtatttcattgtgtatatatgtaccactttttttttttttttgag

SEQ ID NO: 855891 - DNA, 545 bp, Homo sapiens
ttaaatggcttacagtatgattagatgggctggagaaactgtaggccagtcttccagaaacaactctcaaagccacactctagagctgagctgtaaaggaagctgctgctcccactaagaatagtaaactaccagctgaatcagggattaacacccagtagccaccaactttctgaaatcatgccacctcttccacttcaggaagctcctgccaaattagggagccatcacttgcacttccaggtccagaccaaacagctctatgaccattgggaccagaaagatggattcctaaaactctctcctggaaccatatagattgtgggtaggggaaggtgagtctgcaggtaggggaaattaccatatactgtatgagggaattattaggagcccagttccttttcaggtcccatgtgaatgcatttgwttgaaggaacctaagtctcatttagaactctaacagtaaaggaacctgggaaacgtagtttaacttttcagtctctgcatttcagaaagtcacaccataatgacattggaagagatga

SEQ ID NO: 855892 - DNA, 540 bp, Homo sapiens
ctacgccaaatgtcacgcgggggactgtaggcaggtgaatatggtttkattcagcaatagctctcattaacaggtttctcacactagctctttacactatccagcctgcctcggatgcttgagctcgtggctcccacatacagctgtgcttctggctgtcccctgcctttagggtcagcagcttaactctttctgtctctgggcactagtgggccaagctgtgtcctggctccctcctgtccatctcaagacagacagctctgactctctctttgtctgggtgcaagtgtgcctatcatgtcaagccatgttgcactgagccaaaccccaagagcccctgtagagcgttaacagggcaattataccttttacagacaatagtggctcagagccaagtatgaacttacacaaacaggttatataacaagtggaggtgtgcgcttgagcaccaaactcaccgagtcatgcaggcttggatattcacctcggcctattcgttgaccaaagcacattcatgtacctacaaccttcttcacaggg

SEQ ID NO: 855893 - DNA, 556 bp, Homo sapiens
aaccaggctgggcctccagagctcatccactcccctcctctccttccatgtaagcttgtacccaaacrcccccagataactttcattttctttagagtcttgacatgatcagttaccttttcttacaagtccttgagtcagaaaattcctctttccatctgacttactaccttatcttatcacttagagccaatattttgtgccccaccttcctatctagaaactgaactgttgtccctcccttgtcactcttgcctttttacccctcacacctgggggtgccttctgtctaatctccccagctccggaaggggtcccgcagcactgcagccatttgccgcaaggcagatcagtgcaagggaagttgctcttgtaattgactagccctgtctcctggggaagatgagacggtggctggataatgatttgagatgaaagggaattaacccagccgggggctgcctgttggccttggaggaagccaattccagcagcaggtgcactcctgcataaatgagggtcctgactctgctgattaagacatcagcgctcaggg

SEQ ID NO: 855894 - DNA, 629 bp, Homo sapiens
gttgaatgaatggtaagaaaataaaatwaaattaaattaaaataaaaaataaataaatcagtgtttatctcctctgtaaagttttaattaatgtgaaaaagaattctaaggctagtcttaagctggtgtattttgtgctatgaattcgtttttcagtgtcaaggggtacttcaagataaaacatgggcttagaacacctgtaagcccacttttcaagacaacccagcaagttggtcagtaacaaacgtggctgcaggtccctgaaacaaacaagaaactggatgaagtctccacattgttttatgcccttgggagcttgaccttttaaccacgtggcagtactttcttttggtctctgcttcagggaacaataattctagggttcatatcatatttagctctaaaaatcatattaaatagttaaaagcctttgcaagctcaaaattaagtactctagacctcttctgggaaataagatgggaactgtcccatctggtagctcagttcccaaggttttgcgctttcagagtggcggtccaggttcagttccccacctagaaagtaagttgtttctggtttaatatctgtgtgaccttgtctattctcttctccatggactgtcttaaatt

SEQ ID NO: 855895 - DNA, 667 bp, Homo sapiens
actcagaaattgtaaagaggcaaaaaacttttataaccctttataaattttgccaccatgcttgactaatttttttgtacttttggtaaagacrgggtttcgccatgttggccaggctggtctcaaactcctgacctcaggtgatctgctcacctcggcctcccaatgtgctgggattacaggtgtgagccactgtgcctggacgaggaatatatattctgtggttgatgggtggacttattcaacagatgtcagctgtccaagtgtccaatttaaatcaatattttctttgttagctttctgtctcaatgatctaatgctgtcagtgtggttttgaagtccatactatgattgtttggctgtctatgtcttttcataggtctagaagtacttgtttatgaacaagtattttatgttcttcaataatgggtgtgtatatgttaggatagttaagccttcttattttattcaactctttattattatgtaatgcccatctttgtcctcttttactgtttttggtttaaagacttttattcgatataataattgcaccctgctctttttttttttccatttgcatgatagatctttctccatccctttattttgtgcctatgggtgtttttatctgtgaagtggatcccttgaagaccagagatgaatg

SEQ ID NO: 855896 - DNA, 667 bp, Homo sapiens
actcagaaattgtaaagaggcaaaaaacttttataaccctttataaattttgccaccatgcttgactaatttttttgtacttttggtaaagacagggtttcgccatgttggccaggctggtcycaaactcctgacctcaggtgatctgctcacctcggcctcccaatgtgctgggattacaggtgtgagccactgtgcctggacgaggaatatatattctgtggttgatgggtggacttattcaacagatgtcagctgtccaagtgtccaatttaaatcaatattttctttgttagctttctgtctcaatgatctaatgctgtcagtgtggttttgaagtccatactatgattgtttggctgtctatgtcttttcataggtctagaagtacttgtttatgaacaagtattttatgttcttcaataatgggtgtgtatatgttaggatagttaagccttcttattttattcaactctttattattatgtaatgcccatctttgtcctcttttactgtttttggtttaaagacttttattcgatataataattgcaccctgctctttttttttttccatttgcatgatagatctttctccatccctttattttgtgcctatgggtgtttttatctgtgaagtggatcccttgaagaccagagatgaatg

SEQ ID NO: 855897 - DNA, 614 bp, Homo sapiens
tttgccaccatgcttgactaatttttttgtacttttggtaaagacagggtttcgccatgttggccaggctggtctcaaactcctgacctcaggtgatctgctcacctcggcctcccaatgtgctgggattacaggtgtgagccactgtgcctggacgaggaatatatattctgtggttgatgggtggacttattcaacagatgtcagctgtccaagtgtccaatttaaatcaatattttctttgttagctttctgtctcaatgatctaatgctgtcagtgtggttttgaagtccatactatgattgtttggctgtctatgtcttttcataggtctagaagtacttgtttatgaacaagtattttatgttcttcaataatgggtgtgtatatgttaggatagttaagccttcttattttattcaactctttattattatgtaatgcccatctttgtcctcttttactgtttttggtttaaagacttttattygatataataattgcaccctgctctttttttttttccatttgcatgatagatctttctccatccctttattttgtgcctatgggtgtttttatctgtgaagtggatcccttgaagaccagagat

SEQ ID NO: 855898 - DNA, 514 bp, Homo sapiens
taaattgtgtataatgggagtttggtgtacataatatttcatcatccagataataagcatagtactcaataggyagtttttcaatcttcattctcctctcatgctccaccctcaagtagggcctcgtctctgttgtttgttctttgtgtccatatgtactcaatatttagctcccacttataaatgaaaacatgcagtatttagctttctgttcctgtgctaatttgcttaggagagtggcttccagcttcatctatgttgctgcaaggacatgatctcattctttttttgtggctgcatagtattccatagtgtatatgtaccacattttctttatccagtttacagttaatgggcatttaggttgactccatgtctttgctattgtgactaattctccaacaaacatttgttgcacgtgcctttatggtaaaataatttatatttcctttgagtctatagccaataatgaaattgctgcgtcaaatggtaattctggcttaagttctgtgtg

SEQ ID NO: 855899 - DNA, 629 bp, Homo sapiens
tactcacttccaacatgaatgagggtgaatatgccactaaaccctatactggttatcttttttatattgtgtttgcaaaaaaaaatttttttagatagattctcgccatgtcacccaggctggagtgcagtggcattatcttgactcactgcaacctctgcttcccaggttcaataaattcttgtgccacagtctcccaagaagctgggattataggcaggcaccaccatgcctggctaacttttgtatttttggtagagaaggggtttcatcatgttggccaggctggtcttgaactcctggcctcaggttccaagacattcttaactcggggaccaaaagtagtggaaaactgtgtctacactattatctaagttttgaatgagaaaatatccaaccagaattttccacaatgtcatggaataatacagcagagcataaatagaagtattgagtgccttagatatatgtgctgagacagtctgacagtgtgccttcattatctgactggacatgcaaagcagtcatatatactttttctgtgcagtygaaagcaaagcagtcttgattgataggtgtgtgacctgaggttgtcttttgatcatgtcaactggattattaataataat

SEQ ID NO: 855900 - DNA, 644 bp, Homo sapiens
atttagatcatgggaggtaacatctcttacacaagatcacacccagagcactagagtcatttttggaaatcattttttttaacttttaaatgactgattttcttatttataaaacaggccaggtcgggcacgatggctcacgcctgtaatcccagcactttgggaggccaaggccggcagatcacgatgtcaggagtttgagaccagcctggccaacatggtgaaaccccatctctactaaaaatataagaattagccgggcgtggtggtgcacgcctgtaatcccagctattcaggaggctgaggcaggagaattgcttgaacccaggaggcggaggttgcagtgagctgagatcatgccactgcactccagcctgggtaacagagcgagactctgtctcagaaaaaaataaaataaaataaaataaaataaagcactggcagggcacagtggctcacccctgtaaccccagcactctgagaggctgaggcaggaggatcacttgagcccaggagttgaagaccagcctgggcaacacagtaagacctcatctctacaaaawaaaaaaaataataataataataataacaacaataataataatgtattacatccaaataggccgtgactttaaaaatggcta

SEQ ID NO: 855901 - DNA, 644 bp, Homo sapiens
atttagatcatgggaggtaacatctcttacacaagatcacacccagagcactagagtcatttttggaaatcattttttttaacttttaaatgactgattttcttatttataaaacaggccaggtcgggcacgatggctcacgcctgtaatcccagcactttgggaggccaaggccggcagatcacgatgtcaggagtttgagaccagcctggccaacatggtgaaaccccatctctactaaaaatataagaattagccgggcgtggtggtgcacgcctgtaatcccagctattcaggaggctgaggcaggagaattgcttgaacccaggaggcggaggttgcagtgagctgagatcatgccactgcactccagcctgggtaacagagcgagactctgtctcagaaaaaaataaaataaaataaaataaaataaagcactggcagggcacagtggctcacccctgtaaccccagcactctgagaggctgaggcaggaggatcacttgagcccaggagttgaagaccagcctgggcaacacagtaagacctcatctctacaaaaaaaaaawaataataataataataataacaacaataataataatgtattacatccaaataggccgtgactttaaaaatggcta

SEQ ID NO: 855902 - DNA, 419 bp, Homo sapiens
gcctgcagcagctggtgagctgtggggctggagatgaaagtgaccaaacaccaggaccctctgcagaaacacaagtggcagcatgtggtctgaacccagcaacagctcccagctgggaggacacrgagagaaccaaggggacatgaggctcccaaaggcaggagcaggttgcctcttgccagccaccaaggaagagacttccagagcggaagtccctcagctacctcccacccaagagtcagcccctagtgtccctggggaactctgatatgacccctacagaccatattctagcaactctacatatgccaaggctggctcaggggcggggagctggaatctgagcccacccactcccatgggactctgtactgcctgggcctcctactccacacctgtttcccacctcaaaagccacc

SEQ ID NO: 855903 - DNA, 588 bp, Homo sapiens
gatattaaacttaaggctaaccacagatatgttctgccactggcatgtcctcattctttagcatctcctgctacttcatatgtgatactgttgacactttggtttcactagggtggctaagtgtggctctcaaggtgggaagcatctttccagctgtggtaggtaagcatacagaccctggggacctgtataagtctgttctcatgctgctaataaagacatacccaagactgggtaatttataaaggaaagaggtttaattgactcacagttccacatggctagggaggcctcacaatcatggcagaagagcaagagacatcttgcatagcggcaggcaagagaattagagccaaatgaaaggagaaacccctttaaaaaccatcaagtttcacgagacgtattcactaccatgagaacagtatgtggaaaactgcctccatgatttaattatttccgactaggtccttcccacatgtgggaattatgggagctacagttcaagatgagatttgggtggggacacagccaaaccatatcagaaccaattggtcaggtcgggatcckagttctgccacttgctagatg

SEQ ID NO: 855904 - DNA, 507 bp, Homo sapiens
tttacaaaaccattttttttatttttatgtcacwtttggtcgcatatttttctaagatctatacatttcatttaaatatgttggcacacactctttttatatatcatttatataaatcataatatccttttccgtatttttaatgactgcaacgtctataattaattatgcactccctttcacatctaatactgtatgtataattgtgaattctctcttttattcttgactagagttatcatgggctgtttcaaagactcattttttagctttgttgtattcatcaattttaaatttaattttatcatattactttctggatttatgtttattattttgttctttatattgtattttattttgccactctaagtcctaatggatgtttatcacattacttttcattctctgatttgtattacgagtgttcaagatcatactttttttcatgctgctttagctgcatcctatacaaatttataacagcattttcattgcttactttta

SEQ ID NO: 855905 - DNA, 507 bp, Homo sapiens
tttacaaaaccattttttttatttttatgtcacttttrgtcgcatatttttctaagatctatacatttcatttaaatatgttggcacacactctttttatatatcatttatataaatcataatatccttttccgtatttttaatgactgcaacgtctataattaattatgcactccctttcacatctaatactgtatgtataattgtgaattctctcttttattcttgactagagttatcatgggctgtttcaaagactcattttttagctttgttgtattcatcaattttaaatttaattttatcatattactttctggatttatgtttattattttgttctttatattgtattttattttgccactctaagtcctaatggatgtttatcacattacttttcattctctgatttgtattacgagtgttcaagatcatactttttttcatgctgctttagctgcatcctatacaaatttataacagcattttcattgcttactttta

SEQ ID NO: 855906 - DNA, 507 bp, Homo sapiens
tttacaaaaccattttttttatttttatgtcacttttggtcgcatatttttctaagatctatacatttcatttaaatatgttggcacacactcyttttatatatcatttatataaatcataatatccttttccgtatttttaatgactgcaacgtctataattaattatgcactccctttcacatctaatactgtatgtataattgtgaattctctcttttattcttgactagagttatcatgggctgtttcaaagactcattttttagctttgttgtattcatcaattttaaatttaattttatcatattactttctggatttatgtttattattttgttctttatattgtattttattttgccactctaagtcctaatggatgtttatcacattacttttcattctctgatttgtattacgagtgttcaagatcatactttttttcatgctgctttagctgcatcctatacaaatttataacagcattttcattgcttactttta

SEQ ID NO: 855907 - DNA, 500 bp, Homo sapiens
tttttgtttaggttcagaatgtgcatgaatgtagaaactctgataacttctaatatttgrtgagtgcaaaacagctgataattcactctttgaggtaataaagcaaaggaagtcttaatttgacattgtatctataacacattccgtggtgccttaaaaggaaacagactgaagaaccgaacaagacagcccccagggtctctccagcatgtgtcaacaacattaagagaatctttataggaggaggaggaagaactgctcacattgtatccaggataaaacagctctgtgggattttcctgaaagaccaagcaccagtccgtgttggaggttgggcttaaacatagaggaagtcaagcctacagagtacttcttagttccaataatttccaataatcttattccgtagtgactgtgaggatatcaaaagccctgtagacccttttatggcttatttatgctgtccgtacattcatccatttcttataacctcactagca

SEQ ID NO: 855908 - DNA, 500 bp, Homo sapiens
tttttgtttaggttcagaatgtgcatgaatgtagaaactctgataacttctaatatttggtgagtgcaaaacagctgataattcactctttgaggtaataaagcaaaggaagtcttaatttgacattgtatctataacacattccgtggtgccttaaaaggaaacagactgaagaaccgaacaagacagcccccagggtctctccagcatgtgtcaacaacattaagagaatctttataggaggaggaggaagaactgctcacattgtatccaggataaaacagctctgtgggattttcctgaaagaccaagcaccagtccgtgttggaggttgggcttaaacatagaggaagtcaagcctacagagtacttcttagttccaataatttccaataatcttattccgtagtgactgtgaggatatcaaaagccctgtagacccttttatgrcttatttatgctgtccgtacattcatccatttcttataacctcactagca

SEQ ID NO: 855909 - DNA, 529 bp, Homo sapiens
aatatacaatcatgtaatctgcaaacagagataatttgacttcctctcttactatttgaatatcttttatttctttctcttgcctgattgccatggccagaacttctaacactatgttgaataggagtggcaagagagggcatccttgtcttgtgctggttttcaaagggaatgcttccagcttttgtccatttagtatcatattgtctgtgggtttgtcatgaatagctcttattattttgagagatgttccatcaatacctagtttattgagtgtttttagcatgaaggggtattgaattttatcaaaggccttttcctcatctgttgagataatcatgtgttttttgtcattggttctgtttatgtgatggattacatttattgatttgtgtatgttgaaccagccttgcatcctagggatgaagctgacttgatcrtggtggataagctctttaatgtgctgctggattgggtttgccagtattttattgaggattttcacattgaggttcatcagggatatttg

SEQ ID NO: 855910 - DNA, 576 bp, Homo sapiens
agacttctacaagtggataagtgactctctcagctatctcttggccaatttttgctccttctccagtgggtaaatgaacattttgaatgttattccattttctggttttattgaaaactatctttggacacttgcaggttgtcacaagccatttcttccctttagccactgaaccacacttgcctgaaagattttggactatttcctaaggagactattttggtctttataacatattgtccttttactggtcactgccatcagaatgagtctaagtgtctctttcagatagttcagaggttatagtagtttcatctttctagtatagaaatttgaaaaatttagagatgtatcaggattttatataaataaatatgctgagtagtaatacaataaaattttaaatttccccataattagaaagttgcaaacatcrtaatgctctacacatagttgctaataactgtggaattctttcaggtttcatttccaaatgtttagtcaatcctatcagctagagatttcttcaggccgcttttccgcctaactcagtccatcttcggtaacttaactatt

SEQ ID NO: 855911 - DNA, 423 bp, Homo sapiens
tactgttttatatatgtgtcattgtgtattttggggaaaaaaaacccacgcaaacacatgtgcacatacacacacatacactcataaacccaatcatatagatttggaatgtatgcaattggtaacactcgagatctagggaaagggtattgctcagtgattctcagccctggctgtaccagaccgcaatctgcagatattctgattctgttggtttggggagtgtccttgacattaatagcttttcaatgttttccaggcgatcttgatgttccacctaggttaagaaccattactaattaatatttattgagtycttatttatggctaacactttgtatgacgtactccaggtgatataaagtgttaagggacataaagctaagtactctgacggttataaagaataagatatataggccg

SEQ ID NO: 855912 - DNA, 638 bp, Homo sapiens
gctacattccttttgctgacatcatatcttgaaactgaattttagggatctgctgagattgaaaacaagcaatatggctctctatcaatatatttatatatagagagagctatgtrtatatatatatatatatatggatagatagagccatattgttcaacaaatgtacttcatagtgagtgttcaataagtatttgtatatagagagaggcatatatgtatatatagagagagatagccatattgttcaacaaatgtactttatagtgagtgttcaataaatatttattgaacactcactgtaaagtacagagtatccagggcatacattgatgaataagatttcccatccaaatgtcctttgtatctccatatataaataagtactctttctacaaaatgagctacttagttatgagatcttccttctctgcaacacatgtaaaaatgccatatccctgaataaagaattagaacaactgttaattctcctgagttgccattttctacttccccaagttatgcagatttatcaataattcaagaaaacttcctgtgcactgtactagacaatttgaagctgtcaaagcaacggcttcagaaaccgtagcaaaatgacatttgtggctaagaaactg

SEQ ID NO: 855913 - DNA, 697 bp, Homo sapiens
ttagctaatggtttttaagcacctactatatgtcctgaatgctgttacatggatttatccagtcctttcaagaacagatgaggaaactgaggcacaaagataagctcacatgacttgatttaggtcacactagcaagtcagtggcagagtcatgatgtgaacccagatcacctaacctcagagcatcttaaccatgtcaccagtatcacttcctgagccaaatattttaatttaaatgttttaagcagtaaacttcactaggtttttagtcagaaaactaaattgccatcaggaccttgcgcttggctggttggcctttaaaagccttgtgtgtcatcggctatatcaactcacagagtgggagaggctgcttgggaccctctgttgcctgcctgtggttggagctctgagcccatgcaggttcgctcacagtgttgggtccttctctggactatcatcagaggctggaactttgccttctgctgcttttatatcacccccaaccctgcccagctcccaacccagtgctcaccacagggcaactcacccagggaatcctaagaatatcttaatcttccartggatggagaatggaggtttgcagcctgggacatcaaaaacacactgttttgctctttttctcctcttacctgttaaacaggttgcctagctcctgagccatgatggatccaggtcc

SEQ ID NO: 855914 - DNA, 653 bp, Homo sapiens
gacccataattcttcgttgtgggagacctggcctatacrttgtaggatgtgtagcagtatccctggcttctgtctactagactagcaccgctccccaccccttctagccgttgtgaccatcaaaagtgtttccagacattgccacgtgtcccctggagggcaaaatctcccttgattgagaaccactgaggtaaaactctaaaaagagttgtcctgtgctgccaggggtccctctgggacctgcccgtgagtaggtgagaggtttaggcaaagggtagtgttatgcctcctgccctaacccagtggtaaaagccatgtagattgggctacctgtgcacctaggagggcagaggcaaaacctgcaagcagaaagttaggaggtagacacccatgggcatgtactgtgcctgctaaatgtgtggcagtgactggctgggttgggggtgctggagaattagaagactggtagcttctcggggatactgcaagactaggggatttgcacatgaataactatgggccagttttaaaataggaaacatgcttaagctgagtgctggcacaaaggctaactcagctatccacaagtggttcttcaaggagatgctttattcatcctcactttttgctcagacagctctgtgtcttgtgat

SEQ ID NO: 855915 - DNA, 539 bp, Homo sapiens
ggcattttagatgacagctgtgtggaagcaaggaggrtaatattaatacactatcttgaaatgaatgaaagcaaaaagaaattttgtgccatattctagggcatttgagtgcctcacttcaagtcaattgtggaacacaaatgtattcattttgtgttgaggagctggaatgattattttccctgtgtgaaaataaggcctgcattgattaatctgtgaaaacagcaaaggaaaatgaagttaactggcagttgtggcagccatttaattcaagaacaaagactgtctatttttaatagtaaatagaatataaatttgggaaaattgacttacaaatggaaatgagatttcttaatattggcaataatttatcagtcatttaaaaataatatatgcaaataatttattttttctgagatttattgtattaaagttgttacataataggttatggggaaaataggactgtgctttacttttcatatagatttttaaactttatttgtaattaaaaggaagaaggcctagtgaaataatgc

SEQ ID NO: 855916 - DNA, 572 bp, Homo sapiens
aactggtaaatgataagatggatacaagcacaggaaactgttcaaggaacaaaaatatatgtgtttactaaaaggaatatgagtgatgccgccayaccaccctccataccaccatcacaatcatcagcctaactgttgtggttctacttaaggtagatattgaggatgttattaaaggttatatttttaaaaagtgattcattatcaaaggtattggaaacatgatgttaaagatttctttcttgacaaatgtctctaagcctttaatgtgttattatgctccttaggtctttcagagatgtatctgaccaacacatttaactaccaatttcttctccaccaacttccacacacagttacatcttttggggataacattcaaggaaacactttgaaaatattaacctgaaatatccataggttatccatctgctatttcaaagctccaaggactactcaaatacctttttttttttatggctgccaaagtattttgttgttgttgttttatgtttttatttttaaatttttttttttaggttcaagtgtacatgtccaggtttcttatgtag

SEQ ID NO: 855917 - DNA, 612 bp, Homo sapiens
tttcctatatgtttcataaaatatattctgatccttgtgcatgtaacaaaatgtggcttactgattgccaaccccagagttttctgtcagtcttgattctgctcaatttaacagtggccttgtaacacagtcaatcacaatgttcttgtcacttgacttcactgggtagcagtgctttctcatcttgcatcttatctttccaatcatccttttttgcctgtatagcaaagacacttcctaagatttctaatgagccacttagagtatacaattaatggccagggttggttgaagcaccatgggggctattactctctgctgttcctccgaaactcacagtctgtgtgggacttaatagtaataggttcacagcgagcattatatagagaaagaatgttatcatttagttataacatgtttcttcataaatgttccatgttcagaattctagatttttgttcctgtagcagatagcagcatctattatgggatacattttatattttaaaagagaaaagaaaamattagattttctctcaattggcaaatattacaaagtaagtaaaggccagacatgagcaaatttaaaaagaattagtacatttatccaat

SEQ ID NO: 855918 - DNA, 560 bp, Homo sapiens
tttcttttttctttttttttttactttaagttctggaatagcattgaatctatacacgtgcagaaagtgcaggactgttatgtaggtaaatgtgtgccatggtggtttgcacctatcaacctgtcacctaggttttaagcactgcgtgcattagctgtttgtcctgatgatctccctcccctcgttcctgcctaccaaggggccccgatgtgtgttgttcccatccctgtgtccatgtgttctcattgttcaactcccacttatgagtgagaacatgtggtgtttggttttctgttcctgtgttagttagctgaggatgatggcttccagcttaatctgtgcctctgcaaaggacatgatctcattcctttttatggctgcgtagatttccatggtgtatatgtgcctcatttttttttaatccagtctaccatcgatggacatttgggttgattccrtgtctttgctattgtgaatagtgctgcaataaatatacgtgtgcatgtgtctttataatagaattatttatattcctttggttatcccaaggaatcccagtg

SEQ ID NO: 855919 - DNA, 560 bp, Homo sapiens
tttcttttttctttttttttttactttaagttctggaatagcattgaatctatacacgtgcagaaagtgcaggactgttatgtaggtaaatgtgtgccatggtggtttgcacctatcaacctgtcacctaggttttaagcactgcgtgcattagctgtttgtcctgatgatctccctcccctcgttcctgcctaccaaggggccccgatgtgtgttgttcccatccctgtgtccatgtgttctcattgttcaactcccacttatgagtgagaacatgtggtgtttggttttctgttcctgtgttagttagctgaggatgatggcttccagcttaatctgtgcctctgcaaaggacatgatctcattcctttttatggctgcgtagatttccatggtgtatatgtgcctcatttttttttaatccagtctaccatcgatggacatttgggttgattccgtgtctttgctattgtgaatagtgctgcaataaatatacgtgtgcatgtrtctttataatagaattatttatattcctttggttatcccaaggaatcccagtg

SEQ ID NO: 855920 - DNA, 596 bp, Homo sapiens
acccacaaaaaacaaaaaaaaaatttggagctggggagtgctggcacacgactgtagtcccagctactcgagaggttgagaggttgagcgggggagtatcwctcaagcccaggagtcaaagccaccctgggcaacatagcaggagcccatctcaaaaaaataaaaccagaaatttatattatgtgtttactaacattaataagactggccgaaagttaaatttttcttttttaatgacctcagtgtgttgtcgaccagcttgaataaggacattaaactgtggggtggtctttgacgcccctcctcttacatattgatcagcaaacaactaaaaacagggaatgctgggccgggcatggtggctcacgcctataatcgagacgggcggattatgaggtcaggagatcgagaccatcctggctaacatggtgaaaccccgtctctactaaaaatacaaaaaattagccaggcatggtggcgggcgcctgtagtcccagctactcaggaggctgaggcaggagaatggcgtgaacccaggaggcagagcttgcagtgagccgagttcgcgccactgcactctagcctgggcgacagag

SEQ ID NO: 855921 - DNA, 546 bp, Homo sapiens
aggatccgacccggtgttttgtgacaaaggcaagacccccaggtctacttagagcaaagttagtagaggaggcagctaggcgtggctctcattccttcccacagaatggattataagtcgagcctgatccaggatgggaatcccatggagaacttggagaagcagctgatctgccctatctgcctggagatgtttaccaagccagtggtcatcttgccgtgccagcacaacctgtgccggaagtgtgccaatgacatcttccaggtaagtgccgggtgcagcttcatttggggtccccaggtggctacttggcttccctgtgatgaaacccttctcccttagacttccaacctggacagcctctttccccttggaagtgaacccctgcagaggcctctggacagggctgagagggggctgggaggyggctctggctgctgcggttcttctccataacacaagtttcccctccctgccctgcccacagctcccccacccctgccctgagcactgctgttgactctccaatcaagagtcaaatgcctc

SEQ ID NO: 855922 - DNA, 582 bp, Homo sapiens
tgagtttgcttgctctaatggagcctcaatttccccatctgtcaaatggggacggatggcggatcagatggtatctaagatgsctttttgctctgtccatgtctcagctccttgagaaggaggggtgggaagggactgccttattctgaactgtggtctgtcctttctgctcttgcagatgtgaaataaagagcagaaaactgggaggcagggccagggcgaggctcatgcccacccagcagagagagcacctctccccagcagtgctgggtgggaggggagaagggaagctgaggtgttagatggtgaactccaggtctgccttcctgtcttcctgcagccagaatacaagtatgtagaccccatctgcaccttcgtcttctccatcctggtcctggggacaaccttgaccatcctgagagatgtgatcctggtgttgatggaaggtaacctgggctttgtggctccctttttgctcttggctctcaagcgctaatcagctcaaatagggtatgtgtgtgtctggggcatcctagcacatgggcggggagccaggatccggagccccggcataggctggaa

SEQ ID NO: 855923 - DNA, 599 bp, Homo sapiens
tgactcaaataaacaaatgctctttaagggtctgctgtaatttttaaaaatagaaaagggtcctgaaaccaaagtatttgagactgataacaatgcattgattagaaaatatatatactttttttgttgatccaaaatattttacatatttattgggtacatgtgaatatttgtcacatgcatagaatgtgtaatgatcaagtcagggtatttgaggtgctcatcatcctgagtatttatcatttctatgtgttggtaacatttcaagtcctctcttatagctaatttgaaatatacaatacattgttgctaactatcatcaccccactctgctatggaatattaaggtttatttcttctatcatcaacctctctttaccccaccttcctactcatgtactcctcccagcctctggtatccatcattttactatttccatgagatcaacttttttagcttctacctttgagtgagaacatgtggtatctgtctttctgtgcttggcttatcttgcttaataygatgacctccagctgcacccatgttgctgcaagtgacaagatttcattcattcttatggccgaatagtatttcattg

SEQ ID NO: 855924 - DNA, 540 bp, Homo sapiens
tggcttacagtatgattagatgggctggagaaactgtaggccagtcttccagaaacaactctcaaagccacactctagagctgagctgtaaaggaagctgctgctcccactaagaatagtaaactaccagctgaatcagggattaacacccagtagccaccaactttctgaaatcatgccacctcttccacttcaggaagctcctgccaaattagggagccatcacttgcacttccaggtccagaccaaacagctctatgaccattgggaccagaaagatggattcctaaaactctctcctggaaccatatagattgtgggtaggggaaggtgagtctgcaggtaggggaaattaccatatactgtatgagggaattattaggagcccagttccttttcaggtcccatgtgaatgcatttgwttgaaggaacctaagtctcatttagaactctaacagtaaaggaacctgggaaacgtagtttaacttttcagtctctgcatttcagaaagtcacaccataatgacattggaagagatga

SEQ ID NO: 855925 - DNA, 553 bp, Homo sapiens
cattttagccccagaatgagaaaagaaatgaatgcagaagaataagtatttaaagaaataagtggtaacatttttccagaattattgagacatatcaaaccacagatacaagaaattctgagaacctcaagcaggaaagaccacacacacacacacgcacacacacacaccagagtggcttagcatcaaactatgaaaaccaaagaaaacaagaaaatctctaaggcaatctcccacaacacacacacaccaaaaccgtgaattacagaggaacaaagataaaaatgatagcagacttctcattagaaattatgcaagttaaaaacaatgaattgacaagttaatttttatttttaatttttgtgggtacttagtaggtgtatacttatgaggtacataagatgtttcgattcaggcatgccatgtgaaagggaaatgarcacatcatggattgagactttaaagtactgagtgggagaaaaaataacccatctattcacaattctacggccagggaaaatacccttcaaaaataaaagcagaaaacaaaagc

SEQ ID NO: 855926 - DNA, 557 bp, Homo sapiens
aaggacaaagatgtcaatacttggctttaaggtttcaaaaaaaaaaaagttaggatacttgccagttggtttagaaaatatacatgatcactcagccagccttccctttcagatgcgaccttcattcacccccaacctgcaagagaccctcatggttggaggaagaagggagtggaggggaagcaagggagtaagacccatcaggggatgtgagaaaccccagatgaactccaggaatccaaaagcagaggcatcctgagccgtgtttctgagtagagtcgaagaaaggagcaagaatccagagccaggcccttccctggtggggaatgcaacctggttgcctggtgtgtccagacaggtagggctcccagcagccatgaacagatttcctggaggcccaagaaggcacagagtgacccaggagcctgaagacctggaggccatgtggctggacaaggaaatgacaatagggactgcgtcagtggacmagagccagatgaaaataaggatcttagtagacaccagaggaatcaacaagtaaccagatggatcccaaa

SEQ ID NO: 855927 - DNA, 635 bp, Homo sapiens
tcagtctgcattggttgagcacccagtccatgcagtccctgggaactctgagatgagtccctagtctggagtcaggcagctagagggagaaaggtgcttccacagaggttctgcggaagtcctgcccggggcttcctgaatgttgccccagggagtaaggagtgactgagctgggtctaagatgacgccattcagtacagtagccactggccacatgtggctgtttgtgaatttcaattaattaaagggatgagttaagcttatccttggcactaaccacattcaagcactcagtagccaccgaaggctggtagccgccttgttgggcagctcagactctagaacatgtccaccacaacaggaagctccatggacgacagacagcgctgtccaggaggatagacttaagacagaggtgcagtgaggacactagctcagagcccacaagtgtaacagtgcaggcgagtctgttagataaagagacctcctgtttctctagcatttgttttgtggcagcctgctgcggggaaggagtagaccagcsaggcattcccatttaacacaggagaaaactgaggttcacttttgcccaaggtcatccagcaagagggtggcatgagtcccaggtctccaac

SEQ ID NO: 855928 - DNA, 575 bp, Homo sapiens
tcaccagcgttttatagttttcattaaagagagctttcacttctttggttaagttaattcccatatattttattttatgtatggtgattgtaactaaatttatcagttgtaatagttttttttgtggagcttttagattgttccaaacataagatcatatcttctgcaaacaagaataatttgatttcttcctttccaatttggatgccttttatatctttctcttctagctaggacttctggtactatcttgaataacagtggtgaaagtgggtatccctgtcatgttccagatcttagaggaaaggctttcagtttttccttattcaatatgatactagatgtaggtctgtcatttatgtcttttgttatgttgacatatgtttcttctataccgagttttttgagggtttttttcatgaagagatgttgaattttatcaaatkttttttcagcataaattaaaacaatcacatggtttttgtccttcattgtgttgatgtgatgtgccacattgatttgcataagttgaaccatccttgcatccctgggataaaatctcacttggtcgtgat

SEQ ID NO: 855929 - DNA, 610 bp, Homo sapiens
ccatgggttagcagagcaccatgttggtgtcagatacagatggatcaaatcccctagctgaccctcagttgccatatatgtaaaatagaaaacataattttgttccaaaaagggttttgttttgtatggtttgaatgaaataaagtatgacgaagtaaatggcattattgtttttattttatataatcaaatattggttatttggatagatttagaatttttttcttcttttatcagaatgcttatctctgattagacatatccttagttttaagtcctgatgtaaccatcatctttgcagtgttagtcctaaaaataaaaactcctgaaaatatgctgcttaagcatacagcagactagctctgagcaatattgtgcttttgactgcaagcagaaacaaatgtgaaatcataaattgcattggtcgatttcttccctgagcttccttgtagtgtttgctgtacaggtaaacacccarttggagagcattgaccacaaaaatgatacactctaaattatgagaaccatatccttatccatctattcaacagactgtttctttaaatgcagagaaaaacagggtttactgtgctgcagtattcataagaac

SEQ ID NO: 855930 - DNA, 624 bp, Homo sapiens
ctttaaaatgtttctattcttcagcgcagcccaggaattctacctaaagtaacatatcctaaggcaacaaccaagaagtgtggaagaatgcatgtaagaagacacagtgatgtttagaatcctggggaaacggaacagccaaaaagtctcacagaggttaagtaaataatagcattttcatacgagtactatgtagtcatttaaaattatgtctttcagtacctagtaatggggaaaatgtattcattatatattattaaagaaaatacagggtacaaaacactgtatatagactgatctcaaatgactatatatatattaatatatatggcctacagacacacagtcatgtattgcttaacaatgggtatacattctgagaaatgtgttcttagttgattttgtcacgtgagcatcatagagtgtacttccagaaacctagatggcatagcctactacacacctaggctatatggtatgacgtattgcacctggaccacaaacctgaacagcatgtgactgaactsaatactggaggcaactataacacaatggtaaatatttgtggatctaaacatgtctaagcatagaaaagggacagtaaaaatattcttctagggtcag

SEQ ID NO: 855931 - DNA, 387 bp, Homo sapiens
ctggacctggaaggatggggaccaagagaacagcaagcagtccccacaagggaaaaatgaatatgytgaactccagcaagttaagagccccacgttcctccttggaaacacctggagctcataagcacacagcattagcacatctgctgctgggacctggtgcaggaagtcatgaaacggatgggataacagctcccttatgaggcagacatgctacagtgcagaaggaaagagtgtaagtatcagtagagccctcatttaattttagctggaaaatttataaccaactctaggatggctttaacttcaggtgttatgaaagttccaggataacatgtgtctgctttgcagctgctaagctgcattcactgaagctaggagagatgt

SEQ ID NO: 855932 - DNA, 524 bp, Homo sapiens
atattcaaagcaataatgaatgagatttttctaaattaatatgtgacacgaaaccacagattcaggaagctcagagaacaacaaacaggataaaagccaaaaaaaaaraaaaaaaaaaaaaccacatctaaggcatatcatatctaaactgcaggaaaccaaggataaaaaaataaatctttgaaagaaaccagaggagggaaaaataaaccttacttatagaggaataaagatgcaaactgcagctgtcttttcagaaaccacgcaagcaagaagagagtggaataaaaagtactgagaggaaaatccttcaacctagaattctgtatcctgtgaaattatccttcaaaagttagggagaaagactttctcagaccaacaaaaattaatggaatctgttaccagtagacctgtcttacaagaaatgttaaagaaagttctttagaaagaagaaatgtgatgtaggtcaaggaatctcagatctacataaaggaatgcacaatgttagagaagtagtaagtgat

SEQ ID NO: 855933 - DNA, 559 bp, Homo sapiens
ttagagatggggtttcaccatgttgcccaggttggactcaaattcttgagctcaagcgatccttcaacctcagcctcttgagtaacaaggattctagtcayattccactgtgactggctgcatacaaatatgtgaagagcaagtattacaaacgcagtattaggatttattacttctagaccactagagggggaaatgggataaagaaaaaacaatgaaaccaaagacaaggaagtgaaataaataaaaacaaaaattaaaaagagaaaacagaaccaaaaatgaatgtgaaatagaaacaataatacagcagaattaagtttgaatataacattaatcccaattaatgtaaataagtgaaattctgctcttcaaaaatgggtactctgagaatagacaagcaagtcaaaacccacaaaccgctgtaacagggtgtgaaaaacaataataagtttttttcctcaaataaatgatactccagtgtcatgcacaaatcttaattctgtacttttaaatagatattaaaaattattcctaatttattaaaagaaaaatctta

SEQ ID NO: 855934 - DNA, 497 bp, Homo sapiens
aggacactctaggtaagaaacagcacgcatgtaggaatggacagcttaaaacattttggaaaaggcaggtagctcagcgtggtcgcagattagcatggcaggctggcaaaagrtaagcaaaatgctagctcacaaagggaactgtgtactgctaagagtttcgatttttagcctgtaaccaacgaagtatagttaaaatgtttttaagaataatgacaggatcagatctgtgctatggacagattattttggcagccctgtggaagcgggaacgaaacttggggcctaagaaatacagcgtgtgtctgtgagtctcaattttccagtataggaaccactttaacaaaacaaaatatcctatgaaacacttcattcagttctccagctcaccaccttaaacatcatgacttgaaactaaaatgagtggtagtttcctctcctcaacaaacacacatacaatgcttcacatcaacaagataatgtggagcttctattaa

SEQ ID NO: 855935 - DNA, 620 bp, Homo sapiens
ctgtctctactaaaaatacaaaaattagccaggcgtggtggcgtgcacctgtaatcccagctacttgggaggctgaggcaggagaacggcrtgaacccgggaggcgaaggttgcagtgagccgagatcatgccattgcacttcagcctgggtgacacagtgagactccgtctcaaaaaaaaaaaaaataaaaataaaaggctgggctcatgcctgtaatcccagcactttgggaggccgaggcgggtggatcacgaggacaggagattgagaccatcctggctaacatggtgaaaccccgtctctactaaaaatacaaaaaattagccaggcttggtggcgggtgcctgtagtcccaggtactagggaggctgaggcaggagaatggtgtgaacccaggaggcggaacttgcagtgagccgagatggtgccactgcactccagcctgggaggcagcaagattccatctaaaaaagaaacagccccaaatcatttgctatagctaccaccagatatcttgacactgtctgccttagtgtacaaatctctccattctatatgccaaaaaatatgtatcatagaaaaactacttaccagcacttgcaacggtattaagggaaa

SEQ ID NO: 855936 - DNA, 497 bp, Homo sapiens
atctgaggacacaccaataaggaggtgtttcttcttgtcttcaggccccttgatatcagctttttcatacagagcttaaaaacaaacaaaagcagtaatttttttatatgcaatacactaaatacaataaatctctaatttacaaagcagttggttatttccaaaatacgcatttaaatttagctggcaactgcctagtgtaagcaggtgttcttaggacagctgtaagctgaggccgggcacagtggctcacgcctgtaatcccagcactttgggaggccgaggtgggcggatcacctgaggtcaggagtttgagaccggcctggccaacgtagtgaaatcccgtctctattaaaaatataaaaattggctgggcacggtggctcacgtctgtaatcccagcactttgggaggccaaggcgggcggatcacraggtcacgatatcaagaccacggtgaaaccccgtctctactaaaaaatacaaaaaaattagcca

SEQ ID NO: 855937 - DNA, 580 bp, Homo sapiens
ttgcttgagcctagaatttgaatctctgagttcatccttttctttcatcactttgtccagtgacattaggagcaaccaaccgatatcattatattccttagttttctacaaatgtttgaaagtatcgtatacagggtcactaagttatttgccctcttataagtggttaattaggtgtatacaatgcagacatttcgcttatctctataaacagttcatgccatgggctattagtgctttctgtactattggaaatagagtttttagcatttttaagtctaatcggattaaagagccaattcccaaaaccaattcaggagactcatccttaaaattctcttcctctacaaccactcttggtatcaaaatctatattagtcagagttctccaaagaaaccaaaccaatagaacggatggatagactagacagatagatacatagatagatagatagrtagatagatagatagataggagaggagatttaataggggaattggctcatattattacagaggctgagaagtcccacaatatgctgcctgtaagctggagaaccagggaagatggcagtttggc

SEQ ID NO: 855938 - DNA, 634 bp, Homo sapiens; identical to SEQ ID NO: 855587

SEQ ID NO: 855939 - DNA, 561 bp, Homo sapiens
attgattcttacctccattccctgagctcggcaaggacctggagctttagagaaaaagccttgatttattacctctatctttcgactgaaatctctccattaacaaggccgagctagttkaaaaaaaaaaaaacttaccgtgaaatatttttaatatacctcaaagtaaggtaattcaataatcatgtcattgttttgtctatccccactcctttctcttgctgaaatattttattttattttattgaaacggagcctcgctctgtcgccaggctggagtgcagtggcgcgatctcggctcagtgaaacctgcggaggtttcaagcgattctcctgcctcagcctcccgagtagctgggactacaggcatgtgccaccacgcccggctaatttttcgtgttttgtttttagtacagacggggtttcacgtgttagccatgatggtctcaatctcctgacctcatgatccgcccgccttggcctcccgaagtgctgggattacaggcgtgagccacagcgcccagccttgctgaaatattttaaagcaaagcccagatatca

SEQ ID NO: 855940 - DNA, 577 bp, Homo sapiens
aaagaaatagccaaactatctcattcaaagtatgatataattcagtgggttatcacatttgaaatgctattattttcaaattctccaattgtcttctttatggtyattttattcaaatcaggatattaaaaacggtgactacatttggtcgtttagttcgtaagtttcttttaatctacagcagtaaccttccctccccttttttaaatggtgattgacatgttgaaaaagggttgagctattttaaaaaagaaaaacaacgataatatcattccctctcctttccatcctcccctctctacctagaaaagggggagcattaatatccatagcagagaccacttgttaccaatattatttctctccttcttcaaagtaatggaatttgaagctgggcccatgactgtccaatataaagatgacagttcccagccacccttatagttaagtgcggccatgtgtgcagaagtgagggtgaactttctaagttccagaaattgtgttctgcaaggagagaggcatgcttgcctcttcctcattcttcttccccactgcctgaactgcagccatggggtga

SEQ ID NO: 855941 - DNA, 549 bp, Homo sapiens
aaaaggctacatcctgtacgattccaactagatgacattatgaaaaaggcaaaaccatgaatacagtaaaaaggccagtggttgccagggttaggagggggagggtcaaatgaataaatggagcacagaggatttttagggcagtgaaactattctgtatgatactctaatggtggatacatgtcattatacatttatcaaaatccgtagaatgtcaatgccaagagtgaccccctaagttaaactgtagattctgggtgatgatgatgtstcattgtagttcatcagttctgccccacctcatggactgcccctctccacccacaggtggtcaccatcctgaaccctgtgttcatcattccctttttctcttcaacttgtactttctatgtgtatacaaaggatatatttttgcctatttttgaactttacatcacacctgaaatcatattgatgtattcttctgtgagtaattttattttgtttaataatgtgtttttgagactcatccatattgatgtgtgtaggtggcatcaaccattttcatta

SEQ ID NO: 855942 - DNA, 363 bp, Homo sapiens
aaacaacacacttctataaaatacatgagtcaaggaagaaatctgaaatttaaaaatwttttgaactaaataaaaatgaaaatacacctaatcaaaacttatgggatgaagcaaaagcagtgcttagagggaaatttacagcattaaatacatatatcagaaaaaaagaaagatctaaaaccagtaatttaagcttccaccttaagaaactagaaaaaataaattaaattcaaattaagcatgggcaaagattaatatacaaagaaaaataaaataaaaaaattcaaattaaagaaaaaaatcaaagcaaaaaaaatcaatgaaattaaacagaaaaaaaaattgagaaaaatcaatgaaacc

SEQ ID NO: 855943 - DNA, 647 bp, Homo sapiens
ctctacaaaaataaaataaaacaattatgtgggcataatatcattcatctgtggtcctagctatctggtagactttttttttttctttaaagacagaatttcaytcttgtcacccaggctggagtgcaatggcatgattttgactacaacctctgcctcctgggttcaagcgattctcctgcctcagtctcctgagtagctgggattacaggcatatgccaccatgcctggctaatttttgtattttttagtggagacagggtttcgccatgttggccaggctgttcttgaactcctgacctcaggtgatccacccgcctcaggctcccaaagtgctgggattacaggtgtgagccaccgtgcccggcccccccagctacttgggaggctaaaatgggaggatagcttgagcccaggagttcaaggctgcagtgagctatgatcatgctactgcactccagcctggatggcagagtgagaccctatctctgaaaaaaaaaaaaaaaaaagctaagcagagacaactatgactgcatactgcagaggagacagattctacagattacatatgggtaagttactaaataaataatgaaaacaaaaatcaacaataagagtttagagaaataaaccagaaaacaaagtta

SEQ ID NO: 855944 - DNA, 559 bp, Homo sapiens
gaatcagccaagaatcagtcaacatttaagcaaagctgctaacatgaaagacacagataaaaagaaggttttaaaacacacagaagaaaggaaatgcaaaagaaacaataaagacaatagaaagaayaggaaaaaagtccaatatataattaatactttcaaagagatgagaagataccatacccatataaccagaatatttactattaaaaaataaagtatatatgtggaatcaatcagtggggctgaagaagtaggtattcagagaataaaagttcttttttaaaatgccaagaagacaaaacaattgtcaagaaaaatagacactattaggatgtatatttcttagagaagaaatctataacttaggaagaaaattgtagaccaccatgacatttaatttgaagaattcataagtattcttcctacatagagtatacagtaccattaaaataacacaaaaataaattttatatgttttgtaaggacacatgcaaataaaaagatgtatataaaaattagatatacattagacttagaatgtctatgagcaggaaag

SEQ ID NO: 855945 - DNA, 669 bp, Homo sapiens
tggcattagtaccaagcttgggaggggagaaatttgtaatgttcttacacgaagtggtatgatatcacttagaggtatactatctcttggactataataaattgaagacaaatattataaatgctaaagcaaccactaaaataataaaacaagaaaatataattaataagcaacaaaggatattaagtagaatcatttaaaaaatcaaaaagaaggcataaaaagaggaaagggaaacaaataataaaataggataagaaaagaaataaaaagatttaaacctaaacatatcaattttcacactaaatgcaaacagccttaacatcccatttagaaggcaaagattatcatgctggattaaaaagacccaattataaacaacctacaagaaatcaattttaactataaacacaaataaaaggaaatgaacgggaaaagatataccattataagattagtcaaaagaaagttgtaatggttatattaacatcagagaaagtagatttcaaagcagtgaatattccatgggataaagatgatcatttcataatgaaaaagggatcaatttaccaagagaacataacaatccaaaacatttatgmacccaataacagagtttcaaaatacatgaagcaaaagattgagagaaccttaaggagaaatagacta

SEQ ID NO: 855946 - DNA, 644 bp, Homo sapiens
tcaaagatgcagagaaaattttgagagcagctagagaaaaatgacatcacatagaaaggaactcctatatacaattatcagtgaatttctcagcaaaaattttggatcccaggaaagaatgtgataatgtattcaaagtactggggaaaaaaactctgctatccaagaatactatacccatcaaaactattacttaaaatgaaaacacaataaagcctttcccagacaaacaaagattgagggagttcatcatcactacacctgccttacaagcaattcttaagggaattcatcaaattgaaaggaaaccatgctaaagagcaatgtgaaaacatatgaaagcataaatctcacttgtaaaggtaaacatgcaaatgcagaataatgttataccatagtagcagtgtgtaaattacttttaacactaatataaaagttaaaagacaaaaatgttaagaatgactacaatacaaaaaattgttaatgaataaacaacataaaaagacagaaactctgacytcaagaacacaaagtggggtggagggaataaaagtgtagagatttagtatccaatttgaagctaagttgttaacaacttaaagcagatggttatagctacaaaatattttatgcaagtcttgcgg

SEQ ID NO: 855947 - DNA, 462 bp, Homo sapiens
tgccaggctgagctctcttgtatgaggtgtctgtcaacccctgctgagaggtgtctcccagtcagaagtcacaggggtcagggacccacttgaggaggcagtctgtaccttagtagagcttgagcactgtgctgggagatctgctgctctcttcagagccagcaggcaagaacgtttaagtctgctgcagctgcacccacagccacctcttccccaaggtgttgtgtcccagggagatgggagttttatctataagcccctgactgaggttgctgcctttctttcagagatgccctgccaagggtggaggaatctagagaggcaatctggctacagcagctttggtttgctgtggtgggctccrcagagaaggacttcctggtggctttgtttatgctgtgagaggaaaactacctactcaagcctcagtaatggcagatgcccctccctccaccaagcttg

SEQ ID NO: 855948 - DNA, 462 bp, Homo sapiens
tgccaggctgagctctcttgtatgaggtgtctgtcaacccctgctgagaggtgtctcccagtcagaagtcacaggggtcagggacccacttgaggaggcagtctgtaccttagtagagcttgagcactgtgctgggagatctgctgctctcttcagagccagcaggcaagaacgtttaagtctgctgcagctgcacccacagccacctcttccccaaggtgttgtgtcccagggagatgggagttttatctataagcccctgactgaggttgctgcctttctttcagagatgccctgccaagggtggaggaatctagagaggcaatctggctacagcagctttggtttgctgtggtgggctccgcagagaaggacttcctggtggctttgtttatgctgtgagaggaaaactacctacycaagcctcagtaatggcagatgcccctccctccaccaagcttg

SEQ ID NO: 855949 - DNA, 634 bp, Homo sapiens
caaatttgaaagactgttgattatataaagctacaataaaataatgcttctgatgtttataaaatatacagaaataagatatatgacaaaagtagccaaaaatggcaggagaggaattaattaaatgttactcaaaattattacatattagagaaatgcaagttaaaagcacaagtaagcattatgcaaccatcagaatggctaaaattttaaaggttgtcaatatcaatgttgatcatgatatgatatatggagcaactggaactgtcctatgttgctgatggcagcataaatttattcaaccattacttggacgtatctgttaaagcaaaacaaaatcctaacctatgacccagcagtattactcctaggtatatactcaggaggaaatgtgtaaaaattcattaaactatataccgaaggcttgtgcattttacggtacatatctcaagaaaaacttaagaacacaaatgtaaaatgaatgataagaaatcaaaaatcctaatagaaaaataggcaaaagaaaataacatgratataaaaagtagaggaaaacagatgcttataaacatatgaaaatacgctccatttcattcatcaagttacaattaaaataccaaaatgatactgaagc

SEQ ID NO: 855950 - DNA, 668 bp, Homo sapiens
agtgagcaagatagaaactgctccttatgtgcagacaacattgaaggaaagacatttgtttcaacagtaaattctttagtttttcaacaaataggtaagcattagctatkttttaaatgtattgaacaatgttttttaattctttgatacctgtatgaaatagatgtcttatggctatgattttaacatacataatcatttttatatggataataaaattaggattcattatgtgaacaaactaataaataatttccaaattatcttgtatcccataaaaatataatgagggaattattttacttttaagtacattccttgtagtcttctaaatttgctttgaaatagaaaaacacaccttatttttgttaaatgtataaaatatcaaatgactgataatattgttgaattggttaaattttaaaatattcatgaataataataattcttcaggcaaggaatatctctgaaagaatatacgttttaaagatgggtttttcagaaagaatagctaatggatgctgggcttaacacctaggtgatgtgatgatctgtgtaacaaactgctatggtacatgtttacctatttaactaacctgcacatcctgcacatgtacccctgaactaaaaataaaagttggaaaaacaaaaaaagaaaagaaaaaaat

SEQ ID NO: 855951 - DNA, 615 bp, Homo sapiens
taaattatggatacagtcatccataacaacccagtacagastgagctttgcctggatcactattttcccctccactttaccccctgcagggtcagatgaaagtgagatccatacatccttcttcagcaacttgtgcctctgctctgcacctcccgcaattaactactgaaaaaagaacacagcttcacaaaagtgagttgaagtgcatagcacagaaccatcaaattccatatttagaacaagaaaaattctataagacactatttctgcagagagaactctctcatttaaaacaagaaccataataaaatgcataccccacagaatatttgggacattatttgagaacaatatttgcatccaagttacaggtttcttccaggtttttccttctaaatagggagtatgtatttgccttatatgtgaacaatttaagggttcatttaagaaatttcctcaggcagaagaaaactaatgcaaagaataattcaagcccctgccactgagaagacagaaacttttgtatttcaaaatgtctcttgtaatctcagttcaggcaatatgatacatcaaaaaatgagaaattataaaataagaggagtcatatatatatgt

SEQ ID NO: 855952 - DNA, 594 bp, Homo sapiens
  misc_feature 559, 560, 561, 562, 563, 564, 565, 566, 567, 568, 569, 570,571, 572, 573, 574, 575, 576, 577, 578, 579, 580, 581, 582,583, 584, 585, 586, 587, 588, 589, 590, 591, 592, 593, 594: n = A,T,C or G
atacaggtttttattacaagaaacaattgtattgattgtaatagtctaatattagaggtgtatttattcaaaaaattcaaattacactcaatttcaaaaaattagagagataaagtcatactttatattaaatgwttatattatttcaagcattaaattcacaaaatcaccatgaaaatatatttttccagttatgtggagtaagaatgaacaaaaatcatttaaaaaacagatatggctcagcaaatgttcttccaggctttctaattatgtgttattctttctttatagtagtgcagaaaattcaagtatggtaaaaaatacctcatcagttgcttgattggaagaactaatttagactgaacaggaatgtgcttgcagaaaaggagaaatgaccttgtatagcatgatacgtacctacttatttactttgaagagtttctaagtaattttcaattataatatgatcaatcctacataaatttctgtttctgttttatccgatcatattcattcacagaacctatattattgaggatgatgaaattttacaaacttnnnnnnnnnnnnnnnnnnnnnnnnnnnnnnnnnnnn

SEQ ID NO: 855953 - DNA, 330 bp, Homo sapiens
agaggcctggatccttccaccttttatctttgagtcctaggaccccatgtragaactccaactactgtgatgcgaggattccctcatcacacagagtgagataacacagaggtgctcaattggcaactccggctaagcaatgggccaacagggagtgtccatggtcagcccagcccatccttcagatgacttcagtcccagctgctatctgtctacaaacacttgagcgatcccggatgaaactacctagctaaaagcaggcataccacaaaaccataagagataatgagttgtggtttcaagccactcagttatgggatggcttgttta

SEQ ID NO: 855954 - DNA, 486 bp, Homo sapiens
catacttgcaggcttgaaggcttctagaatttttttttcaagttttataaccaaggtttataatacttgctagcacaaaattgactagaaactctatgaagtatttgtagaactatttttttttttcatttgattagaaccacagaatttcaattctggaagtaccttcacaaaacatttagttcaataaaagacaccaatatgctccccagagatacatagctggaaaacaagatgaaattgcaatccctggacaaataatttctgacactgctagttttcaagtctctcttttctgttctctcccacaactttggtatctttcttgtatgatttggcttccatctcttcttcggttccatctgatgttgctgatcatgtctttctaaaagcatccctaggtttcctttacagtcttttatcaatcctcttcccaccctagcatcatcactgttygtcatgacttggatttactattttatgggt

SEQ ID NO: 855955 - DNA, 504 bp, Homo sapiens
atttcaaagaatgtccatttcagatgtgagagctctgaactcgacagagataacttgctgcttggcacccactcagcccctgcagctcctgtcacttaatggtccaaccctctttgccagcaaaatgtctggggcctctgcggaaaatgcagaatcctttttcagaatctctgttattgaatatcctcactcagctaaaatattaaaatcctcctgggattaggtaatgagacagtgtacacttcatagggtacaaattgaagaggtagtttggatgaattctgaattgaatgagataagagtgtcaataaaaataaaaggaaaaccatttattttgtgtagtatctgattctttccccatttcttcgccccactyctccactgctttgataatgtgtctctatagaatatgactcccgtggcaacatttaagaaaccgaggtcactttttagatcttgtatgccaaacacttgcctaggcaagcctttgatttagatgcctgt

SEQ ID NO: 855956 - DNA, 628 bp, Homo sapiens
ttacctgttgtgcaatgtgagatgsgagaaaaggctgtctggggctgtgtgttataatttttgtttaaagcactattaatctgattcttcaggtatttttggctgcaatgagcttttttttttttgtaatatccagggtttaagctataataatttattttttaaaatgactacgaacattttaagtcctgaataatggacttgtgcttgagttttgggcaaatacctcctcatagtttggattttactagtatagaggtcatatgtgaaatgttctatgaatgacttggaaccacttgtatgaaatcaggtacaaactgataaggtgttcagaaactattgatattaggtctatcaggccttaaaaggagtggcccttggttgttgcacttctatctattcaatctaattttatagattttttttaggcatgtttgctgctctcacatttatattaactgcttctaataagattcatgccgggctgggactctaattacatgagtttattcaaattacagataaatcagtagatattaaatctgaagaagtctcagaaagaccactctctacagataggtaaaaagaatttaggtgtaaccaccttttaaatgatgagaggtctttc

SEQ ID NO: 855957 - DNA, 546 bp, Homo sapiens
tcacatattgtgtcaaataccaaagcattttacatgtacaaattcacttaatattttaaacaattatttgaggcataaactagtagtatcctcattttttttgtaaacaaggaagaaaaagaagagttaagaaacttgctgaaagccacatgttcaagaatggcaaagctagaataaagatatgtgtgctttgtgggattcatataatgtctgtattttgtgtattattgtcaactcagatttcatagattcatgagttaagacataaagttctttccctcatgggattcattttgacatgtttttgaaagacttgaggaagagtctgcaattgtgcacttcaaaaaaatcaaaatgataacagtatggttttatagctattttctccaagatagtgaatattattcccttagaacaaactattaacaatcagtctttggtagaaataaaacgcttcagtggatcaaagtttgcaaagtatcaaattattatttgtccttagatgaattmtctaaaaccagtcccactaaagtttctttaaggatt

SEQ ID NO: 855958 - DNA, 563 bp, Homo sapiens
aaaaaaaaagtgttaaatataaaaagtaaatgatgaaccattccaacyccccactgccatcccactgcaaaagcatctgtctggctgtgcagctcctggtctctttctcccagcggcatgcttgtcccagagttgtcattgttctgaaccaagaacgcctgtcatcagctcctgccacttatcataggcattctgggttgctaggtacaaaggcttttctttttcttgttcaattgttgctttagtaaacttttaatttggggctaattggagattcacatgcagttgtaagaacgccactgactcagtttctcttaacagtaatatattgcaaaactatagaacaatatcaaagtcaacaattgacattgatacagtgaaataaagaagctttccatcaccaccaggacccctcaggctgctctttatagccacgcccactgccctcctgccccgccccaccccatccaacagtatctgttttgcatgatagaattttgtcattttgaggatgttctatacatggaatcagaaagtacataaccttttgggataggcttttt

SEQ ID NO: 855959 - DNA, 563 bp, Homo sapiens
aaaaaaaaagtgttaaatataaaaagtaaatgatgaaccattccaactccccacygccatcccactgcaaaagcatctgtctggctgtgcagctcctggtctctttctcccagcggcatgcttgtcccagagttgtcattgttctgaaccaagaacgcctgtcatcagctcctgccacttatcataggcattctgggttgctaggtacaaaggcttttctttttcttgttcaattgttgctttagtaaacttttaatttggggctaattggagattcacatgcagttgtaagaacgccactgactcagtttctcttaacagtaatatattgcaaaactatagaacaatatcaaagtcaacaattgacattgatacagtgaaataaagaagctttccatcaccaccaggacccctcaggctgctctttatagccacgcccactgccctcctgccccgccccaccccatccaacagtatctgttttgcatgatagaattttgtcattttgaggatgttctatacatggaatcagaaagtacataaccttttgggataggcttttt

SEQ ID NO: 855960 - DNA, 624 bp, Homo sapiens
ctctctcaggaggcccagcgtccgggactgccacatgctgacaatgtccagaaacctcccaggaccgtaaactgggaagaacatgggcctccctcccagaacagctcgtgatggtcggggcggggagcaacagggtccccccgtggtgggggcataaacccgtctggcctcatctggtcaagttgaacatatgctcctccatgacccagcactgccatctatcagcagatccgccccagaaggactcacgcccatgtgtccaggagacaaaaaccagaacattcctggcagccagtgcagaagggccaaactgggacccacccagatgttccctctgagggacgggcagagaggggtgttggagccacagaggacacgatgaacaagccacagctcaacggtacagtgtgcgattccacttggataaaggtcagagaaggaagagccagcgccatgttggagggaagccagccatgtgggagaagaaagcaggcccagtcaccgyggccactgtgcccacggcaaggcggggccgcctctgcaggactgggcatgtcaatcagggactaggtcttctggggagctgatagcctcctaattcttgaccttagagtgtttgctttg

SEQ ID NO: 855961 - DNA, 624 bp, Homo sapiens
ctctctcaggaggcccagcgtccgggactgccacatgctgacaatgtccagaaacctcccaggaccgtaaactgggaagaacatgggcctccctcccagaacagctcgtgatggtcggggcggggagcaacagggtccccccgtggtgggggcataaacccgtctggcctcatctggtcaagttgaacatatgctcctccatgacccagcactgccatctatcagcagatccgccccagaaggactcacgcccatgtgtccaggagacaaaaaccagaacattcctggcagccagtgcagaagggccaaactgggacccacccagatgttccctctgagggacgggcagagaggggtgttggagccacagaggacacgatgaacaagccacagctcaacggtacagtgtgcgattccacttggataaaggtcagagaaggaagagccagcgccatgttggagggaagccagccatgtgggagaagaaagcaggcccagtcaccgcggccactgtgcccacggcaaggcggggccgccyctgcaggactgggcatgtcaatcagggactaggtcttctggggagctgatagcctcctaattcttgaccttagagtgtttgctttg

SEQ ID NO: 855962 - DNA, 524 bp, Homo sapiens
agttaaaatgacaaaagacaaactaaaagttttcatagtttgaaattatgtgacctacacaggattatgtcaatgtacagagagtgcttacaaattaataagaaaaagacagatagctcaatagataaatgggcaaatgacatagacatttataagaaaaatacatacaatgaaacatacatatgaaaggttaccagactgatacttagtgaaatataatttagaaagtaattttttttggctttgttttaatgtaacactggtaaagatttaaagagttttgtagaaaccctggggaagtgagcattttcatacagtgactttgatggaggatgttgtaataaacattctggaagacattttggcaataggtataaaaaatcttaaatatgtkttcccatgatatcataattcaaaatctaggaatttatcttcaggaagtacttgaagaaatgcacaaagctaaatgaaatgtctatggggactttggactttgcttaacacattatgatgccatttaatgg

SEQ ID NO: 855963 - DNA, 600 bp, Homo sapiens
  misc_feature 193, 195, 196, 207, 208: n = A,T,C or G
taactgaagatgattttatttattttttaagcagcttcattgaggtataattgatatacaaggaactatacatatttaatgtgtacaatttgatggctttggtcatatgcaaacatctgtgctaccatcaccacctcaaagtagtaaacatatcaacacctcccatagcttccttatgcctctttcttcatcngnnttgttttggtnnctttgtgatggagtcttcctctgtcacccaggctggagtgcagtggtgcatgtctcggcttactgcagtctccgcctcctgggttccagcaattctgctgtctcagcctcccgagtagctgggactacaggcgcatgccaccacgcttggctaatttttgtatttttagtagaaacagggtttcatcatattggtcaggctggtctggaactcctgaccttaggtgatccactcgcctcagcctcccaaagtgatgggattacaggcattagccactactcttggctgcctctttcttttttaaagttattcamctgttattttagattcgggagtgcatatgcaggttcattacatgggaatgcttcatgacgctgaggtttggggtacaa

SEQ ID NO: 855964 - DNA, 765 bp, Homo sapiens; identical to SEQ ID NO: 828050

SEQ ID NO: 855965 - DNA, 710 bp, Homo sapiens
gctgcctgagacaaagatgtgatgactagggatgtctggagtccagctgtcacatacgaccatgaggtaatcatcgagatggaagccaggcactaaggatgatggacaagacaaagccttggcctgtgatgaacatggggtcatcacacttgccctctagatttcttttacagaaagctgcagggcttcaactgaatcagttgctggcattccgtcttcaacgctgtggtccattatgactgaaaaaactcaaatccacacattttgtggccaaaagggcacccctctgcctacaaacttgaaactgctttgagggctcccttgaagaaccctccaccaccctgtgtccttctctcgacaaactcccatttgccaattcccctgttacasttatcatcagacctttgcacagttctccagtcggggcctgacactttctcttctggacattgttttattaaatccaaataaaattttggttaatttgtgaagtctccatgccactctactggctccaagatcccagccctgactgctgcaggcagcaaagctcccacatgcaaatcataattcttccaacatatgattcagaaattcaaagacccccccacaactaactttgcacccgttataaaacagaatgtggagaggttttctataaagatgtacagttcaggcttgtttctactagtgaaaaagtggagacaatc

SEQ ID NO: 855966 - DNA, 502 bp, Homo sapiens
ctagagtgtcatgctttcctggctcagggtgttcactcttttggtttcctccatttggaatatcttgtctccasatcctgtcgtgaccagctccatctggttttgcagcagagagatggagtaatggagtaagatcacactgacccccctgagccgtttggaatggcttcaggccacctggccctccctctcttctcccaccactttagggcctgtgagagaaattggagggaatgcttaggcacgtgtggcttggtcctaatcctcacgtttcatttgccccccaattctaagaccaagaattttgacttgatcggaattgagttgggagagttggtgtatcacacagacttccaagtatgattttagtaaaggggaagttttctcttcggggcagctacatcttggctttgggttgttggtgctgctgagttctgagttggagtgaattttttgtgagctaaatatggtcttgtgaccaactctcctttcatccaaggcg

SEQ ID NO: 855967 - DNA, 398 bp, Homo sapiens
attaaaaatctatgctaaataataactctagtgtaacaatgcagcaaaataataaatgaccaaatatgccttatttgtgaatgtacagataattaaatattaataaatcaatttatataacacatcacctcagggcataggaaaaaaatgataagtatttcaatataaaacatttaagaaccattcctaaatttaataaaaaagcaagtatttagcaaactacataacaacattattccaccaaaaaatggattttcaagaaaaataasaattggaaactaatcctatgaacttcattgaaagacagttcttttatatttaaataatggtggagacagcaacattacagtttcccctttctttttattgattagttttagcattattaaatagcaact

SEQ ID NO: 855968 - DNA, 617 bp, Homo sapiens
atgaaccaggcttttcagataatggactttttactcagcaatcagtcagataaatctctttttaaagggcttaccagatgaaatcaagcccatcttagaaaattttcctttttcccacataaagtaatgtagttacaagaataatcatattcacatcctgcccaaactcaattggaggggaatacacaaaggtgaatgtctttgggggtcattttagaagtctacctactacaagcaataggctaaacaattctcaaagctcattcaggatagagatgtattccagttctgactaatcacatagaagaggccttattgtctacaacaggcattcagtagagacccaagaagtctcatgcctaaatagtggcactaacatagccctggaataaaggctaacatagatccacccaaacaatacttaaaaatagccctcaaacaaacaaaaaaaagctgatctacaagtagtttaaatgcctattaaaaacaaaattctactttatttaaaggaagacaacaaattccagacattcaacaacatagcgcacaatgtccatcatccaataaaaatwactgaacatgtcaagcagtagaaaaatatccttaaccaaaataaa

SEQ ID NO: 855969 - DNA, 630 bp, Homo sapiens; identical to SEQ ID NO: 819893

SEQ ID NO: 855970 - DNA, 617 bp, Homo sapiens
ctatataaaaatatttcatgtaacatacaaatgtctacacctacatttgtacccacaaaaattataaataaaaattaacttaaaaagttaaacacrcatacaaagaaaatgtggtacatatacaccatggaatactatgcagccataaatagtatgaaatcatgtcttttgcaacaacatggatgcagctggaggccattatcctaagcaaagtaatgcagaaagagaaaaccaaataccacatcctctcacttataagtgggaacgaagcattgtgcacacatggacaatgaaatcgagggcaaaaactatatcattatttcaaaagactcagaaaaagcacttgatgaaatttaacatctttcatgataaaaactctgaacgcattaagttaaagattgcacagggggaaaaaaccctattcgagctaacaaacaaatttggtaaagttgaagggtacacaatcaacatacaaaaattagtagtatttctatatgctaataatgtacgatctgaaaaagaaattatgaaaacaattccacttttaatagttaccccaaaatacctagtaataaatttaaccaaggaggttaagatatctgcaatgaaaaagataa

SEQ ID NO: 855971 - DNA, 560 bp, Homo sapiens
agagaaatgaggacaatccgataatgcaatgcaaaatacagagttgcatttggttactgatttataaattaaaatttgggagaactggaaagattatttctacagtgttttgtgtttttcagatgtatcctacttgaaagcacggttgtgaagatacccaggaccagcaatttcctttctgtgtgggacccacccgctgcgatagaattgagtgcagaagactgagcttcgtgtaaacacaaggtcaccagggatcgtaatttcaaactctcccctccccctcgctccctccagccaccaaagtatctgaacccagaactcacaacaggaacgtgtactcaacaggaacgtgtactcaattagcttttgtgggaaagggttgaagattcttggtaactgcttcaacaaaccagaggaattaattagaccgctgattttctccggaagcgcgaagcactaggccgtttgaggatctccgctccgctttgcctgggaccaggaaaagacscgagagacggaactcggcatcaggcactgcttggggcaggaggagagtaggg

SEQ ID NO: 855972 - DNA, 508 bp, Homo sapiens
aatcctaaccaaaaagaacaaagctgcaggcatcacattattagactatactacaaagctacartacacaaaacagcacagtactggtacaaaacagacacatagatcaaaggaacagaataaagagcccagaaataatgccacacacaaccatctgatatttcataaaatttaccaaaaacaagcaatgtggaaaagactccctattccataaatggtgctgtgataactggctagccatatgcaggagattgaacctggaccctttccttacatcatatacaaaaaataactcatgatggagtaaaggcttaaatcaaaaatcaaaatctataaaaatgctggaagataacctaggaaatagatttctggctgtaggacctggtaaagactttatgatgaagatgccaaaagcaattgcagcaaaaacaacaattaacaaatgggatctaattaaactaaagagcttgtgcacagcaaaagaaactatcaatagagtaaacaacct

SEQ ID NO: 855973 - DNA, 588 bp, Homo sapiens
aagtttctttcactgtatttcaccatatctgataaggtatttttatttgctgtaggatacattctcaaaaatttaaaacattcttaatgctyagcagtgaagaaattactagtaaattacagtacatctatggggtggatatgaaagttataagtagagtgaccaagtgtctctgtttgcccaaatcatctctgtttactattcttgatttggcatatttactaatagctgcctttttaactctcacaaatgtcctagtttgaattataaattctttgaatatctttgaatatcttttctggcagactcactgactgtatatatatgatttttcaaataacatcgaatccatttttcattctatgttattttcaaagtacaataatggacagtttaagagattttaaaaattccttatccccaaataatttataatttttcccaggaatagaaaatttccaatactagtacaaagtattattgtataaacattcaactaaatctatgaacagaatcctatgaggaaaataaagaagacattaattttgtatctaagtgcagagtaaccattcaataaaaaattcacgt

SEQ ID NO: 855974 - DNA, 642 bp, Homo sapiens
agttttctgagaagcactgatgtaaaatagaaaactcaggctgattcgctcaggtgtttgtgagaaagactgaataacattatacataaggtacctagtacagagccatacgaaaggattggaacttggttttgaaggatgcaatgatccactgaagaacattaagctaggagtgacatcatcaggtttgcatttttcaagggtaacgaacagttatgaagcaaatctgaggaaggtggaattgaggagtttaaagacaaaaggatgggtttagagaccatttcaatagcctggaaattacgagaaccaatttaaatcaatggcagtggaatgtggaatacaggggaaagatacaaggtatgcttaggagatagagtcgaaacatttagtaaatgactgagtttgaattgagaaaggttgtaggaaaagagaaatcaaggataacacactggttgttaacttggaagacttggtgcttgatgcttgggtgaattattatgctataaacagatgcaaaaagtttgaagaaacttagaggataggacaggtactagattaaaataatgagtttcattttgaatatrtgaagttttagtaaaattccataaaattaaattaagtaaaattttacttccataaaag

SEQ ID NO: 855975 - DNA, 646 bp, Homo sapiens
accaaggtgtgatcgctggattttatagtgtattagcccgttctcacactgctataaagaactacctgagactgggtaatttatggagaaaagaggtttaactgactcacagttccacagactgtacaagaagcatggctgggaggcctcaggaaacttacaatcatggcagaaggcaaaggggaagcaagcatgtcttaccatggtggagcaggagagagaaagagtgaagggggaagtgctacacattttcagacaaccagatcttgtgagaactctatcacaaaaacagcaatggggaagtccacccacgtgattcaagcacctcccaccaggcccctccatcaagtgaggatgacagttcgacacgagatttgggtgaggacacagagctaaactatatcacatggtaaggaatatgtttagtttggtaagaaactttccaaatttcttccaaagtagctcctccattttgccttcccagtgacgaatgagacttcctgttgttccacattctcatcagtgtttggtgcyctgttggtgatctggatttgggccattctcatagatgtgtaggcgtctaatagatgtgtaagtgtctaataggtgtgtaggctattctaataggtatctcattgttgtttca

SEQ ID NO: 855976 - DNA, 570 bp, Homo sapiens
aggtgggcatagtggcacttgcctgtagaccctgctactcaagaggctgaggtgggatgggaagatagcctgagcccaggagactatgggtgcagttagctgtgattgtacsactgcactccaacctgggtgacagagcgagactctgtctcaaatatatatatttcagcaagcctataacagtgtttgctcaccctggtaggttgagtcccacattggctgcttccgactggttatctgaggaaacacttcatacatacctatgtgtgtgtgcatatatatgtacaaccaaaaaaatcagcttcaagaaaaaactagtcagcttcaagtaagtgaaaattttagggcaagtggtaggtagtgataacattttcccttcaggccattctgaaccattgatatattttgcacatgtggctccagtcttcatgttttcccatctaaacttaggccagctcatgaaagggcaacactctacagtgggaagagaaccaactttacagtcagacattcctggactcgagttgctgccgctccactatttaaaagttgcaagtccttggacaaatc

SEQ ID NO: 855977 - DNA, 320 bp, Homo sapiens
atattatatgttcagtatagaacttttagacaccacagataaacgcaaagaaaataaatcctataatctagaaacaagcrctttggcatacactgatttctccttacacacacaaattcacaaacacacagaaatatgtatatgtctttaaaaaaacatgtaccccttcacaaattgtccaagatagtggttgtattcaaataatatattgggaccattattcacttactctctctttttctctctggtgtgtgtgagagaatggttgcatatttcattatgtggatatctcacaatgaaaccatcacgtagctaaagaa

SEQ ID NO: 855978 - DNA, 517 bp, Homo sapiens
cattgggatatttacttttctaaagtgtctgctcatatcttttgtccatttcccatttgmtttttgtttgtttaattgtaagaattttaaagatcataatctgagtttattgttgcacagactggtgacatatagtctcccattctttgctttttcactctctttgtggtgtcttgataaattaagaaactactaatgttaatttaagccaatttattaattttcttgtttatgtttagcatcttttgagtagcaccagtggtgttaaggaaatatttttgtctacaccaaagtcacaaagttattcttctgtgtttaaaagcttaagtatattactctttagatctatattctatataatttgatttttgtatatggtatagaaggaatcaagattcacttttttctgtatggatattcaacttacatagaaccatttactgaaatgattaccctttccctaccacactgccctgttacccttgttgtaatcttgtgaccacatatctgtgtttgt

SEQ ID NO: 855979 - DNA, 613 bp, Homo sapiens
ttttctttatagaggattcaatccaatttgctttctgttgtcattgtctcaccaccagtgcagtggcacagaggagagttggggaatggaggcagggaaaggttacgagcttggcctgggagccagccccaactctcctgtggaccatgggaaggtctttaacatctctttgatatcagtttctgcatctttaaaataaagacagtaacagtagtccctacatcatagagttgttgtgaaattaaattagttaatacataaaaaagcacagagaacagtgcttggcatatatgtagcatatgtatagttgctgctacttcttattctttctttttttaatttactatgagaatccatttaatattttcttgtgtatttattttttactttttgtaggtacatagtaggtgtatatattattgcgttacatgaaatattttgatacaggcatgtaatgtgtaataatcacatcaggacaaatggggtatccatcacctcaagcatttttcctttgcrttacttattattcattcttctgaatacgatgaatgaggcagagtgctcctctgggattgtttgatctctaatgattctggtgatcaggacttttgct

SEQ ID NO: 855980 - DNA, 574 bp, Homo sapiens
gaaattcaagaccattgttttgtatttgactgtgttatccccctcccctttggaagcttctaggakcttttcttgatttcaagtattctatattttaccataacctacctggaatttttttttttttttgtcattcattgtgctaggtgctccattgtcctttcaatgggaagacacatgtctttcagtctgaaaatgtcttaaattacttattcaataatatccccccttcattttctctcttttctttctggaactcctaattagtagctggagagctcacaagatctatgatatattttttcttatctttttccctcccatttctctcttctttaatttttgttctacttttgagagttgcttggccctatcttacaattttctatttaatgcttgtattttactttttatattttttatagacaggagttcctatttgcttctgatcctttctcatggtaactgttatctatattacagacttgtttccctgtgtatctttgaggacattatgattttcgaaaagtttctttcaatgtctgcactgactctgattcatctaagtcctctg

SEQ ID NO: 855981 - DNA, 585 bp, Homo sapiens
tcatgaattttgtttctaataaagttcattttattcaaatgtatttgcaaaatcattgatgattgagaaggagaaaaacaagatcagacatatgtcatcacatccatatgacagatgctacagcttattccaatggttaagttgtcggacttgggctgaagcccaaatcctcaagcgccagatacagagccccacctattgaccactatcacatccgtgctcctcccattaagcatcacataacctcatccatgaaataaacaatctattaattaaacttcaataagaaaaaagggactaaatcaatcctctctgtgtgatttcgaaacaataaactggaaattgaaaattaaaccattttactttttgttttaatctttaaaatgctaaccaacttaaactatttagacattagaaaaacaatgagtcaactcagtcacttaataaaataatctwgtttcaacacaaatcattccactggacacttgactgaatttttcattttttaaccagcagtcttgtctttatgcagccttaacttcatacagtcaaagaggaatttttttaaagcaattcagaaaatgc

SEQ ID NO: 855982 - DNA, 594 bp, Homo sapiens
aaatacattacaagaattatttacctagcatttacattgtagaaataatttaaattatataggaagatgtgcataggttatacacaaatacaatgtcattttgtatcagggaattaagcattcttggattytggtattcacaggaggtcctgaaagcaatcccccatgaatactgagggataactgcactaccaaaatcaagatctagaatacttgcatcttccccaaagttcatctgtgttcctttacaaacaacacccccacattaacatcataccaagcaacaatcttttctctgacatcataagttagatttttccatttctagaatttcctatgaatgaagtcatacagtatgtatacctttgttcccgatttatttctcctttcataatatttctgagtttgttttatatactttttatgcactggtagatttttgcttttttattgctaactactattctatttgtgggtataacgcattttatttatctacccccttgttgatacaaattttacatcatttctagttttggctcttatgaataaagttctcatgagtatgcacattacgagtttttctatgcacat

SEQ ID NO: 855983 - DNA, 682 bp, Homo sapiens
cccctctcctgtgtgcagcagtgggataccagcaggtgagtgtatgctggtagaggacagttccaggtgagtacatgctggctggggtccatctgcaaatgtatctcaatgcgtaggcagtgtttgccagctaaagagctatgatgatagccattggcaagctgatgcagtgctacaagccagtatgaccaggcccagatcctgggcgatactggtagacagggctatgctcagaccagatggccccctcccacaggtaagagagccccactctgtccatgtccaacagctcacaaagacaaaagccatccagagaagtatggtgagttttgagggatgagtccccatggccatgctccactgaagctgtatccatgccaaaccttctggactctgtgcaagctggagttctgtagacagaactgacagaagctggcagttctccttgccagcttagatatccgtgggggtgcagtgtttcctgtacccagaatcctagaggtccatggtgagagtgggccaccgtacacctatttcactcacttctttgctaggagccacttggggccaggaacgagtcctggtgctcgtcarcttcctatacagcttccaatttcttccgacttcagcacaatatctgcatcctccctctgtccacactgaataccctctttctgaagac

SEQ ID NO: 855984 - DNA, 661 bp, Homo sapiens
tggcataatttttattccccccattgtgctggtaaccgatggcctttgaaatgtggaaacccatgccattttattttcgggagtcttgttatagcatgtctttgataatttccttttctttttgccaaaatcattaattaggtataagacattctgtgtaaagattttaattttatgaatcttatgataaatcagaaatccataatatttttccctctttggggccaaaaaagtgagactaaaatgtgtcaaatctaaatttttccttttttatgaagacgacattaagtctccagagcacaaaaattctacaaaatgaaagaaaacaaaacatactattttgatgtttgtagtgacatgaatatgttaatattgagctatacacttgcaagtaacatctttattatattttattggattttcaacattctaattgttattctataatggtatttgcttttcttgatgtttttcgttaaagacatttgcttaaaatgtgaatagaatggctatgctctgcttcttcagaatgaataaaaacaacttagtagcaaagtcattttcaaagaagaaatatcaaacttcaaaaacaattaaatagattaaagcattttcttaaaacatrtacttattgagagcttggggagttaaacacataatt

SEQ ID NO: 855985 - DNA, 620 bp, Homo sapiens
ttctgtgagtcctaaaatcccccttcgctgactctccattgcatttagggaaaaaaatccacactccatttctcagtatttaagaatattcacaatttaagatccttatagctacatttctcactcttttcttctccagacaaaggcagatattcactgcttcttcctcggttgctgttggtcaccatgtacttccccgcaatcatatttctgtctgtgccttgcccccaacccagaacgcccttcctcctacgtcaaacacaccaaagtccacctttatttcaaggcccagatcaaatctgcctacctccatgacatgttctcctctcccctggaccacagagatcctgcccgcctctgaattctccaccaatcatttggcccttactcacactgtgtcattattcatttgtttagatttttctttctcaatggaaggccatgacaatatcatgcatctttggtatctccagtgaaccatgcccaatcctcagcttgtgttagatgacaataatgctatagtyaagagacaccctacatcaaaaactcctgacttcatgctcttttcagggatccaatacatttcagtgttttattgtagttttcaatgatgtgataat

SEQ ID NO: 855986 - DNA, 626 bp, Homo sapiens
ttccattcaacagcacctagcacttcattgtaaggtcatccagtaatgtcttttgcctagttccaagttctgcataatttttcttaacgaaccacatattttaaaagtgctttgcagaaagcaggggctcaaacaggtatgcatataccaatgttcatagcagcactattcatgattgccaaaagggggaagcaacctaaatgcccacatcaacacatgaatggataaaccaaatgcgatatacacatatacacatacaatggaatattattcagccataaaaagaaatgaaattctgacatacactacagcacggataaaactttaggacattgtgctaagtgaaataagccggacacaaaaggacagatattacatgattccacacatataagttagctagaataggtgaattcatagagacagaaaatagaagagtggttaccagaagctgagaggagaaattaacagagttaaggaatacagaatttcagtctgggatggcgtaaaagttctggrgatatatggtggagatggttgtggaacaatgtagatgtacttaatgccactgaattgcacacttaaatggtttaaaatggtaagttttatgttatgcatattttata

SEQ ID NO: 855987 - DNA, 626 bp, Homo sapiens
ttccattcaacagcacctagcacttcattgtaaggtcatccagtaatgtcttttgcctagttccaagttctgcataatttttcttaacgaaccacatattttaaaagtgctttgcagaaagcaggggctcaaacaggtatgcatataccaatgttcatagcagcactattcatgattgccaaaagggggaagcaacctaaatgcccacatcaacacatgaatggataaaccaaatgcgatatacacatatacacatacaatggaatattattcagccataaaaagaaatgaaattctgacatacactacagcacggataaaactttaggacattgtgctaagtgaaataagccggacacaaaaggacagatattacatgattccacacatataagttagctagaataggtgaattcatagagacagaaaatagaagagtggttaccagaagctgagaggagaaattaacagagttaaggaatacagaatttcagtctgggatggcgtaaaagttctggggatatatggtggagatggttgtggaacaatgtagatgtacttaatgcyactgaattgcacacttaaatggtttaaaatggtaagttttatgttatgcatattttata

SEQ ID NO: 855988 - DNA, 651 bp, Homo sapiens
gtaatagtaataaatcagacactgactrttctatacaatttcaacttactgaatataaaaaagttttgttgttattaaatgaaagtattacaaaataattttatcttcaaagaaccacttgagagcagaaagtcaggtagaaaagaaagaagaggaaatcctacctacagcatgtttcttccaaagcagccggtccctatttctcctgcttcaaaacaatggaaaactcccacattggaaactctcgctagacggcattctgaaatgatcagtcattccgtgctgtccttgctgttccgcttcatcacacttgaagctttgccggctgggatttttgctgccttggcaaacatgatgatggtgtcaaacctaatgtttcctaaatttttgcagaaatgcacagaagacttccatgggagcctattgtcaattatctggaaaaagagaagtttgcagacattagaagcaagaactgtgtgaggatcggctctgggttttaatgagaaggattcaaattagaatgtcggctatttcctatagtttgctaaaaataacctgggtgcctgcttccttcacttgtgcttcattttcagtgcctgctcatcctgaagattcagaagagatggaaaatgttccttaggatccagtacc

SEQ ID NO: 855989 - DNA, 637 bp, Homo sapiens
ttcctgagactttacttgatacaggaatgtcagtctccaatgagaaagataatgcctctcaagttttcttgggatatcctcaataccataataccttgtaaaattttgcagaacaattttgcagttgccatttcatgttatttggccaggattcaggtatcattgcatcattttgctgtaatccatgggtaaaaaaaatttagcttcatgcatgaaatataaaaaacagtaaattagcacagatttggtggggggatgaaggtgtgtctggttatatattcaaagtcatttatcattacactgtcccctaaataaaaatatgaaaggcaatgcaaacatcttgacacttagtattcttgtctaataaacacaagtgactgaggtaaaaaatattgctctaaaaccaccagatatgtttgattttataaaggaaatatcatctaggtgattaaatggttattactctctctacaaaactttagtaagtgaatccatttatcataaatgtcagaatcaaacaatgaaaagttcccaccaacatgcatctgcaccatcagcatggttgagttctgctgtcaagttgaaatcagaaaaaaaaaaaaaraaaaaaaaaaacaaggggaggcaccaagatggc

SEQ ID NO: 855990 - DNA, 599 bp, Homo sapiens
ctgatcaaataaacaattaatgcatamtttgttaattatatactgtattcttaaagaaagagaaaagaaaattctattaagaaaatcataaggaggagaaaatatgtttactattcattaagtgaaagtggatcatcataaaggtcttcgtctgcatattcatgttgagcagcctgaggaagagaagaggagaagttgatcctgttgtctcaggggtgggagaaacagaaggaaatttgcatataagtgaacttgtgcatttcaaatccatgctgttcaaggagcaactgtacataaactagtcacatggtcatttattatcattaacaagtatgacatatggtacataattagatgtgctaacctttaatgccactgacaaatgtagtgggtttgcttataccagcctcactgcaaacacatgagtaatgcgttgtgctatgatgtcatcatggccacagtgttactagatggtaagaatttttcagctctgttatcttaagcgaccaccattgtatgcagtgtagcatttaccaaaaaaccattatgccacacaggaccatatttggggcttttagtgtcccctgtccccaagatcc

SEQ ID NO: 855991 - DNA, 475 bp, Homo sapiens
atgcatacaatgacatgttatataatagatgttagtcagctgatacttgttcaatgggctcatgaacagatgcacataatattaaggatagaaggtattcacgactttacataatcaaattgtatctggaccaatgtagaacaactaaggctaatatgacagccttccctcaggggctacccagtcaacttgcagattgatgacattgaaacccatccctcagggattttgttctcactgaaatagacacttattctgggtacgaactcaccttttacatttgcaatttttctgctggtactaccatgagtgaacttaaataatttgttattcaccatcatgatatcccatacaamattgtttttgactaaggaattcatttcactgcaaaaaaaatatggtattaggctcatgtttgtgcaattcattggatttacaacataatccctatcacctagaagaatctgacatgatg

SEQ ID NO: 855992 - DNA, 671 bp, Homo sapiens; identical to SEQ ID NO: 850285

SEQ ID NO: 855993 - DNA, 492 bp, Homo sapiens
atatccactgttctgcagccaccgctgctgatacccaggcaaatagtgtctggagtagacctccagtaaactccaacagacctgcagctgagggccctgactgttagcaggaaaactaacaaacagaaaggacatccacaccaaaaccccatctgtatgtcaccatcatcaaggaccaaaggaagataaaaccacaaagatgggaaaaaacagagtagaaaacctggaaactctaaaaatcagagtgcctctcctcctgcaaaggaatgcagctcctcaccagcaatggaacaaagctggacggagtatgactttgacgagttgagagagaaaggcttcagaagatcaaagtactccgagctaaaggaggaagttcgaaccagtggcaaagaagttaaaaamtttgaaaaaaaattagacgaatggataactagaataacaaatgcagagaagtccttaaaggacctgatggagctgaaaaccatggcacaa

SEQ ID NO: 855994 - DNA, 554 bp, Homo sapiens
acatatggaaaacaaatagcaggttgggtatggtggctcatgcctgcaatgctagtattttgggaggctgaggtgagaagattgcttgagctcaggaattcaagaccagactgggcaacataatgagaccccatctctataaaattatacaaagaaaaattagtggggtgtagtggtgtttgcctgtagtcctagctacttgggaggctaagatgggaagatctcttgagcccaggagttcgaggctgcagtgagctgtgatcacgtcactgcactttagcctgggctatagaatgagaccctgcttctaaaataataaaaaataaaaaaaaaaaagaaaagtaaattaagcaacaacaaaagaaaacaaatagcaaatggtaaatgtaaatccaaacttattaattacattaaatgtgaatggtctaaacattccaataaaaaacaagatatttggattggataaaaaaggcaaaatctaactataggcagyctgcaagagttacaccttaggttcaaagacacaaataggtggaaagtaaaaacatggaaaa

SEQ ID NO: 855995 - DNA, 629 bp, Homo sapiens
ctgtctagcaatctccaggtcatgcccatgcattctgtgattttcccccctgcaatctcactgtcaatctggcattttaaatatttatgcccacaaataactgcaattcattgtcttayacgtttactttagattgcttctctggacatctaaaactttccaaggtaattatcatgaagcactggattaaaacccaataccaggccaggtgcagtggctcacgcctgtaatgccaactctatgggaggtcgaggtgggcggatcatttgaggtcaggagttcgagaccagcctggccaacatggtgaaaccccgtgtctattgaaaatgcaaaaattagccgggcaaggtggcacgcgcctgtagtcccagctactcgggagactgaaggaggagagtggcttgaacctgggaggcagaggttgcagtgacccaagattgcatcactacactccagcctgggctacagagactccacctcaaaaaataaataaaaaaaaacataataccaaagatgctcagttaagacctatatgatttattaagtttcacaggaaaagttctacttaattctgtaattcatagatcccataatcagttaagtatttcacttgtgtttgcatctctttt

SEQ ID NO: 855996 - DNA, 596 bp, Homo sapiens
cacgctttagggcagtcgttattggtgtgggctctgtggtcagagctcaaagatgcaaatcccatctctgccatgactggtacttgtgttgtggattgtggtggagtttagagcctgaagagccagtcgggaccaggtgtggtggctcatgcctgtaatcccagcactttgggaggtcgaggcaggtggatcacctgaggtcaggagtttgagaccagcctggctaacatggtgaaactctgtctctaataaaaacacaaaaatcagctgggcatggtggtgcgtgcctgtagtcccacctactcgggaggctgaggcaggagaattgcttgaacctacgaggcggaagttgcagtgagccaagaccatgccattgcactccagtctgggcaacagagggaggcttcatctcaaaaaaaaaaaaaaaaaaaaaaaaaaaaaaaaaaaaggagccagtcagagtagaagcttcacacatgggcacatgggtagccatgacaataaatataatcattttatggactttgcatattattttttattrggtataagatagtgtttggttttaatttattttttaaattttgtttttttgt

SEQ ID NO: 855997 - DNA, 629 bp, Homo sapiens
ggatcctctttgctgccctagagtcttcttttctccttgccatttgggactagcactggaacatctgctcagtatgtacgtgtgtgtgtgtgttcagccaggaggcgggctgactgggccaaggaagattgttcaggagagcttgcagggaggagaaaacaatttccacgtcaaagtactttgtttaaagattagagctgtatcagcccagaagctatctcccaaccctccccaccccacaaaaaaaagaaagaaaaaggaaatgaaaacatttttttctgtctcttaagaatgcccagggcttgcatagaagctcttttcctttctcctgcggcagcctcgctcttttgacgtcggagctggtgctatgtcagttatgtcctttctggagtagaatagcccttcttatgtgaggaagaggggagagcaagtcggaggcgggttttatcacagtgcagcattgttccagctacccatttctgcagaacgacctctaacacagcagagaacgccaagcraggctgcccagggagtcacaggacagggctggctgtgaagggagtctagtttcagctgccggggaagagcgaatcaaggatgtgccgctcactggcactgtggctctaagg

SEQ ID NO: 855998 - DNA, 395 bp, Homo sapiens
ttgatttctgtattagtccattctcctgctgctataaagacatacccaagactaggtaatttgtaaaggaaagaggtttaattgactcacagttccacagggttgcggaggcctcaggaaacttacsatcatggtggaaggggaagcagacacgtccttctgcatgtagtggcaggaagtagaagaatgagcaaaagtggggaaagccccttaaaaaaccatcggatctcatgagaactcactcactatgatgagaacagcagcactagggtaaccgcccccatgattcaattacctcccagtgggcccctcccatcacacatgaggattatggggactacaattcaaggtgagatttgggtgggaacacagcaaaaccatatcaatttctttac

SEQ ID NO: 855999 - DNA, 439 bp, Homo sapiens
aaagttctgtgccactggcaatcctgtctgagctggcttgttgtcgtttcctgctaacttttgtcacaggacatgggagtgctaagaggtgcccaagaggatctcctatggttcagacatccgctcatctgccctcatgtgaggtcaccacccagtttccacttgagagtcaggatggagcaccccagtcagtgcagtaagctctttctccacttgttggttcatggcacgagaaacacaaaggagccaggtggcagtctcagcttccagtttaatagaaccactgttgtgtcttctgtcagaatcaaacacctctagacaagcagaacccaaaatmatggggacaaaaagcaaaaactttgcttgtgaattattaagggactagtaagagaaatcactcccttttccaccccttgattcccggacatcttaattcggg

SEQ ID NO: 856000 - DNA, 600 bp, Homo sapiens
agatgttaatcacatccacaaaacaccttcgcagcaacacctaggkcagtgttggattaaaccgttggatactacagcctgccaaggtgacacataggaaagaccatcaacctgatgtagggattttgaatacaggaacatccatggttcttttcagttctgtagttttttgaatgtgagctcattctctgaacgtcttaaagctaagtgctttaaagcatctgcagactgagccttggtttctgttattggaaattctgaaatgtttgagcccaaccctgtgcttagtttgacaggggagaggactcaggtccggaaaggttaactgactctgtagggcccccccccataagcctgtactcaaatctttgctgggagtgagacatcttgtctttcttagagagtgtgatgggttccaaaatgatagtttgctctggccaagtggggaaggaagtactttgtttgaacagaatctcaacttcactgtgagttgttctcattctcctgaacacagggattgtcgtgttttcatttgatgggcaaacattattgagagcacattttctatagagcctgcttcccttcctcacaggaggcaga

SEQ ID NO: 856001 - DNA, 538 bp, Homo sapiens
tggtgcggtggctcacgcctataatcccagcactttgggaggccgatgcgggcagaccacarggtcaggagtttgagaccagcctggccaacatagtgaaaccccgtctctactaaaaatacaaaaatttgctgggcatggtggtgcacacctgtagtcccagctacttgagaggctgaggcacaagaatcgcttgaacccaggaggtggaggtcacggtgagctgagatcacaccactgcactccagcttgggtgacagagtgagacttcatctcaaaaaataaataaataaacaaacaaacaagatccaaaactataaatctactagaagacaacctacagaaaaggcttcattacattggtctggacaatgattttttggacatgactcccaaagcacaggcaacaaaagcacaaatagacaaatgtaattacatcaaattcaaaagctctgcacaacaaaggaaataatcgacagagtaaagagatctatggaatgggataaaatatttgtaaaccatacatctgacaaagaac

SEQ ID NO: 856002 - DNA, 481 bp, Homo sapiens
cgggcagaccacagggtcaggagtttgagaccagcctggccaacatagtgaaaccccgtctctactaaaaatacaaaaatttgctgggcatggtggtgcacacctgtagtcccagctacttgagaggctgaggcacaagaatcgcttgaacccaggaggtggaggtcacggtgagctgagatcacaccactgcactccagcttgggtgacagagtgagacttcatctcaaaaaataaataaataaacaaacaaacaagatccaaaactataaatctactagaagacaacctacagaaaaggcttcattacattggtctggacaatgattttttggacatgactcccaaagcacaggcaacaaaakcacaaatagacaaatgtaattacatcaaattcaaaagctctgcacaacaaaggaaataatcgacagagtaaagagatctatggaatgggataaaatatttgtaaaccatacatctg

SEQ ID NO: 856003 - DNA, 592 bp, Homo sapiens
gcttgagcaatgcggatcctgagagcacttccgggtaggtaattgccccggtcgaacgcctcaccacagcagcgcatggcaggcccccatgagttaaaggaaaaacttatgttggccccagccctaggactaccagatttgacaaacccctttacactctatgtgtcagaaagataaaaaatggcagttggagttttaacccagactgtgcggctctggccaaggccagtggcctatctctcaaaacaactagatggggtttccaaaggctggcccccatgtctaagggccctggcagcaatggccctgttagcacaagaagcagataaactaacccttgggcaaaacctgaatataaaggccttccatactgtggtaactttgatgaataccaaaggacatcattggctaacaaatgctagattaaccaagtaccaaagcttgctatgtgaaaatccccgcataaycactgacgtctgtaacaccctaaatcccgccaccctgctcccagtatcagagagcctggtcaagcataactgtgtagacatgttggactcagtttattctagcagacctgaccttcgggaccagc

SEQ ID NO: 856004 - DNA, 644 bp, Homo sapiens
gtgcttctccgagatcttattcctaggtttggactgcccttacgaattggctcacataacgggccggtgtttgtggctgacttggtacagaagacagcaaaggcattaggaatcacttggaaactacatgccgcctactgacctcagagttctggaaaggtggagcgaatgaatcagactatcaaaaatagtttagggaaagtatgtcaggaaacaggattaaaatggatacaggcccttcctatggtattgtttaaaattagatgcatcccttctaacaggatactccccttatgaaatactgtatcataggcctcctcctatactagggggacttccaggcactccccgagagttaggtgaaattgagttacagtgacagctacgggctttgggaaaaattacacaaacaatctcaacttgggtaaatgagaggtgtcccgtcagcttattctccccagttcaccctttctctccaagtgatcgcatgtggatcaaggactggaacgtagyccctttgcggccacagtggaaaagacctcacaccatcatcctgaccacccccacggctgtaaaggagaaggaatcccagcctggatccaccacagccgtgtgaaacctgcagctgctgaaacttgggaggc

SEQ ID NO: 856005 - DNA, 632 bp, Homo sapiens
ctttttgggatataagggcataaatacatcatcatctaaagttcttctcattctcaataaaagtgcctttaggtatacctaaaaagttaaaagtagatcacacattttaataaggactatgacaagaaaaataagccatattccaaatcatgtaactgaatattgaactgagtgaactagtttctcaaatttttaattttcctcattgaagaccctaaagtaattaatacttaataatctattagttcattcctcaacaactgccaagcaataaagctttagaaatctttcaattccttagtctacataaagatttaagaccagacacataatctagctctcaaagtgaaaattcaacaatgacaaagagcacccaccttctctacatttaaacagcttctatgaatggcccctgaagagcattaactttaagtttggcaactagttataaaacagtatctagttgttttatatgctgtttaaatggtttgggtgcccaatcttttggcttccctgggccatactggaagaactgtcttgggccacacataaaatacaatgacactawtgacagctgatgagctaaaaaaaaaaaaaaaagaaaaaaaaaaaggaggggggcggggtctgtg

SEQ ID NO: 856006 - DNA, 631 bp, Homo sapiens
aattttaaagctccaaaatgatctcctttgactctcggtctcacatccaggtcamattgatgcaagaggtgggttcccatggtcttgggcagatctacccctgtggctttgcaggatatagcctccctcccagctgcttttatgggctggcattgtttgtggcttttccacgtgcacggtgcaagctgttggtggatctactattctggggtctggagtatggcggccctcttctcacagcttcactaggcagtgccccagtagggactctgtgtggaagctctgacctgatatttcccttctgcactgccctagcagagattctccatgaatgccctgcccctgcagcaaacttctgcctgggcatccaggcatttccatgcatcctctgaaatctaggcggaggctctcaaacctcaattcttgacttctgtgtacctgcaggctcaataccacatggaagctgccaaggcttgggacttccaccctctgaagccacagcccatgctgttacattggcccctttcagccgcggctggagtggctgagacacagggcaccaagtccacagcatggggatcctgtgctgggcaacgaaaccactttttcttcctgggtctccgggtctgtg

SEQ ID NO: 856007 - DNA, 634 bp, Homo sapiens
aatgagcccattttaacttgatgaggtctataaagaccctattcaaaaataagatcacattctgaggtcccaggggttaagattccagtgtgttttttggtggggtgggcggcacatagttcaaccaaatggcacagttacattttaacacagcctcctggataggcgccgatgtccactgcatctctggtaggagaatctggggtgtctaaatgtggggatagtccatcctcccctcctgcccctcccaggcctaagatgcgtggtgcatggacagctctcctgggaagctgtttcctctgtgtatcacagagcaaagccagacctcaaaacttcattgaaattaagcaatacatactcccctatctctacagaaacctcatgaaaatggtgctgaataattggttttaaacaagtatcgtcttgaagcaggtctagtatgtctagagagaaggctgtgaacctgaaaccagtgggcagtgacttttttttcaactaaagaaaaagctggtgataaatattaacaatataaaaaatgttccagaaaccaggccagcaaaacctaagcaggaatgtcatggacrgcttcttataaatgcttcgtgttgttgttaatcccagttttaatttctag

SEQ ID NO: 856008 - DNA, 417 bp, Homo sapiens
tcaatgtgagctaaaataagaatataagaatttttagtctaagctttctggccaccaaagtataaagggaatatagaacaatttacataatagtcattatcagagraaaacatatctcaccagtagatgcaagttttctttattgtaaaacaaatgtttacatacttgaaatcctgtctttcaaaggtaatcctggcatttagttcagtgcctgatgaaaagaatgccctgggtaaatatttattggatggatagatccaagatctctcttctagctactttgaaatatatgactattgtcaccctactctgctattgaacattagaatttataccttctctctaactacatgtttttacccattgtccaacccatgcatagctggatagatggaaatggaataaaactctgctaca

SEQ ID NO: 856009 - DNA, 553 bp, Homo sapiens
ggacagatgtctttgttacgctcaaaagcataaaacgaaaagaaagagtgaagaggcaaccaggacctacaacatctgctacgtaagttggcctagggtgaatcctgatcaccacacccacttyctgcctggcttcacgagtgaccagaacatgcccactcacccttcccttacagcatcctctaaagtgagggatagcctcctaatattgcaatattgtgtgaacctggagttttgttatgattctgcccagagtagcattcaggattcaaactcagttgatataacaaagacatctgcagcagacagttacccctccagacatccaaaagtccccactcagagttcaaaagtctgttacctttggttagtatttggtttcagtgcattataaaaaccaacatgatggctttaacaaagcagaagggtttgttctctcatctaagagaccaaagcattggtccccagcaggtctggcacccatagtatcagcgacccaggttccttctcttttcatgctcttttatatgtggccccacagccaacttatgat

SEQ ID NO: 856010 - DNA, 485 bp, Homo sapiens
ctcgccactgccatggagaatgaggtcaagatagcaagatagttgagaagtaaaccatttaaaaaaaattgaattatagattccatcagaagaggaaatgttggaaaagtccaagaagttaaaattagcctaataagcttaataggaaataaagagaaatgaaacaatactaagacaacattaaaaaggaaccacgcataagaaataaaaaatatagtagttgaaggaaagaactcacaaatgtgactaaacagtagaatgaataaaactcaaggacaaattagtgagttggaagttcaaactgaggaagttcttcaaatgagggacaaaaaatagaaaatattagagaaaagccaaaaaaatggagtatttacayacaaatgctaacatccatatgataaggctcagagagtcagaggaataaaatgaaaagaaggaagtatttgaaagaataatgaagctagatttcctagaattcaaaaaga

SEQ ID NO: 856011 - DNA, 402 bp, Homo sapiens
ccaaactcaaagacacctagattttcccctttgttatcttgtagaattttttgagttttgccttttacatttaggtctatgatccagttcaagttaatttttgtgaaaggtataaagatgtgtgtctcaatacatcttttcacatattcagttgttccagcaccatttgttggaaagataattctttctccattggattgtctttactgctttgtcaaagatcagtctactgtatttttatgggtctatttctgggctctctattctgtttcttaggtctatttgcttattttttcaccaataccayactgtcttgattattatagctttatagtaaatcctgaagtcagatagtatcagtcttccagctttattctacttcagcattatgttagctatctg

SEQ ID NO: 856012 - DNA, 402 bp, Homo sapiens
ccaaactcaaagacacctagattttcccctttgttatcttgtagaattttttgagttttgccttttacatttaggtctatgatccagttcaagttaatttttgtgaaaggtataaagatgtgtgtctcaatacatcttttcacatattcagttgttccagcaccatttgttggaaagataattctttctccattggattgtctttactgctttgtcaaagatcagtctactgtatttttatgggtctatttctgggctctctattctgtttcttaggtctatttgcttattttttcaccaataccatactgtcttgattattatagctttatagkaaatcctgaagtcagatagtatcagtcttccagctttattctacttcagcattatgttagctatctg

SEQ ID NO: 856013 - DNA, 588 bp, Homo sapiens
gcttgtcactaacccctgcctgggatcccacagctggcctgatcttgggctgcttttctttccacataaaggtgatgatcagacccacggcccaaagctctgcccgtggggacactttctccctggttggggctgaagtgcagcagcgggccactttcggtgtgtgcccacataccatgctaaccttgccatgaaaccaggccggcctttcctcctacttctgctaggcataattacccatccccctttatggtcatcatgtgagcagacacagacacggtgcgacaggggtagaggggacaggagtccgagccacctgcatgtggccaacatgcaccctctgaccccatctcaggacctactgggtctcaggcctcatgatggtcacttctgggcagcaccatcacctcgcgtccctcgtcagaagctctgtctctgccgggaccccatagcgtcccaggagctgctttttcaaacagagtayaattatctgctgcagatggccccgcctgaccccagaactctcgtatctatgttgtgactttcctcttgggatttgccataaactccacccagcatcttttccca

SEQ ID NO: 856014 - DNA, 519 bp, Homo sapiens
gggtggaggttgtggtgagccaaaaacccaccactgcactccagcctgggaaagaagagctaaactccgtctcaaaaaaaaaaaaaaaaaaaacaaaaattggatracaattcaaatgaattcaaactataaaaactaatttatgtgtagacaaatagcatctttctactgaacaattttgttgcagtctgtaggtggctactcaggtgatcagaagtgaatgtaaagacactgtagtcctaggtttgatcccctaatgtgttcattactttcctgttaataatcatagtcagccatcttgtaagtaacattattggtcaacaattgggataataataaatccatcattagcactggagtccaagatccatttgaatagcaacattttttatctatatcatgggcagtgtaacatgacaaaaacagtaacttctagcaataacttactttcttaaggatttgaataacactaaaactttgttttaaagcaaataaaaaatattctatataatcattacc

SEQ ID NO: 856015 - DNA, 470 bp, Homo sapiens
agtcttttgctgtaaattattttttctgaacctatttaagaatttgatggtcttgaaaatgaaattttcattcatattattactgattatttattcttgattccaggttactatgaaaaccagtactactgattttttaacacattaaaattaagttttacatcccttggtatggcagtgagaaagatgatgaaaaatggacttctttctccctagggttgattttctgatctcagcactttaaacagtcagtgtgaggctgcatcattgctttccagtcttagccttcttttccccttccctctgttccacatgtcaggtctgctgccatagggaacagtccaatttgtgccttacaaaggtaccttttcctgctgtgtcctgcctggatgttcccagtgtcatctgctaggttccctmctgaagccccttcttcctttctttttcctccttcccccttccttcctttc

SEQ ID NO: 856016 - DNA, 588 bp, Homo sapiens
tcatcacggcattctgtggccttgtgttctcttgccagcaaagaatggaacgttcagccccctagacatgccggctgctggattttttaagcaatcatccagcttagataaggggcgtgggctgctggggaatgctgccccaaagcgctgtctccagagcagctgccccaggcatgcttaattccctccctgcccactgtgtgcacccccaagatgcctctcaatatccagacctgcagttccactctgtttgttaggccccccaggagagcgagcctgcagtccgccccagcagaggggaccaggccagggatgcctctttcctctctggagtgttaccttggagtcctgaggccccgtgacaagaccccacacggccgaatcctcagtaacagccctccactgacttggtatccagtgggattcctccctccatcccattctctagggggcagaagcamatctgcccgtcctgtccgcctccccttccatcctgcatcctgtcttctcctctccccgcctcctgctgtgtggcccatgagcccaggagggacccagtctactctgtttacctctcccgctgcccac

SEQ ID NO: 856017 - DNA, 663 bp, Homo sapiens
tatactgttctcagtattcttattgtttattgtcactacsccactgtgcaatgtggaggataggctaatcgcatgtttctcagattagatcaggttaattatatgaactgacttcataagatctttttaaaaaggtactgtatagaatttgtagacctataatttgaagtttcgaatttccctgtgtgattcagaagccctcatttggctgaggcactgatatgagctaattacaccatgaagcttgtattgggaacaaatcatttaccaccctccatcttcatcccagtgtggtgtgtggatctcctccccttgactactaaaagtcttttgaaattataaaacttagagttttcatgtgtgtgaaaagcagttctcaagcaagagctagatgttttgtgcgagttgaagaggcagctagatcgtggtgtacgagacgctcaggaagcacttaactcccgatggaaatatgattcgggaaggcgccaggagcctgtacaaattttccacattcttgagttggggaattctggaagaatcaagagtgctatcccatgaggatttcaagcgcctactattactactattactgcatattaataaatagttttgtgaaaaataaagtgaggcagaaatgccaaattgaaaaggaatctgcacagt

SEQ ID NO: 856018 - DNA, 515 bp, Homo sapiens
tatagcttatttttgaagttggaagaattgctatataggaatcaccataaatcctaaaagactgggcctcaaataagagcytttttcttttatctcaaaataatttaatacaaatactaacaaacgcacctttcttccatggtgatgttttatgtgttaccatatcctagattagaaacccacttatgatagcatctatgagctcagacagaaaggcagggcctgtccttcctccacctgcctaccctggagtcactgccagaggctaaggtggagaaatcactgtggcagagctttcaggatggagtgcctgatgggatacaggggaggaacaactggagagaaaaggaaggaaaaggaaggaaaaagcgactcacaatttaagcacatcctgtgtgccagcaactgtgctaggtgtttatatatatcatcttaaatttcttatcttggctctgaggtaggtgttatttacattttacagatgaggaaataatctcatgtcataatctcaaaca

SEQ ID NO: 856019 - DNA, 623 bp, Homo sapiens
ggtaggtgttatttacattttacagatgaggaaataatctcatgtcataatctcaaayaataaagaattcaagactttgcccagggacactgattaattccttcccggatccagtctttgaatgcagagaccacagggctcacaagatccactcaaggggcttcgggtggggtttggtagaggcaaaggggctggaggaagggaggtgaaggtagtggtgggcctgcccatggcttcttctggaagctggtggcacagcccaactacagactaaagttgaaggacagacgggagggcccaggcccaagctccctggggtagctgaaggaccctaaatccctatataaatgcagtgttcaataagtgtagtaactgtagagattttttttaaaaaccatccagtctagaaaattctagatagtgaaaaagggcctttcctttctaaagatgtagaggttaaaaactgttataggtaaaatatgatctggagaaaataagagaactagacaagtaagggaataataattaagaaaaaagaaagaaggagctttttaagcacaaggattctcaaaaagactagagtgatttgcttctgcatatagctttcgttacttaccagtggt

SEQ ID NO: 856020 - DNA, 531 bp, Homo sapiens
ccacagggtcaaacaacaatcaggagaaggaagcctgcagaccaagggcctggctcccrgttcaggaaatcaaggcacagaaagggtaagtcatctagctagaagtggagcttcatcaaattttcagtgatctttttaagatataacgatgcctctggtcaggccaaaccccggcttcagacaatggttcccaacctcagctaacaattagaatcacctggggagctttccaggcgattcccagccccagagattggaatgggtttggagtggcctggaaatgggaatttttcaaagctccctagagactctgacgtgcagctaaggttgggagcactgctcaaaggtctctactcacataaagaatggaaggatgtcacttctacttctttcatgctgatccgaatattttgttattaaaagaaagtcatgatagcactacatctatcacaaatcttaggtgagttgtttttgttttttttaggtaagtttactcaagcgaaaagagtaaatttttctataattttctga

SEQ ID NO: 856021 - DNA, 615 bp, Homo sapiens
cccccattaattgccaagcaatcaatacatccatttatttgatttcattgtataactgtattgaaaacagtccggggtctggacacctggtccctctggctggccaggtcttggtccttggactaccatctagtctgtgcctcagctgttttgctggctgagaagaagaaaaaagtgatgattttactgtgatatgtttgtgacttttatcacaatgcagtgctcagctcctctgtcaccaaagcctaccttttttctggctcttttttggatcctggagggctgacttaagcaaatccttagtaaaggaaagaacccagcagcctctcctcaaaccagtaggcagcttccatacagcctcacagacaggtggcccaggagtgactttatccacatttttctgctcagaaaaacaaaccaccaaatctaaaaaagagattgaccttgaggtttccaggaacaggacttaaaggggtgtggagaaggggtggggaaggggtaaggaagagatagggaggraggaagggaggaaatgggaggagagagactccatggcaacggcagaggagattgtggcacaggccacaggtgtgtaagccccatagaccttctggg

SEQ ID NO: 856022 - DNA, 668 bp, Homo sapiens
gttttgggcaggttgctccatgacgggcagctgtatcrtcttagaaccggactttccgggagagcctttgggtcactctgggcgtcagctggaaagggctgctcttggagcaagctcactggcccacaggaggagctgccttcttgaactgtcaccctgaagccaaccaaagtctgggcaacgccagctccagtgactgccgctccatctcctaggcaatttgcatcgctgtttctgtttgttaggccttgaccattcctttgttgtcatcctgcgcttccctggccataggccttttcccagccccaccacggcatgcccacctgtgcttggggaggggcggaggaaggagccccagccagccatgtccctgtttcgtgctccagtgaccactgctatgaggactttcccactggctcaggctcagttagtcgagctggtgtgccccgctcttagctgttccccaactctcctagagtgtgctaattctgacccagctctcccaggtggaggatgcttttcaaacatgtccttgggaacctctgcagacccattcccagcccattctccatgattccaggcctggccaggttgaaaacttctgtaaattaaaactcaaataaagagagtatagcttgggcataccttttgcacatgcatatatatgt

SEQ ID NO: 856023 - DNA, 608 bp, Homo sapiens
agctccattttctgtcctaaccactgtttgtactttgcactttccacctgcttctgatatgtgttctcttatcaccatggattccaaaccttacagagcagagctgggtaaaacaaacaaacaaacaaataaacaagccaactcccatcactctgaggaaggaccctgctggccctggggtcccctccatttgtccagggtgggaatgagagaaggatcctagctgactgcctgggttcaaatcctgctttgtgaccttggacaagtttctctacctctctgtgtcttggttttcttaaatggagacagtagtagtacctacacctgatagggttgttgctaggattaaatctgagttgatacaagtgctcagaaccatgagtagtacagagcacatgctccatatgtgttagttgctatcattatcactttcatcattaccattattattttgcaacataaccattttgctcatmatcacatttgtaaaagacagaactggaatctgcgatcttcttaaggcctcaggtgtattattttgagaaatgcatgtaattatgtatctcctttttagaatgagaattgggggcatgttccaaggtggcatg

SEQ ID NO: 856024 - DNA, 637 bp, Homo sapiens
tggatgcatctatgctggtgttttcattagcgaggagcaaaggcctgcttcttggtgargaaaacatcaacaatggtatttccccatctaaaaataaggcttttatctgggcagacaatagggtgaccaataatcccagcttgcccaggacttagggggagatggtgggattttcagttttaaaatcaggacagtcctgggcaaaccagggtgagttggtcacgcagtgattgtcattttgggtgggtggagaaaggagcccctgacaggcaagctggggagacatttggggatagttgaggccaggagaactgcggggcctgccaaggctctccttcaggaggagtggttttgctgtctctggctgcctgtgatgaggaatctcataggcctgtgaggacagggttttgctgtctttataggagctcactgtgatgaggaatctcataggcctgtgaggacagggtttcgctgtctctataggagctcactgtgataaggaatctcataggcctgtgaggacagggtttcgctgtctctataggagctcactgtgatgaggaatctcataggcctgtgaggacagggtttcattgtctctgtaggagctgcctgtaatgaggagtctcatagacct

SEQ ID NO: 856025 - DNA, 413 bp, Homo sapiens
cctaaagctttcaactccatgccacaatatttagtatgctgtttttttttttttwaaaaaaaacctttaaaataagaggagacaattacttcagatttctagatgctgtttaaataggcaggaaaacaagatttgcagcttctttagtcttatatttttgccaaagtaaaaggaacaactaaaataagaggttctgaaggactgctctatgatgaaatattaaaggaattaaatatgtatagtctcaaaggagcatccaaaaaaaaacgagattgtggttcacaagtagataaaatgactccatgaagacttttctttttaaagagcaaggcagagaactaatcatttgcactaattgtgaatgataaggtaagaaataataaatgtatcctgaagttacgtcagctcagctt

SEQ ID NO: 856026 - DNA, 474 bp, Homo sapiens
gcatatataaaaagccacaggggaaaaaaggaatacggactcagcaactcttaggtgctctgagcctcttcccaagccttctggttctgtgagcatttcattgaaagaaaatggaataacagagttttagaagaaaaactgtatttggtcttgcaagagaaaagtatattcatataaaactcagttctcaactatttgccaaggttacttcttttgtttccaacatttaaaaagggtatctagttgtaggtagagaaaacattaagatatgtgaatggaaaaaggtaaaatttctaaaagtatggattcacagtggggtctgatttaaatgtttaaattttttctctttaatttcttctcaccaatcctgaaagacacgacgagataatatctactttcaakaaatcaattaattttatttaaaatccctaagattttaatatagtacatgcaaaacaataatagattttctat

SEQ ID NO: 856027 - DNA, 600 bp, Homo sapiens
tatcttattgtactgtagtcacctgtttcaaccatggtttattgtgggtaactgagcctgtggaaagtgaaatagtggataagggggagggctgttgtactagttttgaaacagcagattacctatttaacctgtctcagaccctagcacatgctcagcccattctcaggattactacaagactcaaatgagacaatgtacctgaatgcagtttgaaagccacaaagcctggtaaacagcacatgaaacttacagggaaaatgcctagcaggtatcccaagacattctcctgggtcagtgtaaagtgtaaaatcttgttattcttcttagctggacatacttcaagagaatggcaagtccaacttagccaggctttagatttgccacaactaacctcactcctattttagatgtcacctcccctcacttagtttaactcctccccactcactgcaaaaattatgttygtatttctgaattcaaataagaatcagcaaaattactatgttttctttccatttaacatggtagcctgtgatttaaaacatacacacataaaccctgacttttctttccatatactcagaacaggttcttctc

SEQ ID NO: 856028 - DNA, 560 bp, Homo sapiens
attctagtgagtgcgaagtggtatatcattgtgcttttgatgtgcatctctctaaactaataacgttgaacatctttttatgtgtttattgactatttgcatatctttgagaaatgtttattcaaatcacttgctcatttgaaattgtgttatttatttaatatgaagttgtgacagttctttatatattctgcatacaattcccttatcagatatatgatttgcaaatattttctctcattgtgtagatgtttttttgttacttacttgatggtttcaattcatagaacaaaaaaatctttaatttttatgaaatccaacatatctactttttctcttgttgcttgtgttttgttgtcatatccaagaaactattgcctgattcaagatcatcaagatttattcctatattttctttcaagagttttatagtttcaagtcttgcatttagatccataatccattttgagttaattttttttcaagatggttttggctattttgtgtccattgaaattttatataaatwtaaggatccgcttgtcaatttccacaaaaaa

SEQ ID NO: 856029 - DNA, 593 bp, Homo sapiens
tgaatcttggactgtcatatcctagctgggtgcctttgagcaattcatggctttttttttgtttgtttgttttttgttctttttttttttttttttgagacagggtctcactctgtttgttgtctaggctagagtgcagtggcacaatctcggctcactgcaacctctgcctcctggattcgagcaattctcctgcctcagcctcccaagtagctggtattacagttgtgcaccaccacacctgggtaattttttagtatttttagtagaaacatggttttgccatgttggccatgctgatctcaaactcctgacctcaagagatccacctaccttggcctcccaaagtgctgggattacaggcatgagccactgtgtctggctgattgttttttcagcaacagttttataatctttaaagttgacatggcaatacttaccttttagcattgcttgcaggattaagtaaaatatactgcacacattgctaaattctgttttctttatcattgcttctcatgtatctggatcatctgaagtgatattaatgagtgtagatttctgggatccsagatctcctggatcagaatata

SEQ ID NO: 856030 - DNA, 626 bp, Homo sapiens
aaatgaaaaggggtaagaaggaggatattcaccctgctctgttcacctctaatttgaaatggagtttctaaaggtcattaattcctcagctttcctgatgtgtggctcttggtgacattcatatttggattccttgaagctaagacctgttgcatcaagaaactatttagatgttccacttcttattctaaagctccagagggaaatactggaagtcatttatttccttgtaaatgttttgtacttagttgcagccatttatggggggagagaaaaaagatagacagagaaaaagagagagaatgattctataaattttatgggaatttttctacaatagagggagagagagaaggagagagagagaatgattctataaattttatggaaattgttctacaatttgaaaatcaccaccaaacacacacacacacagcttttggcaataaaattctgtcttatgtataatcaaatgtctgcacagtggaaccactgtgcatgctgataagtgagttttgactcaractctttttgctattgtcccatagcaagaacaaaatcaccccatggttcaccactagttataactcaggcagaagcacatgcatctctctttactgatcttg

SEQ ID NO: 856031 - DNA, 593 bp, Homo sapiens
  misc_feature 416, 506: n = A,T,C or G
attaacaacaacaaaacaaggtagaaacaaggaggcagatccatcatagctatttacccatatgtcagtatcccagaattctttctccaattattgtgccacagcttaaaatccataatgtagaaataatcaatagaataaacttgtttaggaacaaaatctataagcttcagtattggataattttcaaatatggaaaacaaaattccatattaccaataactttaaaaacttatcaatttatgaattatattttatgttaggttttagcactaaaagaaatgttttaagcaaattttcaatattatgatgcacaggtgaaatgtgttgtgttatggaaattgctataatctatcagagaaagaaagtttgggaagcaaaattggaaacaaactacacagggtatagtaaaactnttcacctttgacctctggtaatagaacatccattacacagcatttgagagctttatttcaagctyttaagcaatgccttatctgtataanacatcatttattctcatcatcatcatttgccagctgttattcaacaacatcaactcctgctaagcttgtttgggtataagaaatgtc

SEQ ID NO: 856032 - DNA, 658 bp, Homo sapiens
tgaaacagaaaaaaaaaggttttgtttattctttacataagaaaggcatagtatagagtgcaggtattgaagaagacaatttaactagtgtggtcattggttgattgttatttcagcccataaatccattccacttatctcttctttatggaactctcccctttcttgcttttattactgccctggcagcaaaccttttggcccagcagaggtaaagttcagaatgagagaaatttctttgattttccctgatgttttcaaaggtgtaagaaatgtcatgcctttcagtgtgcacaagtggcaggcaaaatgtcagagcccagtggagggcctagttcaccccagttattaccaagataacctgacaccaggtgaagaggcccaagaggaatcatcacgctgtccttgggagcccgccatgactccacactgtttggcaggctgtttcagaagataactgtagcatttcctaggactgctgccacagttacatttcctgcttttaagcttacctatcatttctacaaaatcctgtcattgagctagctaataacaaagggygatgtttaaaaggaacactggtctaggagttaggagccctgcgttccagcccagtccttctattaagttactgtgtgatttctaacaagtcatttta

SEQ ID NO: 856033 - DNA, 591 bp, Homo sapiens
taattgatgattactccagaagtgggtatcaggtaggataaaatgtaacactaatgagttcaagaactgagaggccatctacataaggtttagtttctgaamattaatactaaaagtgtggcagggagaaagtgaacaagatgttgaaattataaattcaggatggggcgtgattagaagatatgcagtgaaaacaacctattaagaaatggtaaaatctgatgacatttacaataatggggccctgagttttgaaggagaaagtaggaaaggcaatttggaaacatctgtggaaagcaagaggaattcctacctcaatcttaggcctgtagatcttagatcttagaggtgtatagattatgggaaaaagacaatctatacctgagatgttgcaggcaaaatggttttgggtttagtttcagttagtgtccagaagatgcattttgagaatgtttttggagttgtggggcttgatggcagattctgaattccagagtgtgcaatggaagagcttgggaaggcaatgaaagatgaaagattaggagtagtacagagaatcacttcagtgtaaaaatgagaaatcatatgatg

SEQ ID NO: 856034 - DNA, 571 bp, Homo sapiens
tatgaagatggcataatggtggtttaaagagytctggtgtcaggcagaactggattcaaatttctgcattcaagacttatcagcttttaatagaaccactcagggcctcaatttcctccacagtgaaatggagctggtaataatgacaatatcagagggatgttgtgataattacaaaataacatgtgaaacatatagtatgctctctggtacacaatgcttagtgaaccaaagtaagttcctttcctagccattcattggcattaatctgggaatttccaaaggattaaaaactggaaactcagttccacagtctcacttaccaggtctctccttcttgacattcctgttataatgggaatgaattaattatctcttctatacaaattctataaaattttccaccaagacatttagtagacatagtagcccagaaactctttgaatttaagcagctatatagaccctaaatttcatctcaggtttcaaattttcaggacctagtggagcctgagaaaaataattacacaaataggttttatctcatcaatgcaagcttgattcagtattt

SEQ ID NO: 856035 - DNA, 604 bp, Homo sapiens
agcaattgatggaaactgatgtggtatgaagatggcataatggtggtttaaagagttctggtgtcaggcagaactggattcaaatttctgcattcaagacttawcagcttttaatagaaccactcagggcctcaatttcctccacagtgaaatggagctggtaataatgacaatatcagagggatgttgtgataattacaaaataacatgtgaaacatatagtatgctctctggtacacaatgcttagtgaaccaaagtaagttcctttcctagccattcattggcattaatctgggaatttccaaaggattaaaaactggaaactcagttccacagtctcacttaccaggtctctccttcttgacattcctgttataatgggaatgaattaattatctcttctatacaaattctataaaattttccaccaagacatttagtagacatagtagcccagaaactctttgaatttaagcagctatatagaccctaaatttcatctcaggtttcaaattttcaggacctagtggagcctgagaaaaataattacacaaataggttttatctcatcaatgcaagcttgattcagtatttatgaaaatt

SEQ ID NO: 856036 - DNA, 616 bp, Homo sapiens
atatctaatgtagcccataaagatatatacctactatgtacctatacaaatttaaaataaatagaatacaaagaaataaaartaaaataaataaaaaaagaaatgatacaaaaaagacctaaatgaaacttttaaatgtgagaaatacaacatttaaaatataaatatattggtttagattaatagcagatcatacagttgatatgtttaacaaaggttagacaatgtaaaagaaaagatgggtaaccctaatgacgtaacaatagaaattgtacaaaacatggcacaaaaacaagtgaaacaaaatgctgagtcatgaaaaggcatccatgagtagtgggataataccaaaaaaaatctaatgtatgtacattgtgatttccaggaagggcagggttggggaggaagagaaaaatatttgtggatatggatgttgaaagtattccaaatttaagtatttaaaaagtataacatcaaatatttataaagttctacaaactccgtgaggaataaacataaagaaaatgatgcaaagaaatattataatcaaattgtcaaagatctgtgataaacagataaatattaaaaacatttaaatgggaaagacatagtatgt

SEQ ID NO: 856037 - DNA, 579 bp, Homo sapiens
atgcaatccctatcaaaataccagtgacattctttacagagatagaaaaaacaatcctaattttttttggttccatgtatgaaacctcaaaagactcaaaatagtcaaaactattctaagcaaaaagaacaatactggaggaatcacattacctgacttcaaattatactacagggatatagtaacccaaacagcatggtactggcataaaaacagacacagagaccagtggaacagaataaagaatgcaggaacaaacccacacacctacagtgaactcatttttgacaaaggtgccaagaacatacacaggggaaaagacagtcttttcaataaatggtgcttggaaaactggatatccatatgtagaagaatgaaactagacccctatctgtcaccatatacaaaaatcaaatcaaaatgggttaaagacttaaatctaatacctcaaactatgaaactrctacaagaaaacagtgtgaaaaatttccaggatattggtctgggcaaagatttcttgagcaataccccataagtagaggcaaccaaaacaaacatggacaaatgggatcacatcag

SEQ ID NO: 856038 - DNA, 604 bp, Homo sapiens
acttaacagaaaaactcagttttcattatctcttgaatgtctgctattatgtatggggaatatgcattttagaatttgcaacctaaaaggccgctaaattttaaaattcttctttgagacaaaaaattacatcaatcatctgaaatataattagtactgctaaaattgttattactatctactctcattagagcaaaaaaaaaaaaaaaccctttctgtttgtaatttttttttcatgccattctcctgcctcagcctcccgagtagctgggactacagctgcctgccaccacgcccggctaattttttgtgtttttagtagagacagggtttcaccgtgttagacaggatggtctcaatctcctgatctcgtgatccgccagcctcaacctcccaaagtactgggattacagacatgagccactgcgcccggcctctgtttgtaattttaaatttagtaaataccaagaataaacacctttaaatgtaytgacttaatgcaatgtacaaataaaggttaaaaccacttgaagaaaaagaggtgtggaactcagcgagacaatctaattgaaacaatctaaaactttaatgtcagtgtttcaca

SEQ ID NO: 856039 - DNA, 486 bp, Homo sapiens
tatttacctgaacatttgtgtacaaatggcctttaatatatatccagatagatgacctatccagatatggccttttatatatccagatagatagatagatataaaataagcatcctgttataaaactgccaacacaatgtggcatcaccacagcctagtatgacattccagggatgagcagcttgtgtgaggcagtgcctatccagttagccaccctgctgaggatgtacctcaattagaacttttgtgtgtgtgacattgccttctaaagacattctagcagtgtggtgttggtgtatggtgtgggaaacaccaaagacctttcctaccagaataatttgtaaccctccatgtgagcacacagtgtattcaccatttttgtattgctctaaakaaatacctgggactgagtaattcagaaaaaaaaaagaggtttaattggcttatggttctgcagactgtacagaaagcatagcaccagcacgt

SEQ ID NO: 856040 - DNA, 427 bp, Homo sapiens
atatatacacacacacacacacacacacacacacacacacacacacwattaatatgagatgcccaaaaatccaattgtaaaaaggggcaaaggttgtaaactggtaattcataaaaacaaatgaagagatgcttattggtactatatgctcagtattaagcaaattaaatgagataggatcgtgcatattcaaccaacaaaatatctgaatgtctgaaaataataaatgttaatgagggagtggagaaaatgggaatgctcatactgctgatagagagtaaactggtacaactattgtggcagccaattaatatttagtaaagctgaagatgcatggtccactgtggtacaggccctggagatattatcaaatgtgtacacaaagaaacacgcacaaggatattttctgcgatactgtaatactcaa

SEQ ID NO: 856041 - DNA, 625 bp, Homo sapiens
agcctcccaaagtgctgggattactggtgtgaccgaccgygcctggccaatgtgtatgatttaatagccagcagcaacaggccactaacatgccatctgctaacaggggctctagctattaacatcaacagagctaaaaactcttatgtctgatcccttgcaaatggcgaagacctggctgagaattattatctcatgctttcagagaaaactttgcttgtcctgcactgaaaaatctggctgcaataatcacatggaagaaggtatgtttgttggcatggttcatgggctggcttatgacttctaagcagaagatacaaaataatataaaattcctgcaacatgcacaatgtagctgatattcatgttctctttaaatatcttaacactgacttacatatttaagggtgtggagtctttgagcttgggaagcatcttattactgaggtacaaatgctaaaagagggacatttcttctatctaccgcattttcaatgaaaagatgctgaaggtgaataaacagctctgcaaacccagttttgtttaacttggcaacagcagtaagtaagtatcactggacacagagacactggaatagattcagtctttagtcttattcatcacg

SEQ ID NO: 856042 - DNA, 506 bp, Homo sapiens
agaacctgtctctacaagaaaattttaaaaattagctaggtgcagtgacacatgcctgcagttccagctacttgggaagcttggtcaggaggattatttgaacccaggaggttgaggctgtagtgagccctgattgcacgactgtactcaagcctgggaaagagaataactgcctgtcttttaattaaaaaaaacaaaaaacaaaaaacaaaaacagtaagaattgcttttcatcataacttctttttttccagttagtcatctatgaatgtttttgtaagatattttgtcctaaaaggactgtcaccaacaagcaggtacaccaggatgccatggccccaggctggccttggcattactacttcaagctaaatttcaatttagagaagrtgcaggtcatttctgatgaccaacatctggatctccccttttcttctcctatcacaacaaacagcatatattcccactaattattattattattattctttgagatggaatctcgc

SEQ ID NO: 856043 - DNA, 596 bp, Homo sapiens
gaaaacacaaggaggggcaggactagggcaggagagtagatggagagagctgtgtcccgaaccaacattctygagattcctttgctagtgttttttcttcagggttcactgagaagaggaaggtcagatggggagggacaaaacccaaggaaatgaggctcatttcaaactctaacaacttgatcacaaacaaaatgtatgtagaattacaaataagttattctgttttcaggcatcaaaaatgttatcaatgaaatgttgagatgctaaagcagtgaaatgtgaaacgaagcagtgtcacaggcaactgggcctctcccctggcccatcccaggagggatgaagggtggctgatatgaactctaaggattattctgaaggggccaacaaatgttacaaagaggctcaaaaataaaaatcagaaccatttttccctcattcatccagggcctactcctggccatgttctgtgctttgcactttattcaatttaattcaatttttctcctaagcaatctatttagatactttgtagatgtggaaattggtttagggaagcttacatcattttcttgcagtcatatttctagtaaatt

SEQ ID NO: 856044 - DNA, 619 bp, Homo sapiens
cagtctcagagcaatataaaagcatgtgagaaacaaagaaaaaagaccagagacaaagaaacaagaccwgttatgttaggactttaacccagagctagtgctcctggggccacgcctctcaaaaaacttctgccatttcccacttttccgacctgccccaggcagaggatctagccaccagcagaagaactaagtgagcagattaatgccaggggatgctgctgggtgctgcaggctagtagggtaggtaagtccccatgaaatttcagaaagatttgtaggaggcttacaaaagtacacaaaatacaaacactgttgagttgcaagtgaatcaaatcaagaaagaaaaataatattgagttaagtgcggtccagaagaagcctaaacagaggacattagcatgtgtggattgctacctggagcattagtgatcagaaagagcatagtagaaacgctatgcccacaggaagactgagtgtgaaaatcagaagagccaaacctgtgctaaagaccagagaaagagaaagtaagacaagagtgagaataataatgatacaaaaaaccctccagtactaataattaatattaattaatattgaataaataaaataatattca

SEQ ID NO: 856045 - DNA, 619 bp, Homo sapiens
cagtctcagagcaatataaaagcatgtgagaaacaaagaaaaaagaccagagacaaagaaacaagaccagttatgttaggactttaacccagagctagtgctcctggggccacgcctctcaaaaaacttctgccatttcccacttttccgacctgccccaggcagaggatctagccaccagcagaagaactaagtgagcagattaatgccaggggatgctgctgggtgctgcaggctagtagggtaggtaagtccccatgaaatttcagaaagatttgtaggaggcttacaaaagtacacaaaatacaaacactgttgagttgcaagtgaatcaaatcaagaaagaaaaataatattgagttaagtgcggtccagaagaagcctaaacagaggacattagcatgtgtggattgctacctggagcattagtgatcagaaagagcatagtagaaacgctatgcccacaggaagactgagtgtgaaaatcagaagagccaaacctgtgctaaagaccagagaaagagaaagtaagacaagrgtgagaataataatgatacaaaaaaccctccagtactaataattaatattaattaatattgaataaataaaataatattca

SEQ ID NO: 856046 - DNA, 523 bp, Homo sapiens
gtgcccctaccctagagatctatggaactttgaaccagagagtgatgatttaggatatctggcagaagaaatttctaagcagtaaaatgttcaagaagtgacctggctgcttctagcaacctatgtttgtctttgtgagcaaataagtgatctggaactggaacttatattttaaagggaagcagagtataaaagtggaaaatttgtagcccagccatgtggtagaaaagaaaaacccattttctgggaatgaatccaggcgagttgcagaaatttgcataactaaaaagaagtcaaagttaatggccaagacaatgggaaaaaatgccttgaaggaagcatctcctcctgtcacaggcccagagggctgggagagaagaatggttttgcaggctggrcccagggccctactgtcttgtaaaacctcacaacgctgttccctgcatcccagcagctccagctccagccatggctaaaaggaccccagatacacctcaggctactgctccagagtgtacaaccc

SEQ ID NO: 856047 - DNA, 608 bp, Homo sapiens
ttctattcaggccttcaatggattgcaagaggttcatccactttatagagaataatctgctttactcaaagtccatggatttaaatgtcaatcttatcygaaaacaacctcatgggaacatcagtatattgtttgaccacatatctgggcactgaggccaagcccagttgacacataaaagtaaccctcatacccaccttgagatctgagccaattgagagagagtctcaggtatcaaatagatggagattaacagtagtggtgtttgagtagaggccatggcttggaaacgtgatcaaatggacttcctgctactcaaccttccccatagtaatgaccaatatacagatcgtcacccaggaattttgttatgaggaagagagaaaagtgtgtgcagagggcaggaagaaagcccaagctctgtgcattacacttttctcagtctcattatcccatgtcactaccttcctttggagaagagtgcctgtggaggcacagaggaggctccaagttacttgttacattattctaaaagaagcagaaattccttttaaacaagaccaggcaggtttgtgtggggagagagaggatcactccctaaaatagca

SEQ ID NO: 856048 - DNA, 591 bp, Homo sapiens
gccagctcctggtaaaatgttatccgaayctttttactcaattcatgacaggtttttgggatatattctactttccaggcactgagttaaattctggagaccagaagaccaagacgttgtccctacactgacattttatctaatagtcctgttttcagattccttgccctaagctcttcctattttttgatttctctcctccagttctcattccatatcagagggctcctgtggatgctccatgctctacgggattgcactcttccacctgcctcccatctctccatgtaaagaggcacccaaaggagcttccactctattgactctctggagcgatgttttgcggtggccgctatgactttaccacattccaggacaagcaatttaaacctcatgcctcagatcccccacctggaatgtgagaatgatagtggtattcacctgttagggttaccatgaagatgaaataagtgaatgcctgttagttaactattaagaacagtgcctggcacatgataaatggtgttccatgttgatgttgatgctgatgttctcatccctaagttctccctttcccttttcagccagggc

SEQ ID NO: 856049 - DNA, 589 bp, Homo sapiens
gaatgcacgatgttcctttactcttcctaatcttcatactactgtcagagtaaccagctaactgccctggcttggtcttatctctccctagacttcttcaattctacactgccttttggattttaggaaaaatctaaactcttcagtgcagtttacaagccctacaaatattctcccacatccctttcctgtctctacttctgtaattttgcatgacttcaacttctatccacacagaaccactggttatgggaactatccttggtctctccccctcccttattccgtttcctctccctagaatgtcttctgtttctcatcacattcagatctctgtttaaatgtcatcttgccagagagacctacctggaccatcctatctaaaataggagtctgtctccatcactcttaaccccctcattccgctttatttgtaatcacagcacttttcactgcctgtcattatattatatttttaatgtcctttttctccaatgtactayaattttcatgaaggcagcaactaggtctacctttttcactcctgtacccctattgcctcaaaaccattctggcacattgtagacag

SEQ ID NO: 856050 - DNA, 576 bp, Homo sapiens
aacaaaaaatgcacataaatgacgcgcatgatgcgtatttgtgattttcgtttcagactttttctatattcttttttttccccctttgaatggagagagaactgagagcacttgtaaatcaacctagcatagacaagttaggtaaaacctacaactgacttttggtaagggatcactcaatcctgagagtagataaaaaatagcagcctgggccaggcacggtggctcatgcctgtaatcccatcactttgggaggctgaggcaggcagatcacgaagtcaggagtttgagaccagcctggccaatatggtgaatctccatatctactaaaaatacaaaaattagccagtcatggtggtgcatgcctgtaatcccagctactcaggtagctgaggcaggagaattgcttgaacctgggaggcggaggttgcaatgagccaagattgcaccactgccctccagcctgggcracagagcaagactccatctcaaaatatatatatatagatagatagatagatagatagatagatagatagatagatattgatatagatatagatatgtcagcctgca

SEQ ID NO: 856051 - DNA, 571 bp, Homo sapiens
cagaagagacaacatggaggtaatgaaaacatgacattarcaaacacgggaaaaaggagttcatgaagtctacatgctgtagccaaaggaaaggaagacaggggctttcgagagtcatttcccatggggagccagtttaaagctttaaagttgcaagaaaacgggccaggcaagacgtggctgctgggtcacaggtggagattagtatgggcgaccacacttgtacattttatttcagtggctagacttccttcaccccaacattctttacacggacccaggagatgagaatcagctttctcattagctctcaggcacaaatcaacataaccactattctaaaagctaatatggtgatcaacactcaacctctaggattcactttttttaaattccaaggatgggtgcataaaagatggcccatgggttgtgaatgcgctcagaaaatggatcaaaccacaggaaatgctgcccaaatcctcagttctggaatgcaaaaacttcccacaagggtagtacacataaaactactccaaaaatctccttccacctgccttcacataattagtga

SEQ ID NO: 856052 - DNA, 623 bp, Homo sapiens
agcttttttcctcttcctccagaatatgcacaaaaagcatatttcttagcatcgccttgagattagctataaatccatgactacattccaaaaaaacaaaagaatgtttggctggaatgcagtagactaatttacaggctttgccaaaaagaaccctctccagtgcaaatgtccctgctctttcctcctgcccaatggcttgaatggagataagccctggagcagccttgggatgcacgtgatgaaactgcagtaccacaagatggaaagagcctgggtccctaaattatagggtggaggggacctctatgttctgaactattaattttgtttcaactttattaactgattagatggtttgataagcccctgaaattcgaaaggtttagcaattgtgtattaagtcataccttaactaatataagagatacaatatggtggataaacaccatgaagtattgtgaagaaattaaaggtaataacttgtgtatatatatatatatatatatatatatatatatatatatatatatatatatatwttttattttatatatatataaaatcacggttagatcttaaatatgtagtgcttagtggaaaaaagtgaggaacaatactat

SEQ ID NO: 856053 - DNA, 526 bp, Homo sapiens
attttattcgacaaggtaaattgtctcactatgtgattccaatgaaatccttttcctccttggaacaggttttwaaaaaaaaaaaaatcagcaaaagagaagagtaaaactgttataattaagtttttaaaaaaaaaattatctctggtttttatgttttcatatgaaccctgggagggaaatctgtcttcttgccaatgggatagtacaatattggtgtgaccattggcagtgttgtctattgcttcatttgccatcagggttgatttggctaatcgggttgactaatccttgtttcccctccgtgtgtattttaacagaactagtgggctcagatggacaatctttccaggaaaaggaggccggttctgaaacaagtaaatcagaaagtaaacctccagataattcctacattttgcacttgttgacagaggcgtttctgccctaagatgagttatcatgggaatcttctcctctttctttcctgtctcaatcatgggtttgaattcaaatatcaaaatcctag

SEQ ID NO: 856054 - DNA, 577 bp, Homo sapiens
caggggctgaagatgaggacagagttgttatcagggagcacaagtaaggacataaaggcttctccagaaactgccaaacagcagctagcgctgctctagggatacctatgggtggacagcacaaaagattaatagcactttataacttgaggactccactgtcagttaagcatgtcactttacatctctgtgacttttttcaacttttagaatagacaaataatgagagacttaattataactatagcatagaatgtaaatattattaaccttgacaaaataaagcaggctgggagacagaatcaggaagaatgggaatggtatttccatacaacttacaatgtgcagagtcaaaaggcactgcctcagattaatgagacaagaaaaagaaatagaaaaaaagtgtttagagctggagttgcagaggtgatcaacagtagaagtggaataataagattacaaatacatgtggggggatagtagagtaaacraaatcatcacccacagtaataccaagtcaacagataatatcttaggttgataaataaactgaggtgtaaacattttagacagaggt

SEQ ID NO: 856055 - DNA, 423 bp, Homo sapiens
gttttgtcttataaatgatcagtgggtccagtgtttcatagttgtctgcagaaaaatctttgcattgggtagggatatttgactatatattctaatccgttacataatgatttaacctgttggtgttatgtactaaagcacaggctgtgggggctgacagcttgggactcctatctgctttctgctacttggtatctgtgtgatcttgggcacagtgttcaaaaactctaaacttcagcttctgtatctgcaaaatggtgacaaagatacctcatggtattcaatgagaatttggttaaaaaaaaaaaaaaatatatatatatatatatagagagagagagagagagagagagagagwgtgtgtgtgtgtgtgtgtgtgtacagcacgtagcctgaaaatacagtcattattgtgttagtcaa

SEQ ID NO: 856056 - DNA, 595 bp, Homo sapiens
tgtgtgtcaccgcacacggacataggtgattaggtggttgagacctcacattaaaatgcttgtttagaatatattcatagtggctttaacggaatgtcttgactttcaaagactctataccactaattttgggtgttcgtatttcagctgaccactggtatgttctttgctggagcgctttctcataaagaattttctcctttatgctgcaaaggtggaatgaatttcataaattattttgaggttagatttttcaaatgaataagagagtattgcatttcagagaggccctggagtccctggtgggaagatttctaagtaaatacattggatgatgcaaaaggatgcaggatgattttttgtggctatatgtgtacagtgatttaaggggcttttggttgtgtgtgtgtgtgtgtttgtgtgtgtgttaggggatgctttaaaaatgcagttcctgattaggctgatattatgttattatgtcataatcaacttaatgctagcagagccctcatttcctgtggcattaaatsgaaatatttatttatctttccagaactatttaaacatcatttaaaagaaacaataaatatga

SEQ ID NO: 856057 - DNA, 559 bp, Homo sapiens
gagaggacctttagtcttggatcctgacctccttttaggtgaaacttcctctgaggacaaagtatagtggtcccagtgtccctgtctcatttaaaaagtaaaatactggtagtatagtttgggataagcaaactaagtagtcagattctggcattctgaatcttccttttgcttaggaattgctaaggccgagggttgtctctggctcaacatttgcctgaacgttcagtctcctttcgggtctgtgagggagcaaatgctactgcgggagcctcagggagccctgcccacaccttcctcttcccttccttaaaggtcacgatagctgggttcatcccgtagttggatgtcaagtttgcttttaaaatagattgtaacacttaattcttgctgtcatcctgtaggaaataccacgatccagtggtagcctccaagtatatcaccctgaaaacaattctggtggtctcaaaacagaaagcacagaggcccaattaagatgctcaaatctcatggtttattaartctacgtgaaacacacaagaagaagcaaggggatagg

SEQ ID NO: 856058 - DNA, 559 bp, Homo sapiens
gagaggacctttagtcttggatcctgacctccttttaggtgaaacttcctctgaggacaaagtatagtggtcccagtgtccctgtctcatttaaaaagtaaaatactggtagtatagtttgggataagcaaactaagtagtcagattctggcattctgaatcttccttttgcttaggaattgctaaggccgagggttgtctctggctcaacatttgcctgaacgttcagtctcctttcgggtctgtgagggagcaaatgctactgcgggagcctcagggagccctgcccacaccttcctcttcccttccttaaaggtcacgatagctgggttcatcccgtagttggatgtcaagtttgcttttaaaatagattgtaacacttaattcttgctgtcatcctgtaggaaataccacgatccagtggtagcctccaagtatatcaccctgaaaacaattctggtggtctcaaaacagaaagcacagaggcccaattaagatgctcaaatctcatggtttattaaatcwacgtgaaacacacaagaagaagcaaggggatagg

SEQ ID NO: 856059 - DNA, 479 bp, Homo sapiens
cagatgtatggtttacaaatattttatcccattccatagatctctttactctgtcgattatttcctttgttgtgcagagcttttgaatttgatgtaattacatttgtctatttgtgmttttgttgcctgtgctttgggagtcatgtccaaaaaatcattgtccagaccaatgtaatgaagccttttctgtaggttgtcttctagtagatttatagttttggatcttgtttgtttgtttatttatttattttttgagatgaagtctcactctgtcacccaagctggagtgcagtggtgtgatctcagctcaccgtgacctccacctcctgggttcaagcgattcttgtgcctcagcctctcaagtagctgggactacaggtgtgcaccaccatgcccagcaaatttttgtatttttagtagagacggggtttcactatgttggccaggctggtctcaaactcctgaccctgtggtctgcc

SEQ ID NO: 856060 - DNA, 602 bp, Homo sapiens
ttctctgcctcctgtgaggaagggaagcaggctctatagaaaatgtgctctcaataatgtttgcccatcaaatgaaaacacgacaatccctgtgttcaggagaatgagaacaactcacagtgaagttgagattctgttcaaacaaagtacttccttccccacttggccagagcaaactatcattttggaacccatcacactctctaagaaagacaagatgtctcactcccagcaaagatttgagtacaggcttatgggggggggccctacagagtcagttaacctttccggacctgagtcctctcccctgtcaaactaagcacagggttgggctcaaacatttcagaatttccaataacagaaaccaaggctcagtctgcagatgctttaaagcacttagctttaagacgttcagagaatgagctcacattcaaaaaactacagaactgaaaagaaccatggatgttcctgtattcaaaatccctacatcaggttgatggtctttcctatgtgtcaccttggcaggctgtagtatccaacggtttaatccaacactgmcctaggtgttgctgcgaaggtgttttgtggatgtgattaacatc

SEQ ID NO: 856061 - DNA, 558 bp, Homo sapiens
atgggaagctgtgtgtaaacacaggtagggtttcactgggaaagcctttgcagtttgattctcctgtcacccctaagytcccagctggacagtctagtctaaaaacggcactgctcacgcctgtaatcccagcactttgggaggccatggtgggcagatcagttgatgccaggagttcaagaccagcctggccaacttggcgaaaccctgtctctactaaaaatacaaaaattagtgggacgtggtggtgggtgcctgtaatcccagctacttgggaggctgaggcatgagaatcgcttgaacccaggaggtggaggttgcagtgagccaagatcacgccactgcactccagcgtggacaacagagtaagactctgtcaaaaacaaacaaacaaacaaacaaacaaacagacaaacatctccgacttccctaatgcccaagacagaaggaaggggccagtctagaaatccctactcagagtcggtccagcctgcaggcagcgagaggatttcccctggatcctgagcctatctgtgccttccttgaggcagcgttggt

SEQ ID NO: 856062 - DNA, 413 bp, Homo sapiens
cccgaattaagatgtccgggaatcaaggggtggaaaagggagtgatttctcttactagtcccttaataattcacaagcaaagtttttgctttttgtccccatkattttgggttctgcttgtctagaggtgtttgattctgacagaagacacaacagtggttctattaaactggaagctgagactgccacctggctcctttgtgtttctcgtgccatgaaccaacaagtggagaaagagcttactgcactgactggggtgctccatcctgactctcaagtggaaactgggtggtgacctcacatgagggcagatgagcggatgtctgaaccataggagatcctcttgggcacctcttagcactcccatgtcctgtgacaaaagttagcaggaaacgacaacaagccagctcaga

SEQ ID NO: 856063 - DNA, 476 bp, Homo sapiens
tagtgagagactccatctcaaaaaaaacaaaaacaaaaacaaaacaacacattttacagctatacaaaaattttttttctttatattcttattccatatgcctttctgttttaatttttttatttttaaacttttttgttaaaaactaagacacaaacacatacatgagcctaggcctacacagagtaggatccttaatcccacagtcttccgcctccacatttcaccccactggcaggtctccacacaataacatgcatggagctgtctatgataacaatgctgtcttctggaatacctcccgaaggacatgcctgaggctgttttacagttaactttttaaataagtagaaygagtacactctaaaataactaaaaagtataatatactaaatacataaactaataacatagttgtttattatcattatcgagtattatgtactatacgtaattgtatgtgctatacttttata

SEQ ID NO: 856064 - DNA, 308 bp, Homo sapiens
atgtataaataaaatgcataggaaatcatgtggaaggatataccctaagatattaatagtggttacttatggagatacttggattgtagatacttttactgtcttcatttcagttttctgtagaatcttctaatttttctacggtaaaaatacatttcttgggtactttttttttttcttgagacggagtcttgctctattgctcagggtagagtgcggtgatgtaatcttggctcactgcaacctccgccttccgggttcaagtgattctcctgcctcagcstcctgagtagctcggattacaggtg

SEQ ID NO: 856065 - DNA, 628 bp, Homo sapiens
ccttagagccacagtgccagtgagcggcacatccttgattcgctcttccccggcagctgaaactagactcccttcacagccagccctgtcctgtgactccctgggcagcctygcttggcgttctctgctgtgttagaggtcgttctgcagaaatgggtagctggaacaatgctgcactgtgataaaacccgcctccgacttgctctcccctcttcctcacataagaagggctattctactccagaaaggacataactgacatagcaccagctccgacgtcaaaagagcgaggctgccgcaggagaaaggaaaagagcttctatgcaagccctgggcattcttaagagacagaaaaaaatgttttcatttcctttttctttcttttttttgtggggtggggagggttgggagatagcttctgggctgatacagctctaatctttaaacaaagtactttgacgtggaaattgttttctcctccctgcaagctctcctgaacaatcttccttggcccagtcagcccgcctcctggctgaacacacacacacacgtacatactgagcagatgttccagtgctagtcccaaatggcaaggagaaaagaagactctagggcagcaaagaggatc

SEQ ID NO: 856066 - DNA, 538 bp, Homo sapiens
aaattaaattcagaaaaccataatatattcttatggaaaaagaacaatccaggaatagctaagtcagcttgacaagactaaaggggatcttaccttatgcatgaagacgtatctcaaagttgcaatggtcaaattagaatggcagtggcaaaagaacagacaaataggctgggcgcagtggctcacacctgtaatcccagcactttgggaggccaaggcgggcagatcacaaggtcaagagattgagaccatcctggccaacatggtgagaccctgtctctactaaaaaaaaaaaattagctgggcgtggtggtgcatgtctgcaatcccagctactcgggaggctgagataggagaatcacttgaacctgggaggcagaggttgcagtgagctgacatcgtgccattgcactccagcctgggcgrcgagagcgaaactccgtctcaaaaaacaaacaaacaaaaaacaaaacaaaacaaacaaacaaaaaacagacaaatagcctggtggaatggaatacagactccaaacagatct

SEQ ID NO: 856067 - DNA, 599 bp, Homo sapiens
gtctcaaaaacaaaaaaacaaaatttaaaaaataaattaaaaccaaacactatcttataccyaataaaaaataatatgcaaagtccataaaatgattatatttattgtcatggctacccatgtgcccatgtgtgaagcttctactctgactggctccttttttttttttttttttttttttttttttttttttgagatgaagcctccctctgttgcccagactggagtgcaatggcatggtcttggctcactgcaacttccgcctcgtaggttcaagcaattctcctgcctcagcctcccgagtaggtgggactacaggcacgcaccaccatgcccagctgatttttgtgtttttattagagacagagtttcaccatgttagccaggctggtctcaaactcctgacctcaggtgatccacctgcctcgacctcccaaagtgctgggattacaggcatgagccaccacacctggtcccgactggctcttcaggctctaaactccaccacaatccacaacacaagtaccagtcatggcagagatgggatttgcatctttgagctctgaccacagagcccacaccaataacgactgccctaa

SEQ ID NO: 856068 - DNA, 669 bp, Homo sapiens
tttgcaacaacatggatggaactggagatcattatgttccatgaaataagccaggcacagaaagacaaacagagcatactctcatttatttgtgggatctaaaaatcataacaagtgaattcatgaacataaagagtagaatgatggttcagaggctgggaagggtagtgcaggggagtggggaagggggtgatggttaatgggtacaaaaaaaataggaagaatgagtaagatctactatttgatagcatgacagggttaccgtagtcagtaataacttaactgtgtattttaaaataatttaaagagtgtgattggattgtttataacccaaaggagaaatgcttgaggagatggaaattctccatgatgtgcgtatttcatattgtaggcctgtattaaaatatctcgagtaccccataaatatatacacctcccacgtatccacgaaaattaaaaattaggctgggcgtggtggctcacatctgtaatcccagtgctttgggaggccaaggcgggcggatcacttgaggtcaggagttcgagaccagcctggccaatatggcgamactccgtctctactaaaaaatacaaaaattagccaggcatggtggcacaagcctgtaatcccagctactttggggactgaggtgggaggatcccttgagc

SEQ ID NO: 856069 - DNA, 592 bp, Homo sapiens; identical to SEQ ID NO: 856003

SEQ ID NO: 856070 - DNA, 644 bp, Homo sapiens; identical to SEQ ID NO: 856004

SEQ ID NO: 856071 - DNA, 632 bp, Homo sapiens; identical to SEQ ID NO: 856005

SEQ ID NO: 856072 - DNA, 417 bp, Homo sapiens; identical to SEQ ID NO: 856008

SEQ ID NO: 856073 - DNA, 485 bp, Homo sapiens; identical to SEQ ID NO: 856010

SEQ ID NO: 856074 - DNA, 390 bp, Homo sapiens
acacctagattttcccctttgttatcttgtagaattttttgagttttgccttttacatttaggtctatgatccagttcaagttaatttttgtgaaaggtataaagatgtgtgtctcaatacatcttttcacatattcagttgttccagcaccatttgttggaaagataattctttctccattggattgtctttactgctttgtcaaagatcagtctactgtatttttatgggtctatttctgggctctctattctgtttcttaggtctatttgcttattttttcaccaataccayactgtcttgattattatagctttatagtaaatcctgaagtcagatagtatcagtcttccagctttattctacttcagcattatgttagctatctg

SEQ ID NO: 856075 - DNA, 390 bp, Homo sapiens
acacctagattttcccctttgttatcttgtagaattttttgagttttgccttttacatttaggtctatgatccagttcaagttaatttttgtgaaaggtataaagatgtgtgtctcaatacatcttttcacatattcagttgttccagcaccatttgttggaaagataattctttctccattggattgtctttactgctttgtcaaagatcagtctactgtatttttatgggtctatttctgggctctctattctgtttcttaggtctatttgcttattttttcaccaataccatactgtcttgattattatagctttatagkaaatcctgaagtcagatagtatcagtcttccagctttattctacttcagcattatgttagctatctg

SEQ ID NO: 856076 - DNA, 604 bp, Homo sapiens
ctttactgctttgtcaaagatcagtctactgtatttttatgggtctatttctgggctctctattctgtttcttaggtctatttgcttattttttcaccaataccatactgtcttgattattatagctttatagtaaatcctgaagtcagatagtatcagtcttccagctttattctacttcagcattatgttagctatctgggtcctttgtcttttcacataaacttgagaatcagtttgtcgctattcacaaaataacttgttgggattttggttgagattccattaaatgtatatcaaattgggaagaattaacattttaacactactgagtcttcctatccattaacatggactatccctctatttttttttgatcttttatttctttcattaacgttttatatttctcctcatacaaatcttctacgtattttgttagatttctctctctctctgtcactctgtgctagtgtaaatggtattgtacttttaatttcaaattctaattgttcattcttgatatataggaaagcaattgacttttgtatagtaatsttgtatcgtgcaaccttattaccatttaaaacactaactatttcta

SEQ ID NO: 856077 - DNA, 588 bp, Homo sapiens; identical to SEQ ID NO: 856013

SEQ ID NO: 856078 - DNA, 571 bp, Homo sapiens
gtctcgctctgtctttgaggctggagtgcagtggcccaatcttgactcactgcaacctctgcctcctggtttcaagctattctcctatctcagcctctagagtagctgggattacaggtgcatgccaccacacccagctagtttttgtatttttagtagagatggggtttcgccatattggccaggctggtcttgaactcctgacctcaggtgatctgcccaccttggcctcccaaagtgctgggattacaggcatgagctaccatgcccggcctaaaaatggtagtttggacctactctgtttctgacttggctggttcacctctccttaggcaaccttgtggtcccctgctcctgggaggtcaccatattgatgcttaatttagtgtggacacctgaccggcatggtgcactacagctgagagctcctggactaaagcaatccttctacctcagcctcccaagtagttgggactacaggtgcacaccaccatgyccagtcatttttttttttcatatttaggaaaatttccgaatagatttccagaatttacacaacttggtgagagaa

SEQ ID NO: 856079 - DNA, 465 bp, Homo sapiens
tttgctgtaaattattttttctgaacctatttaagaatttgatggtcttgaaaatgaaattttcattcatattattactgattatttattcttgattccaggttactatgaaaaccagtactactgattttttaacacattaaaattaagttttacatcccttggtatggcagtgagaaagatgatgaaaaatggacttctttctccctagggttgattttctgatctcagcactttaaacagtcagtgtgaggctgcatcattgctttccagtcttagccttcttttccccttccctctgttccacatgtcaggtctgctgccatagggaacagtccaatttgtgccttacaaaggtaccttttcctgctgtgtcctgcctggatgttcccagtgtcatctgctaggttccctmctgaagccccttcttcctttctttttcctccttcccccttccttcctttc

SEQ ID NO: 856080 - DNA, 589 bp, Homo sapiens
tcatcacggcattctgtggccttgtgttctcttgccagcaaagaatggaacgttcagccccctagacatgccggctgctggattttttaagcaatcatccagcttagataaggggcgtgggctgctggggaatgctgccccaaagcgctgtctccagagcagctgccccaggcatgcttaattccctccctgcccactgtgtgcacccccaagatgcctctcaatatccagacctgcagttccactctgtttgttaggccccccaggagagcgagcctgcagtccgccccagcagaggggaccaggccagggatgcctctttcctctctggagtgttaccttggagtcctgaggccccgtgacaagaccccacacggccgaatcctcagtaacagccctccactgacttggtatccagtgggattcctccctccatcccattctctagggggcagaagcamatctgcccgtcctgtccgcctccccttccatcctgcatcctgtcttctcctctccccgcctcctgctgtgtggcccatgagcccaggagggacccagtctactctgtttacctctcccgctgcccact

SEQ ID NO: 856081 - DNA, 661 bp, Homo sapiens
tatactgttctcagtattcttattgtttattgtcactacsccactgtgcaatgtggaggataggctaatcgcatgtttctcagattagatcaggttaattatatgaactgacttcataagatctttttaaaaaggtactgtatagaatttgtagacctataatttgaagtttcgaatttccctgtgtgattcagaagccctcatttggctgaggcactgatatgagctaattacaccatgaagcttgtattgggaacaaatcatttaccaccctccatcttcatcccagtgtggtgtgtggatctcctccccttgactactaaaagtcttttgaaattataaaacttagagttttcatgtgtgtgaaaagcagttctcaagcaagagctagatgttttgtgcgagttgaagaggcagctagatcgtggtgtacgagacgctcaggaagcacttaactcccgatggaaatatgattcgggaaggcgccaggagcctgtacaaattttccacattcttgagttggggaattctggaagaatcaagagtgctatcccatgaggatttcaagcgcctactattactactattactgcatattaataaatagttttgtgaaaaataaagtgaggcagaaatgccaaattgaaaaggaatctgcaca

SEQ ID NO: 856082 - DNA, 505 bp, Homo sapiens
ttttgaagttggaagaattgctatataggaatcaccataaatcctaaaagactgggcctcaaataagagcytttttcttttatctcaaaataatttaatacaaatactaacaaacgcacctttcttccatggtgatgttttatgtgttaccatatcctagattagaaacccacttatgatagcatctatgagctcagacagaaaggcagggcctgtccttcctccacctgcctaccctggagtcactgccagaggctaaggtggagaaatcactgtggcagagctttcaggatggagtgcctgatgggatacaggggaggaacaactggagagaaaaggaaggaaaaggaaggaaaaagcgactcacaatttaagcacatcctgtgtgccagcaactgtgctaggtgtttatatatatcatcttaaatttcttatcttggctctgaggtaggtgttatttacattttacagatgaggaaataatctcatgtcataatctcaaaca

SEQ ID NO: 856083 - DNA, 625 bp, Homo sapiens
gaggtaggtgttatttacattttacagatgaggaaataatctcatgtcataatctcaaayaataaagaattcaagactttgcccagggacactgattaattccttcccggatccagtctttgaatgcagagaccacagggctcacaagatccactcaaggggcttcgggtggggtttggtagaggcaaaggggctggaggaagggaggtgaaggtagtggtgggcctgcccatggcttcttctggaagctggtggcacagcccaactacagactaaagttgaaggacagacgggagggcccaggcccaagctccctggggtagctgaaggaccctaaatccctatataaatgcagtgttcaataagtgtagtaactgtagagattttttttaaaaaccatccagtctagaaaattctagatagtgaaaaagggcctttcctttctaaagatgtagaggttaaaaactgttataggtaaaatatgatctggagaaaataagagaactagacaagtaagggaataataattaagaaaaaagaaagaaggagctttttaagcacaaggattctcaaaaagactagagtgatttgcttctgcatatagctttcgttacttaccagtggt

SEQ ID NO: 856084 - DNA, 533 bp, Homo sapiens
ggccacagggtcaaacaacaatcaggagaaggaagcctgcagaccaagggcctggctcccrgttcaggaaatcaaggcacagaaagggtaagtcatctagctagaagtggagcttcatcaaattttcagtgatctttttaagatataacgatgcctctggtcaggccaaaccccggcttcagacaatggttcccaacctcagctaacaattagaatcacctggggagctttccaggcgattcccagccccagagattggaatgggtttggagtggcctggaaatgggaatttttcaaagctccctagagactctgacgtgcagctaaggttgggagcactgctcaaaggtctctactcacataaagaatggaaggatgtcacttctacttctttcatgctgatccgaatattttgttattaaaagaaagtcatgatagcactacatctatcacaaatcttaggtgagttgtttttgttttttttaggtaagtttactcaagcgaaaagagtaaatttttctataattttctga

SEQ ID NO: 856085 - DNA, 606 bp, Homo sapiens
agctccattttctgtcctaaccactgtttgtactttgcactttccacctgcttctgatatgtgttctcttatcaccatggattccaaaccttacagagcagagctgggtaaaacaaacaaacaaacaaataaacaagccaactcccatcactctgaggaaggaccctgctggccctggggtcccctccatttgtccagggtgggaatgagagaaggatcctagctgactgcctgggttcaaatcctgctttgtgaccttggacaagtttctctacctctctgtgtcttggttttcttaaatggagacagtagtagtacctacacctgatagggttgttgctaggattaaatctgagttgatacaagtgctcagaaccatgagtagtacagagcacatgctccatatgtgttagttgctatcattatcactttcatcattaccattattattttgcaacataaccattttgctcatmatcacatttgtaaaagacagaactggaatctgcgatcttcttaaggcctcaggtgtattattttgagaaatgcatgtaattatgtatctcctttttagaatgagaattgggggcatgttccaaggtggca

SEQ ID NO: 856086 - DNA, 639 bp, Homo sapiens
gatggatgcatctatgctggtgttttcattagcgaggagcaaaggcctgcttcttggtgargaaaacatcaacaatggtatttccccatctaaaaataaggcttttatctgggcagacaatagggtgaccaataatcccagcttgcccaggacttagggggagatggtgggattttcagttttaaaatcaggacagtcctgggcaaaccagggtgagttggtcacgcagtgattgtcattttgggtgggtggagaaaggagcccctgacaggcaagctggggagacatttggggatagttgaggccaggagaactgcggggcctgccaaggctctccttcaggaggagtggttttgctgtctctggctgcctgtgatgaggaatctcataggcctgtgaggacagggttttgctgtctttataggagctcactgtgatgaggaatctcataggcctgtgaggacagggtttcgctgtctctataggagctcactgtgataaggaatctcataggcctgtgaggacagggtttcgctgtctctataggagctcactgtgatgaggaatctcataggcctgtgaggacagggtttcattgtctctgtaggagctgcctgtaatgaggagtctcatagacct

SEQ ID NO: 856087 - DNA, 617 bp, Homo sapiens
ttcccccattaattgccaagcaatcaatacatccatttatttgatttcattgtataactgtattgaaaacagtccggggtctggacacctggtccctctggctggccaggtcttggtccttggactaccatctagtctgtgcctcagctgttttgctggctgagaagaagaaaaaagtgatgattttactgtgatatgtttgtgacttttatcacaatgcagtgctcagctcctctgtcaccaaagcctaccttttttctggctcttttttggatcctggagggctgacttaagcaaatccttagtaaaggaaagaacccagcagcctctcctcaaaccagtaggcagcttccatacagcctcacagacaggtggcccaggagtgactttatccacatttttctgctcagaaaaacaaaccaccaaatctaaaaaagagattgaccttgaggtttccaggaacaggacttaaaggggtgtggagaaggggtggggaaggggtaaggaagagatagggaggraggaagggaggaaatgggaggagagagactccatggcaacggcagaggagattgtggcacaggccacaggtgtgtaagccccatagaccttctggg

SEQ ID NO: 856088 - DNA, 423 bp, Homo sapiens
cctaaagctttcaactccatgccacaatatttagtatgctgtttttttttttttwaaaaaaaacctttaaaataagaggagacaattacttcagatttctagatgctgtttaaataggcaggaaaacaagatttgcagcttctttagtcttatatttttgccaaagtaaaaggaacaactaaaataagaggttctgaaggactgctctatgatgaaatattaaaggaattaaatatgtatagtctcaaaggagcatccaaaaaaaaacgagattgtggttcacaagtagataaaatgactccatgaagacttttctttttaaagagcaaggcagagaactaatcatttgcactaattgtgaatgataaggtaagaaataataaatgtatcctgaagttacgtcagctcagctttaataggtgt

SEQ ID NO: 856089 - DNA, 476 bp, Homo sapiens
cagcatatataaaaagccacaggggaaaaaaggaatacggactcagcaactcttaggtgctctgagcctcttcccaagccttctggttctgtgagcatttcattgaaagaaaatggaataacagagttttagaagaaaaactgtatttggtcttgcaagagaaaagtatattcatataaaactcagttctcaactatttgccaaggttacttcttttgtttccaacatttaaaaagggtatctagttgtaggtagagaaaacattaagatatgtgaatggaaaaaggtaaaatttctaaaagtatggattcacagtggggtctgatttaaatgtttaaattttttctctttaatttcttctcaccaatcctgaaagacacgacgagataatatctactttcaakaaatcaattaattttatttaaaatccctaagattttaatatagtacatgcaaaacaataatagattttctat

SEQ ID NO: 856090 - DNA, 602 bp, Homo sapiens
ttaccattcagctcataggtatataaccaagagaatgaaaacatacgttcactcaataagttgtatatgaatgtaagtagtagcattatttatattaatcagaaaaaatgaaaacaaaccaaatgtctgtcagctggtgaatgggtataaatgtggtatatccatacaacggaatattatgtaacaataaaaagagagaacgtactgatacaagaaaatgcaattttactcctacacaacttctggttaccaggtaaactgctgtgaaattcattgcctatcgacatttgatgtttttgagagccttaagaaaaccacttcttacattttaatgagtcattaaatgacttttcttctttcacacacaaaatctcccattttagtttttactgttttccagtatttgagcttatgtgcccaaagtgtttttttatctaaactcatagaaatataagctgtatttcaagaatgatcattgccaatgagccacaacagaggtaaaaatatactttctaaattatcaggaagactcctacagctgattytataaggaactccctaaaatacataccaatagcttaagagatttgtcagtaaacaac

SEQ ID NO: 856091 - DNA, 623 bp, Homo sapiens
gttagaactgcattaaagcttgttagtattcaaagagccattaaaaacaagatttgagtcaaaaaataactcarggtggattaaagatgtaaatctaagacctgaaatcatacaaattctagaaaaaaaacttaggaaaaacttttctggacattggcctagacaaagaatttaggactaagatcccaaaagcaaatgcaacaaaaatgaagataaataaatgggaccaaattaaacaaaaagcttctgcactacaaaagaaataataaaaaaatattaaacagacaacctacagaataggagaaagagattggtgtaaaagtaattgcagtttttgctatttaaaagtaatggcaaaagccacaattacttttgtaccaacccaatacttgcaagctacagttccaacaaaggaaactaatatacagattctacaagggactaaaacaaatcagcaaggaaaaaatagcaatcccaataaaaagtgagcaaatcacatgaatagacatttctcaaaagaagatatacaagtggccaacaaacatatgaaaaaatattcaacttcattaatcatcagggaaatacaaaatagaatcatgatgagataccaccttaccccagcc

SEQ ID NO: 856092 - DNA, 625 bp, Homo sapiens
atgcaaaacagaggaattaaggtcctcttcttgtgacaccaaggcagagttagagccagcaactggaattgtgtataaatttaaattaaagcaccagcctgcaagctgagttagtggaaagggtaacagatagggtcagttgtaccccctcagtgtgaagatgatctcactgaagaatagaatcatgatgcttcaaatcatttacccactggttggcctccggaagaccgagggcaaatccttctgacaacctttaaaataatgcttcctgttactgccaaacagcaaatggcaacttcaaagcattatgtcatcaaagtctttgctgaccaaaactaaacataaaataaaatttaaatttaaccaaaagtatgaccagttccaaagatttctttcttaaaatttaaggttgttcatgaggaaagtcttaaaaattctgaagttgcaccctagtacattagatatagaagcttcaaaatggaaattggaaggcacacttgcaaagcagatttctaagagggaaggatgattggaaagggaagaaaaagaaacaggacayagcagtgcaaataccgttatcaaagataatgtcagaagcctcagaggcaagtcactaaaaaggaat

SEQ ID NO: 856093 - DNA, 625 bp, Homo sapiens
atgcaaaacagaggaattaaggtcctcttcttgtgacaccaaggcagagttagagccagcaactggaattgtgtataaatttaaattaaagcaccagcctgcaagctgagttagtggaaagggtaacagatagggtcagttgtaccccctcagtgtgaagatgatctcactgaagaatagaatcatgatgcttcaaatcatttacccactggttggcctccggaagaccgagggcaaatccttctgacaacctttaaaataatgcttcctgttactgccaaacagcaaatggcaacttcaaagcattatgtcatcaaagtctttgctgaccaaaactaaacataaaataaaatttaaatttaaccaaaagtatgaccagttccaaagatttctttcttaaaatttaaggttgttcatgaggaaagtcttaaaaattctgaagttgcaccctagtacattagatatagaagcttcaaaatggaaattggaaggcacacttgcaaagcagatttctaagagggaaggatgattggaaagggaagaaaaagaaacaggacacrgcagtgcaaataccgttatcaaagataatgtcagaagcctcagaggcaagtcactaaaaaggaat

SEQ ID NO: 856094 - DNA, 498 bp, Homo sapiens
tcaggtttgtttgtttgttattctcttgctcaggatctgtagggatgattgaatatgtgactttatggtttttgctaactttagagaattctcagattcaatctcatcatatattgcttccagcccattatctctcttttatgctccaggggatccaactcatttttttcaatgttgttttcactctcttctctgtttcctaattttaactctccatatttcactttgtattttgcagttgtagatttacatgtggttcatttttacagttactactttcttgccaaatttttcaacgttttattttattttctggagcatattaagcatagctattttaaaatttagatttgataatatcattatttgaagctcctgtaggtttttctttggtcattaattttggattttgatctatgttgttttgtcacctgcttattttctgttgaataccasacattattagttcgaaaattggagaaataattatacaagttg

SEQ ID NO: 856095 - DNA, 530 bp, Homo sapiens
tctatcatcacagattaattttgtgtgtgccagaatttcatataaacgaaatcatgcagggtgtgctatttggggtctggcttcatctactcagcatcatgtttttgagatgcatgcatgtggcactattagtaatttactccattatattgcattgtatgaaatttttttccaatttctcccttccatctttattgattctcaagattttgcacagaaaactctttggggtctagaagagcagtaattgcatcacagtttccaagacttcaagtttcaaaagcaaatcattaaaaaaaaaaatacagctcctgatttgagttagatacagggacaaaaaagtagcacatacttgaaggttacatggtctacaaatggtggcaatattttccttgggagagtrgttctgttggtatgtattttttaaatactcaaaaggctcaacctcaagcagtaataaacacaagcaaaagtgatttaacccttaaataactcagaaaaacctctctgtacatacaagtgaaacaata

SEQ ID NO: 856096 - DNA, 518 bp, Homo sapiens
tttttgcttcggtagctagtataaatgggattgctttccttttcagattgttctctgttgacatatataaatgctactgatggccaggcatggtggctcatgcctgtaatgcaaaaactttgcaaggccagggtgggaagatttcatgagcttaggagttcaagaacagcctggacaacaaaatgagactttatcactatgaaaatttttttaaaaattagccagctgggactttagtcccagctacttgggaggctgaggtagaaggatcacttgagcctgggatgtctaggcttcagtgagccgtgatcctgctactgcactccagcctgggtgactgagcaagaccctgtctcaaacaaacaaataaacaacaaatgccactgatttttgtatattgattttgtattttgcaacttcaccaaatttgttcactagttctaacagttttttggtggaatctttaagtttttctaaatgtagaatcrtgtcatctgtaaacaagaataatttgactt

SEQ ID NO: 856097 - DNA, 511 bp, Homo sapiens
gcagatactgataaatgttcctattcctctttacaaacttcatcaatccattctaggctgttacttcacattgccactaagagggaaccacaaggatcaggaattacttttgtgaaaatctgaatataatttgggtacctccacaatcacccgcctgagtctccgtaattcttccaatatactgctgagagcagtggaacagaattgtcattgatcttggcacagaccatcctatttcccaagactcattctccctagggttttgttcttacggcattgaggctgctgcatcctttccagtttaaaggccattctcctcaatggaagaaaaagagatgaaatggggcttaagacttgagtaaaaccaactgccttggagtaattgattcccactgggggtctatttcctgctcgtttgtcttatccttccacaacaatatcttctcttgctctctttggcatcttttccaagccagaaattytctgggctttgcacctcctggtaaaagta

SEQ ID NO: 856098 - DNA, 623 bp, Homo sapiens
gttcatccatatgtatgactatatggacactgctttaatacaattctgcaaacaggagcaagatgcaactcacattacgaatctgtaatgtgaattacacattacagaaactgtacctgatttcacactctagcagtatctgatcataagattatcttatacttctctgggctcccagagctcaaagccaacttgctaattaaccctgggctctgctacatacttcagagaggaaagcagagtgaggccgaggtattctacgtggcttgaggatcctaggtactcaaaactctatggttacaagtcctggtcactcctgtttccagaccgcctcatgtaaaactctttcctaatcaattactttgaatgtccacagtgaatacctactttgctaagggaaagaaatacctttgcagatatttctaaaaagggcaaggggaacacatgtcattgtatatatctgcaataatttcagctctgggaaaaaaatcatcccataatatagatacccatcktaatgctgaggggagagcagtggttgaaaaaaaaacaagcaggcaaatagcaaaacagaattttgtaagattgggttccagggagtcattgagcctttttaggccatg

SEQ ID NO: 856099 - DNA, 640 bp, Homo sapiens
tttcactttatttaacctagtgttttctaaactttcttaatcatgaaaactgattttgtaaactgtctattgaaaacctgtgaaagagttagtgtgtcatggtgactaccgcgggaaataatcttaatgaaatgtgctcagttctactcctacagattccatctacttgtaataatcaagtgatcaaggtgtttacttaattggcatttccaaatatcagtgtcatggctggccagctctactctcatctggtattcttccctctctaattgtctgtcttccctcatctaaaactttccatcaaccataaaagtaccacacataatagaccatgaagaaggtaatcactaacgtgacagacgtcatccttggctcctgtacttcttactcaccaagcatggatcagatcagatccaattgagggtgtgtgtgtgtgtgtgtgtgtgtgtgtgtgtgagaaacagagagagagagaaaaaaaaacaatgagagagagagagagagagagagagaaaaacagayggagagagaactgggccatgagaagtataatggtatatatcctccccacctcaaatcccttttcacaggcctgctacaaatgagtcagagaaagaagcaaatatatcactccgtgtta

SEQ ID NO: 856100 - DNA, 529 bp, Homo sapiens
acatggccagaaggaagaaaacaggaacatgaagtcagtgctttcacagctatgaagccgccagggaaaatcccattcttagagtatcagagcctcctgcttgatgagggattctcccctgctgcccagtgactgctgcccaagccgacaggctgcaaagaacttcaagaagtactataggtcaaaagacactttactagatgtcatgagtagaatgcagtgctgtgtctcctcaatttggtttgaatgttgttgctgtttcataataccattttatagagcagtttaaggttcacagcaaaattacgcagaaagcacagagatttcccatatacctcctgccccacacgcacagcctcccgactaccaagatctttcaacagaatggtctgtttgttgcaatcaataaacatatattgacacatcattattacccaaagtccatagttyacattagggttcagtcttggagctgtagattccatggctttggatgaatgtataatgacatgtatctaccatcacagtc

SEQ ID NO: 856101 - DNA, 637 bp, Homo sapiens
ccaatatacaacatatatttgaaaagaatataatgaacacccacgtgcccaccatgtagcataaaaaaattaaaattactcacatagtggaaactatctgtcaacctcttcctcgctgaaatacatccctctttccttccccctggaaagaaaactgccccaaatttgatttcccatgagcaatttttatatcagtttctaaaaatgtgaaagggaacatgctaacttaaagtttaccagaaagccatgcaatgaacatccctctgctgtgcttgaccttggtttccaaacagaagtttctttaaataaaactttaaatgacctcaggttaaatgatgcctcaggtggctggttaaagagaatgaaagaaatcacaaaagaagaaaacggtaaatctgaagtgacaagtgagaggctatatctgaaagggttgaagcattcatggatgaaattgatagattaatagagtattatcattttataaggttaaaagctgtgccaaaaactaaggatactcatccatactgcaagggwctttcctcaaagacacaggctacaaaaataaaaacccaacattcattaaagaagtcataatgactcaaatgccagccagggatgcagcctggaaacagtactc

SEQ ID NO: 856102 - DNA, 631 bp, Homo sapiens
caatctagctttcccttataatttcagtgtgctcaaactacatctcatgcaggtccaaatatttcttcttacctagtccttagtggaattaagaaaatctgatcaccacactgctgactcccccagtccycaaatatctgattatagcctaattcctgacacaaaataaacctaaattcttggcctttaaaaaaaagtcacaacacaaatgaccaagttaatacagatgctatcagggttgtcctggtcccagatcagtgattcttagcagaataggttaagaaaacctttagatttccaatggattgaaagacaaatggctgggcatggtggctcatgcctgtaatcccagcactttgggaggccgaggcaggcggatcatgaggtcagagcatcgagaccatcctggccaacatggtgaaaccccgtctctactaaaaatacaaaaattagctgggtgtggtggcgtgtgcctgtaatcccagctactggggaggctgaggtgggagaatcacttgaaccagggaggcagaggttgcagtgagcagagatcatgccattgcactccagcctggcaacagagtgagactgtttcaaaaaaaaagaaaaaaagacaaatgaagtggtaaac

SEQ ID NO: 856103 - DNA, 598 bp, Homo sapiens
cacacagagagagagaaagagaggaaaatgaatctcaagaccccaaaatcgttaagccaagggagaagtcaagctgggaactacatcaggtaaacctgcctccyattttattactaaataagacagctaaaaagattttaaaaagctacatacctccctcacaatttggaatttcctggtgggcctcaagatctttacccgaaaacagttctgaactgaaagctgatcttcacaggtgcaggaatgaaagtcatccctctgctcacctgagacgaaggcatatctgattgcttcctccaccacactgtttatgtaagaatgcagattcactgaaccagactgaattgtgtaaatttacacaaagaacagaaaactttaaagactgatcaaggactcaaaagaatgcaaccttttgtctcttatctacctatgacctggaagcccctcgcttagagttctcccaccttaccagaccaaaccaatgtacatcttacacatattgattgctgtctcatttctccctaaaatgtataaaagcaacctgtgccccgaccaccttgggcacaggtcatcaggacctcctgaggctgtgtcatgg

SEQ ID NO: 856104 - DNA, 598 bp, Homo sapiens
cacacagagagagagaaagagaggaaaatgaatctcaagaccccaaaatcgttaagccaagggagaagtcaagctgggaactacatcaggtaaacctgcctcctattttattmctaaataagacagctaaaaagattttaaaaagctacatacctccctcacaatttggaatttcctggtgggcctcaagatctttacccgaaaacagttctgaactgaaagctgatcttcacaggtgcaggaatgaaagtcatccctctgctcacctgagacgaaggcatatctgattgcttcctccaccacactgtttatgtaagaatgcagattcactgaaccagactgaattgtgtaaatttacacaaagaacagaaaactttaaagactgatcaaggactcaaaagaatgcaaccttttgtctcttatctacctatgacctggaagcccctcgcttagagttctcccaccttaccagaccaaaccaatgtacatcttacacatattgattgctgtctcatttctccctaaaatgtataaaagcaacctgtgccccgaccaccttgggcacaggtcatcaggacctcctgaggctgtgtcatgg

SEQ ID NO: 856105 - DNA, 629 bp, Homo sapiens; identical to SEQ ID NO: 855995

SEQ ID NO: 856106 - DNA, 554 bp, Homo sapiens; identical to SEQ ID NO: 855994

SEQ ID NO: 856107 - DNA, 604 bp, Homo sapiens; identical to SEQ ID NO: 856038

SEQ ID NO: 856108 - DNA, 486 bp, Homo sapiens; identical to SEQ ID NO: 856039

SEQ ID NO: 856109 - DNA, 427 bp, Homo sapiens; identical to SEQ ID NO: 856040

SEQ ID NO: 856110 - DNA, 500 bp, Homo sapiens
agaacctgtctctacaagaaaattttaaaaattagctaggtgcagtgacacatgcctgcagttccagctacttgggaagcttggtcaggaggattatttgaacccaggaggttgaggctgtagtgagccctgattgcacgactgtactcaagcctgggaaagagaataactgcctgtcttttaattaaaaaaaacaaaaaacaaaaaacaaaaacagtaagaattgcttttcatcataacttctttttttccagttagtcatctatgaatgtttttgtaagatattttgtcctaaaaggactgtcaccaacaagcaggtacaccaggatgccatggccccaggctggccttggcattactacttcaagctaaatttcaatttagagaagrtgcaggtcatttctgatgaccaacatctggatctccccttttcttctcctatcacaacaaacagcatatattcccactaattattattattattattctttgagatggaa

SEQ ID NO: 856111 - DNA, 573 bp, Homo sapiens
tagggcaggagagtagatggagagagctgtgtcccgaaccaacattctygagattcctttgctagtgttttttcttcagggttcactgagaagaggaaggtcagatggggagggacaaaacccaaggaaatgaggctcatttcaaactctaacaacttgatcacaaacaaaatgtatgtagaattacaaataagttattctgttttcaggcatcaaaaatgttatcaatgaaatgttgagatgctaaagcagtgaaatgtgaaacgaagcagtgtcacaggcaactgggcctctcccctggcccatcccaggagggatgaagggtggctgatatgaactctaaggattattctgaaggggccaacaaatgttacaaagaggctcaaaaataaaaatcagaaccatttttccctcattcatccagggcctactcctggccatgttctgtgctttgcactttattcaatttaattcaatttttctcctaagcaatctatttagatactttgtagatgtggaaattggtttagggaagcttacatcattttcttgcagtcatatttctagtaaatt

SEQ ID NO: 856112 - DNA, 669 bp, Homo sapiens
atgagggagaaacctccctttttgactttgaataccactgctgagaattgtgcttctatttcactttgtggaatgcttgaagtgatttttacagaattctttttggaaatgttaatacttgtggaacaaatggcttattgttaaacttggagctggaagacctggatttgaatgcggatattgccagttactagcagtgtgacctcagtttcttcagtaaaacaggatattatcattgtctgacaaagttttttgggcctcagttaaaaaaatgttaagttaaagtcatttcggttcttgaaagtgccaagcaaatgtgaggcactattagtattttgtaaaaagccatttctttaaagggaagacaattcatgaagaaaaaattcaaatgaaagcaaagtaataaataaaattaccgtaagaactgatgagagaattctgattttgtagatggaaatttgtttttgaatttaatgaatatacatatatttactcctttaagtagttattttatgtttcaaaaagattcaaacattttaattgcaaaaagtctttgccttgctttaaaagcaagtttaatttcagggacaatacacctattmattacccaaaccattcctaagcagtaacagccttaagagcctattaatgtaagggggggtgttaagt

SEQ ID NO: 856113 - DNA, 630 bp, Homo sapiens
tatatgtggctaagcttccattgccattctactctccaccatccacgggtgctgttgcattctgcttaggctctgctggcctcrgccaggccatccctccatgaagatgccgtctttttttctttttttgagatggagtctcgctctgtcgcccaggctggagtgcagtggcacgatctcggctcactgcaagctctgcctcccagattcacgccattctcctgcctcagcctcccgagtaactgggacggactacaggcgcccaccaccgcgcccgactcattttttttttttttgtattttcagtagagatggcatttcaccatgttagccaggatgatctcgatctcctgactttgtgatccacctgccttggcctcccaaagtgctgggattacaggcatgagccactgcacctggccttgttatggtgcctttttatttctttgctcctaagaaatagtcctggactttgtgatgctaccttactgtaacatcaatgttaatgcttttaaatattttccacaggtgttaagtcatttattactttactaagtcacagagtgccatacattttatatgaaggatagggatccatttcctcaaattataactgctagtaagacagaa

SEQ ID NO: 856114 - DNA, 360 bp, Homo sapiens
ttctaaagtatcatcttcaaattgttctgttaaacaaggggtgaaagtccagggctacacatttgtcaagtaaattggcagagctattgcagcaaggggatttgacagaaccacacacgtgggtctttgctgattcaagtggcatttattgagttcaagttatttttgttgctgttgttgttgatttttgtaccgtttcacaaagtcagtaagattttaaattaatrtgtgaaacctgcataaagataattttgaacctttcaaagttttagaaaaataaaacatgtcataagtaaattttttcttctctttctctttctcaagacaaatgtcagcattgtaaactgtatctgtctcaat

SEQ ID NO: 856115 - DNA, 472 bp, Homo sapiens
actcttgttccaaaaggaagaaattggccaaatcaaaagggatacaggccccatgcaagtctgaaacccagcagggcagttattaatcyataaagcttcaaaataatctcctttgactccatgtctccatccaggacacacaggggccagaggtgagctcccaaggccttgggaagctccacctttatggcttttcagggttcagccctcatgtttactgtcatgggctgttgttgaatgcctgtggctctcccaggtgcagggtgcaaactgccagtgggtctacaattctggggtctggaggatgatgggtctcttctcactgcaccaccaggcagtgctccagtggggactctatgtgggggatccaaccccacatttcccctccacagtgccctcatagaggttccccatgagggctctgcccatgcagcaggcttctgtctagacatccaggcttttccatacatca

SEQ ID NO: 856116 - DNA, 472 bp, Homo sapiens
actcttgttccaaaaggaagaaattggccaaatcaaaagggatacaggccccatgcaagtctgaaacccagcagggcagttattaatccrtaaagcttcaaaataatctcctttgactccatgtctccatccaggacacacaggggccagaggtgagctcccaaggccttgggaagctccacctttatggcttttcagggttcagccctcatgtttactgtcatgggctgttgttgaatgcctgtggctctcccaggtgcagggtgcaaactgccagtgggtctacaattctggggtctggaggatgatgggtctcttctcactgcaccaccaggcagtgctccagtggggactctatgtgggggatccaaccccacatttcccctccacagtgccctcatagaggttccccatgagggctctgcccatgcagcaggcttctgtctagacatccaggcttttccatacatca

SEQ ID NO: 856117 - DNA, 525 bp, Homo sapiens
acaacttagcttaataggcagacaagattgacaacctaacgtaggagtatttgcctgtaacaatagctgagtcttggccaatcccagtggccattcttcaaccactcatagactgctgactgttcaagttgtgctcaaataaagcaaacgccaacctgtaaccaatccagctgtttctgtacctcacttctgattcctgtatgtcactttactttttttgtctgtaaatttgttctgaccactaggcaccccgggagtctctgtgaatctgctgtgattctggaggctgcctgcttcacaaatcgtttcttcttttttaactcagttaaactccatcaaatttaatttttctgacgttttcttttcacacttaaaagccctacttcatttgcaccactgctgttcaacttccctscccacccctaccgccactatttccaactacctgatcgcctttcttaccattctctctctttttttcttctcccatcctgggctccttgtcattctcaaacatagcaagca

SEQ ID NO: 856118 - DNA, 572 bp, Homo sapiens
ctaatatgcctggtgtctttgtgataatatggacatatggcgacagagggactgggagaatgccacgtgacaacaaaggcagaggctggcccaatgctgcaaaccaccgaagcaaggaagaagcgaggaagacttgaggaaggatcccccacaggtttcagagggagcacagccctcctgccactttaattttgaacttctaggctcaagaattgcgagacaaaattctgttgttttaaggcaccccgtttgtagtactttgctgcagaggccctgagagtccaattcagccctattagctttttcatccggggcaagtgaagatactctctactggatacagatagagatggtagaagataaagctgtgtttctcacgtcctgtgagttatgcatgcaaggtaccagttactcaactgtcctgtggactaaatctctttaagggactaagggagcttamcaggcccctggtaaggaggcctaggcccataggtggtaccaaagcaaaagggacctagcacagtggtgaaaaactccagcataccttctgggaacttgccctgcagatacgg

SEQ ID NO: 856119 - DNA, 654 bp, Homo sapiens
tggattttaaaaagttaaatgaaaaagtcaataaaacataggctggaaaaatatctatcgagttcatgatagtgtttgcttctgggcagtaagagagggaaaggagattggagagggtacaaaggagatttcagccatatctgtatcatcagaaatagttttatttatttcatttaaaaatcagaagcaaatataacaaaatgttaacagttaattctgggtatctgtgtattagtctctgtattttcctaaattataaaaatattttttttttaagtgaagctttagatgccaggcatgatggctcacacctgtaatcctagcacttcaggaggctgaggcgggcagatcacttgaagtcaggagttccaagaccagcctggccaacatgtgaaaccccgtctctacaaaaaaattttaaaaaattactggatgttgtggtgcattcctgtctagctactcaggagtctgaggcaggagaatcacttgaacccaggagatggaggttacagtgagctgagatcacaccactgcattccagcctggtcacaggtgaaactccatctcaactaaaaaaataaaaataaataaattttttttaagtggagctttaaataagayatagaaaggcacatgtatttcatacttcattcc

SEQ ID NO: 856120 - DNA, 555 bp, Homo sapiens
gttagagtgtaggcgctcttggttttatttttaaaaagacttttaccatgtagtgggatctgcaaactgatgtcatgagtagctgttaattctaggaaaaggagaccctctctcagtgtgtgtacagtagaccttagggatgcctcagactgattctgattgagtcatgtgcccacctgtggatttattgctttgacctagaaagtagtgcatttcaattggccagtctcctgggttacagccacacttccaccgtgccgtccattgttgggtggagcactggaactgacagtcctgctgttactgtgagagtgggaacatggtggtctcctaagtgaggggagactagagagatgagcaagagggaatttccacatgtgtgatagagaatgagatagtgaaaagacccttttattgtaattgggtttcagaaactctgagatacctttaatttaagcttcattgaaataacttcagtagggaggtctgaattaagtcttttckcaactaacaggagttacattatgttttatagggttcagggaaaaggatcca

SEQ ID NO: 856121 - DNA, 531 bp, Homo sapiens
caactttctctaagtgaatttttgtcctctcatcttggaacatgagtgatcaggcttcaccaactacactttccctgtccctttgctttcctaaaaaggatattctagaaccctttcaattcatttgtattcctttgccttatttttacatttcctacggttcttaatgaaatagcagactgtgaaccagcgcatagctgtctgggcccatgtccccaatccccaggtgagaaacagtcttcagaagcaacaatttcattgttgctccattggatactattcatccatcacctttcagcaaacaggattccttctccaccgactcttcagctgatatgggtgagccttgttgatcctaacaaaagggatgtgtgtgaagaggaagcacctgacgacaaacaagcaccatctccttccccagtgtgaggaggggtgggaagggcaycgtgtgggcagagggcaccctgtgctgagccccacactgtggcagctcagctgtggaaggggccttggagtcagtgcccacctgtg

SEQ ID NO: 856122 - DNA, 609 bp, Homo sapiens
ttcattcttctgcatatggatgtccagttttcccagcaccatttattgaagagactcttctttccccagtgtaggtccttggcacttttgtcaaaaatgaattcactgtatatgtatggatttatttctgggttctctattctgttccactgtctgtgtgtctgtttttatgccagtaccatgcctttctggtttctacagctctgcagtataatttgaagtcaggtaatgtgattcctccagttttgttctttttggttaagatagttttggcttttctgggtgttttgtgatcccatatgaattataggattgttttttctatttctgtgaagaatgtcatttgtattttgatagggattgcattgaatttgtagattgctttgggtagatgaacatcttaaacaatattgattcttccaatcaatgaacatgaaatatctttccttttggtatgtgtatcctcttcagtttcttacatcaatgttttatagttttcattgtagagatcttttacctttttaattaattcccaggtrtcttattttattcataactattgtaaacataattactttcttgattttttttcagattgttcactgttag

SEQ ID NO: 856123 - DNA, 620 bp, Homo sapiens
aagggtaacatgtttttatccataacccattgttactaacaattttaatatatagattcagttaatctttcatgctgaaaaacctgagattttatttacrtcttatatgagcaatttcattgtgtttctagataattgagtatgctcttttggctagtgggttgacaagcttgtgtgtgcatgtgtgtgtgtgtgtgtttaatgttggcacgtgtgtgtgtgtgtgtgtgtgtgtgtgtgtatcctgtagtaacacatattggccactagagggtaataagaaagcagttcatttgttcttattggctcactgttactaaatagtccttatcattagactttttgcatagtcacagtcattgcttactttcactttaatatatatttatttaacaccttctgtggagccaggcactgcactgtgtgcttgggatataaaaatgagtaagagcagttgactgagcaatagctgtagcctgtgctataagacttttctctgcttttgattcaagaacccctcatttaaaaaatactacattcatccttacctcccgtgcagtcccctccctccctctctcaatgatttcttcacagtctaaatattcctgatggattcagtt

SEQ ID NO: 856124 - DNA, 507 bp, Homo sapiens
tcattgccatagctttcttgggctgctgttgctgaaggaagtgtaacaggtgctgcgggtgcacagttaggtaggaaagaggctcccagccagggtgagcaggggcatgcatgttctctgtaaaagatgagagaaaatgcttttagccttgtggacctctgttgcatattttttgtttttggttgcttgtttttacaacctttgaaaacagaaaaaccatttgtagctggagctgtagaaaaccaggctctggatcaggccatagtttactgacccctgggctaaatgatctttatagccatttttggtctcagaattaatgttgaactgtaactaccatgcatttgggatagtaatgtgtgaaaaggcagaggatttaactatgaagtgtcctttttaataaaggcctcaacatatatatktaaacatatttgaaattcaattatgtgagtgtttacgtattccaccaaatttagagaaagcctttcatcttctctcttacaggag

SEQ ID NO: 856125 - DNA, 598 bp, Homo sapiens
ttgtgtgtacctttaatggcattcaaaaattccactaacatcccatgtgtgaatccattttttacatgttttcaaaatttattttattgatgacatgctgtatgtattttttctattatgaataatgcaatgaactttcttgtgccattttccctatggaacttctgcaaaagtttctctattatttttttacatgtggaactgctggatcaaagagcaaatgttttctttccagaggtattgtaccaaattacccttcaaatctccagaggtaagaagacctcatgctctatatttgcacttatgttgagattgttagtcttcttaatattttccatttgatggttatgaaatgacatttcatactgttttgattcatagtttcttatttagtagctatattgaacatctttttatgtttcttggccttgtattttttttctcttctgaatggtctgttgatatcttttgccttttatttttagttttcagacagggtctcgttctgtcattcaggctggagtgcagtggcgggatcacagctcactgtaaactttgtctcccrggttcaagcaatcctgcctcctcagcctcctga

SEQ ID NO: 856126 - DNA, 619 bp, Homo sapiens
gtgtaaaactaggctgtgccctgactaccttgggcacatgttctcagggtctcctggggctgtgttatgggcagagtttggctcttttcactgacagacattaacattaactgaggtgctttggcttctagccccttggaagctgccgtcctgtaaggaggggcacctggagacttcccgactgggaagagctcacatcttgtggagtttgggggctgcggagacagagcaagacaaggaggctgaggcacccgctgatggtgcttgggtcagagacacatcctctgtgcctgtcctcccaatccctgacctgtaaaataatgagaaaataaaggatgatttgaagccttgaagtgtggggaggctgcctatggagcaaccacatcaccggagcatccagccaagacaaggctgggatgcggatgaggttgtaagatgagctgcccaatagcctggtggatggggatttcagcggctctcccaggcaaagagaggggcatctggcagggcccagtgargactctggcttcctgtgcagcctggtggaggcccccatctcactgcctctgggtgtgagaggggactgagcaagagcaactcactgtccgcttgctgggaa

SEQ ID NO: 856127 - DNA, 596 bp, Homo sapiens
gtgaagatcaatgtagtaaaactgaggaaagaggaaaaacatgttttatagtcttktctttaacattttgcttattttgtgttatttgattcattaatattttaggcacagtaattcctgatttattagtatgtctgcttaaatgagtaaaacatggagtaataaaattttaggttcttagtttttgaaattcagagattgttacgcctgactacttactgtgcctccacagtaaccaacacagtagccccaatggctggaagcgaatttgactctttgcccatatgctataccctcagcttcttaatattgatgggtatcgcacaggtaccaactttgatttattgcaaatctgatttagagtgggtacagagagacttgaaagggctgtgtccatttatgactgaatttttgagagtttattcttcaggaagtacctctggtgccagacatttatatttttaacgatttggatgtattttgctttatgcacagggtgtggttgatatctacaatcgtttttgtgcatcaggaaataaggttattaaaatattattaaaataggtttccacaggcactttgctacatgtgacaaa

SEQ ID NO: 856128 - DNA, 595 bp, Homo sapiens
tttggactatgcagactccactggggtggcatgaggaaktattggtaaaatctggctgttcttgaaatcgagctccttggaagatcgtgataatcaagtgagagatcactgccccaccaaatttgagtacttacagttgatcacacgaaataaaaatgcccaattatgattactaaggaagagatcctatattgctggaattattgtctccccagagtcaagcgccagtgccagggtcagaatgagtactgaacaccagaagacttcctatccaaagtatttgctgagctactaggcatccaggtggtcaagaggacaatgagctaaactgatagtagcaatcaagcctctatctgcttactatgacagtgtgagcaagaggcagaaaaagaagtgccaaccacccccctccccgtgttccatttcccccatggagcagtgccaggtcaagatcagcatggacctgggcaataggaaactgcagaggagtgccagtctaaggtctactgcctctttatggacacagaggctggggagagaagggggacaaggatgttctttagccatggatcctgataaggaggttatggtagag

SEQ ID NO: 856129 - DNA, 522 bp, Homo sapiens
ttcagaagctgaataatgagcaaatccttttttacaatgttttatatttttgaattttaaaatttgttcagcatccygagtcagacaagtaagaatgaaatcaaacgcaaatctggcaacagagatgttttgtgactcatgagtaagccattcaggtacagacaatacctgtcaggcaggttgggtgtgttgctagatcactttctccatgctcaaacacagatatgatgtctcgacacccacataaggtatttcatgctaaaatcaagaaatactgggagttccactgagaccttaactttcaggaaaaataaaatcagtgtactcattgaagagtagctataatcactctttggacacagaaacgttgcactcttttttgaaggttctttcttgaagcagacgtttctttccatttctttttttgtcagaaaatcatttcacaaactgctttgagatttaactaaatttcttatttttttttttttaaagttgagctgggactgggcatggtggctcact

SEQ ID NO: 856130 - DNA, 665 bp, Homo sapiens
gacatgtttaagaaaaagggagaaatttggtgtggctgcagtggaggatttcagagagagcacagcaacayacgaggatggggatgaaagctgggctcagatcaacaaggtccttgagtcttgctaacaaggttggattttcatttttagagatttcagagtaattgaaaatttctaagaaatttttaaaaatcttaaataacaccaatcacagaaaacttggtgatgaaaataaaaggctttattgggaatccaaatacccacattgggattcttattcaaccatttactggacgtaaacgtcaacctctctggaatttgttttatatttttctgtgggtaattaaatgaaatgttaggggaatagaaaagtaaatgagataatggatgtgaaagcactttgccaacaataacatactgcaaaaaaagaatgcatccacacactcgattttgcattgcaaactctgctaaaatggaataagaacaaaatctgttatcacaggggcagcctcctccttaagacacaaaagtccaatttataattttattttaagaaacttttggagatgcttctgtcagatgaatcataagccattgaagataagttgttcattttcagccttccattccaattgttttgaaaacatctgtgtcatcattctaca

SEQ ID NO: 856131 - DNA, 585 bp, Homo sapiens
tataatgcatatacacaatttttttttaagaatcctcaaccaatcttaagaaygtaaaggggtcctgagaccaaaagattaagaatcactgccgtcgaggttttaagcttggctaggacacagtctgtacttactgaagtaacccacagtatgacagtaataagacactttatgaagaacatattttcagtagctaagtgtcatagaaaaggaagcttgttagccatttcctcaagttgacaacagagagtccttaggaaaataattttttaaagccaatattgagccttccaagactgcacatggtgatatgttaaatttggaatttatgcaacttaaaaaactgagagtcgggggttggcatttttgtgcatcctaactgacgagtgctgccccagggctctctaacactgcacacagtctactaaagaagcaggctgcccatcatgacccccacccatcagctacacagcacacatctgcttctagatgaaccttcttgcaagtggcctgtcttatggcaaaatcaaggggcaggcctgtaaagcggaccaggaaatgagcagcaactgcataccaccaacc

SEQ ID NO: 856132 - DNA, 679 bp, Homo sapiens
tatactgttctcagtattcttattgtttattgtcactacsccactgtgcaatgtggaggataggctaatcgcatgtttctcagattagatcaggttaattatatgaactgacttcataagatctttttaaaaaggtactgtatagaatttgtagacctataatttgaagtttcgaatttccctgtgtgattcagaagccctcatttggctgaggcactgatatgagctaattacaccatgaagcttgtattgggaacaaatcatttaccaccctccatcttcatcccagtgtggtgtgtggatctcctccccttgactactaaaagtcttttgaaattataaaacttagagttttcatgtgtgtgaaaagcagttctcaagcaagagctagatgttttgtgcgagttgaagaggcagctagatcgtggtgtacgagacgctcaggaagcacttaactcccgatggaaatatgattcgggaaggcgccaggagcctgtacaaattttccacattcttgagttggggaattctggaagaatcaagagtgctatcccatgaggatttcaagcgcctactattactactattactgcatattaataaatagttttgtgaaaaataaagtgaggcagaaatgccaaattgaaaaggaatctgcacagtttggcattttcttaca

SEQ ID NO: 856133 - DNA, 557 bp, Homo sapiens
gtcaggttccactagctacttcaacttttctgtttcatatatcatagtttttctagatctttccttccctttttcttttctttctcttttatctcagaagaaggaaagaggagtatgtgtcttcatctccctkcagacaagaccctaacctatgtgttggtctcatctgctcctttctcatttggaatctttctccaataattcgtttcacttattcaaattctcccctctactgccttcttctactttatctgcaaatgcctctagctttcccttcatacctcaaacttggcttgtctaaaaatgcagttatgttttacctaacaaaaccagtccatctttccagtgggagaaggttctaagcaactgagaccaaactttggagttatttttgattcatctgccttctctgcatgtctctgcattcagccctcttttccatgaccactgacaaatttagctcaggtccccattatctcacattgggaataccaatgataatgacaattgtttatgaagtgtttactcttggctgggcactgtgctgcatactttag

SEQ ID NO: 856134 - DNA, 515 bp, Homo sapiens
gccaggcttggacaaaggcacccggcctacaccccagcggctccccgccggggcctacgtggactkcagcctccagccacagggacaagagctgctggccagggctgcccgcctgggctcactgcgcctgcgcagtgagcagcgcgccccaggtcttctgcccgggcccactgcgcctgcgcacggagtagtgcactctcgtcggcggcaccggcccactgcgcctgagcacgtagcggtgcatttcgggacctgtagttttccccggcaggacggtagaagtcgtggtttgtgcgcggccaggcgctggagcctccgctgccgggagcagtaagtgtgtgacgtcggggtagaagggagtgacccaaattccaaaagctctttgggatgctgcgatgtcgcggccggccccgcgctcgggttttccctcctagacaaaagtctgccggctcccggtcgcgccgggtcggggatccggaaggtgaaggccgccaggccccacctgcggggcgccc

SEQ ID NO: 856135 - DNA, 511 bp, Homo sapiens
gcttatttttgaagttggaagaattgctatataggaatcaccataaatcctaaaagactgggcctcaaataagagcytttttcttttatctcaaaataatttaatacaaatactaacaaacgcacctttcttccatggtgatgttttatgtgttaccatatcctagattagaaacccacttatgatagcatctatgagctcagacagaaaggcagggcctgtccttcctccacctgcctaccctggagtcactgccagaggctaaggtggagaaatcactgtggcagagctttcaggatggagtgcctgatgggatacaggggaggaacaactggagagaaaaggaaggaaaaggaaggaaaaagcgactcacaatttaagcacatcctgtgtgccagcaactgtgctaggtgtttatatatatcatcttaaatttcttatcttggctctgaggtaggtgttatttacattttacagatgaggaaataatctcatgtcataatctcaaaca

SEQ ID NO: 856136 - DNA, 631 bp, Homo sapiens
ggctctgaggtaggtgttatttacattttacagatgaggaaataatctcatgtcataatctcaaayaataaagaattcaagactttgcccagggacactgattaattccttcccggatccagtctttgaatgcagagaccacagggctcacaagatccactcaaggggcttcgggtggggtttggtagaggcaaaggggctggaggaagggaggtgaaggtagtggtgggcctgcccatggcttcttctggaagctggtggcacagcccaactacagactaaagttgaaggacagacgggagggcccaggcccaagctccctggggtagctgaaggaccctaaatccctatataaatgcagtgttcaataagtgtagtaactgtagagattttttttaaaaaccatccagtctagaaaattctagatagtgaaaaagggcctttcctttctaaagatgtagaggttaaaaactgttataggtaaaatatgatctggagaaaataagagaactagacaagtaagggaataataattaagaaaaaagaaagaaggagctttttaagcacaaggattctcaaaaagactagagtgatttgcttctgcatatagctttcgttacttaccagtggt

SEQ ID NO: 856137 - DNA, 527 bp, Homo sapiens
agggtcaaacaacaatcaggagaaggaagcctgcagaccaagggcctggctcccrgttcaggaaatcaaggcacagaaagggtaagtcatctagctagaagtggagcttcatcaaattttcagtgatctttttaagatataacgatgcctctggtcaggccaaaccccggcttcagacaatggttcccaacctcagctaacaattagaatcacctggggagctttccaggcgattcccagccccagagattggaatgggtttggagtggcctggaaatgggaatttttcaaagctccctagagactctgacgtgcagctaaggttgggagcactgctcaaaggtctctactcacataaagaatggaaggatgtcacttctacttctttcatgctgatccgaatattttgttattaaaagaaagtcatgatagcactacatctatcacaaatcttaggtgagttgtttttgttttttttaggtaagtttactcaagcgaaaagagtaaatttttctataattttctga

SEQ ID NO: 856138 - DNA, 608 bp, Homo sapiens; identical to SEQ ID NO: 856023

SEQ ID NO: 856139 - DNA, 637 bp, Homo sapiens; identical to SEQ ID NO: 856024

SEQ ID NO: 856140 - DNA, 617 bp, Homo sapiens; identical to SEQ ID NO: 856087

SEQ ID NO: 856141 - DNA, 670 bp, Homo sapiens
tggttttgggcaggttgctccatgacgggcagctgtatcrtcttagaaccggactttccgggagagcctttgggtcactctgggcgtcagctggaaagggctgctcttggagcaagctcactggcccacaggaggagctgccttcttgaactgtcaccctgaagccaaccaaagtctgggcaacgccagctccagtgactgccgctccatctcctaggcaatttgcatcgctgtttctgtttgttaggccttgaccattcctttgttgtcatcctgcgcttccctggccataggccttttcccagccccaccacggcatgcccacctgtgcttggggaggggcggaggaaggagccccagccagccatgtccctgtttcgtgctccagtgaccactgctatgaggactttcccactggctcaggctcagttagtcgagctggtgtgccccgctcttagctgttccccaactctcctagagtgtgctaattctgacccagctctcccaggtggaggatgcttttcaaacatgtccttgggaacctctgcagacccattcccagcccattctccatgattccaggcctggccaggttgaaaacttctgtaaattaaaactcaaataaagagagtatagcttgggcataccttttgcacatgcatatatatgt

SEQ ID NO: 856142 - DNA, 476 bp, Homo sapiens; identical to SEQ ID NO: 856089

SEQ ID NO: 856143 - DNA, 423 bp, Homo sapiens; identical to SEQ ID NO: 856088

SEQ ID NO: 856144 - DNA, 403 bp, Homo sapiens
ctgtccctttcttttccagcaaaaccagttccctatgaaacacacctgaygtatttttaaatataagcattatggatcagaaattggaggttctatttttaataggccatgattttaaaatagaatttccaattggttaaacgatactcactctcaaataggaattcctataaacaggtttattttgaaatatagcatataaatttttcaaaaagccatcaatgtttcagtttgctggcaatctaccagttaaaacacagtaatagatcaattcagtgagggagctactggtctaatggtctaagctatggaatccatcctcatcagaagaaataaccaaggagcgggaatgtggggagaggttcacaacagaaaccactgcccctacttgcctgtgttggtt

SEQ ID NO: 856145 - DNA, 595 bp, Homo sapiens; identical to SEQ ID NO: 856056

SEQ ID NO: 856146 - DNA, 479 bp, Homo sapiens; identical to SEQ ID NO: 856059

SEQ ID NO: 856147 - DNA, 602 bp, Homo sapiens; identical to SEQ ID NO: 856060

SEQ ID NO: 856148 - DNA, 558 bp, Homo sapiens; identical to SEQ ID NO: 856061

SEQ ID NO: 856149 - DNA, 413 bp, Homo sapiens; identical to SEQ ID NO: 856062

SEQ ID NO: 856150 - DNA, 476 bp, Homo sapiens; identical to SEQ ID NO: 856063

SEQ ID NO: 856151 - DNA, 308 bp, Homo sapiens; identical to SEQ ID NO: 856064

SEQ ID NO: 856152 - DNA, 628 bp, Homo sapiens; identical to SEQ ID NO: 856065

SEQ ID NO: 856153 - DNA, 538 bp, Homo sapiens; identical to SEQ ID NO: 856066

SEQ ID NO: 856154 - DNA, 599 bp, Homo sapiens; identical to SEQ ID NO: 856067

SEQ ID NO: 856155 - DNA, 669 bp, Homo sapiens; identical to SEQ ID NO: 856068

SEQ ID NO: 856156 - DNA, 592 bp, Homo sapiens; identical to SEQ ID NO: 856003

SEQ ID NO: 856157 - DNA, 644 bp, Homo sapiens; identical to SEQ ID NO: 856004

SEQ ID NO: 856158 - DNA, 632 bp, Homo sapiens; identical to SEQ ID NO: 856005

SEQ ID NO: 856159 - DNA, 417 bp, Homo sapiens; identical to SEQ ID NO: 856008

SEQ ID NO: 856160 - DNA, 485 bp, Homo sapiens; identical to SEQ ID NO: 856010

SEQ ID NO: 856161 - DNA, 390 bp, Homo sapiens; identical to SEQ ID NO: 856074

SEQ ID NO: 856162 - DNA, 390 bp, Homo sapiens; identical to SEQ ID NO: 856075

SEQ ID NO: 856163 - DNA, 604 bp, Homo sapiens; identical to SEQ ID NO: 856076

SEQ ID NO: 856164 - DNA, 465 bp, Homo sapiens; identical to SEQ ID NO: 856079

SEQ ID NO: 856165 - DNA, 589 bp, Homo sapiens; identical to SEQ ID NO: 856080

SEQ ID NO: 856166 - DNA, 478 bp, Homo sapiens
tttgtaagctttgttttacatttctcccatcccttctttgtgaatatttcagagccctctactcaagagggtaggggatgtggctactttgttccctgttttgttgccagcatggtgcctggcaaagaatagacactcaataaatatttggtaatgaatgaatgggtgagactctcatgagtgatgtcctttgttatggaaatcactaggccacatggtcttcttttggaagcaccaagtaggaattctatatttaggttcttggaattgaaataataacacaagtgacattgtacattaatcaattaatggaatatatgtagctgtggccccatgagggagttcttgttaattccattccacaagtggccagggtccactgcyagcctcatgatcccaggtcccgggtcccctctgctaatcttcacttttgggcaccacggtttctctctggttgggtaagtcattccacgaccag

SEQ ID NO: 856167 - DNA, 619 bp, Homo sapiens; identical to SEQ ID NO: 856044

SEQ ID NO: 856168 - DNA, 619 bp, Homo sapiens; identical to SEQ ID NO: 856045

SEQ ID NO: 856169 - DNA, 523 bp, Homo sapiens; identical to SEQ ID NO: 856046

SEQ ID NO: 856170 - DNA, 608 bp, Homo sapiens; identical to SEQ ID NO: 856047

SEQ ID NO: 856171 - DNA, 591 bp, Homo sapiens; identical to SEQ ID NO: 856048

SEQ ID NO: 856172 - DNA, 589 bp, Homo sapiens; identical to SEQ ID NO: 856049

SEQ ID NO: 856173 - DNA, 576 bp, Homo sapiens; identical to SEQ ID NO: 856050

SEQ ID NO: 856174 - DNA, 571 bp, Homo sapiens; identical to SEQ ID NO: 856051

SEQ ID NO: 856175 - DNA, 623 bp, Homo sapiens; identical to SEQ ID NO: 856052

SEQ ID NO: 856176 - DNA, 577 bp, Homo sapiens; identical to SEQ ID NO: 856054

SEQ ID NO: 856177 - DNA, 595 bp, Homo sapiens
ttaccattcagctcataggtatataaccaagagaatgaaaacatacgttcactcaataagttgtatatgaatgtaagtagtagcattatttatattaatcagaaaaaatgaaaacaaaccaaatgtctgtcagctggtgaatgggtataaatgtggtatatccatacaacggaatattatgtaacaataaaaagagagaacgtactgatacaagaaaatgcaattttactcctacacaacttctggttaccaggtaaactgctgtgaaattcattgcctatcgacatttgatgtttttgagagccttaagaaaaccacttcttacattttaatgagtcattaaatgacttttcttctttcacacacaaaatctcccattttagtttttactgttttccagtatttgagcttatgtgcccaaagtgtttttttatctaaactcatagaaatataagctgtatttcaagaatgatcattgccaatgagccacaacagaggtaaaaatatactttctaaattatcaggaagactcctacagctgattytataaggaactccctaaaatacataccaatagcttaagagatttgtcagt

SEQ ID NO: 856178 - DNA, 630 bp, Homo sapiens
atgcaaaacagaggaattaaggtcctcttcttgtgacaccaaggcagagttagagccagcaactggaattgtgtataaatttaaattaaagcaccagcctgcaagctgagttagtggaaagggtaacagatagggtcagttgtaccccctcagtgtgaagatgatctcactgaagaatagaatcatgatgcttcaaatcatttacccactggttggcctccggaagaccgagggcaaatccttctgacaacctttaaaataatgcttcctgttactgccaaacagcaaatggcaacttcaaagcattatgtcatcaaagtctttgctgaccaaaactaaacataaaataaaatttaaatttaaccaaaagtatgaccagttccaaagatttctttcttaaaatttaaggttgttcatgaggaaagtcttaaaaattctgaagttgcaccctagtacattagatatagaagcttcaaaatggaaattggaaggcacacttgcaaagcagatttctaagagggaaggatgattggaaagggaagaaaaagaaacaggacayagcagtgcaaataccgttatcaaagataatgtcagaagcctcagaggcaagtcactaaaaaggaattgaag

SEQ ID NO: 856179 - DNA, 630 bp, Homo sapiens
atgcaaaacagaggaattaaggtcctcttcttgtgacaccaaggcagagttagagccagcaactggaattgtgtataaatttaaattaaagcaccagcctgcaagctgagttagtggaaagggtaacagatagggtcagttgtaccccctcagtgtgaagatgatctcactgaagaatagaatcatgatgcttcaaatcatttacccactggttggcctccggaagaccgagggcaaatccttctgacaacctttaaaataatgcttcctgttactgccaaacagcaaatggcaacttcaaagcattatgtcatcaaagtctttgctgaccaaaactaaacataaaataaaatttaaatttaaccaaaagtatgaccagttccaaagatttctttcttaaaatttaaggttgttcatgaggaaagtcttaaaaattctgaagttgcaccctagtacattagatatagaagcttcaaaatggaaattggaaggcacacttgcaaagcagatttctaagagggaaggatgattggaaagggaagaaaaagaaacaggacacrgcagtgcaaataccgttatcaaagataatgtcagaagcctcagaggcaagtcactaaaaaggaattgaag

SEQ ID NO: 856180 - DNA, 505 bp, Homo sapiens
gacaagctcaggtttgtttgtttgttattctcttgctcaggatctgtagggatgattgaatatgtgactttatggtttttgctaactttagagaattctcagattcaatctcatcatatattgcttccagcccattatctctcttttatgctccaggggatccaactcatttttttcaatgttgttttcactctcttctctgtttcctaattttaactctccatatttcactttgtattttgcagttgtagatttacatgtggttcatttttacagttactactttcttgccaaatttttcaacgttttattttattttctggagcatattaagcatagctattttaaaatttagatttgataatatcattatttgaagctcctgtaggtttttctttggtcattaattttggattttgatctatgttgttttgtcacctgcttattttctgttgaataccasacattattagttcgaaaattggagaaataattatacaagttg

SEQ ID NO: 856181 - DNA, 529 bp, Homo sapiens
tctatcatcacagattaattttgtgtgtgccagaatttcatataaacgaaatcatgcagggtgtgctatttggggtctggcttcatctactcagcatcatgtttttgagatgcatgcatgtggcactattagtaatttactccattatattgcattgtatgaaatttttttccaatttctcccttccatctttattgattctcaagattttgcacagaaaactctttggggtctagaagagcagtaattgcatcacagtttccaagacttcaagtttcaaaagcaaatcattaaaaaaaaaaatacagctcctgatttgagttagatacagggacaaaaaagtagcacatacttgaaggttacatggtctacaaatggtggcaatattttccttgggagagtrgttctgttggtatgtattttttaaatactcaaaaggctcaacctcaagcagtaataaacacaagcaaaagtgatttaacccttaaataactcagaaaaacctctctgtacatacaagtgaaacaat

SEQ ID NO: 856182 - DNA, 519 bp, Homo sapiens
gtttttgcttcggtagctagtataaatgggattgctttccttttcagattgttctctgttgacatatataaatgctactgatggccaggcatggtggctcatgcctgtaatgcaaaaactttgcaaggccagggtgggaagatttcatgagcttaggagttcaagaacagcctggacaacaaaatgagactttatcactatgaaaatttttttaaaaattagccagctgggactttagtcccagctacttgggaggctgaggtagaaggatcacttgagcctgggatgtctaggcttcagtgagccgtgatcctgctactgcactccagcctgggtgactgagcaagaccctgtctcaaacaaacaaataaacaacaaatgccactgatttttgtatattgattttgtattttgcaacttcaccaaatttgttcactagttctaacagttttttggtggaatctttaagtttttctaaatgtagaatcrtgtcatctgtaaacaagaataatttgactt

SEQ ID NO: 856183 - DNA, 512 bp, Homo sapiens
agcagatactgataaatgttcctattcctctttacaaacttcatcaatccattctaggctgttacttcacattgccactaagagggaaccacaaggatcaggaattacttttgtgaaaatctgaatataatttgggtacctccacaatcacccgcctgagtctccgtaattcttccaatatactgctgagagcagtggaacagaattgtcattgatcttggcacagaccatcctatttcccaagactcattctccctagggttttgttcttacggcattgaggctgctgcatcctttccagtttaaaggccattctcctcaatggaagaaaaagagatgaaatggggcttaagacttgagtaaaaccaactgccttggagtaattgattcccactgggggtctatttcctgctcgtttgtcttatccttccacaacaatatcttctcttgctctctttggcatcttttccaagccagaaattytctgggctttgcacctcctggtaaaagta

SEQ ID NO: 856184 - DNA, 622 bp, Homo sapiens
gttcatccatatgtatgactatatggacactgctttaatacaattctgcaaacaggagcaagatgcaactcacattacgaatctgtaatgtgaattacacattacagaaactgtacctgatttcacactctagcagtatctgatcataagattatcttatacttctctgggctcccagagctcaaagccaacttgctaattaaccctgggctctgctacatacttcagagaggaaagcagagtgaggccgaggtattctacgtggcttgaggatcctaggtactcaaaactctatggttacaagtcctggtcactcctgtttccagaccgcctcatgtaaaactctttcctaatcaattactttgaatgtccacagtgaatacctactttgctaagggaaagaaatacctttgcagatatttctaaaaagggcaaggggaacacatgtcattgtatatatctgcaataatttcagctctgggaaaaaaatcatcccataatatagatacccatcktaatgctgaggggagagcagtggttgaaaaaaaaacaagcaggcaaatagcaaaacagaattttgtaagattgggttccagggagtcattgagcctttttaggccat

SEQ ID NO: 856185 - DNA, 642 bp, Homo sapiens
tggatttcactttatttaacctagtgttttctaaactttcttaatcatgaaaactgattttgtaaactgtctattgaaaacctgtgaaagagttagtgtgtcatggtgactaccgcgggaaataatcttaatgaaatgtgctcagttctactcctacagattccatctacttgtaataatcaagtgatcaaggtgtttacttaattggcatttccaaatatcagtgtcatggctggccagctctactctcatctggtattcttccctctctaattgtctgtcttccctcatctaaaactttccatcaaccataaaagtaccacacataatagaccatgaagaaggtaatcactaacgtgacagacgtcatccttggctcctgtacttcttactcaccaagcatggatcagatcagatccaattgagggtgtgtgtgtgtgtgtgtgtgtgtgtgtgtgtgagaaacagagagagagagaaaaaaaaacaatgagagagagagagagagagagagagaaaaacagayggagagagaactgggccatgagaagtataatggtatatatcctccccacctcaaatcccttttcacaggcctgctacaaatgagtcagagaaagaagcaaatatatcactccgtgt

SEQ ID NO: 856186 - DNA, 539 bp, Homo sapiens
catggccagaaggaagaaaacaggaacatgaagtcagtgctttcacagctatgaagccgccagggaaaatcccattcttagagtatcagagcctcctgcttgatgagggattctcccctgctgcccagtgactgctgcccaagccgacaggctgcaaagaacttcaagaagtactataggtcaaaagacactttactagatgtcatgagtagaatgcagtgctgtgtctcctcaatttggtttgaatgttgttgctgtttcataataccattttatagagcagtttaaggttcacagcaaaattacgcagaaagcacagagatttcccatatacctcctgccccacacgcacagcctcccgactaccaagatctttcaacagaatggtctgtttgttgcaatcaataaacatatattgacacatcattattacccaaagtccatagttyacattagggttcagtcttggagctgtagattccatggctttggatgaatgtataatgacatgtatctaccatcacagtctcatacagagt

SEQ ID NO: 856187 - DNA, 635 bp, Homo sapiens
ccaatatacaacatatatttgaaaagaatataatgaacacccacgtgcccaccatgtagcataaaaaaattaaaattactcacatagtggaaactatctgtcaacctcttcctcgctgaaatacatccctctttccttccccctggaaagaaaactgccccaaatttgatttcccatgagcaatttttatatcagtttctaaaaatgtgaaagggaacatgctaacttaaagtttaccagaaagccatgcaatgaacatccctctgctgtgcttgaccttggtttccaaacagaagtttctttaaataaaactttaaatgacctcaggttaaatgatgcctcaggtggctggttaaagagaatgaaagaaatcacaaaagaagaaaacggtaaatctgaagtgacaagtgagaggctatatctgaaagggttgaagcattcatggatgaaattgatagattaatagagtattatcattttataaggttaaaagctgtgccaaaaactaaggatactcatccatactgcaagggwctttcctcaaagacacaggctacaaaaataaaaacccaacattcattaaagaagtcataatgactcaaatgccagccagggatgcagcctggaaacagtac

SEQ ID NO: 856188 - DNA, 619 bp, Homo sapiens
atgcaggtccaaatatttcttcttacctagtccttagtggaattaagaaaatctgatcaccacactgctgactcccccagtccycaaatatctgattatagcctaattcctgacacaaaataaacctaaattcttggcctttaaaaaaaagtcacaacacaaatgaccaagttaatacagatgctatcagggttgtcctggtcccagatcagtgattcttagcagaataggttaagaaaacctttagatttccaatggattgaaagacaaatggctgggcatggtggctcatgcctgtaatcccagcactttgggaggccgaggcaggcggatcatgaggtcagagcatcgagaccatcctggccaacatggtgaaaccccgtctctactaaaaatacaaaaattagctgggtgtggtggcgtgtgcctgtaatcccagctactggggaggctgaggtgggagaatcacttgaaccagggaggcagaggttgcagtgagcagagatcatgccattgcactccagcctggcaacagagtgagactgtttcaaaaaaaaagaaaaaaagacaaatgaagtggtaaactgtccactttaattagttgcaaaggaaaacatgc

SEQ ID NO: 856189 - DNA, 588 bp, Homo sapiens
gagagaaagagaggaaaatgaatctcaagaccccaaaatcgttaagccaagggagaagtcaagctgggaactacatcaggtaaacctgcctccyattttattactaaataagacagctaaaaagattttaaaaagctacatacctccctcacaatttggaatttcctggtgggcctcaagatctttacccgaaaacagttctgaactgaaagctgatcttcacaggtgcaggaatgaaagtcatccctctgctcacctgagacgaaggcatatctgattgcttcctccaccacactgtttatgtaagaatgcagattcactgaaccagactgaattgtgtaaatttacacaaagaacagaaaactttaaagactgatcaaggactcaaaagaatgcaaccttttgtctcttatctacctatgacctggaagcccctcgcttagagttctcccaccttaccagaccaaaccaatgtacatcttacacatattgattgctgtctcatttctccctaaaatgtataaaagcaacctgtgccccgaccaccttgggcacaggtcatcaggacctcctgaggctgtgtcatgg

SEQ ID NO: 856190 - DNA, 588 bp, Homo sapiens
gagagaaagagaggaaaatgaatctcaagaccccaaaatcgttaagccaagggagaagtcaagctgggaactacatcaggtaaacctgcctcctattttattmctaaataagacagctaaaaagattttaaaaagctacatacctccctcacaatttggaatttcctggtgggcctcaagatctttacccgaaaacagttctgaactgaaagctgatcttcacaggtgcaggaatgaaagtcatccctctgctcacctgagacgaaggcatatctgattgcttcctccaccacactgtttatgtaagaatgcagattcactgaaccagactgaattgtgtaaatttacacaaagaacagaaaactttaaagactgatcaaggactcaaaagaatgcaaccttttgtctcttatctacctatgacctggaagcccctcgcttagagttctcccaccttaccagaccaaaccaatgtacatcttacacatattgattgctgtctcatttctccctaaaatgtataaaagcaacctgtgccccgaccaccttgggcacaggtcatcaggacctcctgaggctgtgtcatgg

SEQ ID NO: 856191 - DNA, 401 bp, Homo sapiens
accacatgaactgtagcctgaaatgtgattgatatttgtatttgaaaaagggtgtgggactagtgagaagtcaagacatgggatgagaaaacagggtcctggccagacacggtggctcacgcctgtactgccagcactttggaaggctgaggcaggtggatcacctgaggtcaagagttcgagaccagcctggccaacatggtgaaaccccatctctactaaaattataaaaattagccaggcgtgatggcgggtgcctggaatcccagctacttgggaggctgaggcaggagaattgcttgaacccgggaggcggrggttgcagtgagccgagatcatgccactgcactccagcctgggctacagagcgagactccatcaaaagaagaaagaaaagaaaa

SEQ ID NO: 856192 - DNA, 615 bp, Homo sapiens
ctgtctagcaatctccaggtcatgcccatgcattctgtgattttcccccctgcaatctcactgtcaatctggcattttaaatatttatgcccacaaataactgcaattcattgtcttayacgtttactttagattgcttctctggacatctaaaactttccaaggtaattatcatgaagcactggattaaaacccaataccaggccaggtgcagtggctcacgcctgtaatgccaactctatgggaggtcgaggtgggcggatcatttgaggtcaggagttcgagaccagcctggccaacatggtgaaaccccgtgtctattgaaaatgcaaaaattagccgggcaaggtggcacgcgcctgtagtcccagctactcgggagactgaaggaggagagtggcttgaacctgggaggcagaggttgcagtgacccaagattgcatcactacactccagcctgggctacagagactccacctcaaaaaataaataaaaaaaaacataataccaaagatgctcagttaagacctatatgatttattaagtttcacaggaaaagttctacttaattctgtaattcatagatcccataatcagttaagtatttcacttgtg

SEQ ID NO: 856193 - DNA, 556 bp, Homo sapiens
agacatatggaaaacaaatagcaggttgggtatggtggctcatgcctgcaatgctagtattttgggaggctgaggtgagaagattgcttgagctcaggaattcaagaccagactgggcaacataatgagaccccatctctataaaattatacaaagaaaaattagtggggtgtagtggtgtttgcctgtagtcctagctacttgggaggctaagatgggaagatctcttgagcccaggagttcgaggctgcagtgagctgtgatcacgtcactgcactttagcctgggctatagaatgagaccctgcttctaaaataataaaaaataaaaaaaaaaaagaaaagtaaattaagcaacaacaaaagaaaacaaatagcaaatggtaaatgtaaatccaaacttattaattacattaaatgtgaatggtctaaacattccaataaaaaacaagatatttggattggataaaaaaggcaaaatctaactataggcagyctgcaagagttacaccttaggttcaaagacacaaataggtggaaagtaaaaacatggaaaa

SEQ ID NO: 856194 - DNA, 633 bp, Homo sapiens
ccctagacacgtcacaaccccaggctctcagcaccgtccgtcgtctgctgggactgggcttagtcgtgtgtttctgtctgggagactgtactgaagrcagaattcctagagaatcacccacatgtcactcagaagtattcttctcaggcttcagaaatttgctttagccaatgttgttttaaaagatgggcgttttaccccgaattgaagtgacttcattttcggtgggttttgactgaatcaccatcaggagatgcacgtgtcatgcaccagcctctgaggtgcgggggtgtccccgtgtctgtcctgtttgcatccttagctctccggaaggaagtggaggatctgaccaaagaacagtcggagaccaggaagcaggctgagaaggaccgctcagccctgctctcccagatgaagattttggagtctgagttagaagaacagctgtctcagcatcgcgggtgtgccaagcaggcggaggccgtcactgccctggaacagcaggtggcatctctggacaagcatttgcgcaaccagcggcaattcatggatgtaagaattctgaataatacatttttttgcatcactaaaagttgccgttacagcatgaacttctttccagatcgttacgta

SEQ ID NO: 856195 - DNA, 624 bp, Homo sapiens
tccctagggcagcaccccagggctgtgagaggcgtgaagctattgggctgttggtggcttgctcttctcaaggaggtgacttgagtaagtggctactcactgtttctcttcccactggcatgatgggaaaaaaatcttaagaacaaatttttttttaaatttttgtgagtacatagtaggtgtatattaaaaaatctatttttaaatcttttattttaatgtagccgtgcttttgaagcaaaaaagaaaaccaaaaccaacctgtttatagtagagatgatattcaaaattgcagagcattcataacttcacagatgcccttgaaagaccttgtgtagaatcgtgtgtgtggtgcccacacaacacgtgctcagtgaatgaacacagcgtgggagaattagtgtgtgtggtgcccacgcggcgcgtgctcggtgaatgaacacagcgtgggagaatcgtgtgtgtgtggtgcccacgcggcgcatgctcggtgaatgaacacagcgtgggagaattgtgtgtgtggtgcccacgcagcgcgtgctcggtgaatgaacacagcktgggagaattgtgtgtgtgtggtgcccacgcggcgcgtgctcggtgaatgaacacagcgtg

SEQ ID NO: 856196 - DNA, 625 bp, Homo sapiens
ttgtatattcagtggcggaagcgcattcaccatgttgtatattcagtggcggaagcgcattcacagtgttgtatattcagtgatggaagtgcattcacagtgctgtgcattcagcagcggaagcgcattcatggtgtgcgttcagtggcagaagcgcattcacggtgttgtgcattcagtggcggaagcgcattcacagtgttgtgtattcagtggcggaagcgcattcacagtgttgtatattcagtgatggaagcgcattcacagtgctgtgcattcagcagcggaagcgcattcacggtgttgtgcgttcagtggcagaagcgcattcacggtgttgtgcgttcagtggcggaagcgcattcaccatgttgtatattcagtgacggaagcgcattcacggtgttgtgcattcagtggcagaagcgcattcacagtgttgtgcgttcagtggcagaagcgcattcacagtgttgtatattcagtggcggaagcgcattcaccatgttgtatattcagtggcggaagcgcattcacagtgttgtatattsagtgatggaagcacattcacagtgctgtgcattcagcagcggaagcgcattcacagtgttgtatattcagtggc

SEQ ID NO: 856197 - DNA, 587 bp, Homo sapiens
actcacttcttcccattggaattcastaagaacaaattcaacaattcagacgccccagctggaggtttattttatggattttacctgtgcggtatttagggttgtgtttatgaataaaggtgtgcgttctggcaagtagaaatacagagcttgtctttcacccaagtatctgtaactttctccaatgcagacactaaaatgcaataaaaacaaaccaaacccattaaacatgaattagatgaggcaggctgatgggaggttgtgggattaacaggccgtcagcggattgaagctgcgcacatcgctgggatgctgctgcgggaggattcggtctaatccgggagcatctggctgggcagtgggcagcgtctgcagtcgtggctgcttgaaggtatgaaggttgtggcctttgcttccccccatcaggctgccccaccctggaccccacccagacccctcgggcaccctggggtcatcttcagctcccccttctcttccttccttctcttccgcctgggcccctactgtgacccgaggtcagcagaggaccctggcaggtggctgctccctgggactcgactgtgcag

SEQ ID NO: 856198 - DNA, 609 bp, Homo sapiens
tctcacggggcgtggagggcgcagtcccgtctctcgcggggcttcatgtaccagaccgtgttcatgttcacacctgggaggaggggaagcaggcatggtctgtgcggcaggtccagccaacccacagggccttggatgagtctctgcagctgaggctggcactgccagggctgaccccaaggctgtggctaaattgggctcccagcactggccctgtgtcctccgtgaggagatctgcaccccaggtctatgcatggactgtccccacccccaggccccaagctcagctcccttcaacctgtgtgtcctcagggcaccttcactccatccacctgggtctccccatcttagtgaccgtctccactgtgggtgccaggaccctctctacttccatggctgtgcgtcagggccactgtgtgagctggaaatcagcgcagggaactctggagaggggagggagtcctggggaggggagggartgctggagaggggagggagtcctggagaggggagccgataataacagggaagccccatgaggagggaccatgatggagcgaggactgagtgcaggaaggagggtgttctaggcccgggcagagaggggag

SEQ ID NO: 856199 - DNA, 653 bp, Homo sapiens
caagattttaatgccccaaaagttattttccatccattaaataaaaggaaagcactagtattctttttgctttgttaaattattatccttttgttcttgtatttgtactatatgaaagttcaataagttagtagaataaaatacattcctcaaaaaaaaaataggtgtggaattttaggtcaaaagtcaagtacattatcctgacttctgaaatgtatcaccaattactcccccaaaactttggaccaatttatatgcccaccaggggctcatgaatgctttcatttttctgaaggcttacctactgtagatattatttttgcttatctaaaccaagattttaaaaaccagattctttaaacagaggttgtaatgacagagaaagtaaataacaacaaattataatgacaaatcatctgagctactttagagtatatataccttcattcaaatccaactctcactatacgtggttaaatcaagccaggatctgattatatttatgattttgtcagattgtagcatttagaaaaatggttagcttgttcttttgaaatatcatggtgaataccatgaagcaatgaattttgctaccacaacttctttttacrtatttcccaatgtgacaggtaaaatattagagtataataatt

SEQ ID NO: 856200 - DNA, 606 bp, Homo sapiens
ggacttaacagaaaaactcagttttcattatctcttgaatgtctgctattatgtatggggaatatgcattttagaatttgcaacctaaaaggccgctaaattttaaaattcttctttgagacaaaaaattacatcaatcatctgaaatataattagtactgctaaaattgttattactatctactctcattagagcaaaaaaaaaaaaaaaccctttctgtttgtaatttttttttcatgccattctcctgcctcagcctcccgagtagctgggactacagctgcctgccaccacgcccggctaattttttgtgtttttagtagagacagggtttcaccgtgttagacaggatggtctcaatctcctgatctcgtgatccgccagcctcaacctcccaaagtactgggattacagacatgagccactgcgcccggcctctgtttgtaattttaaatttagtaaataccaagaataaacacctttaaatgtaytgacttaatgcaatgtacaaataaaggttaaaaccacttgaagaaaaagaggtgtggaactcagcgagacaatctaattgaaacaatctaaaactttaatgtcagtgtttcaca

SEQ ID NO: 856201 - DNA, 514 bp, Homo sapiens
tcaaaattgagccatgaagaaatccaatacctgaatagaccaaaaatgagaaacaagattgagccacaataaaaagcctcccagcaaagaaaagccctggacccagtggcttccctgttgaattctaccaaakttttaaagaaaaactaataccaatcctactcaaactattccaaaaaatagaggaggggagaatatttccaaactcattctattaggctggtacaaatgcaattgcgatttttgccattgaaagtaatggcaaaacccacaatggcaaaaaccacaattgcctttgcaccaacctaatatgagaccagtattacactgataccaaagccagacaaaagcacatcagaaaaagaaaactacaggctaatatcgcagatgaacatagatgcaaaactcctcaacaaaatatcagcaaaccaaattcaacaacacattaaaaaggtcattcatcatgaccaagtgggatttatccctggaataaaaggatggttcaacatatgca

SEQ ID NO: 856202 - DNA, 469 bp, Homo sapiens
gtgtacaaatggcctttaatatatatccagatagatgacctatccagatatggccttttatatatccagatagatagatagatataaaataagcatcctgttataaaactgccaacacaatgtggcatcaccacagcctagtatgacattccagggatgagcagcttgtgtgaggcagtgcctatccagttagccaccctgctgaggatgtacctcaattagaacttttgtgtgtgtgacattgccttctaaagacattctagcagtgtggtgttggtgtatggtgtgggaaacaccaaagacctttcctaccagaataatttgtaaccctccatgtgagcacacagtgtattcaccatttttgtattgctctaaakaaatacctgggactgagtaattcagaaaaaaaaaagaggtttaattggcttatggttctgcagactgtacagaaagcatagcaccagcacgt

SEQ ID NO: 856203 - DNA, 635 bp, Homo sapiens
tccgctatatgtggctaagcttccattgccattctactctccaccatccacgggtgctgttgcattctgcttaggctctgctggcctcrgccaggccatccctccatgaagatgccgtctttttttctttttttgagatggagtctcgctctgtcgcccaggctggagtgcagtggcacgatctcggctcactgcaagctctgcctcccagattcacgccattctcctgcctcagcctcccgagtaactgggacggactacaggcgcccaccaccgcgcccgactcattttttttttttttgtattttcagtagagatggcatttcaccatgttagccaggatgatctcgatctcctgactttgtgatccacctgccttggcctcccaaagtgctgggattacaggcatgagccactgcacctggccttgttatggtgcctttttatttctttgctcctaagaaatagtcctggactttgtgatgctaccttactgtaacatcaatgttaatgcttttaaatattttccacaggtgttaagtcatttattactttactaagtcacagagtgccatacattttatatgaaggatagggatccatttcctcaaattataactgctagtaagacagaa

SEQ ID NO: 856204 - DNA, 638 bp, Homo sapiens
tgagggagaaacctccctttttgactttgaataccactgctgagaattgtgcttctatttcactttgtggaatgcttgaagtgatttttacagaattctttttggaaatgttaatacttgtggaacaaatggcttattgttaaacttggagctggaagacctggatttgaatgcggatattgccagttactagcagtgtgacctcagtttcttcagtaaaacaggatattatcattgtctgacaaagttttttgggcctcagttaaaaaaatgttaagttaaagtcatttcggttcttgaaagtgccaagcaaatgtgaggcactattagtattttgtaaaaagccatttctttaaagggaagacaattcatgaagaaaaaattcaaatgaaagcaaagtaataaataaaattaccgtaagaactgatgagagaattctgattttgtagatggaaatttgtttttgaatttaatgaatatacatatatttactcctttaagtagttattttatgtttcaaaaagattcaaacattttaattgcaaaaagtctttgccttgctttaaaagcaagtttaatttcagggacaatacacctattmattacccaaaccattcctaagcagtaacagccttaag

SEQ ID NO: 856205 - DNA, 360 bp, Homo sapiens; identical to SEQ ID NO: 856114

SEQ ID NO: 856206 - DNA, 472 bp, Homo sapiens; identical to SEQ ID NO: 856115

SEQ ID NO: 856207 - DNA, 472 bp, Homo sapiens; identical to SEQ ID NO: 856116

SEQ ID NO: 856208 - DNA, 523 bp, Homo sapiens
acaacttagcttaataggcagacaagattgacaacctaacgtaggagtatttgcctgtaacaatagctgagtcttggccaatcccagtggccattcttcaaccactcatagactgctgactgttcaagttgtgctcaaataaagcaaacgccaacctgtaaccaatccagctgtttctgtacctcacttctgattcctgtatgtcactttactttttttgtctgtaaatttgttctgaccactaggcaccccgggagtctctgtgaatctgctgtgattctggaggctgcctgcttcacaaatcgtttcttcttttttaactcagttaaactccatcaaatttaatttttctgacgttttcttttcacacttaaaagccctacttcatttgcaccactgctgttcaacttccctscccacccctaccgccactatttccaactacctgatcgcctttcttaccattctctctctttttttcttctcccatcctgggctccttgtcattctcaaacatagcaag

SEQ ID NO: 856209 - DNA, 598 bp, Homo sapiens
atataaaatgaatgcacgatgttcctttactcttcctaatcttcatactactgtcagagtaaccagctaactgccctggcttggtcttatctctccctagacttcttcaattctacactgccttttggattttaggaaaaatctaaactcttcagtgcagtttacaagccctacaaatattctcccacatccctttcctgtctctacttctgtaattttgcatgacttcaacttctatccacacagaaccactggttatgggaactatccttggtctctccccctcccttattccgtttcctctccctagaatgtcttctgtttctcatcacattcagatctctgtttaaatgtcatcttgccagagagacctacctggaccatcctatctaaaataggagtctgtctccatcactcttaaccccctcattccgctttatttgtaatcacagcacttttcactgcctgtcattatattatatttttaatgtcctttttctccaatgtactayaattttcatgaaggcagcaactaggtctacctttttcactcctgtacccctattgcctcaaaaccattctggcacattgtagacag

SEQ ID NO: 856210 - DNA, 575 bp, Homo sapiens
aacaaaaaatgcacataaatgacgcgcatgatgcgtatttgtgattttcgtttcagactttttctatattcttttttttccccctttgaatggagagagaactgagagcacttgtaaatcaacctagcatagacaagttaggtaaaacctacaactgacttttggtaagggatcactcaatcctgagagtagataaaaaatagcagcctgggccaggcacggtggctcatgcctgtaatcccatcactttgggaggctgaggcaggcagatcacgaagtcaggagtttgagaccagcctggccaatatggtgaatctccatatctactaaaaatacaaaaattagccagtcatggtggtgcatgcctgtaatcccagctactcaggtagctgaggcaggagaattgcttgaacctgggaggcggaggttgcaatgagccaagattgcaccactgccctccagcctgggcracagagcaagactccatctcaaaatatatatatatagatagatagatagatagatagatagatagatagatagatattgatatagatatagatatgtcagcctgc

SEQ ID NO: 856211 - DNA, 603 bp, Homo sapiens
ttctattcaggccttcaatggattgcaagaggttcatccactttatagagaataatctgctttactcaaagtccatggatttaaatgtcaatcttatcygaaaacaacctcatgggaacatcagtatattgtttgaccacatatctgggcactgaggccaagcccagttgacacataaaagtaaccctcatacccaccttgagatctgagccaattgagagagagtctcaggtatcaaatagatggagattaacagtagtggtgtttgagtagaggccatggcttggaaacgtgatcaaatggacttcctgctactcaaccttccccatagtaatgaccaatatacagatcgtcacccaggaattttgttatgaggaagagagaaaagtgtgtgcagagggcaggaagaaagcccaagctctgtgcattacacttttctcagtctcattatcccatgtcactaccttcctttggagaagagtgcctgtggaggcacagaggaggctccaagttacttgttacattattctaaaagaagcagaaattccttttaaacaagaccaggcaggtttgtgtggggagagagaggatcactccctaaaa

SEQ ID NO: 856212 - DNA, 612 bp, Homo sapiens
agagcaatataaaagcatgtgagaaacaaagaaaaaagaccagagacaaagaaacaagaccwgttatgttaggactttaacccagagctagtgctcctggggccacgcctctcaaaaaacttctgccatttcccacttttccgacctgccccaggcagaggatctagccaccagcagaagaactaagtgagcagattaatgccaggggatgctgctgggtgctgcaggctagtagggtaggtaagtccccatgaaatttcagaaagatttgtaggaggcttacaaaagtacacaaaatacaaacactgttgagttgcaagtgaatcaaatcaagaaagaaaaataatattgagttaagtgcggtccagaagaagcctaaacagaggacattagcatgtgtggattgctacctggagcattagtgatcagaaagagcatagtagaaacgctatgcccacaggaagactgagtgtgaaaatcagaagagccaaacctgtgctaaagaccagagaaagagaaagtaagacaagagtgagaataataatgatacaaaaaaccctccagtactaataattaatattaattaatattgaataaataaaataatattca

SEQ ID NO: 856213 - DNA, 612 bp, Homo sapiens
agagcaatataaaagcatgtgagaaacaaagaaaaaagaccagagacaaagaaacaagaccagttatgttaggactttaacccagagctagtgctcctggggccacgcctctcaaaaaacttctgccatttcccacttttccgacctgccccaggcagaggatctagccaccagcagaagaactaagtgagcagattaatgccaggggatgctgctgggtgctgcaggctagtagggtaggtaagtccccatgaaatttcagaaagatttgtaggaggcttacaaaagtacacaaaatacaaacactgttgagttgcaagtgaatcaaatcaagaaagaaaaataatattgagttaagtgcggtccagaagaagcctaaacagaggacattagcatgtgtggattgctacctggagcattagtgatcagaaagagcatagtagaaacgctatgcccacaggaagactgagtgtgaaaatcagaagagccaaacctgtgctaaagaccagagaaagagaaagtaagacaagrgtgagaataataatgatacaaaaaaccctccagtactaataattaatattaattaatattgaataaataaaataatattca

SEQ ID NO: 856214 - DNA, 594 bp, Homo sapiens
gccagctcctggtaaaatgttatccgaayctttttactcaattcatgacaggtttttgggatatattctactttccaggcactgagttaaattctggagaccagaagaccaagacgttgtccctacactgacattttatctaatagtcctgttttcagattccttgccctaagctcttcctattttttgatttctctcctccagttctcattccatatcagagggctcctgtggatgctccatgctctacgggattgcactcttccacctgcctcccatctctccatgtaaagaggcacccaaaggagcttccactctattgactctctggagcgatgttttgcggtggccgctatgactttaccacattccaggacaagcaatttaaacctcatgcctcagatcccccacctggaatgtgagaatgatagtggtattcacctgttagggttaccatgaagatgaaataagtgaatgcctgttagttaactattaagaacagtgcctggcacatgataaatggtgttccatgttgatgttgatgctgatgttctcatccctaagttctccctttcccttttcagccagggcaat

SEQ ID NO: 856215 - DNA, 518 bp, Homo sapiens
gtgcccctaccctagagatctatggaactttgaaccagagagtgatgatttaggatatctggcagaagaaatttctaagcagtaaaatgttcaagaagtgacctggctgcttctagcaacctatgtttgtctttgtgagcaaataagtgatctggaactggaacttatattttaaagggaagcagagtataaaagtggaaaatttgtagcccagccatgtggtagaaaagaaaaacccattttctgggaatgaatccaggcgagttgcagaaatttgcataactaaaaagaagtcaaagttaatggccaagacaatgggaaaaaatgccttgaaggaagcatctcctcctgtcacaggcccagagggctgggagagaagaatggttttgcaggctggrcccagggccctactgtcttgtaaaacctcacaacgctgttccctgcatcccagcagctccagctccagccatggctaaaaggaccccagatacacctcaggctactgctccagagtgtac

SEQ ID NO: 856216 - DNA, 623 bp, Homo sapiens; identical to SEQ ID NO: 856052

SEQ ID NO: 856217 - DNA, 534 bp, Homo sapiens
cctatgtttcctagattcttccagttactggtctggcaaagggaggtggtggtttgaattaatgagaaggggttactgggatgaaaacaaggtcttttatccttactgtaactatagagtttggttaaraaaaatagaagtcttaacacagccctgcaggaattaatgaaagagccagacccttgggcaaaggggcagagttggaaaaaggctaaaagaagaattcttagagctgaggggccaatgagcacatgtagacacctagaaaaatcaactttagtgtttcattctgcagtggtggattatttaacctctttaagtctcattttcattgacaataaaacggaagtaaatggtagtaccaacttcccagaatcttggtttcataaagcccttaacagtgtgctaagcactcaggaaatgttatctcttgttattattacttgtcacactgactaatatcagaaaatcatgaaggagttgtgaattcaagatatctttcctctctcctcgtctttgcctcagttgaaaagc

SEQ ID NO: 856218 - DNA, 484 bp, Homo sapiens
cctaaatcatctctctcaagttaaaagttctgcaagtctagggcaggggcaaaatgctgccagcctctttgctaaaacatagcaagagtcgcttttgctccatttcccaacaagttcctcatctccatctgagacctcctcaacctggatttcattgtccatatcattatcaacattttggtcaaagccattcaacaggtctctagggagttccaacgttcccacattttcctatcttcttctgagccctccaaactgttccaaccctgcctgttacccagttccaaagtcacttccacgttttcaggtatcttttctgcaggtccccactctactggttccaatttactctattagttcattttcacactkcccataaagacatacctgagactgggtaatttatacaggaaaggggtttaatggacttaccattccacgtggctggggaggcctcacaatcatggcggaaggtgaaatgcat

SEQ ID NO: 856219 - DNA, 484 bp, Homo sapiens
cctaaatcatctctctcaagttaaaagttctgcaagtctagggcaggggcaaaatgctgccagcctctttgctaaaacatagcaagagtcgcttttgctccatttcccaacaagttcctcatctccatctgagacctcctcaacctggatttcattgtccatatcattatcaacattttggtcaaagccattcaacaggtctctagggagttccaacgttcccacattttcctatcttcttctgagccctccaaactgttccaaccctgcctgttacccagttccaaagtcacttccacgttttcaggtatcttttctgcaggtccccactctactggttccaatttactctattagttcattttcacactgcccawaaagacatacctgagactgggtaatttatacaggaaaggggtttaatggacttaccattccacgtggctggggaggcctcacaatcatggcggaaggtgaaatgcat

SEQ ID NO: 856220 - DNA, 604 bp, Homo sapiens
taccattcagctcataggtatataaccaagagaatgaaaacatacgttcactcaataagttgtatatgaatgtaagtagtagcattatttatattaatcagaaaaaatgaaaacaaaccaaatgtctgtcagctggtgaatgggtataaatgtggtatatccatacaacggaatattatgtaacaataaaaagagagaacgtactgatacaagaaaatgcaattttactcctacacaacttctggttaccaggtaaactgctgtgaaattcattgcctatcgacatttgatgtttttgagagccttaagaaaaccacttcttacattttaatgagtcattaaatgacttttcttctttcacacacaaaatctcccattttagtttttactgttttccagtatttgagcttatgtgcccaaagtgtttttttatctaaactcatagaaatataagctgtatttcaagaatgatcattgccaatgagccacaacagaggtaaaaatatactttctaaattatcaggaagactcctacagctgattytataaggaactccctaaaatacataccaatagcttaagagatttgtcagtaaacaacaat

SEQ ID NO: 856221 - DNA, 500 bp, Homo sapiens
gctcaggtttgtttgtttgttattctcttgctcaggatctgtagggatgattgaatatgtgactttatggtttttgctaactttagagaattctcagattcaatctcatcatatattgcttccagcccattatctctcttttatgctccaggggatccaactcatttttttcaatgttgttttcactctcttctctgtttcctaattttaactctccatatttcactttgtattttgcagttgtagatttacatgtggttcatttttacagttactactttcttgccaaatttttcaacgttttattttattttctggagcatattaagcatagctattttaaaatttagatttgataatatcattatttgaagctcctgtaggtttttctttggtcattaattttggattttgatctatgttgttttgtcacctgcttattttctgttgaataccasacattattagttcgaaaattggagaaataattatacaagttg

SEQ ID NO: 856222 - DNA, 625 bp, Homo sapiens
gttagaactgcattaaagcttgttagtattcaaagagccattaaaaacaagatttgagtcaaaaaataactcarggtggattaaagatgtaaatctaagacctgaaatcatacaaattctagaaaaaaaacttaggaaaaacttttctggacattggcctagacaaagaatttaggactaagatcccaaaagcaaatgcaacaaaaatgaagataaataaatgggaccaaattaaacaaaaagcttctgcactacaaaagaaataataaaaaaatattaaacagacaacctacagaataggagaaagagattggtgtaaaagtaattgcagtttttgctatttaaaagtaatggcaaaagccacaattacttttgtaccaacccaatacttgcaagctacagttccaacaaaggaaactaatatacagattctacaagggactaaaacaaatcagcaaggaaaaaatagcaatcccaataaaaagtgagcaaatcacatgaatagacatttctcaaaagaagatatacaagtggccaacaaacatatgaaaaaatattcaacttcattaatcatcagggaaatacaaaatagaatcatgatgagataccaccttaccccagccag

SEQ ID NO: 856223 - DNA, 622 bp, Homo sapiens
cagataggaatctagggtgggaataccaccgagttgatttcaaagggatcctggtcaagagagtgaagcaacctcagccaaagcaatttggatggtcccatgagatacagaaagtgagggaggatgtgagcagtccactagagggactgttataccagagcactgataagaggcccatgagtgcaggagtcagctccgaaagatccacaattcagggaaccctcttgccagattgtcagaggcatgcgtctctcccctactccccgttttaacaccggaagagtcagagcagcctagagctgagaccaatgcttaagggagaggtctgccctgcctctcttaccactgccagtttacaggtttacagaggaaaggtgaagcccaactctttcttgcacaagagttgttaaaagtaatatatttcagtacagtagaaagcataagaaacactttctgtggcagtcagctagacggtgcccaggttcttagaaaaaccttttccaaagaaatcacttctacttccttcacttctaatatgagattataggaaagraaaaaaaagtcatttctccttcctaacttggcctctccaacatatttaatgactggggcttagccacgg

SEQ ID NO: 856224 - DNA, 531 bp, Homo sapiens
tctatcatcacagattaattttgtgtgtgccagaatttcatataaacgaaatcatgcagggtgtgctatttggggtctggcttcatctactcagcatcatgtttttgagatgcatgcatgtggcactattagtaatttactccattatattgcattgtatgaaatttttttccaatttctcccttccatctttattgattctcaagattttgcacagaaaactctttggggtctagaagagcagtaattgcatcacagtttccaagacttcaagtttcaaaagcaaatcattaaaaaaaaaaatacagctcctgatttgagttagatacagggacaaaaaagtagcacatacttgaaggttacatggtctacaaatggtggcaatattttccttgggagagtrgttctgttggtatgtattttttaaatactcaaaaggctcaacctcaagcagtaataaacacaagcaaaagtgatttaacccttaaataactcagaaaaacctctctgtacatacaagtgaaacaatat

SEQ ID NO: 856225 - DNA, 520 bp, Homo sapiens
tgtttttgcttcggtagctagtataaatgggattgctttccttttcagattgttctctgttgacatatataaatgctactgatggccaggcatggtggctcatgcctgtaatgcaaaaactttgcaaggccagggtgggaagatttcatgagcttaggagttcaagaacagcctggacaacaaaatgagactttatcactatgaaaatttttttaaaaattagccagctgggactttagtcccagctacttgggaggctgaggtagaaggatcacttgagcctgggatgtctaggcttcagtgagccgtgatcctgctactgcactccagcctgggtgactgagcaagaccctgtctcaaacaaacaaataaacaacaaatgccactgatttttgtatattgattttgtattttgcaacttcaccaaatttgttcactagttctaacagttttttggtggaatctttaagtttttctaaatgtagaatcrtgtcatctgtaaacaagaataatttgactt

SEQ ID NO: 856226 - DNA, 513 bp, Homo sapiens
cagcagatactgataaatgttcctattcctctttacaaacttcatcaatccattctaggctgttacttcacattgccactaagagggaaccacaaggatcaggaattacttttgtgaaaatctgaatataatttgggtacctccacaatcacccgcctgagtctccgtaattcttccaatatactgctgagagcagtggaacagaattgtcattgatcttggcacagaccatcctatttcccaagactcattctccctagggttttgttcttacggcattgaggctgctgcatcctttccagtttaaaggccattctcctcaatggaagaaaaagagatgaaatggggcttaagacttgagtaaaaccaactgccttggagtaattgattcccactgggggtctatttcctgctcgtttgtcttatccttccacaacaatatcttctcttgctctctttggcatcttttccaagccagaaattytctgggctttgcacctcctggtaaaagta

SEQ ID NO: 856227 - DNA, 612 bp, Homo sapiens
gttcatccatatgtatgactatatggacactgctttaatacaattctgcaaacaggagcaagatgcaactcacattacgaatctgtaatgtgaattacacattacagaaactgtacctgatttcacactctagcagtatctgatcataagattatcttatacttctctgggctcccagagctcaaagccaacttgctaattaaccctgggctctgctacatacttcagagaggaaagcagagtgaggccgaggtattctacgtggcttgaggatcctaggtactcaaaactctatggttacaagtcctggtcactcctgtttccagaccgcctcatgtaaaactctttcctaatcaattactttgaatgtccacagtgaatacctactttgctaagggaaagaaatacctttgcagatatttctaaaaagggcaaggggaacacatgtcattgtatatatctgcaataatttcagctctgggaaaaaaatcatcccataatatagatacccatcktaatgctgaggggagagcagtggttgaaaaaaaaacaagcaggcaaatagcaaaacagaattttgtaagattgggttccagggagtcattgagcctt

SEQ ID NO: 856228 - DNA, 638 bp, Homo sapiens
tcactttatttaacctagtgttttctaaactttcttaatcatgaaaactgattttgtaaactgtctattgaaaacctgtgaaagagttagtgtgtcatggtgactaccgcgggaaataatcttaatgaaatgtgctcagttctactcctacagattccatctacttgtaataatcaagtgatcaaggtgtttacttaattggcatttccaaatatcagtgtcatggctggccagctctactctcatctggtattcttccctctctaattgtctgtcttccctcatctaaaactttccatcaaccataaaagtaccacacataatagaccatgaagaaggtaatcactaacgtgacagacgtcatccttggctcctgtacttcttactcaccaagcatggatcagatcagatccaattgagggtgtgtgtgtgtgtgtgtgtgtgtgtgtgtgtgagaaacagagagagagagaaaaaaaaacaatgagagagagagagagagagagagagaaaaacagayggagagagaactgggccatgagaagtataatggtatatatcctccccacctcaaatcccttttcacaggcctgctacaaatgagtcagagaaagaagcaaatatatcactccgtgtta

SEQ ID NO: 856229 - DNA, 531 bp, Homo sapiens
catggccagaaggaagaaaacaggaacatgaagtcagtgctttcacagctatgaagccgccagggaaaatcccattcttagagtatcagagcctcctgcttgatgagggattctcccctgctgcccagtgactgctgcccaagccgacaggctgcaaagaacttcaagaagtactataggtcaaaagacactttactagatgtcatgagtagaatgcagtgctgtgtctcctcaatttggtttgaatgttgttgctgtttcataataccattttatagagcagtttaaggttcacagcaaaattacgcagaaagcacagagatttcccatatacctcctgccccacacgcacagcctcccgactaccaagatctttcaacagaatggtctgtttgttgcaatcaataaacatatattgacacatcattattacccaaagtccatagttyacattagggttcagtcttggagctgtagattccatggctttggatgaatgtataatgacatgtatctaccatcacagtctca

SEQ ID NO: 856230 - DNA, 635 bp, Homo sapiens; identical to SEQ ID NO: 856187

SEQ ID NO: 856231 - DNA, 546 bp, Homo sapiens
aaaacaaatagcaggttgggtatggtggctcatgcctgcaatgctagtattttgggaggctgaggtgagaagattgcttgagctcaggaattcaagaccagactgggcaacataatgagaccccatctctataaaattatacaaagaaaaattagtggggtgtagtggtgtttgcctgtagtcctagctacttgggaggctaagatgggaagatctcttgagcccaggagttcgaggctgcagtgagctgtgatcacgtcactgcactttagcctgggctatagaatgagaccctgcttctaaaataataaaaaataaaaaaaaaaaagaaaagtaaattaagcaacaacaaaagaaaacaaatagcaaatggtaaatgtaaatccaaacttattaattacattaaatgtgaatggtctaaacattccaataaaaaacaagatatttggattggataaaaaaggcaaaatctaactataggcagyctgcaagagttacaccttaggttcaaagacacaaataggtggaaagtaaaaacatggaaaa

SEQ ID NO: 856232 - DNA, 635 bp, Homo sapiens
ctgtctagcaatctccaggtcatgcccatgcattctgtgattttcccccctgcaatctcactgtcaatctggcattttaaatatttatgcccacaaataactgcaattcattgtcttayacgtttactttagattgcttctctggacatctaaaactttccaaggtaattatcatgaagcactggattaaaacccaataccaggccaggtgcagtggctcacgcctgtaatgccaactctatgggaggtcgaggtgggcggatcatttgaggtcaggagttcgagaccagcctggccaacatggtgaaaccccgtgtctattgaaaatgcaaaaattagccgggcaaggtggcacgcgcctgtagtcccagctactcgggagactgaaggaggagagtggcttgaacctgggaggcagaggttgcagtgacccaagattgcatcactacactccagcctgggctacagagactccacctcaaaaaataaataaaaaaaaacataataccaaagatgctcagttaagacctatatgatttattaagtttcacaggaaaagttctacttaattctgtaattcatagatcccataatcagttaagtatttcacttgtgtttgcatctcttttgtctca

SEQ ID NO: 856233 - DNA, 596 bp, Homo sapiens
atgtgtgtcaccgcacacggacataggtgattaggtggttgagacctcacattaaaatgcttgtttagaatatattcatagtggctttaacggaatgtcttgactttcaaagactctataccactaattttgggtgttcgtatttcagctgaccactggtatgttctttgctggagcgctttctcataaagaattttctcctttatgctgcaaaggtggaatgaatttcataaattattttgaggttagatttttcaaatgaataagagagtattgcatttcagagaggccctggagtccctggtgggaagatttctaagtaaatacattggatgatgcaaaaggatgcaggatgattttttgtggctatatgtgtacagtgatttaaggggcttttggttgtgtgtgtgtgtgtgtttgtgtgtgtgttaggggatgctttaaaaatgcagttcctgattaggctgatattatgttattatgtcataatcaacttaatgctagcagagccctcatttcctgtggcattaaatsgaaatatttatttatctttccagaactatttaaacatcatttaaaagaaacaataaatatga

SEQ ID NO: 856234 - DNA, 477 bp, Homo sapiens
cagatgtatggtttacaaatattttatcccattccatagatctctttactctgtcgattatttcctttgttgtgcagagcttttgaatttgatgtaattacatttgtctatttgtgmttttgttgcctgtgctttgggagtcatgtccaaaaaatcattgtccagaccaatgtaatgaagccttttctgtaggttgtcttctagtagatttatagttttggatcttgtttgtttgtttatttatttattttttgagatgaagtctcactctgtcacccaagctggagtgcagtggtgtgatctcagctcaccgtgacctccacctcctgggttcaagcgattcttgtgcctcagcctctcaagtagctgggactacaggtgtgcaccaccatgcccagcaaatttttgtatttttagtagagacggggtttcactatgttggccaggctggtctcaaactcctgaccctgtggtctg

SEQ ID NO: 856235 - DNA, 534 bp, Homo sapiens
gttctttgtcagatgtatggtttacaaatattttatcccattccatagatctctttactctgtcgattatttcctttgttgtgcagagcttttgaatttgatgtaattacatttgtctatttgtgcttttgttgcctgtgctttgggagtcatgtccaaaaaatcattgtccagaccaatgtaatgaagccttttctgtaggttgtcttctagtagatttatagttttggatcttgtttgtttgtttatttatttattttttgagatgaagtctcactctgtcacccaagctggagtgcagtggtgtgatctcagctcaccgtgacctccacctcctgggttcaagcgattcttgtgcctcagcctctcaagtagctgggactacaggtgtgcaccaccatgcccagcaaatttttgtatttttagtagagacggggtttcactatgttggccaggctggtctcaaactcctgaccytgtggtctgcccgcatcggcctcccaaagtgctgggattataggcgtgagccaccgc

SEQ ID NO: 856236 - DNA, 545 bp, Homo sapiens
gagaggacctttagtcttggatcctgacctccttttaggtgaaacttcctctgaggacaaagtatagtggtcccagtgtccctgtctcatttaaaaagtaaaatactggtagtatagtttgggataagcaaactaagtagtcagattctggcattctgaatcttccttttgcttaggaattgctaaggccgagggttgtctctggctcaacatttgcctgaacgttcagtctcctttcgggtctgtgagggagcaaatgctactgcgggagcctcagggagccctgcccacaccttcctcttcccttccttaaaggtcacgatagctgggttcatcccgtagttggatgtcaagtttgcttttaaaatagattgtaacacttaattcttgctgtcatcctgtaggaaataccacgatccagtggtagcctccaagtatatcaccctgaaaacaattctggtggtctcaaaacagaaagcacagaggcccaattaagatgctcaaatctcatggtttattaartctacgtgaaacacacaagaaga

SEQ ID NO: 856237 - DNA, 551 bp, Homo sapiens
gctgtgtgtaaacacaggtagggtttcactgggaaagcctttgcagtttgattctcctgtcacccctaagytcccagctggacagtctagtctaaaaacggcactgctcacgcctgtaatcccagcactttgggaggccatggtgggcagatcagttgatgccaggagttcaagaccagcctggccaacttggcgaaaccctgtctctactaaaaatacaaaaattagtgggacgtggtggtgggtgcctgtaatcccagctacttgggaggctgaggcatgagaatcgcttgaacccaggaggtggaggttgcagtgagccaagatcacgccactgcactccagcgtggacaacagagtaagactctgtcaaaaacaaacaaacaaacaaacaaacaaacagacaaacatctccgacttccctaatgcccaagacagaaggaaggggccagtctagaaatccctactcagagtcggtccagcctgcaggcagcgagaggatttcccctggatcctgagcctatctgtgccttccttgaggcagcgttggt

SEQ ID NO: 856238 - DNA, 420 bp, Homo sapiens
cccgaattaagatgtccgggaatcaaggggtggaaaagggagtgatttctcttactagtcccttaataattcacaagcaaagtttttgctttttgtccccatkattttgggttctgcttgtctagaggtgtttgattctgacagaagacacaacagtggttctattaaactggaagctgagactgccacctggctcctttgtgtttctcgtgccatgaaccaacaagtggagaaagagcttactgcactgactggggtgctccatcctgactctcaagtggaaactgggtggtgacctcacatgagggcagatgagcggatgtctgaaccataggagatcctcttgggcacctcttagcactcccatgtcctgtgacaaaagttagcaggaaacgacaacaagccagctcagacaggatt

SEQ ID NO: 856239 - DNA, 624 bp, Homo sapiens
ccttagagccacagtgccagtgagcggcacatccttgattcgctcttccccggcagctgaaactagactcccttcacagccagccctgtcctgtgactccctgggcagcctygcttggcgttctctgctgtgttagaggtcgttctgcagaaatgggtagctggaacaatgctgcactgtgataaaacccgcctccgacttgctctcccctcttcctcacataagaagggctattctactccagaaaggacataactgacatagcaccagctccgacgtcaaaagagcgaggctgccgcaggagaaaggaaaagagcttctatgcaagccctgggcattcttaagagacagaaaaaaatgttttcatttcctttttctttcttttttttgtggggtggggagggttgggagatagcttctgggctgatacagctctaatctttaaacaaagtactttgacgtggaaattgttttctcctccctgcaagctctcctgaacaatcttccttggcccagtcagcccgcctcctggctgaacacacacacacacgtacatactgagcagatgttccagtgctagtcccaaatggcaaggagaaaagaagactctagggcagcaaagag

SEQ ID NO: 856240 - DNA, 667 bp, Homo sapiens
tgcaacaacatggatggaactggagatcattatgttccatgaaataagccaggcacagaaagacaaacagagcatactctcatttatttgtgggatctaaaaatcataacaagtgaattcatgaacataaagagtagaatgatggttcagaggctgggaagggtagtgcaggggagtggggaagggggtgatggttaatgggtacaaaaaaaataggaagaatgagtaagatctactatttgatagcatgacagggttaccgtagtcagtaataacttaactgtgtattttaaaataatttaaagagtgtgattggattgtttataacccaaaggagaaatgcttgaggagatggaaattctccatgatgtgcgtatttcatattgtaggcctgtattaaaatatctcgagtaccccataaatatatacacctcccacgtatccacgaaaattaaaaattaggctgggcgtggtggctcacatctgtaatcccagtgctttgggaggccaaggcgggcggatcacttgaggtcaggagttcgagaccagcctggccaatatggcgamactccgtctctactaaaaaatacaaaaattagccaggcatggtggcacaagcctgtaatcccagctactttggggactgaggtgggaggatcccttgagc

SEQ ID NO: 856241 - DNA, 590 bp, Homo sapiens
gcttgagcaatgcggatcctgagagcacttccgggtaggtaattgccccggtcgaacgcctcaccacagcagcgcatggcaggcccccatgagttaaaggaaaaacttatgttggccccagccctaggactaccagatttgacaaacccctttacactctatgtgtcagaaagataaaaaatggcagttggagttttaacccagactgtgcggctctggccaaggccagtggcctatctctcaaaacaactagatggggtttccaaaggctggcccccatgtctaagggccctggcagcaatggccctgttagcacaagaagcagataaactaacccttgggcaaaacctgaatataaaggccttccatactgtggtaactttgatgaataccaaaggacatcattggctaacaaatgctagattaaccaagtaccaaagcttgctatgtgaaaatccccgcataaycactgacgtctgtaacaccctaaatcccgccaccctgctcccagtatcagagagcctggtcaagcataactgtgtagacatgttggactcagtttattctagcagacctgaccttcgggacca

SEQ ID NO: 856242 - DNA, 632 bp, Homo sapiens; identical to SEQ ID NO: 856005

SEQ ID NO: 856243 - DNA, 634 bp, Homo sapiens
gtcaattttaaagctccaaaatgatctcctttgactctcggtctcacatccaggtcamattgatgcaagaggtgggttcccatggtcttgggcagatctacccctgtggctttgcaggatatagcctccctcccagctgcttttatgggctggcattgtttgtggcttttccacgtgcacggtgcaagctgttggtggatctactattctggggtctggagtatggcggccctcttctcacagcttcactaggcagtgccccagtagggactctgtgtggaagctctgacctgatatttcccttctgcactgccctagcagagattctccatgaatgccctgcccctgcagcaaacttctgcctgggcatccaggcatttccatgcatcctctgaaatctaggcggaggctctcaaacctcaattcttgacttctgtgtacctgcaggctcaataccacatggaagctgccaaggcttgggacttccaccctctgaagccacagcccatgctgttacattggcccctttcagccgcggctggagtggctgagacacagggcaccaagtccacagcatggggatcctgtgctgggcaacgaaaccactttttcttcctgggtctccgggtctgtg

SEQ ID NO: 856244 - DNA, 419 bp, Homo sapiens
aatcaatgtgagctaaaataagaatataagaatttttagtctaagctttctggccaccaaagtataaagggaatatagaacaatttacataatagtcattatcagagraaaacatatctcaccagtagatgcaagttttctttattgtaaaacaaatgtttacatacttgaaatcctgtctttcaaaggtaatcctggcatttagttcagtgcctgatgaaaagaatgccctgggtaaatatttattggatggatagatccaagatctctcttctagctactttgaaatatatgactattgtcaccctactctgctattgaacattagaatttataccttctctctaactacatgtttttacccattgtccaacccatgcatagctggatagatggaaatggaataaaactctgctaca

SEQ ID NO: 856245 - DNA, 552 bp, Homo sapiens
ggacagatgtctttgttacgctcaaaagcataaaacgaaaagaaagagtgaagaggcaaccaggacctacaacatctgctacgtaagttggcctagggtgaatcctgatcaccacacccacttyctgcctggcttcacgagtgaccagaacatgcccactcacccttcccttacagcatcctctaaagtgagggatagcctcctaatattgcaatattgtgtgaacctggagttttgttatgattctgcccagagtagcattcaggattcaaactcagttgatataacaaagacatctgcagcagacagttacccctccagacatccaaaagtccccactcagagttcaaaagtctgttacctttggttagtatttggtttcagtgcattataaaaaccaacatgatggctttaacaaagcagaagggtttgttctctcatctaagagaccaaagcattggtccccagcaggtctggcacccatagtatcagcgacccaggttccttctcttttcatgctcttttatatgtggccccacagccaacttatga

SEQ ID NO: 856246 - DNA, 486 bp, Homo sapiens
cctcgccactgccatggagaatgaggtcaagatagcaagatagttgagaagtaaaccatttaaaaaaaattgaattatagattccatcagaagaggaaatgttggaaaagtccaagaagttaaaattagcctaataagcttaataggaaataaagagaaatgaaacaatactaagacaacattaaaaaggaaccacgcataagaaataaaaaatatagtagttgaaggaaagaactcacaaatgtgactaaacagtagaatgaataaaactcaaggacaaattagtgagttggaagttcaaactgaggaagttcttcaaatgagggacaaaaaatagaaaatattagagaaaagccaaaaaaatggagtatttacayacaaatgctaacatccatatgataaggctcagagagtcagaggaataaaatgaaaagaaggaagtatttgaaagaataatgaagctagatttcctagaattcaaaaaga

SEQ ID NO: 856247 - DNA, 490 bp, Homo sapiens
taaaatatgagactatgaaagacaaagaaaattctgcagagtaaatcatacaaaggaccaacatygagaatgacaccagatttccccacagcatcagtggatccaggaaaacaatggagcagtatcagcaaagtactgaaggatatgaccttagaacctagaaatatacatccagccaaactgccctttaattaagtatcagggcatgaaacaaatattctcagtcatataagacctcaaaacttgaataagtagagaaacaaatcaaagagttgctggagaaacaaataaaaataatcaaataccttacaaaagttggttgtagtaaacaacaaatttttaaaattctaagaccaggctgggtgtggtggctcatgcctataatcccagcacttatggaggccaaggcaggagaatcgcttgaggccaggagtttgagaccaccctggccaacatggcaaaacctcatctctactaaaaatacaaaaat

SEQ ID NO: 856248 - DNA, 490 bp, Homo sapiens
taaaatatgagactatgaaagacaaagaaaattctgcagagtaaatcatacaaaggaccaacatcgagaatgacaccagatttccccacagcatcagtggatccaggaaaacaatggagcagtatcagcaaagtactgaaggatatgaccttagaacctagaaatatacatccagccaaactgccctttaattaagtatcagggcatgaaacaaatattctcagtcatataagacctcaaaacttgaataagtagagaaacaaatcaaagagttgctggagaaacaaataaaaataatcaaataccttacaaaagttggttgtagtaaacaacaaatttttaaaattctaagaccaggctgggtgtggtggctcatgcctataatcccagcacttayggaggccaaggcaggagaatcgcttgaggccaggagtttgagaccaccctggccaacatggcaaaacctcatctctactaaaaatacaaaaat

SEQ ID NO: 856249 - DNA, 403 bp, Homo sapiens
accaaactcaaagacacctagattttcccctttgttatcttgtagaattttttgagttttgccttttacatttaggtctatgatccagttcaagttaatttttgtgaaaggtataaagatgtgtgtctcaatacatcttttcacatattcagttgttccagcaccatttgttggaaagataattctttctccattggattgtctttactgctttgtcaaagatcagtctactgtatttttatgggtctatttctgggctctctattctgtttcttaggtctatttgcttattttttcaccaataccayactgtcttgattattatagctttatagtaaatcctgaagtcagatagtatcagtcttccagctttattctacttcagcattatgttagctatctg

SEQ ID NO: 856250 - DNA, 403 bp, Homo sapiens
accaaactcaaagacacctagattttcccctttgttatcttgtagaattttttgagttttgccttttacatttaggtctatgatccagttcaagttaatttttgtgaaaggtataaagatgtgtgtctcaatacatcttttcacatattcagttgttccagcaccatttgttggaaagataattctttctccattggattgtctttactgctttgtcaaagatcagtctactgtatttttatgggtctatttctgggctctctattctgtttcttaggtctatttgcttattttttcaccaataccatactgtcttgattattatagctttatagkaaatcctgaagtcagatagtatcagtcttccagctttattctacttcagcattatgttagctatctg

SEQ ID NO: 856251 - DNA, 603 bp, Homo sapiens
ctttactgctttgtcaaagatcagtctactgtatttttatgggtctatttctgggctctctattctgtttcttaggtctatttgcttattttttcaccaataccatactgtcttgattattatagctttatagtaaatcctgaagtcagatagtatcagtcttccagctttattctacttcagcattatgttagctatctgggtcctttgtcttttcacataaacttgagaatcagtttgtcgctattcacaaaataacttgttgggattttggttgagattccattaaatgtatatcaaattgggaagaattaacattttaacactactgagtcttcctatccattaacatggactatccctctatttttttttgatcttttatttctttcattaacgttttatatttctcctcatacaaatcttctacgtattttgttagatttctctctctctctgtcactctgtgctagtgtaaatggtattgtacttttaatttcaaattctaattgttcattcttgatatataggaaagcaattgacttttgtatagtaatsttgtatcgtgcaaccttattaccatttaaaacactaactatttct

SEQ ID NO: 856252 - DNA, 470 bp, Homo sapiens; identical to SEQ ID NO: 856015

SEQ ID NO: 856253 - DNA, 476 bp, Homo sapiens
tttgtaagctttgttttacatttctcccatcccttctttgtgaatatttcagagccctctactcaagagggtaggggatgtggctactttgttccctgttttgttgccagcatggtgcctggcaaagaatagacactcaataaatatttggtaatgaatgaatgggtgagactctcatgagtgatgtcctttgttatggaaatcactaggccacatggtcttcttttggaagcaccaagtaggaattctatatttaggttcttggaattgaaataataacacaagtgacattgtacattaatcaattaatggaatatatgtagctgtggccccatgagggagttcttgttaattccattccacaagtggccagggtccactgcyagcctcatgatcccaggtcccgggtcccctctgctaatcttcacttttgggcaccacggtttctctctggttgggtaagtcattccacgacc

SEQ ID NO: 856254 - DNA, 663 bp, Homo sapiens; identical to SEQ ID NO: 856017

SEQ ID NO: 856255 - DNA, 502 bp, Homo sapiens
tgaagttggaagaattgctatataggaatcaccataaatcctaaaagactgggcctcaaataagagcytttttcttttatctcaaaataatttaatacaaatactaacaaacgcacctttcttccatggtgatgttttatgtgttaccatatcctagattagaaacccacttatgatagcatctatgagctcagacagaaaggcagggcctgtccttcctccacctgcctaccctggagtcactgccagaggctaaggtggagaaatcactgtggcagagctttcaggatggagtgcctgatgggatacaggggaggaacaactggagagaaaaggaaggaaaaggaaggaaaaagcgactcacaatttaagcacatcctgtgtgccagcaactgtgctaggtgtttatatatatcatcttaaatttcttatcttggctctgaggtaggtgttatttacattttacagatgaggaaataatctcatgtcataatctcaaaca

SEQ ID NO: 856256 - DNA, 646 bp, Homo sapiens
taaatttcttatcttggctctgaggtaggtgttatttacattttacagatgaggaaataatctcatgtcataatctcaaayaataaagaattcaagactttgcccagggacactgattaattccttcccggatccagtctttgaatgcagagaccacagggctcacaagatccactcaaggggcttcgggtggggtttggtagaggcaaaggggctggaggaagggaggtgaaggtagtggtgggcctgcccatggcttcttctggaagctggtggcacagcccaactacagactaaagttgaaggacagacgggagggcccaggcccaagctccctggggtagctgaaggaccctaaatccctatataaatgcagtgttcaataagtgtagtaactgtagagattttttttaaaaaccatccagtctagaaaattctagatagtgaaaaagggcctttcctttctaaagatgtagaggttaaaaactgttataggtaaaatatgatctggagaaaataagagaactagacaagtaagggaataataattaagaaaaaagaaagaaggagctttttaagcacaaggattctcaaaaagactagagtgatttgcttctgcatatagctttcgttacttaccagtggt

SEQ ID NO: 856257 - DNA, 533 bp, Homo sapiens; identical to SEQ ID NO: 856084

SEQ ID NO: 856258 - DNA, 643 bp, Homo sapiens
gtctgatggatgcatctatgctggtgttttcattagcgaggagcaaaggcctgcttcttggtgargaaaacatcaacaatggtatttccccatctaaaaataaggcttttatctgggcagacaatagggtgaccaataatcccagcttgcccaggacttagggggagatggtgggattttcagttttaaaatcaggacagtcctgggcaaaccagggtgagttggtcacgcagtgattgtcattttgggtgggtggagaaaggagcccctgacaggcaagctggggagacatttggggatagttgaggccaggagaactgcggggcctgccaaggctctccttcaggaggagtggttttgctgtctctggctgcctgtgatgaggaatctcataggcctgtgaggacagggttttgctgtctttataggagctcactgtgatgaggaatctcataggcctgtgaggacagggtttcgctgtctctataggagctcactgtgataaggaatctcataggcctgtgaggacagggtttcgctgtctctataggagctcactgtgatgaggaatctcataggcctgtgaggacagggtttcattgtctctgtaggagctgcctgtaatgaggagtctcatagacct

SEQ ID NO: 856259 - DNA, 621 bp, Homo sapiens
attgttcccccattaattgccaagcaatcaatacatccatttatttgatttcattgtataactgtattgaaaacagtccggggtctggacacctggtccctctggctggccaggtcttggtccttggactaccatctagtctgtgcctcagctgttttgctggctgagaagaagaaaaaagtgatgattttactgtgatatgtttgtgacttttatcacaatgcagtgctcagctcctctgtcaccaaagcctaccttttttctggctcttttttggatcctggagggctgacttaagcaaatccttagtaaaggaaagaacccagcagcctctcctcaaaccagtaggcagcttccatacagcctcacagacaggtggcccaggagtgactttatccacatttttctgctcagaaaaacaaaccaccaaatctaaaaaagagattgaccttgaggtttccaggaacaggacttaaaggggtgtggagaaggggtggggaaggggtaaggaagagatagggaggraggaagggaggaaatgggaggagagagactccatggcaacggcagaggagattgtggcacaggccacaggtgtgtaagccccatagaccttctggg

SEQ ID NO: 856260 - DNA, 553 bp, Homo sapiens
cttcccgggtggaggatgagcccatctactggtcctttggatccactagtgggtttgcttggaggtcacacttaccacagctgctcccaggtggtgactgggccctacagggatgcgaagacaggcccattccagagagatgtgggatttctctgacagacagttgtggctcaaggactctccctgagccttgctagaactttcttggagctgtgctgcagtgtctagacaagcttccttcctttcctcctcctccttccctctgaccttcacagggccagacctgcaccatagcttgagggttctcccaccttcttggccccttccagaccgtgtctcccaagaaatccctcaggtgtctaatcccatcttggtatctgtttctggaagacccaaactacacagcactcaaaccattttagttccatctcctttttgctaaatatatagtttaaaggctgtgtttaaggattacctagaaatcattttagggtataatgacatgtyatttatttattttaaaattatgtttgctccacttggtgaaaatttc

SEQ ID NO: 856261 - DNA, 457 bp, Homo sapiens
caggggaaaaaaggaatacggactcagcaactcttaggtgctctgagcctcttcccaagccttctggttctgtgagcatttcattgaaagaaaatggaataacagagttttagaagaaaaactgtatttggtcttgcaagagaaaagtatattcatataaaactcagttctcaactatttgccaaggttacttcttttgtttccaacatttaaaaagggtatctagttgtaggtagagaaaacattaagatatgtgaatggaaaaaggtaaaatttctaaaagtatggattcacagtggggtctgatttaaatgtttaaattttttctctttaatttcttctcaccaatcctgaaagacacgacgagataatatctactttcaakaaatcaattaattttatttaaaatccctaagattttaatatagtacatgcaaaacaataatagattttctat

SEQ ID NO: 856262 - DNA, 418 bp, Homo sapiens
cctaaagctttcaactccatgccacaatatttagtatgctgtttttttttttttwaaaaaaaacctttaaaataagaggagacaattacttcagatttctagatgctgtttaaataggcaggaaaacaagatttgcagcttctttagtcttatatttttgccaaagtaaaaggaacaactaaaataagaggttctgaaggactgctctatgatgaaatattaaaggaattaaatatgtatagtctcaaaggagcatccaaaaaaaaacgagattgtggttcacaagtagataaaatgactccatgaagacttttctttttaaagagcaaggcagagaactaatcatttgcactaattgtgaatgataaggtaagaaataataaatgtatcctgaagttacgtcagctcagctttaata

SEQ ID NO: 856263 - DNA, 398 bp, Homo sapiens
ctgtccctttcttttccagcaaaaccagttccctatgaaacacacctgaygtatttttaaatataagcattatggatcagaaattggaggttctatttttaataggccatgattttaaaatagaatttccaattggttaaacgatactcactctcaaataggaattcctataaacaggtttattttgaaatatagcatataaatttttcaaaaagccatcaatgtttcagtttgctggcaatctaccagttaaaacacagtaatagatcaattcagtgagggagctactggtctaatggtctaagctatggaatccatcctcatcagaagaaataaccaaggagcgggaatgtggggagaggttcacaacagaaaccactgcccctacttgcctgtgt

SEQ ID NO: 856264 - DNA, 633 bp, Homo sapiens; identical to SEQ ID NO: 856194

SEQ ID NO: 856265 - DNA, 624 bp, Homo sapiens; identical to SEQ ID NO: 856195

SEQ ID NO: 856266 - DNA, 600 bp, Homo sapiens
aaaacgtcgatgagggccaccatggccttctccagctcagacatcctaggggctcgcaaaggaaagttgccttctcatctatacctcatcmtaaaacatttcatatgttatcaatacagacctcaacccagacaagggggatggaatggccttggcactcttttcaagctcagagcagcaggcatggcctggaggggcattctgggaatttgcacttttatcataatccttccaccggcctcttagacagctgtgggcctgccttctctgtccgtgtgggccacggggatatattcccatgccctctgaattctggctgggttgggccaacagggaaactggcaaaaatacagaggcagagcagcaagggaattcagggattaatttcccctgaattaatccccacagggtccctctctgttcctgcaaggctccaagatgaggtggtagagtgcaggtgagcaaaccatcaactgcaagctgttaaaatcaatctgaaagtgagacagtgactaggagcaaaataagaagacaaaaaatcaatagcattcctatattctatcagtaaagaagtagaaaatacagtgcaaaatatcctat

SEQ ID NO: 856267 - DNA, 587 bp, Homo sapiens; identical to SEQ ID NO: 856197

SEQ ID NO: 856268 - DNA, 609 bp, Homo sapiens; identical to SEQ ID NO: 856198

SEQ ID NO: 856269 - DNA, 449 bp, Homo sapiens
aatgaagctggccacattgattgactcttcctttcatgaaagatttctctgtagcatgcartgctctctaaaaccattttacctacagtagaacttctttctatcttggagccaatcctctcaacccctcaaactgctttatcaactaagttgatgtactttgctgtcatttttcaacaatgttcacagcattttcaccaggagcagattccatctcaagaaaccactttctttgttcattcataagaagcagctcctcatccattcaagcttgatcatgagattgcagcaatttagtcacatcttcaggctctgcttctaattctaattctcttgctattttcaccacatctgtccatcttcctccactgacctcttcttgaaccaagtcatccaggagggttggaaccaacttctgcaaactcctgttaatggtgatactttgacct

SEQ ID NO: 856270 - DNA, 602 bp, Homo sapiens
gattataattcaatcttaacttctctgagtctaaatttttacattgctttctgaatcatctttgttaccattttattcttaacaggctaaaggaagggttaatagagtagtgctaacaaataggatctgggtttataatcaggcttttgtgatttgaatcaaagaaacacaaaaacttagtgtttatcagagtgtagtgcacttattcctggagttatgcgagatcattttagatggcatagaaactataaagcacttatagaatggatgtgtatttattttgctgtgcattaggaaaaaaaaaacaccttactatcgagtccatggtttaatggatattacctgtggcaaggattgctggcaatctgttaaaatctgtcccaccttccttggtacacggccagattacattttccagccttggttgcaattagattgaccacgtgaataagttctcaccaatggactctgagtgggagtgaagagtgccacagccaggyctggcccatacaaatgctccatggtcacacttctgctcctgcctgttccaggtgatggggaattgacacctatggcaactttagaaaccatgagttaaggat

SEQ ID NO: 856271 - DNA, 618 bp, Homo sapiens
gctgagtttgtgcagtgaatgaatgaattagtgatggaacaataaatgagtgaatgaatgagtaaataactggtcttgtcagaacctggcccaatgcctggctggtgtgtagtgaatacaggtccccagtcccatgtgtgttttagcattcagagtttttcagactgtaggtagacaatgcagcacctatgttgcatgttatcacacaggcttggggtggggtaacaccccaacacccacattaatgcatccacagagaaacatctgaatactgggataaataaaatgaatgaatgaatgtgtaagaacaaaaatgactgatagccacaaatcagtcaaggtgtggtttggctgctgggtgggttacaaaaaccctctgagtttttggagctcttccaggttggggattgtgcattgggattgtgggcctattgatataggttggacctgtgtcccccaccaaatctcatgttgaattgtaatccctaatgttggaggtggggcctggtaggaggygattggatcataggagtggtttctcatgaatggttagcaccattcctttggtgctgttctcgtcatagagttcccatgagatttggttgtttaaaagtgcgt

SEQ ID NO: 856272 - DNA, 611 bp, Homo sapiens
cagctcttaccacacagcactgaaatcatctatttgtgcgtctgtctcgccagctgcagcaagatcccagagggcaaggaacacatcttacttatctcccatcacccatacagaacccagtacaacagctcatcaacactgaacgcaaccccagcctggccaggctggcctccttgctgcccctgaatacatgctgctcacgctcaactctgagcctgcgctcaccccagcacccccacatctcacttaagacaatccgaccatggcctgggcacagttcaaattgcatttcctccctaggcccacagaagtcaatagggtcgcaggttcaaacccccagctcctctcacccatgtgccgagtgcccttgcacaagatgcttctgtctctgggttctcatcgtaaagagggaatgactcagtatcccctaacttgcagggctgacaacgcatataaagcttctgaaccgacacttggcatataatagatttttaagaacagcacacttgttttccccaatcacactgtctatgccatctgggtgtttcatcccttttcttccccgtaactgttgtgtatattamcctggctctcctgaggcaggtttgtca

SEQ ID NO: 856273 - DNA, 615 bp, Homo sapiens
caagcagtggttttggcagagccmggatccactgccaggcctctctggtcctggagtccccattctcagcacaggctgctgcccgctgggccaagatggggcttctctacactgcagcaacagctcccaggcgccctcccaccaagtgttcatcttctccttcaaggagagatggcaatacaacacccagactgccactgtggaccctaagtctttcttttttttgagatggagtttcactcttgttgccgaggttggagtttcactcttgttgccgaggttggagtgcaatggcgtgatctcggctcactgcaacctccgcctcccaggttcaagcgattctcctgcctcagcctcccgagtagctgggactataggtgcccgccaccccgcaacccggctaagttttcgtattttttagtagagacggggtttcaccgtgttagccaggatggtctcgatatcctgacctcgtgatctgccctcctcggcctcccaaagtgctgggattacaggcttgagccaccacacccggcccatggaccctaagtcttctggacaccagacaagcttcccctacagggcggggttcctttctcacatctagaaagaagg

SEQ ID NO: 856274 - DNA, 528 bp, Homo sapiens
ccagtgactcagccacagaggtcaggaagctggagacatgagcaggcggctcaccccatggtcccctccccctccccacctgatattttcatyaggacacatcttctgcaccaggcccctcagctcctgccctgcaaagctgcagatgcctctgctggctttattaaggccctattagcccagcagccccagggaaggctaaagatgctgtcactgcagacactggtttggtagcctcagaggggctcagtagggagggccaggaacctaaggttacagcgaggtctttagagctgcacaggcctgcctggtttaatcccagttcttctgctaattggctgtgtggccttgggcaacttacttcccttctcggagtggcggcttctccacctataaaacagggtcattaacgtgcttgtttgaggatttgctgagctaaagcatttacaacacctagcccgaagtaagcacttgttacatatcccaggatccctgggagccaggtccacggtggagcgctcatacaca

SEQ ID NO: 856275 - DNA, 548 bp, Homo sapiens
tttatttgaaaaagaaaaaaaagagagaaaaagggaaactcaggtcccagagrtgcacgtgtccgctcgatcagcttagaggatgggacaggggagagctagaggggatagcttgggccttagaatctgtgcccatgagctgagtgactcggacgggtcacctcacctctccgggctctatccccgtctgcacaaaggggatcacagcaggacctgcctatggggccaccgagagggaggttctgcccctgaaatgattatcgcctgtgggtataacatgcaccagtgaacaggctgttgtgtcccaaatgctcataaatggaccccgatgcttggtgctttgtctggggacctcccaccacacgcagagtggtggcaatggctgaggtcacacagggagttgtggcctccctagagcctctcctgggcttcttctttggaggcacttgcaccctggataagcttgtgtctcctaggggctggtttcaggaggcgatgctggctgaggtctagtgacccagggactccaggaaaggcccctcacacct

SEQ ID NO: 856276 - DNA, 642 bp, Homo sapiens
ggacagggacagggaagagctgcagttggactagctaaagccttatgactttctcaatcactagagctgctaagctgacactatctttattacctggttcctctcagagttgacatttggaataaagtacatggccttccctttatttctgtgaaatgacatcttgatctagttgtcccagtccactgcatttggtgcaattgtccaaggtactcatgaactctgccagctctgcgatatgagctgagtgagttgggcgggtcgcctcaccactctggcctctatctctatttgtacaatggggatcacagcaggacctgactatgaggtcactgagatggaggttctgtccctgaaatgattatcacctggggtataaagttcaccagtgatgaacaggccattgtgacccagaaggttgtaaatgaacccagatgctcagtgctttggggacctcccaccacacacagagggcaaggactggggtcacacaaggagaggggccgcaccatgtccccccaacaggycctccccagggcctttccctcagaggcaccagcaccgtgtaggcttaggtttcctaggggtcagtcctaggaggtgactctggctgaggtctagtgacccacagaccccagggaa

SEQ ID NO: 856277 - DNA, 603 bp, Homo sapiens
catctctgttcactgcaacgtctgccttctgggctcaagtccttcctcagcctcccaagcagctgggactaccgctgtacaccaccatgtccggttgttctgctgttgttgttctrgtacagatggggtttcacgatgatgtccaggatcgtctcaaactcctggcctcaagcaatccacccacctcagcctcccaaagtactgacgttacaggtgtgagccaccccacctggcctagaggaggctctcccgtggccagctgcagagagcctatggccatgcctccacggccagcatcaagccctgttgcatggggaccactggggacccaggattccagctgggcaggcactgacaggggacctgatgtgtggctcatggtggcctcacagctgcttctctgtcctgcagctacaagctgtcctgccagctggagcccgaaaacccgtaggctggcaacatcctgcagtggctgggaacccaccgggatgctggccagaacaccggctctgcaccatccctcacccagaccgtagacaccagggaaccacatctaggaggctggcagctcagctgcatcttgccctggatcctcatcaccaa

SEQ ID NO: 856278 - DNA, 436 bp, Homo sapiens
ggtcagccacttgaatggacaaaggtgtgacccatacatggtataattaagtagattctgcagtgacccgagacgggtcctgtgggtgagacgtgcagaatacaagattgtacccatctaccttgtgcattcagctctcaacaaagtatgcatttctctgcacaaagcccaaggagcattaagaaaaaggattattgttcagagtgatgtggttatggaaaatcttttttatgattcccctgaaaggtggcacgcctccaggctggccagtgttacagacgtgtgctttgcagattctttttcccccaagggatgtggtaagaacataaggatggcttgrccttcccagggaagttgcagaaggaaattgtgtacatatggagggcactttaattctgcacatgtcagctgggaatcttttatggggcgataaaac

SEQ ID NO: 856279 - DNA, 579 bp, Homo sapiens
ggattgctggctagctatatttataccccctgctaattatatgctaaataagaggcaggttattcataaactaggaacaggaagttcctggaaccatataagataattcctgggttattgccgtgggatcatttgtaaactgtcatggccctggtgggagtatcttatgcaaatgcattttaattcctattccgagctggttttggccattctttgttattgttatgttctgttttgatcagcagggttttgacaggtgcttggaaaaatcctgctgatctcctccctcacagggacatgcctactgccaaaggagagacggaattatctttctattctccccatagaaaatattacaaaatcactgtcacacgaaaatgtgatcaaagagtctgcagccaagaaatatgggggggacagagtgttttaaaggcgaaggtgtgtctgtcacttagtaaaaatgtcaggattcttttttttctggagtttgtggtgtttgtcggcttttcaaaatttgtcattccttttcttaatctaaataatcatttyatagagaaaaaaaattactcatcagtgttg

SEQ ID NO: 856280 - DNA, 551 bp, Homo sapiens
ttcagggtggtatgtgaaagattctccccggggcctgaaagtttggggggatgaataactcctcccttctcaggcccagtcccaaggcacaagaccacttgtgctagcagcgtgtgtcagcaagatagcagaagcaggaagagagctggccaggagacacgtacccctgaagatcaagagagaggccatctgggtaccatgtagcagttacatcagactgggacacttcctgtttacaggagactataaaacccctgccccgtcctcacctggggctgacgccattttaggcctcagcccatctgcacccaggtgctcattaaaacagcgtgttgctccacactgccttgtgttctttgctggcaagctctcggggttcgaaccaacacaagagccttacagtatggccgcagatgtytcccaacatttcacagaacctggtcagaataaaacattccatgggggttcaggtcataaaaaaatactgcctaaccacctaaccacaggaacatctctattacatcctgctggatgaagggcccaaggaacat

SEQ ID NO: 856281 - DNA, 590 bp, Homo sapiens
ccaggggatattggccgcggatccctgcctgtccccgctgctttgcagtygggccaagaatgcagactaacacgaagaatcagactctccggtgtggaaactattacataattatctatgttattatttttactttttggagacagcatctaactctgtcactcaggctggagtgcagtggcacaatcatggctcactgcagcctcgaccttccaggcttaagcgatcctcccgcctcagcccctcaagtagctgggactacaggtgcccaccgacatgcctggccaatttattattattattattattgagaggaggtcttgctgtgtttccgaggctggcctagaactcctgggctcaagtgatcctcttgccttggcctcccaaagtgttgggattacaagcatgagccgccatgccccactggttgtctattttaatagaggcttgatctttgcttgtgaatacaaaacattcttcaaaatacaggtttagagagggcacagcaggcacagaacgagggtagggaaatggagtggggcaagaatatcttcaccccatgtgcttggaaaaaacaatgaaactgcctc

SEQ ID NO: 856282 - DNA, 518 bp, Homo sapiens
caaggagctagccctgggccaggaccggtgcgtaggggtagtaggggatccatgtgggactgccgcagactggagccactgatcctgcctcagggggaaaaacccatttcttgccctgcccagtaaggacacatcagggtctggagctttggggccccctgaccccttaggttcctgctgttaggaccatcttcaaagtgcgagcaggattgaatgaatttctggctctgctcctcagtgtgtaagtctgtgaaccgggaaggctctcttttaacacccccggggcagtgcaagggtcatgtgggattgtctgtgtgctgtacctgccttggcacctgacagggtaggtacacgtggctgaagtgtgattttctagaacttttccaggctggtcakaaggaattctgggtatgttctgaagttacgtattttggacctgtgtcccagccaggttccaggtgaagttcacgggagactcacagagtagtgaaagaccattggcctggatgtctagacat

SEQ ID NO: 856283 - DNA, 499 bp, Homo sapiens
gtgcctgacttccataccctcctcggcagtggggacattgattggatccatggtacagkggggcaagctgctggccacaggacatgtgtgtgcaaggccactatgcccacacctcaggggaaccagggcagagaacagcctgttccctttggcagtgggacagacaggagacaagcatgaaggggaaacaggggcatgtgacaaactggtcagaagccctaggctcctagaggacagactgggaccagagtgacacaggcgtcccagagccagtggagtgggatgaagggccagcgaaaggagggagacagggctcaaggggaaggaggctgggctaggcagagcctctgaggagagctgatcctgcaaagttactggcacctcccctgggccagccctgtgttcctggccagggacgggaggagacagtgccctgtctggcagaggaaacagattcatgtgcatgactatcagtgtgccatggccacagaaagcaccg

SEQ ID NO: 856284 - DNA, 499 bp, Homo sapiens
gtgcctgacttccataccctcctcggcagtggggacattgattggatccatggtacagtggggcaagctgctggccacaggacatgtgtgtgcaaggccactatgcccacacctcaggggaaccagggcagagaacagcctgttccctttggcagtgggacagacaggagacaagcatgaaggggaaacaggggcatgtgacaaactggtcagaagccctaggctcctagaggacagactgggaccagagtgacacaggcgtcccagagccagtggagtgggatgaagggccagcgaaaggagggagacagggctcaaggggaaggaggctgggctaggcagagcctctgaggagagctgatcctgcraagttactggcacctcccctgggccagccctgtgttcctggccagggacgggaggagacagtgccctgtctggcagaggaaacagattcatgtgcatgactatcagtgtgccatggccacagaaagcaccg

SEQ ID NO: 856285 - DNA, 620 bp, Homo sapiens
ccaggggatattggccgcggatccctgcctgtccccgctgctttgcagtygggccaagaatgcagactaacacgaagaatcagactctccggtgtggaaactattacataattatctatgttattatttttactttttggagacagcatctaactctgtcactcaggctggagtgcagtggcacaatcatggctcactgcagcctcgaccttccaggcttaagcgatcctcccgcctcagcccctcaagtagctgggactacaggtgcccaccgacatgcctggccaatttattattattattattattgagaggaggtcttgctgtgtttccgaggctggcctagaactcctgggctcaagtgatcctcttgccttggcctcccaaagtgttgggattacaagcatgagccgccatgccccactggttgtctattttaatagaggcttgatctttgcttgtgaatacaaaacattcttcaaaatacaggtttagagagggcacagcaggcacagaacgagggtagggaaatggagtggggcaagaatatcttcaccccatgtgcttggaaaaaacaatgaaactgcctcgttgtttcctaagtaaaatagtccctgtct

SEQ ID NO: 856286 - DNA, 581 bp, Homo sapiens
ttcttatgccaaactctcaaggctccctccccactgggggttcccaggtctgactcactttagcaytctaggccagtgctagaggccgcattaggtgcctggtgtttggatcagaggacctcagtcaagccaggctccagtctgatcataggcctacatgtgggcctctttgcccttctactgaatggacatgcacacccctgcccattctccctccacagactgcttctgtgtccagcccctgttctgtagcaggtgactcaagctggttgtaccaagggcagcagttgggaagagtcagctgagcagggtcctccctctggcctgcccagggggctctggctctgctctctgccctactgcttagttatagccctgcctcctccactgaattgtgctccagctgcatctctgtatgccagccagaccagcaaacgctggagctcagggtgagggtgctggcctcccccactgccctgccacagggccctccagcctctagcctctaggagtagccccttcagctgggtgagaagccccatgggatagagcaagtcagatgcaggaaaaagaaaagacag

SEQ ID NO: 856287 - DNA, 621 bp, Homo sapiens
actagtgtgatatttgggggtgttgacgacccttgttttgtcatgttaccacagttggttttctggttccttctcattggggtaggctctgtcagagggaaggtatagggctgaaggttgttgttaagattttttttgtcccagggctattcccttgatgtagtctctcccccttttcctgtggatgtggcttcctgtgagccaaactgcagtgattgttgtttctcttctgggtctagctgcccagtgagtctagtcagctccaggctggtactgggggttgtctgcacagagtcctgtgatgtgaaccgtctatgggtctctcagccatggataccagcacctattctggtggaggcggcggacggtgcagtgcactccgtgagctttggtggtttaatgctctatttttgtgctggttggcctcctgccaggaggtggctctctccagaaagcatcaactgtagtagtgtggagaggggccagtggtgggtggggccctaggactcccaagattatgcgtcctttgtctaccactactagggtgggtaggaaaggaccctcaggtgaggacggkgctaggcatgtctgagatcagactcttcttgggcaggtgttgct

SEQ ID NO: 856288 - DNA, 437 bp, Homo sapiens
ctcacccctgccagggggatcctttatgacktaagtcagatcacagttctcctctgctcaaaatactccagcgactcaatccccctgcggtaagagccaaagccttcccagtgtcccatgctcccctctgtcgtgacctcctgctcttcctgctcactacacccaccctggcccgttgctctccagtctgaaccccatgcattgtcccacctggagccttcgccctcactcttccctccagccagaacacccttctcctcatgccttgcacattcctacagctctctgctcagatgccacttcctccagggagtcttccctcaacatcctactcacacacccccaatcttaccctgtttattttttccatggcatccatcaacatccgatatgttccatgtttacatgggttactgtcagctcccccttctattaat

SEQ ID NO: 856289 - DNA, 582 bp, Homo sapiens
ttcttatgccaaactctcaaggctccctccccactgggggttcccaggtctgactcactttagcaytctaggccagtgctagaggccgcattaggtgcctggtgtttggatcagaggacctcagtcaagccaggctccagtctgatcataggcctacatgtgggcctctttgcccttctactgaatggacatgcacacccctgcccattctccctccacagactgcttctgtgtccagcccctgttctgtagcaggtgactcaagctggttgtaccaagggcagcagttgggaagagtcagctgagcagggtcctccctctggcctgcccagggggctctggctctgctctctgccctactgcttagttatagccctgcctcctccactgaattgtgctccagctgcatctctgtatgccagccagaccagcaaacgctggagctcagggtgagggtgctggcctcccccactgccctgccacagggccctccagcctctagcctctaggagtagccccttcagctgggtgagaagccccatgggatagagcaagtcagatgcaggaaaaagaaaaggcaga

SEQ ID NO: 856290 - DNA, 596 bp, Homo sapiens
accctttcaaagtatactttaaaattcaattggtttaaagccaattcagtggtktttagtatattaacaaagttttgtcaccatcacagttatctaattctagatcattttcatcacccaaaaagaaactctgtacccaataaagagtcactccccattcccctcttcccctagcccctggttaccattcatctactttctacctctgtggataggaagtagctgcctattctggagatttcattcaaatgtaataatgaaatatgtggccttttatgactggcttctttcatttagcataatggtgtcaaggttcatccatgttgtagcatataacggtacttcatcccttcttatggctgaataatattcaattttatggactttttagcaaaacattctaatttttacttctctactgtgcttattgtttgtctttctccacaacaatgtgagcactaaaggcagacatttttgcctattttgttcactactgctttttctgcaccaaacgcattgcctggttgtgggtacttttctagttttaggaaggagaagacaagatataggtcctgactctggttctgcctctcatt

SEQ ID NO: 856291 - DNA, 596 bp, Homo sapiens
accctttcaaagtatactttaaaattcaattggtttaaagccaattcagtggtgtttagtatattaacaaagttttgtcaccatcacagttatctaattctagatcattttcatcacccaaaaagaaactctgtacccaataaagagtcactccccattcccctcttcccctagcccctggttaccattcatctactttctacctctgtggataggaagtagctgcctattctggagatttcattcaaatgtaataatgaaatatgtggccttttatgactggcttctttcatttagcataatggtgtcaaggttcatccatgttgtagcatataacggtacttcatcccttcttatggctgaataatattcaattttatggactttttagcaaaacattctaatttttacttctctactgtgcttattgtttgtctttctccacaacaatgtgagcactaaaggcagacatttttgcctattttgttcactactgctttttctgcaccaaamgcattgcctggttgtgggtacttttctagttttaggaaggagaagacaagatataggtcctgactctggttctgcctctcatt

SEQ ID NO: 856292 - DNA, 507 bp, Homo sapiens
atcctcccaacagcctgcaagacagaayttctgggaagcagaccaggtggctggcagggaggggaggcttgccctggcttttgtgggcccagtgggaggcagggagcaggaaggggcatcctgtatgtgtcctctgcagcagcagcagcggaggcctcccttgggctgggcttcctggaagagggtcaggaaacacccgctgtggcccctctccaccacgccctcatccaggacaccaagtatcagtcactcagctcacgagacccaggccctgactcagggagagaggatgtgaggggtggggcaccgggctcctcaggactgagagacccgagatgtggccccaggctgggtgttggggcagactggctatggcagcattgtgtgtaccccagcaggccagtacccacgcagggagcctccaaaccccttcacccatgaccctgggagaagaccgcagccttggagaattggcctcactgaaggggcctgcaccggccagcaggg

SEQ ID NO: 856293 - DNA, 507 bp, Homo sapiens
atcctcccaacagcctgcaagacagaacttctgggaagcagaccaggtggctggcagggaggggaggcttgccctggcttttgtgggcccartgggaggcagggagcaggaaggggcatcctgtatgtgtcctctgcagcagcagcagcggaggcctcccttgggctgggcttcctggaagagggtcaggaaacacccgctgtggcccctctccaccacgccctcatccaggacaccaagtatcagtcactcagctcacgagacccaggccctgactcagggagagaggatgtgaggggtggggcaccgggctcctcaggactgagagacccgagatgtggccccaggctgggtgttggggcagactggctatggcagcattgtgtgtaccccagcaggccagtacccacgcagggagcctccaaaccccttcacccatgaccctgggagaagaccgcagccttggagaattggcctcactgaaggggcctgcaccggccagcaggg

SEQ ID NO: 856294 - DNA, 507 bp, Homo sapiens
atcctcccaacagcctgcaagacagaacttctgggaagcagaccaggtggctggcagggaggggaggcttgccctggcttttgtgggcccagtgggaggcagggrgcaggaaggggcatcctgtatgtgtcctctgcagcagcagcagcggaggcctcccttgggctgggcttcctggaagagggtcaggaaacacccgctgtggcccctctccaccacgccctcatccaggacaccaagtatcagtcactcagctcacgagacccaggccctgactcagggagagaggatgtgaggggtggggcaccgggctcctcaggactgagagacccgagatgtggccccaggctgggtgttggggcagactggctatggcagcattgtgtgtaccccagcaggccagtacccacgcagggagcctccaaaccccttcacccatgaccctgggagaagaccgcagccttggagaattggcctcactgaaggggcctgcaccggccagcaggg

SEQ ID NO: 856295 - DNA, 592 bp, Homo sapiens
aactagaaatataaaaacattttcttaactcaataaagtatatttttcaacatctcactgaacacaccatagtcaatggtgaaatagaagccttctctttcggtcaggcacggtggctcatgtctgtaatcccagcacattgggaggctgaggtgggcagatcacgaggtcaggagttcaagaccagcctggccaacatggtgaaaccccatctccactaaagaatacaaaaattagctggttgtggtggcacatacctgtaatcccagctacacgggagcctgaggcaggagaatcgcttgaagccagaaggcagagattgcactgaactgagatcacgccactacactgcagcctggactacagagggagactctatctcaaaaaaataaataaaaaaaataagaagccttctctttctagtcaagaccaaacccactattctatccaatatagtactaaagttcctagagatcacaataatacatgaaaaagaaaagaaacaaaataacattatctgcagctgaattaactgtctrtatagaaaaattcaaaacatttctttggaatattattggaactaatgagagtt

SEQ ID NO: 856296 - DNA, 391 bp, Homo sapiens
cactccagtctgggcaaaagaactagactccgtctcaaaaaaaaaaaaagagaraaaaaaaaaacagcttaaccaagacatgcagctggaaagtaagagaggctagattcaggccgaggcactcttgagcctcttactatacagagaaatcttgattaatgttgtgttgcatgccctatgcagcagatactccttgttgctgcgatggtgaattttatctgtcaacttgcttggaccaggggtgctcaaacatttgctcaaaggttattctgggcgtgactgtgagggtgtttgtagataagattaatgtttgaatccatcgactgagtaaagcagattgctgtctctgatgtaggtaagcctcattcaatcaattgaagatctgaatgga

SEQ ID NO: 856297 - DNA, 541 bp, Homo sapiens
gctgtctgttcttcttaatgggtcctaaatgtaargcagatgtttcaatatactgtgtacttctgaggtaagactgagtaaacatagtgacacttaccctaatttttttaagtttcactctagctttcattgtggtgaagaaacgaataaacactagattttttcttaaacatggaagcaattttcaaaatccacctccaggaacagttattgatgtagagttgactaggaatgaatggtaagccacctgtattttttgcacatggttctatgattttctcaatttccttcagttcagcacaatcacttaattccaataactttaccttaaagcactgctgattctttagaactaatttggtctgttttttttactattgggcagagattcctcatttaaatctagaaatcgcgatgagtcttctggttgtcgaagtttcttcatcaaacttttgtaaatgtctgtgaccacgtaagatttaacttcagtgtggccctaaaacccttctaattacgaatacaaaagatagcaaatgatgtt

SEQ ID NO: 856298 - DNA, 541 bp, Homo sapiens
gctgtctgttcttcttaatgggtcctaaatgtaaggcagatgtttcaatayactgtgtacttctgaggtaagactgagtaaacatagtgacacttaccctaatttttttaagtttcactctagctttcattgtggtgaagaaacgaataaacactagattttttcttaaacatggaagcaattttcaaaatccacctccaggaacagttattgatgtagagttgactaggaatgaatggtaagccacctgtattttttgcacatggttctatgattttctcaatttccttcagttcagcacaatcacttaattccaataactttaccttaaagcactgctgattctttagaactaatttggtctgttttttttactattgggcagagattcctcatttaaatctagaaatcgcgatgagtcttctggttgtcgaagtttcttcatcaaacttttgtaaatgtctgtgaccacgtaagatttaacttcagtgtggccctaaaacccttctaattacgaatacaaaagatagcaaatgatgtt

SEQ ID NO: 856299 - DNA, 595 bp, Homo sapiens
aaactttcttactggaataaggtttgttaatttttctagatctattttagaagagaagaaattcagaaatgactttcccagttggggaatcacctataaataatcttgaaaaagcttaaaacttggtaatctcagtagcgttttgagagtagcgaaaaccatagttctttgtagcttatcatgtttagttggttggtaccactgcatgcgatgtttgcctcacataagtgagtttttcttccctgattttgtcctttgctaaggaaactgaactgaactgaagtccaggtcttctgtaatagagtgtctctccttcaacagggaacaacactacagtcgcccgtagttttgtttctgttcagtctccattgtggcatgccacactctcctggtttgggccctgctcatttctttactgccttcctgcctgccctttttgtgcaggtaggtcatcccattcatgctcagccctcctsgctgtctacactgtcttcttgggcaatcgtatccagtcccaagccttttaaaaaaacaagctatacccatcctggtggaattcctgcctataaaagggcgcaccttcagacctccaggc

SEQ ID NO: 856300 - DNA, 613 bp, Homo sapiens
aacgaggcacttgaccttcagacacttaaccttcacatgcctgcttgggtcttttccaagcatatcttcctttctttcctgttctaaarcctttttaaataaacttccactcctgctctgaaactcacctgggtctcttcttctgccttatactcctcagtcgaattctttcttctgaagaggcaggaattgaggtagctgcagatctttcctctggtaattccagtatggtgaagacagtatgggtgaaaaataaatttggaagttagcacccatgtgtaagattttcaataactctaagtgctgattatatgtatttagcaaagtaaaccttttatttttgttttaacttttttgttgttatctagactgaaaacaatgctcttctcaggacacattattaagacttctaagacgcttctctatttataagaagaatacataaatgtctactatgtgagtcactaattaacgaggaaaacaaaattacagctcaattgttcaacctattttcgattttttagtttccgcatatttctgtcttttcaaccattgccagagcttcacaagagtaatttgtgtgcatatctgaattttgtaatcaacttatttt

SEQ ID NO: 856301 - DNA, 640 bp, Homo sapiens
gacatctctttgcgaccttgamccattcaaatgaatcttcatctgtttcctgcaacaccattgccaagcactgaattttcaaaaagacaatgaatatctcattaggtatagaatggaaaaaatgactgtattagttatctcttgctacctaataatattatcacaaatttagagacttaatataacatccatctatcatatcacacttttgcagatcaggattgcaggctttggttagcggggctctctgctgcagtgttaaacctgccatcaaggtgttggccagggcttcagattcctctgagatctgactggggagaaatcacctcctaatctcatgtggttgtttgcagaatttaactacttttaggctgtgaagtgacagcagtctcagtttctttctagtttttggacagaggccaccctcagctcattgcctcctcaatgtggaagtacaacatggcagctagcttcctccaggccaacaaggaagacattctcttcccagtataaatgctgcaggtttatgcaacataattatgtatggtaatcacatatatcctgtcaactttgccatattctattgaatagaagcattcatggttcctgccataccccagggaaggtgatgacacgaagc

SEQ ID NO: 856302 - DNA, 623 bp, Homo sapiens
gatacagtggaaactttgaaaaggtatagaagctttaaaaaaaagtcatcatagttctctgaattgtaggtattttctctttaggcagccttccaaagccctttcatgctagtgaaagtaagctgtgtgctactttttgatgatattgcccatgataaacctcaaatggtgaggaaattcattttcagacacagatctgaagctaacttatccaacttatctgatcagaaaatcttgctgtaaatctttcaaaaacaagatgacttgtgagatttttagcaatccagagtgtgtctggggagaatatgtgacatgagcagttttctctatggtttcagctaataataggaaatccatgacccaaggaaatagaaatcctcacgtgagcaagaatatcaggtcttcccaaagcccataaatgtaagaaggattaaattatgtgtgcttactgaatttataattttatttactccaagaagtttccccacttatcaaattcattgcacctagytttaggaattaatagctaaaatacagataattcaaatctattttgattcttaaaaatcaagatctgatcttcagtcctgttttctagaggtgatgtatagaatgataatatg

SEQ ID NO: 856303 - DNA, 490 bp, Homo sapiens
tacaaagagcctggcatctcccctatctytcttgcttcctatctcaacatgtgatctttgcaaatgctggctctccttccccatctaccatgagtggaagcaacttgaagccctcaccagaagcagatgctggcaccatgcttactatacagcctgcataactgtgaaccaaatagacaactttaaaaaaaaataaatcatccagcttcaggtgtttcttcatagcacgaaaatagactaaaaccagtcacattcttgggccctgtagtttctgttcgtttgttttacctcacagtttatggtggagtatatcttcttagaaatgatgattatcataaacttctcggtaccttgcttatctgaaaatatattcatattcctcctatatgtgactattttgcaagtagcattctgcctactcatttagcacatttctattttccttctttttttaagtaagtcttctttgtctcatatttgatcaggtctt

SEQ ID NO: 856304 - DNA, 584 bp, Homo sapiens
tgcgttatggctgtcctgttttcccaacatggatccagagagagagattgtatgagagaaaaagagtgcagaactaggatggagtctggtggaaataattcatagaatatcaagtctaaaggtttccaaagttattgcatctttcaaattatgtttggcatataaatctaaagctgactaacttcatttaagaagtaatgtcatttttatgtggttacagaaattccaggaatatattatgtttgaaatacataatttccgtaaattccaggaatatgttatgtttgaaatacacaaaggattactgtgagtcttaagagtttttgtttgttggttggttggttggttggtttgttttccagccaggtgtggtggctgacacctgtaattctagcactattgggggccgaggtgggcgaatcacctgaggtcgggagttcgagaccagcctagccaatgtggcaaaacccygtctctactaaaaatacaaaaattagcagggcatggtggcacacacctgtaatcccagctactcaggagtctgaggcaggagaataccttgaacctgggaggtggaggcagca

SEQ ID NO: 856305 - DNA, 521 bp, Homo sapiens
tctcataacttgcgcatgttgacaaaaaaaaaaaaaaaccagcatatataaatctgtgcttgagccgaacattctatttgacaactactgagtttgtccagataaggctgtgtaagtatttagccttgcagctttatcacacgactgtcatatactccataattgcttttgtaaacttagtcttaatggtgtctaggttcacaccagagcaaccatctgaaaattcagtgtcagcttatgatgtatgaactttctttcagtgtgtagatgtttctaattttttaaattacatttttgtatatttccatataatgacctaaaatcactttgattctcatcactaaatgtttttcagttactgttcatgcgtacatggtattgcatcagatattattcaaagctagttgagtagcatatatggatgtttgtttaaactagcttatatgtgtgtatatatatatgtatatatacacatatgcataaatakgcagatatataagaagcatacaaaggataatcat

SEQ ID NO: 856306 - DNA, 645 bp, Homo sapiens
gcaggaagggccctgcttagctttatctgtatccctaataacacacttagggaatttgtgcttcctgtctctccctctgccatccatgcccctgccagcccccaggtcagggctctgtaggatgaaaggtcctgattccctgtgggggcacacttctgccaggggacacggaaagagtcctgctgaactctaagctatagcttctgcctgtcactgcaaagactttgtatccagagaccagtatgcaagaagagtcattgcctgggctcaggcaattaacccagttcttcaggaggaggaagtgcttatgtgacacagtaagggcagggagaaatgtgtttgccactcacatgatccatttggaccctacttgaccaaatttgatagtaaacagacaattacaccaccatagcttgaaaatagcatggcagccagggtctcagacccctcagaaatgaagatttgggtcctgccaccaggtaagacaccaatactaggagaagcattacctgaggctgaggctratatagaatggacaccagagaagggagagagtaaaaatcagttacatcccctaaatcaattgctgtgagaaaaatgagaattctctccgaaattccaaataaaataaattctccctttatt

SEQ ID NO: 856307 - DNA, 635 bp, Homo sapiens
tactcatttcagggtaagtgtcgtttgaacaaggcactcagggaagctttttaaaaataatattctgggccrggcatggtggctcacacctgtaatcccagcactttgggaggccaaggtgggtggatcacgaggtcaggagtttgagaccagcctgaccaacatggtgaaaccccgtctctactaaaaatacaaaaattagctgggcgtggtggcgcgcgcctgtaatcccaggtactcaggaagctgaggcaggagaatcgcttgaacccgggaggtggaggttgcagtgagccaagatcgtgccactgcactccagcctgggcgacagagcaagattcaatctcaaaaatagatagataaattaaattaaataaataatattctgaagcaggtgtcttcatgtcagatcaacccttattccacaggtaaggtaaaggtttaggactaatttctcttctcttaatccctgactcctgtctccaaagcttgggatggtggtagcgttggaggttacacaaatgatacggtttggctgtgtccctacccaaaatctcatcttgaattgtttgtaactaacctgcacgttgtgcacatgtaccctaaaacttaaagtataaacaaaaaaaaaagaa

SEQ ID NO: 856308 - DNA, 619 bp, Homo sapiens
cccggaacaggagaagccaggctcctcctcactgcaaaccaacaggaaattcctcaaggcttcacccgagtgcgcactcctcccagtgcgcaggccagtcggaagtcctgccggggaaccctttttacttggctgtctcagtaggctggcaaccggcactctgtcagggtcagctgggaaatcttccaactgtagtgttttttggcaatgcttttcaggtgatagtttctgcgtaattaccgggaaaaaaaacctatggcaattaataacaccgggatgtgttacagatccctcatcctcctagctatgaaattttttgggtttatctcattttagctacagggagtccatctcgtcttctgttggggtatattttaacttagctaataagtgttgctttttattaaaactcaactactgggaaactgtgacctcaggacactgtggccagaacacttgtgaatgagagaatgacaagtgggaggtccaacctgttcaaggaagagttctcaaagtgggcactgcaacaaaaaccaagtccattccttaaaggtgayttccttgttccacaggcatctctaattgtaatagatttaaatgttaagtctccaccccaagg

SEQ ID NO: 856309 - DNA, 568 bp, Homo sapiens
agaattattagtattaaatataattcagactttttgcctaggtctactcatcagacatatttataccgtctctgctagatgttttaaggtaataacattcctactttcataatttttttgatacttgcttrgtttgtccttaagccaaagctataagagctggctgctgggttcccccaaagctttgcacacaccttactgtgagcttgtgtctttggtttggagcttctggattctgaggtctggacaggtggccatgatgatgtcaggaatatatgggattcatagtgcttgggccaccatttgcaaagcaaatgcaagctcaatatggccccatcctttctgacctagctgcctcctgaccatgttgagaggcatcaattcctctgggcatcgcctgcacaactctgtcttctgtcctgagctttacatttggtgtgtaaatttagggcccagacaggccatgttcttcatatccttccttgggtgcctcatgggtacttgagaaccaggacaactggggaagatataaggaagagtacttgtgtaatagtttcaaaactatttt

SEQ ID NO: 856310 - DNA, 543 bp, Homo sapiens
catcctagatttggacagtttcctcaagatcacaaatcaatacttctctgccatcacratacttttagctctcttaattgtttcccttgctatgaacaatagaactggaaaagggggcttgtgtttacccacttctttttgtgaaggattttgcagccaatcttatacatgggcagtcttgtgccttgatgaatgaaagatgaaagtccaatgtgggttagaaattttaatggtacctttgttacttcatagttagaacattggtcagctcctcttaacctacatcataggttaaagagaacagtgtcaggaggacttgagctttctggctgggcatcagttttaggtcactttttccatggcttggagtaaatgaggcaataatcaaaaatttatcccgcataataagctctgtagcaggattccactgtgaggttattgttgcacaatagaatttcaaaaattatctcgctaaaattgtactagattatagaattgctcaagattacctactagatgacaaaggaaaaatttgtgcagttg

SEQ ID NO: 856311 - DNA, 444 bp, Homo sapiens
aagtaaaatatagttaataaaaattgaatatatcccacaatgtactcatcttaattaactggaactctgtcagcctatatttctgcttaaaccctatgtagtgttattggaaatttattaaatarccttgaagcacttaaataaatgaaaaaaagtggaatcagtcacaaatttttaaaggtaaaacctgcatttatttgataaacttttaggtctgaatacatttgaacaattgtaaactggtaatttttttagtgatgtgtatagacattttctgttaactgaaatatttgattaaatcctgatatatcaaaacaagagtgatggtcaaaatattcaacaacttgtatggtacagacaacttcatcggcatgggcattagtcataaacaaccagtttgacccatactactgagtctctattataagtctttttgggagtttt

SEQ ID NO: 856312 - DNA, 661 bp, Homo sapiens
ccacaaagataattcctgagkgttagaaatgtacatagacacaagaagattacaatcaagagaggaaacaggtttataaaaaataattaaaatacaatgtgatcccttagctagaccttgaaagacatgtagaggggaaattattccaaatgagacagcagttgtgagaaacaatatcaagatattttcactctttctagcctggcataattaattgtgattactctggcaagtatgacatcttctaaatttacaaaaacagctattttgtcattgagggaatcattttttgctgtgctgatattacaataataagctggcttgtgtcattgcagaaaatggtctgtaattaaatcttcctgaacttctaaagagcagtttccacaaaatggctgtatcttctaatttcctttccattttctcagcaagacatagtccctatgacaaaagtaagatgttttgaatatatttctcagtttcctggcaaagttgctcatttgcaaagtcacacacccagcccacagaaatttaaaaaaaaacatattttagtcattcatttggcaatgctttttacacaaacaggtaattaggaacactgaaaagacttaaaagatcctcaatctgaagtgataacgctcagagtatgtattggataacggca

SEQ ID NO: 856313 - DNA, 573 bp, Homo sapiens
agaaatgaaactggatcctcttctctcaccttatamaaaaatcaactcaagatagatcaaagccttaaatttaagacctaaaaactataaatattctagaagataacatcagaaaaaaccttctagacattggctcaggcaaagacttcaagaccaagagcccaaaagcaaaaacaacaaaaacaaaggtaaatagataggacttaattaaactaaaaagcttctgcagagcaaaagaaataatcagcagagtaaacagacaacccggagtgggagaaaatcttcacaaactatatatctgacaaaggaccaatatccagaatctataaggaactcaaacaaatcagcaagaaaaaaaacaatcccatcaaaaagtgggctaaggacatgaatagacaattctcaaaagaagatatgcaaatgactgacaagcatatggaaagtgctcaacatcacaatgatgagagaaatgcagatcgaaaccacaatgcgataccacctcacttctgtaagaatggccataatcaaaaaaatcaaaaaaaatagatgttggatggatggtgtaaaaaggga

SEQ ID NO: 856314 - DNA, 548 bp, Homo sapiens
ggtggtttcttaaaaaaactaaacatactcttaccatccagcaatcatgctccttggtatttacccaaaggagtgaaaaactgtccacacaaaaacctgcatgtgggtgttcatgtcagccttattcataattgccagaacatggaagcaaccaagatgtccttcagtaggtgaacagataaactgtaatacatacagagaatgacatattatgcagtcctaaagagaaactatgaagccatgagaagatacagaaaacacgtattatgagggaaagaagccaatctgaaacagctgcataccgtatgatttcagttatatgacattctggaaaaggcaaaattatagagacaataaaaatatcaggggttgggtagagagagggatgaataggcagagcccagaaaatttttagggcagtgaacctaatctgcctgatgctrtaatgatgaatacatgtcattgtaaatttgtctaaacccatagaatgtataacaccaagagtgaaccctaatgcaaactatggactctgggtgataatgatgtgt

SEQ ID NO: 856315 - DNA, 619 bp, Homo sapiens
acatatttccatagatttattcctaggtaatatacttttgatgctttgttatggtactatcttttctatttttcctcttttaactaatatttaactgatattttaatagctggtatacagaaatataactgatttttgtaagctgactgtgtatctatatagcagtcttgtaaaatacatttattaaagcgaataattacaaattttggaaaggattgtttatgtacacatttatttactaaaaatgacatcttcctttccaatcataactttttcccctttttcttgtcttttagcaccagccagaactttgattccatgttaaatggaagtggtgacaaatatagtgggtatgcttgtcttattctgcacagtaagattttaaacatttactcaagaagtatgacttttatgggtaaatatctttatcagattaggaagtttccttctaatcctaattggctacaagattttaatcataaataaatattgatttctgtcaaattctttttatgcatctattaaccttatcctaccagctttcttttttattatgacatcataaataggttgatttttacacrttaaacaaaactcgcattcttagaataaagccagt

SEQ ID NO: 856316 - DNA, 568 bp, Homo sapiens
agatggaaagtgctactattcctctctggaatagttgtgtagggttggtgttagttctcctgatgactggtatcatcaagaattggtataattcaacgatgaaatcatctgggcctggagtttcctttggacgaggttttaaatttaaaaaagcaatttatttaacaattataagtccatgtagatcatttcatctagtattaattttcttaagcttcattttctaggaatttgtgtatttcatctaaattcccaaattaattggcataaagtaattcaaaatatcctatctttttaatgtctataggatctatagtgatgtttcattttcatttctaacattacttatttgtaccatctctcattttattgattaaacttgccaggtaatcatcagttttgtaagattttttgaataaccaactttcgcttttttataatcctattttatggatattttttatttccttaatttctgctctttttgtttccttccaagtacttactctatgtttaatctactgctcttttctttttwaaaaaaaaaaaaaacattgtgggtaccaat

SEQ ID NO: 856317 - DNA, 544 bp, Homo sapiens
aaaatctctgaaccctctgctcaattttgttttgagtctaaaactgctctaaaatataaagtccattaaaaaaaaatccagaccccctaccttatgcaataccccaaattaatctcagatgattcacagaccaaattgaaaaataataataacaacatttctgaaagaggaaaacataagaaactatcttcatgaccttggggtgggcaaagatttcacaaataggacaggaaaagcactaaacatatgcttttttaaaagtgataaactagactttgttaaaatgaggagctctgtttatcaagcaatattaagagtttaaactggcaaagacaggccaggcacagtggctcacgcctgtaatcccagaactttgggagggtaagatgggtggattacttgaaatcaggagttcgagatcagcctgaccaaactggtgaaaccccatctctactaaaaatacaaaattagctgggcatggtggtgcatgcctgtwattccagctacttgggagctgagacaggataatcacttgaagccagga

SEQ ID NO: 856318 - DNA, 580 bp, Homo sapiens
ttataggtaattgttacagatgtaataacttttgcttaagtgctttgctattgcaaaatgaaaatgcaattattgtgggagattcacttgaaaaccttgaaacaatgcaattatagtgagagatttcaatagacctttttaagaattgaacaaatctagtagatggttaggtaaaaaaaaaagtttccagaaatgtttaacctctttgaaatacttctacgtaaccctggctgtatagcagctcaccatctctttagaatatcaaattcctttagcgactccttgagaagatattgtatctgtctaaatgaacactagaaagtttccttgaacatcttaatgctgttaatgctgtttccaaatctggcgagacactcaataatgtacagttgacatagctttcatcactcctcccccaaaacgccgttttgaagaatttatgctttctttctctcttcctcccatgcctggcatctgcactgtttgtcatgtctcctggtggccatacttgcacatgmaaattaaaagggaattgccaaggggagctggttctgcatccagagggctctgagcgaagatt

SEQ ID NO: 856319 - DNA, 664 bp, Homo sapiens
tgttaattattacttttacacatcacaatagctacacacctaccatgtcttaactctggttccaatgctgttcatgtcactcattcaaactctagtgagatgtgtaagagcaaaagatgcagaccttgggcctcaagtttgtacaataacacagggtgagccaacacagagaagtcaaaccaatggagttacaagtaggtcgatggccatctaactgcagtcagcttgcaaggaaggacagtttgaggtgagacagatttacaactgaggcctgcacatcaaggagcattcaggatctcaggcccttctcactcataatactaagttttcccatgagaacaatagcatgttagtgttggatggaatcttcgagatcttacgcaagatgctcaatgtcaaattaaggaaaccaaagcccagagatcaaggagctggcccaaggcttcacactggtaggcggcagtccaggagtggaacttgggcttcctgagctcagagtcaatgttgtttctgtgacgccacattgtgcctcattaaacatgggaattactgattagaattgacagtgctagtcatttatgttcattctaaccrctgggaatgtattatctatgtgccaagataaaaagaacagtctaattaggcatttagaaaatttagaact

SEQ ID NO: 856320 - DNA, 679 bp, Homo sapiens
tggattccattactaaaaggaagaaggggagattgaatactgggaarcaaataagtccctgattagccatatctgtaaatactgctgtcacctccaactaaataataaggtcttaaagggtagggctgcattttacactctcagtgccttcaaatgataagttcttaataaatatttcctgattgggtgatttggtgaatgcactttcatccaagagattttctggagagtttttattatactgccaaaaccaaacactattcaatcccagggtaaacactgcaggaaaaaaaatgtcacagggcaacatagtcataagtgggttctccccatgctcacacgcccttcattctaagctgggggaggctgctgtagtaacacagatgcaaaaaataaactttgactaaatggcttcatgttccagatgattggatgcctcgttaaagcacccaaagatgaagctactgctccggcaaagttgctgacctaattttgagaactaaaagacagagctaagtgtgttttcatggcatcccacattcctttcttaattcatcatgattcatgggaaccaggatctcaggctgcccctcccccaggtagcagttaagctggtggaattgttctctctagtccataaggacatggaaacggatcctgctggaggaagtcaatagag

SEQ ID NO: 856321 - DNA, 635 bp, Homo sapiens
tatctccatagacaatggagccactagyggtacatttatactcatcaatgaggccacttctgatctgattttctgacatttgtcttgatttaaaaaaaaaaaaggtgggggaagggagatggacaaaaacttaatctctggcaggtcccgtctgatgacagctcagcacacagtgtgtgtttaggaattgttctgcttcttattctccccacatcagtcatgattccagaacttgaagtggttcaaagtgagctcatagtagcatttaacctgttgagaatctcttgtcaccactatatgttttcactggtaaaagagtcatctgatttactgtgtgtccccacattcacaatgcatacatattcacacaggacatggaagccaaaagtaaatggttagtcacaaaaggtttgttttctcctattttgctgtttacaaaggagtgttatcttatgttggaaaggatttcagccaagaacagcagtgaggctgtaggagcaatgttacaatgtatttccctggctttttaaaacctattccctggtttctgcctgcaagccttaggatgtgagatgcgggctggaaaagctgctggagggtaaagcagtaatagaaaaaagaagatattttgagag

SEQ ID NO: 856322 - DNA, 600 bp, Homo sapiens
ggcctgaattctggctcaatgactttctctccccaagcctatattttttaatctgtaacatgcggtataatgataactagtgcatagaatgattgtggaggattaagtaagacactgggtatgaaagtgctttgtaaaactgtacactattacacaaatgtgtgttcattcccagctctctttctttaaatgagatatggtggtgcgtaatgatcgaagcagagacttggagtctggtgtgcctgtattcaaatctgactgcaccacttactgtctgccagatcttggataaattatttaatctccctaaacctcagtgtcctcatctgtgaagtgaggtgagtgatactctctcttacagttgttacagagattaaatgagataatgtgcaaaaaacatttagcatattgctaggcaggtgaccagtaatgaagtgagggtgaacattaggactggcacactaggaggcccttggatgagttagagacgtatcacattgcaggtgattgtggtgatgccaaatagcaggacagaacagacttagggaagcagrgcccactcactgcattgtgacatcactttgtaattaagtcttttcc

SEQ ID NO: 856323 - DNA, 528 bp, Homo sapiens
gtataatcacatttgcccctggstgaggtacagtataattattttctcgtgatgattgccaaaaagaatcatttgaccataaactgaaaagagaagagaaatacttccatgaattactacttgtgatattccctaattttgtctaaaatgtaaaccgttccatttccccataagattttacatggtagagaagaaaaaaaaatgcacgctttgtccttttaaagacccttgacacatggtgctatttcatggggagtaggggtagaggatatagttggctagattctgtgaagaaaggggtagaaggatggtctctgagttgacgaggatgcaccaatgccattaagcccctgggctgggatgggggtggcaggtctgtatccaaagtgaaagctaggttaaattgaaataatttcatcaagtgtatgggaggacagacggtcttcagttttcatcactatgccttctagaaaataccttttaatgcaaatttttatgaaggatattattataaaattggtgatattt

SEQ ID NO: 856324 - DNA, 622 bp, Homo sapiens
tcacttgattgacaatggatcataagcacgcagtagttttatctgtagagggacaatcagagatcagctagtgtggatygggctcagtgctctggagaagggatgtcacacagaacaggaaaaaaaagtaaattctcaaaaagtagaccttaaaatactaagcaaaagatatatatgatcaaggttttttgagttcttgaagcctagctttggttgaccaaaatccaacttattgtataaaaacaatagaaatgagaagaatgtatatgagagtcaatttttctaacctgaagttaattaaaaagaaaaagctgaggagggagaagaaaagcctaagaagagagcaacaggagtataggtcgggtaggggctttacgccatcttctccagattgtcctcactctaaaagaggtttagaataataggagagtacattaaatgtgcctagtctctaagtgagcctaaggaggcaggaagcctttctgagagcctcacactcaggggcgattggcagtggaagagaagacacaataccttgatgtctaggcagaagggatgtatgcggccttccaagttttgattatatagcagagaatcaggaagtttctcaaattcttagaag

SEQ ID NO: 856325 - DNA, 608 bp, Homo sapiens
taaactggtaaagatgcaaatgttctatttgaccatttgatggggccaaggaagactagctaaaagcaatgtctatcccatggcctgtatatttaagagaaaayccacattttaacacaaattaagggaaagaaaattggaattcttgagttctactttaatgtgaatttagccagataccaatagacatttttcattatccccttctagtttgtctgtttttaaaaataatgtggcagattaaaacactcagataatgtgttcaatgtaaaatgtgacaccaagcaaaacattgtggttgctctctttttataaggcaccatgtttccaaactactagatttatggtaatttacctagtgggaaaatacccttccaaaattgtagtataaatgttagtttaataatatctgattatttacagtatatggcattgggaaggcttaaatcatgttaaaaaatatctttatacttaagcatcaccttagcagaatttaaataactgaatatatataaatgttaataatctcactttctatagagaaagtgtatcaatcatttggaacaaagaataaacataccatactactttattttcaaggaattatt

SEQ ID NO: 856326 - DNA, 344 bp, Homo sapiens
cattacttgagattgactcaattctaaaattatgtaattttgtcttttgtttctgaagcctgatacattggactgggaccaaccaactrtaagaaaaacaatacaacattaattttatttggatccatcttatatttctatgtattcagacaagttagccactcccccatgatgaattatttataatgagttaccatatcttaagaaatttatatatattaaaatacacaaaacaaataaaaccacacttctaaaaagaagcaaactctctggacttctaaagaacaggtgacctaaaatggtatgctcactgttctctgaaagtcaaccagaggatgccaaat

SEQ ID NO: 856327 - DNA, 640 bp, Homo sapiens
tttatttactaagggcttaaatatcctatcataatggtatacacatttgcctaacaaattttgaattagctcagtatctaaatgactctaggtaatgccataagccatgggtttatgtcaacattttcaggttattaaagagccattatgatccagtgtttatgacatgaagtaccaggaagttttgtcaacctgccacagggcccaaaattctcctatttggtattaatctaagatggctttaagagttcaccaaaaatgaaatatcttcagaagagaaagctgaagtcaatatctggggcttgccagtgtcccttccccaaagtaataaaagatttagtgggtagagggggcaagacactccacctgatgttagttaaagacgggtaacataatttgattccaattcatcagtttgaatgtaggcacaagtctatatttgaaatgtgaaagtgaggtagcaatatgttacaaagggattggtgggtttgttatgcaaaagcaaatgaatcccttaatgactagagtcagatctactgcttcaatagggagtgattcataagactatcatccagggtaccytgatggaacacaatcaagtctctgaatctgtcattggaattgctgaatctctacaata

SEQ ID NO: 856328 - DNA, 544 bp, Homo sapiens
cttatccattaacttcagctatccagaatctagtcaatgatttaaaaaattcacaaattctcaaggattttattcacataagagctttaaatgcagaacctaattagaactatattaaaacttgatttcattattattcttcaagtaagtatttatatcgggtttctcattcattcaatgaatttattgaaccctttggtgaatacttggtggcatgttgctaagtattaaggattcagtagtaagaaaacaaatgctctgctcgatctcctagcaggtagcagggcaagataaaatccacaatgtttgtatgtcaaataagaaggtgattgaggtggggtgggcagtgacttttaaaagccagcacatgcctttagctacatgggaattcataacacacagtggtttagaatytctgaatttaaaacaaaatatcagaaaaaaaggaaagcaaatatcaggaaaaacacaaattgaactaaattttaaaaattttaaactaaaacaactgttttattttgggctgctctaacaaactacgata

SEQ ID NO: 856329 - DNA, 626 bp, Homo sapiens; identical to SEQ ID NO: 823851

SEQ ID NO: 856330 - DNA, 629 bp, Homo sapiens
gggaaggaattcagttcatggtttgactctgaaacaaaattgataacagcccttttccaaaaagacccacttcttgcctggggtccaatctgcctttgcaggactaacaaattagcgacaagatttgaaatcacaatttaggagtcatgcagcctctggctccaagagtccgaacctccccaaattgctcctgggggtaacatcactaatgtaaaacctaagatcactgcttgagatgttttgctgaccctgaactggatgaatcagctgacaccactcagattgataatctggcccaatcagttctgccatcacacccaggaacagaagacattatgaaaacctaactttggccccctatgattcaatctccaacctgaccaatcagcactccccacttcccaagcccctatctaccaaattatgtttaaaaactctgatccccaaatggggaaactgatttgagcaataataaaactccggtctcgcgcacagccagctctgagtgaattactctttatccattgcaattcycgtgtcttcataaatcagttctgtctaggcagcaggcaaggaaaacccattgggcagttatagatcaatctcaatatggacatactttgacatga

SEQ ID NO: 856331 - DNA, 633 bp, Homo sapiens
tgatttttcagatgagatcacacagctgatataaggcagaagtgaacttgacaattcaatatatgtgtgttaaacataatacattaaaaaatttattaatcacacagaaatatatttgatgtgcaatattcctaaagtctccttatagtactcattcttccttcttatgcatcaaccttgtttctttgtcacgttaattaacattctaagttaagagaaaacttgataattcctgagtcaaggccccatccatctcaccaaccacaaaagattaagctgcaaaaaagttattttgaaataaaaccttcaaaagctgctactttgggtttcaatctagagataagcaatggtgaaataagaagggccttggaccaagtggcaaatatttaaaaaatattagaccagaatgacgagctttcaagggagcattggccagatttatgcattctcaccaggccaaatatgcttcatacctcactggatctttcccatgaatacagacagaacactccacaaaacataccaataatacaaattgaattcttacatttgctgtgcactatggtattcactttgyttgcattatctcattgaaaattcaaattttaaaagaaagtactattatttttatat

SEQ ID NO: 856332 - DNA, 642 bp, Homo sapiens
aagctggggataagaaaattaaaacatcacagtgcttatgagaaacagagtcatgactggatcctgagcactttggctccgaagtgttcaattcccacactgctagtaagaycctgtatataatacaatagcttacttttagtggcctagcactcactcagtcctgaatgggtggggcccccaccatatctaaggtggtatggtttaatcacaaaggttcagaggcagtagcctgagtcccaagctctctagattctaaaaggccaaagttctaagagtcaaaatcttgcacagaaatcagggacctggaaaggcaaggccttatcatcacattataggtgtttattaaaaatcatgcaatcaatatgtattatttactgctgagcagaaagtaggtgtcatctattgtgtgaaggacagggaataaaatgaaagcttagcgaccctctcttccagaaatatcacatgagagaaaaggcatcttttacttgtctcctccacgataccagaggcttcctgaatgaaccaactatgtcttcctcacttctgtgtccttcatggtgccaattatatgccatcatgtgcacattatgtgccatttgtacactgcacagtacaaaatgggtatctgttgggtaaagg

SEQ ID NO: 856333 - DNA, 606 bp, Homo sapiens
ttttatctggtagtgattttagcttttatctgatagtgataaatctggctcccatgatctaaaacatacacatacatcaaaacacataacatggtttcagaactgccagaaggtatcgctatgcacagttccttttgtttttagcttttcagtttccagtgaaaacaatgtcaatgttttctaaagttattcaggtcaattacttttccccccactacttttagtgaggttataacatacatttgtaaacgttagatttctttctcagtctgcattccatcctgagatccttaggttgatccttttgaaaatttatttgcatatctaaagttcacactcacgatgcacagttctgtggacttcgagaaatgtatagagtcatatttctgccacccaagtagcatgtgaaacagtcccattacaccagagttcatctgtgcagcctcttttggtcaactattgtcctctccctcaaaccttggcaaccaccaaattgctctccatccctaaaataartgaagtcaaatatgtagcttcctgggtctagcatctttaagttgacaaaatatatttaagagtcatccatgatattgttaaaatcaatag

SEQ ID NO: 856334 - DNA, 622 bp, Homo sapiens
caatgataagatcacccactttatagttacaaagtcagaaactagtacacctgtatggaaatggaatatagaaatgttgatcttaataggtggcttaaaaaatacatcagyataggaattattattcctattctattagcgtaagaattagtacttgagttatcaaaaatatgttggaggcacttattggcattgttgaatccaatatgattccgccctggaatactgggtggaaaatttgtacatttttgaaaaagatatgtaattaaagatttgcagcagaaaatgtcattaaaatttttaagctaaaaaatacaggaaggaaaaaataaggaaggtaaaaaaaaggaaggaaagaaaaagaataagaaagcaaggactcaattgaccgatcaacaagactctcttgttggattaaagtcttaacaccctataatgtaatattcaaaaaacaagtttttttcaattaaaaagaaataacaagcatcttcaaaacaatgacatgtggagtaggaaaaaataataaaaagcaacattgaagattataaatcaacaaaaagggtaaagagaaacatcatatattaataaaatgtagcaggcataaaaatgttgtgttcctaat

SEQ ID NO: 856335 - DNA, 628 bp, Homo sapiens
gtgtgatgcttccaactgtttctttatcaagataactgacttttgtgcctctacaatatagataatctaacttaactctaacttgctataaatgtaccaatcagccaatcttcaaggtcttgatcaataatgtggtttaaattattgcacctcactttctacaaaaacataaatatgacattacattgatgacattcttctccaaggaggttcacttgccacactcattcaggacatacaaaatactcaaaatggatctaacaaaaaagacattaaccgttgtcccattatcagtaaatacctctttaccctcttaacaccacttaacattgtgaatgctaacaaggtcaacaggtatttcttgacgacaggacaattgttgatcttttttttctcaattgattttgtgcttctacaacagaagttatatcaattaactcctaacaagtgctaagatgtaccaattggcaaacattcagtggatactgagattcaaattaccagagccaataaatatttatatactctcttggtgcatgtgtgacatcatcagccttgacttgtgaattaattttgagtagcaggaattgatcctgcctcatgartatagccacaaggtacattgtga

SEQ ID NO: 856336 - DNA, 471 bp, Homo sapiens
ttcatagcaatgtgagaactggctaacacagaatgtgtgtgtgtgtgtgtgtgtgtgtgtgtgtgtgtgtgtgtggtgtgtacttgctttctttttttttttgaggcagagtttcactcttgttgcccaggctggagtgcaatggagcaatctcggctcactgcaacctccatctcccaggttcaagcgattctcctgcctcagcctccctagtagctgggattacaggcatgtgccaccacgcccagctaattttgtatttttagtagagacagggtttctccatgttggtcaggctggtctcgaactcccagcctcaggtgatccacccgcctcggcctcccgaagtgctgggattacaggcatgagccaccgcgccyggcggtgtgtacttgctttctaaaaaacattttacttttttactgaggtaaaatttgtgtaaaaaaaattatcattttttaagggcagggg

SEQ ID NO: 856337 - DNA, 607 bp, Homo sapiens
agtgaaactccaactctactaaaaacgcaaaaattagcctggcatgatggcacacacctatagtcctagctacgtgggagtctgaggcatgagaatcgcttgaacctgggaggtgaagcctgcagtgagccaagatcacaccacttctctccaatctgagtgacagagcaagattctgtcttgaaaaaagaaaaagaaacacaatttttttcacaagcgccactaaaaaaagtgatcaagaagtaccagttactttaaaaaaattgttgaaggtagaaggttcagaagagtattgagattcatagaaacaaaacaaggagttagtgacactgaaagcataaacaaatataaaaaaaatcctgagccagagacaaagtgggcttcctaagattttaaatgtttaatatcttcacttatacatttaaaatctaaaataataaaatgtattcacatgagaatatattactttaatagtgttttattttcaaatataatttcayagtcagaataatagatgataaaaattattttgagcacttattgtcaatgtatataatgacatcaagattgactagatcccccttaatcccatttcttttacttggtc

SEQ ID NO: 856338 - DNA, 615 bp, Homo sapiens
gccaggtggtatggaagcctctacgctaccacgagcacttaagcatgcttccgagtgagatggggagccacggaaggtcatgagtgaggcatggcaatacttgacttaggttttgttttgttttgttctgttttgttttgttttgtttttgagacagagtttcgctcttgttgcccaggctggagtgcaattgcgtgatctcagctcaccacaacctccgcctcccgggttcaggcgattctcttgcctcagcctccagggtagctgggattacaggcacgcgccaccacacccggctaattttgtatttttagtagagacggggtttctccatgttggccaggctggtctcgaactcctgacctcaggtgatctgcctgcctcggcctcccaaagtgctgggattacaggcgtgagccaccgtgcctggcctttgacttaggtttcaaaaagattaattggccgggagcagtggctcacatctgtaaccccagcactttgagaggccaaagcgggaggatcgtttgagcctaggaattcaagaccagtctgggcaycatagtgagaccctgcctatttacaaataattttaaaaattagtcaggcatggtgatg

SEQ ID NO: 856339 - DNA, 351 bp, Homo sapiens
gatttcacattagcttctgagaaatatgaaaaatagatgggcttagactttcataatmatgcccaaattcacaggaaggcttcttagatttccaacatcttgggatcacatattttctcatacctccacccacgccaggaggaaacatatgataaaacaccttgtttccttcaagccttatacttctggtcagataaggatagaaaaaccaatagtagacagggctttgctttctgaggcgtatccctgacactgtcatactcaggcctctgttagccctttgcttcatgggtaattttttttctttcttcacttcccatcactagttttgagagttacattgacatatca

SEQ ID NO: 856340 - DNA, 537 bp, Homo sapiens
actgttctaggaacttaaattgaagaaaaaaatgtatatacttgatatggtttggctttgtgtccccacccaaatctcatctcgaattgtaatccccataatccctgtgtgtcaagggagaaamcttgtgggaagtgattggatcaggaggtggtttcccccatgatgttctcatgatagtgagtgagttcccatgaggtctgatgattttataaggggctcttaccccttcgctctctctttcctgctgacatgtgaagaagttatttacttctataatttgcatctataatttgtcaattaacaaaaatatactactactgttacaggtaacagtatggatagacctccaatatgtttgctatgctaaatgaaaggtgccagaaccaaagattacatattctaggattctagttaagtatattcttgcaaaaataaaattatgtacacaaaaagattgtgtttgccatgtgcggtgggtgggagaatggtttgacaaccaagaagcttgaggttatttattatgcatgatcatgt

SEQ ID NO: 856341 - DNA, 537 bp, Homo sapiens
actgttctaggaacttaaattgaagaaaaaaatgtatatacttgatatggtttggctttgtgtccccacccaaatctcatctcgaattgtaatccccataatccctgtgtgtcaagggagaaaccttgtgggaagtgattggatcaggaggtggtttcccccatgatgttctcatgatagtgagtgagttcccatgaggtctgatgattttataaggggctcttaccccttcgctctctctttcctgctgacatgtgaagaagttatttacttctataatttgcatctataatttgtcaattaacaaaaatatactactactgttacaggtaacagtatggatagacctccaatatgtttgctatgctaaatgaaaggtgccagaaccaaagattacatattctaggattctagttaagtatattcttgcaaaaataaaattatgtacacaaaaagattgtgtttgccatgtgcrgtgggtgggagaatggtttgacaaccaagaagcttgaggttatttattatgcatgatcatgt

SEQ ID NO: 856342 - DNA, 610 bp, Homo sapiens
gacagagggagactccatctcaaaggaaaaaaaaargaaaagaaaagaaaaagaaaatatactaaaagcaacatgaaaccatatgaaagtataaaataaaggtaagtccatagataaatacagaatactgtaatactgtagtggcagcgtgttaatcaattttaattctagtataaaagttaaaacacaaaagtattaagaataactataattaaagaatattaatatgttaatggatacacaatatatgaattgtgacatcaaatatggagggtggacaaaaataaaaatctagagctctatgtgatggaagttattatcagtttaaaacagactgttatatgatgttgtatgtaagcctcataataaccacaagaaagataactgtggaatatagacaaaagatagaaaatcagaaattaaagcatactagtatagaaaatcatctaatcccaaaggaaaatagcaagagagaagaaagaaaggatttacaaaacaaccaaaaaaattattaaagtgtcagtaaaagttcttacctattaattaccttaaatgtaaatggactaaattcttcagtcaaaagacatagagtagctggaaggatttttta

SEQ ID NO: 856343 - DNA, 589 bp, Homo sapiens
ccagggaccttgttagaccttctgcaggtggaaggcatgaagatcgaagaagagtccgaggtgagagggcgaggcgacacccctcttccctggacggggtgtcagtccctgcagcaggggcccttggaaggagaagcagatgtctgcaaagcatggaacaagggagctttcgtagatggcagaggtgaaggacatctttagtcctggggaggccttttgggtataaataacaggaacccagtcccactagctgaagcagaaacgggtgacagtggacaagggcagctcgcagccctggatggtagggcagcacagcaggaggcccccaggggctgaggccagctccctactccactctccctgcttcctgcttccctccggccacctcttcagcctctgtgggcaaactggtgctgtccactctgtgtctgggtggaagaagcttctaggccctcccagtccctgggctagtgctcatccaggtgttcagcacatatatgcagtggccactgtgggcctgrcatgatgccaaggtgccaggacagaggtgaccacgacagagacagtcctcgccttcaagggactgaca

SEQ ID NO: 856344 - DNA, 604 bp, Homo sapiens
attgctgggtgaagcaaaaaaccaagttggttaaggtttactaggcgcccctttgtgcmgggccctgggtggcactggtgccctgtgggcttgacagccagtggaaaggaaggtgtctttagatgagggggttggggaggggagtcataagacagagggagtggggtgacgctgtgggtcagggtggtgcccacccagacccctggctggcagctgcggtgaatgtgcagagctgtctttgtgctcaggtgagcagcctctgaccaccacggctgcagaggtctccgggagtccccttcctgtcctccccagagggatccgcaggggtggatgctgcacagaagaggccaaagcgctcgatttgtcaggaaggaggaaaagcactacttacaaaaaactattcaaaatgcactcgcccagctgtgagcttccttgtcactccttaccagggacagagtctgaggagaaagccgatttcactgagacgccgctccccagcgggcagggaaagggggcccccttcagacacccccgagtctctagttggaaggctgcttgttttggggctctgcccaccacagcttccacaagtggaggggcggcc

SEQ ID NO: 856345 - DNA, 626 bp, Homo sapiens
gacatggctctaagcattatatacataaacattataaactcgatctaatctacctgttacaactccttgtgaagtaggtcctgctatccccagtttrcaaaaggcctaacctgaggcttcaagacctgaaggaccttacagctcatcagcgatgcaaccaggatttggatccaggccgtctgcctccgagaccaacctcttgaaccctactcctgcccttgaggggttgcgggggtttgccagcctccttgcccacctcagctagcttactcaagcccaactttgaatcagttaacgatgagcaatcggtccttctttcagaatctggcctcctttgtgtgcgcggcagtgtctgtcgtatatctgtgtgatgtgtgataacagtgctgtgggaagagggtgggtctactggagctctttaaagggcagggtaagggctgcgtctgtctcattcaatgctttatcccagggcttggcagatagtagttgctcaataaatacctgtggaataaatgtacgtgtgtgtactcaacttcagaccctggagcctgagggtgaacctgtgggggtcaggaccaggtccagagcatggtccagaggcccctcttctcccttgagctcccaca

SEQ ID NO: 856346 - DNA, 618 bp, Homo sapiens
tccatctcatcctgatccctgccctcccccgctccccaggaccctcctaccctctaccttagtgcagcccctcccaagccctcccaaatgtactcaccacggggctgaagaggggtctgtagggtcctcagccccactgcctccctgggggcctgcggcgtctccagggacccaaacacctggctcccagggggagctgcgccctgtgctggcagcgggagaggcacagccagtgattggcatgtcccaccccctggcacgccagccttagcggggagggagaaagggaaagagagggagggaggaaagggagaaaaggaagggaggggagctggagggaagcctcaggcagcgtctggggttggactaggttctggagtgtgcccccctccttcaccagggcacccaatttgagccccaagagggaggagaaaggacatgaggaaggcgagcccaggaaggctaaaagtcccggacgggagagaaggcggatacagggagacaaacacccacacccactgcacagacccggcggcacacacaccctcacaaaggcacactgtttccttgggctcctcccsccagccaaccttagagcccccagcccctgtgcaccat

SEQ ID NO: 856347 - DNA, 625 bp, Homo sapiens
gtccctggccaccatcaagtagtctgaagtgccctctgtggggtggggattgtgtctcgtgggttctcactaattcccttggaaagatccaatcaaggtggcagtcagcacacacaaggctacayccttgaaaaatcacatgagatgtccaaagaggtgctgtgaatgtgtcataagaaacatcatctttagtgacttaaaaacatctgggattcttggaaggtgggaagcagacaggaatagctatagaaaaacagccacagctctgaagcatttgtagaaggctgcctagagagcaggggagccaacttcggagctaggtggctgaaaagtgggcaggtagggtacaggttggggtccctgaccccagcatggtggttttcctcaggccatgggcagcagagacatttgctccctcaccatctgtgagagtaagtgctgtgcccagggggcaggccctggaagaacaagagcttggctccctccttgcccccacaccattgtcagggatggcttcagaccagggggcagaggaacgagtagttctggctacagcactgatctggcaaccggggatccccaggactttgagtaaaaagaagaccagacccaacaacagaaaaac

SEQ ID NO: 856348 - DNA, 527 bp, Homo sapiens
tgcactccagcctggactgtagagtgaaactctatctcaaaaaaaaaaaaaaggaaaaacccaaaaaacaaaaactcttattggattacaagttaattttgtgtcaggatcagtcctgggaatggaatcctagtatacaatgttagagatcctataccttagaagaaatccagttattcaaaaagtatggtagagcttctcaatgctttcttgaactagagcaaccatgtttggccaagtgtgtgctgaagagtaaaagctgctctacaaaaagagatcaaagcacaaagcagttagagaaaacaagtagctcccaagagacagagcttaccataactccctgagctcctggtggctttccatttccaggttctagtctttcacgaggtatagctacagttcttaaatattgcaatatagactgcttctttaatgaattcacctttgctcagaaacacaaatgcagcaaacatagtgcaaactrgaaattagccagaaaaaaagttcataaatgttttctaacatat

SEQ ID NO: 856349 - DNA, 589 bp, Homo sapiens
caggcgcaagccaccatgccyggctgattttttatctttttagtagagatagggtttcaccatgttggccagggtggtctcaaactcctgacctcaagtgatctgcccacctcagtctcccaaagtgctgggtttcccatatgagacactgtgcccagccttgaattttaagttgggattacaggtgctgggattactggtgtgagccactgtgcctggccagctttgtttctcaataacaaaactatttcatgaccaggtatttgttggatgtctgctaggtgttgactctgtgctgggctttgtggtacagccatgaacaagacagactatttctgtatttgtgaagctcccatattaatgcagtgaatttatgaaaaaaacaattgctgtgacaatatatctaatgtaaaaaatacctttcaaaatactgggaatgaggaagagtggaagcaaggagctcttttttttccctccctagatgatgtttaaataaaaaagaccatagagatgcctgacagttgcattgctgtgactctgatccttatatattgcaattggttctgataattacaacctgaattgctcc

SEQ ID NO: 856350 - DNA, 589 bp, Homo sapiens
caggcgcaagccaccatgcccggctgattttttatctttttagtagagatagggtttcaccatrttggccagggtggtctcaaactcctgacctcaagtgatctgcccacctcagtctcccaaagtgctgggtttcccatatgagacactgtgcccagccttgaattttaagttgggattacaggtgctgggattactggtgtgagccactgtgcctggccagctttgtttctcaataacaaaactatttcatgaccaggtatttgttggatgtctgctaggtgttgactctgtgctgggctttgtggtacagccatgaacaagacagactatttctgtatttgtgaagctcccatattaatgcagtgaatttatgaaaaaaacaattgctgtgacaatatatctaatgtaaaaaatacctttcaaaatactgggaatgaggaagagtggaagcaaggagctcttttttttccctccctagatgatgtttaaataaaaaagaccatagagatgcctgacagttgcattgctgtgactctgatccttatatattgcaattggttctgataattacaacctgaattgctcc

SEQ ID NO: 856351 - DNA, 641 bp, Homo sapiens
gccctttcctctgtctatgaagccagccgtgttacgtcttcaaatctctccyctcggtgaccttctctgactgaccctcgcatgcccccttataagacccttgggttatcacctgggtcatccagggtcgcctccccatcccaggatccttaacttcatctcagctgcagcgtccctgttgtcctgtaagggaacattcacgggccttggcgattggatgtaggtgcctttggggctgtgattcagccaaacccgccccttggttacttctgggtcagaatccaggggagagttgggtcctgaggtttggggcctgtcctcctcacttgctgtggttcacacctggactctggggctcaggcctgccttccccctttctccctcctgggcgcagggctgcgctggcaggactgtcactcagcctgatggaacgcctggctgaggagtacggcgcgagggtggtgcggacactgacggtgcagtaccgcatgcaccaggctatcatgcgctgggcctcagacaccatgtaccttgggcagctcacagcccactcttccgtggcaaggcacctcctgaggtgagtagctcggcaccacccgccgccccatccttctgccctggctaatcctctgcgtcacctg

SEQ ID NO: 856352 - DNA, 486 bp, Homo sapiens
gtgtacagtttgataagttttgacatctgtatatacccgggaaaccatgaccacaaccaacatagtgaacacatccatcgcccccaaaagttcctcgtaccccattggggtgtttccctcctgccaccccctccccaggcagcagcccttctgctttttggtaatgattgcctggtgcttctcaccatatggctgccttgtaattatttgagcattcctctactgttagacatccatgtttatcccatttttgctacttcggctaggaagagcattctcatacatacagatatcttcatatacttgactatttccttacaacaaattctagaactggtatctccagacccaaggttatgaatgttaagaatttggaagcmatttgcccaatcttgttcacaagtcttgctaggtatgacatgcactttccatttgattttctttctgaaaagttgaatcatcataatgccaaaaaaaaaatactaa

SEQ ID NO: 856353 - DNA, 592 bp, Homo sapiens
cagcgtttgcagaggtaccaagaggcacttctgcaggggctacgagttggtagaaggaaagcaatgaatataaagatttcagaagtgcttcaaggagctgatgagagcctaagtcagttttataagagactctgtgaagcattccggctttataccccatttaactgtgaggctgctgaacatcagcctatggggaatacttcattcgtagggcaagcccagggtgacatcaagtggaagctgcaggcatgaataccacccagtccataaaagtggccaccacggtgtatgttaactgtgaccaaggaacaaaacgggaaagagcaaaagccacaagcgcggcagctaagcacgcccaccattaagttcctctccccagcccggctctatctggaaaaagaaggggccagggacttggcgccaggagaagagcaaaggaaaaggaaaggagaaagtaasagtaagtgtgagaagggaaagaagaaagtaaaaaggaaatcagaaaaaaacaggagagacagacggcagtgcacgggggcggggcccgtgccgttgtccggccccaccggctggccgcaagagcagaactcag

SEQ ID NO: 856354 - DNA, 619 bp, Homo sapiens; identical to SEQ ID NO: 856308

SEQ ID NO: 856355 - DNA, 608 bp, Homo sapiens
aaaaatggctgcttcttcaattttgccctccaaatctcccataaaaatctctcctgtggcccaccctaactggaagtgtgcagggaagagaatttcaggaaatgttkttcagtcttggcaaggtgacatcttacaaagtcaccacagtaagttctcagtcaagacttattatatgattgcatgagtaaatagattgatactcaggtttccaggtttgtcacaaaggtcaatttaacttataacaaagctataccaaagtatttttaaataaaaacaacttcagatttaggtaaggagaaattttatttaaaggagtgttgcaagaggggagaaaaagacttctgcgataggaagagggagacaatttcaatagggagaactcagaccataagatcaaacatctaaaaggtcaggaagaaaagaactgttcttatatggtgaagagtaagcaaggtctatggagtgtcttttgtttggagtaaggaggctctttctgcatgctattgttggctctggctctggctgagggtgggtcaaagttcagggtcccatagggaggacagaaggttaactaaagtttggtcaagttggttaacaagcactttgtt

SEQ ID NO: 856356 - DNA, 579 bp, Homo sapiens
ggatcctaaccagattgaaayggctgagatgacagatatagaactcagaatatggatggcaaggaaactcaacaatctgccagagaaagttgaaatcaaatacagagaagacagaagaaagattcagagcatgaaagacaacatagctatatattaggaaagaaccacacagaacttctggaatagaaaaatttactacagaaatttccaaatacagttgtatactttaaccataatgtagaccaagcagaagaaagaatttcagagcttgaagacaagggttctcaagtaatccagtcagacaaaaaataaaaaataaaaatgaaaaagccttcaagatctatgatattatgtaaagtgaccaaacctatgacttactgacattcctaagagaagaaaacaagcaacctggaaaacatatatgagggtttaattcaggaaaatttccccaatcttgctggacaggtctatatgcagatacaagaagttcagagaactcctgtaagatactatacaagacaatcatccccaaggaatatagtcataaagctatccaaggtcaatagagccagaagagat

SEQ ID NO: 856357 - DNA, 579 bp, Homo sapiens
ggatcctaaccagattgaaacggctgagatgacagatatagaactcagaatatggatggcaaggaaactcaacaatctgccagagaaagttgaaatcaaatacagagaagacagaagaaagattcagagcatgaaagacaacatagctatatattaggaaagaaccacacagaacttctggaatagaaaaatttactacagaaatttccaaatacagttgtatactttaaccataatgtagaccaagcagaagaaagaatttcagagcttgaagacaagggttctcaagtaatccagtcagacaaaaaataaaaaataaaaatgaaaaagccttcaagatctatgatattatgtaaagtgaccaaacctatgacttactgacattcctaagagaagaaaacaagcaacctggaaaacatatatgagggtttaattcaggaaaatttccccaatcttgctggacaggtctatatgcagatacaagaagtkcagagaactcctgtaagatactatacaagacaatcatccccaaggaatatagtcataaagctatccaaggtcaatagagccagaagagat

SEQ ID NO: 856358 - DNA, 603 bp, Homo sapiens
atggccttgaccaccacctgagaaacctgaatacttaaccaggtgtccctagggcaagtttgcatcctccctatagaactgcagctaatgtgctcttgaaagtgccacctcctggctggaggccaaccaacacaaaatgagtgcactaaacaaaaacaaccaacgaccctcacagagtccacttcactaccctgccacctccactgaagcaggtgctggtatctatagctgcaagactggaagacagttcacaccagaggactctttgcagacactcctcagtaccaggctggagcctggtagctccactgggtggctagactcagaagagcaaaaacaatcactacagtttggctctcaggaaaccccattcccaggggaagggggagaatgctacatcaaaggagcaccccatgggacgaaagaatatgaacagcagctcttgaatcccagatcttccctctgacatagtctacccaaatgagaaggaaccagaaaaacaattctggtaatatgacaaaacagggttctttaacacccccaaaagattayaccagctcaccagcaatggatccaaacaaaggcaaaatccccgaatttcca

SEQ ID NO: 856359 - DNA, 638 bp, Homo sapiens
tgttggccaggctggtcttgaatccagcctctataaattttttttgtttgatttttgagatgaagttttgctcttgttgcccaggttggrgtgcaatggtgccatctcagctcaccacaacctccgcctcccaggttcaagcaattctcctgcctcagcctcccaagtagctgggattacaggcatgcagcaccacacccagctagttttgtatttttagtagagacaaggtttctccatgttggtcaggctggtctcgaactcctgacctcaggtgatccacctgccttggcctcccaaagtgctgggattacaggcgtgagccaccgcgccgggccagcctctataactttttactctgaagaatttcaggtagtcaagagtgtttatccaaatgttgaggaaaaggactgcagactagaagccagatttgttggctcaagtaaattaggatgagtgatgttataagaaaccagttgggaaaccaagtggagagagttcctcaccacaagggttattcataccagaagggccagatgacggagcatggtggcatgcacaatttctgctgaaaggttactaatgatatcaaagacacaggtgtggcttgcaaaaatccaacaatccaattaggatcc

SEQ ID NO: 856360 - DNA, 634 bp, Homo sapiens
aattgcaccttctccaacaagggctgaatcctagtggcccttgcactgggaacttccaaatagttaaaagacttttctgacgcaatctgaggcgatatggacaaatgtggatttccaatattgcatcatgaaatgtatcaacatttgcaagatctgtataactcagtgaaccaatatttccagatgatcaatccatgatgcaaaaattccatttcaagtgtaagatagatcaatggattttaatgtaacattatatgaaaaggtttctcattccaagctgtaacctttaagaaagcaccattttttgagttttaatgtaatttccataaatacccacaattatcagaaaagattattaagctattcctcccctttccaaatacatatctgtgtgaggctgtatttttttttatgaacttcaacaaaacagcctatcacaacagggtgcgtccagaagcagatacgtgaatctagctggtttctattaaggctgccattaaagagatttgtgaatataaaacaargccactgttctcactaattttgttttggaaaattaaaaaactattgtatatattcacgtatgatagatgttatttttaaatgaattaacaaatattttgtaattttctct

SEQ ID NO: 856361 - DNA, 601 bp, Homo sapiens
catacaaatattatcaactgatttttgacataggcacaaaggcaatttgatggaaaaatgagtcttttcagcaaatagtgctggaacaattagacgttcatacataaaaaaatgagcctagacacagacctcacaattgacagaaaagttaactctaaatggatgacagacctaaataaatataaaatctaaaatttctggaagaaaacacacatgaaaatctgtgtgaacttgagctgttgatgaggttttagaaataatataaaaagcacaatccatgaaagaaaaactgataagttagattttattaaaaattaaagcttctgccctgtgaaagacactgttaagaggatgcagagataagccatagagtgtgagaatatattttaaaaacacttatcaggtaaaggacttcatctagaatatacaaagaactcttaaaactcaataataagagaaaacaattttaaaatgtgcaaaagatctgaatggacacctcaccaaagaagagacacgcattacaactaaatatataaaaaagacactcaattttattcrtcagggagacaaattagaacagcaatgaaatactaatacatat

SEQ ID NO: 856362 - DNA, 648 bp, Homo sapiens
agaggtgttgtggtgaggtaaagaastgggtatagaattgggaaagagttaacgtttaaaggttgttgtataaaatgggcagggaattcactgactgacaaatagactgatgatgagagttacagttactaaaataggcttatgatattccagtgattgaattattcactcacctaggtaactggtgtcttggccaaccttagataagccagatgaacagagtgctgataggactgaaacagtgaacaaatccagtagaaagaagaaaccctttaaatgggtctagaactaggcaccacccaccaaacacaggagtacttactgttgcatttggagacactaattgtattgaatttttccataatctctacacccacatttgaccttaaagacacaaatacagaaattaatctgtaggtggcctcaaatcaggaaacatacagaaactagattatccagtgcctcagttatttcttagagataagtcaattattatgcctacagtttcaggccatttagtaaatttccatttctttgcctattaggctatgggatacagttacccagaaggtatgcaagagaatttgttgagttgcagaaataatgtattagagcacacacacatacacacatgtgcatttctcattt

SEQ ID NO: 856363 - DNA, 531 bp, Homo sapiens
ggttcaagcatcagcttggccacttagctgaatgacatcaggcagtttatttaaatcgctctgtctcaggtttttcatctctaaagcggggatactgaaaactccaggagtttgagagagaaaagtatgtaaagcatcctgcacagtgcccagccctggataaacatttgttcccttcctcatgtctcatttaagatttgccttgtcacctccctacggtggccatattgttgactgaatagattccaatccaggcaagtgttttatgtaatgtcactgaaatggagtttataacaaaatgaggttttaggaaagcatttgtaaactatgttaattgaagattgaattagtaggggatttatgtgcccgctgcacccccaccccaacaactctgctrtcatggtcattactaatcataaaaatatattttatctttctttagacaataagctttctcttcattgtgatgagtgccctaacaacttctagtttactacaggaagcttgattgtaagcgaatgggactctcca

SEQ ID NO: 856364 - DNA, 540 bp, Homo sapiens
ggactttaattaattttccagagatcacatagctaaaaagcagtctctctctctccccttcccaattgaccattacatctactgcctataccacactttttgttctgtaagtagggataaggtatcggttttcacccacgtggcagcttcttaaaggctaggacaacatatacttctgtatcccctactatgccaggtgtgacattgaacactggagaattacttcatcctttggttctgagttgaactcacttctcctcctacctgtacggtggatcatttaggacatttatgaggtggcccaggctgccgtcactaatcttagaagcaacaaactagggcagatctgaagataatccttatatatcagtgaatctgaaagcctcgactttttgacatgttctgagggagattttctaaatggctggcaggggrtggggggtgatttgcagataggggtgtcagttcagagatgcctggggctttgggtgaatcatgaaggtgtgagtttcggagagcagagtaacaaactctgaaccc

SEQ ID NO: 856365 - DNA, 671 bp, Homo sapiens
tttaaactccattgtttgtgaaattctattttgactaaatagagggactttgttcaggcttttgttgtctttagcatgatgtgtttctttcctaaactccmcacagataagaagataaatttgatcatgaatttctaaaagtagaaatcataggttttttagaattagcataaaattattgtacaaccctccatgggctatcaaattgggagcaatccaattttatttgccatcatggtcacatataaagtgtcagattattcttgttagatgattattgtacatttaacttagaaaagcttctcaggtctgctcctgagatgcttgaaagacttttggtttaaataggttgcatatgttctgctgttaatggctgaccgtttttatttcatattactaaaatgtaatcaagaaaaagagagtagaaaatacatcgcaaatattcagtctactatctagacaatttcaaaagctttcaattttatctcctgttccattatcttcaattgtagagtttggataggaaaagaattcaaaaataaatacaaaacattcattccaatacatgaagaaaattagccctgttcatgtacattttctaatatggatatgtttctaaaaatcagaatataatatttatggagtcattagtaaaatgcacttgattatct

SEQ ID NO: 856366 - DNA, 417 bp, Homo sapiens
ccagttcaaatctagctaaaagaccccatcacttttccttatcaaaggcaatatcccttaaggcctgaagctcgtaaaggattaaaggatactgttagacatttaaaagctcaagtcttagtaaraaaattcagcagtccctgcaacaccccaattctaggaatacaaaaacaaaatggtcggtggagactagtgcaagatcttagactcatcaatgaggcagtaattcctctatatccacctgtagccaacccctatacactgctctctcaaataccagagtcagcagaatggttcactgttctgatcctcaaggatgccttctgtattctcctgcactctgactcccagtttctctttgcctttgaggatcccacagaccacacgtcccaacttacatggacagtcttgcctcaa

SEQ ID NO: 856367 - DNA, 646 bp, Homo sapiens
aatggggctcagtccatatgaaatgctgtatggatgaccttttctcacaaatgacctcttacttgatcaggaaatggccaacttggtcaaagacataacttctttggaaaaataccaacaaaacattaaaaacctacctgaaggacatcacagagaaaagggaacagagttgttccaactgggagatctagtgttggtcaagtcccttccctctaccttcccatctatgaattccttgtgggaaggaccatactcagtaatcctctctactcccactgcagttaaggtagcaggaggggaatcttggattcaccacacccgagttaaactttggacaccccctgaggaacctgcaggaccatcagatcaggagtcccaagatcagccagaccagcctcaatacacctgtgaaccattggaggacttgcgtctcctatttcagaaggaaacatcccaaactaaaaaggctccttcagctgatcctgaggaaaaaccccttcctacttaaaaaagwtaagtgaaaacctacataatctttaacacctctccttgcccctttaatggaatccttttactgtttcatcacattattaggcagtatactaaacatactctttgcagtaggattatatactgtagcttctgc

SEQ ID NO: 856368 - DNA, 646 bp, Homo sapiens
aatggggctcagtccatatgaaatgctgtatggatgaccttttctcacaaatgacctcttacttgatcaggaaatggccaacttggtcaaagacataacttctttggaaaaataccaacaaaacattaaaaacctacctgaaggacatcacagagaaaagggaacagagttgttccaactgggagatctagtgttggtcaagtcccttccctctaccttcccatctatgaattccttgtgggaaggaccatactcagtaatcctctctactcccactgcagttaaggtagcaggaggggaatcttggattcaccacacccgagttaaactttggacaccccctgaggaacctgcaggaccatcagatcaggagtcccaagatcagccagaccagcctcaatacacctgtgaaccattggaggacttgcgtctcctatttcagaaggaaacatcccaaactaaaaaggctccttcagctgatcctgaggaaaaaccccttcctacttaaaaaagttaagtgaaaacctacataatctttaacacctctccttgcccctttaatggaatccttttactgtttcatyacattattaggcagtatactaaacatactctttgcagtaggattatatactgtagcttctgc

SEQ ID NO: 856369 - DNA, 633 bp, Homo sapiens
acttgattccatgttgctgagcaagtgccctaccagcacacgtgtagaatgctggaagcttattttctagaaatgattaaaaaaataaataaataaataaataaaagaggatactttcatttcctgtggttgtagtaaaagaagtcaccacaaatgggggtttcaaacttcaaaaatgtattctctctcagttctagaggtcagaactctaaaatcagtttcactgaatcaaatgcaaggtgttggcaggacctcatttcctccatgagagagtccctccctgacttcttctagctttctcaaatggctgtggctctccaaactctgcctgtatagtcacaccgtctcctttcctgtgcatgtcaaatctccctctgcctctctttcacaagggtacaagagatctcacccaaataatgcaatacagtcctaccatgtcaagattcttagttagatctgcaaagacccttatttcttataaggtaatattttcaggttccagggattaggacttgatgtgttttggtggccattaaaaatagtgcccttgctctaatacaaagaatatgtaatttgcraatgccaggcaccgttgagggcataggtaccataaatgactatatgaaaagaaac

SEQ ID NO: 856370 - DNA, 318 bp, Homo sapiens
aaaaacaactcttttagatttagctgaaaacagcttataatgaatatacaattgaaataattattgttgtaaaagtaaatatgcttaaatatgtctttctgtttgggatatttttatcatgttaaagtaccacatcaacacactacttttttaaagaaagaaatagagaacttttagattgcaaaagtgtacgtagaaaataagtaagtagtgaaattttgaaatatttaccatcaacaaacactatcaaagctagargtgtgcagttgttttcaattctgaataaatttcataaaataaataatactaaacattact

SEQ ID NO: 856371 - DNA, 382 bp, Homo sapiens
aaggtgatttattcaattacccatagtatgttattaacatagctatgacttctttgtatttgttagaaattttatattaagaaatatatacagtagttcccagtagaaatttatataaaatactctattttacatatgtaatgaaatctaagatttaaaagagattctttactctggggaaaataatggtggattaattaatttggtactcttttagggcctttctaaattaaaactccacattacaatttccaatgcagcccacaaacttaaatttatgaagaaatttaacaaatctactaagaaataaattcaaaatctgtaaaatatgcaattttaatgtyatttaaaacttttattgcaaatattcctgttattagca

SEQ ID NO: 856372 - DNA, 380 bp, Homo sapiens
ggaaattaaatgtatgttcaagtgttatttctttacggcactggggaacaagcattcctagtagcacctctcatcccakccattctggcggctgaggcaggagaatagcttgaacctaggaggtggaggttgcagtgagctgtgatcacaccactgcactccagcctgagtgacagagtgagacttcgtctgaaaaaaagaaaaaatggatattggctacttctattatttaacattaaaatgacttcaatattttaaatcttttgaaataagtttttagcttgtatacacagtaaacccaatgaaaaaacttaactgtcaagaagcaaatcaatactggacatatgtcaagtattattttagacactaggtacctgaca

SEQ ID NO: 856373 - DNA, 590 bp, Homo sapiens
attgatggtcaaattacatcaagaaaaacttagagctccaatgatcaacctgcaactatagagctaatatgtagagtcagccaggttctctgtctagctatgttttcccrcttcctttgatctattcacgtttctaatggtgttgagttaaaactcattgtttacagtatcactaattcaaggctccttggagattttttgtttttcatacaattcagccagttctagctacaatgtaaacattaaaaatttaaacataagctcatttaaaattgaataaaaaaagtaaaaggggttttaaaaatcaaatttttgtaggaacagttttagccaaaattttgattcatggcattcaataaattttccatatgagcaagaagagtttagccacatgaacagttctcaattttatcagacataatttggatccaactgttatttataaacaaatgaatttatattactattttatgtctgaagctctaaagtgaaaactattagatctttgagtgtgagggcatatgtgtttacatgtttacatacatgtacatattttgtgttacatgctgtttttacatggtatcaaattg

SEQ ID NO: 856374 - DNA, 590 bp, Homo sapiens
attgatggtcaaattacatcaagaaaaacttagagctccaatgatcaacctgcaactatagagctaatatgtagagtcagccaggttctctgtctagctatgttttcccacttcctttgatctattcacgtttctaatggtgttgagttaaaactcattgtttacagtatcactaattcaaggctccttggagattttttgtttttcatacaattcagccagttctagctacaatgtaaacattaaaaatttaaacataagctcatttaaaattgaataaaaaaagtaaaaggggttttaaaaatcaaatttttgtaggaacagttttagccaaaattttgattcatggcattcaataaattttccatatgagcaagaagagtttagccacatgaacagttctcaattttatcagacataatttggatccaactgttatttataaacaaatgaatttatattactattttatgtctgaagctctaaagtgaaaactattagatctttgagtgtgagggcatatgtgyttacatgtttacatacatgtacatattttgtgttacatgctgtttttacatggtatcaaattg

SEQ ID NO: 856375 - DNA, 527 bp, Homo sapiens
cagactttattttctggcataaataactaaatgggtattgatakggtttggcagtgtccccacccaaatctcaccttaaattgtaataatctccaagtgtcaagggtggggccaggtggagataattgaatcatggggccagtttcccccatattgttcttgtagcagtaaataactctcacaagatctgatggttttataaatgggagctcccatacacaagctctctcttgcctgccaccatgtaaggcatttcttgcttttccatgattgtgaggcctcccaagccatgtggaactgtgagtcaatgaagcctcttttctttataaatcacccagtctcgggtatgtctttattagcagcatgagaatagaaaaaatataggtataaagaaggtttttttgtctttgtttgtttgttttacagaataatttcagctaatcaatgtagaagagatgagggaaaaatagaatcaccactaggtgaacatcaatagtagtaatagttataaggcaaaatgtagcaat

SEQ ID NO: 856376 - DNA, 646 bp, Homo sapiens
tcaccagcttccagtattttctaactactgggagactgccattccctggcgctggctgtgacccattattatttagagagacagtttaacaaccgcctgaccatcacctgatggttgcctgayatttatggtgggggagaggggttgggggagctctgctgccctgctcacatctgcctatcttcctactctaacaataacacctcttaacatctctcatctaaattcgttatattaataattttatgtcaatatcctctttacaagtggtaatgtctctgttccttttgtccaagctgaaacaatgccttacaatatttctgacctttatgtatatccatttatcattcactcgatttaataaaagcaaaacccacacatgccttcaagattgtacgaactccctgcaaccagtaactgttaggattctgagacttactgttttaagaaagtgaacctacaagatacatctataagatacttagaggatctttggtttgtttttttctggtctgcaggtttttatgaggtggcttgctatgatgcattcgtaaatactcttttaaacctcctatggatttgatcttaagcctgagagctgttcttaatttaagtataattttccctctggagagacttgaaatga

SEQ ID NO: 856377 - DNA, 641 bp, Homo sapiens; identical to SEQ ID NO: 809376

SEQ ID NO: 856378 - DNA, 614 bp, Homo sapiens
cataatgcaccctctgcttccttttcagcatttattctgttgctcttccccccaccctcccattctgcctctagactttgtttmtttttcttagagaggaattctaaattaaacaatgcaagaaaatgaaaatggcaagggtacaacattatagaggactaaaggggaatagaagtaagttacgttattgaaatctcagtgtgagggaataatgaggataacacaggttaattttccgatgtgtcctttacccacataattgtccaggacatagatgttatcggagagaagctaagaagcacaatttgtaagagtcttaaaagggtaatagaagacacacttaggcttagcatcgttaatgggcagagaggttcaggtcatagttgatttgagtctgctcaaaacattgtgcagcatgttgtattcagtgttctggttaggatgttggggatggcccaagggcccaataactaacagtgtataattttgatttgagtgcttaagtagatatgttttcctgaaaaaacatgagcagtaaaggttgacttggatttgtatgcggcatgtttccaagggggacctgggaacagatgtgttgtctgttctgaaagcat

SEQ ID NO: 856379 - DNA, 611 bp, Homo sapiens; identical to SEQ ID NO: 809378

SEQ ID NO: 856380 - DNA, 581 bp, Homo sapiens; identical to SEQ ID NO: 809379

SEQ ID NO: 856381 - DNA, 607 bp, Homo sapiens; identical to SEQ ID NO: 809373

SEQ ID NO: 856382 - DNA, 437 bp, Homo sapiens
tatgaagcatctaccactgcctttgacttaaccctttttatgtctgagcttcaatcatgagkttttcaaaaattatttctagaaagcaagttgggtttcttcaatagacagtggagtgttttgctccagagtactgaaatattctgttgtgatgttggaaactttcaccaattaaggacaaaaaccttctcataggtgtgtatatatatatatatatacacacctatgagtgatatacacacacacacacacacacacacacacacacacagagagagagtttgtgtcttttacaggaatcattttaggagttcatgtagacttattttattgaggctgttgagcaaaaattttttttctacttctccttgtgaattttatttgggtattatttgaatagtctcagaagtagcagatctttattttttaggataatt

SEQ ID NO: 856383 - DNA, 488 bp, Homo sapiens
gccatcagaagggtcctgtctccaggcaagattagctgcataatttgacggtccagtgcaaaaataatatgcaggactcagtgttaaaaatgtattaagaattttgggctgggcgcagtggctcctgtctgtaatcccagccctttggggggccaaggtgggtggattgcttgagcctaggagttcaagaccagcctaggcaacatggtgaaactgtatctctacaaaaaattagccagacgtggtggcatgcacctgtagtcccagttactcaggaggctgaggtgggaggaccacctgagcccaggaagtcaaggctatggtgagctgtgattgggttattgcattctagcctgggcgatggagtaaaaccctttctcaaaaaaaaaaaaaaaaaaaaaaagagacagagagagaatttcaagacaaaatagcagagtgctcaayggagtgcagggtccttttgagttcaggatcctgactgagtg

SEQ ID NO: 856384 - DNA, 316 bp, Homo sapiens
tgagtaatgtttagtattatttattttatgaaatttattcagaattgaaaacaactgcacacytctagctttgatagtgtttgttgatggtaaatatttcaaaatttcactacttacttattttctacgtacacttttgcaatctaaaagttctctatttctttctttaaaaaagtagtgtgttgatgtggtactttaacatgataaaaatatcccaaacagaaagacatatttaagcatatttacttttacaacaataattatttcaattgtatattcattataagctgttttcagctaaatctaaaagagttgt

SEQ ID NO: 856385 - DNA, 616 bp, Homo sapiens
atctcaaaaaattagaaaagcaagaggaaatcaaactaaaattartagaaagaaatgttataaatatcagagcagaaataaatgaaattgaaactacaaaaacaatacaaaagaaaaaatgaaaagttatttataaaagataaacaaaacttacaaatctttagctagactaagaataaaagagagtagtcccaaataaataaaatcagagatgaaaaacaagacattacaactgataccacagaaatacataggatcattagagactggtatgaacaaatacatgtcaataaattgaaaaatctagaaatcaataaattactggatacataaaacctatcaaatctcagccatgaagaaatagaaaaccttgaacatatcaataacgagtaataagattgaagcagtactgaaaaattctcctatcaaagaaaggtccaggacctgatttcttcattgctgagttctacaaaacacttaaggaagaaatgatatcagctattcttaaactatttccaaaatctgaaaagaacagaatactttcaaattcattctatgaggccagcatacccaatccagacaaaggcatagctaaaaaagaaaaccacaggccaat

SEQ ID NO: 856386 - DNA, 549 bp, Homo sapiens
actaatccattccaccatcccaagctccctaagcctttggatcccttccttgacattaaacctagggagatcaggcatttccagytgactcacagtgggctatcttttaatccatatttcagctaaccaagcaaataaactgttagaaccttttttaattccctgagtgcagcactaagacagagtccctacttactgggcccaaatcaataaattcagtctgattcaactctatgttcttccacaattatcccatacttttaatatccattcccatgcctgttcctcagatttctgtttatataaattagagaactcaaacagttctttttgagtgtagtgcacctcccatgggtcacactctcaacctcgcctctaggggcccatagggactttagtctagttataggtctagaagcaaacagaagggttggggtggctgctgaggagaaccaacattatcttgcctggcaactgcctcaggagaggccatcattgttgcctcaagcagcgcagggtttatctcctcagacaaaagtggaaaggctg

SEQ ID NO: 856387 - DNA, 620 bp, Homo sapiens
tctcttaatgtgtatatttttatgccaatatcatgttgttgttgttgttgtttgttttgttttttttttttgaaatggagtcttgctctgtggcccaggctggactgcaatggcacgatctcagctcactgcaagctctgcctcctgggttcacgtcattctcctgcctcagcctcccaagtcatgttgtttttgttactgtggtattatattttgaagtcaggtaatgggatgtctccagctttgttcttcttggtcaggaatgctcttgctattatgagtcttttatggttaaataaataatttaggattattttttctatttctttgaaaaaagacattggtattgtatagagattgcattgaatttgtagattgctttgagtagtgtgatcattttaatggtatgaattcttctgatacatgagcatgaaccctctttccattttttgtgtccttttcactttctttcatcaatgttttttacttttactcatagaagtctttcaactccatggttaagtttttcttagtattttaatgttttgtagccattgtaaaastgattgccttcttcattgtttcttagctagttcattattaatgaacagaaatactac

SEQ ID NO: 856388 - DNA, 546 bp, Homo sapiens
ctgaggcttcacagaggagggccctgggcctggyccagaaaaccatttttccctcttaggcttctggatctgtgatgggaggggctcccgtgaagctctctgacatgccctggagacactctccccattgtcttgctgattaacattcagctcttcattaattatgcaaatttctgtagccctcttgaatttttacccagaaaatgggtttttcttttctatggcatcatcaggttacaaattttccaaacttttatgctctacttccttttgaatgttttgctgcttagtaatttcttctaccagaaacccaaaatcatctctcttaagttcaaagttccacaggtctctaaagcaggggcaaaaatgccaccagtctctttgctaaagcatagaaagagtcacaattgttccagttcctgagaagttcctatttttttcctatttttgccattgtgaatagttctatgataaacatgggagtgcaaatatctattcaagattctgatttcaattcttttggataaatactcagaagtgggatac

SEQ ID NO: 856389 - DNA, 489 bp, Homo sapiens
attgatagtaaaattgaaggctttttctgaataaagtttgstttaaatttgcactgagttccagtaagctcatacactacctattatattagaaatttgaatttgtagctgaatatttcctaagttctttgattgagactgacacttgtgcttttacaaaagatgcaaaagaataaaggatttatcatatacaaacatcactgccttgttattggccatctttatacgggactgaaataacaaagctggatggaaaaaaatatgagtcatgatatcatatatggtttcttacacatatttcaattcaagaggcacaactaaatttcaacaaaaactccctgggtcttctggggtaattcccattaatcaagtagattttaagaagcaagaaccatttgactatagttttgattagaaaagtcagcgtcctaaggttgtagtcactaggaatgggaacataagcctggacaaaggcacgaacagagctgc

SEQ ID NO: 856390 - DNA, 635 bp, Homo sapiens
ctaaatcttctctctcttctgacttctaaatcttttgtgaatgcctcccataaactgactttatctagaactacataagaaaggactctgagaaatgaagttttcagctttacccatgaaagtcagaygatatctcaggggagaggtagaggcaatgatgaattgacaacagacaatataagaaaacccacccatttatcagttgagggttcatacacatcccttttgccaatttaaaattctcgagtaacagcagtgataaaatcattcctgtctcttttacgggatgtgatcccttttctgtaataaaattatgatcattctctccttccaaaaaggaaatgtattgctctgtatatcgtaatacacatcttggagtgacattcactccttttctagtgacgtctcaaggcttttttgatacaatgtaacataaatactaaattatgtgatatcttattttggattctctctaaaagcagaggttaagacaaagatttgactgtaagtaatttgcttgggacatgctctaaggaaataagataaggcttctaggaaaatgagaccgaggagaagaaaaacaaaacgtgtgtcactgagctagaagctactgtggaaaatgggagtcactctca

SEQ ID NO: 856391 - DNA, 620 bp, Homo sapiens
aataatattcttagtttgtatacctagagaacaaacagagcctcaactaaactttctactgcaaactgattagtatatgaaaatattttaatatcrgtgagaaaaaaagaagtgagaaattatcaacggacttttttgatattaaataatctggatatattgtctttggaagaacttatgtgccagttatttattgtcacaacaatactgcagtgataacaccatagaacaaacaaccacaaaagtgtatgtataattaacaataattagtcattgtgcatgtgtctgtaatcaagtgggggtcagttaaggggatcccctgacattgtttatgcttgcttagatacctggagctcagagggctgttgagggaggtaggctggcttctgccagagtgaccagggcaactggacaactgtaatgtgacacaggcccagtgacccaggctaactgcggagacacaagaaagaatacattgaaatatgtcagaccccttaaggtctaggttcatactaggcaccttctcttaaaaatcaccctatagatcaaagcaatgtgtatgtccaagtttaggatgaagaggtgagtgaatatgccccatctcttttttggaaaggatt

SEQ ID NO: 856392 - DNA, 620 bp, Homo sapiens
aataatattcttagtttgtatacctagagaacaaacagagcctcaactaaactttctactgcaaactgattagtatatgaaaatattttaatatcggtgagaaaaaaagaagtgagaaatyatcaacggacttttttgatattaaataatctggatatattgtctttggaagaacttatgtgccagttatttattgtcacaacaatactgcagtgataacaccatagaacaaacaaccacaaaagtgtatgtataattaacaataattagtcattgtgcatgtgtctgtaatcaagtgggggtcagttaaggggatcccctgacattgtttatgcttgcttagatacctggagctcagagggctgttgagggaggtaggctggcttctgccagagtgaccagggcaactggacaactgtaatgtgacacaggcccagtgacccaggctaactgcggagacacaagaaagaatacattgaaatatgtcagaccccttaaggtctaggttcatactaggcaccttctcttaaaaatcaccctatagatcaaagcaatgtgtatgtccaagtttaggatgaagaggtgagtgaatatgccccatctcttttttggaaaggatt

SEQ ID NO: 856393 - DNA, 604 bp, Homo sapiens
ttagttctactaactgaggaattacagagagttttgctcaacaacccaggattccacataacatcgtataagattaagggatccattcaacagcaaggagaagggagagggagtwttaggtaggtaggtaatcatggagtacttgatccagtcatatttcatatcacaatgtatccacttgtctgttggaacactgaaatgccccccacttttttttttttttttttttttgagatggagtttcactcttgttgcccaggctggaatgcaatggtgcaatcttggctcattgcaacctctgcctcctgggctcaagcaattcccctgcctcagcctcctgagtagcttggattataggcatgcaccaccatgccttgttaattttgtatttttagtaagggcggggtttcttcatgttggtcaggctggtcttgaactcctgagctcaggtgatctgcctgcctcggcctcccaaagtgctgggattacaggcatgagccaccgtgcctggcccctgaaatgccctcttaaaaatgaagctgaaatgccatcttaaggacaacttgtgatgatcaggcatcttccaggttaaactgtataccct

SEQ ID NO: 856394 - DNA, 486 bp, Homo sapiens
agggcatacctatttttctcaagatacatcctaagcaccccttattacttgtagatcatcaactgtggtcagctgtgatcatgttccaggggaagtctaaccctaaaggaaatagtttatactccacaagaatcataagactttttctaatttatcttatcagaaatttgggaattatgtgtgaaagaaaatagaacttctggtccccaaatttaccatgccaaagggaaagttcagcttgggaaatgaattatgcaaaaactgctttcctttttttttcccaaatagttagttgtaatttcacaattctgtgtcatagcctcattttctctactctctgtttttacatgttactttatcttatgtaaaatgtagatttactgaacacaggacaatgtataattgactttcctcaactgtctcattttacacgtaaaatgtaragtcactgaagctaatcagagcctcacaggaatgtgagcatct

SEQ ID NO: 856395 - DNA, 486 bp, Homo sapiens
agggcatacctatttttctcaagatacatcctaagcaccccttattacttgtagatcatcaactgtggtcagctgtgatcatgttccaggggaagtctaaccctaaaggaaatagtttatactccacaagaatcataagactttttctaatttatcttatcagaaatttgggaattatgtgtgaaagaaaatagaacttctggtccccaaatttaccatgccaaagggaaagttcagcttgggaaatgaattatgcaaaaactgctttcctttttttttcccaaatagttagttgtaatttcacaattctgtgtcatagcctcattttctctactctctgtttttacatgttactttatcttatgtaaaatgtagatttactgaacacaggacaatgtataattgactttcctcaactgtctcattttacacgtaaaatgtaaagycactgaagctaatcagagcctcacaggaatgtgagcatct

SEQ ID NO: 856396 - DNA, 558 bp, Homo sapiens
atcagcactctgtaaaatggaccaatcagtgctctgtaaaatggaccaatgagcagaacatgggcggagccaaataagggaataaaagctggccacctgagctagcagcggcaagccagtggcgttcaatgytgtggaagctttgttgttttgctcttcacaataaatcttgctgctgctcactgtttgggtttgcactaccgttatgagctgtaacactcactgcaaaggtctgcagctttactcctgaagccaacgagaccacaaccccaccggaaggattaaacaactccagatgtgctacctttaagagctgtaacagtcactgcgaaggtccgcaaggtctgtggcttcacttcttaagtcagcgagctcacgagcccatgggaaagaagtaagaactccagatgggctacttttaagaagtgtaacactcactgtgaaggtcggaggcttcaatcctgaagtcaagcgagaccacgaacccacgggaaggaaaaaactgtggacacgtgaacattggaaggaacaaactccgggcccaccatctttaggaac

SEQ ID NO: 856397 - DNA, 664 bp, Homo sapiens
gtgtaacactcactgtgaaggtcggaggcttcaatcctgaagtcaagcgagaccacgaacccacgggaaggaaaaaactgtggacacgtgaacattggraggaacaaactccgggcccaccatctttaggaactgtaacactctgtgagggtcggtggcttcgttctcgaagtcagcaagaccaataacccaccagacggaaccaactccagacacataatggttactgttttatgtctgccattatgtttggatggtaataattattggtaattgcagaatgtgatgtaaccagtgttaaatggtgacatcctctcctaagttattcactgttatattccattactcaacttgttcacctaaaataatatgtcagtatttttccatgaataatttgagaaattttacatattctgtatgaagagtattcatgaatgagtcatcctatttctgtcattgatttttatgtgttgtgtcaaattgtggagaagactttcaagtgaaaggaacaaaaacaagactgtttatagcaggactggttcttcagctgggtaatatcaagttaccctgacagctttttctgtgatgctcttactcctccagtactgccacaaggctggcccctgacatccctacacatcacggcttacaagttgtgtcatct

SEQ ID NO: 856398 - DNA, 560 bp, Homo sapiens
attaaaaaaacagaaatttgaaaactgaaactaaractgttgttgtgaaatgaagtagaaatcacctaaccaatttacgaaaagaacatgaatataaaaagggtggtatgagatattctgtttttcaagtgagcactcataagtgtagattaaataagttatcaaaaaataattaacaacgaaaaaaacatgaaactggccttatactcaagagttttctttggtaaacattagtttgtgtacacacttcatatgtaattagaaataagaattgataagaagagacaacatgcttgtggaagttgcaagaataattattttcctttagccttgacatttcatttccttcctactctgaaaattgtcaaatgaagttcggcacctgcttgcagccccttccgtgtctactagggatgctgaagtaaactttattatttgagattcttgtactgcaaaatgcataatagattttcatcatgtctagtgttctctacctaagaggagcttaggaagagtttgctagtcatagtaccaaaagaaagacaaatggacttatatgc

SEQ ID NO: 856399 - DNA, 523 bp, Homo sapiens
gtatatacggatatgtgtatatttaatatatatacaattaaaggcagsgtcttgctttgccatccaggctggaatgcagtggtgtcaacctatctccttttagccttgaactcctgtgttccagcaatactcccaactcagcctgctgaacatgtgcataccaccacatccagctactttctaaaagttttgattaataaaaatattttaacattaggacatccaactttcgaagtagttcaataagcattttattttgatacccactccaaattaaattctatatgatggtttagattatgcattaatgagcagatcactctttatccataaaatcatcaatataattgaaatcagttttatcacatataacccatagaaaaattgaatgtcaatgttttaataaaagcagaatgtaaccaatgacttcagccactttctattttccggtaagtgctaaaaagaaaattgtatgaattttaagagccatataactttttaaaaaacatttgtaatgttattc

SEQ ID NO: 856400 - DNA, 523 bp, Homo sapiens
gtatatacggatatgtgtatatttaatatatatacaattaaaggcagggtcttgctttgccatccaggctggaatgcagtggtgtcaacmtatctccttttagccttgaactcctgtgttccagcaatactcccaactcagcctgctgaacatgtgcataccaccacatccagctactttctaaaagttttgattaataaaaatattttaacattaggacatccaactttcgaagtagttcaataagcattttattttgatacccactccaaattaaattctatatgatggtttagattatgcattaatgagcagatcactctttatccataaaatcatcaatataattgaaatcagttttatcacatataacccatagaaaaattgaatgtcaatgttttaataaaagcagaatgtaaccaatgacttcagccactttctattttccggtaagtgctaaaaagaaaattgtatgaattttaagagccatataactttttaaaaaacatttgtaatgttattc

SEQ ID NO: 856401 - DNA, 523 bp, Homo sapiens
gtatatacggatatgtgtatatttaatatatatacaattaaaggcagggtcttgctttgccatccaggctggaatgcagtggtgtcaacctatctccttttagccttgaactcctgtgttccagcaatactcccaactcagcctgctgaacatgtgcataccaccacatccagctactttctaaaagttttgattaataaaaatattttaacattaggacatccaactttcgaagtagttcaataagcattttattttgatacccactccaaattaaattctatatgatggtttagattatgcattaatgagcagatcactctttatccataaaatcatcaatataattgaaatcagttttatcacatataacccatagaaaaattgaatgtcaatgttttaataaaagcagaatgtaaccaatgayttcagccactttctattttccggtaagtgctaaaaagaaaattgtatgaattttaagagccatataactttttaaaaaacatttgtaatgttattc

SEQ ID NO: 856402 - DNA, 629 bp, Homo sapiens
ttcattactgagccatataatattgctgccacagaactcctactagctagagataaattggagagccctgaaaaaaatgacatgagtaaaatgaaacggatgatgttggtgagatcactcctrcaaatcaagacagagtgtgttctctcctctttttggctcaccccagtgagggctgtcatctgacttgagttggttcactaggatcatgagtagaggtggttcctttctccgacatcagagactgaggccaaacatgagaaccacagcaggtatttcattaccagatagtcactctcaagtgggttgttatgcaattgatccaatgctaaccctctttaaaagggcacattttccctactttattgttagaaaaaagcacatcatgtattgacatgttgtactgatttttctttttttttttgtactgattcttcataaggcatttcatccatcccatagttaactatagatcatgagcccatttgacataaagtagggtcatgtatttcctccttcttctcccacattgttttaacggtcctgtcagcatagactaaaaagcaatggtactaaaaaatccttctcaatactctaaatcttgaaaagcaaacttcaatgtaacttct

SEQ ID NO: 856403 - DNA, 618 bp, Homo sapiens
gaaaaaacaatgactcaattaaaataatagaataataaacattctctatttagattagcaaactcttcttgttcaaagtgtgtaaaatagagaacaacttctccaaacatagttttatttatttattcatttatttttgagacagagtctcactctgtcacccaggctggcatgcagtggcttgatcagggctcattgcagccttgacctcccaggctcaagtgagccttctgcctcagtcccccaagtagctggggcaacaggtatgcacaaccacgtcctgctaattgtttgtagttttagtagagaccaggttttgccatgttaccaaggctggtctttaactcctacactcaagggatccacccatcttagcatcccgaagtgctgagattgcaggcatgagccatcatgcccggatccctccagacatggttttaaccatgaatttttaagatattctctcataaaaagagatctatctttgtcatgcacataaacagaaaactgaaaaatcaaccctgtytcaaagggagaacagatttttaaaaagaaataaagtaagagtaaacagtatttatttattttaattagtttcagtggctgttgatggactgc

SEQ ID NO: 856404 - DNA, 590 bp, Homo sapiens
aatattacactgaaaaccctttagtaatatttttcaaaaatattatactaggagtttatatattttcctaacacctaaggaaatgagtattaaataaaacatgaaaattcatcaatattatttctcacttcgtgggttatctgaatgatataaaccatgaagcaataagtaatattggttttgaatttttacctttcttgctaatgttctatatgaataccaaaattttctttaattgtaagattataataatgttcaatagctaatccaaactcatgtgtgtagttttagtttcctcttagatttaggattatatttaatgtgattctgtttgtctggcagtgtttccattattttggcagctggcaaggaggattggttatacgaagcttttctattttccctgcaatttccaacttggctccaacttttagtaatcgtatttttgcttccgtttaaaggaactgtatgcagaatgtcatttattargtaaccacttatctgtgaaaaaatcctacttattctatttttgacaaagtgataaagatagctttgcagtgaaatgctgagtaacaagcaaatcagactgc

SEQ ID NO: 856405 - DNA, 647 bp, Homo sapiens
tggaaatcttccaaaagcattgttttattaacctgacctttgtaaagttgagaatgaatgtgagtttaggttctacctttaggcagatttttgaaacctaactgaagctgccagttaaacgcaaagcaatattttttaaagttaactgatctgcagggtttgaattgagttgtttctgaaccataaggtaaacaagtgatgtattttctttcattctctccttttgtaagtttaatttttgtcaaagtagtataaaaatgaattcaaatgtaattatagccttttggtagcctctaggactatagagtttttaaaaacaaaacagtccattgatttttttccacctgtcattcctgctttccagaggccacagagttcaagtcctctagctatattcttaaaaatctgcctttttatttctaaaaaaatcaagtttatgcttccatttctctcttgttgttttcaaattagccacttcttttgactccctacaatgaaagataagaattaagctttttaccaaaaacacacacacttacagggagtcacatccctccccacatatcacacacaaccttaaaatatcagtcacagctgaycccttattatataattattgcatataatttcctatgtacacttgcttg

SEQ ID NO: 856406 - DNA, 454 bp, Homo sapiens
tggatgttattatttactatttaaatagttgaataatttaaactaagcctttcaacaaataattgccttataatcaattatccatgccttctctttttatgwttaaaggaaaataaaaatatcgttatttgcctttttacttttatcatttgcagcttctttgaagaaaaataatctgtcaaatttttggtcctagtattacagcaattccttccaaacatttttgggagtatatctctatcagtaaaaaaatgatgttaaggccaggcatggtggttcatgcgagtcatcccaacactttgggaggctgagatgggtggatcacccaaggtgaggagtttgaggccagcctggccaacatggtgaaaatacctctcttacaaaaataaaaaaagaaagtgaaagaaagaaagaaatatcctggtatcgtggtgcacacctgtagtccagctac

SEQ ID NO: 856407 - DNA, 454 bp, Homo sapiens
tggatgttattatttactatttaaatagttgaataatttaaactaagcctttcaacaaataattgccttataatcaattatccatgccttctctttttatgtttaaakgaaaataaaaatatcgttatttgcctttttacttttatcatttgcagcttctttgaagaaaaataatctgtcaaatttttggtcctagtattacagcaattccttccaaacatttttgggagtatatctctatcagtaaaaaaatgatgttaaggccaggcatggtggttcatgcgagtcatcccaacactttgggaggctgagatgggtggatcacccaaggtgaggagtttgaggccagcctggccaacatggtgaaaatacctctcttacaaaaataaaaaaagaaagtgaaagaaagaaagaaatatcctggtatcgtggtgcacacctgtagtccagctac

SEQ ID NO: 856408 - DNA, 567 bp, Homo sapiens
acacattccaaaatgtggatgctgaactttcaggctgatagtaatgacaacaytttctcatttacaaaaagcttccacatatcatctcatttaattttcacagaaactgtttgtaagaatgattgatgcaatcttcattttacagttggaaaaacgaaggctcagagaccctggatcacccagtgagtaagcagcatgcccaggtctagcataccattctcctgctttcagctcttgtatgctatccacatgcttacagcatgcttggacaatgcagaaactcagctttggtactttgggtaatctgttcatctgtgaaatgggataactcatgctgatctacggacaaaaataactgtaaggatgacatgaaatgatgcagatagcaggcactcaaaaaacagagctctatcaacattcctgcttcctctcaatgactggcactgaaccgtccttaacaccccatttctaagccaagagattcttcaagaccaagccaagtctgccgtgccactgtcccccgcaggagcctctggcttcatcaagcccacagatccacagttgctt

SEQ ID NO: 856409 - DNA, 524 bp, Homo sapiens
accaaaaattaggagattgtgacccagttgcaagagaaaagataatcaactgagaatgaccctgaaattattccagtgttggaatgagaaaataacgattttaaatcagttattttaactatgctcaatgaagtaaaggaaaatatgctgtgctgaataaagagacacaaaatctcaacaaagaaagaaaaactaccaaaaataaccagatggatatagtcttgtgcccaccagcactctgcacccatgctaacaccaccactggtgtgaatgtgtgcacaggtgctggcaggggcccactgaacccctaagctatgctgccacagccactgctgcaaatgccagcatggagaatggcactcaggcatctgctagcatcttgccacagcattcaggcatctgkcactcaggcatctgctagcatcctgtcacagccaacaagcatgcatgccactgtgctgccactgctgctgatgctggcatgtgaggacaaggatggatcccactgccattgccctgtgaag

SEQ ID NO: 856410 - DNA, 624 bp, Homo sapiens
accaagcatggctgcaggaagtggctggaagggttgcatcttgggtatcccttctttggagactatagctaacaacttgatttatttggctcttgatttctttmattataataaatacgtaggtattactatcttgtgatacattaattgagtcagatgatggatgtgagactgctttactaaggctgtattgctctgaagttagattgttggagtttaaatcccagttccaccatttactagctgtgtggccttgagcaaaatacttaacctctccatgccttggtttcctctcctaccaaatggttataaatttgtgagaattaaatgagttagtaaacacaaagcacttagaagtctgtttgacattcagtaaacatgcagtaatgtagctttatcattgtttaagtttaggctacttaaatagcatatccttatctagtattgccaatgaccaaggatatgcaagacttatgtggggtaagagagcaatttctatacttattagaaacatgagtcctggattcatttattcttttaacagacattttatgaacatcaaatatgccaagcactgagttcgatactgaagattcaaagacatatcagacacagccactgttg

SEQ ID NO: 856411 - DNA, 643 bp, Homo sapiens
aggacacacttcacccttcatcccttcatcccgccatatctatcatctatttaccatttgagtaatgagaggaataagcagcttcataattaatctcattttccctgagtgtttggagttaaaaatcatttgcrtttccacaatggtccagcaatcccttatcccatccatcagttggaatggtaaattggctgcccagtttccatctgatctttagttgaataactgcatgtcatcatcacaaatttgcagtttggcctagagcttgttttggaggggctttgcttctttactaaagtgtttccgattttaactttatgttatatccacgtacagggtgtgacagtgtgtgtgtggacagagagagggagagaagtagctgggggtggcagtgggaaagatgtagaaatgtaaggtgttggaactgcagacgcacacacaccactaattaaaatggggaaatagcattctttcacttgcagccacaggcaatgaacgttccttgaaaaaaaaaaaaaaaactggagcctctaatactcagacatttgcaactggataataactttgcaaaatgtgactgacagttaccagattatctccttaatcacacttttgtttccattaaggcagggcttatgctccc

SEQ ID NO: 856412 - DNA, 606 bp, Homo sapiens
agaaacacaccaaggctcagagaaattaggtaactttctcggtgtcacagaayaccaaaatgctcagccaagctttacgtttatatttgattccaaaacccattctctgtcctcatcctactacattttgctagtgaatgtcactattcctcttagcctagaacctaacagaggaagctagatttacccagttgcctctgcagagtgacatgatgtgtgttccaacaggtggtttagataaggctggcttttcctggtgctttgagaaaaataagagtattgagaattagtaactctgccctaaaaggagatcaaagggaactgatgcttaaatggtttgacagtgttatgccccaccctggaaggtggatttgggactttatcccttaaacaaaaagaatagttggagccttattagggaactgagcaaaactaaccaatataagggcttggacactgctcaggccaacaagttgccaagttggatggaaaagcagctcatagctaggagaggccaaggccaagttgtatggaaaaagccaagtcaagaggtagaaaggctgaggtttctagcctgggctgtgcatccatagagtgtgggatcct

SEQ ID NO: 856413 - DNA, 655 bp, Homo sapiens
agatgatttccaaacctatgcaaaatgctgatgcacaraaaataatgtacactgaattcctttgtattcatactatctctctagccaagaattcaagtaaagttttaaattcatagtcttctcttctcatgcctaaatgggattggaactagcagggtctgtgtaaaataaggcctgaagagaagaaggcacatgtcttcaggtcatttagaatagattcaaatacataaataacttaaaatagcagttttcaacataaaaaaaagttttacttctgcttttcttatagagaagctgacacctggcacttacaaatgacaagtgagacaatttccaatttctacccacattcgtactcgagaggagagtaaaacatgcagagggacaacaaggctttacgccttcacctcacataatgctgggagtcgaccaaaagagcaattccattcccaaggttcaaagtgggttcattctccaccctgcaaagcaaagcaaagctaagccatctctcaaagattctaaaatcaatctctgtttgacataaattttggcccatgactactaccaccccagcgattactagaattcagtaactaattaaccaaggggaaaatggcaatctttaagtttaccccctctagagacagggatgaat

SEQ ID NO: 856414 - DNA, 564 bp, Homo sapiens
aaagaaactgaaaaagaaaaatgtctggctctcagtgttagtggaatgaaagcattgttgctaatgatgtcattgaaattttctttttttttttaaattatacacccaagaatttctgaaaataaaagattgcataatatagggaggttctgtttatacagcattctacagttcacatctgttatttgcatttattgtttaatcctcagaacaactctgggcttgagtggatcttatttttttctagttccagtgtttttcaaaatagacatacttttgtgagtttgaactggtgtaaggtatttaacaccttgagaaaaaaattattttgcttacctcagagtaatgtgggatggtatttcctttaggtagtgaaattgagatattaagaatgtagcagaaatgtacatggacaagcataggcaagtcaggtttcttctctggactggagtttcttcctgtaaatttaaggaagacagattgtgaattgaggaccttttacctccagaacttttgtgactttttttttttttttagttmcggatatatgaaacctataaatag

SEQ ID NO: 856415 - DNA, 564 bp, Homo sapiens
aaagaaactgaaaaagaaaaatgtctggctctcagtgttagtggaatgaaagcattgttgctaatgatgtcattgaaattttctttttttttttaaattatacacccaagaatttctgaaaataaaagattgcataatatagggaggttctgtttatacagcattctacagttcacatctgttatttgcatttattgtttaatcctcagaacaactctgggcttgagtggatcttatttttttctagttccagtgtttttcaaaatagacatacttttgtgagtttgaactggtgtaaggtatttaacaccttgagaaaaaaattattttgcttacctcagagtaatgtgggatggtatttcctttaggtagtgaaattgagatattaagaatgtagcagaaatgtacatggacaagcataggcaagtcaggtttcttctctggactggagtttcttcctgtaaatttaaggaagacagattgtgaattgaggaccttttacctccagaacttttgtgactttttttttttttttagttcckgatatatgaaacctataaatag

SEQ ID NO: 856416 - DNA, 518 bp, Homo sapiens
tctgtctttgaataggagatgccaaaacttgtttacattcacccagtatttctcagatcagtccagaaatttagataccatcttaatttttctttttttttttaatcacatgctgtatctaatctttaactcatttgactctaccttcaaaatgtatctgcctttgaattacttctctccccctattgccaatcatctaagccaccattagttttcacctggattattgcaataactccctaatggtctctccacttctgcattgttcccctgcagcctgttctcctctgctgctagagtggtctgtttaaaaacataaatcagatcagtgctcaaaacccttcagtgtctttccacacttgctgaaaagccaaatttattgtggcctataaagttycacactgtctgacctctggttacatctctgatcccagtcgcttaccatatttctctttgtttactcaactttagtcttgccagtctttttgctgtcctacatgcccagtgtattctcatct

SEQ ID NO: 856417 - DNA, 534 bp, Homo sapiens
gacaggagtctcactggattaaactcaaggtgttgcctttctggaggctctaggagataatccattttattgtctcttccatcttctagaagctgcctgtattacttggctcatggtcccttcttttatctccaaagccaacaatgtggcatctctctgaccccacttccacttcacatctctttctcgtgctacagccaaggaaaggttctctgcttttaaggattcacataattagactgtgcccagccagataatcctggaaaatctttccatctcaagacccttaaccttaatcacatttgcagtccttttttgccatataaggtgacatattcacaggttccagggattaggagggggactattagtctaccaaccacaggggatcttaggacctctgaagcaacatggaaaatgagtgaactctaggttaggagcatctgttctagattccattcattctagatgttaaatcaacaagaaattctgcttgcctacraataacagaatccctaaaagcagtggctctta

SEQ ID NO: 856418 - DNA, 510 bp, Homo sapiens
cacagtcaaagaatttacttaatgtytaactccacattccccaaatgaaactcatttttacccaggcagatcacatgactctaatattacgtgaaatcactttgggaaactgctttgtctacagtactcatctccacctatccctttatcttctgttgtaatgcctggtaaagtcttactgggaataaagtccaatccataccaccaactaattttaaaaacaggaataaaggaaatatttcaagaaacaaaatactagctttttctcagagttgaattgtttacttgtaatttggaagcttcttgggtcttattgtgtgtggcttttataagtattgtggttcaggagcagtggaggtgatgtctgcctcaggattgaaggacccttttttttgcagggctggtaaaatgacagctgacttcttcatgatcatcagctagcataagcacatctgctgtgcacctggctcttaagcttttaaataggactcccaggagagtgctgataaa

SEQ ID NO: 856419 - DNA, 510 bp, Homo sapiens
cacagtcaaagaatttacttaatgtctaactccacattycccaaatgaaactcatttttacccaggcagatcacatgactctaatattacgtgaaatcactttgggaaactgctttgtctacagtactcatctccacctatccctttatcttctgttgtaatgcctggtaaagtcttactgggaataaagtccaatccataccaccaactaattttaaaaacaggaataaaggaaatatttcaagaaacaaaatactagctttttctcagagttgaattgtttacttgtaatttggaagcttcttgggtcttattgtgtgtggcttttataagtattgtggttcaggagcagtggaggtgatgtctgcctcaggattgaaggacccttttttttgcagggctggtaaaatgacagctgacttcttcatgatcatcagctagcataagcacatctgctgtgcacctggctcttaagcttttaaataggactcccaggagagtgctgataaa

SEQ ID NO: 856420 - DNA, 602 bp, Homo sapiens
ttacatataattttagcattttttttctaattttaattaaaaaaattttttttgtatagatgtggtctcaccatcttgccctggctggtttgaaactcttgggctcagacagtccacctaccttggcttcttaaagtactgggattataggcatgagcaccttgcccagcctgtttttctatctctgtgaaaaatgtcattggtattttgatagggattacgttgaatctacagactgctttgggcaatatgaacattttcacaatattgattcttttagttcatgaacgtgaaatatctttccattttttggtgtcttcctcaatttctttcatgagtgttttatagttttcattgtagaggtcattcacttctttggttaagttaattcctaggtatttaattttatttgtagctattataagtgggattactttcttgatttctttttcagattatctgctgttggcatataraaatgctactgatttttgtatgttgattttgtatcctgcaactttactgaatttatcagttctaatagttttttggtggattctttatgtttttccaaatataagatcataccatctatgaacaat

SEQ ID NO: 856421 - DNA, 627 bp, Homo sapiens
aaatctcccctccccacctcattctgttttgtttttagcccattctggatttctgcactcatgcatgcctcatgtgaccagggataggcagggagaaaaactcaaggggctggggttatgtgtacatcttcatggtattgactgttatgcatgcatggaaacagacctggacatgaaaggataagcttcaagccaggtgcatgagggctcccagctgacttttgggtgcacacaggatgcaacagcttgccacagagtgatagaggaggccatgctaggagagaagggagaacaagcagggcaggcaccctggcccgactcttacacacagtgtgagatgctctcttggtttgggtctcccagatggcgaggaattcagggaaatttctttatttgggagatgcaagaaataatggtagggggttgaagtgatatagtagggaggtgaaacaatggtagggaggtgaagttatataggcaggaggcagtgaatgaaaagtgagctgttaaaccaactactacagtgggcaatgggscttattcctgcagggcaacactaggaagagtaagggagctgggggttttatactcctttccccaagtgtcaagaattgaggtctcctgggg

SEQ ID NO: 856422 - DNA, 549 bp, Homo sapiens
  misc_feature 75: n = A,T,C or G
gtgttgatttcagcctttaaggggggtcgtggtggtctaggagaccagtgatggtccctggctttgacttgttcncctgagaggtttctcatcctctccctctatgagcttggtagcctttycagaggagagccttggaagcatgtgcctctgggtctgcagtgatgctggatcacactgcacctgatgcctttctcagtggtctactacaaattagctcatggtcacagttaaggcattttaaaactggttggactagattcttcccccttgactactttctatttattttaggatgcattttttggcaacctttcccctcgcactctaaataaacttgcaaatgtttttctcctcttgaaattgtttgttaaatacactttgctgctaattcaggaggccaggctttgattagctacagagtggcccttgcagcaggcgctggcagggtggaagacctgcagtgcctgatgctgcaggaatggccagacactgaccatgggcagggtcagagagcggaggaggtggaagaatgcacttaatccaggc

SEQ ID NO: 856423 - DNA, 562 bp, Homo sapiens
gaggattccccaaggggatgtgaattctcaagcacttccatctctccatgttcatgcaaagaaggtgccaggagccccgtggccatcctcccacaaaagacacacaggtggtggcatctggggggtcaatgtgcatggttgtgcatggtagagacccctggatggagctccatgatgtgggatttacatcccgcccatactctgctgtgagagagatggtatgcagccagtccagccatctgaagcagaacggaaaaatggtatggaaagcaaggcacctgaaaaattttcaaagggagaaaaagaatgagcaaaactatcctgtagaggagagagacattgaaaatgacatatacagacacagaaaaggttgctcagtcaacaacttctgcaggctcaaagcatgggaagtaatcagtaaatggccaatttatctctccctcacagccaagccaactcctaacataattggaagtttaatatattccaacaagttcagracaagcatactagatcttaaggcaatctcatggccctgcagctcatcctttttttcaaagaa

SEQ ID NO: 856424 - DNA, 497 bp, Homo sapiens
ctcattactgagccttcctcaagacctccttaacatcctaacattataaatacaataattttagaaattacttagtcaataaaaaataagcacttattgtatacgagactctgttctaggagccagagatacagaggaataaggaattaaggtatttctcccatattcaaggacttcagtttcattacctgtccagaaaactatgagaaccacccatcacctctggttatagattcttaagtgggatgtcaagccccttccctaatgatctcagtttaacctgctgtcctattcctctgtggcctattcctgtgctacactcgagccaaggtggcctcttccctagccccacacatactctttgtttttccattcttccaagcaggcccggagaaggaatgggctccacgatgcagggcccgcggtagagaacagccaggcagagcagggggcctggctggatgtggccascatctgcaggggttcagcattgagat

SEQ ID NO: 856425 - DNA, 643 bp, Homo sapiens
ttactaggtgcttcatttttatttaaaaggctgatttaataatagaaagaaaaactccaggcaaacaaaaacactaacggacctgaacctactgacgttcttagatattttkaatgtcatgagtgactccttttgctactcacagtgtagcccctggcctagcattgtcagcatcactgggaacttgttagaaatgcaggactttgggctccgctttggacttctgaatcagaatctgcattttcacaagagccccacaagattcctgtgcacatttaagtttgagaagcactgctctggagcacacatgtgtgcacacacgcccactcatgcagaaatatttacgtgagctagttcattcctcagccacacctcaaatgttctaccttatttaatatgttcatccttcttggctgtctcattggcaatttctcttgatcttcaggtatattgaataagctcaacgattaaacatatttattttatcattttttaaaaagagcttagaaatttcaacattgaatgaaaccataccataaaacttgggaactggttagtgagggaggattaacaacattttcttgtgcagctcaatgagaaagagcagctcactcaagatcacacagataattgttgaagccag

SEQ ID NO: 856426 - DNA, 623 bp, Homo sapiens
catatttctccatgcagcttattgacgtaacctaagatgagaagacactactattcatgcctggtcagaaagcacagactggctatgtaacagccccagcaggraagcactgggtgaagacactggattaaattgagacaaatgtttgcttctcagaatggcagtgaccatgggtgcttgactgtgggtggggatgacagatttcatgctttcctctttcagaatcatgtctccaacctcctttgtatatggcgagtccgtggacgcagccaacttcattcagctggatgacctggagtgtcactttcagcccatcaatatcacccttcaggtacccactcctggagacctcctctgtccgtgggggctaacggaagggcacatgggatgtctctcctacagagggctaagctcttgtcaggagaaacccttctgtggttggctggtgtggtgtgtgtgtgagatctgtaaccacacacagaatgaatccttttcgatgcctggtactctgctgtgcaggcccctctgctttttcaggatttggaaggacaggtccacgtcatgaatgccagttttccccaagaagccctctgtgtggtggaggcctcagcaatgtcccagcc

SEQ ID NO: 856427 - DNA, 639 bp, Homo sapiens
gagatgctgtcatgggtggggagaccctgaggtcacccagctgtgtgggatccaaagagccaggacctgagaaggcagactctgcctctgccacagactgggagggagagggcagtcacggccgccagggacacaccgtgtgcccagaccagggcttgccgtaactaacgggtggcaggaaagctttgaggaggctgttgaatgaggccacctgggtcacaacagctttgctagtcaacccagagcagtatctcatttcggctcacatttctcgaacgcttactttgccccagtccttgctttgcctggactaggcactgggatgcagcaataactgtgcccttccctgcacttgaccgcgtcaccacctagcaatagacctgcaggcataatggagggtggtgagtgctgcgcagtaactgctctggaaactgagaagaaggtgccatgagtccccctcccttgcccccaaggaggagggaggattaaaaggtcacagagaacagtgtggtagatgagagcagctttcaggctgacagctgtgggcagcaatsctgactctcacacttgcctgacatgaggccttaagggggctgcttaccttctgtgaccctcagtttcttcctctgtaaaaaggag

SEQ ID NO: 856428 - DNA, 598 bp, Homo sapiens
caggggtgggtgggggtgattttcaggcctaatgctgacaccactccactgagagaaagragcttgcttccgggtgcctgcaagagatgacagtgccttcaccttgttgttagcaagaattgcatacataaaaacttgagcacatgaaagccacatgtaagagtgagttcaggtgcttctaaatcctttccagattgttaacacactgtctatgtcaaatccttacactagcatagtgatgagaaagtgagccagcttttgctcttagagatgaacaagagaagtctggttcaggccgggcgcggtggctcacgcctgtaatcccagcgctttgggaagccaaggcaggcggatcacttgatgtcaggagtttgagaccagcctggccaacaagatgaaaccccgtctctactaaaaatatgaaaattagctgggcagggtggtacacgcctgcagtcccagctactcgagaggctgaggcaggagaatcacttgaacctgggaggcagaggttgcagtgagccgagatggcgccattgcactccagcctgggtgacagagtgagactctgtctcaaaaaaaaaaaaaaagtgaaaag

SEQ ID NO: 856429 - DNA, 612 bp, Homo sapiens
  misc_feature 25, 26, 34: n = A,T,C or G
ccgggaggttgtgagtttgtgtgcnnacgcccgnagagaagttgtgagcctgtgtgtgcacctaacmcagaggttctaagtgtgtgcacttgtatgtgtgtgtgcacacgcggacagagtgattgtaaggatatgtgtgcgaacctcacagagaggttgtgagattgtaagggtttgcgcacctaacggagatgttgtgagtgctttttttcctgacaggctgtgagtttgctgttgtgtgtattagaggtttgtatgggcctgactgaggggttgtggaatgtgtgtgcgtgagcaggagcctggagaggttctatgcctgttcactcctgacagagtttgtgagtgtgtatgattgtgtgactacaccacccaactggcggattgaatgtgttgtatacatctactgggagggcgtgtgtgtgtgtaaattgtatacaatgaggctgtgtgcatcagtgcacctaaccacgaacctgtgtgtacagatgtgtgtgccttcctgtgtatcagacaatgaggccatgtgtctgggtgtgtttagttggttgtgcaagtgctggagtctgggggggagaagaggcagttcggagccatccccgctttctccct

SEQ ID NO: 856430 - DNA, 612 bp, Homo sapiens
catggcactggtggcagcctgacaccaggctgaaagccataaaactgaaaaacatatctagatctttttccatttyccaagtgtcattctccccgctctgaaatctgcttactgtctatctttttacagtgcttccaggtagttattttttatattttgttaatagtttatagttttctccaggagaatcagtctaggatggaaaacctagtctatggtagaggaaaaataatcaaaacaggagtttcctatagagaagtaagagtttttacccaggtatatatatttgtcaagactcagtgaatgtacacttaagatgtgggcacttcactgaatgtaaatttcacctcaaaaaaaactaatagtgaactgtagttaatgacaggcgtatgtttgaacatttacaaaataaaatattgagaagaaaaagtgaagtaaaattgtactttttgattccatgtacacagaattcctgaaatgcagttggttgaggcttcattgggatctgcttttataaacagacaagaaaaatgtgttatgaacacatttgttctcagtttcttgagcgctcctataaacaaagggctgtggaataatcaatcagtaagaatc

SEQ ID NO: 856431 - DNA, 568 bp, Homo sapiens
ggccttttacacattgctgtttcacctgctcctcccaccacaaaaaaattaatgaaactttcagcccagcttctttcaagaaggcatttctgggctgggcacggtggttcacgcctataatccccgcwctttggaaggccaaggcagatggatcacaaggtcaggagttcaagaccagcctggccaatatggtgaaaccccgtctctactaaaaatacaaaaattagccgggcttggtggcaggcgcctgtagtcccagctactcaggagggtgaggcaggagaatcacttgaacccgggaggcagaggttgcagtgtgccgagatcgcaccactgtactctagcctgggtgacagagcaagactccgtctcaaaaaaaaaagctatttctatacccctcgctactcatagtccccagtctgggctatgtgctcttctttgggcaccaagagtgctctgcttttcccatcctaacaagactcattgtataccagaagtacatattcaaatgtctctcctgctagatgtgggcttcatgaggtctgacccctgcctatgttgttggtca

SEQ ID NO: 856432 - DNA, 575 bp, Homo sapiens
gcgatttacctatataacaaacctgcacatgtacccctgaacctaaaataaaagtttttttaaaagtatgtcctccgccaagtatgtctgtaggggcagtgacctactcttgagtccctgtattaggaataatattatttaagagcttctgaaatgaatttatctgtgcaagttcttgaaaactttgatttatttgattgcattgtctgttggagagcagcatagctctgccttgagtgatgtcagaaggaagcttaaaatccttaagacaagccggaaatctgaaaaaggaaggaactgtggagatcatctcaagaggaaatgatacttgctcttatgctgcagaggtgatgactaggggttggagataatcaagaagttgctaaatagttcttagtgtcaaaacagagctcagaaaggtgccaggcagctgccattgcgagccatcaggtttggccccttcacgtgagacctcattatcactgtaccccccttaataaaaatggacacaycttttcacaaatcccttcagtgtacaaggcatgaagcagtgcattgccttattaggccatcta

SEQ ID NO: 856433 - DNA, 626 bp, Homo sapiens
ctcagccaaggtcagctttcttgaggaggtagtgctgcaarccattagtagccagtactcacagcagctggggcaggatgcacaatggtccagtgagggggatctgggtcggcatcagtggcatctactacaatatctctggtcaactaagacctcccccaagttctttccatgtgaactcctcttagtacaggtcctccatttgaaatgtatgcaatttatttgtgaacctaaatgggaaacttcaccattatccccatgaaacatgctcttgttagcttgggtttgtttgggcttgttaatgttagtctaatacccagctgtctccagccctaggtcagtgccatttgctaaacatacttcctaaatcttctgccttgtctttggtgaaatggctaaaaagtacagggacagcctggggagctgtggctctccactacggacctcccccagctcatcctgactctattatcaccagggtagcatgaccaagcatactcctcttaaggcagtcgaggtggaatggaagaggtcagaagacatatgagggagagagcctggaaagtgcatcccacaatgtctgtgttccctctgaggaatggctcaccacagtagaacctctgtgt

SEQ ID NO: 856434 - DNA, 567 bp, Homo sapiens
tatttaaaaattattatccaagtataattgatgctgtgacctcttgtaactgtkgtgaatgtggtgaatcgaggttggctatcattgataacctgtctgaattgctctgtcttgcccgccatctggtgcacagaggctgtaactcccatgtcccagctgtgtgtgtatggccagtcactgtaaatcctgccctcctctgtcctcacataggtaggcacgagacggtacatggctcctgaggtgctcgagggagccatcaacttccagagagatgccttcctgcgcattgacatgtatgccatggggttggtgctgtgggagcttgtgtctcgctgcaaggctgcagacggtaagtaggatggcagccctgggcatcctagattgagtgatagggagcagtgggaccttagagtgatcctgccaggctctctctttctcctaggacccgtggatgagtacatgctgccctttgaggaagagattggccagcacccttcgttggaggagctgcaggaggtggtggtgcacaagaagatgaggcccaccattaaagatcactggttgaaa

SEQ ID NO: 856435 - DNA, 567 bp, Homo sapiens
tatttaaaaattattatccaagtataattgatgctgtgacctcttgtaactgtggtgaatgtggtgaatcgaggttkgctatcattgataacctgtctgaattgctctgtcttgcccgccatctggtgcacagaggctgtaactcccatgtcccagctgtgtgtgtatggccagtcactgtaaatcctgccctcctctgtcctcacataggtaggcacgagacggtacatggctcctgaggtgctcgagggagccatcaacttccagagagatgccttcctgcgcattgacatgtatgccatggggttggtgctgtgggagcttgtgtctcgctgcaaggctgcagacggtaagtaggatggcagccctgggcatcctagattgagtgatagggagcagtgggaccttagagtgatcctgccaggctctctctttctcctaggacccgtggatgagtacatgctgccctttgaggaagagattggccagcacccttcgttggaggagctgcaggaggtggtggtgcacaagaagatgaggcccaccattaaagatcactggttgaaa

SEQ ID NO: 856436 - DNA, 356 bp, Homo sapiens
ggggcaagggctgcaagtgggctgttcttaggagaaagtgacacctggcagtgagggaakatggtgagcattattagcctttgttgtccagcatggccttcttgtcctgtctgctctggagaggagcctgtgggaccagtcctgcctggggagggcatacccacacgtgccagctgattctgactctgaatacatcatgtccggacttgggggtgtttctgcagaaaaaggaggttgtttttcagccttgaacatcttcaggaggatagagactcttgctcacatattcttagcaaagggaagggtctctcatctccaggccacagagatagttcttccattgccctaagaggcta

SEQ ID NO: 856437 - DNA, 603 bp, Homo sapiens
tggctccatgctgcactgcctcaccactgcaccagccttggtgccccatctctgtggsccaggcttccagcctcccaccttgggcccacctcctggctacagccgacgatgcagatctttgtttgtttttgaagaaaaggtccctagagacctctcctaccttttgcaagaccactggtgtctcagtgtgtgtgtaaacaaaaagcttgagttgtggggaagttgtaggagagttcctaagaacttagtccttcatgacaacagaagcacagcattttctaaaacattaaaaatctcaattacactaaaactccaggatggttgggccaggggggaataaatcatgttaactaagaaagcaagggagggaactactgagaacgtcaaggttggaatccatattgcttcaagccagaggccagttcctagtcggtggctcccatgctggtctctgatgtttaggaagtggtgtcagcagagactgagctgcaccctttctttggacagatggcaggagaggagaacttcaaggaagagctcagatcccaggatgcttccaggaacttgaaccagcatgaggtagcaggacatccacattcctgg

SEQ ID NO: 856438 - DNA, 591 bp, Homo sapiens
aaccacagtattattaatgcccttaaagaatttaacaataattctttattaccaattttatagtcagtgttcaaatwttcctggttgtctttaattttttgttgttgttggttggtttgaaccaggattcaaataagatagacacaaaaatttggttgatatgtctctttagttcctataaatctgtagattttcctttccttttttttttcctccattcagattatctgttgaagatctaggatgtttgtcctagagttcctttccatattctggatttgctgatcgcatacctgtggaagcatttaacatttcttttcccaagagataaatttctgggaggaaaactttaccttgtaattggacatatatatacaccctattaaaaataatttaaaaaaatttttaaggccagtcaagtgaagcagtgggagtagagaaggaacaaagaagtatgtaactggttgtgaacaattagttgtaaacaccactgcacttataccagcctataaaaataattggattttactttttagataagaaactgaggaatgaggacatgcattgttatctctcatttagaaatctctt

SEQ ID NO: 856439 - DNA, 640 bp, Homo sapiens
gaatgaagaccagtgttttttgtattctttggtgcatgtactcataaacctatgatttctaagattcttttttacttctcctttcttatctacagaagcccaaaagtcaggtgcctctttattaattttaaagcacaatttttgtagtcttctaagtcgatgcttttgagttcatgagttcatgttatgttaggagttgtgaaattagatacttacattaaacacggtttagtcttgatgcttttttttcgctcatggcattaaagtcataactggcaaactatctttccttgaaattaaacttgaaaaatttttaaattatgcaattatatgtgcataatgataaaaatgctaaatcttaaaacatgattgtggaaatatatgacattgtaatgaaattcaaacagtacaaagcagcatgaaaaggtaaagtctcacttatactccttatcccactgtccagtttttatttgttttggcacttatttctatatctcagaataatgagcactaaaatatatttttaacttgtgacctgtcgyttattaacagttactttatctctataaaattatgaaatttattgtttatttcttgcactgcactatactctgctagtcatatatacttaattttagtt

SEQ ID NO: 856440 - DNA, 598 bp, Homo sapiens
cttcggagtggtgacacttggccgtccggccctcgggaaggactccagggtaamtgccttccttttcccttctgcggactccaacggaaccctggactcagtcttctagcctcactggatctcacaaaaagcaaccctctcagtatggacatatttgaaaactcaaagccgatggtgcagtgttaattccatgagttttgtggataaaaagttctgggttcaaagtccactaacttcctatgcaccctttacaaatcactctgaaattccatttttttttccacgagtgaaatggaggaagcactacttccccatgtaaaacctaaggcgtcatgttgggaaccgtggtggactcacagggaatgcccagcgccgttgagcagccgcctcctggttcccaggctgggcttctgccaacaggccctcagtttcctttattggagacacaaaatgtgacatttattaagtgtcccagcgcactggggaccagttctgcccatggactcgcctctgtccctaacctctgggttggcatgtacatgagaaaacatgcgggtcaacaaaaaagaaagacatgggggtgtgatgggaaggggta

SEQ ID NO: 856441 - DNA, 598 bp, Homo sapiens
cttcggagtggtgacacttggccgtccggccctcgggaaggactccagggtaacwgccttccttttcccttctgcggactccaacggaaccctggactcagtcttctagcctcactggatctcacaaaaagcaaccctctcagtatggacatatttgaaaactcaaagccgatggtgcagtgttaattccatgagttttgtggataaaaagttctgggttcaaagtccactaacttcctatgcaccctttacaaatcactctgaaattccatttttttttccacgagtgaaatggaggaagcactacttccccatgtaaaacctaaggcgtcatgttgggaaccgtggtggactcacagggaatgcccagcgccgttgagcagccgcctcctggttcccaggctgggcttctgccaacaggccctcagtttcctttattggagacacaaaatgtgacatttattaagtgtcccagcgcactggggaccagttctgcccatggactcgcctctgtccctaacctctgggttggcatgtacatgagaaaacatgcgggtcaacaaaaaagaaagacatgggggtgtgatgggaaggggta

SEQ ID NO: 856442 - DNA, 636 bp, Homo sapiens
gacttttttggctggttgtgttgtttactgtcctctgattctatctataactttcttgtatgcccaatcttcactatttttatacatgtattgctattttatcattrtatgtctcttgtcaatgtcatgcctattgtaggaaaagaaaaggatgcaatcaaagacccacaaatcatcataaattgtaggatagatctgatccagttggcttttcagattgaaccctaggccttactccctctcaccacttaaacaattggctattaaatcaggtcagattgtgtccttcttctgtgatctgaactcactaatattgaaactatcatcaccaatgacagatgaccaaataaacaaccctgggaatgagatttcctagcattgtgggacttcctgctggttgttggccttcacatacattccataaaatgatctttggccaatagtggggactgaggcctcaactctgaccttttattctcttgccaaaaatcctgtctaaggggcctggagattcacactccacaagccataaaatctcgtgatttttttttcaattaacctggtataatgtggcttattttccaagctgaccctgtgatagcatcacataacacatggcagacccccttatcttaa

SEQ ID NO: 856443 - DNA, 636 bp, Homo sapiens
gacttttttggctggttgtgttgtttactgtcctctgattctatctataactttcttgtatgcccaatcttcactatttttatacatgtattgctattttatcattgtatgtctcttgtcaatgycatgcctattgtaggaaaagaaaaggatgcaatcaaagacccacaaatcatcataaattgtaggatagatctgatccagttggcttttcagattgaaccctaggccttactccctctcaccacttaaacaattggctattaaatcaggtcagattgtgtccttcttctgtgatctgaactcactaatattgaaactatcatcaccaatgacagatgaccaaataaacaaccctgggaatgagatttcctagcattgtgggacttcctgctggttgttggccttcacatacattccataaaatgatctttggccaatagtggggactgaggcctcaactctgaccttttattctcttgccaaaaatcctgtctaaggggcctggagattcacactccacaagccataaaatctcgtgatttttttttcaattaacctggtataatgtggcttattttccaagctgaccctgtgatagcatcacataacacatggcagacccccttatcttaa

SEQ ID NO: 856444 - DNA, 614 bp, Homo sapiens
ttgagaagggatgattgtattttgcaatgtgagaaggacatgagatttgaagggccagggatggaatgaaatagtttggatgttgtaccctttaagtcgcatgttgaattgtaattcccagtgttggagttggggtctggtgggaggtgatggggtcatgagggctgatttctcatgtttagtaccatcctcttggcactgtccttgcaagagtgagtgagttctcatgacatctggctgtttaaaagtgtgtggcacctctccctgcttgctcctgctctggccatgtgacataccttcttttgcttcaccttctgccatgtgtaaaacctccctgaggacccttcttgaagccaagcaactgccagtgcaaagcttcctgtacagcctgcagaactgtgagccaactcaacctttcttttctgtataaattatgtagtgcttaggtattcctctatagtaatgcaagaatgtcataatacaaggcataatggcttgcattttaaaaatgaaaattagatttatgtaatttatcatgaaaagatgaaatgagttaataatgagcaatatctacrtgttgtcttagaggtgctgacaatctgtcaaggaattac

SEQ ID NO: 856445 - DNA, 421 bp, Homo sapiens
ttctctcttttggatgattctaagtaccagctaaaatacagctatcattcattttccttgatttgggagcctaatttctttaatttagtatgcaagaaaaccaatttggaaatatcaactgttttggaaaccttagacctaggtcatccttagtaagatcttcccatttatataaatacttgcaagtagtagtgccataattaccaaacataaagccaactgagatgcccaaagggggccactctccttgcttttcctcctttttagaggatttatttcccatttttcttaaaaaggaagaacaaactgtgccctagggtttastgtgtcagaacagagtgtgccgattgtggtcaggactccatagcatttcaccattgagttatttccgcccccttacgtgtctctcttcagcggtcta

SEQ ID NO: 856446 - DNA, 589 bp, Homo sapiens
ccccacccacattccacaggctgctttaggctttaggacagtggcaaacatggcctctgccatcccggtctgtgagcrccccttcttacaccaaggtcagttgctaaccaatgagctgctgggggcctccttctcccactcccactgcactgtgtccagagtggccagcaccagccccaggtgtcaggggtcagtgcatttgcctcagggggactggcagagtgggcgcatcctgaagggctgtgctggaatcagcccatagtctttgcgtgtcccatggggcagggccaaaggaagcagtcagcaagtgccatccaccccagcttttctctccctggggactgctggactgagggtccaggtggcccagctccaaaggctgttgctggccagacctgcccacctcccctctgacctgcaggcacttgccttttcagagtcatatttgaatcctactcttcacatcagggttcaggcagctgtccaaacaccttatcttttcatctctgaccatttcttcagagtcgactatgagcagaaatcacccagacaccccacaggtaagtccacttgcctcacatggctcttc

SEQ ID NO: 856447 - DNA, 421 bp, Homo sapiens
ttctctcttttggatgattctaagtaccagctaaaatacagctatcattcattttccttgatttgggagcctaatttctttaatttagtatgcaagaaaaccaatttggaaatatcaactgttttggaaaccttagacctaggtcatccttagtaagatcttcccatttatataaatacttgcaagtagtagtgccataattaccaaacataaagccaactgagatgcccaaagggggccactctccttgcttttcctcctttttagaggatttatttcccatttttcttaaaaaggaagaacaaactgtgccctagggtttactgtgtcagaacagagtgtgccgattgtggtcaggactccatagcatttcaccattgagttatttcygcccccttacgtgtctctcttcagcggtcta

SEQ ID NO: 856448 - DNA, 658 bp, Homo sapiens
ggattgtacttgactacatcatagcataagtttaacttttcttgttaatattttaaaaagtatttatgtaaataaacagtgcctgacacgtgaattacttacaaaaaagactatcatttgaggctataaaaagttaatatgcaaaaatattcatatctttactaaaaagcaaatcaacctatgaaataccaatgctactcaacaataatatcacaatatacatactaaactcagaagataagtttgttaaaacatgttattactttttatgaaagacaactaaacatatgccatctataacaagaaaggtattgttagacgtggttaaaattgctctgcagatatgagtctaataatgataaatgatatttaacctttgcagtcatcacatatcaatattactattactttcaacttacaactatgaaagcttaatgttaagaaattaagatttagaagggaaggggccagcatgtaattctaagtcttttgatttatagtccatattcaatgtatcactagtgaaatcatcttaaaatcctgactctgccactaatctttctcagcttaggaagtcatttagctgatgtggctccarttttctcactcaatgttataatagggttaaatcaaatgtcccaaactcaagttcttacag

SEQ ID NO: 856449 - DNA, 542 bp, Homo sapiens
cttttaccaaatctgaaaagttttctgtcatcatttagtcaaatattttttctggctctttctcttatactgtgcctattagacctttcaaaactgcccccatacatctctatggttctattttttcaccccaatctttcataactctcttcagattttctatcaatctataatcaagttcatttacttctctataatattaattctgctaataagcccatagagcctatttttaattctgatatatttttcagctctagaattgccatctgattttgttttatttcacggctggtacttcctatcttttaattcattataagtaaacttttctctacctcgctagttacaatagacctcatgtgatatttccaacatgtgggttatcttagagttggtatatgatgattttctcttcccttgagaataagtcacattttcctgaccatttttagaataagtacttttggattatatgctaaacagtgtgactataactctgtacaatattatggrgaaactttctggccagaaaatttcct

SEQ ID NO: 856450 - DNA, 600 bp, Homo sapiens
gccaaaactaacagtacagcaacattcaactccttgaagccagcattattaaagcatcagaaattaacaaaacctccactcttaggaaacaagattcagaactactaggattaggtgaatctccccaagaaaactatctgtgcattgcttaatctgggggtttaacatttaacttttttaaaaaagaggcaaagatttataactccctagtgcctacaatggtgtccaatactcagtaaataataagtatctattgaaagaatgccatagaacagatgagactgagataatgagagaatgtaagagaaatacacgcaagagatcaaagcactgaccttacagaagacaaaaattagacataaaagtaaaaagaaaatgcaaacaaggataagagaaaaccattaaaagcataggaaatccagtgaaagagaatgctacagaggtcataaaaggatagttaagaattctgtcataacaagtgagttatraaaatatttacttttacctaccttacgtggttgaaaatcatatttcacacaatgctgaaaacattttcctttggacttcgatgatgtgactataaaacagttgccaacaaaa

SEQ ID NO: 856451 - DNA, 221 bp, Homo sapiens
tcctggcctggttcccatatggagcctgggcgtacacttggagcctgatgtcccaggtagatcgctgggccccagttgtcatcagatcctaggaaactctcaggccccaggtgcacataaagctccaagtggccacctaggccacaggttgatacacagggtccargtggacactgggtgcaagatgaacaccaggtctctggtgaacgccaagcctcagg

SEQ ID NO: 856452 - DNA, 497 bp, Homo sapiens
tttccagggagctgttattaggatgagacaacgaccagaacatagcaagaattcattagtgctctcaccacccttcccccattgcagccctcagtacctgaatggcaatcgtgcatcttctcatcagcctggaattgcttcccctttcatctttggctctgcagtattcagtgtcactagtgaaatgtgtgaaatgaatgaatcgacaactgatgcttaatacctaatgagacaagtgaatgaatccttttgttcattttatggccagaaagatagtgtaattaagtaataacaactggcaaaaaagagaaactcaacctatactttgtccttttctcaagtagcatctaaaactttttccctctgattaaaaaattatcactgaaggatctctttgaatgtgtcttgaattttatataagcagatgatcacagctcagcataatattagaagattataygattttaaaaattggttcatagttttatagtcttgga

SEQ ID NO: 856453 - DNA, 591 bp, Homo sapiens
gagaactgacccaaactcaattttaggactggtcctgaaattcagaaatgcctttcccatattgcctaactgtgcctttttcactggaaaraaagtgctgccttcagggagcacgcctccgcagagatcagtaaaatcaatgagaaatgcaatgtccatttgtcagtaaagacatctgaagtttgatgggtttcttgggactggataactagttaaagattctaaagaaaaattaagtggggcatagaaaccaaaaatctcaagagatctttgaagaaagaaacatgaaaaatgaggacaaatttagagaaatgttgctggcatagatgttaacttccagaagaagatggaaatagactaccatgcaaaacaaaaagacagaagagaatattagcactctgttgcaaaggagaataggtatgctctactggtaagtataatgcaaatattccaatatctgaaaaaaatcccaaatccaaaatacttctggttccctgcattttggacaagggatactcaacaggtattttaaaagatcaaaatacagatcacagaatatggatattgaagaatatgagcaaacgagagtaa

SEQ ID NO: 856454 - DNA, 496 bp, Homo sapiens
atgtgacatacccctttgctcagcagatacacaattcctgcttcctgctcattagacayttgcagctgtctaagttatcagatggacctatctcagtatcgcagtgtttgtgttcaagtaacccttattttacttaataatggtctcaatatgcaatagtgttgatgctggcaattcagatatgcaaaagagaaacctgaaagtgctttcagtaactgaaaagcagaaagttttgcacttaatgaggaaaaagatatgctgagattgctaacatctagggtaagaactattcctttattggtacaattgtggaaaaggaaaaataaattcttgctagtttcgcttttgtacctcaaacttcaaaagtcacagacacagtgtgtagtaagtgctaatgtagggttcggtattatccatggtttaagacatccactggaggccttccaaagtatgccccacagataaagagggaatactgtagtctttttatgctaat

SEQ ID NO: 856455 - DNA, 593 bp, Homo sapiens
atatttatagtccaaccacttagattgtacaattatcattttgttatatttgctttactacatatctatcactctatccaccattctatccaattatcaactcaccgtttcttatttatgtcaaagtatatatttttcttacatacttaacatatgtagcattattgttcagtatttgtgtacagctcattttttttaagttactaaggttttttattaacacctcagagtagaggttatgaaaggaccctgaattgttccaggaattttcttcagtgagcatttgtgaagactcggggatcaaggttgggttaaactttgtgatgggtccattggcagtctagtcacaagcacctcctcgatccttaggtcccagcggaaaatgatgccagactcttaaactgccacaaggtagcctggaaagaactctacagtccagaaagagcctggaaagtggttttgtgagatgaaatttactcctggtgaaaatgctgtgaatattgtttagcctacaacaaaggatttagaatattgataaacatagtamaacagtggcagggtgtgagaggactgactccaattttgaaagaagt

SEQ ID NO: 856456 - DNA, 596 bp, Homo sapiens
acatttgcatttggagtgcatctgttttgcattcatttaatcttgttgagatggtttgcttgttgacctactcagtcagttatcttttcacctttgtgagttgagagctttgtgtattaaatctgtaaaactttgcatcgtggaaagtgacataatctgtagcagacccatgctgtttttagatgcatcttcattgtggtagtgacagtgattgagaaactttacatgtttttctgtgctatttcagaatatgccttctgaattcagctagaggtggagtcaaaaacaacagaatactatatttttgtttctctgatttaggtaaaatacctcttttctgacaagactaggactcttacatagactaccatgaactaaaagaagcacaacattgccagagtaacctgtggtacgtgtattaatcacttactgaacattttacttgcattctttcaagaaaatgagtttayttttagatacttagtcaaattatcttgactctctgatgtttttaaagagtatttataatagatttagttatttcattaatattgaatgtatttaaaactaaatgcatcccaaaggaaactgaacag

SEQ ID NO: 856457 - DNA, 596 bp, Homo sapiens
acatttgcatttggagtgcatctgttttgcattcatttaatcttgttgagatggtttgcttgttgacctactcagtcagttatcttttcacctttgtgagttgagagctttgtgtattaaatctgtaaaactttgcatcgtggaaagtgacataatctgtagcagacccatgctgtttttagatgcatcttcattgtggtagtgacagtgattgagaaactttacatgtttttctgtgctatttcagaatatgccttctgaattcagctagaggtggagtcaaaaacaacagaatactatatttttgtttctctgatttaggtaaaatacctcttttctgacaagactaggactcttacatagactaccatgaactaaaagaagcacaacattgccagagtaacctgtggtacgtgtattaatcacttactgaacattttacttgcattctttcaagaaaatgagtttatttttagatacttagtcaaattatcttgactytctgatgtttttaaagagtatttataatagatttagttatttcattaatattgaatgtatttaaaactaaatgcatcccaaaggaaactgaacag

SEQ ID NO: 856458 - DNA, 602 bp, Homo sapiens
cttaattttgttttataagctttcttcaaaggcctggtcatcatttgctgtgtgtttatatatttttattttttcagtgggcaaaatacatgtaacataaaatgyatcacattaactattttaagtgtacagttcagttgctttaactatattcataatgttttgtaatgattcccaccattcctctctagaactttttcatgtgaagctctgtacctgtaaaacagtaattcctaactcctgtcatcttccagtccctattaaccaccattctactttctgcctctatgactttgcctatcttaggtacctcatataagtggaatcatacagtatttgtctttttgtgtttggcttatttccattagcataatgtattcaaggtttcattgttcatccacattgtgaaatgtgtcagaatctccttcctttaaaaaggaataatattccaataatattccattgcgtgcatatatcacatttgtttatccattcatccaccagtgggcatgatgttgcttccaccttctggctactgtgagtactgctgctgtaaacattgctatgcaaatatctttttgggtccctgcatttaattattg

SEQ ID NO: 856459 - DNA, 536 bp, Homo sapiens
gaggctgccaggtgagttccagggctctgtggttcctagagcgctcccgggagtctcctggctgcagcgggaaccgagctggatgcccggacagcgccggggtcgtttttctgccccygccccgtggccggagccgcaggcctgccgctacccccacccgggccacgccttccttcctcgcggccggaccgcgccagagtcccgggccctggctggaaactcgcaggccccgggcagcctgggccgcaagtgcgatgaagaagcggggcccggcgcgcacatgtggttccgggcaggagccccggccgcctcgtgcccttcttctcgcccacgacggtggccggcggcggcctctgcttcccggacccatgaacaaagctggagatgcggctttggagtcggccctgggacctgcttcttctcttggcttcggggaccgcagcccagggcgttccctccggatcggtggccagggcttgcggggcgtgtgcgactcgggacccccagccgggcagcagcggccgccaagcatggca

SEQ ID NO: 856460 - DNA, 536 bp, Homo sapiens
gaggctgccaggtgagttccagggctctgtggttcctagagcgctcccgggagtctcctggctgcagcgggaaccgagctggatgcccggacagcgccggggtcgtttttctgcccctgccccgtggccggagccgcaggcctgccgctacccccacccgggccacgccttccttcctcgcggccggaccgcgccagagtcccgggccctggctggaaactcgcaggccccgggcagcctgggccgcaagtgcgatgaagaagcggggcccggcgcgcacatgtggttccgggcaggagccccggccgcctcgtgcccttcttctcgcccacgacggtggccggcggcggcctctgcttcccggacccatgaacaaagctggagatgcggctttggagtcggccctgggacctgcttcttctcttggcttyggggaccgcagcccagggcgttccctccggatcggtggccagggcttgcggggcgtgtgcgactcgggacccccagccgggcagcagcggccgccaagcatggca

SEQ ID NO: 856461 - DNA, 610 bp, Homo sapiens
cttaattttgttttataagctttcttcaaaggcctggtcatcatttgctgtgtgtttatatatttttattttttcagtgggcaaaatacatgtaacataaaatgyatcacattaactattttaagtgtacagttcagttgctttaactatattcataatgttttgtaatgattcccaccattcctctctagaactttttcatgtgaagctctgtacctgtaaaacagtaattcctaactcctgtcatcttccagtccctattaaccaccattctactttctgcctctatgactttgcctatcttaggtacctcatataagtggaatcatacagtatttgtctttttgtgtttggcttatttccattagcataatgtattcaaggtttcattgttcatccacattgtgaaatgtgtcagaatctccttcctttaaaaaggaataatattccaataatattccattgcgtgcatatatcacatttgtttatccattcatccaccagtgggcatgatgttgcttccaccttctggctactgtgagtactgctgctgtaaacattgctatgcaaatatctttttgggtccctgcatttaattattggggctata

SEQ ID NO: 856462 - DNA, 574 bp, Homo sapiens
ttctttttttgtgtatatatctagcaatgagattgctggatcatatgatagctctaattttagttttttgaggaacctccaaattgttctccatagtggttgcactaatttacattcccaccaacagtatgcaagggttggctttttttccatatcctcaccagcatttgttatcacctgtcttttgaaaaaacagccattttaactgaggtgagatgatatctcttcatagttctgatttgcatttctctgataatcagtgatgttggccaccttttcctaagtctgttagtcttttgtatttctttttttgagaaatatctattaagatctcttgcccattttcaaatcagattattagatttttctctatacagttgtttgagctttttatatattctggttattaatcccttgtcaaatggatagtttgcaaatacgtttccccattttttggattttctctttgttgactgtctcttttgctatgcagaagctttttaacttartgcaatcccaattgtccacttttgctttggttgtctgtgcttgtggggtattgcttaagaaatct

SEQ ID NO: 856463 - DNA, 574 bp, Homo sapiens
ttctttttttgtgtatatatctagcaatgagattgctggatcatatgatagctctaattttagttttttgaggaacctccaaattgttctccatagtggttgcactaatttacattcccaccaacagtatgcaagggttggctttttttccatatcctcaccagcatttgttatcacctgtcttttgaaaaaacagccattttaactgaggtgagatgatatctcttcatagttctgatttgcatttctctgataatcagtgatgttggccaccttttcctaagtctgttagtcttttgtatttctttttttgagaaatatctattaagatctcttgcccattttcaaatcagattattagatttttctctatacagttgtttgagctttttatatattctggttattaatcccttgtcaaatggatagtttgcaaatacgtttccccattttttggattttctctttgttgactgtctcttttgctatgcagaagctttttaacttagtgcaatcccaattgtccacttttgctttggttgyctgtgcttgtggggtattgcttaagaaatct

SEQ ID NO: 856464 - DNA, 597 bp, Homo sapiens
gtgcatatttatagtccaaccacttagattgtacaattatcattttgttatatttgctttactacatatctatcactctatccaccattctatccaattatcaactcaccgtttcttatttatgtcaaagtatatatttttcttacatacttaacatatgtagcattattgttcagtatttgtgtacagctcattttttttaagttactaaggttttttattaacacctcagagtagaggttatgaaaggaccctgaattgttccaggaattttcttcagtgagcatttgtgaagactcggggatcaaggttgggttaaactttgtgatgggtccattggcagtctagtcacaagcacctcctcgatccttaggtcccagcggaaaatgatgccagactcttaaactgccacaaggtagcctggaaagaactctacagtccagaaagagcctggaaagtggttttgtgagatgaaatttactcctggtgaaaatgctgtgaatattgtttagcctacaacaaaggatttagaatattgataaacatagtamaacagtggcagggtgtgagaggactgactccaattttgaaagaagt

SEQ ID NO: 856465 - DNA, 487 bp, Homo sapiens
ctcccagaaaattcaagactactaaacgcacccaaccttacaaccccgaagcatattatcacataggggtcttgtgtagtttgctaaartgtaatgtactacctgtcacagaatgagcacttaactgatgttgggtgtgatgtagcatagtagcaaaaaactttagaattaggccacagtgtttttaagggctttgcacgacccattattttttggcacttaatttaaaaaaatctgcatgcttattttaattttgtcattacttgccattgtatccatctcagcacactgatcaaataatcacaaaaatcacagagatgatactctgctaattaagaaagttttctttttttctttgtgaaaccattcttcattttttttttttttggtatttagaaataatttctagtgctaatttatttttagtgacattttgcacagactctccaaataaaaaaccaagaacgaccaattttattgggaaaat

SEQ ID NO: 856466 - DNA, 527 bp, Homo sapiens
gggatagtggtccactcaatgaccctgaggctgcctgggaaacgccttgccagcctccgtcatgggctcagctgcagcagccacctgcacatggcgggggagcagccttgatggcaamcccagaccacgctttcacgccagccaggcagactccagggccaggcgccgcccagcggccaattcaggtggtccggccccagcttcaggagggcgggaaccggcagctcagccatttcctggcggctgccctgtgcccagcccctgcacaccctgatctgggcacctacaagaaagagctgactctagggtgaaagggccgtccactcagcgacccccaggctgtctgggaccagccctgcctgcctctgctgtagattcagctgcagtggtaacctgcacaaggcgcgcagcagcagctgtggcaaattctgaccctgccagcgccaccagcagcgcggacccttgggccagaagcctccacgacgcctaagtcaggggtgttggtccccagccgcaggagggcagaa

SEQ ID NO: 856467 - DNA, 508 bp, Homo sapiens
tgaaaagaactggtggcctgtgtgtcccatggtcttacagggcagtggtggarggtggcccggtcatccactttctggggaggcagaaccagaagcaccagttggacaactgctaaaaagatatttatgcagcctcatatgttaagtcgtatattttgaaagctttttaaattttttctttaagaagattttagatgcttatcactgagtaccagagggatgtaggctgatgcccttatcaacaaagtcagggactgtggcacacaaggattgactactgcagacacggtcacaatgctacctctagagggcctgaatccccctgccctctctggtggggagaagggctggcagagccattagcatgggctccggccaatcctggccactttgacactcctggtgctgacccagggtcctggaggaagggatgaggtgggcagtagagatgctcagggcagtggcccctttccatccacactggaactatttcaatattttaccacca

SEQ ID NO: 856468 - DNA, 495 bp, Homo sapiens
ctcccagaaaattcaagactactaaacgcacccaaccttacaaccccgaagcatattatcacataggggtcttgtgtagtttgctaaartgtaatgtactacctgtcacagaatgagcacttaactgatgttgggtgtgatgtagcatagtagcaaaaaactttagaattaggccacagtgtttttaagggctttgcacgacccattattttttggcacttaatttaaaaaaatctgcatgcttattttaattttgtcattacttgccattgtatccatctcagcacactgatcaaataatcacaaaaatcacagagatgatactctgctaattaagaaagttttctttttttctttgtgaaaccattcttcattttttttttttttggtatttagaaataatttctagtgctaatttatttttagtgacattttgcacagactctccaaataaaaaaccaagaacgaccaattttattgggaaaatactaaatg

SEQ ID NO: 856469 - DNA, 502 bp, Homo sapiens
taaacatggtcctccttgggtcatgtggctaccccaggaccaatcattgcacaaacataggagatamtctcaaaagccaggctggagtcaaggttatccagtggagtttccactttaaaaatcagttttgtcagcctttgtgtttgcatattacagacatgatagctgtctattccacttctattagagatgaaaactaagagcatatgcccattcagaggattttacatgaatcttcatagcagctttacttgcaacagccaaaacctgaaaacattccaaatgtccatggcaggtgaatttgtgacttataaacttactatggtatacgtatataatgaaataatactccctagtaagaacagaacaattgatagatgtagcaacatgaattaatctcaaaaatagtgatgctgagtgatcagaaagtatacataccatatgatttcatgtatttggaaataaaaactcatggatagtgactggaagtggatcagtggtt

SEQ ID NO: 856470 - DNA, 502 bp, Homo sapiens
taaacatggtcctccttgggtcatgtggctaccccaggaccaatcattgcacaaacataggagatactctcaaaagccaggctggagtcaaggttatccagtggagtttccactttaraaatcagttttgtcagcctttgtgtttgcatattacagacatgatagctgtctattccacttctattagagatgaaaactaagagcatatgcccattcagaggattttacatgaatcttcatagcagctttacttgcaacagccaaaacctgaaaacattccaaatgtccatggcaggtgaatttgtgacttataaacttactatggtatacgtatataatgaaataatactccctagtaagaacagaacaattgatagatgtagcaacatgaattaatctcaaaaatagtgatgctgagtgatcagaaagtatacataccatatgatttcatgtatttggaaataaaaactcatggatagtgactggaagtggatcagtggtt

SEQ ID NO: 856471 - DNA, 565 bp, Homo sapiens
ttgatagatgtagcaacatgaattaatcwcaaaaatagtgatgctgagtgatcagaaagtatacataccatatgatttcatgtatttggaaataaaaactcatggatagtgactggaagtggatcagtggttacctgtggaagagatggggggataggcaggaaaaagtgagtagaaaaaacacaagaaaactttggtggtaaaggtaatggatatgtttgctattttaatatgttgctggttttatagagctacaaatgccaagaattaccaaaatgtacaattgaagtatgtgcagtttattgcatgtaaataaaccttttaaaaattaaccgatacaagttgacttacatgaccagaaagctcttgaaaaactctcctgttttctcccctatttttattcttgcatgcccttatagactgtgttaacacatttctcatcttacggttcttttgtgtctacatttctccaggtcaatataactatcaccataatttcttggtttctctttagttcatcagtaattatgagtaatgtattgaaatgttaatgatatgttcatgc

SEQ ID NO: 856472 - DNA, 544 bp, Homo sapiens
ttatattcctgttgtatttttttatagataataactcctgttgaataactttttagtcaaatagacatattttgaagatacagctttcagctttgctgtaagatcatcgaactacattaataaaataatatagcttgataatgaagtaggctgagaataatctcatacaaaaccaataacaaattttgaaatacatttacttgcaataaaatgttatctataatgtagattctttaaatgttaacccgtactcagaaattcaagaacaaagtaaaagccaccatgagtcacaaacatatattctttactctcatcatctttgccacagaacttttgcacttgatcttactgttgtttttctgataatttgtgttttttcctttcttaaatggctctaagttaactcttattagaaagtttcaaacccccttctctcatcatcatgccccaaaatttgtcaaaaaaaagtttcagagatattwtattgagttatttaggccaaaggcaataaatggctcttacaataagactttgaaaataatgt

SEQ ID NO: 856473 - DNA, 633 bp, Homo sapiens
tttatcctcaagttttttatattcctgttgtatttttttatagataataactcctgttgaataactttttagtcaaatagacatattttgaagatacagctttcagctttgctgtaagatcatcgaactacattaataaaataatatagcttgataatgaagtaggctgagaataatctcatacaaaaccaataacaaattttgaaatacatttacttgcaataaaatgttatctataatgtagattctttaaatgttaacccgtactcagaaattcaagaacaaagtaaaagccaccatgagtcacaaacatatattctttactctcatcatctttgccacagaacttttgcacttgatcttactgttgtttttctgataatttgtgttttttcctttcttaaatggctctaagttaactcttattagaaagtttcaaacccccttctctcatcatcatgccccaaaatttgtcaaaaaaaagtttcagagatattatattgagttatttaggccaaaggcaataaatggctcttacaataagactttgaaaataatgtaatactctacaataggcatggtgtatcatgcatataatcctagcacttwaggaggctgtggcagaaagatccc

SEQ ID NO: 856474 - DNA, 372 bp, Homo sapiens
caaggcaggacaaacacactcggagcagtgtgttagyacctggggcctgtgcatgccagggaggccaagctggctcaaagagcaaccagacacctctgcaaggtttggccagggctatagaaggtccccctggatggtaatcctggctgctttctgcacttgaatataaagtcctccccaagatggcctgtggtctgcctcttggcaaccaagaagcccgcagtgccatgtgacacctgaggcatggactggagccccaaaggcagggtacacccttctcctgaacctgcttcttgtttcctctatatggctccatttgtggcaaagttgttgcactgaagcttgtgcatgccgggcaaggacaagctggct

SEQ ID NO: 856475 - DNA, 225 bp, Homo sapiens
gccccagctactgacacgctgctccgagtgagcttgtcctgccttggcacaaattttaagtctcgccagggccacagaaggctyagtcccatggatggtaattttggctgctttctgcacttgaacgtaaagtcctcctcaagaaggcctgtggtccgcctcttggcaaccaagaagcctgcagtaccatacgacccgaggcatggactggagccccaaaggcag

SEQ ID NO: 856476 - DNA, 399 bp, Homo sapiens
ctgcttttcctaaggcctctgctccatcaggaattaggtggcagccaaggcaggacaagcacactcggagcagtgtgttagyacctggggcctgtgcatgccagggaggccaagctggctcaaagagcaaccagacacctctgcaaggtctggccagggctatagaaggtccccctggatggtaatcctggctgctttctgcacttgaatataaagtcctccccaagatggcctgtggtctgcctcttggcaaccaagaagcccgcagtgccatgtgacacctgaggcatggactggagccccaaaggcagggtacacccttctcctgaacctgcttcttgtttcctctatatggctccatttgtggcaaagttgttgcactgaaacttgtgcatgccg

SEQ ID NO: 856477 - DNA, 314 bp, Homo sapiens
aggccccagctactgacacgctgctccgagtgagcttgtcctgccttggcacaaattttaagtctcgccagggccacagaaggctcagtcccrtggatggtaattttggctgctttctgcacttgaatgtaaagtcctcctcaagaaggcctgtggtctgcctcttggcaaccaagaagcctgcagtaccgtacgacccgaggcatggactggagccccaaaggcagtgcacaccctgctcctgagcctgctgctcgtttctatatggctccatttgtagcacagttgttgcactgaagcttgggcatgctggc

SEQ ID NO: 856478 - DNA, 314 bp, Homo sapiens
aggccccagctactgacacgctgctccgagtgagcttgtcctgccttggcacaaattttaagtctcgccagggccacagaaggctcagtcccatggatggtaattttggctgctttctgcacttgaaygtaaagtcctcctcaagaaggcctgtggtctgcctcttggcaaccaagaagcctgcagtaccgtacgacccgaggcatggactggagccccaaaggcagtgcacaccctgctcctgagcctgctgctcgtttctatatggctccatttgtagcacagttgttgcactgaagcttgggcatgctggc

SEQ ID NO: 856479 - DNA, 406 bp, Homo sapiens
gtgccatctgcttttcctaaggccactgctccatcaggaattaggtggcagccaaggcaggacaagcacactcggagcagtgtgttagtacctggggcctgtgcatgccagggaggccaagctggctcaaagagcaaccagacacctctgcaaggtctggccagggctatagaaggtccccctggatggtaatcctggctgctttctgcacttgaatataaagtcctccccaagatggcctgtggtctgcctcttggcaaccaagaagcctgcagtgccatgtgacacctgaggcatggactggagccccaaaggcagggtacacccttctcctgaacctgctttttstttcctctatatggctccatttgtggcaaagttgttgcactgaaacttgtgcatgccg

SEQ ID NO: 856480 - DNA, 506 bp, Homo sapiens
gcataggccccagctactgacacgctgctccgagtgagcttgtcctgccttggcacarattttaagtctcgccagggccacagaaggctcagtcccatggatggtaattttggctgctttctgcacttgaacgtaaagtcctcctcaagaaggcctgtggtccgcctcttggcaaccaagaagcctgcagtaccatacgatccgaggcatggactggagccccaaaggcagtgcacaccctgctcctgagcttgctgcttgtttcctctctgtggctccatttgtaggacagttgttgcactgaagcttgtgcatgccgggcaaggccaagctggctcaaacagcaaccacccacctctgcaagggtatgcctggagcaggtgcaccagtcaccatctagcggccggacatggtacatcacttcttctaccctaaaggtgggctacagcaccatctgcttttcctaaggccactgctccatcagcagttaggtggcagccaaggca

SEQ ID NO: 856481 - DNA, 493 bp, Homo sapiens
tgcctggcatgcataggccccagctactgacacgctgctccgagtgagcttgtcctgccttggcacaaattttaaktctcgccagggccacagaaggctcagtcccatggatggtaattttggctgctttctgcacttgaacgtaaagtcctcctcaagaaggcctgtggtccgcctcttggcaaccaagaagcctgcagtaccatacgatccgaggcatggactggagccccaaaggcagtgcacaccctgctcctgagcttgctgcttgtttcctctctgtggctccatttgtaggacagttgttgcactgaagcttgtgcatgccgggcaaggccaagctggctcaaacagcaaccacccacctctgcaagggtatgcctggagcaggtgcaccagtcaccatctagcggccggacatggtacatcacttcttctaccctaaaggtgggctacagcaccatctgcttttcctaaggccactgctccatca

SEQ ID NO: 856482 - DNA, 217 bp, Homo sapiens
tactgacacgctgctccgagtgagcttgtcctgccttggcacaaattttaagtctcgccagggccacagaaggctcagtcccatggatggtaattttggctgctttctgcacttgaacgtaaagtcctcctcaagaaggcctgtggtccgcctcttggcaaccaagaagcctgcagtaccatacgayccgaggcatggactggagccccaaaggcag

SEQ ID NO: 856483 - DNA, 623 bp, Homo sapiens
aggggtgcctcggtcagcaggatggggtgctcctcgggagccacacgcagctcattgtagaaggtgtggtgccagatcttctccatgtcgtcccagttggtgatgatgccgtgctccatggggtacttcagggtcaggatgcctctcttgctctgggcctcattgcccacataggactccatctgacgcatgccccccatcatgttctggtgcctggggcaccccacgatggaagggaagacagcccggggggcatcgtcacctgcaaagccggccttgcacatgccagagccgttgtcaatgacgagcacggcagtatcatcatccatggtgagctcattcagttgtagaccctttaaaagattatcattctttttttccacactttcaatttcctccaaatatttcttttctcttagctggctctgatgtttcattatgtctagttccagtcttagcatgacaatttcttcctgcaacgtactattttcatgcaagaggtctttttctttcttataactaagagaaagctaagtaaacaaagggaacttttagttagcactcaatagattgatataycatgatttcttctgaaattaaaaaataacatctgtatttgtata

SEQ ID NO: 856484 - DNA, 624 bp, Homo sapiens
aatgaaaaaggtgagtgatctatataaagataactggaaaacaccaccaaagaaaataacagatgacacaaacaaatgaaaatacatcctatgttcatggactgaaagaactgatatagtgaaaatgaccayagtgcccaaagcagtctacatagtcgatacaattcctaccaaagtaccaatgtcattcttcacagaattattttaaaatgctgacattcatgtaggaccacaaaagagcctgaatagcaacagacataccaagcaaaaggaacaaatatgttggcatcacgttacctgacttcaaattatactctaaggccacagtaacagaaacagcgtggtactggtataaaaacagatacatagatcaacggaacagaacagacaactcagaaataaagccgctacaaccaagtgatctctgagcaagcatacaaaaacatacactggagaaagtacaggttattcagtaaatagtgctgggaaaaaaagagagccacatgtggaggaatgaaactggatctctatctctcaacatatacaaaaattaattcaagatggatgaaaggcccaaacctaagacctgaaaacattggcctaggcaaagaatttatgatgaag

SEQ ID NO: 856485 - DNA, 624 bp, Homo sapiens
aatgaaaaaggtgagtgatctatataaagataactggaaaacaccaccaaagaaaataacagatgacacaaacaaatgaaaatacatcctatgttcatggactgaaagaactgatatagtgaaaatgaccacagtgcccaaagcagtctacatagtcgatacaattcctaccaaagtaccaatgtcattcttcacagaattattttaaaatgctgacattcatgtaggaccacaaaagagcctgaatagcaacagacataccaagcaaaaggaacaaatatgttggcatcacgttacctgacttcaaattatactctaaggccacagtaacagaaacagcgtggtactggtataaaaacagatacatagatcaacggaacagaacagacaactcagaaataaagccgctacaaccaagtgatctctgagcaagcatacaaaaacatacactggagaaagtacaggttattcagtaaatagtgctgggaaaaaaagagagccacatgtggargaatgaaactggatctctatctctcaacatatacaaaaattaattcaagatggatgaaaggcccaaacctaagacctgaaaacattggcctaggcaaagaatttatgatgaag

SEQ ID NO: 856486 - DNA, 647 bp, Homo sapiens
ccagcattctcatttctggatagctacacaaaayaaaagaaatcgtactctcacaaagacacccgcacacatatgtttactgcagcacaattcacaatatgcaaagatatggaatcagccagtgtccatgaactgatgaatggaataaagaaaatggagatatataaaaatatatatatctcacatcacatatatatatatcacatatacgtatgtgtgtatatacactcacacatatacgtatgtacatacccgagactgggtaattcatacacatacatacctgagactggataattcataaaggaaagaggattaattgattcacagttatgcatggctggggaggcctcaggaaacttaacaaccatggtagaacgtgaaggggaaccaggaaccttcttcataaggcggcaggagagagagaatggaaggggaaagagccccttatgaaaccgtcagctcttgtgagaactcactcactatcacaagaacagcacggaggaaaccgaccccatgagccaatcacctcccagctggtctttcctcaacacctgggaattacaatttgacatgagatttgcatagaaacacaaagccaaactattgtgggggggtatccttatttttaaaatatctaaatgtca

SEQ ID NO: 856487 - DNA, 581 bp, Homo sapiens
agtttaagcaggagagataacatgccagatggttgactgccttttagttattaggaggaactctgacacatacttagcgtgaaatgggaggcaatcagaagggctggggcaggggaatgacacaatttgacttatgttttaaatacatccactgagttaagaattgatgaaaggggaagtttttaaaaaccaggactatcaattcccagtctatgacactcatctagatggcagatgatggtggctcacatgtgcaagatatgactggcttctggacatattcttcaggtagacctgacgagatttactgagagattagatgtgaagtgtcaagagagagagaaagatgagtctagaatgacaccgaggtttttggcagagcaactggaagagttgccattaaccaaagtaggaaagactacatgaggtgtagatttcaggaaggccatcagtagcccaattttggatctgacaagtgtgtgatactcaacagctaatcaaataactatttattaggtagctacgtctgataggctaggcctgtcaagtagscaggctgatacagagatctggaattaagg

SEQ ID NO: 856488 - DNA, 627 bp, Homo sapiens
agcaaaacagaccgtgatgaatggactagaaaggcaggagtaaaagcctgagggagtgaggtcctgaaagccaagtgaagacgccgttagggagaagatgccctccattggctcaaatattgctgacagattaaataaaatgaggtgtaagaaaaaatgcatagatttatttacagaaaaaagtagtgataaccttgagaaaaacaactctggaggagtgctgaaattgaagacttactggcattgagatcaagagtgaatggaaagaaaatttgagttcgtgagtgtagacagttacttaaaggacaacatacttaacactcacgactgagaatgatgtaattttcatccacagtcatggaaaagtgatagacaagaaatagtttccaaattttacataacaggtggaggtttcaaatgctatgtaacaattatatatttcaaaggttataaaaattatacacatgtggcattaaatgccagaccaaggttttaaaggcccctagaacatttctagatyacataagctgattatcattttgttcattcatgcttatacataaagaccaagaaatactaaaggtctcaacgagaatatttcttgcttgataaaaatcagccaattct

SEQ ID NO: 856489 - DNA, 634 bp, Homo sapiens
aaacacgaaggtgctcactgaaacatgggaaccaaagtttcccacaacataaggagcagagtgaaactgctgaggtacaatcatggaattccagaaaatgagttgctccccaaatttcacattcgatagccataaaattttctagctggaaaatacacagaataaaaaattatctactttagccacattttctattgataatcagactaaaaccaagaaagataaaattattgatccaaagctcctaaagtggcattacttagcattttacggcaccatttgggactattccataataatgaaagaatatctctagggtttgcatctctttaaaattcaatgtatagaattctgagttaagtattaaatttttcactgatgatttatgctacttacatgataggatcacgtatgcctacacttactacactttgttaaacaacataatgtaaaaatctaattcaacgcaaacatttgaatataaaagtatacctttctatcaccacccttatttatttctggttcttgagacatttcctgcagatgcaaaaamagaaggttaatttgcttgttgtatttctgtgatgtctcctcttttggagcacatgtttttaaaataattttattcttaagt

SEQ ID NO: 856490 - DNA, 380 bp, Homo sapiens
agttttcagaaaatgttattaagtcckaattttgcctcttagttgtcctactctttatggcttatatttcagggcatctcaactatgtcatagtttgtaactaaatgtattcctaaatatctcattaaagtagataatgtgattgtccactattacggagttgatcaatcacaccaagggcagaaaaaccaatggatgttaagacctggtttggaccaatgagccttctctacagactcaaactctgagcccgcagatgttggttacaatgatgctttatattgatgttcaattccggctgacatgggagaccaaaagtctacttttattttttttagtttccatgaagaagtagcaagctgacattctgtcattttcga

SEQ ID NO: 856491 - DNA, 474 bp, Homo sapiens
atttaaaatctatttatatttaaytttcccagattgttactaaataatcagttcataggactactgaaactaaattaacagaattcctatctgcattcttaataactccatggttttaagtgtgtaaaactgccatgctgattatgccaaagctctacatacttaaagagacacactggacagtccacaatacagcttcaattgataaaaaacagtttagaatttgcttaattccaattgagaaaactctgctcttaatgacttactgacctaagcacttgaatgactgaacaaagagacacaaaatcctgagagggccatcctctacttattgaaagactgctcacagcaaactactaaagaccttctgaatggcagtgaataactgatggtagaaaggaaaatatattattctgtaacctgatatgtaacctgatagatactaccaataatattcattttaatgtctcaacc

SEQ ID NO: 856492 - DNA, 589 bp, Homo sapiens
gttgcctaggctggtctcaaattgtttggctcaagtgatctgcccaccttggcctcccaaagtgcttggattacaggcatgaaccatcacgcctggccataaaaaaacatgcatggctacatcaaagtgaaaactttttgcaaggaaaaggaaacaatgagcccaaagaggaaggctgggagaacaaatcacatatcggctaatgggggttgttatggaaaatatgcaacacattaatagtactaagtagcaacaacaaacaaatgatccatccaaaactgagcagggaacctgaataggcatttctgcaaagaagacattaaaccacatggaagggcgcttcctccacagtcaggtggccgtgactagatggacagagttaggcagacgctgtggggggcggggggtgttgagaaaagtgacccctatgtcccgacggcagggaaacaaatgtaaaarttcagtagaccacctgcagtagttcatgcctgtaatcccggcactttgggaagctgaggcgagaggatttctttgagctcagaagtttgagaccagcctgggcaacatggcgaaaccctgcctctaccaa

SEQ ID NO: 856493 - DNA, 619 bp, Homo sapiens
aaaccctgcctctaccaaaaatacaagaaaaacaaaattcagcagaccaggcacagtagttcacacctgtaatcccagcacttagggaagccraagtggaaggattgctttgagttcagaagttcaagataagcctgggtaacatggcgaaaccccgtggccagcaaaaatatgaaaaaaaaaaaaatagctgggcatggtggcacaagcccagctaatggggagactgaggctggagaatcccttgagcccagaaagtggaggctgcagtgagctgagatctgccactgcactccaggatgcacaacagggccagaccctatctccaaaaaaataaaaccaattaaaaaatcagcaaaccctggaggtggctgggatcctttccttccacctgaggcttggatgcaaggcagccaaactggggcctggtcccaaaaccccacctaggccgggcttcctcttcctcccacagccagagatttcctctctctccatctacatggggagtctccctcagaaacagccctaaagcctcctactctttccaacctcaaaagccctcagggactgagtactactataaaattcatactaagatggaaagaaagaaaaaaggaag

SEQ ID NO: 856494 - DNA, 512 bp, Homo sapiens
atcatttcagcaaaaattcaggatacaaaattaatgtacccaaatcaatagatctgctatacaccaacgatgtgcaagctgagaatcagatcaagaattcaatcccttttacaatasctgcaaaaaaataaaataaaacacttaggaatatacctaacaaggaagtataaaagacctctacaaagaaaactacaaaacactgctgaaagaaatcacagatgacacaaacaaatggaaacacctctcatgctcatagatgggtaaaatcaatattgtaaaaacgaccataacgccaaaagcagtttacaatttgaaagcaatttccatcaaaatatcaccatcattcttcacagaactagaaaagataattcgaaaattcatatggaaccaaaaaagagcccgcatagccaaagcaagcctaagcagaaggaacagatctggaggcattacattacctggcttcaatctatactacaaggccatagttagcaaaacagcataatactggtata

SEQ ID NO: 856495 - DNA, 512 bp, Homo sapiens
atcatttcagcaaaaattcaggatacaaaattaatgtacccaaatcaatagatctgctatacaccaacgatgtgcaagctgagaatcagatcaagaattcaatcccttttacaatagctgcaaaaaaataaaataaaacacttaggaatatacctaacaaggaagtataaaagacctctacaaagaaaactacaaaacactgctgaaagaaatcacagatgacacaaacaaatggaaacacctctcatgctcatagatgggtaaaatcaatattgtaaaaacgaccataacgccaaaagcagtttacaatttgaaagcaatttccatcaaaatatcaccatcattcttcacagaactagaaaagataattcgaaaattcatatggaaccaaaaaagagccygcatagccaaagcaagcctaagcagaaggaacagatctggaggcattacattacctggcttcaatctatactacaaggccatagttagcaaaacagcataatactggtata

SEQ ID NO: 856496 - DNA, 579 bp, Homo sapiens
aagaagtatattgctttggtctagaaaggtgtgacaagttgaagctaactcagaagactggaaggagggagggagcttccaggtcacagatcactgatacacaaatggttacattcttttgagtttctgattagtctccaaaggaggcaatcaggtatgcatctatctcagggagcagaggggtgactttgaatagaatgggaggcaggttggccctaagcagattccagcctgagttttccttagtgattttaggggcccaagatattttcctttcacatttccccccttttctttttaaaaaatcttttggaaaaagcattttacaagaaaatgagtctctggtctcgggtttcatctgatctctcatggctaggagggtttattcctagagaggtaggtcccaaaagctcatttttagcaggttgtgatgtctcacatcctttgaagttaaaataggggggaggaagtgagaaaaaacaacaacaaacaaaagaacaatcctggaaaaatcaatgyaagccacattactctgcagtccatgcctcagtaggcaggtatgaaagtggcttaggtatg

SEQ ID NO: 856497 - DNA, 645 bp, Homo sapiens
gaaagcacaccatttcagtcaaacccttgataaaataaccaacttctccaactgtgtcctattgcwaaataaaacagattcttattgcacttatgcaaataactatattgccataaattaagaatacccccagtttccaaattctggagaaattaggtagagaaaaacaaatatgctccaaattttgttcacaggaatatactttattgttaaaatctgcaactaacaaagttttcttaactctgaaaaactaaacaaagtatcagcaatgttttaagcaagaagtcaaaaagattacttcaattttctgttggttcagttatttctattaactcctgttccgtttcatagtcaggaacatttcagctctccatgagagagttccgaaattttttgctttattccaatgtaacaatttccaaaattatcagaaaacctgaatttaagtgcacctgttaagagtcctacagctgattataaacccaccttataaagagggtttaaaacaagacaaaacaagacaaaacaagataaccgtctgtggatgaaaaaaaagtaaaggcagccatagttaaaagatacaattgacaagtgaatgtgttacctccgtggcacacgataattttaacatagcaattatgatta

SEQ ID NO: 856498 - DNA, 599 bp, Homo sapiens
gacaagtgaatgtgttacctccgtggcacacgataattttaacatagcaattatgattattacgaataatgtacactaagttrtatcagaattacaggagtttcccatcattttggaacacataccaataacatatttatacaaatggatatgaaagaaagccaaacaccatttcttatctgacagtactttcctgtataaattttataccagataagccaaattatgtcatttttagactttagagaaactaatgttctatttaggatggaaaaagacataatatataatttgattttggaaagtttgtcaaatataaaatgtttaaaacacttgatattaaaaaataggattacaggtcattgtaaagtcatttatttaaccaaagtgataattcaaggattttttaaaagtgaaaaccttcatcctttgagacaggagacttaattttttaaacaagaagccctaataaaaacagcatgaagccaattacatttgttttttaaaattttctaaatctataaaatgtaatcttgattataaaatataacttccataagccttttataacctgtactaaggagttggtaaatgcttca

SEQ ID NO: 856499 - DNA, 624 bp, Homo sapiens
aactaacccaaggtgaatgaaagatttcagcagaatacctcmaactataaaagtcctacaaggaaacctaggacatatctttctcagtacgggctttggaaaagcatttaaacaaaaagcaacagtaagaaaaaccaaaaggacaagctgggcctaagaaactataacactgccagatagcaaaataaatcactggcacagtaaacacacaggctacaggatgggagaaaatgttcccaaactatgcttctcaccaaggtctgatagccagactctaatatgaccttaaaaaaatcaagaggcagaaaaacaaaccattcaaacaatgggtagagaacatgaacaaacacctcaacatccctcatcatcagagaaatgcaactctcatgaacactgagataccatctcacatcggtcagaatggccatttgtcctaaggccaagcattaacatggtggcaaggcaatggaggaaagcaaacactgctacactcttggtgggaataaaaactagctctcacactatgagaagtggtttggaggttcctcaaagaacttaacaactaccatccaaatgagcaatcacataactgggtatctacacaaaggaaaataaatcataaat

SEQ ID NO: 856500 - DNA, 630 bp, Homo sapiens
aactaacccaaggtgaatgaaagatttcagcagaatacctcmaactataaaagtcctacaaggaaacctaggacatatctttctcagtacgggctttggaaaagcatttaaacaaaaagcaacagtaagaaaaaccaaaaggacaagctgggcctaagaaactataacactgccagatagcaaaataaatcactggcacagtaaacacacaggctacaggatgggagaaaatgttcccaaactatgcttctcaccaaggtctgatagccagactctaatatgaccttaaaaaaatcaagaggcagaaaaacaaaccattcaaacaatgggtagagaacatgaacaaacacctcaacatccctcatcatcagagaaatacaactctcatgaacactgagataccatctcacatcggtcagaatggccatttgtcctaaggccaagcattaacatggtggcaaggcaatggaggaaagcaaacactgctacactcttggtgggaataaaaactagctctcacactatgagaagtggtttggaggttcctcaaagaacttaacaactaccatccaaatgagcaatcacataactgggtatctacacaaaggaaaataaatcataaatcttcct

SEQ ID NO: 856501 - DNA, 646 bp, Homo sapiens
ttaaataaaaacatagaccatgtcctatttttgttttccaaataggatcacaacacactactaaaaatcccgtgggacaatgaaatgycctgcattcccaaagcagtttctgcacatacaaagtcagtggagtgccatcacactcttccactttcaactacttcccaaagctttagttacccaagcgattcgtgataggcattaacagagaaacacaggccaacgaacacaatgagggtgtccagcagcaaactcaaatgaaggtctcagttaatttagaaagtttattttgccaaggttgagaacacactcgtgacacagcctcagggtcatgatgacatgtgcccaaggtggtcagggcacagcttggttttatacatttcagagaaacatgagacatcaatcaatatatctaagaagtatattgctttggtctagaaaggtgtgacaagttgaagctaactcagaagactggaaggagggagggagcttccaggtcacagatcactgatacacaaatggttacattcttttgagtttctgattagtctccaaaggaggcaatcaggtatgcatctatctcagggagcagaggggtgactttgaatagaatgggaggcaggttggccctaagcagattccagcc

SEQ ID NO: 856502 - DNA, 408 bp, Homo sapiens
ggccaggcaggcagcgtgcagggatcctcctggtgcttcagccagtcctggggctgccacttcccagagcactgccgggtgtgcagggcgtgggtgcagcgccagctgcctcaggctcatgcccactgttcggttgcaggcaccaaccccttcctcaggtcgatgcaccaccgcgtgacctccaggcagctgcagctcccggacaagcactaggttaccaccttgctcagcacctgtgcccagagcatccacaaggcctgcctctcggctgcctagccaggactgcagggatggcccgcagcctcatcggggccaaggatgcatgcctcctgtcagacacttmtagatgttggcgtccatggagagcctggagttaggttagctttcctccttttctctcctgccttg

SEQ ID NO: 856503 - DNA, 722 bp, Homo sapiens
cactccatgtgacttcctccatgaagccagacacagtccccagccacgatcctcgggctgctctcaccacggcctgtccagggtccgggtgcatctcagcagcatgaggttgtgctcaggttgttgttagcgcgtcttgtgtgtgctcgacacacccctgctgctttctataggagaacacagaggacataggaaacccttcaaacacacatgggactctctgctcacagttttgggttcaggctgcactgctttgggcaagtggggcaccccctagggaagcctctgagtccagggcacaggatgcctctttcaatacttgttttttttctcatactcaggatctatactgtagactttataacactgtacccttaagctacaccaaatttattaaaaaatattttttctttgataattaacttttctgtagcttttaaaatttataaacttttaaattttttaactttttgacttgcaataacagcttaaaatacattgtacagctagctgtataaaaatatttttctttatagcctgtaagtttttttatttgaaaaacgttctattttaattttcttgaaaactctgttaaaagctgtgayacaaacatatacattagcctaggcctacactgggtcaagatcatcagtgttactgtcttccacctccacatctgctcccattggaaggtttttagaggaaataacgtgtggatccag

SEQ ID NO: 856504 - DNA, 625 bp, Homo sapiens
gaaagcacaccatttcagtcaaacccttgataaaataaccaacttctccaactgtgtcctattgcwaaataaaacagattcttattgcacttatgcaaataactatattgccataaattaagaatacccccagtttccaaattctggagaaattaggtagagaaaaacaaatatgctccaaattttgttcacaggaatatactttattgttaaaatctgcaactaacaaagttttcttaactctgaaaaactaaacaaagtatcagcaatgttttaagcaagaagtcaaaaagattacttcaattttctgttggttcagttatttcaattaactcctgttccgtttcatagtcaggaacatttcagctctccatgagagagttccgaaattttttgctttattccaatgtaacaatttccaaaattatcagaaaacctgaatttaagtgcacctgttaagagtcctacagctgattataaacccaccttataaagagggtttaaaacaagacaaaacaagacaaaacaagataaccgtctgtggatgaaaaaaaagtaaaggcagccatagttaaaagatacaattgacaagtgaatgtgttacctccgtggcacacgataattt

SEQ ID NO: 856505 - DNA, 591 bp, Homo sapiens
gacaagtgaatgtgttacctccgtggcacacgataattttaacatagcaattatgattattacgaataatgtacactaagttrtatcagaattacaggagtttcccatcattttggaacacataccaataacatatttatacaaatggatatgaaagaaagccaaacaccatttcttatctgacagtactttcctgtataaattttataccagataagccaaattatgtcatttttagactttagagaaactaatgttctatttaggatggaaaaagacataatatataatttgattttggaaagtttgtcaaatataaaatgtttaaaacacttgatattaaaaaataggattacaggtcattgtaaagtcatttatttaaccaaagtgataattcaaggattttttaaaagtgaaaaccttcatcctttgagacaggagacttaattttttaaacaagaagccctaataaaaacagcatgaagccaattacatttgttttttaaaattttctaaatctataaaatgtaatcttgattataaaatataacttccataagccttttataacctgtactaaggagttggtaa

SEQ ID NO: 856506 - DNA, 475 bp, Homo sapiens
agatattttggggtttgaaaaattcatataatgattaaaggagaaagctcttatgagttattgtatgctgagatatatgtggacacacacacacacacacgcagtttattgcattgttgggttttatacataaaattacccaagttgcaaatatatgtctaccacccttgactctcaggatagtgcagcaggatgcagcggaacccccctgacttgctgacaagcgcagaccagtctagaagtggccctgtacatgtttctgcggaaccctgacactgaagctgttctggttgccatgtcctgtttccgccacctctgtgaggaagcagatacccggtgtggggtggacgaagtgtcrgtgcgtaacctcttgcccaactcttaacacattcatggagtttgcctgtcagcaatgtgatgtcaacaggtaaatatgaatagtggtttttttactcaacctccctaaagcacatgg

SEQ ID NO: 856507 - DNA, 527 bp, Homo sapiens
ggaccaacacaacactgtacattgtaatggaatattgtgaagaaggagacctggctagtgtaattacaaagggaaccaaggaaaggcaatacttagatgaagagtttgttcttcgagtgacgactcagttgactctggccctgaagtaatgccacagacgaagtggtggtgatcatactgtagtgcgtcggggtctgaaaccagccagtgttttcctggatggcaagcaaaacgtcaagcttggagatttggggctagccagaatattaaaccacgacacgagttttgcaaaaacatttgttggcataccttattacatgtctcctgaacaaacgaatcacatgtcctacaatgagaaaccagatatctggtcattgggctgcttgccgtatgagtcgcgtgcattaatgcctccatttacagcttttagccagaaagaactcgctgggaaaatcagagaaggcaaattcaggcgaattctataccrttactctgatgaattgaatgaaattattatgaggatgtta

SEQ ID NO: 856508 - DNA, 551 bp, Homo sapiens
ctctgccatccgagccggagggcaccgtgcccagaccccaccctgtgttcacaccccagcaggctgtctgctttgtcttcacatacacggagcccaggacagactggccatgcctctgcccccacgcaccctcayctccccaacacagatacggctctgcttgcctggggccctagggaggtgacaggcaggacctctgggcacccattgacgcagggcactctgggcttcaggtttggaaatctgagagtcagagagacatccaggctttgccgcaagcctcaccagaacctcccggggtgtgaagagtcctgttcgggagcagggctgtgaggcggggcaggccagggctcgtccgggtcacaggtacagccttgtgtgttgcaaacgacaaggacctcccaagtgtgccaccatgtgcccacccactaccctgcccagagtccactgtggatggactggcagtggctatacagtgggcagacccagaggagctgtctgggggcccagggcaggcaggggtcattctggaaaaccaagcttctagtgct

SEQ ID NO: 856509 - DNA, 412 bp, Homo sapiens
ggccaggcaggcagcgtgcagggatcctcctggtgcttcagccagtcctggggctgccacttcccagagcactgccgggtgtgcagggcgtgggtgcagcgccagctgcctcaggctcatgcccactgttcggttgcaggcaccaaccccttcctcaggtcgatgcaccaccgcgtgacctccaggcagctgcagctcccggacaagcactaggttaccaccttgctcagcacctgtgcccagagcatccacaaggcctgcctctcggctgcctagccaggactgcagggatggcccgcagcctcatcggggccaaggatgcatgcctcctgtcagacacttmtagatgttggcgtccatggagagcctggagttaggttagctttcctccttttctctcctgccttgggga

SEQ ID NO: 856510 - DNA, 718 bp, Homo sapiens
ccatgtgacttcctccatgaagccagacacagtccccagccacgatcctcgggctgctctcaccacggcctgtccagggtccgggtgcatctcagcagcatgaggttgtgctcaggttgttgttagcgcgtcttgtgtgtgctcgacacacccctgctgctttctataggagaacacagaggacataggaaacccttcaaacacacatgggactctctgctcacagttttgggttcaggctgcactgctttgggcaagtggggcaccccctagggaagcctctgagtccagggcacaggatgcctctttcaatacttgttttttttctcatactcaggatctatactgtagactttataacactgtacccttaagctacaccaaatttattaaaaaatattttttctttgataattaacttttctgtagcttttaaaatttataaacttttaaattttttaactttttgacttgcaataacagcttaaaatacattgtacagctagctgtataaaaatatttttctttatagcctgtaagtttttttatttgaaaaacgttctattttaattttcttgaaaactctgttaaaagctgtgayacaaacatatacattagcctaggcctacactgggtcaagatcatcagtgttactgtcttccacctccacatctgctcccattggaaggtttttagaggaaataacgtgtggatccag

SEQ ID NO: 856511 - DNA, 530 bp, Homo sapiens
gatactcaaatgacttttcatttaaattgaatggagaaagattgaggggttctagaattaaaaacaacttaaactacatagaaatatcaaggatattttaattatatggtcacctggaggctgggaaaaagtgtaggatgatgcagacacctctccatcttaacaataagcctaccttatttcatttgtgggtcaacagtggattgactgacctgagatcattttccctcaaccgcaaaaatatacagtttatgaaaaccaggtcttgagaaaatagagcttaatatcaataaggctgtaaagaaaaaattcctagaaaacatcagatccgaacaatgtgctgggattgtatgtcacatggctagtaccagttgctgtcgttaatgttggagtacatggaaagsataatacttggggggatggggccttataaagtttagtagctttgcttgtcttggaaaatgttgtttttggttgttgttgttttggtttggtttggtttatttgtttgttttttttttttttttttt

SEQ ID NO: 856512 - DNA, 626 bp, Homo sapiens
ctaaaaacatgatctcattaaaaatacttaaacacaataaactttactttctcatttattaaaaaaaattaaatccctggcactagaaatgtaaaacatggcaagtatgcatgttctaatctggagttaatttggtatgtgtaatcccataagcaaagcagtagccatgtcctattgtttttttttctttcccaatacacatgctaatctactgcctcccccagcccctggccatattaatattactgaagcccactttcatcagtgtctttccacgatgaaaacaaatgagcaagcaaccaaaaactacacaaaaccacatgcacacacatggccctccttcaatggatctccactgcctagagaattaaatccaattcctctgcatggtatgcaaaatctccacagtatggcccaacctgcctctccagcttgatctctaactgcttccctacacataacacatgtgctgccaagagggacttctggctgtgtcccaaacacrcctgggtttcccagctccagttgccctgcctggtgtctgtgcacatctcacctatccacactcctcccactcttccaagtcacctcatatgcctctctccactccaccagacttaatatgt

SEQ ID NO: 856513 - DNA, 649 bp, Homo sapiens
aacaagcagatattttatgttttaagatagcttcttgtggtttgggctgtctttattcgggttttgacckcctgaaaaaaactaagtcatctctaacacaggtctaagtatttttttctcttgaccaggtaacttttgaatttgtttttgaagtctttccattattactctggttaaataagtgaccattatctctcaaggatatgtaattctactttaattaaatatttttaggctttttgcatccaaacaaatgacaaacttccacagaatcaaattcaaatttaagtctttttcacttaaaattgactaagggattttatagttgggctcctgggaagtctcaaaagatttgcctcccattaggcttgcttgatcagctcccaaaatcttctctagtgtccgtgtgctttctttcaaaacaatatatagcatttcccttgctagtaaacccccaatcttctctttgtccttcacacatatagaagaccaccgtggttttcagttttgttcagaactacaattctgtgattcccaaataaattgtataatttagagatccatctttattttgacttcaatagtggtgataaattctgatacaatattcaagaatatgttttataacaatactaagtcaatttagaaa

SEQ ID NO: 856514 - DNA, 621 bp, Homo sapiens
atactgtcctaagtggtctctgccactacccctgtacccctagtcggacctccatgtagcagccagagtgattcttgtaaaatgtaactcagagtatattacaggaacttycccattcagaacccttcaatggaatctcttctcatttagaggcaaagccatggtctgcaaggccttgcactctctgcatcctcactctctctgcccaccactctgacttcatctcttaccgccctccctctcagtgcttctggtgcagccatactggcctccttgctgtccttgaatatgattaaagaacttcagcacttactgtttcttcaacttggaatatttcatccacaagtctctctgatttgccctctcacttctttcaggtctctactaagatgacaccttatcagagagagtttctttggccatcacatatcaaatagcagccttcccacaatactatttacttctttaatctgttttatttttctgcaatcactcaaccatatctaatgcatatttctcctttctaagatttaagtaccataacaaaattttgtctgttttgtttgaacctatacagtaccttgaaaagtggctgacaggtaatcagtgcctaataaacat

SEQ ID NO: 856515 - DNA, 590 bp, Homo sapiens
aatggtgggacacataccagcatgtaacatctatgtgagcatggatttctgtttagtgatatatcctcagcaccaagaataatgcctatttaatgaatacaggagtgagtgaatgagctatgatgtgaatccaagtctattagatctcaaagcccaagacttttaacaatcaagctactgtctgtctgatgtgagggacaagtagaaactcatgcacatgtagaaaatgtaatttggcaattgaaaactgcactctacatcctcacaggtcaaagaacaaatttgaatgaaaaatgtttaaggattagagagtaatgataacataaacattatacaacaaaatgtgtgggatacagccaaagtggcatttgagggaaatatccagccataaatgatgtattagacaagccaaatattcgtgggctatatttctaagttaaagagaagaaaaacataatcaaagraaacaggaggaaggggaaaaaagagataaggcaatacatctatgcaatagaaaacaaagcagcataataaagagtcaataggctgggcatggtggctcatgcctgtattcccagcacttttggagg

SEQ ID NO: 856516 - DNA, 556 bp, Homo sapiens
aagtgggaaatgctgaagagctctacaaatgaaagacattaataatattaactgaaatagattccataaatactatgtgtaagatcctaccttgatttacctcatttattcatcaaatccactgtctgacagaagtattatcattagttatattttatagtctaaacaaatctaggcagaaaggtcaaataatttgcataagctcacacaatcagtgacttagatttgatccaatctatttcattctatagtgtcggtcatttcccccgatagtagtaaaaactgtgggctccattgttagcctgcctgagatcagacgccatctccaactaggcaagttaccttttctgcctgtttcactcttcaaaaattagagatacaataataccgacctgatttctttgggtttcataagtaggaaataaaataatacatagaaaagacttggaatattgcctgacacaaaatagttgmcttaaaacgttaattattattattttcaatgttgccaagagaacaaaccctgtggtggtgaatttgcatatgtaaacctgtt

SEQ ID NO: 856517 - DNA, 611 bp, Homo sapiens
cttcatgttatgttcacattcttttagcagcaaatgacaatgaactgccattgattttattttattttttgaacttaagtagtgtatccacaagtayaccattgccctgtccaatctttaggggagatattctattatctaaaactcggtaaattgacctatcatgttgttggtgatatcttatttaggtaaaaatattaggtatttagaacaatgcatttctgaatattttgactgatattattatagatggatttagaatctgccctttaggggtccagaaggaggtaatgtttggatatcattaggctagaatattttattgtcctacaaaaatgttgataaattgcttataagggcttatgtattagtaatgaccatgtcaccaaaataataaacccaaatatgataagaatcacaatcagaaaatatattttttcttcttttatttacaaccaaccaaacaaaataacatagctataattttgtcaatctcagaacaataaatttaagtaaaatagaacataaagaatttttatcacagatgaatcagatggaaactatccagaaaacacccaaatatgtgtattcctcagttaatactcagtcta

SEQ ID NO: 856518 - DNA, 589 bp, Homo sapiens
tgaaagccatgggatcatcacattacaggccttctcagaagctaataggaaactctggcttgaagccacggatgggaaggaacygatttatactctgcctgacattataagcaagaaagaagaaatgtatttgaatgaagcagggttcaattttgtgagaaactgcattcaagctgtggaaaccagtggtatcaccattttaggcctctactgaataggaggagtgaactccaaagttcaaaaactcatgaatatcatattttgtcctaaatcccctcctgatattgatattgaactgtgggacaataagacaataatgagtgggctgaaaaactacctcaggtgctttgcagcaccactgataacttacaagttacacaaagatttgtatcattgctgttaaatctgatgaccaaaactacagggtggaggctgtacatgcattggtgtgcacattgccagagaaaaacagagagatgctggacatcttaataaaacatctggtcaaagtatcactgcacagccaacaaaatctcatgactgtctaaaatcttggtgtcatatttggcccaactctaatgagagcaca

SEQ ID NO: 856519 - DNA, 446 bp, Homo sapiens
aatctttgcctctatttgaaaattatataattaggattccaattatataattcattatataattgctgttaggaacaagccccccaaaatctggccataaacaggccccaaaactggccataaacaaaatctctgcagcaccgtgacatgttcatgatggccgtaatgcccacgctggaaggttgtgggtttaccggaatgagagcaaggaacacctggtctgcccaggatggaaaacctcttaaaggcattcttaagccacaaacgatagcatgagccatctgtgccttaaggttgtgctcctgctgcagttaactagcccaacctaytcctttaattcagcccatccctttgttttcaataagggataattttaattaatttaatatctatagaaacaatgctaatgactggcttgctgctaataaatatgtggataaatctct

SEQ ID NO: 856520 - DNA, 626 bp, Homo sapiens
cagaaccaccaatcacaactgacggtttacctgttgctcacaagaatctgcaggaaattgaaccctaggccttgcaaytcattggactcacaaacactcactgcactggaccccctggggtcaactttatgtcataagtatctgtcaggttcacagaattaagtgtccagcttataaggatgagtaacattgatttatccctccagaaggaagcttaactttttccttcagtttgctttaatgaagcctcatccatcttgcatgctcaggcagtgagtaatttctgttaagtgaatttttggaagctaaaaattacaacaaatcttctcattttattgccttttaaaaaaatctaccaaattttccctgacttccaaaattataatgctgtattctagagatgatgtcacttcattgtttcatcaaaagtgagcccctggaatgatgactcatacaggttaatttgcctttaatgtggcaatttgatgcttagaaatggttctgatttattaatgactatctttgtttcccctagaaataaagtctgtgtatagaacaagatccctccatcaatgctcctaaatgttatggacattattgcttttgtctatttcattgctgcaggg

SEQ ID NO: 856521 - DNA, 493 bp, Homo sapiens
gttatcttagagtttgattggcttaatattcacatccctttatctctgctagaggaataatttcattaatttactaaatgtctactaagcagcattcacatacttggtcttatataagttctgaagatgtggccaggcgtggtggctcacacctgtaatcccagcactctgggaggccaaggcaggcagatcacgaggccaggagatcgagacaatgctggctaactggtgaaatcctgtctctactaaaaatacaaaaaattagctaggcatggtggcaggcacctgtagtcccagctactcaggagactgaggcaggagaatggcatgaacccgggaggtggagcttgcagtgagctgaaatcgagccactgtactccagcctgggagatagcacaagactccgmtcaaaaaaaaaaaaaaaaggttttgaatatgtaaatataaataaaccactggtcttaaagttttcagtctgttggagaaacatatg

SEQ ID NO: 856522 - DNA, 534 bp, Homo sapiens
ggacaaacactcagatcccagtagcagtgttctggaatcctttggaatggacaaacattcagatgctcgtagcattgttctggaatcctacgtgagggacaaacactgagttcctagccactgtgttctggaatcctatttaattgacaaacgttcagacactctcagaagctttctgtaatcctatctgagggacaaacactcagaaaccagcagcagttctctggaatcctttgtgagggacactcagaaaccagcggcagttctctggaatcctttgtgagggacaaacactcagaaaccagcggcagttctctggaatcctttgtgagggacaaacactcagaaccccacagaagtgttctggaatcctttgtgatgggcaaacattcagaacctmgtagcagtgttctggaatcctatgtgaggaacaaacactcagaacccagcagcaatcttctggaatacaatgtgagggacaaacgctcagaacccagcagcagtgttttggaatccggtatgatcgacatagac

SEQ ID NO: 856523 - DNA, 521 bp, Homo sapiens
ctcagaaaccagcagcagtgytctagaatcctctgtgtgggacaaatatccagaaactcgaaacagggttctggaatcctatgtatgaaacaaacactcagatccctgaagcagtattctggaatccttactgatggacaaacattaagaccttcatagcagttttcttgaaccctatgtgagtgagaaacgttcagaacccagcagcagtgttctgaaatcctatgtgagtgacattcagatattcgtagctgtattctggaatcctatgtgggggaaaaacactcagaacccagccactgtgttctggaataatatctgagggacaaacattcagacactcgtagaagtattctggaatcttattcgtgggacaatcacttggaaaccagcagcagtgctgtggaatcctctgtgagggacaaacacttagaactcagcagcagtgttctggaatccgttatgagggacaagcattcacaaccccgtagaattgttctggaatcctaagtgagggacaa

SEQ ID NO: 856524 - DNA, 521 bp, Homo sapiens
ctcagaaaccagcagcagtgctctagaatcctctgtgtgggacaaatatccagaaactcgaaacagggttctggaatcctatgtatgaaacaaacaytcagatccctgaagcagtattctggaatccttactgatggacaaacattaagaccttcatagcagttttcttgaaccctatgtgagtgagaaacgttcagaacccagcagcagtgttctgaaatcctatgtgagtgacattcagatattcgtagctgtattctggaatcctatgtgggggaaaaacactcagaacccagccactgtgttctggaataatatctgagggacaaacattcagacactcgtagaagtattctggaatcttattcgtgggacaatcacttggaaaccagcagcagtgctgtggaatcctctgtgagggacaaacacttagaactcagcagcagtgttctggaatccgttatgagggacaagcattcacaaccccgtagaattgttctggaatcctaagtgagggacaa

SEQ ID NO: 856525 - DNA, 577 bp, Homo sapiens
tttgagggacaaacactcaaaccccagccactgtgttctggaatactatctgagggacaaacattcagacactcatagaaattttgtggaatcctatgtgagggcaaacactcagaaaccagtagcagtgctctggagttctttgtgagggacaaacataaagaacccagcgcagtgttctggaatcctttcagagagaaaacattaagactctcgaaagaatgttctggaatcctatatgagggagaaacactcagaatccagcagtagagttttggaatcctgtgtgagggacaagtattcagaatttcgtggaagtgttcacgaatcagatgtgagggacaaacactcagaacccagcagcagtgttctggaatcctaagtgagtgacactcagaacccagcagcagtgttctagaatcctttgtgaggaacaaacactcacacactcgaagcagtgctctgtaatcctatgtgagggacaaagaatcagaacccagcagcagtgttctggaatcctttgtgatgaacaaacatttagaccctcrtaacagttttctgggatcccatgagaggg

SEQ ID NO: 856526 - DNA, 551 bp, Homo sapiens
acccagctactgtgttctggaatcctatctgagggacaaacatttagaaactcgtaggagtgttctgaaattctatgtgagggagaaacactcagaaaccagcagcagagctctggagtcctcagtgagggacaaacaaacagaaaacagcagcagtgttctggaatcctttctgagaaaaaaactttaagtccctcataaaattgttctggaatcctatgtgagggacaaacactcagaacccagcagtagtgttttggaatcctgtgagaacaacaaatattcagaacttcgcagcagtgttcacgaatatcatgtgagagacaaaccctcagaacccagcagcagtgttctggaatcctaagtgagtgacaaacactaagagcccagcagcagtgttctacaatactttgtgagggatattcagacactcgaarcagtgttctggaatcctatgtgagggacacacactcagttaccagcagcagtgttctggaatcctttgtgaaggaaaaagatttagaccctcgtagcagtgttctgggatccta

SEQ ID NO: 856527 - DNA, 551 bp, Homo sapiens
acccagctactgtgttctggaatcctatctgagggacaaacatttagaaactcgtaggagtgttctgaaattctatgtgagggagaaacactcagaaaccagcagcagagctctggagtcctcagtgagggacaaacaaacagaaaacagcagcagtgttctggaatcctttctgagaaaaaaactttaagtccctcataaaattgttctggaatcctatgtgagggacaaacactcagaacccagcagtagtgttttggaatcctgtgagaacaacaaatattcagaacttcgcagcagtgttcacgaatatcatgtgagagacaaaccctcagaacccagcagcagtgttctggaatcctaagtgagtgacaaacactaagagcccagcagcagtgttctacaatactttgtgagggatattcagacactcgaaacagtgttctggaatcctatgtgagggacacacactcagttmccagcagcagtgttctggaatcctttgtgaaggaaaaagatttagaccctcgtagcagtgttctgggatccta

SEQ ID NO: 856528 - DNA, 532 bp, Homo sapiens
actcagaacccagcagcagtgctttggaatcctgtgtgagcgacaaggactcaggaattcatagcattgttctggaattccatgtaagaggcacacactgagaacccagcagcactgttctggaatcctatgtgagggacaaaaactcagaacccagcagcagcgttctggaatcctatgtgaaggacaaataatcagaacctagccactgtgttctggaaacctctctgagggacaaacattcagacattcatagaagtgttctggaatcctctgtgggggaaaaacatgcagaaaccagcagctgtgctctggaatccttcctgaggaaaaacaaacaaatgtagcagcagtgttctggaatcatatttgagggaaaaacattcagacattcgtagcagtgtactggaatcctatgtgaggtacacacactcagatcccagcagcagtgttctggaatcrtttgtgatggaaaaagatttagacactcgtagcagtgtcctgggatcctgtgtgagggacaaacactcag

SEQ ID NO: 856529 - DNA, 506 bp, Homo sapiens
ggacaaacactcaaaaccaagcagcagagttctgttatcctatatgagacaaacactyggaacccagcagaactgttatggaatcctatgtgagggacaaacactcacaaacaagcagctttttactggaatcctatgtgagggagaaatcttcagaacctagcagcagtgttctggaatcgtatgtgtgggactgacactcagaacccagcagcatgttgaggaatgctatgtgagggagaaacacacaaaacccaccagcagtgttctggtttaatatatgcgggacaaacacacagaacccagcagaagtgttctgtaatcccatgtgagagacaaacactcacaaaccagcagcaatgttttggaatcctttgtgagggacaaacattcaaaacctcgtagaagtgctctgcaatcctatgtgagggacaacactctgaacccagcagcaatgttttcgaatcccatgaaagggacaaacactcagaactcggcagcatttt

SEQ ID NO: 856530 - DNA, 506 bp, Homo sapiens
ggacaaacactcaaaaccaagcagcagagttctgttatcctatatgagacaaacactcggaacccagcagaactgttatggaatcctatgtgagggacaaacactcacaawcaagcagctttttactggaatcctatgtgagggagaaatcttcagaacctagcagcagtgttctggaatcgtatgtgtgggactgacactcagaacccagcagcatgttgaggaatgctatgtgagggagaaacacacaaaacccaccagcagtgttctggtttaatatatgcgggacaaacacacagaacccagcagaagtgttctgtaatcccatgtgagagacaaacactcacaaaccagcagcaatgttttggaatcctttgtgagggacaaacattcaaaacctcgtagaagtgctctgcaatcctatgtgagggacaacactctgaacccagcagcaatgttttcgaatcccatgaaagggacaaacactcagaactcggcagcatttt

SEQ ID NO: 856531 - DNA, 506 bp, Homo sapiens
ggacaaacactcaaaaccaagcagcagagttctgttatcctatatgagacaaacactcggaacccagcagaactgttatggaatcctatgtgagggacaaacactcacaaacaagcagctttttactggaatcctatgtgagggagaaatcttcagaacctagcagcagtgttctggaatcgtatgtgtgggactgacactcagaacccagcagcatgttgaggaatgctatgtgagggagaaacacacaaaacccaccagcagtgttctggtttaatatatgcgggacaaacacacagaacccagcagaagtgttctgtaatcccatgtgagagacaaacactcacaaaccagcagcaatgttttggaatcctttgtgarggacaaacattcaaaacctcgtagaagtgctctgcaatcctatgtgagggacaacactctgaacccagcagcaatgttttcgaatcccatgaaagggacaaacactcagaactcggcagcatttt

SEQ ID NO: 856532 - DNA, 523 bp, Homo sapiens
ctggaatgctatgtgagggacaaacactcaaaaccaagcagcagagttctgttatcctatatgagacaaacactyggaacccagcagaactgttatggaatcctatgtgagggacaaacactcacaaacaagcagctttttactggaatcctatgtgagggagaaatcttcagaacctagcagcagtgttctggaatcgtatgtgtgggactgacactcagaacccagcagcatgttgaggaatgctatgtgagggagaaacacacaaaacccaccagcagtgttctggtttaatatatgcgggacaaacacacagaacccagcagaagtgttctgtaatcccatgtgagagacaaacactcacaaaccagcagcaatgttttggaatcctttgtgagggacaaacattcaaaacctcgtagaagtgctctgcaatcctatgtgagggacaacactctgaacccagcagcaatgttttcgaatcccatgaaagggacaaacactcagaactcggcagcatttt

SEQ ID NO: 856533 - DNA, 523 bp, Homo sapiens
ctggaatgctatgtgagggacaaacactcaaaaccaagcagcagagttctgttatcctatatgagacaaacactcggaacccagcagaactgttatggaatcctatgtgagggacaaacactcacaawcaagcagctttttactggaatcctatgtgagggagaaatcttcagaacctagcagcagtgttctggaatcgtatgtgtgggactgacactcagaacccagcagcatgttgaggaatgctatgtgagggagaaacacacaaaacccaccagcagtgttctggtttaatatatgcgggacaaacacacagaacccagcagaagtgttctgtaatcccatgtgagagacaaacactcacaaaccagcagcaatgttttggaatcctttgtgagggacaaacattcaaaacctcgtagaagtgctctgcaatcctatgtgagggacaacactctgaacccagcagcaatgttttcgaatcccatgaaagggacaaacactcagaactcggcagcatttt

SEQ ID NO: 856534 - DNA, 523 bp, Homo sapiens
ctggaatgctatgtgagggacaaacactcaaaaccaagcagcagagttctgttatcctatatgagacaaacactcggaacccagcagaactgttatggaatcctatgtgagggacaaacactcacaaacaagcagctttttactggaatcctatgtgagggagaaatcttcagaacctagcagcagtgttctggaatcgtatgtgtgggactgacactcagaacccagcagcatgttgaggaatgctatgtgagggagaaacacacaaaacccaccagcagtgttctggtttaatatatgcgggacaaacacacagaacccagcagaagtgttctgtaatcccatgtgagagacaaacactcacaaaccagcagcaatgttttggaatcctttgtgarggacaaacattcaaaacctcgtagaagtgctctgcaatcctatgtgagggacaacactctgaacccagcagcaatgttttcgaatcccatgaaagggacaaacactcagaactcggcagcatttt

SEQ ID NO: 856535 - DNA, 556 bp, Homo sapiens
aggattccaaaacactgctgctgggttctgactgtttgtccctcacataggatttcagaacactgttaagattgtctgaatgtttgtccctcacaaagtattcyggaacactgctgctgtgttctgagtgtttgtccctcacataggattccagaagattgctgctgcattctgagtgtttgtccctcacataggattccacaaaactgctacgaaggtctgaatgtttgtccctcagataggattccagaatactgcaatgagggtctgaatcattgtccctcacataggattctgtcactcctatgagtgtctgaaagctgagctctcccataggattccagaaaacttctactgggttctcagtgttttttctcacataggatttcagaacactgctgctgcattctgagtgtttgtccctcagataggattccagaacactgctgctgggttctgagtgtttgtccctcatatagaattctagaacaatgctgctgggttctgagggtttgtccctcatatagaattccagaacacagctgatatgttcgga

SEQ ID NO: 856536 - DNA, 556 bp, Homo sapiens
aggattccaaaacactgctgctgggttctgactgtttgtccctcacataggatttcagaacactgttaagattgtctgaatgtttgtccctcacaaagtattctggaacactgctgctgtgttctgagtgtttgtccctcacataggattccagaagattgctgctgcattctgagtgtttgtccctcacataggattccacaaaactgctacgaaggtctgaatgtttgtccctcagataggattccagaatactgcaatgagggtctgaatcattgtccctcacataggattctgtcactcctatgagtgtctgaaagctgagctctcccataggattccagaaaacttctactgggttctcagtgttttttctcacataggatttcagaacactgctgctgcattctgagtgtttgtccctcagataggattccagaacactgctgctgggttctgagtgtttgtccctcatatagaattctagaacaatgctgctgggttmtgagggtttgtccctcatatagaattccagaacacagctgatatgttcgga

SEQ ID NO: 856537 - DNA, 556 bp, Homo sapiens; identical to SEQ ID NO: 856536

SEQ ID NO: 856538 - DNA, 630 bp, Homo sapiens
gaattccagagcactgctgctggtttctgagtgtttgtccctcacatagcattacagaacacttctaagagtgtctgaatgtttatccgtcagataagattccrgaacacagtgacacttttctgagtgtttctccctcagataggaatccagaacagtgctgctgggacctgagtatttgtccctcacataggattcaagaacactgcttccgaagtctgaatgtttgtctctcaaaagggattctggaacactgctgctgggttctgagtgtttgtcactcacataggattccagaacaccgatgaggggttttgagagtttgtctgtcacaggggattgcagaacactgctgctgggttaagagtgtttgtccctcacataagactccagaacactgctacgaggttctgaatgtttgtccctcacaaagcattccagaacactgctgctggtttctgagtgttagtccctcacataggattgcagaacactgctgctgggtacagtttgtttgtccctcacgaaggattacagagaactgctgctggattctgagtctttgtccctcacataggtttccagaaccctgcttcgagtgtctgaaggtttgtccctgacaaaggattc

SEQ ID NO: 856539 - DNA, 630 bp, Homo sapiens
gaattccagagcactgctgctggtttctgagtgtttgtccctcacatagcattacagaacacttctaagagtgtctgaatgtttatccgtcagataagattccagaacacagtgacacktttctgagtgtttctccctcagataggaatccagaacagtgctgctgggacctgagtatttgtccctcacataggattcaagaacactgcttccgaagtctgaatgtttgtctctcaaaagggattctggaacactgctgctgggttctgagtgtttgtcactcacataggattccagaacaccgatgaggggttttgagagtttgtctgtcacaggggattgcagaacactgctgctgggttaagagtgtttgtccctcacataagactccagaacactgctacgaggttctgaatgtttgtccctcacaaagcattccagaacactgctgctggtttctgagtgttagtccctcacataggattgcagaacactgctgctgggtacagtttgtttgtccctcacgaaggattacagagaactgctgctggattctgagtctttgtccctcacataggtttccagaaccctgcttcgagtgtctgaaggtttgtccctgacaaaggattc

SEQ ID NO: 856540 - DNA, 575 bp, Homo sapiens
ccagaacacggctgctgagttctgagtgtttttccctcacaagggattccagaacactgctgctggcttaagagtgtttttccctcacataggatgccagagcactgytatgaggttctaaatatttgtccctcacaaaggattccagaacacctctgaaaatttctgagtgtctgcccctcacataggattccagaacactgctgctgctttctttgtgtttgttcctcatataagattccagcccactgctgctgtgttctgagggtttgtccctcacataagatcccagaatactgctacgaggatctgaatgtttgtccttcacttaggattcctgaacactgcaaacagtgtctgaatgtttgtccctcacgaaggtttccacaacactgctgctgggatctgagtgtttgaccctcacataggattccagaacactgctatgagggtctgagtgtttgtctctcccataggattccagaacactgctatgagggtctgagtgtttgtctctcccataggattccagagcactgctttgagagtctgaatgtctgtccctcacttaggat

SEQ ID NO: 856541 - DNA, 507 bp, Homo sapiens
atgccagagcactgctatgaggttctaaatatttgtccctcacaaaggattccagaacacctctgaaaatttctgagtgtctgcccctcacataggattccagaacactgctgytgctttctttgtgtttgttcctcatataagattccagcccactgctgctgtgttctgagggtttgtccctcacataagatcccagaatactgctacgaggatctgaatgtttgtccttcacttaggattcctgaacactgcaaacagtgtctgaatgtttgtccctcacgaaggtttccacaacactgctgctgggatctgagtgtttgaccctcacataggattccagaacactgctatgagggtctgagtgtttgtctctcccataggattccagaacactgctatgagggtctgagtgtttgtctctcccataggattccagagcactgctttgagagtctgaatgtctgtccctcacttaggattccagaacacctctgaaagtttctg

SEQ ID NO: 856542 - DNA, 556 bp, Homo sapiens; identical to SEQ ID NO: 856535

SEQ ID NO: 856543 - DNA, 543 bp, Homo sapiens
tgaagagaaaccctacaaatgtgaagaatgtggtaaagccttttactgttcctcaaaccttattcaaaatgacatagttcatactgaagagaaacactacaaatgtcaagaatgtggcaaagcttttaagaagtctttagaccttaatgtacataagataattcatagtggagagaaaccctacagatatcaagaatatggcaaagtctttaaactatcctcaaaactgaatgaacataagataactcatagtggagaggtatcctacgaatgtgaagaatgtggcaaaggcttttactgctcctcaagccttactaagcatacgatagttcatactgaaaagaaactgtacaaatgtgaagaatgtggcaaagcttttaagtggtcctctgagcttcctatacatcggagaattcatactgaagagaaaccctataaatgtgaagaatrtgtcagagtctttaaacactcctcaaaactgaatgaacataacagaaatcatactggagagaaaccctacaaatatgaagcatgtggcaaagc

SEQ ID NO: 856544 - DNA, 548 bp, Homo sapiens
ctaaacataagagagttcatactggagagataccctacaaatgtcaagaatgtggcaaaactttttcttgttcctcaagtttactcgacataagasagttcatactgaagagaaatcccacaaatgtaaagaatgtgggaaagcctttaaccagtccttatgccttattaaacttatgagaattcatactggaaaaaaatcattcaaatcataagactgtggcaaaatcttttaagtattgctcaaatatatccatccgtaattcatactaaagattatgcctatgaacctaaaaaagtttggcagagcttatgaatacacctcaaactttcctaagcattggagaaatatcagtgagaaacctcagaaaactgaacaatgtggcaaggcttttaaatggttgtcacatcttactgtaggcaaaataattgatagtggagaaaatctctacaaacaaagaatgtgtcaaaacttctgacatgctcatacctcatgacacataaaagcatttatacttgaaaaattatacagagtgtggaaaagccatt

SEQ ID NO: 856545 - DNA, 538 bp, Homo sapiens
agagaaatcccacaaatgtaaagaatgtgggaaagcctttaaccagtccttatgccttattaaacttatgagaattcatactggaaaaaaatcatwcaaatcataagactgtggcaaaatcttttaagtattgctcaaatatatccatccgtaattcatactaaagattatgcctatgaacctaaaaaagtttggcagagcttatgaatacacctcaaactttcctaagcattggagaaatatcagtgagaaacctcagaaaactgaacaatgtggcaaggcttttaaatggttgtcacatcttactgtaggcaaaataattgatagtggagaaaatctctacaaacaaagaatgtgtcaaaacttctgacatgctcatacctcatgacacataaaagcatttatacttgaaaaattatacagagtgtggaaaagccatttctatctgctcacatcatagtcaacatcagtaagttcatacttaataaaattattataaatgtaattacttttgaaagaccttggaaaatttaaaccc

SEQ ID NO: 856546 - DNA, 548 bp, Homo sapiens
ctaaacataagagagttcatactggagagataccctacaaatgtcaagaatgtggcaaaactttttcttgttcctcaagtttactcgacataagacagttcatactgaagagaaatcccacaaatgtaaagaatgtgggaaagcctttaaccagtccttatgccttattaaacttatgagaattcatactggaaaaaaatcattcaaatcataagactgtggcaaaatcttttaagtattgctcaaatatatccatccgtaattcatactaaagattatgcctatgaacctaaaaaagtttggcagagcttatgaatacacctcaaactttcctaagcattggagaaatatcagtgagaaacctcagaaaactgaacaatgtggcaaggcttttaaatggttgtcacatcttactgtaggcaaaataattgatagtggagaaaatctctacaaacaaagaatgtgtcaaaacttctgacatgctcatacctcatgacacataaaagcrtttatacttgaaaaattatacagagtgtggaaaagccatt

SEQ ID NO: 856547 - DNA, 533 bp, Homo sapiens
atgtttatcccaactgtgtatgcatcacagcccttctttttattctttgtgttatggctacatctttattgctgtttgttttgtgccatgccacttcacacagtactttgtaggttctgatgaaagtttgtcaatgtaactttcagatctgttaattgagataaaaggcatggagtgttcacaggtgagaggaataaatcagtcagaatttcttgtctttgtaaaaccaaacttttatcaaattttaacacagtctgtgtgtggtagctcacacctataatcccagcactttgggaggctgaggtgggagaatcactaggtcaagaagttgagaccttcctggacaatatggtgaaaccccatctccactaaaaatacaaaaattagctgggcatggtggcatgcacatgttgacctagccattcaggaggctgaggcaggaaaatcgcttgaacccaggagacagaggttgcagtgarctgagattgtgcaactgcattccagcctgatgatagagtgagacttcatctcaa

SEQ ID NO: 856548 - DNA, 596 bp, Homo sapiens
ctagtcagtgcctcagtggggactgtgtgtgaaggctctgacctcacatttctcttctgcactgccmtaacatggagttctccatgagggctccacctctgcagcaaacttatgcctgtatatccaggcttttccttacatcctctaaaatctaggtggaggttcccaaaccccaattcttgacttctgtgcactcacaggctcaacaccacatggaagccaacgaagcttggggcttgtacctacagaagcaatggtctgaactgtaccttggccccttttagccacagatgtagtggctgggacacagggcaccaagtactgaggcttcacaaagcagcaaggcctggacccggcacacaaagccattttttcctcttagacctcctggtctgtgatgggaaaggcttctgtgaaggtctctgacatgccctggagacatgttccccattgtcttggtgattaacattaggctccctgttgcttatgcaaatttttgcagctggcttgaatttttccccaaataatgggtttttcttttctatagcattatcaggctgcaaattttcccaaacttttatgctctgcttcccttt

SEQ ID NO: 856549 - DNA, 446 bp, Homo sapiens
gggggaaaccaccccccatgatccartcacttcccaccaggtgtctcccttaacacatggggattacaattcaagatgagatgtgggcacacaaagcctaaccatatctatcataaagacatagtcccaattgcctgatatctctgcttcctgacccctgtgtgagacaggctatgtttgtcccagaatggcctgtttctcttgatttgggagggcagtgtattaagcaacttaaatcctaggcacaattcacaatgccagctctcaataaatttgttactgtaatttgtttccagaaatgatatcagagcagaaacacaaagcaaaaggaaccaaaagataggtaatgctgaatggttggaaagtatatttatgaaagagctatgcttcgcaaaagcatctttgctatgattcaagggagaaatcattaaacaccaactccatca

SEQ ID NO: 856550 - DNA, 298 bp, Homo sapiens
ctccccatgtccatcgtggcagggactcaatttatcatgctcccttaggtaagctgacaggaagatgcatgctggacccctttgatttttttttttttttttttttttgagatagggtctggctctgtcacccaggctggagtatagtggtgtgatcatggctcagtgcagcctcaacctcctgtactcaagttatcctcccacttcagactctcaagcagctagaactacaggtgcacacctccatgcctggctaatytttgggaaaaaaatttatagagacagtttgtctctatat

SEQ ID NO: 856551 - DNA, 575 bp, Homo sapiens
tctttgccccactattaagttactgatgtcacaaattaaactttatatactttgtatccattaacatagatttataattattatgcttttgtcctttaaattccattaaagtattaaaaattgagttattagcaaaaattacaataatacaggttttaatctttatgtatttacctttatattttcatcaggctgagcaactgtctagtatcccttcatatcaacttgaaggactccctttattgtttcttttttttttttgagatgaagtctcgctccgttgcccagactggagtgcagtggtgtgatctcagctcactgcaacctctacctcccgggtacaagtgattctcctgcctcagcctcctgagtagctaggattacaggtgcgtgccaccacacccagctaatttttgtatttttattagagatggggtttcgccatgttggtcaagctggtcttgaacacctgacctcaggtgatccacctgcctcggctcccgaaagtgctgggattacagacrtgagccactgtgcccggcccctttattatttcttattggtcaggtctagtg

SEQ ID NO: 856552 - DNA, 585 bp, Homo sapiens
tctgggaatgtcttaatttctccttcacttttgaaggacagttttgtcaaatatagtattctcagttggcaggctttactctttcagtactttcaatgtatcatcccaccaccttctggcctgcagggtttctgctgaaatatccactgataatcttctagaggctcccttgcacatgagaagtcacttttctcttgctgcttttaagattctctctatacttactaccactaaattctacacttaaaaatggtataatctgttatgtatattttgccacaataaaaacattggaaagaggtaccatagaagagtatattacatgcaccataggctggaaaacattttcagagattaggctattctcagtaactcacatatctagttctggtaaacactgattgatttaaacaaatatcaatgaacaaagtattacatgcaccgcgtgcagctaaacagtgtttcgctgacataacactagtacctagatctgataaactatctaaacaggcatcactgaaactatrctacagaaaacacagaatgctaaccacagtatttccaagagtcaacgctacacctggg

SEQ ID NO: 856553 - DNA, 594 bp, Homo sapiens
aatttgaggctctaacttggcctcaaatcaggattttttttaagaaaaagtccccacaaggccaggtgcggtggctcacgcctgtaatcccagcactttgggaggccaaggtgggcagatcacgagatcaggagatcgagaccatcctggctaacacggtgaaaccccgtctctactaaaaaaatacaaaaaattagccgggcatggtggcgggcgcctgtaggtcccagctactcaggaggctgaggcaggagaatggcgtgaacccgggaggcggagcttgcagtgagccgaggagatcatgccactgcactgcagcctgggcaacggcaagactctgtctcaaaaaaaaaaaaaaagaaaaagtccccacaaatacatgtggttgatgtttctgagtccccctactgcacttacttttttatccccagaagtgggcactttgacagggcccctggccactgggtggggacttacaggcagagagacagtaaccaaggccaggtgcagtggctcatgcctgtaatgccagcrctttgagaggctgaggcaggcagatgacttgaggtcaggagttcgggaccagtctggcca

SEQ ID NO: 856554 - DNA, 492 bp, Homo sapiens
tgaggtgggtggatcccttaagctcaggagttcaagaccagcctgggcaacatgcgacataggaagacgccctacttttacaaaaaaawtttaaaaattagccagatgtggccaggcacagtggctcacgcctgtaatcccagcactttgggaggctgaggtgggcggatcataaggtcaggagatagagaccatcccggctaacacggtgaaaccccgtctctactaaaaaatacaaaaaattagccgggcatggtggcgggagcctgtagtcccatctacttgggaggccgaggcaggagaatggtgtgaacccaggaggcggagcttgcagtgagctgagattgtgctactgcactctgcctgggcaacagagtgagactccatctcaaaaaaaaaaaaaaattagccaggtgtagcggtgcactctgtagtcccagcaactccggagactgaggtgaggagggtcacttgagcccaggaggttgagac

SEQ ID NO: 856555 - DNA, 568 bp, Homo sapiens
tgaaaccccatctctactaaaaatacaaaaattagccaggccgtggtggttcatrcctgtaattccagctacttgggaggcggagacagaattgcttgaacccgggaggcggaggttgcagtgagctgagatcgcaccactgcactccagcccgggcgacagagcaagactcggtctcaaaaaaataaaataattaattttttaaaatgctagtgtaacttcagaaaacttagaatatgattttaaataaaaataataactaaactaaaaaagcaaatcctgtataagcccttagttacttgggaagtcatttaaaagttaagcccatatcatctcaaattccaaaacttattgcaaggtaaataatcaaaagggtggtgctggcacaaagaaaaaagatatagattgatgggacagaaatgaaaatctagaaataaacccatctatggtcaactgatttttgacaagggtgccaacaccactcagtggggaaaggaaaagactatcctttcccttcaacaaatgatgctggtacaactagacagccatgtgcaaatgaataaagctg

SEQ ID NO: 856556 - DNA, 487 bp, Homo sapiens
atgcctgcccctctaacacacacaggagattaaggacacccaggggccacctaggccagggggcgctggtggcagacacacaattcttggcctgcgggtgtggtagcaggaggcctgggcagggcccttcccaagctggccacatttacataacaaaaggtcaaaattggagccacttgtgcaagggctatttataagaaccagtctcaaccgcttttggctcccccgttccttcccttcctgatctgctctcaccgcctccctgcccagagggcccagccccctagcccgcttggcctgaccacatggccttccctctccagaggtttcactgcctaagggctcacccaagctgcaggcctgggctttcaatacyggcccaccaaagccttgggcagctgccgccaggaaacgaggggttccctcccacccccagagctctgggtcctgcaggaggggggatcctgaggtggtgggtccttgcacc

SEQ ID NO: 856557 - DNA, 575 bp, Homo sapiens; identical to SEQ ID NO: 856551

SEQ ID NO: 856558 - DNA, 298 bp, Homo sapiens; identical to SEQ ID NO: 856550

SEQ ID NO: 856559 - DNA, 585 bp, Homo sapiens; identical to SEQ ID NO: 856552

SEQ ID NO: 856560 - DNA, 386 bp, Homo sapiens
ctgtgtttggtgagcgagtagagggatccagagtgcagggtggtcttggcctggggcttttgactgccctctggagatgcactgagggccacccagctggggagcagccgggagggataggaacctgttcccacygtggcatctttgcccttccaatctgcttcaccgtcgcccttgatctctgtgccagttggaaaattgaggcagaaccaatacccctgggtgatctggaaatcatcagtgggaagggttgcctttgcccaaggctaaagatgacatgtccctgcacactttcagccccaggttttcctaccttgtggggaggtgagaggtcagggtgagtgctgggtttgaggctcagctgtgctgtgtgaagattgagagga

SEQ ID NO: 856561 - DNA, 301 bp, Homo sapiens
tacagaccagcctgggtaatatagagacaaactgtctctataaattttcttttcccaaaaattagccaggcatggaggtgtgcacctgtagttctagctgcttgagagtctgaagtgggaggataacttgagtacaggaggttgaggctgcactgagccatgatcacaccactatactccagcctgggtgacagagccagaccctatctcaaaaaaaaaarggggtccagcatgcatcttcctgtcagcttacctaagggagcatgataaattgagtccctgccacgatggacatggggag

SEQ ID NO: 856562 - DNA, 487 bp, Homo sapiens; identical to SEQ ID NO: 856556

SEQ ID NO: 856563 - DNA, 387 bp, Homo sapiens
ctgtgtttggtgagcgagtagagggatccagagtgcagggtggtcttggcctggggcttttgactgccctctggagatgcactgagggccacccagctggggagcagccgggagggataggaacctgttcccacygtggcatctttgcccttccaatctgcttcaccgtcgcccttgatctctgtgccagttggaaaattgaggcagaaccaatacccctgggtgatctggaaatcatcagtgggaagggttgcctttgcccaaggctaaagatgacatgtccctgcacactttcagccccaggttttcctaccttgtggggaggtgagaggtcagggtgagtgctgggtttgaggctcagctgtgctgtgtgaagattgagaggag

SEQ ID NO: 856564 - DNA, 544 bp, Homo sapiens
attaggagactgttgctttaaaattttattataagaggacacttgaaagtattctcattttattggaacatttattacgtttaagatatttctatattctttgctacagcagtaaatgtgagagccacatttctttgcagcttcacactgcacacacactgcacacactgtgcacattagagagccacagagacgttcctcctgagccagactccaaccacttccagagttttcttgggaacggcacatagatctgtaggcatctgagtcttagctcctcctgtgactctctccctctggccccatgcatctcctcctgtcccaccttagttaatggttcacttgtctactcagttgctcaaggaaaaaacgccagcggagcccttctcggctcttcctcccttgtctagtcacctggcggattctgctgaaytatgccttcagtctctcttctctgcctgtcttctctccatccccactcccactcccaatgccactgccactcccactgcctcagttcaggccatccctgtttgtggtagac

SEQ ID NO: 856565 - DNA, 616 bp, Homo sapiens
agagacattccttatctgttgatttaaaaaacatacttaccatacaggcttacataggtagattttgaactatacattgcagccacacttaagcatcatttaaaaatgattaatgaattttaagaattcatttagtctgtttgaaatcaaggatggttattccaaatcatactgcttttagatttgaaaccgagacctttttactttttaggattctttttcttcggctatgggtaatgactgaagaaaagctagacaaaggctggtgaatcttttaaattggcagtttaaatttttttatcttcgtggtgttaaaagtgcttttcagaaattgaatagataggccaggcgcggtggctcacatctgtaatcccagcactttgagaagcagaggtgggcggatcagttgtggccaggagtttgagaccagcctggccaacatggggaaaccctgtctttactaaaaacacaagaattagccggacgtggtggtgcacgcttatagtcccagctaccgggaggctgaggcaggagattcgcttcaacccgggaggtagaggttgcagtgagccgagattgcgccactgcactycagtctgggcgacagagcgagact

SEQ ID NO: 856566 - DNA, 560 bp, Homo sapiens
tcataaggtgccatggtatgaatgtttgtgtcttccccaattcatatatcgaaatcctagcccccaaggtgatggtatttggaagtgggacatttggaagattattagttcatgaggtggagccctcttgagtgggattagtgcccttaaaaagcttacccagagagctctcccattctccttgcctcatgtaaatgaaaccactattgcaaaattatgactgtggtgaaagaaatctgaaatcttgcttctaaccactaagctgttcttgttcattcctggatgaaggccaaattaactttgggaggaacatagtttatagcccttttctaaaacaatcccccttcttgcctggggactacactgccttttgtaggactaacaaattagccaaaagattagaaattatggtttagaagccatgcagttggaggttacaagacactccccwaattgctcctgaggataacatcactattgtaaaaccaaagatcagtgcttgagatattttacagccccagcacttgatggatgagctggcaccatcccaatggataaac

SEQ ID NO: 856567 - DNA, 559 bp, Homo sapiens
gttttcagtgaggtgtattagtgtaagagtcaccgactctcacctccaaacattaacaagtaaacttgacatatactttgaatgacaaagaccaatttattctcagtctccttgcaaaaagcacaaaacaattgtgtggttggcatatccatttttttaaagctctcaacttaaatcaaagtaaaagttcaatttaaaataagagcctgaggaaattatttcaattggattaagtagtttagagaaaaaactaatggcatggctctcctgcctaggcctgatagattctaattttctgaattaatgtaagatagagaagggttgtatggggcaaagatagcaagagaatatagcacaaataaaagtacatccagaaaataagaagagatgtgggtattgcaaataaagcaaagtgaaatggaatagaaaaaaatgagtccagatgactttttaaaaagtaggcagatatttyttaagttttggagaattgcataatttcaaaagactctatgtaactttacaagactaaaatgactctcggttaatgtctttgcttggc

SEQ ID NO: 856568 - DNA, 559 bp, Homo sapiens
gttttcagtgaggtgtattagtgtaagagtcaccgactctcacctccaaacattaacaagtaaacttgacatatactttgaatgacaaagaccaatttattctcagtctccttgcaaaaagcacaaaacaattgtgtggttggcatatccatttttttaaagctctcaacttaaatcaaagtaaaagttcaatttaaaataagagcctgaggaaattatttcaattggattaagtagtttagagaaaaaactaatggcatggctctcctgcctaggcctgatagattctaattttctgaattaatgtaagatagagaagggttgtatggggcaaagatagcaagagaatatagcacaaataaaagtacatccagaaaataagaagagatgtgggtattgcaaataaagcaaagtgaaatggaatagaaaaaaatgagtccagatgactttttaaaaagtaggcagatatttcttaagttttggagaattgcataatttcaaaagactytatgtaactttacaagactaaaatgactctcggttaatgtctttgcttggc

SEQ ID NO: 856569 - DNA, 397 bp, Homo sapiens
ttggccagaaggctcagatcagcagaaaacatgcgaactctgtccacatgcatgtgaagagtatgtatgctcgagaatggtcttaaaccaatgatacaacttaacagataaatattccaacttcacatgtacaagagaaacaatttgaaaacacattctatgctgtctcctagaagtccccatcagtggtaaccgtatcattagacaacatcaatgtcatcctttctttccctgtctaactttcccttttacataccagtgcttcttaagattacctatcaracaatttgcagccaaacccatattcgaatgtgtgcctctggggaaactaaaacaagcaacccaactgtttttgaccaatttgaaaactacttatgttaatatgctactaaattct

SEQ ID NO: 856570 - DNA, 520 bp, Homo sapiens
aagctcaaacatatgttcaagaatttttaaaagatgcaaaggacaarcacatcccaatgtggaaacttacataatcataaaaacgagtatgaaaacattagaatagacaacaaagaggaattcaaaacagaccagaaaacagtctttggtttcaacaaagggttttcaccaatttaagaatgtgataaaaattataaaaattagtatcagaaactcactgaataatataacttgtctttttatataatcatgtgtttgattaagagtaagcaactatagcccatgatcaagtcaagctatctgcatgttgttgaagtaaagttttactgaaaatcaacatactcatttacctattgtccatggattctttaatgctaaaatggcagacagagttgcatagatgcaagagagagtatggtcacaaagccaagtattaacttcctggccatttataaaataaaattgctaacttcgggtttagataattacatattcacatattgttattaaaaaataaatt

SEQ ID NO: 856571 - DNA, 520 bp, Homo sapiens
aagctcaaacatatgttcaagaatttttaaaagatgcaaaggacaagyacatcccaatgtggaaacttacataatcataaaaacgagtatgaaaacattagaatagacaacaaagaggaattcaaaacagaccagaaaacagtctttggtttcaacaaagggttttcaccaatttaagaatgtgataaaaattataaaaattagtatcagaaactcactgaataatataacttgtctttttatataatcatgtgtttgattaagagtaagcaactatagcccatgatcaagtcaagctatctgcatgttgttgaagtaaagttttactgaaaatcaacatactcatttacctattgtccatggattctttaatgctaaaatggcagacagagttgcatagatgcaagagagagtatggtcacaaagccaagtattaacttcctggccatttataaaataaaattgctaacttcgggtttagataattacatattcacatattgttattaaaaaataaatt

SEQ ID NO: 856572 - DNA, 543 bp, Homo sapiens
tccagggtaggtaaacttcatctccttcaaggtgaagttgttacaggctaccacttgacctctctgagcctcagttttttctgtgtgaagcatggaacactgtctttgaggggttcagtgagacccagcttagagtgggaaggggacaggcagtagtgctcagtgaggagggttagggagcctcctctctgcccgagataactgtctggtctcagacatccctcctctagccccagactcggcccaggaagtggggcaaggattgcacctgtaccatacccagactgggaggagctgggtgggccaggtgtggccacctcagcccttttcttggcctcaaggggccaatttagcccccttagcctcagccccaccccatccacctgagccactgaaacccaggcctggtggcagccaggaggtmtgaggtgcagaaccatgcccaacttctgggggtgttgctgagagtgggctggggagcagctgctgcctggcctcgaggtgctccccagcccttgagggactggtttataccccatcgtg

SEQ ID NO: 856573 - DNA, 623 bp, Homo sapiens
ctttcccttataatttcagtgtgctcaaactacatctcatgcaggtccaaatatttcttcttacctagtccttagtggaattaagaaaatctgatcaccacactgctgactcccccagtccycaaatatctgattatagcctaattcctgacacaaaataaacctaaattcttggcctttaaaaaaaagtcacaacacaaatgaccaagttaatacagatgctatcagggttgtcctggtcccagatcagtgattcttagcagaataggttaagaaaacctttagatttccaatggattgaaagacaaatggctgggcatggtggctcatgcctgtaatcccagcactttgggaggccgaggcaggcggatcatgaggtcagagcatcgagaccatcctggccaacatggtgaaaccccgtctctactaaaaatacaaaaattagctgggtgtggtggcgtgtgcctgtaatcccagctactggggaggctgaggtgggagaatcacttgaaccagggaggcagaggttgcagtgagcagagatcatgccattgcactccagcctggcaacagagtgagactgtttcaaaaaaaaagaaaaaaagacaaatgaagtggtaaac

SEQ ID NO: 856574 - DNA, 507 bp, Homo sapiens
cacagagagagagaaagagaggaaaatgaatctcaagaccccaaaatcgttaagccaagggagaagtcaagctgggaactacatcaggtaaacctgcctccyattttattactaaataagacagctaaaaagattttaaaaagctacatacctccctcacaatttggaatttcctggtgggcctcaagatctttacccgaaaacagttctgaactgaaagctgatcttcacaggtgcaggaatgaaagtcatccctctgctcacctgagacgaaggcatatctgattgcttcctccaccacactgtttatgtaagaatgcagattcactgaaccagactgaattgtgtaaatttacacaaagaacagaaaactttaaagactgatcaaggactcaaaagaatgcaaccttttgtctcttatctacctatgacctggaagcccctcgcttagagttctcccaccttaccagaccaaaccaatgtacatcttacacatattgattgctg

SEQ ID NO: 856575 - DNA, 507 bp, Homo sapiens
cacagagagagagaaagagaggaaaatgaatctcaagaccccaaaatcgttaagccaagggagaagtcaagctgggaactacatcaggtaaacctgcctcctattttattmctaaataagacagctaaaaagattttaaaaagctacatacctccctcacaatttggaatttcctggtgggcctcaagatctttacccgaaaacagttctgaactgaaagctgatcttcacaggtgcaggaatgaaagtcatccctctgctcacctgagacgaaggcatatctgattgcttcctccaccacactgtttatgtaagaatgcagattcactgaaccagactgaattgtgtaaatttacacaaagaacagaaaactttaaagactgatcaaggactcaaaagaatgcaaccttttgtctcttatctacctatgacctggaagcccctcgcttagagttctcccaccttaccagaccaaaccaatgtacatcttacacatattgattgctg

SEQ ID NO: 856576 - DNA, 576 bp, Homo sapiens
tgaaccacaaaagacagggactactttaagccttcgcttttgcagattgatacgtgtatctcgtccttttgcagttacttgtcattatctgccyaagaatagtatttctaagaagttgtttctgtgtatcttctggggaagaatttgtccttcagttacatgtgattgcaacatgttgataaaagcaaaagaaaagcaataaaatcatttggttgaatatctcatttctttgaagccaaacagtttttgagtgataagaaagcaattcagtggaacttactgttcagcatcttacagaacaggattcatatgtacttgtgtattcacatgcgaattcatgcacacattatcacctaagagagtctgagtgtcctggtcctcaaagtatgtggttttcagaatttacactgtatacaaatctagaacgacatttgctgcctaaaggacaatgacgttagatctacacagcaagagttgaatagagctttgttcatcttctcacaaatttgggtggatctaaattgcttattttaggacaatttaaacttcctagtttaaaactttatggttatctgg

SEQ ID NO: 856577 - DNA, 541 bp, Homo sapiens
caacaagaacattatcaaaaaatgtcagaatcaacgttttcagaactttggaaattaaccaaaggcttgcagcaatctgggaaacatttatttaagaaaacagcagaatcttggtaagaacagggagctttgtggcactttaacttgccgtattcccatccccaccctccccagcaccacattagctgtgaaatccaacagcctgcaaaacgacctgtgaccacaggggaaagtccggcagtcactggaagggcttagagctcctcaaggcccattctcggagaattgtcattatttgacctctctggtcacactacttgcaaggctgtttttatttgagctgacttagagctcatccagcacaaataaaagcagccttgagagtagggtcaattattgaacctcacagctgactgaggtagtggataacaagtgggatagayaatgtgctaaccaaaaaacataaaagaaaaagcagaggaatgggatgtccttggagagagtgggcgctttaaaaagttctaacaatattcctgggaat

SEQ ID NO: 856578 - DNA, 668 bp, Homo sapiens
agaagaataaaaagatggaaggatttgctctactggatatcaggttatcataaaaccacagccatttacatagtatatatatatatatatatrtgcataagtagataaatggatcaatcaaagagaagggagaaatctagaaacagactcatgcgtattttgacactcgatatttcacaaagttttcttcaacaaatagtgctgggactactggatatccatatggaaaaaaattaaacttgatccttatctcacaccatatgtaaaattcaatttcaggtgaattgcagatctaaatgtgaaaggtaaaataaaacttctagttgatagcgtagtataatatcttcctactctagtgtacataaagacttcttaaacagggctcaaaatatattaactattaaaaaaattacatttcactaaaattaagaatttttgttcattaaaagatgacagtaagagggtgaaaaggtaagcaactattcagaatacacacacacacacacacacacacacacacacacacacacacacaaaactcttacaagccagtaagaataagataacccagtagaaaaagggacaagacactgggatgggtacttcataaaacaggctatccagattaataaacctataaatcagaaatcagagaacttatagtttca

SEQ ID NO: 856579 - DNA, 611 bp, Homo sapiens
tcccacctcccaatctccctttttttattttgtgtataatctcatgtgctsttttcatttcattgtaattttcttcataattaagaatctatgacttatttcctttccctatcatttcctttctcgtaacatagcaaaacaatgtggcaaaatcagtgatttgttacttaagtaatgtaatcagtgctcatttaaaaaaacaaaaaaagaatattttaatcatattttttctttatgagtctctacttgtttgcacatatttgtagtagggaaaaaagttgatatagtaaacattattttccttccttttctttttctttattctagcagttgctcattgaatcaactggtataccgaaattctgtcttttgagcaaaggcataggtcccagacagtggagtgggaagaaatatgtagagacagtgtctgggggaaaagggaagaaaagaagaatatttgtgcactctaacagcagagacaactcatatgctatttctttgcatctgaatgaagtcaacaaaactcatggaaaacagacactgttctctgagttctacaaaaaaacagagcctgaggcaaagaacccgtatgttaacaattatttggcaag

SEQ ID NO: 856580 - DNA, 639 bp, Homo sapiens
cacaggcccaacaccatgtggaagctgccaaggcttgggacttgcaccctctgaagcaatagcctgagttgtacattggaccattttagctgcagctggatcagctgtggtgcagggcaccaagtcccaaggctgtatacagcagagtgaccctaaacctggcccagcaaaccatgtttccctcctggacttgcgggcctatgttgagagaggctgttgtgaaggtctgtgacatgccctggagacattttccccattgttttgatgactaacatttgggtcctcactacttatgcaaatttctgcagccggcttgaatttctccccagaaaattgggttttctttttttatcacataatcaggctgcaaactttccaaacttttatgctttgcttcctcttgaatgcgtctcacttagaaatttatttcgccaaatatcctaaatcatctctctcaagttcaaagatctactgatatccagcgtgggcaaaatgcttccagtctctttgcacatagcaaaagtaacttttactccagttccccaaaagttcctcatctccttctgagaccatatcagcctggacaccatggtccatatcattttgatcaaactatycaacaagtctctgtgaagttgc

SEQ ID NO: 856581 - DNA, 555 bp, Homo sapiens
acaatatgttttcaattttcttaggtaaatacctatgcatgggattactggtttatatggtaaccacatgtttaacattataaaaaactgacaaactatattccacagtggctataccattttgcattccaatagcaatgtatgaaaatctcacttgtttcacagtctcaaccgcactgtatgtattatccttattattttgtctattctagttggcatgtaatggtgtcccattgtggtttcaatttgcatttctctaatgaataataatattgaacatttcctcatgtgctttttgcctcccatacttctcctttagaggtgtctgttcaaatcttttgaacattttctatgtgtgttatctcattataattatattcttactgtttttttacacagaagactaagattcaaatcctctatcaaagtatatgtttttacaatattttcttccagtctgtgrcttttaatttcattttcttattaaagtctttgaaaacagatgtttctagtttgatgaagactaatttagctaaaaatctcttggtatatcgt

SEQ ID NO: 856582 - DNA, 659 bp, Homo sapiens
cctgaagtttctttacttgaaattaatataggaacctcagctttttttttttgattaatgttttcatggaattttttttaattcttttaccgcaacctgaatcttggtagtcagagtgtgtttttcttttatagtcaccatgtagttgggtcctgagtgtataaagtttttttttttttttaacccatgctggcaagcttagttttataattgctttatttatatcatttacatttaaggtgattattaatatagttagattgatatctgttatgtttgtgactattttccactcatagcgttaggtctttatttctattttcctatgttttcttccttttctggtattaaatgtataatttatatgattgaattttatctgccctcttgaaaggtatatcaattatacttatttctatttttatttttagtgtttcccctggagtttacaatatatgttcttaactaatataagttcaccttcaaataatagcatagcaattcacatttactacatgtacctactaatagaatatccmaaatttctttcacctctctttataacgtttcacttatctatattctcttttaactaataccttgtgactatttttgccttaactgaacagttatgttaaagcaattaaggatagaaaaat

SEQ ID NO: 856583 - DNA, 608 bp, Homo sapiens
ccagtgtctattgtttccttccttgtgtccatatgtactcaataattagcttccacttttagccaagaaagtatggtatttggtttctctgttcctctgttattttgcttaggatgatggcctccagctccatacataatgttgcaaaggacatatccatttctttgttatggctgtgtagcattccacggtgtatatgtaccatattttctttatccagcctactgtggatgggcatttgggttgaatctatgtctttgctgttgtgaatagctccaatgaacatacacatgcatatatctttatgacggaataatttatattcctttggctatatgctcaataataagattgctaggtcaaatggtaattctgttttaaatttttttcactgccaagctgctttccacaacaggtgaactaatttacattccaaccagcagtgtataagtgttcctttttctctgcaacctcaccagcgtctgttattttttgacttttcagtaatagccattctgactagtatkagatggtgtctcattgtgtttttgatttgcatttctctggtaactagtgatgttgagcatttttccatatgcttgttggtt

SEQ ID NO: 856584 - DNA, 580 bp, Homo sapiens
aaacaattgaacaagcaaaaagcaaatcaccccactaagagacacttcacacacacacacaatacaagcagccaacaaaaatatggaacacatttcaaataaaaatcatcagaaaattgcaaattaaaaccacaatgagatgcattcaaaccagtcagaatggctactattaaaaagtcaaaaagcatcacatgctggcgaggctgtctagaaaagaaaaaacgtatgcactgttgatgagaatgtaaattacttcagccactataaaaaaataacaacttaaagcatagctacaatttgacccagcaatcccattgcaggacatatattcaaaagaaagtaagtcatttgaccaaaaaacaaacaaataaacaaacaaaaccacacatacactcgtatgctcatcaaagcaccattcacattcgcaaagacatggaattaacctaggtgtcggaggcatttgaaccaaccctcatggctgctctscctacggaatagccattcttttattcctttactttcctaataaatttgctttcactctactctaaagacttactcggaattctttcttgtgtga

SEQ ID NO: 856585 - DNA, 491 bp, Homo sapiens; identical to SEQ ID NO: 838464

SEQ ID NO: 856586 - DNA, 591 bp, Homo sapiens
tttctttttttttcctatgaaacggagtcttgctatgtcacccaggctggagtgcagtggtgcaatyttggctcactgccacctctaactccccagtacaagtgattctcctgcctcagcctcccgagtagctgggattacaggcacgcaccaccatggctggctaatttttgtatttttagtagagacggggtttcgccatgttggccaggctggtctcgaactcctgacctcaagtgatctacccacctctgcctcccaaagttctgggattacaggcgtgagccaccatgcccggccttcttttttctttctttttaaaactatgctagccacttaatgatcactctgtgtctgaagattcagaatacatctcagctcttagaatgtcggtatagtatatatatatatgtgtatatgtctatatatatatatatatataatgcatatatatctattataacccctcctctctaaattttttctctctttgggaattctatttatatatcttatcctttggagtgctttcctatgtttcttttccatcatattgtctgttgtttttgtcccccttctgcatccagaaac

SEQ ID NO: 856587 - DNA, 586 bp, Homo sapiens
aatcaaatgatttctgtctctattttcttgagtaccaattgtaaaaactgaaattaggttgaggaaagtgctttagaaataataaagatgtacaaatacmaggctttggattttttattagttctgcaataaataataggtttatagttcacctgttgttgatctcatcagtggtcgccaagtaagagggtgaatcactcatccccagagactctgctacctcttagctctggagggtaaaaagcaagggccagagcaaatacattggggagagggggagaaaaaaaaaatcaggctattttaatagccctcacatgccaagtgcttttgattcatcatgtttagttttcataagcttgtgaggtagataatattatccccattttatagatgagggaatttaggctccaatgggttaaataacttgtacaagtacacatactgaatgactgccatgaggagggatgtgaattttggtcacgtgccaacacctacactcttcctaccataccacactggacaggtaattgtctagtccctcctgaaccactggtcacctccccaagctgttaagaggagcgagggg

SEQ ID NO: 856588 - DNA, 253 bp, Homo sapiens
tgtttctaacctggactgacttttccaaagagccagttcctggcacatatgagatgttcctagcacactccacacccacaaagtataaacatcagacagacaaaagcagcacctccatcatcacagcagcaaacccagcaacgcatggtccagagtccagtccagagcccactgcggtgggcagccagaggcctagaggagctggcttagctggagcaaagatgcaggcasaacgcaccggcgacaagaggaa

SEQ ID NO: 856589 - DNA, 463 bp, Homo sapiens
agagcgcctggctgttttatggaatgtttggagcagtactgctctcygtagaactctcaaggactcagagaaggaggtggcaggcagacacagacatcacgactctcagaccaaaaatgattcaaacaagttggactctaaatgtgaaggagttttctgaacatggtaaccaatttattttgcttctattatcctttttatgtgtgcatgagaattatatatgataagaatctacatttaagtgaaacagagctctttcgagaaatacaaaagaaaaattctagtgatgaaagaaccttgggacatcgttaactggcagcattctcttttcttagtgacatttttataatcgatgacatcttagtttttttttgttttttgttttgagacaggatctctgtcacccaggctggagtgcagtgatgcaatcacaacacactgtagcctcaacttccctggctca

SEQ ID NO: 856590 - DNA, 489 bp, Homo sapiens
ggtgaagacctggccgcaggctgttgctatggaaactgggtctgtgccttggaaggaatctgcacgcagggcagcctcaggcttccccctgggcttcctggggggccagtggtgagctgggtgggaattggagctgcttcccctggaccccttgcaggaagcctcaacgttgcctggtggggtcccctcccctggcacctcctcgaaggggctttcctctttcagggaactcggggctgcgttcacagaacttcctcaaatggaaacctcacggcctggctcctaaggcctccttgaaatggagctcttcacacagactttcctctctctgggaccttggggcctgatccacgggkccctccttctttgttttatatcttaaatggcctttcttattcagtggctctgccctggagaccccctctacaggcagatgactttctctggggggtctccttatcctgagcagggccaggagctggaggagct

SEQ ID NO: 856591 - DNA, 650 bp, Homo sapiens
tagaggcaggaagggccctgcttagctttatctgtatccctaataacacacttagggaatttgtgcttcctgtctctccctctgccatccatgcccctgccagcccccaggtcagggctctgtaggatgaaaggtcctgattccctgtgggggcacacttctgccaggggacacggaaagagtcctgctgaactctaagctatagcttctgcctgtcactgcaaagactttgtatccagagaccagtatgcaagaagagtcattgcctgggctcaggcaattaacccagttcttcaggaggaggaagtgcttatgtgacacagtaagggcagggagaaatgtgtttgccactcacatgatccatttggaccctacttgaccaaatttgatagtaaacagacaattacaccaccatagcttgaaaatagcatggcagccagggtctcagacccctcagaaatgaagatttgggtcctgccaccaggtaagacaccaatactaggagaagcattacctgaggctgaggctratatagaatggacaccagagaagggagagagtaaaaatcagttacatcccctaaatcaattgctgtgagaaaaatgagaattctctccgaaattccaaataaaataaattctccctttatt

SEQ ID NO: 856592 - DNA, 658 bp, Homo sapiens
ctcctccccattataaactatttaaaaaatatttaatagcttaagaaattacttaagtaatactcagtatagaaataaaatatgtgktctctcaactatccacagtgtgctgtcaattatggaataaaaaatacgtattgagtagtttaaatggaccatttttttaaaaggatgattagtttactgtaaactctataaactttcatatagatttaacaaattaatcatttacaattataaatatgtaaaaattctttgattatgtgaacaacttttggttcaaaaagtagagtaactaaaagtataaaattcaatgccttacacagcaagcatgtgcagatagtagaaaatcctaattgataatttttaatatgtcgtctggagtagatgatttaggtttgtaagaagttataaactgcctaagggtagggaatcactgtctatggaatcatggtgtcattaaaagaattcgatattcggcctcatattccagacattgccaatggttagttttgtgacttgagggaagacatttacttttttgtcagcaacagcttccttatttgtgtaaaaataactcttgtttttctcatgtcataaatgattacaatttgaagttgctttcacttccagaaagtgggtaaagacttttttttct

SEQ ID NO: 856593 - DNA, 658 bp, Homo sapiens
ctcctccccattataaactatttaaaaaatatttaatagcttaagaaattacttaagtaatactcagtatagaaataaaatatgtgttctctcarctatccacagtgtgctgtcaattatggaataaaaaatacgtattgagtagtttaaatggaccatttttttaaaaggatgattagtttactgtaaactctataaactttcatatagatttaacaaattaatcatttacaattataaatatgtaaaaattctttgattatgtgaacaacttttggttcaaaaagtagagtaactaaaagtataaaattcaatgccttacacagcaagcatgtgcagatagtagaaaatcctaattgataatttttaatatgtcgtctggagtagatgatttaggtttgtaagaagttataaactgcctaagggtagggaatcactgtctatggaatcatggtgtcattaaaagaattcgatattcggcctcatattccagacattgccaatggttagttttgtgacttgagggaagacatttacttttttgtcagcaacagcttccttatttgtgtaaaaataactcttgtttttctcatgtcataaatgattacaatttgaagttgctttcacttccagaaagtgggtaaagacttttttttct

SEQ ID NO: 856594 - DNA, 560 bp, Homo sapiens
tttcattcagcacattgtatctgtggaattcatccatattgtatcatttgttagtagtttatttctttttattgctgagtagtattccattctaagaatrtaccacaaactgttgatccagtctcctgttgacagattcttggattgcttctagtttgggctactgtgaataaagcttctattaacatccttttatgtccttctatggacatttattctcatttctcttggatgaatacctcggagtggtatcgccaactcacagaataagcttcaataattatcaacatgtggccaaatttgtttcatctacacttccccgatcccttcctctatggattatgaaatttctagtttatgaaattctttttgttttcttagggttttgctctgccatccaagtaagtgcagtgacacaatcatggctcactgcagccttgatcaagtgatcctcccacctgggggggctcaagtgatcctcccacctcagcctcccgagtagctaggactacaggtgtgccccaccatatccagctaattttttaataagggtctcactg

SEQ ID NO: 856595 - DNA, 605 bp, Homo sapiens
ctaaccccatttcccacccgagttgtacagtcttcaagggtaggctgcaaaaatctccatggaaccagttccctagagtttccaaaactagtaaaccatttctgctccctaccttttttttcctttccccattttcttgagaaaggggaggaggatgtgggtgctccaaacccatgtgttgctgcccaaacagatttactctcagtgcagcaaacagtcctgttcctttcatggaagttcctggcgaatggatctttgttgtaaaactgtgtatgtgttggccggatgtggtggctcacgcctgtaatcccagcactttgggaggctgagccgggcagatcacctgaggtcaggagttcaagaccagcctgaccaacatggagaaaccccatctctactaaaaacaaacaaaacaaaaacaaaaacaaacaaaattaaccgggtgtggtggcacatgcctgtaatcccagctactcaggaggctgaggcaggagaatcgcttgagcccgagaggtggaagttgtggtgagcagagatcgagcyattgccctccagcctgggaaacaagtgaaactgcatctcaaaaaaaaaaaaaaaaaaaaaaa

SEQ ID NO: 856596 - DNA, 595 bp, Homo sapiens
cagattatctcagataatctcatattatcttcttaagaagtcggctgggaaaatattagcacagtttttttggcraacaaaacaggttcttagaggtttatcaggtattggtgaaagtgtggagaaataggtatccccacaaatatatgatatcctcaaacttaattttggctaatttgataagtaaaaaatggtattgttttttaaaaaatttggtgggtacatagtaagggtatacatttgtggagtacattagatattctgatacaggcaaacaatgcataaccatcacatcgggcaaatgaggtagccatcactttaagcatttatcctttcttcgtgttgaaaacaatctaactatacccttttagctattttaaaatacacagtaaactattgttgactgtagtcaccctgttgtgccatcaaatacaagatcttattcattctatttaaatatttttgtactcattaaccatccccaattatcctccacctcccacctccctctccccatccactactgttcccagcctctggtaaccatccttctactctccatgagttcaattgttttaatttttagctcccataa

SEQ ID NO: 856597 - DNA, 528 bp, Homo sapiens
tcctgcctctgagtcgaatataccatccccatcttccttcccttgcctgctcactgtacccgtcattagtctgctctttaagcatcaaatgctctgtggaaaatttccttctttctgtctctcaagttaaattaaccacttcaatctccttaccctgcacgtacactttgtagattttatgccacagtactcataacactttttgcagttactgcctagcctacaagatggtaaactctttgaggacagggtttcttactttattttatcaccagcaattggtgggtaatagcaaatatgtagtaaatgtttgtggaattaatagttttcctcaacttactataggaccatgttctgctctaaaactttgaagttaaagcctagtctgtgatagcttagtacagtggtgggcaatctacagcctgtcctctctatctttgtaaataaggttttactggtatacagccatgttcatttgtttacatwctgttgtctgtagctgctttcacacaactgtggcagagttga

SEQ ID NO: 856598 - DNA, 358 bp, Homo sapiens
ggaagaataggtggtggtgtggttaatagagcatctatatatgcagaacttagtttatattgtattcagttaataagtcataaccactttagctagtgtattagtcagggttctccagaaaaacagaactagtaggagatacatatatataaaatcaggtttactataagaaattgacttgtccgtgatctgctgtctgcaagtctgaagtcctaaaaaccccgggagctgaaggtttaaatcccagtccaagagcagaagaaattgagatgagatgtcccagttaaaatggtgaggcagaaaaaaaraggcaaattctccttcctctgctttatgttcttttcaggccctcaatgga

SEQ ID NO: 856599 - DNA, 512 bp, Homo sapiens
tatatgggtccagagaaggagagagtaagaactatggaaatagagtaattcagtcattcttttttgtttttgagacagggtctcactctgtcactgaggctggagggcagtggtgcratcagggctcactgcagcctcaatctcccaggcccaagtgatcctcccacctcagcctcccaagtagctgggaatacagatgtgccaccatgcctggctaattttttaactttctgtagcaacgaggtctctctatatttcccaggcttgtcttgaactcctaggctcaaacaatcctcccatcttggtctcccaacgtgttgagattacaggtgtgagccactgtgcctggcaattcagtcattctattcaaggaacatatgccctggattgtacatgagataggagacaagtatctactattccttctatgtcaatttcatagttgctgcttccaatatgaacctttgactcactgagtttatttctagtgtttagaaccacagtatgcattt

SEQ ID NO: 856600 - DNA, 512 bp, Homo sapiens
tatatgggtccagagaaggagagagtaagaactatggaaatagagtaattcagtcattcttttttgtttttgagacagggtctcactctgtcactgaggctggagggcagtggtgcgatcagggctcactgcagcctcaatctcccaggcccaagtgatcctcccacctcagcctcccaagtagctgggaatacagatgtgccaccatgcctggctaattttttaactttctgtagcaacgaggtctctctatatttcccaggcttgtcttgaactcctaggctcaaacaatcctcccatcttggtctcccaacgtgttgagattacaggtgtgagccactgtgcctggcaattcagtcattctattcaaggaacatatgccctggattgtacatgagataggagacaagtatctactattccttctatgtcaatttcatagttgctgcttccartatgaacctttgactcactgagtttatttctagtgtttagaaccacagtatgcattt

SEQ ID NO: 856601 - DNA, 624 bp, Homo sapiens
ggcacttagtgatttattcttctcttaaggctccatcagcaggtggaatggaagacacctcccaccctgaccccttgggcaaccaaggcattatactccttcactgcctgctctgtctggaggacccgcayatcaatgccatgtttcttgaggtactccacagttgatgaaggcacctgggaaggtggaaaagagatgagtaagtagggggaaaggccccccaggggttcctttactgccatgaggcaggtgtactctacagaattagacagtgacaatcgtcacttcacgatcactcagtgtatcaccagtccaaaatttggcagtgagccccaatgagtcaaaaaggcctctttgtcagaggtatcataatacccatgcataaagctcaagtgaaatggaaatgaaagaacatgggatttgcagttagccttggatttacatccttactagcactgtaaccttgggtaagtaaattaaattctctgagtctttgttttcatgtctgtaaattagggacattaacacctagggttggtatgacaactaactgagctaagggtatgtgaaacatctaccttggtgtgcaaactccataaatgttaaatgtttgagttagtctaa

SEQ ID NO: 856602 - DNA, 525 bp, Homo sapiens
tggagctgggatcctcatccccattcgcaggtggaggtgacagctgcttgctgccaccagggccagggcctcgctttctgaaccacgtgggagcaaggagtcaactagatcacagtgcagagcrcccagcacggtgctggaacgcaggaacagctccgtgccatgcaaggatgactccgggccagcagaggtggtgggggggatgatggaagcaaccgggtatgcggccttgcatcttagccctgcccctaactcccatgtgaccttgagcactcccctccccatctgcgggcaggcaaggggctcgggatgccgctatagggctcaaccccactgggctagaaacaaccaaggcccagcagtcccagagagcggaaggcaagggaaggagaaagtaggggctccaggccccttaagccccttcccccaggcagtcacacctgctgaggaccccgctgagccagctgccccctgtagatccccagggtaggggccccacatccctcccacttcctgctcccactc

SEQ ID NO: 856603 - DNA, 628 bp, Homo sapiens
cctaggcgtggcccaggagctcaatcccaggcccacacggagctgacccctcccagccagtcgggctragggtacagcactgagccagaagctgatgacctgtctgccttgacttgtgacctgccagatccctaggccttgccgggcctggctctgtctgtctgtacaatgatggttctgggctgactggtctctgaggcttgccagctcagcccacccatggctttttcctaccccttatctacctctaaacctctgtgccagccactcctgcattaccctgggggtactcctgagccaaggatcttagaccctccccttcaccctagtcagaccctttgctgacccttctctgggacccaagtcctggtcctatctgtcttggggaccataggcagttggtgccaaagactgtccccaggatacttgggatactttaaagtcatccagtaaaatgtcattcagggaaaatctgtccacatttacctggctccagccctctaatcaatcctcctttgggacgcctgctcccctgacatgtccaaagctgatgaactctttatctttccccagacctgctcttcctgtcacaacctcagcaagagcatcaccaaccagccggtcacct

SEQ ID NO: 856604 - DNA, 586 bp, Homo sapiens
ctaggacatccactgccatcaccgttccctggaggatcctctttctaatatagtgctccagttcctgccttcaccaggccctgccactgaaatgcgattataccaggaatgatttagcgaagctgctctcaggcccttccctgccttggagaaggcagatctcctggctccagctgctctgggaaggactttcaggggcaataaacgcaccacccagtctctctgtggggagtccttcctggctttcccaggtcccaccacccacctctatggaccttgctccacccccctgcattccagcggtccccgcctgggtctgatcagacatcacacccacagcccatgttcaatgtacctttctgccatgaaaaacattcagaagtgatttaatcattccgcctttgaacttgtttggccgtgagtgatacactgatcgttccccagcagctcctgtgattccccrgccgccatcagcacacccaaggattcttgcaaggtgggaacacctgccctccgagtggttctacacgcaatgaagtgatgcgtttatggataccagcttaaatgggtcgtgacgttgaccccg

SEQ ID NO: 856605 - DNA, 568 bp, Homo sapiens
ccaagtggaattactgacttaacatttagcttgggatcctgagacttccatcacacagttttctcattgattcgcagccaataatatctgttttaaaaacatctcaggccgagcgcggtggctcacacctgtaatcccagcactttgggaggctgaggtgggcagatcacctgaggtcgggagtttgaggccagcctgaccaacatggagaaaccctgtctcttctaaaaaaaatacaaaattagccaggcgtggtggcgcatgcctgtaatcccagcactttgggaggctgaggcaggagaatcgcttgaacccaggagacggaggttccggtgagccgagatcgcgccattgcactccagcctgggcaacaagagcaaaactccgtctcaaacaaacaaacaaaaaacatctctctgctccttggggccggstgccagctctgctattggaggcactgagcgaccttgaagcaggcatgtcactcctctgtgccccagtttactcatctgtaaagtggggagagctggggcagacagtgagctggctgagggcaggactgtgtctc

SEQ ID NO: 856606 - DNA, 618 bp, Homo sapiens
atagctactaacatgacagaagctctgataggtctttgggtggtgggaatgggttgggagagagtgttgcaataagaaggggagtgttaagcacactgtcacttaggagtgcacactgcggttacagaatcttctaattctttggtggaagcttcctggaaggggaagtttcagtggtgctatcattcaaagaaaattcaaggctgggcgcggtggctcacgcctgtaatcccagcactttgggaggccaaggtgggcggattacctgaggtcaggagttcaagaccagcctgactcacttcgtggtgaaaccccatctctactaaaaatacaaacattagccaagcatggtggcacacacctgtaatcccagctactcgggagggtgagacaggagaattgcttgagcctgggagacagaggttgcagtgagccgagatagtgccactgcactcctgcctggctgacagagagagactgtctcaaaaaaaaaagaaaaaagaaaaaagaaaattcaagcccttkgtgaaggttttataatgaccctgacaagggttccttgggtcacggagaagagaccctacccaaatgaagatgcctttacaagtttggagcgct

SEQ ID NO: 856607 - DNA, 740 bp, Homo sapiens
tctaacatatgtcaaaagttgagctccttagcctcctcacacacatttaccttatattatctccccgtctcggttaatggaagttctctccacatggttcaggcccataagccttggagccatccttgactcccctttccattactccccacatctaatccatcaacaaattttactggctccttcaaaatatatacagaacctgattacttctcactacctttgctgcctgtatactggccaaccgaaatagtagcctgaattattgcatcaggttcccaactactctccctatttcttacgcatgccactaccgcaccctcaactgcagtctattataaatacaacagcaaaatgatccttttatttttgttttgagacagggtcttgctctgttgcacaggctggagtgcagtggcgcaatcttggctcactgaaacctccacctcctgggttcaagcgattctggtgcctcagcctcccaagtagctgggattacaggtgtgtgccactacgcccagcaattttttgtatttttagtagagacgggtttcaccatgttggccaggctggtctcaaactcctggcctcaagcaatgcacccgcccttggcctcccaaactactgggactacaagcatgrgccaccatgcccagctcaaaatgatccctttaaacatgggtcagatcatgtcactcctgtgatcaaaacactccaataaagctgggcatggtggcaca

SEQ ID NO: 856608 - DNA, 446 bp, Homo sapiens
tcaataatgaaacaaaatcagcatgtataccttctgatatacacactgcaaagagctcagcatcacttctgtggtattcttgccagaaacatacaaatcttaaatataacaaacattacaaatggagtcacattctacacagtaactaggctaatttttaaaaatgttaggaccattaaagacaaagaaaaaataaggaactattccagattgaaaggtattaaagagatatgacaatgaataaaaccactgattatggattggctagtgggcctaaaaagggtatatctgggataattaggaaaatgtaagtggggtctgtggaccagaaaataatattgcatcaatacttatttcctgattttgatggawacattgtggctatgtggcaaaatgttcttgtgcataggaaatatatattgtagaattaagaggtatggtaggaa

SEQ ID NO: 856609 - DNA, 446 bp, Homo sapiens
tcaataatgaaacaaaatcagcatgtataccttctgatatacacactgcaaagagctcagcatcacttctgtggtattcttgccagaaacatacaaatcttaaatataacaaacattacaaatggagtcacattctacacagtaactaggctaatttttaaaaatgttaggaccattaaagacaaagaaaaaataaggaactattccagattgaaaggtattaaagagatatgacaatgaataaaaccactgattatggattggctagtgggcctaaaaagggtatatctgggataattaggaaaatgtaagtggggtctgtggaccagaaaataatattgcatcaatacttatttcctgattttgatggaaayattgtggctatgtggcaaaatgttcttgtgcataggaaatatatattgtagaattaagaggtatggtaggaa

SEQ ID NO: 856610 - DNA, 613 bp, Homo sapiens
gtacatgttcccaacgatagggccatattgatgaggggtcggaaagcaggagcctgccaaagagcaaaagatatgcccgtgtggacaagaggttactttattatttatttattcattaattcattcatttattcatttacttattttgagacggagtcttgctctgtcacccagactggagtgcagtggtgcaatttcagctcactgcagcctctgcctcccgggttcaagtgattctcgtgtcagcctcccgagtagctggaattatgggtgcccaccattacacctggctaatttttgtatttttagtagagacggggtttcgccaggtttgtcaggctggtctggaattcctgacctcaagtaatctgtctgcctcggcctcccaaagtgttgggattacatgcatgagccaccatgcctggacaaggttactttattaaacggggtaggacctcttattagattggttcacctggaggatggtcttagtgatacctgactttgagtctctttcagtctctctgcaaagctcattttgaaagrcatttctgagtctcctactaaatgccagacactgagatgagcaaatgaacaaaataaaagtctctga

SEQ ID NO: 856611 - DNA, 616 bp, Homo sapiens
ggcaactgccctctccaaggatccccagggccctgctgagtggcaagagagatgcccacagcctggctggagaccccttcaaccccacagcttttcargatggaggagggtggggggttgggagctctccccgccccctttccctcacagccctctcctagctcccactgcacctttcccctccacatccctgcagctggacccaagcccaggcagcgacagcccctcccatatggcagcaggaacaaagagaactgttccccacaacaaaatccagaagctccggcgggcggccagatctcaagctcccagcccagtgtgacccacggcgttctccatgggccactgacgcccgcggggccagcactgctcctggcttcaaaaatataaatttaaaaatccccaccccaagataattgctctctcctctggcttattgtggtggctccgtggtaggcactgagaagcaattattcacggctaatgattataatcaagtcaaatagaatttaatggacacgtattctcttcctgcttgaaactttacatatgaattaagcacatatgggtttcacgaggcacagacgcagatttatgcagccccgaaaagccctgc

SEQ ID NO: 856612 - DNA, 617 bp, Homo sapiens
aatagcagtctctgctaaatttaacataaaacaagaactcattacttctgcctgagatctgatttcatgtctggatacagttaacgggtttttccttatattccaaggaagcaaagttaattctcagtggccggtggccctgagtggggtgacgtgggccccacaggtgctctctgccccaccctcctcctccatcctcacctcctgtcctgccagggcaggagcagcccaagagagaccactctaaggtgtggcacacagtgtgaccacccaggaaaggacccaggctgttcttccaacttctccctgagacccagcgcacagtgggtgcccaggaggggtgcccactccctcacctgagacccattctctggggctgccgagggctctttctggaacacagtcagccagccagccagccaggagatattgactgagggcctgctatgctctggggctggtgtattcctgcctcatggaggagtgrggaatctacgtggctgagtcagggcctagcctgggtggggctggggaggctctgtggggaaccagatttccacagaggacgcttccacggataaggaggactaggaggcaatggggaagggcctggcacg

SEQ ID NO: 856613 - DNA, 600 bp, Homo sapiens
tgatttccaagattttggtgtacccattacctaagcagtgtacttgggtacactgtacccaatgtgtagtcttttttccttcaccctctgccctcttgatgcctctscatccttgtagcttggttcccacttataaatgataacatacaatgtttggttttccattcctgagttacttcacttagaataatggtctccaaccccatccaggttactgtgaatgccattatctcattccttttatggctgagtagtattccatggtgtgtgtgtgtgtgtgtgtgtgtgtgtgtgtatcacattttctttatccactcgttggttgatgggcatttaggctggttcacagttttgcagttataaattgtgctgctatagacatgcatgtgcaagtgtctttttcatataatgacatcttttcctctaggaagataaccagtagtgggattgctggatcaaatgatagttctacttttagttctttaagaaatcttcatactgttttccataatgattgtactagtctacatccccaccagcagtgtaaaactgttcccttttcaccacatccatgtcaacatctggtactttttaaatatg

SEQ ID NO: 856614 - DNA, 523 bp, Homo sapiens
gtcatagtagctaaaaagtggaaaaaatccaaatgtccatcaactgatgaataaagaaaatgtggtattttcacagtggagtacccatttggctataaaaaggaatgaagtgctgatacatgctacaatatggctaaaacttgaaaacattatgctaagtgaaagaaccagtcactaaaggtcacttacattttgtatgattccagttgaaatgtctgctgtaggcaaatctatagagacagaaagtagattagtgtttgctagaggctaagggtcaggggaatggggagtgacagcttaatgagtatggggttggtgaaaatgttctgaaatttggaattatatagtggtaatggttgctcaatattgtgaatatactaaaaatcactaaattatatactttaaaatgattacartgatgaatttcattttatgtgaattttgtctcaacccctctacccacagcttacatttatacttaatcatcaaatattgaatgcttttcccctaacacaaggataac

SEQ ID NO: 856615 - DNA, 651 bp, Homo sapiens
tcattcactatcacgagaacagaacaggaaagacacatcccataattcaatcacctccyactgggttcctcccacaacacgtgggaattgtgggagttacaattcaagatgagatttgggtggagacacagccaaactgtatcatctatggttatcataataaaaactgtgattcttcttgctttggtggggaaaaggaattgagtaggaaaggacaggagggaatttttgtgggaatagtgatattccttatgttgattatggtgtagattacacaatgtatgcatttgtcagaactgatgaactgagtgcttaaaatatgtttattttacagtatgtgaattatacctcgttaaaaatattttcaaaattgataatggtttgacagtcattttcagaaagttgaatttgaaatagtatatacagttttcatgtacccataattacaaactgtatgaatgcatttctaaaccatatatatatatctaaaacctgctaatatagcacagtgattaagaagggctctaaagtcagacttcaaaattcagtcttgctaaattgtactaacttaccttaggcaaattaccatacctctctatgtgtcctcagtttcctcagtcataaaatgggaataatttaatacctacttaa

SEQ ID NO: 856616 - DNA, 606 bp, Homo sapiens
ggcaaatgctaaaactagtgagcagaactttaaggagagagaagatattggcatagcttcagtgcatctcccccaaggtatttattgatttattactattgagattttaatatatatccacaaattatttgatactcatacttctagaaaacttaattcccttacccttgagtgtgggttgcatttatcttgagaatagagtacggaaggtgaccttagagtggataaaaccaacagatgtactttaaccaagtgaccaaagttaataacagcagtagtaagtcattgataacatgtatcccctgatacaatgcagtgagcagggcatttcccctctgtaggctcttctccaaaacccagaaccccagtctaatcatgagtaaacatcaaacaaactcaaatttcaggacagtctaccaaaaatatctgactaatatagtactcttcaaactgtcggtcagggaagacaaagaaggaccaagaaacggttacgtactggggatactaacaaaacataactgaatgkaaagggacctgcaagattcaaaatcaacaaaaggacatcagtggaaaaacttgtgaaatctgaatagcctgttgtttagt

SEQ ID NO: 856617 - DNA, 561 bp, Homo sapiens
aggctgaggacacaggaaggatccagggaagagggagtatggcctttattgaaagcccactgtgaacctactaggtaccaagcactttttcttatccttccagcaatctttcaagatagaaatatgagtctytttaggcttagttatgctgcagtaataaattaactccagaatcctagtggcttaacatagcggaagtttatttctttctcatgctacgcatccatcaaaggttggtagaaagctttgctctacctagtgacttagcgaccaggctgatgaaatctctcccatattttaggggtacgacctggatgattggccactttggtctctgtagcagaggaggaaatcactggaaggttgaacattgactcttaaatgtgttggtcctgaagtgacacaccacccattggccagaactagccctgtggtcctgcctgatttctgggattccaggaggtgtgggaagacatggatattttaggagcagtaacttcccctgccacagtagatatgatttctattttataggaaaggaattgaggcttagagaaattg

SEQ ID NO: 856618 - DNA, 614 bp, Homo sapiens
cctgggaaatcagatcacctggcttattaaactctggtataaagtaaacatagggcctggcatggtggctcatgcctataatcccagcacattgggaggccgaggcaggcrgatcacctgagttcaggagtttgacaccagcctggccaacatggtaaaaccctgtctatactaaaaatacaaacattagctgggtgtggtggcaggcacctataatcccagctacttgggaggctgaggcaggagaatcacttgaacctgggaggtggaggttgcagtgagccaagttcgtaccactgcactccagcctgggcaacagagcgagactccgtctcaaaaaaataaaaaaataaagtaagcacaaacaaatcagttgtgagtgtgggttgagaggatttcgtatcacaaaaatctgaagactgcagtgcacggccaaatagaaatgtgttttgtcggctcagaggctctttttcgtttcctgcttggctagctctctgctgcattccaaatagctgagggacttccagataatcaaagttctctaaccatacacactgttagtaactcctttcagcccccttcctgtccagatgtacaaagagaatagcaaaggg

SEQ ID NO: 856619 - DNA, 641 bp, Homo sapiens
tgactggctttagcttagtttccttgtccctcaggagggtgataacagcacctacctcacagggtcattatgaggactgaatgactgctgcccatagaatttaatgctgctgtgcctaagtcaagaagcaacaatgggacttgtggattctcagcacttccatgacatggactctaccctaacattggctgggcaatgttataacttataaacttataagtttataagtccatcccttgattttaacaggtctgagcaataatgtggaaaggctactggtagccactgccaataaatcaaatccatcataggccacctcctccagaaagcccacctggactatgctgtcttattgtgactacttccttggctgaatttctatgggatttgaaattcagagaaattaagtaactcatccaaggtcacacaactaataaatggtaaactggtttaccatttagtaaccaggttactagtaaccatttactggtaaatggtaaagcaggatttcagtccggccatctgaccccaamgcttgtctgctatgcaagcatgggaatcttatgttttttgctacctggaaagtttcagcattgaatcatcttagcctggggtcttttaaaaataaatgattccattaa

SEQ ID NO: 856620 - DNA, 514 bp, Homo sapiens
agtcatcaagactggcgtccacttcctttggggctccctaccctgagccagatgttttttgttgaatctggtaattttcaaagaagagtccagattggagtgtcagaccaatggctgggctctgtgaatagagcctgtgaaagaacacaggaaaagcacccataaactgtgcactacacagcactttgcaacctctcagcctttccatgccctctcacagcagcccagtgaggcaggcgtcattattgaccccattttgtgggtgagaaaactgagcctccaagactttcctgggtccagtgcagagctgggacccatcgtgtctcagaagatgcaggtggcgcctggcacgtgatgggtactcacacaccattgaaacttcagactcctagctctgaggcttttgtcttccatcttatggtctctgcctcaagaaaagtaatctatcccraaggctatttcttcaaaatataagaaaatccttacagggctgtgatctcatgttcctccgcag

SEQ ID NO: 856621 - DNA, 565 bp, Homo sapiens
gacctcgtgatctgcccacctctgcctcccaaagtatgctgggattacaggcgtgagccaccgtgcctggccaatattcaccatctttacatgttcttatggcaattttttcttgtcttctttggagaaatatttattcaagtccttggcctattttttaatttgggttttatgttgtttattgttgagttataagagttctttatatattctggatacaattgtctgatatatgatttgcaatttttttcccattctgtgagttatctttttactctcttgataatgttctttgaagaacaaaactttttcattttgaaagagtccaatgtatctacattttttcttttgtcacttgtgcttttggtgtcacatctaagaaaccatagcttaatctaaagtaatgaaaatttattcctgttttctcttaagagttttatatttttagatttacacatggatctatgatccactttgagttaatccttgtattttgtgtgaggtctggagcaaacttcattctttcgcrtgtggatattcagttatcttggcatcatttcctgac

SEQ ID NO: 856622 - DNA, 426 bp, Homo sapiens
tgcatattcagtgcttccctcaggaactctttccaggcagtcccggcggtgacagaatctctcagaatttgcttgtctggaaaggattttatttctcctttgattatgaagtttagtttggccagatatgaaattctgagttggaaattcttttctttaagaatgttgaatattggtcccccaatctcttctggcttatagggtttccattgagaggtccactgttaatcagatagactttgctgtgtaggtgacctgacctttctctctggctgccattaacatgttttccttcatttcaactttggaaaatytgatgattatgtgccttggggttgatcttctcatggagtatcttactggggttatctggatttccttaatttgaatgttgggctgtcttgctaagttggggaagttctcctg

SEQ ID NO: 856623 - DNA, 629 bp, Homo sapiens
atcactctgtaataattttccttttttttttggttatgttggtaatattkattcctttagtgtttggggaaattaactttcaaagccattaggtccagaattttccttatactgtggtttttcagagacttcaacatctttaataactatagaactacccaaatttttcaatttcctcctaaggtttttcaaaagccttgtctccttgatctgacttcttattttcatattctaaaaaattcttgtattttcttttaaaaagctgtagaatctatgagaatgactcgttttttgcactgtttatgttggttaaattgtgttttctctttttttcctaggggtgtatgaattttactagtctttttaaaggacttcattagtgttcatttattttctatttcattaagttcctattttaccattttttcttgctagtattttttagtttattttacagttttctttctgtcttcatgagaaaaataattagatcatggatgcttagcctttttgtctagtatatggaatttaaggctataaaatttcctctaagcacagctttagctgaatttaattttttctattgtctatttttttctcggttatcagtccaatgttatcttttcaat

SEQ ID NO: 856624 - DNA, 628 bp, Homo sapiens
ggagaaacagacagcaataaaataatagtaagggacttcaacgctgcactttcaacaacrgatagattgcccagacagaagatcagtaaggaatcattggacttaaactacactttaggccaaatgaacctaacagacatacagaacattccatccatgagcagcagaatacacattcttcttaagcaaacgtggaaattttccaggacagatcatatgttaggtcacaaaacaagtcttaaacttaagaagattgaaattgtatcaagtattctttctgactgtaatagtgttaaattagaaatgagtatgaggaagaaaaccgtaaaatcaacaaatacatggaaattaaacagcacactcctgaacaaccaataagttaaagaagatatcaaaagagaaatttaaaagttcttgaaagaaataaaaatggaaacacaatggatcaaaacataagggatgcagcaaaagcagtgaaagggaagtttatgaagataaacacctacattaagaaaaaagaaaactctcaaataatctaatattaaaccacaaggtactaaaatgaacaaactaagcccaaagtcagcataaagaaaaaataatacacatccaagaagaaatcattaaa

SEQ ID NO: 856625 - DNA, 628 bp, Homo sapiens
ggagaaacagacagcaataaaataatagtaagggacttcaacgctgcactttcaacaacagatagattgcccagacagaagatcagtaaggaatcattggacttaaactacactttaggccaaatgaacctaacagacatacagaacattccatccatgagcagcagaatacacattcttcttaagcaaacgtggaaattttccaggacagatcatatgttaggtcacaaaacaagtcttaaacttaagaagattgaaattgtatcaagtattctttctgactgtaatagtgttaaattagaaatgagtatgaggaagaaaaccgtaaaatcaacaaatacatggaaattaaacagcacactcctgaacaaccaataagttaaagaagatatcaaaagagaaatttaaaagttcttgaaagaaataaaaatggaaacacaatggatcaaaacataagggatgcagcaaaagcagtgaaagggaagtttatgaagataaacamctacattaagaaaaaagaaaactctcaaataatctaatattaaaccacaaggtactaaaatgaacaaactaagcccaaagtcagcataaagaaaaaataatacacatccaagaagaaatcattaaa

SEQ ID NO: 856626 - DNA, 594 bp, Homo sapiens
cttggaaccaagccaaatgttcaacaatgatagactggactaagtaaatgtggcacatatacaccatggaatactatgcagccataaaaaatgatgagttcatgtcctttgcaggacatggatgaaattggaaatcatcattctcagtaaacttttgcaaggacaaaaaaccaaactccgcatgttctcactcattgatgggaattgaacaatgagaacacatggacacaggaaggggaaaaacacactctggggactgttttggggtgggggtaggggggagggatagcattaggagatatacctaatgctgaatgacaagttaatgggtgcggcacaccagcatggcacatgtatacatatgtaactaacctgcacattgtgcacatgtaccctaaaacttaaagtataataataataaaataaaaaaaagaaattcagaagtacctattttaattaaaatggattgaaatttttttcaaaagaacttctttcaagaaaaaagatcaaataaaatctaatattttatttygtttcttacataaagaaaaaatttcaaataaagctgtccacaagagttatcttcagccatct

SEQ ID NO: 856627 - DNA, 529 bp, Homo sapiens
aagaaaataagagagggtgcaaacaaatggtaaaacattccatgctcatagataggaagaatcaatatcatgaaaatggccatactgcccaaggtaatttatagattcaatgctatccctttgaactaccattgacattcttcacagaaacagaaaaaactatttcaaattttacatggtgccaaaatgagccgtatagccaagacaatcctaagcaaaaagaacaaagctggaggcctcaccctacatgacttcaaactatactacaaggttacagtaacaaaaacagcatggtacttgtataagaactgacacataaatcaatggaacagaatagagaactcagaaatcagactgcacatctacaaccatgtgatcttcaacaaacctgacaaaagcaagcagtggggaaaggattccccatctaataaatgstgctgggagaactggttagccataagcagaaaattgaaactggatcccattcttacacctcatacaaaaactaactcaagatggattgaagagt

SEQ ID NO: 856628 - DNA, 530 bp, Homo sapiens
aaaggcaacccaggaagcaagcaagggcaaaggaggttgtgcattctttaggggagggaggcgtctgtggaaggcccttgcctgccaccttctccattctcagcagtgtccctcagaagaagcactgctggtgtcacaagggctgggatgctaacccctaaatctgacaactttggtgaaattgctactttgatatcagagaccatgccttccatgtcttgggtattccaacaatattgtcccacagtgccttgtagagagcgacacttgggcaaagccctgattcaactaaaacacaaagcacagtatattctgataaatatggctggaatttttggttcttttgtacacttatgtatccaaaaagtttagacctctgcttatcacatagttggtgctcaataaatattttttgaatgaawacatgaatgcttaaaacctcattgcaggccattctccctgtggtcagaattgagtagtatttctaattaaccctcaacaaggtagcttatggctcatcagcaaagcaa

SEQ ID NO: 856629 - DNA, 549 bp, Homo sapiens
atccaaaagaagcaaggtgaaacttgcaccaggtaaccaactaggacttatacctccatagaatggacgacctgtgtgcatataattgtaaagtcttttagacttggtcaaaaggcaagggccagatctgtttacttgcaaatgggctattagcagtttatcagaaaattatactgtgactaccaaactactatccatgtagcaaaaacgacatgttccaccattttttcctctcgtgctgatttacagtaagtcacaaaagagttaatgttctctctctcccttaatccctaaagcaagtaggttaatagtaccagtgggttgtgtttatagaattgaaacactgttattgtatatgtcaagagaattaaacctctctgattatctatacattttaaaatgtatcatttccttgcatagatacayatctgcaacaaagatgaagaaactgaacatttaaaaaagtaaactaacaattacattgttagagagtaaatgtaagtaaaagtgactattgttaattaatgttttctacacacattattagtg

SEQ ID NO: 856630 - DNA, 631 bp, Homo sapiens
ggaaagtaattactggcccaaagtcacatagaagtttactggcagaatggagtgagtctaaaatcaaggtctmctgactttcagttcaaaagaataatagaagagggaaatcattcctctagatcaggggtcagcaaacttgttctattaagagccagagggtacatattttaggctttgtggaccatatgactattggcagctactcaactactcagctctgtccttggagcccaaaagcagccatagacaatacataaacaaaagagtgtgtctatgttccaataaaactttatttacaaaaacagcctgcaggccagatttggcccttgagtcatagtttgctgatgtttgctctggatctaaaggagaaaataagcatggaagtctcgttgggagcttctttatgagccacatcccaaacttggtctgtcatggagaatgtcaatttttcataggtccagagggtgctattaattagctaaaattgctctgactcaggcaaaactgactctttttatagccttcttgagaaaaggttgtttatgagaatttcaaagtattgaagagtcatttttcaggattgtctttgtgtcaccattgttccacttaaatgtgaaagatttatgtt

SEQ ID NO: 856631 - DNA, 560 bp, Homo sapiens
ttcagacatgatgtgtattccaagagaatttgcaatttaaataaatgaaagcatattcagtccgggcatggtggatcacacgtgtaatcccagcactttgggaggccgaggtgggaggaggtcaggakatcaagaccatcctggccaacatggtgaaaccctgtctctactaaaaaaatacaaaaaagttagccgcttgtggcggtgtatgactgtagtcccagctacttgggagactgaggcaggagaattgcttgaacctgggaggcagaggctgcagtgagctgagactgcaccactgcactccagcctggtgacagagcgagactctgtctcaaaaaagaaaaaaaaaaagcatattcagaaaaaaaactgatgagagaccactacacacctattagagtggcccaaattctgaacaatgacaacaccaagtgctgatgaggatgtggagtaacaggagctcccattcatcgttggtggggacgcaaaaagttgtacagccactttggaggagagtttgatggtttcttacaaaattaaacatactctaatcataa

SEQ ID NO: 856632 - DNA, 560 bp, Homo sapiens
ttcagacatgatgtgtattccaagagaatttgcaatttaaataaatgaaagcatattcagtccgggcatggtggatcacacgtgtaatcccagcactttgggaggccgaggtgggaggaggtcaggagatcaagaccatcctggccaacatggtgaaaccctgtctctactaaaaaaatacaaaaaagttagccgcttgtggcggtgtatgactgtagtcccagctacttgggagactgaggcaggagaattgcttgaacctgggaggcagaggctgcagtgagctgagactgcaccactgcactccagcctggtgacagagcgagactctgtctcaaaaaagaaaaaaaaaaagcatattcagaaaaaaaactgatgagagaccactacacacctattagagtggcccaaattctgaacaatgacaacaccaagtgctgatgaggatgtggagtaacaggagctcccattcatcgttggtggggrcgcaaaaagttgtacagccactttggaggagagtttgatggtttcttacaaaattaaacatactctaatcataa

SEQ ID NO: 856633 - DNA, 631 bp, Homo sapiens
ctctcagcagcactgaatagtctttattaaaactcrtttttccccctcttgaattctttgtttttcatcccaccttagagacggctttttttcagtcttcctttgttggctcctccttccctgatggattctagatgttgggagtagtccagacctcagtccttgaatatcttctctctatgctttctccctaagtcagtggttcacaaccttggctggatattagaaacatccaagaagcttttaataacaccaatgttcaggccgcacctgagaccaattacataagaatctctgagggtaggactgaaacattattatagtttcaaagattcccaggtgtttcccatgtgtagccaggcttgagaaccatttcctgggtgatcccattcattccagggctttaaatgccacccgtctgttgttgatttacaaattgattattccagccctagaattcctaattctgaccccagccctaacttctctccctggctcgcttcatacactcctggcttgtttcaggttttccatgtgcacaagcttttcaactctggataagaactccctggaccacacagatcaccacctagggctgattcagtttctcattgccatccacttcccacaa

SEQ ID NO: 856634 - DNA, 631 bp, Homo sapiens
ctctcagcagcactgaatagtctttattaaaactcgtttttccccctcttgaattctktgtttttcatcccaccttagagacggctttttttcagtcttcctttgttggctcctccttccctgatggattctagatgttgggagtagtccagacctcagtccttgaatatcttctctctatgctttctccctaagtcagtggttcacaaccttggctggatattagaaacatccaagaagcttttaataacaccaatgttcaggccgcacctgagaccaattacataagaatctctgagggtaggactgaaacattattatagtttcaaagattcccaggtgtttcccatgtgtagccaggcttgagaaccatttcctgggtgatcccattcattccagggctttaaatgccacccgtctgttgttgatttacaaattgattattccagccctagaattcctaattctgaccccagccctaacttctctccctggctcgcttcatacactcctggcttgtttcaggttttccatgtgcacaagcttttcaactctggataagaactccctggaccacacagatcaccacctagggctgattcagtttctcattgccatccacttcccacaa

SEQ ID NO: 856635 - DNA, 594 bp, Homo sapiens
aggaacctgaaaaggaagactttctctatctgttaacaattattaatattaagtgttcatttaaatacaggcctggtctggtgttttgagaaasctgactacctaagatactgtctttttctcagccttgttggttctggagaatttcaattttagatcacccatttgagataaagtccaaattggtgaaacacctttctttaaatgggtgatgtgtattcaggagcttattccttttagcttagtgacacaagggttggttagaagaatctaataacgttcacatgcctgttcatgttctttgcccactttttatgatgctgtttttttttttttttgtaaatttgtttaatttacttatagatgctgggtattaggcccttgtcagatgcatggattgcaacatgtctcccattctgtagttttcttcaatctgatgatagttgatttggctgtgaagaagctctttagtttaattagatcttatttgtcaatttttgctttttttgcaattgttatttatatctttgtcatgaaatctttgcctgtgcctatgttctgaatgatattacctaggttgtctttcaggatttt

SEQ ID NO: 856636 - DNA, 636 bp, Homo sapiens
ttaaatcagtcacttctctaagaaagtcctaatttcttttagggataaatggaatttggagaacataatttgagtattatttgtgcatttagggtattcattgttctttcaggccttttcagtggacacagctagaaaaccagtcatttttaagaaaaaattaattatgaattcatactgacatttctaaatcaaagcttctaggtttttatttaacttaaaaaattttacatacgcatctcttttactctgaaaatttactcttttaatactttaaagttttatatttatatattttattagtccaataataatagtaattgtcatgctactcacaagaagacccatgaatgtaatttagaattgtgtgtgtgtgtgcgcatgtgtgtgtgttgttcttgggggtatatgtcccataacagatgtaccacccaaagattgacgttaaatacttatctgtgtgcttgtaattcttctgtaaagaaaaattgtggggtttttttttgccaacytggcagattagcggttttagtaggcctcactcgcttggaaatagcaaggtggtccatgaagataaactctgtgagctacaattcaggaaggcaaatgggaatcccagatcccagggatgagaat

SEQ ID NO: 856637 - DNA, 637 bp, Homo sapiens
atgatgtggcgggttgtgggggactccaaggctctatttccaacttccatcagagaacttctgttttcacctggttttcaaatttgctttccaaaagggatttggtttaagtaaaggatacagaggtttataaaagtttgaaaacttctacattgcaggatgtgcaggctcttgccagatgggacagtgtatgagactcttccagggtgacgtcttaggcaatttcctgtccaatcacagatggtcacatgctgctttcctgagttaacctattaactcacccttgtttcccaggcctcagtggagctaggcttgtcacgtcttcacagtgactagattccctcacagtcgagtatatctgccactccttgacttttaaaacatagtctatgttcaccctctaatatgaagagcccctttcactattttctttgtctgtgctggagtcacttcagtggcaagtgttctttggtctctgccgcaccctccctctgatgcctctgagaagaggatttccttttygtgagaatgtcttcccattcttcttaccctcttgaactcacatgttatgccacttagatgaggaaattgtagttaaataattagaaaggatatgacttatctcaaatcaatccaa

SEQ ID NO: 856638 - DNA, 631 bp, Homo sapiens
cttttatgtaatatgaaccagaaaattccttatttttaaatcagttgagattttctgctacctatagccaaaaacaccctaacttgccaacttttctaccagcttcaatcagaattcagctccatcacttcaccaacgctgctgttgtaaagagcatcagtggccctcatgttggagaatccaacaaatagttttcctgctcctgtatctctgctcagcctttgaagattagattttccatccaatatgcaagtgtgcttaaggatattcactgtagcgttggatatcacagcaaaatattaaaaaataggctactgatacactgaatactgaaaataatctactgatgcacacaattttatttcatttatgttttattatttttatcttaaatatattttaattttaaatattatataaatatattcaaatgttataaaattattttcttttaatatttacacttatttcaaactaattttattttttgttactttaacattttatttakttggtttttgcatttatttaatgtataaatgtatttattgaatcaccaataggggactgaataagctgcgtatttcttcctttgagcgcagctggtgcaataaacaggagctcgcagagt

SEQ ID NO: 856639 - DNA, 583 bp, Homo sapiens
ctccaggcaggtggggtgacagcaccaagggaagcaccagccaactgcacttgggactgaaagcaggagagcctaaggtgctgctgttttaaagtaagaactttcccacagttgtctgaagtcccatccttcctactaagagagaagcaggcctaaggttggggtgggggatttccttagtaaaagaaactaatttccctaattaggctccatacaaagtcatttctcttgcatctcacctccagtatttgtcctctacaaagaaatatgttttgttcttttccttatcagaaatggctgcatcgattttcctcacggttggagggaaacctagggtgtggatgcctcttgggtatccagctcgtacctcatttcctctgatggcccagaattgatttcctgttaaatataaataattcagagtcatattgaattataacagttaagccctttcgctttagaaatacactttagcatctwtgattttcatggtaaagtagtagcccaaattttagatttagtcaccagcttacagtgggcttttcacaaaaatttgcagactgaatgaatgaactaaggtcaa

SEQ ID NO: 856640 - DNA, 572 bp, Homo sapiens
agaaatgaaactggatcctcttctctcaccttatamaaaaatcaactcaagatagatcaaagccttaaatttaagacctaaaaactataaatattctagaagataacatcagaaaaaaccttctagacattggctcaggcaaagacttcaagaccaagagcccaaaagcaaaaacaacaaaaacaaaggtaaatagataggacttaattaaactaaaaagcttctgcagagcaaaagaaataatcagcagagtaaacagacaacccggagtgggagaaaatcttcacaaactatatatctgacaaaggaccaatatccagaatctataaggaactcaaacaaatcagcaagaaaaaaaacaatcccatcaaaaagtgggctaaggacatgaatagacaattctcaaaagaagatatgcaaatgactgacaagcatatggaaagtgctcaacatcacaatgatgagagaaatgcagatcgaaaccacaatgcgataccacctcacttctgtaagaatggccataatcaaaaaaatcaaaaaaaatagatgttggatggatggtgtaaaaaggg

SEQ ID NO: 856641 - DNA, 548 bp, Homo sapiens
gttacactggctattttcatggccgaattaggaagaccagaaggaagatgttgatgttttctgggaaagatrattcagaaaaggtagagtaggtgtttggaaagacaacatgagacttccgctttgaaaggaagcactttaaccaacatttttgggtatttactcctaaaaacatgtgtgcttccaattatttttggaaatgttcaatgcaggtcttgctcttggctgtatgtacagcatcccctgggaacgtgatgttccactccttcatttagaattcaaacactgagataatgcactgctccagtctttatttctcttctcactggtccatagaaggcagaagggaacaagatagtatagatgatgaaatgttataagaagaatgttgaaaaatatgtctctactcagaaatttagtagatgtaaaataaacatactgaaacaaaaacagccagaattactgattaatggcagcaaatttcatacttaagatagtatataaatctgctagcctttaacacatagccactgtgtaaccttgggaaa

SEQ ID NO: 856642 - DNA, 528 bp, Homo sapiens
gctccagtacatctggcagcagacatttcagtggaaaacttacaggccagaagttagtggtgtaacatatttcaagtgctgaaggaaaataacttttaccctagaatagtatatccagtgaaaataatcttcaaacatgaaggaaaaatgaccttcccaaataaaagctgaggaattacatcattgccagacctgacctataagaaatactaaagggagtacttgaataaggaagaaaaggacattaattagcagtaaataatcacatggaccattctcaaaaatagaccatatgctaggccacaaaacaagactgaaaacattcaaaaaaatagaaataatatcaagcaacttatctgatcacaatggaataaaactagaaattaataacgagaaattttggaaactatacagataatggaaattaaacaatgtgctcctgaatgacmagtgggtcaatgaagaaattaagaagaaaactgaaaaatttcttgaaacaatgggcaataaaaacacaacataccagga

SEQ ID NO: 856643 - DNA, 622 bp, Homo sapiens
aaaatatgcagtttcctctgattaagaggaacaatttttatatgtacataatgtcaagtagaccttggcttatgttagagagtatgtagaaataactgatttattttgtcattcataagaaattaccttggccaggtgtcgtggctcatgcctgtaatcctagcaattctggaggctgaagtgagaggactgcttgagcccaggagattgaggctgttcgagttgcactccagcactccagcctgagaaatagagcaggattctgtcttaaaaaaattaccatggcaagtagtctcctttttcatctagaaggatgtctttaaatacaacagactaagagaatgttacattttgtgacttgaggacactgggagacaaagctgtatttacctccttcacatgcgcaccaatacatttctccacattctcattaaatatttaattgctttaccatgggttcaatatttgtatttaaatttacgtaacacatcttaaaaagtagcatatcttaaaatataatwctagcatcagtggtgacacgacaaatgagggtaccctattgttttgtaatatttagaaaatgcagcttgatctttttgcctcaaattgtgatctacaaacc

SEQ ID NO: 856644 - DNA, 621 bp, Homo sapiens
aaaattaatattttgtataaggaagaaaatacattttaattttctgtatgtatgtctgtatatatatataayacattttatataaatatgcatgtgtatgttattataatgcacatatatatgtatagtgcatctacagaattttacatagagaagaaaaaatatcaaacatcttataaaaagtacaaaaaataacctctggaaagatcatgtgtgataagggtaattgcttttaggtttgtaacataattctgatactggagtgaataaatttagttttatggaaaatttgcctaaaggattgttgtgttcatgagatggtaagaaaatctttgtagttgagcaatgcatcataagcatcccttaacttcggtagtaaagctttggggaaaaaaggagcttgtctgaaacatcactgtattatctccccttttccagagagttcaatagccaagaaagtagttagattacagaggaaaacagcaccctcccttctcccaagatctactgtaaactgcttttccctcaattgctgtatttatccaaaccacatggaatagatttggcttctttgggttatttgcagaaatgattacttttaatacaaaaagttaaatcaat

SEQ ID NO: 856645 - DNA, 599 bp, Homo sapiens
ttatctagtttttaaaataagctaaaatttatggaagttgaactctatgtggatattttcaatatgccttgaatttatgtgttgccaaaactgcagcatgaaagcatcacaaaaactgtttagtaagttttcagagtgaatctatgtttatactaaaaagtcattttttgttctcttcccttaagagcaccggagattgtcagaagatctcatttctagtcttagctgtaggactgtgggcaagtcaccgtaagtgtattatacagttccttcctctataataaaacgacatcataagagggtttaacataccatgtgaaaaatatatatatatgtggaagtggttcaaaaactataatgctgaactgtactattattgtttcacttaaatatgctgctctgtaatttttggtgtttatatgagccaaatttaagcataatcttttaaaagtggacaatttggaaagaaaattaaatgatgtatttaactaattctatggcttatacartattattactgtatcacttagtagaaatgaactgttttttttgttttagtcctgtgccatttttcctctgggagacaatctgaagtcaac

SEQ ID NO: 856646 - DNA, 449 bp, Homo sapiens
attctctcatgttttatcttttgttatttaaatggtctctatgtcagaaatgagaattcttaaccataacagcatgatattggtataaaaacagacacaaagaccaatggaacagaatagagaacccagaaataaagccatgcattaacagtcaactcatttttgacaaaggtgccatggatatacattggggaaagggcaatctcttcaataaatgctgctgggaaaactggctacctatatgcagaaaacagaactagatcactatcactcaccacatacgaaaataaaatcaaaatcgattaaagacttaagtgtaagatctgaaactacaaaactactacaagaaaactttggggaactgctttaagacttttgggtaaatatttttgtagtaagacctcaaggcataggcmatcaaggccaaaattgacaaatggaatttcatc

SEQ ID NO: 856647 - DNA, 449 bp, Homo sapiens
attctctcatgttttatcttttgttatttaaatggtctctatgtcagaaatgagaattcttaaccataacagcatgatattggtataaaaacagacacaaagaccaatggaacagaatagagaacccagaaataaagccatgcattaacagtcaactcatttttgacaaaggtgccatggatatacattggggaaagggcaatctcttcaataaatgctgctgggaaaactggctacctatatgcagaaaacagaactagatcactatcactcaccacatacgaaaataaaatcaaaatcgattaaagacttaagtgtaagatctgaaactacaaaactactacaagaaaactttggggaactgctttaagacttttgggtaaatatttttgtagtaagacctcaaggcataggccatcaaggcmaaaattgacaaatggaatttcatc

SEQ ID NO: 856648 - DNA, 442 bp, Homo sapiens
aggctttactcaaatagctcataatcttggctgtctgttcgtattcaggagtaagacctcaaaagttgacctggagagtggatagcttttttatgccttcactgtcattttaatgtgatctgaacatagtagcaataaaagcttgtatttcatatatcttgacaaaccacagatatcttgtcttagtaatccacctctggtgttgggcatttcttgtttgcttttcttttttccccctctgctatggtgaacatccttgcatgtatattacatttgtctaattatttctttaagataaatcctaaaaaayagaagcttgaaaagcatgcaaattttaacttttgctatgtattgcctgattgcccacccatcagcaatgttatttataattccactgaaaatggcatgagtcttatttttcacatacatacctttgttttta

SEQ ID NO: 856649 - DNA, 442 bp, Homo sapiens
aggctttactcaaatagctcataatcttggctgtctgttcgtattcaggagtaagacctcaaaagttgacctggagagtggatagcttttttatgccttcactgtcattttaatgtgatctgaacatagtagcaataaaagcttgtatttcatatatcttgacaaaccacagatatcttgtcttagtaatccacctctggtgttgggcatttcttgtttgcttttcttttttccccctctgctatggtgaacatccttgcatgtatattacatttgtctaattatttctttaagataaatcctaaaaaatagaarcttgaaaagcatgcaaattttaacttttgctatgtattgcctgattgcccacccatcagcaatgttatttataattccactgaaaatggcatgagtcttatttttcacatacatacctttgttttta

SEQ ID NO: 856650 - DNA, 442 bp, Homo sapiens
aggctttactcaaatagctcataatcttggctgtctgttcgtattcaggagtaagacctcaaaagttgacctggagagtggatagcttttttatgccttcactgtcattttaatgtgatctgaacatagtagcaataaaagcttgtatttcatatatcttgacaaaccacagatatcttgtcttagtaatccacctctggtgttgggcatttcttgtttgcttttcttttttccccctctgctatggtgaacatccttgcatgtatattacatttgtctaattatttctttaagataaatcctaaaaaatagaagcttgaaaagcatgcaaattttaacttttgctatgtattgcstgattgcccacccatcagcaatgttatttataattccactgaaaatggcatgagtcttatttttcacatacatacctttgttttta

SEQ ID NO: 856651 - DNA, 491 bp, Homo sapiens
atgtctttaaattgattttttaaaaaacaaatatgagataattaacattttattgttcccaaagagtgatcctccactggactcatccatcaattttattttttatttagatgagtttattctttcttaatatactttctccgcatatgctgttacagcatccacgtttgtgtttgtatttggcagccatattttctgctcttaagaatcttcaagataagattcgacgcttggaacttgagaggattcaggcagaagaaagtgtgaaaaccttgtctagagaaacaattgaatataagaaagtactggatgaacagatacaagaaagggagaattcaaagaatgaggaatcaaagcacaatcaaggtttgttgatgaagaaaattaaaattctatcaaaataagtgttgtgcagtattaagtattctaaargaaatagtacattagtgttttgtagcggtatcttcaagtactacaaaactgcattgtat

SEQ ID NO: 856652 - DNA, 576 bp, Homo sapiens
cacagccttggaattcggtgtaaagctgttgatctggtgtgtgtaccctctcaaaccctatcaggaagatgtatctaaactgatttgcacttacctggaatagcagcagtacacatttacagggrccttaatcatctggacatcccacagaacatcacatagggatgctacactgaagatgccatgctaatcagacctggtaagcaggaagtggaacataccctacatgcccttgtaaggcacccatgcattgcagagagtgggggataagccctagagtggttcaggggtctgctatctcaataaagatccaggggtccatcctgggtaatatagcaagaccccatgtctaaaaaaaattttttaagtagctgggcgtggtgttgcacacctgtggttccagctacttgggaggctgaggcaggaggatcacttgagcccaggaggtcaagaccagcttggacaacatagagagaccccaattctacgaaaaatttttaaaattagctgggcatggtagcgtgcacctgtgatcccagctactccagaggctgaggtgggaggatcccttgagcc

SEQ ID NO: 856653 - DNA, 591 bp, Homo sapiens
tgtctacattccatttcaccaattctctcttcaactgtgttcagtatgttctgcagtctatacattgagtctttaatatcaataataatactttcagttctaggaattctattagctttttaaaaaatgtgcctagttatgtttgaagtctcttatatcttactcatgttttcaatccatcttttatttcttttaacagtataaatatagtctgtttaaaatgttacattcattaattctgatacaggagcctttgggctctgttttaattttagctatcctagaagctgaccctgacacaagtatttgtgtacaacttgattgttttcgtagtcttaggaagcactaataggagaatggagaagtttatagaggaaaaaagaagaagaaattatgggcaaatgaacgggtgtgatgtggataattcttaacaagatgtatagactgtataaaatagtaatatattacttattttgaaagattaaaaaaacaaactaaagctaaggcaacttttkgtagtcactgtaattcgccaatgaaatataagatggaataaggtgaactgaagtgtcaaacgtcattgaattggtt

SEQ ID NO: 856654 - DNA, 299 bp, Homo sapiens
atccataaatcatcttgtactaacaacatcttcacaatattggcttttctaattcctgaatagagtatgtctgttaggaattttaaatgtttatttttgaagttttgtagtttttgttagtgaagggatcttccgcatctatttctttttgtatttttggatttcatcacaggtttttaattgytaaaaattccaatagtcattgttgctggtacatataaaaaaactgaattttttatttgacagttgggtcctgtaaacttgctaagtttcttattctaaccatagttatgtctgta

SEQ ID NO: 856655 - DNA, 673 bp, Homo sapiens
ggggaaaaggaagtggaatatacagcatcaataaatgacaggcatgcraggaagaaggacactggggagtccaaggaggcgatggcaataatggtcaccacaatgagaaggttgcccaccatagtcacattgtatgtgagtaaaaacattacaaataatgctttttgcacatcaggatcctgagagaggcctgggaggacaaattctgtaacattattacttgttcccatttactcttctctaaggctcgtaatagagttgagagctcaggagggcagaaactgtaatgaaatagtgaacaggaacatgaatgcatccataatgtcacaaaacacactttcatcattgtatcctcaatagttatttacacacatgatcaacattgtgtaagtctctattgagttcctcatctcctcaaagattttattttagcctgcaggtgacagcttcagactctaagttttagtgaatattctgtacagaagaagagttaaaagcccaatagccattcatatctttcatacctctttatttaaaatgtatttcttggcatgactgttagctatgttgaagaggcaacagagttttggtcttaagaaacttactttatggtggtggtaataaactctaaataagtaaattggcatagattcagtcctttgtgtttgtagtt

SEQ ID NO: 856656 - DNA, 673 bp, Homo sapiens
ggggaaaaggaagtggaatatacagcatcaataaatgacaggcatgcgaggaagaaggacactggggagtccaaggaggcgatggcaataatggtcaccacaatgagmaggttgcccaccatagtcacattgtatgtgagtaaaaacattacaaataatgctttttgcacatcaggatcctgagagaggcctgggaggacaaattctgtaacattattacttgttcccatttactcttctctaaggctcgtaatagagttgagagctcaggagggcagaaactgtaatgaaatagtgaacaggaacatgaatgcatccataatgtcacaaaacacactttcatcattgtatcctcaatagttatttacacacatgatcaacattgtgtaagtctctattgagttcctcatctcctcaaagattttattttagcctgcaggtgacagcttcagactctaagttttagtgaatattctgtacagaagaagagttaaaagcccaatagccattcatatctttcatacctctttatttaaaatgtatttcttggcatgactgttagctatgttgaagaggcaacagagttttggtcttaagaaacttactttatggtggtggtaataaactctaaataagtaaattggcatagattcagtcctttgtgtttgtagtt

SEQ ID NO: 856657 - DNA, 538 bp, Homo sapiens
tggaaattcgtccctaagggagcttcgcactggccctcgagccaccctatgagctgagcgcccctgacaatctctaaagtggctggctggtcgaactcttgctgtctctccccgacaaatcctttcgcctggagggcgaaagcatcgcctctcatctggcggcctagaattcctaggaccaggtttcccccgcccccacctagtgctccaaaggctagacaccttccctgggggctgtgttgcgaaggggtgggtttgggcggggaagccctcaattaggagctgaaggtcgtagtttttagggacagtgtctcaagggagaccctatctcagctctcatctctacctctgaaaataacagcctggagggcaggagacgctgaagttcagggctaggaacccagtaaaayatttttcaaacattagtgggacagacagggagcaacccttgaggaggaagggagttgacaccactgagctccagttgggccctttgcttcctgccttagctgccaaccttgcccttacccacctccgg

SEQ ID NO: 856658 - DNA, 484 bp, Homo sapiens
tggtgatcagaagcattctatgttgagtgtgaatgtagaaggaaaaacagtccattgtttcctaactcatacaaaggctaaggtgctgtatgtgggcagtctttgctttgcccagtccccatatggacatatttggcttaccacattttagtttaataactccagtcctccccaccagcatggttcaaacttcatttgccatggaattttaacgaattgtataaggtgcaaaccttgctactggctctttagtccaaaaaaatgacataaataacagatgggcatcatgattaggacatcactgctttcgaagactagtggtgattggctggtcagtgccggtgtgttattcagctcatgcagacgtcagacaagtgtataggtgggttgcctcctcatctctcagtgatcaacmgatataacattttatgaaattcaatgattgggctgggcgcagtggctcacacctgcaatcccagcactt

SEQ ID NO: 856659 - DNA, 514 bp, Homo sapiens
ccaacaaaacacctttgtgggttaggtttgacccacaggccgcggtgtgtggtgtggctgtcttcacgggcagctcaggagacagacgatgtatgtgacggcggggaaacacggagttgaactgtgagtgtcacgaaggctggcggcctgtgctctgttcaccacatctagcagtacatctctgttcatctagcagcacagtgccagctagatggtgttcattcatcccgtaattcttcccttaattcctgagaacctgctgtgccaggcactgagattctacaaggcaaggcagacaaagaaacaaggaaacaagcagaagcctaagatgcacagagaacatttggcgagagaatgtgatggtggcaggtaggggtgctgaggcctgaatgagagggtggagccagctgtgcagagtggagaagaycatgaccagcagaaggaacagctgatgccaaggccctgagcaggagtgagcctagtgtgtaccgcgaacccaaatgcaacctggccg

SEQ ID NO: 856660 - DNA, 568 bp, Homo sapiens
tttcagacaggcaagaatataaatcttgtgattaaaacaacaataataacagcaaacttttgtggggaaccattaattcctaagacaggagatctcagacagatgtagtaataagaacatttgccacggagagagaagacattaatatagagtgagaggctctgctgtgttacctgcaaacttctatttttggggtattgtagttgataacccaaggctccttccaatctaacattctctagagatagaatgggcatgatgacagtgatttctggtggggctttccagacaggtttggaagtacagtggttcacattttgatgaggaggcaagtcgggggagtaaagtggaaggagctcaggcttaggaattcaagggacatggatttacatcctgaccctgccacttactagcagtgtgatcttgggaaggttacttgatctatcttycctgaagtttgctatctgtagaaagaggataacagttctaacctcctaaggttgttttgaggattaaaagagatattatagctatttaaagtgcttgtttaacacaatatctgacacat

SEQ ID NO: 856661 - DNA, 569 bp, Homo sapiens
aggctgaggacacaggaaggatccagggaagagggagtatggcctttattgaaagcccactgtgaacctactaggtaccaagcactttttcttatccttccagcaatctttcaagatagaaatatgagtctytttaggcttagttatgctgcagtaataaattaactccagaatcctagtggcttaacatagcggaagtttatttctttctcatgctacgcatccatcaaaggttggtagaaagctttgctctacctagtgacttagcgaccaggctgatgaaatctctcccatattttaggggtacgacctggatgattggccactttggtctctgtagcagaggaggaaatcactggaaggttgaacattgactcttaaatgtgttggtcctgaagtgacacaccacccattggccagaactagccctgtggtcctgcctgatttctgggattccaggaggtgtgggaagacatggatattttaggagcagtaacttcccctgccacagtagatatgatttctattttataggaaaggaattgaggcttagagaaattgtcttgtca

SEQ ID NO: 856662 - DNA, 613 bp, Homo sapiens
tccctttgctattctctttgtacatctggacaggaagggggctgaaaggagttactaacagtgtgtatggttagagaactttgattatctggaagtccctcagctatttggaatgcagcagagagctagccaagcaggaaacgaaaaagagcctctgagccgacaaaacacatttctatttggccgtgcactgcagtcttcagattcttgtgatacgaaatcctctcaacccacactcacaactgatttgtttgtgcttactttatttttttatttttttgagacggagtctcgctctgttgcccaggctggagtgcagtggtacgaacttggctcactgcaacctccacctcccaggttcaagtgattctcctgcctcagcctcccaagtagctgggattataggtgcctgccaccacacccagctaatgtttgtatttttagtatagacagggttttaccatgttggccaggctggtgtcaaactcctgaactcaggtgatcygcctgcctcggcctcccaatgtgctgggattataggcatgagccaccatgccaggccctatgtttactttataccagagtttaataagccaggtgatctgatttccca

SEQ ID NO: 856663 - DNA, 628 bp, Homo sapiens
tgcctaacttgaattttatattcactgaaaatacaattcaaaaacgtaggcaaaataaaaacactttcatcaaacaaaaaacartgaatacaccagcagatctatattttaaaaaatactaaagagagtacttcaggtagaaggaaaatgatactggaaggaagcagaaacatacagaaaggattggagggccaaaaatagggtcaatatatgggtaagtctaagtgaatattggctatgcagtccttagaagaaatttgtagctattatatagcttgtaatacatatatttttaaaaggagaatatctagaaatcaaagtttccatctcaggaagcagtaaaagtaaataaaataaagcccggatatagttgaaggaagaagataattaagatgaaaatcagtaacaaataatatataaatgtaaaattggaattgcttagctattagaaaaggctttaaaatgataaccatctattataaatgatcaagaagagaaatgggacaagttactaatattaggagtaaaaaataaaacatcacttcagatcttaccaaagacaatataaacaactttatgccaattaaagctaaaaatttagttgaaatggagaaagcctagctgcaaa

SEQ ID NO: 856664 - DNA, 643 bp, Homo sapiens
tgaagcattcttctcttaccagctgaacgtccctagaaggtgatagagcagttaaatttcaccattttgcctcttatgagcatgtgttagcccacttacccaactcctgagatctcactgggaagctactgatcatcattttcatgtttttcctatctactggaagactgcctttttctggtgccagctgcatcaatcattattttagagagacagttaacaaccacctgaccatcacctgatggtcgcctgacattcctggtagggagcggggcagccctttcctgccctgttcatgtctgactagttaccaactgaaacattttttttctcttttctagcatcactgtgttgtgtctggttcttaatggggctcttaagccctcccagggctattttaatttattggtagcttcaaattgttttttgttgggggacgaagtctggtattttttattctgtcctcttgctgacatcactcagctcatcaggagtttcatgaagaacattgcatatggcctctactgtgtttttagagacatggcagccactcaagtttttgatgatatcttgatatttacatttggtaaatgtgtcttcaatattataagmgtttgttgaaattttaaaatagttgtatatc

SEQ ID NO: 856665 - DNA, 643 bp, Homo sapiens
tgaagcattcttctcttaccagctgaacgtccctagaaggtgatagagcagttaaatttcaccattttgcctcttatgagcatgtgttagcccacttacccaactcctgagatctcactgggaagctactgatcatcattttcatgtttttcctatctactggaagactgcctttttctggtgccagctgcatcaatcattattttagagagacagttaacaaccacctgaccatcacctgatggtcgcctgacattcctggtagggagcggggcagccctttcctgccctgttcatgtctgactagttaccaactgaaacattttttttctcttttctagcatcactgtgttgtgtctggttcttaatggggctcttaagccctcccagggctattttaatttattggtagcttcaaattgttttttgttgggggacgaagtctggtattttttattctgtcctcttgctgacatcactcagctcatcaggagtttcatgaagaacattgcatatggcctctactgtgtttttagagacatggcagccactcaagtttttgatgatatcttgatatttacatttggtaaatgtgtcttcaatattataagagttwgttgaaattttaaaatagttgtatatc

SEQ ID NO: 856666 - DNA, 631 bp, Homo sapiens
tttcagtcactgtgttaaacacttcaaagaaaatacaaaatagtattcccactaagatgagtttcacagtctagtggacaagacagggctctamactgataatccaagatggtgaatataataaggaacagtcagagggaattgggaggcacagggaagaggtacttctcagagggtggagtggagggaaagactgactggaggaaatcctacctgtctgtggaagttaggctgaagaatagtaattaaagacatacaaaccagtaagtaggctattgtagtaggccaagaaagagatcataaaagggcaaattaaagcagatgtggtaggcatacaatgtagaggtcagatttgggaagtatttaggagataaataggcagaatctaataaattattgaatgaggaggatgaagaagagggaggagaagaagacagaaagatgacttcttgtttgtatcttgaatgaatgaatggatagcggtggtatcaccttgggtgatagcctggatagcttggaaagatttttcttggatactatgggagaagtacagttttataatacacagaaaacactggattccattttggacatgttgagtttgaggtcccaggtgtctagctggtagttg

SEQ ID NO: 856667 - DNA, 328 bp, Homo sapiens
tgtgttgcaattatctctttgagaactatttaatgttccacaattccactatcttcatacttttaccctttaaagcmattcctctagtcagtgtgatatgcccccactgaaagattccatagctttgacataactaccattaaatggaaatgactgatttttcataataatctatatatgtgagatattatatataaatgtacattttattcttctatagttagcttaccctgatcctttgaatgaagcaccagataagatctacactatctactgtagccttgtagtatagtttgaagtcaggtagcgtgatgcctccagctttgtt

SEQ ID NO: 856668 - DNA, 328 bp, Homo sapiens
tgtgttgcaattatctctttgagaactatttaatgttccacaattccactatcttcatacttttaccctttaaagccattcctctagtcagtgtgatatgcccccactgaaagattccatagctttgacataactaccattaaatggaaatgactgatttttcataataatctatatatgtgagatattatatataaatgtacattttattcttctatagttagcttaccctgatcctttgaatgaagcacmagataagatctacactatctactgtagccttgtagtatagtttgaagtcaggtagcgtgatgcctccagctttgtt

SEQ ID NO: 856669 - DNA, 652 bp, Homo sapiens
aaatgaatggatgcctttaaaaacagtacttccaattaactctgctttttttctctctctctcttttttctttttttgacaaagycttgctctgtcgaccaggctggagtacagtggtgccatctcggctcactccaactctgcctcccgggctcaagctattctcctgcctcagcctccctagtacatggcctgtgccaccatgcctggctaattttctgtgttttcagtagagacggggtttcaccatgttggccaggctggtctcgaactcctgacctcatgtgatccacccatctcagcctcccaaattgctgggattacaggcgtgagccaccgtgccgggcctaactctgctttttgataagctgttctgatgcaacttatggcattaatagcattttccgagaagatagaaaaactttggaagtcatggtcccttcaatcccatagtctgcttgctttattaactttctcttcagtttactccctcctactcttctttatcatccaacaattttgggtgttcctaaatcttgcaacaagctttctttctattttttcctcctagctcattgggcttgggatattttattggcattggagctgaagaaatctgtgaaaaaaaagtctgtatatacatatatatgtc

SEQ ID NO: 856670 - DNA, 582 bp, Homo sapiens
atttttcttaatatattgtatttgtttaaaatttcttattcttttcaatgtctgtattgtactttgttrtataataacaatttatctaatcctcctgttgatagatgtttattctgtttttttatcctaaacagtgctacactcaattctctctcctttctctgtctcttgtctgtctctccctctgtgtgtgtgtgtgtttctatttgtaaacctattttaataggtttaacacccagaaaaagaatgtggtggttcaaataatataaacatttaaatttttaataaatattgcttatattccaaaagggtgagccactaacttctcaacaggtgtctgtttttgctttttcatcttttttttgtttttttgagacagcatttttctctgtcaccctggctggagttctgtggcatgatcatagctcattgcagcctccaactcctgggctcaagcaatcctcccacctcagcctcctgagtagctgggactacaggggtacaccaccatgctcagctgccttttcttggttttagttttttgtagagacaaggtcttgctgtgttgcccaggctggtctc

SEQ ID NO: 856671 - DNA, 546 bp, Homo sapiens
cttgttttatcaccaaaaggcattttaattttgcacactttagaattcttacaatgtgtaattgactgctagttgctgaacaaaggacagataaagtgtttcctgcacctgagcagcctaaaggtgagtgtaatacagatgcacaagtgactggttgataatggaatgagaccccttataagaaagacatacagagcacggcagaggagcaagaacaacacagaggcaatgacatttgagctaggcctcttatatctgtagatgaacatttgatggtaggtagtagggaagatggaactaagaatatttgagctacttaatatatgccaggcagcatgctgagtgcttgtgttcatttaattctcaagacagccataagcggcaatacaggtattgggcctattattctaaatcccattttataagagagttaggattagattcagttccatctttctacaaaacctggcactgtcattccaggcaaagggagtacaatccatttttctcttaagaggttgawtttgccaatgagacagaatgaat

SEQ ID NO: 856672 - DNA, 607 bp, Homo sapiens
aaactaggttatgaaaatttaacaaaatctcagaaaagacagcagaacccagtggtcaaataagaactgaacccaactctagagatgttttaccttcagactatggaaaagtaaaattgtaataccctagctctcaaattttgcctaggagtaacaaaagaaacaatgtcaaagtggacaaagagaatttactcatactacatttcaacaaagagatgacatgaagacaagtgaccacttcaagcacaagcaagataatgagacacaaaatggcaactgagcgcatatcacagcaaaaagaataaaggagaggaacacataataagtaaaagacagaggcagaactcaatttgaaagaaaacacaactgaagaaaaagaaaacactccacaaaactcaaaagtctagaaattagtaagtacttgaatataaaaaccagcgctcaaagacaaatgataaactgcagaatgagatgaaaatgragactgtagagctaaagaaacaaactgaggagcaaaccaccaccaccacagacccaaataaatgaatcagaaagaatggcccaaaattattatacctaacctagtgctttggtttgaatgtgctcc

SEQ ID NO: 856673 - DNA, 636 bp, Homo sapiens
ttggattgatttgagataagtcatatcctttctaattatttaactacaatttcctcatctaagtggcataacatgtgagttcaagagggtaagaagaatgggaagacattctcacraaaaggaaatcctcttctcagaggcatcagagggagggtgcggcagagaccaaagaacacttgccactgaagtgactccagcacagacaaagaaaatagtgaaaggggctcttcatattagagggtgaacatagactatgttttaaaagtcaaggagtggcagatatactcgactgtgagggaatctagtcactgtgaagacgtgacaagcctagctccactgaggcctgggaaacaagggtgagttaataggttaactcaggaaagcagcatgtgaccatctgtgattggacaggaaattgcctaagacgtcaccctggaagagtctcatacactgtcccatctggcagagcctgcacatcctgcaatgtagaagttttcaaacttttataaacctctgtatcctttacttaaacaaaatcccttttggaaagcaaatttgaaaaccaggtgaaaacagaagttctctgatggaagttggaaatagagccttggagtcccccacaacccgccacatcat

SEQ ID NO: 856674 - DNA, 549 bp, Homo sapiens
acataatatttcaaactcacaaaaagtgatcatttgaaatttttgctacctcatgatactaagtcaatttgggatttttttaaaaaaagaaagaaraagacatgctgaatctgattactgaccttacttcttaggtcagagatcagaaaatacagactacggccaaatcctgcctgacccctgtctgtataaataaagttttattgaaacagggccacatttatttgtttctatatcataaatggctgctttcactctacaatggcaagctgagtaattgcaacatggatcatttggcttacaaagcctaaaatatttgctatctggttctttacagatactgctttagaatatctttattttaatattcccaaatttagtgatgtttgaaaagagcctatttttccatttttggaaattcatttagaaattataatttctataattagaaattagcctatttttccattttttggaaattcatttagaaattataatttctataattagaaattagtctattgagaaaagaacagacaccttccctct

SEQ ID NO: 856675 - DNA, 510 bp, Homo sapiens
caataatgtaatttttttcagaatttcatgaagttctgtcagggttctcttccgtagtattgacagtcctttccatagagtgcagtgagccttaaaattcttattatgaccccttgatctagggggcaaattagagagatgtgtttgggggtaagtagactacttgatctcagggtttctgggtagccagaggtgtcttccaataccaaaagaattttaaaaggcaatcccttcctggcaaggtatttcatgactgcaggaacaaagtatgggtggaatcaatctagaacataggtttctgttgtccaggccttcttgttgtacaaacaaaagactgaaagctggtgtttatcttttccattcaaggcttgggggttarcagcttcatagataagggcagtccttatcataaacccaagtgcatttgcacaaaacagtagaattcgcctatcccttcctgccttaaatctcagtgcttacatctcttccttactcataaataccctttgt

SEQ ID NO: 856676 - DNA, 655 bp, Homo sapiens
atcttgatacaagcatacaataagtaatgatcaaatcagwgtagttaggatatctatcacctcaaacatttatcatttctttgagtttggaacatttcaaatccactctagttattttgaaatatacaataaattattgttaactatagttgccctattgtgctatgtaatactagatcttattccttctatctaactgtatttttgtacccattgaaccaacccctcagtattgtctgccctcctcactacccttctagtttctggtaaccatcattctattctctgtctccatgagatcaatttttttttagctcccacatatgagttagatcatgcaatatgtgtctttctgtgcctggcttatttcacttaatataatgacatttagttccattcattttgctacaaatgataggatttctttcttttttatgctgagtaataatccatcctgtatatacaccataatatttgttgatggaagttgatcatcaggttgatttggtatcttggctattgtgaatattgctgtggtaaatatcagagtgcacatatctctttggaatactgatttccttattttgaggtagaaatgcaaaatgatgcaaccacttttcacttatcttaggcattttcttaaaaagttaaactt

SEQ ID NO: 856677 - DNA, 462 bp, Homo sapiens
ccaaatgtccatctacaagtaaaggaataaactgtgctatagccattcaagggaatactactcagcaaaagaaagaaaaactattgacaaagatgccaacatggacagatctcaaaataatcatgctgacagcagaaaccaagatgaatggttgcctagggattggatgaagtgggaaggaagagttgggagggtgggaatataaagagacgagaggaagcttttttgagataatgggtatgttaattattttgattgtagaaatcatttcacatatgtaaaacttccaattttatgttttaaataacacaaaaactcatttttttaaaaaatgtaattcaaaaatacaatctatcgataattcaatctatctattgtatttttaaaaatacaatctatcggtaattcagcaaacctaaaytgtcatttgttaaaaggagcattactttaggtatgaggatc

SEQ ID NO: 856678 - DNA, 504 bp, Homo sapiens
ttaaaaaacaaaaagtaggaagaggccatggagctaattktattaattaaagaagacaaaaattcttcaattttgtcaggcttaagtatttcacaaaacctcacatgcttgcatcaaaacagacaatggctattttgctcaaaaggcagtacactggcagcttgactcagattcattttatttcgtagtcacatcaaagctctatggtgcaaaaaagaaaacttttttttaaaatctaaagacagaataatttcaaatctttaaaaaatgactcagatgaatataaacccagtgtgctatttttggaagagttacttacagcatcttttttagtccacatgtgtttcccttttgtacagccctcttgggctaagaatgtattaaaatcagaagtttttcttctacaacagctccagtatttcatcctttaaattatcacagaaaaacttcagaaataaaatctcacaaccaattaaatccacaagtattttagggataaatctg

SEQ ID NO: 856679 - DNA, 515 bp, Homo sapiens
gctgcaagttgctgacaggactgggacttgaactcaggtcttaggatccctaaccccacatttctttatttatactaccatgaggacatggccartgtggatgggaggaacacatggggaagagaggagtagtgtcaggtctcatttgcccaagacaaggggctcttcaggctcctgccttccccttctaccagtccagtggcagatcagccctcctaatttacttcacatttgcatatatcacttccagatgaggaacctgagtctcagagagagtgaagaacttgcctagcatctgtggtaggctgaaaagtggccccccaaaagatatctacatcctagtctctacaacctgtggatgttagcttacatggcaaaaaaggttgagggagctctgcagatgtgattatgctgaggatcttgagatgggagcttaccctggatgatatggacaggctctgaatgccattacatgttcataagagggaagcagagagagattctacgagacacag

SEQ ID NO: 856680 - DNA, 504 bp, Homo sapiens
agctccaagattcattaaacaattactactagacccaggaaataagataaatagcaacacaatagtagtagaggactttaacactctactgacagcaccagacagaccattgagatggaaagtcaacagcaaagaaacaatggacttaaactgcaatctggaacgagtcaacataacagatttttaatcaacattttacccaagaactgcagaatatacattcttctcctcagcacatgaaacattacccaagatagagcatatgataggccccaaaacaagtctcagtaagtttaaaagaattaaaattatatcaactatcttctcagaacacagtggtacaaaactagaaatcagttccacaaggaacccttaaaactatacaaatacatggaaattaaataatctgctcctgaatgatttttggattcacaatgaaatcaagatggaaattaaaaaattctttacaawgaatgataatcatgacacaagttatcaaaacct

SEQ ID NO: 856681 - DNA, 473 bp, Homo sapiens
caaaaagcttaaccaccacaatcaactaggcttcatccccaggatgcaaggtttggttcatcatactcaaatcaataaatgtgattcatcacataaacagaactaaagacaaaaaccatattatctcaataaatgcagaaaaggcttttgataatttcaacatccattcatattaaagactctccataagttaggtattaagggaacatacctcaaaataataagagccatctatgacaaatccacagctgacattatactaaatgggcaaaagctggaagcattcttcttgaaaaccagcacaagatagggataccctctcttaacactcctattcaaaatagtgttggaagttctggccaggaaaataagrcaagagaaagaaataaagggcgttcaaataggaagaaaagaagtctaactatccttatttgcagatgacatggtcctatatctagaaaaccccataggtt

SEQ ID NO: 856682 - DNA, 594 bp, Homo sapiens
cacccattatacaatatacgcatacctacacaataataaagatttgctttggcacctgagacrtctttctgtcctacttgtagtcattgctagaatacttatttgtaaccagtttcaatagtcagggtcctggcagaaaaatagatgacacactcaaagggattattgctaagaattcatgaaaagtctattgaaagaggcaagaacatgattagggatccaacaaggggtgaagaaacacgcgggactgacagcaacaggaagccatcaccttgactagcctgaagggtaaggaaaaggtgttgtgcagtttccacaacccagtgagagctgtagctatggaaggagatggcctgagctgacacctggcctgaaaggaaataaacagcaaataaatactatgatttctgtttcaacactttgctctccagctaatgccctcatttcccaaatccaaacaaaaggaaaagagcagaggaagccaagtgatatattccgaaaaagtcaacctccctaccaggtagaaaagtgcaggaaaggacaaagaagagctctcaagagcctaatagatgagaagatagacaaagcatggct

SEQ ID NO: 856683 - DNA, 587 bp, Homo sapiens
cacccattatacaatatacgcatacctacacaataataaagatttgctttggcacctgagacatctttctgtcctacttgtagtcattgctagaatacttatttgtaaccagtttcaatagtcagggtcctggcagaaaaatagatgacacactcaaagggattattgctaagaattcatgaaaagtctattgaaagaggcaagaacatgattagggatccaacaaggggtgaagaaacacgcgggactgacagcaacaggaagccatcaccttgactagcctgaagggtaaggaaaaggtgttgtgcagtttccacaacccagtgagagctgtagctatggaaggagatggcctgagctgacacctggcctgaaaggaaataaacagcaaataaatactatgatttctgtttcaacactttgctctccagctaatgccctcatttcccaaatccaaacaaaaggaaaagagcagaggaagccaagtgatatattccgaaaaagtcaacctccctaccaggtagaaaastgcaggaaaggacaaagaagagctctcaagagcctaatagatgagaagatagacaaag

SEQ ID NO: 856684 - DNA, 594 bp, Homo sapiens
actccttaggataaatcagtgtctgatgtttttgctcttgttcttatgaaaaaaaaaaaaaaagcctgggaaaagatgcttcccaatcgtgtttttagtatgatttgaaaaactctggaatacattattaaatctgccacaatcttgctataattctaagtaattttcttttcctattcttacagataaccagttatgaacaccttcttatatgattagattcacattttagaaattaagagggcattcgtggtcatctgcttcaagttctcattccaagcagaatttactctacagggtagagtttacatctgacagatttggccttgacttattaataacacctcctctctgatagacatttgttgtttcctgcagagcacacatcctccctctttttggcaagagcgctcacaattttcttctagagtcctcctcgacttcatctcaccccgtgtggctcataggatggactcctgttccaggggttgcataaatagcccaggactggcttgccagcatatcaaatcacccragccaagtaactaatttggggatagatatgcagcacaagttactccaagaaaactggga

SEQ ID NO: 856685 - DNA, 535 bp, Homo sapiens
tgtgatgggcagagttttctgatgtcctactatgggcacatattatgtatgggcaacataattttattttgttattccactagaattatgaggttgcttcttttttgcarcataatctagtcttttctgaatggtatctccaattccattggcccaccggttgagaatccctggttttacctcagtaaatgatttcttaatagatttttagagagaaagaaatggatctatatacttaaaattctttagaggactaatctaaacttttccatgcaagtgaaatcaatgtgaactagtttgcagagggatttttaaatgatactgagatatcatgtatcagtcatttcttccctcatttattcaagaaatatttattgagtatacattatgccaggcactgctctaggcactaagtatacactagtgaaaaaaaatgtttactacaatattagagagtgaaaggtgttaagaagaaatgaatatgaattagaaaatggaaatttatggaaaggggataatttggagaatattaaac

SEQ ID NO: 856686 - DNA, 549 bp, Homo sapiens
tcttcagaagcatgtgtgatgggcagagttttctgatgtcctactatgggcacatattatgtatgggcaacataattttattttgttattccactagaattatgaggttgcttcttttttgcaacayaatctagtcttttctgaatggtatctccaattccattggcccaccggttgagaatccctggttttacctcagtaaatgatttcttaatagatttttagagagaaagaaatggatctatatacttaaaattctttagaggactaatctaaacttttccatgcaagtgaaatcaatgtgaactagtttgcagagggatttttaaatgatactgagatatcatgtatcagtcatttcttccctcatttattcaagaaatatttattgagtatacattatgccaggcactgctctaggcactaagtatacactagtgaaaaaaaatgtttactacaatattagagagtgaaaggtgttaagaagaaatgaatatgaattagaaaatggaaatttatggaaaggggataatttggagaatattaaac

SEQ ID NO: 856687 - DNA, 535 bp, Homo sapiens
tgtgatgggcagagttttctgatgtcctactatgggcacatattatgtatgggcaacataattttattttgttattccactagaattatgaggttgcttcttttttgcaacataatctagtctyttctgaatggtatctccaattccattggcccaccggttgagaatccctggttttacctcagtaaatgatttcttaatagatttttagagagaaagaaatggatctatatacttaaaattctttagaggactaatctaaacttttccatgcaagtgaaatcaatgtgaactagtttgcagagggatttttaaatgatactgagatatcatgtatcagtcatttcttccctcatttattcaagaaatatttattgagtatacattatgccaggcactgctctaggcactaagtatacactagtgaaaaaaaatgtttactacaatattagagagtgaaaggtgttaagaagaaatgaatatgaattagaaaatggaaatttatggaaaggggataatttggagaatattaaac

SEQ ID NO: 856688 - DNA, 577 bp, Homo sapiens
atattcttttcatggttgtcctataaagttatttgacattttgacaccaaactattatttttatcttttctggaccctcactstttctcattcataaagtgtaatgtttttccaagtggacactcggagatatccaaacctttcaaagggcatgtgagatccaaagtattttagaatagtactaaaatattatttgttttttttattgtgttaacgtttgtactgatgatgcaaaaacaatggtgagtaaaaatatgggtaccttagtacaagtcaaggaaacggcacccaaccatactaatagttattgttttcactaccatgtttttgatgaagtaataaaaattactcaacttttaaatctctactcttacttacataattttcgtttaatattctgtatgatgaaatggtaagtacacatgaaatacttctgttgtataccaaagtttgaggactatcttaaggagaagcaattggcaagtctattctgtgcaagctaaactagctgctttattcagggaacaaaatttttacttgaaagaacagacagaaaaactatagttatttaaactta

SEQ ID NO: 856689 - DNA, 656 bp, Homo sapiens
taggaaaattcattatcttcttcctcacccatgcagatacatataggggcacacagacacaatttatagttgagaaaaattagggttagaayttaagccacttgactgtgttcatggaaacagtatgagttaacaccctgggcttcctgataactagttcagggttcatttcattgcattagatgagaaagttatagctgttctctcttctggtttaagtggattatgtaactattacatcttctcatcccatccaccacatcagtgcaagaaaattagggccatgcacagaacagcccatgtgaatcacagctctgtaactgcagagaaaatattgtgctgatcagtgggaagcagcaatttttccacaatcgtctgtccatgcttagatagtatatcacattaaaagtgaaagccttgatctacagaaaagtagctgcccaatttctaatttgtgacagtcgaacaagaaaaagctgtgacatgctcattcattaaaagctctcattacatattaatcatgccaggaaactgcacaaaagttgtgaagatatcagtatagttatccatttgtaatttcagagagaattaaaggaaaacggagtagcaaaactacagtttagtctcttctatagaaggaaagtatctgaagttct

SEQ ID NO: 856690 - DNA, 498 bp, Homo sapiens
aaggaagctaagaatatatttattgccaaggaagccctcagrtggtgaaagactgagtttaaatcaatgattaattactatcagtttttcatagactttctataatgtatcaattaccctagcaacagttctatgactgtttaatccttacagttactattcttcagtatttctcaatagcctgagatattacacctgctagtgcaattcctttcatcattgccacactgaatctcatcatccatgaatggtttaaaaattccttttcctaaatgccattcagctccaaagtgtcattctaggatctgccttcctgctactactttggacactaaatgtcacattttgggttcaaagggaaacagactcttagactctgagatttgcatgcagcaggtttattagagagtgattagagggttatctctggaataaatatgtgagtgagtgaggaaagcaggactgggcagagggaaaggttgatctacaagctttcat

SEQ ID NO: 856691 - DNA, 551 bp, Homo sapiens
ttgaaaaaaattttaaacaataccaagtacagaatcaaaagtcagaagaatgaagaaaatgcaaatgytatgctcaccattattctttctgtgtgctttttagttaaaagaaaggtagatatatagcctttgagaattaaaatttaatatctcagaaaaatactgaaaataacagtaaaattataatttactggcatgatttatattctaccacccccagttagtactgtacaaataactatttgtccagttgtaaaatcagaattacatattccttacagtgttgtgggagttgaattagataatgtatataagcatctagcatataacaatcatatcacaatgaatgaaagcttttgtgaagctatgggatgcttacaggaaactgctaatataatatttctaacaataaaactgaattacaggaattgcattaataaacttacttttttttttaagttgcctgtagtaaaagtctctgtttgggtatagaatcccatgagttttaacactcacagattcatgtaaccaataccactaacataaggcag

SEQ ID NO: 856692 - DNA, 618 bp, Homo sapiens
tctagagtcagagacttttattttgttcatttgctcatctcagtgtctggcatttagtaggagactcagaaatgyctttcaaaatgagctttgcagagagactgaaagagactcaaagtcaggtatcactaagaccatcctccaggtgaaccaatctaataagaggtcctaccccgtttaataaagtaaccttgtccaggcatggtggctcatgcatgtaatcccaacactttgggaggccgaggcagacagattacttgaggtcaggaattccagaccagcctgacaaacctggcgaaaccccgtctctactaaaaatacaaaaattagccaggtgtaatggtgggcacccataattccagctactcgggaggctgacacgagaatcacttgaacccgggaggcagaggctgcagtgagctgaaattgcaccactgcactccagtctgggtgacagagcaagactccgtctcaaaataagtaaatgaataaatgaatgaattaatgaataaataaataataaagtaacctcttgtccacacgggcatatcttttgctctttggcaggctcctgctttccgacccctcatcaatatggccctatcgttgggaacatgt

SEQ ID NO: 856693 - DNA, 543 bp, Homo sapiens
aatatacacccatgaaaccatcagcacaaccaakgccataaatatatccatcatttgcaaaagtttcttccagctttcttgtttattattattactttttgtgacagaacaattaacataagatctaccctctttgcaagtgtttaaatgtacaatacaacattaactacaggcactatatttgtacagtaaatacctaggacttatttatcttgtattttagagcaggctaattgtgaggaaggttggcttcaagtggagcagaaactgatctactacaaatgaaaatgcgcagttttctatatgatacccaataaagtagatgatatacttaaggatgtataagcagaaatgctgaatgaaagggtaataaaacaattttgtgcaagattactatgagtttgtatgtgttgacaagggaggtgtgttgatgtgcaagagaaagtaattgttctctctacctatatttaccagggcattgtgatgccaaataacattcatgtcaattgtcataagcagcacagaattttgaggtaattctat

SEQ ID NO: 856694 - DNA, 670 bp, Homo sapiens
ggtcacgtaacttgcccacattcacccaacgaataaatgaattctaagttgaatccaagtcagtctgaccacagaatttcacatcctttgctactccgggatsccatggtaggcaccgtgggtgccccaaaattaaaaaatgatgtggatcatcttcccgtaaggattactatgtcataagctcaaagactgtaacagcaggttatctaggttctctactaacagacaagaaatcaaggccaatgagtgtggtgatttacccaaggtcacacagcacctctatggctaagacacatttagaatgccccaccctgtgttgactttcattccaattctcttttcactcactacacagagctgaaaacccccacttactgagtaaactacaagatccacgtaacactttattattatcaaagaaatatgaaaccatatggaaatgattttgaaatatgcccatttatctccttagacataatcctttttgataactttcaaactgacttaaattgttgaggctacatatggatcttggtctcataaaaaataagcactaaaatttagttgagttgaggttgagtttagagttagtgctggtcatgccaccctaagcttccaagtatcattcagtcccatcttgtttcctgctttggggttatttaacaggtca

SEQ ID NO: 856695 - DNA, 670 bp, Homo sapiens
ggtcacgtaacttgcccacattcacccaacgaataaatgaattctaagttgaatccaagtcagtctgaccacagaatttcacatcctttgctactccgggatcccatggtaggcaccgtgggtgccccaaaattaaaaaatgatgtggatcatcttcccgtaaggattactatgtcataagctcaaagactgtaacagcaggttatctaggttctctactaacagacaagaaatcaaggccaatgagtgtggtgatttacccaaggtcacacagcacctctatggctaagacacatttagaatgccccaccctgtgttgactttcattccaattctcttttcactcactacacagagctgaaaacccccacttactgagtaaactacaagatccacgtaacactttattattatcaaagaaatatgaaaccatatggaaatgattttgaaatatgcccatttatctccttagacataatcctttttgataactttcaaactgacttaaattgttgaggctacatatggatcttggtctcataaaaaataagcactaaaattwagttgagttgaggttgagtttagagttagtgctggtcatgccaccctaagcttccaagtatcattcagtcccatcttgtttcctgctttggggttatttaacaggtca

SEQ ID NO: 856696 - DNA, 672 bp, Homo sapiens
atgtgtgtgtagttttatattttatatataggtgtgtgtgtgcatatatatatatatatakagagagagagagagagagagagtgcaatacatcatgaccaagtggactttatcccatgaatacaaagttagttttacatttaaaatcaaggttaacaaaccaaattatgaacaagccaaaacagaaaagccatatgtcatccaaataaacaaagaaagatcgtttgacaaaattcaacagccattcctgatcattaatattcagcaaaccaagaattcaaggcaccttttccagcccgatcaaggccatccatgccctagatgggcaccctgttatcccagaggtgccatcatgcttatggtaaaggctgctttccccttccgatcaggaatgaggctaggacatccactctcacagtttgtattcaacattgctcctagtcagtgagataaggtgagcaaaataagtaaaaggcatacacattggaaaggaagacacgaaactctctttatttgcagatgacataattgtctatgtagaaaatcctaaggaatcaacaaaaatactactggaactaataaatgagtttagcaaggtcaatatacaaacacctattgtatttctgtatacaagtgactaccagaaattgaacattttaacacgataccgtt

SEQ ID NO: 856697 - DNA, 596 bp, Homo sapiens
ttgtattcaacattgctcctagtcagtgagataaggtgagcaaaataagtaaaaggcatacacattggaaaggaagacacgaaactctctttatttgcagatgacataattgtctatgtagaaaatcctaaggaatcaacaaaaatactactggaactaataaatgagtttagcaaggtcaatatacaaacacctattgtatttctgtatacaagtgactaccagaaattgaacattttaacacgataccgtttaataacagcatggaaaaaatgtgacacccagggaaaaattcaataaaagaaagacaagacccatgaactggaaattacagaactgagaggaattaaagggctaaatacatagacacatcttgttcatggattgaaagactggatattatcaagatgtcaattctccacaacgtagtgtttagattcaatgcaatcccagtcaaaatgccagcagatttgctttagataaattgacaagctcaccctaacrtttatatgaaaatgcaaagggcctaaattatccaacacaattttggaaaaggactaagttggagaacttttttttaatataatacaatcaaa

SEQ ID NO: 856698 - DNA, 620 bp, Homo sapiens
tgtatcaatctctattttgaactgtaacagcaagaatatcatgcatatyaacacagagatccttcatgtgcctgagatattctaataagctcttataacatggtatgttatacactatatctcaaacaactcttactattgctataaaattttcaacatggaactttgattaagataaagtgaagagataataatgtttctaaatcttaggaaattttttcctgttactgaggtgggggacttttcaaaaatgtatttctgtcttttgctggaaatatttatttcagtttcctacagcattgctatagcattgctgtaggaaattaacagtaattggtgactggcagttcaactgacagaaacacattattttgcggggaggcggaggaaaagcattcgcaaactcaatatgaatccatttcggaaagtagagttgtttagagaaatacaaatatcttcactcagtttttgcccacttactgaaaacacagtgtgaaactaaaattgaaaaagcaatgttcttctgaacatctttccattaaatattgcatcatataaaaataggattttatggttattattacacatattttcttccctttcatatgcagaatctaaaa

SEQ ID NO: 856699 - DNA, 619 bp, Homo sapiens
ttatttctgcctgatctttattatttcttttcttctactaagtttgcatttggcttgctcttcttttcctaattctttaagatgcattgttaggttgtttatttgaagtttttctastcttttgatgtagatgcttatagcaaaaactttcctctaagtactgattttactatatcccatcatttttggtccattgtttccttcatcatttgttttaagaatttttaaaatttctctcttaatttcttcattgacctactaatcattaaggagtatactttttttttttttttttgagatagagtctcactctgttgcccaggctggagtgcagtggtgcgatctcagctcactgcaacctcagcctcccacgttcaagtgattcttctgcctcaacgtcccatgtagcttggattacaggaatgtgccaccatgcctggctaatttaggagcatacttttaatttccatgtatttgtatagttttcaaaattcctcttgttactgatttttagttttattccactctggtcagataagatacttgatataatttcaatttttaaaagtttaacactagttttgtggcctaacatgtagtctatccttgataataatac

SEQ ID NO: 856700 - DNA, 607 bp, Homo sapiens
attaagcatttcactgttcaccttaagggcgtgctacatagactattttttttttcctagtctggcatgctctggggcataaaatgatttggttgccgaagttttgacattttaaaatatttcaatgattaaatgtttaattaagtcagtggaccctgaggtcacttggcaaagggtagtttttttgttttgttttgttttgattttgattttggatcaaattcattaaaacacacacacatacacacccaatttgagaaaagcattggtaaatctgttgggaaaaaagctttcctaaaaatattcatttactaccgtttcttgagttaatcagagttacaagaaagcggtacttctgcatagaattatctggaagtgtttcactggaaaaaggttcattatcctaataaatgatggagtaaataacaaataacaggcctggtacaggcctggctcacacctgtaatcccaggactttgggaggcygaggtgggcagaccacttgaggctagaagctcgagaccagcctggccaacatggtaaaaccccatctctactaaaaatacaaaagttagccgggcgtggtgacatatgcttgtaatcccag

SEQ ID NO: 856701 - DNA, 459 bp, Homo sapiens
cagtgatccttcctatctctaaataagcttagatcatagtctctagttcagtttagtacaacasccatttattgagtatctatgacgtgtcaggcactgttctgtgtgctagggttgcaaaatgggtaaaacatcgccagtccttaaagagccagggtaattgactccgatttacattgggctttagttgttaggtgtcagtgcattgtattttctcaatgataataaacattttgttggtaacagaggctgaatttaatttttttgtatctttccagaggtgattctagtaaattttcagtttatctcactttgtcacttgaaagtgagttaacatttcttaaacactctctttgtgtcgaggcatttttaaaaaaatgtcttatttctagtggccctaggaacttctggaaaagtgtcagtttgtactacagtagttattctggaagaaagagaatg

SEQ ID NO: 856702 - DNA, 658 bp, Homo sapiens
gacctcgtgatccacccgcctcggcctcccaaagtgctgggattacaggcgtgacatcagctttcttaatatggaaaaaacaaaccaarttttctattttttgtatgtcaggaaaaacctggagaaagaataatcacagtataaaattgaacagctaattgagtttttgaaatggtttattttaatggtgatttagcattctaagacacagacccttagcttttgtttagcttttgtctttgaatgtagcttctaaattgaagtgctgtaatagccacaaagaaaaaagttattagttaatatattctcatagactgtaactgatgatgatgcctatgaagcctataagaaaaattcccttaatctcaatgatctctacagccaccctattcagaatcaattgtttccctaatttgccaatgggaatagtccagctcagaaatgttaagaagacatggacaggtcaccacaactgtgtcatagtggctgggagaaaggggtcagggggtgaagaatactaacaaatgtttgagaacttactaatatacctacattattgaccaacattcattctactctgggacatgaccaccactgctgctctatgacatgggtgctattattctatgtcctaatgatacaatagactccaaatgga

SEQ ID NO: 856703 - DNA, 646 bp, Homo sapiens
agagttaaatattttgtcaacaattgtctaaaatgttaattgttagcttaagaaagtcaaacaagttaaatcattgccagagtaccctggttatttttaactgataataatcaagtttccmattgacaattaaaaagttgagagctgtaagtgggaggccagatctgggtatctatggctgtctacatgataaatgtcctcctaggacagtgataggagtgtttatattatttatatatgcagccatcatttccttaaaaactgacctattttcgttctgttttctagaacaaagtaaaaaaaaaggagaattcttatctatctaggaccttcctaccacttatttcaagtaaatataattataagatctcacaaaggcaaaagggttcaagtggagagaggagttagtataatactttacaaaaaattgataaaaacctttctttgacatcaaggtgatgttatcatgtaaaccaagatatcttgcttgtttaggacaatgtttgtttatagaaggcatctgctttctttgaaataatattggtaggtgatgttcatcaaatgtttctaaatcgtaatgtttaatcacttatggcttctgtattgtaaacatttttaaataccaatatgtttaaatatgggcttt

SEQ ID NO: 856704 - DNA, 532 bp, Homo sapiens
gttaaaaaatatgtcaccaatcttcttgttctaatccttaaacctgtgattcacctgactagtcacttttgccttgactccatgctcaccaaragttctgatgcctctaactaaactcaaagagctcacctgaaggtacctgaggacgtaggtgtctagttatgctagatagggatattttattttgaaaactaataaattagaatcaatctgatgaatccgaggaagatgagtttgcctctggctgatgtagtaacatgtggtatcctgccattcacatcactgtgcttgtgagtctgaggggcaaatttagatccccccaagatgattcctccctatgggtacttgtggtcttccctaagcatcacgtctttggctcctccatgagccacgtgccttttcttcaaacggctgcacagattatgtgcgtaacactatgctttaaaccactagagagtgatccaagagaacatataattaagtgagaaattgtttggcataaactaaaagtgctacagaaattccgagagaa

SEQ ID NO: 856705 - DNA, 632 bp, Homo sapiens
aacataaatctttcacatttaagtggaacaatggtgacacaaagacaatcctgaaaaatgactcttcaatactttgaaattctcataaacaaccttttctcaagaaggctataaaaagagtcagttttgctctgagtcagagcaattttagctaattaatagcaccctctggacctatgaaaaattgacattctccatgacagaccaagtttgggatgtggctcataaagaagctcccaacgagacttccatgcttattttctcctttagatccagagcaaacatcagcaaactatgactcaagggccaaatctggcctgcaggctgtttttgtaaataaagttttattggaacatagacacactcttttgtttatgtattgtctatggctgcttttgggctccaaggacagagctgagtagttgagtagctgccaatagtcatatggtccacaaagcctaaaatatgtaccctctggctcttaatagaacaagtttgctgacccctgatctagaggaatgatttccctcttctattattcttttgaactgaaagtcagkagaccttgattttagactcactccattctgccagtaaacttctatgtgactttgggccagtaattactttcc

SEQ ID NO: 856706 - DNA, 518 bp, Homo sapiens
gtactcactttaaaatgttagattttaaaacagaaaggagagtctatcaaatgaagccgcttgagagtttttataaaacccaaagagaatatatattamcatataacattgttatatgtcatcaatctggagggttgataataacattgatatctggatgttatcaaccctacagataacattcagagcttggttactgtcttcttagtaaatatctatggtatactgagctctctgcctttaccacatattatatagtttggctggcagctttgttttcaataagtgcttttctttgcaagaaaaagatgctagtgagtgccatctatcatttctgctagatcatcttccaaaatcccaaagaacagcactgtctgcttttctctttctgacagagaaacctctgaactggatgctaatattttgcagaccaagcatgcgccaaaatggattaaaaatctaagctggcatatctgcatcagtctaagcagtttcaaaggaagaactgcaatgttaag

SEQ ID NO: 856707 - DNA, 518 bp, Homo sapiens
gtactcactttaaaatgttagattttaaaacagaaaggagagtctatcaaatgaagccgcttgagagtttttataaaacccaaagagaatatatattaccatataacattgttatatgtcatcaatctggagggttgataataacattgatatctggatgttatcaaccctacagataacattcagagcttggttactgtcttcttagtaaatatctatggtatactgagctctctgcctttaccacatattatatagtttggctggcagctttgttttcaataagtgcttttctttgcaagaaaaagatgctagtgagtgccatctatcatttctgctagatcatcttccaaaatcccaaagaacagcactgtctgcttttctctttctgacagagaaacctctgaactggatgctaatattttgcagaccaagcatgmgccaaaatggattaaaaatctaagctggcatatctgcatcagtctaagcagtttcaaaggaagaactgcaatgttaag

SEQ ID NO: 856708 - DNA, 590 bp, Homo sapiens
cctgctgagcgccagaaaccaggcctgtgtttcttgccccattagwggatccccttccatcccaccccaccctaaccaggccaggaataaacaaagaggcctggaagcccaacccactcaccaagtcctggtcaggagagtcatacggtgattcccacttgatgaccacggaggttttgcccgtatgaaccacatgcaggtgacggggtggaagcctgctgtccgggatcatcttcactacaacgtagtcagaggatggcccctggtagggtaccactacacggacctgaagcccaagcacacacgtaggaaaaaaaatacatcatggacttatgcaatctttataaaagtattttttcaacaaaataatgacacaattaaaattcagttagtacaaaaaaccataaaatataaaataatttcccacctaccccgaatcattttccaagaggtaccactggtaagagtttttgtgcttccttccagaaatcccctatgcatatataaggaaggatatgtatgtacgtgtatccttacacatatatgcacgtgtatatgaagcctatcttcctcaaatattttttatacaa

SEQ ID NO: 856709 - DNA, 391 bp, Homo sapiens
tcacatcaacaggccatatgggtgtaggatgcagctgcttgcaccattgtttcaaggctgtctaaaagagtcaaggagaaggaatcycaactatggagttcagaaaagggaggaagatcaacttgttaatctgtggtttagagactcatttttagcatgaattacagagtttagggtgaaatggttaagacagacatattacctgtgctccattaagaaagggagctgagaaattctggaaaaactttaaaaggtgggttattcaaaaatgtattttctatgtgtgttttataaacaaaaagcttgcctacttgtgtacattttgctgttattacagtcagcttttatttccccaatataaaataacagaatagtgttaggttataggaga

SEQ ID NO: 856710 - DNA, 391 bp, Homo sapiens
tcacatcaacaggccatatgggtgtaggatgcagctgcttgcaccattgtttcaaggctgtctaaaagagtcaaggagaaggaatcccaactatggagttcagaaaagggaggaagatcaacttgttaatctgtggtttagagactcatttttagcatgaattacagagtttagggtgaaatggttaagacagacatattacctgtgctccattaagaaagggagctgagaaattctggaaaaactttaaaaggtgggttattmaaaaatgtattttctatgtgtgttttataaacaaaaagcttgcctacttgtgtacattttgctgttattacagtcagcttttatttccccaatataaaataacagaatagtgttaggttataggaga

SEQ ID NO: 856711 - DNA, 514 bp, Homo sapiens
accatttagcatgattgctgtgggtttctcataaaggctctttgtcaggttgaggaagttctcttctgttcctagtttgttgagtgtttttatcatgaaagagtgtttgattttgtcaaatgctttttttgcatctattgagatcatcatgtgatttaaaaaattctactggtacgatgtgttacaagaattgattttcagatgctgaactaatcttgctctcgagggagaaatccagcttggttatgatgtatacttatttttagatactgctggaattggtttgctagtattttgttgaggattctttattctttttccacatacaatcattcctaattgttgaggatttttgcgtccatattcataagagatattttttctctggttttmttttcttgtgatgtccttgtctggttttgacatcagggtaatatttgccttataaaatgagttgggaagtgtttagcctcttctattttttggaagagtttgtgaataactgatattaatt

SEQ ID NO: 856712 - DNA, 479 bp, Homo sapiens
ctctgtgtattccaggagtgattgggggactttgggcagcttgattaaaacagccctacaagtgaagttgccaaactggaatgattatgtgtcttgtaacctgacacctatctyaggggctggaacaacacctgaagtcattcatgggaccttcggcctcagaacaggtgacacacctaaggcgtaacaaaagccttcccgcctgaatgacttccacccaactgggtgttggctgagggtgatgccagaagtttccgccccccctccccctaccttctaggtgcatgacttctcactgtgtgggtgctttggtttggggttgtgggaagttggagtggtctgggggttgggcgacagggtttgcagctcagtacaaagagatcattgccaggtgtggagcaataggattggaaagtccacagagaaggagggagtttcttctcttagggaggtaagatgtaccccctttccctggatcc

SEQ ID NO: 856713 - DNA, 479 bp, Homo sapiens
ctctgtgtattccaggagtgattgggggactttgggcagcttgattaaaacagccctacaagtgaagttgccaaactggaatgattatgtgtcttgtaacctgacacctatcttaggggctggaacaacacctgaagtcattcatgggaccttcggcctcagaacaggtgacacacctaaggcgtaacaaaagccttcccgcctgaatgacttccacccaactgggtgttggctgagggtgatgccagaagtttccgccccccctccccctaccttctaggtgcatgacttctcactgtgtgggtgctttggtttggggttgtgggaagttggagtggtctgggggttgggcgacagrgtttgcagctcagtacaaagagatcattgccaggtgtggagcaataggattggaaagtccacagagaaggagggagtttcttctcttagggaggtaagatgtaccccctttccctggatcc

SEQ ID NO: 856714 - DNA, 479 bp, Homo sapiens
ctctgtgtattccaggagtgattgggggactttgggcagcttgattaaaacagccctacaagtgaagttgccaaactggaatgattatgtgtcttgtaacctgacacctatcttaggggctggaacaacacctgaagtcattcatgggaccttcggcctcagaacaggtgacacacctaaggcgtaacaaaagccttcccgcctgaatgacttccacccaactgggtgttggctgagggtgatgccagaagtttccgccccccctccccctaccttctaggtgcatgacttctcactgtgtgggtgctttggtttggggttgtgggaagttggagtggtctgggggttgggcgacagggtttgcagctcagtacaaagrgatcattgccaggtgtggagcaataggattggaaagtccacagagaaggagggagtttcttctcttagggaggtaagatgtaccccctttccctggatcc

SEQ ID NO: 856715 - DNA, 631 bp, Homo sapiens
tcatgccacccaccatggcatatactataaatttccttgtattagtacaggatgcctggactcacactccaactctgccacctatgagctgcgtgaccttaacttctctgtgcctcagttttttcatcartaaagtagggataatgatagttcccacctccatggagcttctatgggaattaaatgagcaacccacacaaagcttaggcctgacacagataactcacaataaatgttagctcttactattactgctgtttacatttgtgtgcatatcttatctctacattagataaacttcttgaagcagggatcaaatctttgaaaaaatttaacataaacaacatttcaaaactgccattagccctgttttggagaccaagacgctgagacccagagaggttcatcatttgctcaaatacacgcagctaggacatgaagaaagctagcttcagacccccatgtacacattctcaggactgtgcgcttggctttcttattactgcactgttcgcagtgactttccccaagagggcacacagtcagtccctagtgaagagccagtgcagccaacagcgtgggtaaggaggggaccccccccccaaacgtggcctgccctcgagccccttct

SEQ ID NO: 856716 - DNA, 540 bp, Homo sapiens
ctgcatacaacactcaggtattactggaaaaatgaaaaatctgggggacaaaacccagtaacttagggaagggaacaggagaagaatgaggaaatcatttgagcttggctcatcccgtcattacataaatcctctaacagaaggcaaaggactccagagcagcagaatccaagtccccagttaatcattcctgtgtccatcatggcttgactgtgtttccttcatcatcctaagagccagaggcagacacaggaagacacagagagggtagcatccatatacagagtccagaagcagtaaaggagccgatcatgcctatactcctactgcaatagaaatcactagtgtggtccactcctggggtcttttttgacccccaagtttctctgagtaaatgtgcatgaattccacrtgccctgtcacttatgactatttcaatctgtctctcaactgaaaaatctattactgttgctttctgaatctgaaaacccattagatgctcaatgtcagaaatctatacctgattatatcacaagtgaa

SEQ ID NO: 856717 - DNA, 558 bp, Homo sapiens
catcctgttaccaaatacctcctccatgccagacacttggygggtcttcagacccccattttactgatgaaaaaactgaggtcagaactggaatttgtacccaggaggctgattaccaagccttcatcctgtcccaaacagcctcagaaaatactctcaaaagtgctctgactgggcgcagtggctcacgcctgtaatcccagcactttgggaggctgaggcggtggatcaccagaggtcaggagttcaagaccagcctggccaacatggtgaatccttgtctctactaaaaaaaatacaaaaattagcggggtgtagtggcggttgcctgtaatcccagctactcaggaggctgaggcaggagaatcacttgaacccgggaggtggaggttgcagtgagccgagatcacatcactgcattgtaatctagcctgggtgacagagcaaggctctgtttccaaaaaaaaaaaactctggacgaatgaagtggccggaagtagttatttaaaaggttaatgttagttgaatgttaactatcctgactgaaattaagttgaa

SEQ ID NO: 856718 - DNA, 526 bp, Homo sapiens
cacccttgtttttaccttctagagaccataatcaaaataaactatacacagtaacattcttawccgtttcccttatatgcttgttcactctagaaacaagctgagattttataaacaaaacaaagcaaaacaaaaacaaaaaacttgcaaaattcaattctctgggatgttcaggcagtccatgaaaaatacaataaaataaaataattcaattctccaaaaattgtacattattcttttcatttgtaattctttaaagctgaatatgcagacttattggatatctgtatttaattcttttatgaacttcctattcatgtgcttttgctatttttctattattagtgtgttaatttttttgttattttttacagaactttacaattaagaacagcaatgtttggtcatacatattgcaaaacatttcttccaagttatcataataaaagtcaaattgagcactggaatttcatgaatctgcacataccgtgttattacaaaaccagataatgtccccttcattacc

SEQ ID NO: 856719 - DNA, 521 bp, Homo sapiens
ttaaaaggcagaatttggggaagggaatccaggcaactgaagtraactgaattgaactgaactgaagcatgcaaagtgcagaccgctgggggttagaatagagagtggcattaggggaaaggagggtaccgcaagcgagaatttggagcttgtggacagtccagaatgccacacaaggacatgtgaactccagacagcaaaacaaccaggtcttctaaacagatgagtaaatggattagatctgtgatattgggccaatactccaacactattcctattcccaaataccatcaatgattgatttctgaagaaaagtttatttagacgcaggcttgtaccttgtaaggacaatgagccctattagctgcttctcacacgtctgggtgaaacaggacaagccagttctttgacagagagcagtcatgaattccagaaccgtctcattccggaggactttgtaactcacatcagcactaaacaggagcttcctttcaaaatatgacacagaaatggcaaaccca

SEQ ID NO: 856720 - DNA, 638 bp, Homo sapiens
tgcaaggagattccaaaaggtttgtggaaaaatagaattaaaaggtaagaatttaaaaaactacctttatttcttaccaagagttttaccaaggtcaagacacttttataagcaattatatcagccatttagtccatccctagagaactaagggtcctgggaatttaaccacatcagtgcagtcttttttagcttattaacgaaagaaaaatgggtgccctttacattgttttatattttaagattataaaacaaaaaaagtcagaaggagccaaatcagcagtaaagtgtatgcctaatgatttcccattgaaacttttgcaaacttacccttctttgttgagaagaatgagtagaagcattgttgtggtgctttccagggaagctttcctggccatttttctgctcaagctttggcaaagtttctcaaaacactttcataataagcggatgttaccattctttggccctccagaaagtcaacaagcagaatgcctggagcatctcaagaaactattgccatgacctttgctcttgatgggttggcttttcctttgactggaccacttccacctctcrgtagtgattgctctgattgtgctttgtcttcaggatcgtactggtaaagccaggtttca

SEQ ID NO: 856721 - DNA, 549 bp, Homo sapiens
agttcagtatgcctgcttctaaacaccagttggcaggggtgggggatggagaagcctgagagatgggaagcggggtcctctaaggaggaggaagggaaggaagatgaccgggaggaaagcccgtaacttgccaatgagctcataagcaaggtaaagaagaaagatgaaagacagaaaataggcgaaggttgggtgtggtggctcatgcctgtaatcccagcactttgggaagccaaggcgggcggatcacaaggtcaggagatcgagaccatcctggctaacacggtgaaaccccgtctctactaaaattaccaaaaattagccgggcatagtggcgggcgcctgtagtcccagctactcgggaggctgaggcagactgacgtgaacctgggagggggagcttgccgggagccgagattgtgccmctgcactccagcctgggcgacagagccagactccgtctcaaaaaaaaaaagaaaagaaaagaaaagaaaataggctttgagaagaaaggatgaagacctttcatcctcagaaaccatgggacat

SEQ ID NO: 856722 - DNA, 599 bp, Homo sapiens
gcccctccacttgtggaagctgtggtgggcagagccccaaaacaagcagccttccaactagagactcgggggtgtctgaagggggccccctttccctgcccgctggggagcggcgtctcagtgaaatcggctttctcctcagactctgtccctggtaaggagtgacaaggaagctcacagctgggcgagtgcattttgaatagttttttgtaagtagtgcttttcctccttcctgacaaatcgagcgctttggcctcttctgtgcagcatccacccctgcggatccctctggggaggacaggaaggggactcccggagacctctgcagccgtggtggtcagaggctgctcacctgagcacaaagacagctctgcacattcaccgcagctgccagccaggggtctgggtgggcaccaccctgacccacagcgtcaccccactccctctgtcttatgactcccctccccaaccccctcatctaaagacaccttcctttccactggctgtcaagcccacagggcaccagtgccacccagggccckgcacaaaggggcgcctagtaaacctaaccaacttgttttttgcttcacccagcaatt

SEQ ID NO: 856723 - DNA, 603 bp, Homo sapiens
ctccctcactagaatgtcagtcccttgaaggcgaggactgtctctgtcgtggtcacctctgtcctggcaccttgtgcatcatgycaggcccacagtggccactgcatatatgtgctgaacacctggatgagcactagcccagggactgggagggcctagaagcttcttccacccagacacagagtggacagcaccagtttgcccacagaggctgaagaggtggcggagggaagcaggaagcagggagagtggagtagggagctggcctcagcccctgggggcctcctgctgtgctgccctaccatccagggctgcgagctgcccttgtccactgtcacccgtttctgcttcagctagtgggactgggttcctgttatttatacccaaaaggcctccccaggactaaagatgtccttcacctctgccatctacgaaagctcccttgttccatgctttgcagacatctgcttctccttccaagggcccctgctgcagggactgacaccccgtccagggaagaggggtgtcgcctcgccctctcacctcggactcttcttcgatcttcatgccttccacctgcagaaggtctaacaaggtccctgg

SEQ ID NO: 856724 - DNA, 609 bp, Homo sapiens
ctctacgtccatagtggtcaaactgaacattccctgtcagcccttgaattcgaacctaagtgaaaaagaaaaccacacgtgttcacttgcaatttcacttataggaattttaacttcatctgctgggcttataactacttaaaaaagtagaactataaactataaccaactaactgaaatgccattaggtatttgagctattgggatagcatctgaaataggaatatcaaagggatgtataagcaattttgctatacccctggaagaggaatatgttttatttgtttttactattataaagtttccatttttagtcgaagaatcctccctcaattgtaaagtatttttataggaatggcaattttttatggttacttttcagttttatctatatatccacaaaatggattaaataaccctgatacttatgccagatcatattctcaccttgctaatattaaaattaagatataagaagcaaaaartataaggacatttttgaaaatattgaaatatattttattccaaatttccttttaatttgcttttacctatgttttgaacctgtgacatttcagaacatttaaaatgtaacattaaatatgtata

SEQ ID NO: 856725 - DNA, 600 bp, Homo sapiens
tttatctagtttttaaaataagctaaaatttatggaagttgaactctatgtggatattttcaatatgccttgaatttatgtgttgccaaaactgcagcatgaaagcatcacaaaaactgtttagtaagttttcagagtgaatctatgtttatactaaaaagtcattttttgttctcttcccttaagagcaccggagattgtcagaagatctcatttctagtcttagctgtaggactgtgggcaagtcaccgtaagtgtattatacagttccttcctctataataaaacgacatcataagagggtttaacataccatgtgaaaaatatatatatatgtggaagtggttcaaaaactataatgctgaactgtactattattgtttcacttaaatatgctgctctgtaatttttggtgtttatatgagccaaatttaagcataatcttttaaaagtggacaatttggaaagaaaattaaatgatgtatttaactaattctatggcttatacartattattactgtatcacttagtagaaatgaactgttttttttgttttagtcctgtgccatttttcctctgggagacaatctgaagtcaac

SEQ ID NO: 856726 - DNA, 601 bp, Homo sapiens
catagtggtcaaactgaacattccctgtcagcccttgaattcgaacctaagtgaaaaagaaaaccacacgtgttcacttgcaatttcacttataggaattttaacttcatctgctgggcttataactacttaaaaaagtagaactataaactataaccaactaactgaaatgccattaggtatttgagctattgggatagcatctgaaataggaatatcaaagggatgtataagcaattttgctatacccctggaagaggaatatgttttatttgtttttactattataaagtttccatttttagtcgaagaatcctccctcaattgtaaagtatttttataggaatggcaattttttatggttacttttcagttttatctatatatccacaaaatggattaaataaccctgatacttatgccagatcatattctcaccttgctaatattaaaattaagatataagaagcaaaaartataaggacatttttgaaaatattgaaatatattttattccaaatttccttttaatttgcttttacctatgttttgaacctgtgacatttcagaacatttaaaatgtaacattaaatatgtatat

SEQ ID NO: 856727 - DNA, 543 bp, Homo sapiens
ctgagtatggtgaagaggttaatgacccaggccttggagtcagggaggctggttatctgggtgtgttctagaccaacacccacagcactttttacctggtggttgtggtatttaaagttctagcactgtcatttattagccaaatgaacttgaacaaaattcttgccaagccgtagtttcctactctgtataattgagatttataatggaaatttaagagttattaggagaactaaataatatgatgtatgtaaagcagttagcaaattgactgactcagaaagagctcaatcattttattattatatgttaagacccagttaaatgtcacttcctgtcttttccaaggagagttagtatttttcttctttggatttctttgcatttttattttttaaaaaaatatataaaaagcaatgtcacagtaaaatcaccatatgcttttaagtaataaaagattataaaatagcaagtgcagcatgtgtgtgcattaactacattaatgaygaaatattttcttttggcacctttatttttcaaatt

SEQ ID NO: 856728 - DNA, 676 bp, Homo sapiens
gagacaccactcagcccctgcctgggatcccgcacaccacccaacatgacagatagttccaacacttgtattcggttctctcaacagcacgcgtaagagttcaccagcctggagccatcaggaaaggcacccctaacctctaaaaccacatgttgggggttgcacaggaaataaggtcctgtccaaacatccccagcaacactgattcctggactgtccttcctccaaggcctgtggctcccaggggacagacactggaaggcagacttcctgcagtgtctctgcagcaaccgaggggaggggcccggagctggctggagcagtggcacacaagctggggccacctgcggcaggtcctaaacaacatgagtgtctggatgagggtgtggacatcaccagtggcccttttgagctggggaggaacatgaggtctgagtttaagacgcctggtgagaggactggaagccaggcaccagagcagtccccactcacccacacagctgtcctgatcgtcgggctcatagcctggtgggcaggggttggggtgttgagcgggaggcactggtggcgggggtccctcgccrtgtaggtcgttgatgacggcagcggagcggggcaggcacaagtagcccccgtagtggttgatgcacttcatttcccccttgcaggcctcagg

SEQ ID NO: 856729 - DNA, 609 bp, Homo sapiens
agtgagcacaggtaactaccatgaatgggaacagctttgctcacaaggaccttgacctgtgggaactgggaggagggaacagctccactgggggaatgctgggwcgatattgtgccttccatgctgtgacaaagccagagccaaggagctgggaatccaggaaaggggctgcagaaacacggaaggtgcacattgaggcagaagagcctggagagatggctaacaaaagaaggacctgaaaaacaggcaggtcaggcctcatgctttttgtgtttcccattgattttgttcttccttagtatctagggaaatgtctttgaaaatgacaggttggctcagatgtatttagaagtctcctcttcgacaggagttgtattggggtgggcaagccagcatgccaggaaatcccaagggaaaaatgaaacgccggggaagagagtcaggcggcgtgttctaccccacgcccaccttaaaccctgacagtcccctccccagctgacattttagaggggctatattttgatagaagggacagttcccaaaattatatggaaaacttcacacccacacacaaatatattcatgccagagtgagaacaaacacagttg

SEQ ID NO: 856730 - DNA, 665 bp, Homo sapiens
cacaaaatcctctgcagaaactgaaacgttttcaaagtccattgcaaccttacacaaaaaaatacttctgggagaacatctgcccagcaactgcctgcctggcctgtaggtccacsctttttcaacccgctgagctctgttctgagggaagaaaagcagggaaagaaacacagacagctgggattgaccccaggcatcacatttgaccctgtccagaacaccccccgaatatggggacgctgaggggacctctgcctacaccctgggtgctcctccagggtccccacctgaggaagttcccagcctgctgggtgcagtgtcctgctgcagggatcttacctccatcttgctgtaaatccagggaagaacttctgtcactttggtgtacacaccaggtttgtttctctggccacagcctgtgccccagctggtgacacctgccaggtaccagcggttgttctgctcacagacaagaggccccccgctgtctccctgcaggggagagggggcacattcgcaggatgggacaggtggtccatgagcgggaaagggtggggtcccaattcccacatcagccccaacacccctgcctcccccatccccagggtgctgggacctgagccccacccacaggtaccctcacctggcaggagtctctgccccca

SEQ ID NO: 856731 - DNA, 495 bp, Homo sapiens
aaaaatatatatatttatagtggtctggcctaacttcaagtcagactcctgagggtagagacttccttkgtcttcttcatgtttcaaaatcagcctacatacataatttttttcatactaaatattgtagctctagccacagaattgagtgatttttcatatcctacttagtttcaagatcatgtagtctgggcatttgggaattacatttcatagccataaaatcacaaccgtgaaatatgaattgttaaagcatgaacaaacctcagagaaacttgattgataacggttgccaaagtgagattatcagcagtaaatgatccaatgttaatttgattgtgattagatgcaatgccttccatgtcatagtgtcacctctaaacaagtctttccataatgaagtaaaaatcaacctaagaactaatcatgtgaagaaatatgctactagaataattttgtgattgggtgccaccttcttaaactaaaatccaagaa

SEQ ID NO: 856732 - DNA, 638 bp, Homo sapiens
aggagcccataaacagtggattgcataaagaaactgtggtacgtatgcactatggaatactacacagccataaaactgaatgtaataatgtcctttgcagcaatatggatgcagtttcsgtcattatacgaagcaaactaacacagaaacagaaaacaaaacatcacttgttgtcactcataaatggtaaacaatgggtaaacatggacgcaaaagtgggaacaacagacaaaggactctaacaaacctgcacatgtactccttggatctaaaatgaaagttgaaattaaaaaacaaaaaaaaggaattaccaaaagtaagtatagaaaaagagacaaacatttatggtagtgaggtttgctacacataaagatagcaagaacacacagggcagtagaaagtgctacggcagacaagaaggtgctaatcataaaactagaataccaataaatattaaaacatgggctctgcttttaccatcatatacagagagagatctgcccgagagagatttatggaaagttaaagaacagcggtcagtatagctctgatcttggtgtccctggcttctctggcttccattatagtaatcttaggtgaactttaaaaaaaaaaaaagtgtatgatttagttcataa

SEQ ID NO: 856733 - DNA, 638 bp, Homo sapiens
aggagcccataaacagtggattgcataaagaaactgtggtacgtatgcactatggaatactacacagccataaaactgaatgtaataatgtcctttgcagcaatatggatgcagtttcggtcattatacgaagcaaactaacacagaaacagaaaacaaaacatcacttgttgtcactcataaatggtaaacaatgggtaaacatggacgcaaaagtgggaacaacagacaaaggactctaacaaacctgcacatgtactccttggatctaaaatgaaagttgaaattaaaaaacaaaaaaaaggaattaccaaaagtaagtatagaaaaagagacaaacatttatggtagtgaggtttgctacacataaagatagcaagaacacacagggcagtagaaagtgctacggcagacaagaaggtgctaatcataaaactagaataccaataaatattaaaacatgggctctgcttttaccatcatatacagagagagatctgcccgagagagatttatggaaagttaaagaacagcggtcagtatagctctgatcttggtgtccmtggcttctctggcttccattatagtaatcttaggtgaactttaaaaaaaaaaaaagtgtatgatttagttcataa

SEQ ID NO: 856734 - DNA, 554 bp, Homo sapiens
tcttcagaagcatgtgtgatgggcagagttttctgatgtcctactatgggcacatattatgtatgggcaacataattttattttgttattccactagaattatgaggttgcttcttttttgcagcayaatctagtctcttctgaatggtatctccaattccattggcccaccggttgagaatccctggttttacctcagtaaatgatatcttaatagatttttagagagaaagaaatggatctatatacttaaaattctttagaggactaatctaaacttttccatgcaagtgaaatcaatgtgaactagtttgcagagggatttttaaatgatactgagatatcatgtatcagtcatttcttccctcatttattcaagaaatatttattgagtatacattatgccaggcactgctctaggcactaagtatacactagtgcacaaaaaaatgtttactaccaatattcagagagtgaaaggtgttaagaagcacaatgcatcatgcacttcagcaaactggaacttcatggaaaggggataatttggagcaata

SEQ ID NO: 856735 - DNA, 534 bp, Homo sapiens
ggatattggtgaacagcaaatgtttgctgcctgatcgttcctctggaagttttttctcagacgggtacctggccgtgtgaggtgtcagtctgcccctamttgggggtacctcccagtcaggctactcggcggtcagggacccatttgaggaggcagtctgtccgtctcagatctcaagctgcatgctgggagatacgactactctcttcaaagctgtcagacagggacatttaagtctgcagaggtttctgctgcacttttgtttggctatgccctgcccccagaggtggagtctacagaggcacgcaggcctccttgagctgtggtgggctccaccctgttcgagcttcctggccactttgtttacctactctagcctcggcaatggtgggcaccactcccccagcctcgctgccgccttgcagtttgatctcagactgctgtgctggcaatgattgaggctccatgggtgtaggaccctccaagcctgctgcagtatacaatctcctggtgtgctgtttgctaagaccgttg

SEQ ID NO: 856736 - DNA, 541 bp, Homo sapiens
tccatttgtctatgaaatttattccagataattatgttatcattacaggctttagactcatcggtgttagaaaacgctctgtttcttaaataaaataaaatccagaatagctaaattagtacaggaaatcagttgagaaaaatctgttaaaatttgtcctcgtgtttctttaactctttttcaggttttcttgaccttggtatcatcatcaaaatcagactcaaaaggcaaggctgctccctcttgccctctctgaacttaacatgtaataaaataaatgccgttcagataatctccttcaggacaattgagactggctgtatttttttaaattcagtaaaatactatggataaccaaataaaaataaatccaaaacatattagtaatgaacacaatgtgcttatagatgggaattttaaaaattaacatttcctatcattttgtttgaaatatttcaakttctagtacattcttttcatgagcaaaagtattgtaacaccctattcttaaagtatccttttagaaatcatgtctttgtaa

SEQ ID NO: 856737 - DNA, 585 bp, Homo sapiens
ataatatgagatttttaataaaaagatgaacacttgaaaaaaattttaaacaataccaagtacagaatcaaaagtcagaagaatgaagaaaatgcaaatgytatgctcaccattattctttctgtgtgctttttagttaaaagaaaggtagatatatagcctttgagaattaaaatttaatatctcagaaaaataactgaaaataacagtaaaattataatttactggcatgatttatattctaccacccccagttagtactgtacaaataactatttgtccagttgtaaaatcagaattacatattccttacagtgttgtgggagttgaattagataatgtatataagcatctagcatataacaatcatatcacaatgaatgaaagcttttgtgaagctatgggatgcttacaggaaactgctaatataatatttctaacaataaaactgaattacaggaattgcattaataaacttacttttttttttaagttgcctgtagtaaaagtctctgtttgggtatagaatcccatgagttttaacactcatagattcatgtaaccaataccactaacataaggcag

SEQ ID NO: 856738 - DNA, 585 bp, Homo sapiens
ataatatgagatttttaataaaaagatgaacacttgaaaaaaattttaaacaataccaagtacagaatcaaaagtcagaagaatgaagaaaatgcaaatgctatgctcaccattattctttctgtgtgctttttagttaaaagaaaggtagatatatagcctttgagaattaaaatttaatatctcagaaaaataactgaaaataacagtaaaattataatttactggcatgatttatattctaccacccccagttagtactgtacaaataactatttgtccagttgtaaaatcagaattacatattccttacagtgttgtgggagttgaattagataatgtatataagcatctagcatataacaatcatatcacaatgaatgaaagcttttgtgaagctatgggatgcttacaggaaactgctaatataatatttctaacaataaaactgaattacaggaattgcattaataaacttacttttttttttaagttgcctgtagtaaaagtctctgtttgggtatagaatcccatgagttttaacactcayagattcatgtaaccaataccactaacataaggcag

SEQ ID NO: 856739 - DNA, 407 bp, Homo sapiens
tgaagtgcagtggcacaatcatggctcactgcagcttcaacccgggttcacacaattctcccacctcagcctcgtgagaagctgtgactacagctgtgcrctaccacacctggctaatttttgtatttttcatagagacggagtttcaccatgtggcccaggctggtcttgaactcctgggctcaagcactccacttgcctcagcctcccaaagtgttgagattacaggcgtgagccactacgcccagccactttttttttttcctttttattcagtcagtttttgtttcttatattttgaaactgtattgttagatacacatacatttatgattgttattataggggagggaaaaatggtttccctagttctttagctgggtcattaatttagttacatgagacag

SEQ ID NO: 856740 - DNA, 523 bp, Homo sapiens
gactcatctagaccttttaataagacgrtcaacttcacacttagggaaaaaattaaaatgtgatggccacttctaataattcaggtagttataagggatctggaagaaatccagtctttatgaatatactattagttgggcattaaaaaatcagtatatattttaactttttgtgacatgctaacacattttcagaataattattgcatagtagaatttattactccagaacagaaagaccttacttcatttcaaatgaagttaattaatttacatttctgggtaaaaactggttctataaattaagtagagtagcttctttatgataaagacaattttctgaaaagtgaacaattctgttaaaagaactttattgatgtgtagatttcgcactttatttctgagactgcgttcatgtagttgttccccaatgtttgagtactaagagaacttgagaaaattacttcataaacatatggaaactgaaaatggactctctttgtgacaaagatattcaacagaa

SEQ ID NO: 856741 - DNA, 633 bp, Homo sapiens
agaaggtagaaaatgttatcaatatatttgaatattgtaagtagaaataaaaatcaattagtcatattttaacaaaccaattaaagtaagccttaaagaaaaaaaagcatgtgtttaaatttttaaaggcaagtttctgacaaaactccctatatagaaggttataactttttttttaaaagtcacaatgtaaaactacattgacagccaaaacacatatattttaacatgtaaataaatctattacccatttcaacagtgatataccaaagaaagaactcattagccatttttcatagactagtcaaacatgttaaaatgctatcattccgtatttgcaagttggcctgtagaaatatactgaagatttttttaaaagaagattgaatttaattcaaataactcattttaatttaaatgaaactaatataaatcaatcatcataaaacagattgaaatttcactgttaaccatgctcataattcaacttacatttaatttagaagaaataatagtcaaatttgtggttatttaaaamaatctagagtttaatatagcgtagaatgcataaaaatttttttctttcacgctcattatatgactaaacaaaatttatacagaacatttctttag

SEQ ID NO: 856742 - DNA, 603 bp, Homo sapiens
agaaaatttaaacagattgatgagaattcaaatgttttcactgatgtgaatattagttaacaggaaaaaagaactcataaaaactgttccatacttgttttacyccaaaatgttaatccatgctgttatagataccctgtgagacacacaaatgcttttccaactcattgatttcaaatcaaagggcaaaatatacattagtaatgatgatatgccaaaacgctccttaatgtgaacatcagtatttacgttttaatgtcagttacaaagatccctgggcgggcgcggtggctcacacctgtaattccagcactttcgaaggccgaggctggtggatcatgaggtcaggagatcgagaccatcctggctaacacagtgaaacaccgtctctactaaaaatacaaaaaattagccgggcttggtcgtgggtgcctgtagtctcagctacttgggaggctgagacaggagaatggtgtgaacccgggaggcggagcttgcagtgagctgagacagcgccactgcactccagcctgggcaacagagcgagactccgtctcaaaaaaaaaaaaaaatccctaagcagagatttgggatcctttatat

SEQ ID NO: 856743 - DNA, 509 bp, Homo sapiens
aatcccagcattttgggaggccaaggcaggtggatcaactgaggtcaggagttctagaccagcctggccaacatggtgaaaccccatctctactaaaaatacagaattagtcaagcatagtggtgcatgcctgtaatcccagctgcttgggaggctgaggcaggagaatcgcttgaacctgggaggcagaggttacagtgagccaagatcatgccactgcactccagcctgggtgacagagcaagattccatctcaaaaaaaaaaaaaaaatcaagcataatagaagcaatcaacacacaaataaattaacaatagctaaaactccacacagtaaaattgttgaaagtgaaacattgggcaaagaatcaccttatgattaaacagacaaaaaataaatttgatagaaatcattttagatagactgaaaataagcaaaattatacacagtaaatattgatracaataatatttgttaaaatatcaaaatattctcagaaatttagataac

SEQ ID NO: 856744 - DNA, 497 bp, Homo sapiens
tatactatgttttatagacattttttgcacttaagtttcagaaaagtgtaatatcaaaatgaatagatggaagaggaaactcaaaggtatcataatttaagactcatttccctacatctttcatttkcatttgcatttgctgctgccatgtgataggaaaacagactcaaataacattgagtgaatgtttataagaaactcacatcccagttatttgaaacacatgtgtaatgctacataggtatactaatcattctatttaaggtatatgtaagttgtttgttatatttcatttactgttctaatcacttttatatataaatttttattacgttctataaggtatgaagtattggtaagatctagcattttctctgtattacaattgaaaacatataagataaacaaaaattgggtaaaatgccagatttacaggcagtattctatagaacttggagttggaaattatgtaatttgattacagataagacacctga

SEQ ID NO: 856745 - DNA, 249 bp, Homo sapiens
gaatatgcatgtttacaaagctcttacaactgagttttccaggtgttattttactggtttatattgtattatatgctgaaaatcagaaaatgaaagaataactgtttatgatagtttatatattttatatgtaatgatttaccaatttaagccaaaatcctttaaaraagttgtaaagaaactccaatttataaaataaattatctttttacaaatctataggtcaaactttttctatatacacctgtg

SEQ ID NO: 856746 - DNA, 647 bp, Homo sapiens
aatttagtatctttagtgtcctcctgaatgttcatgttagcaagattttgccctatrttagttatcatgggaaccctttctccatcattatggtcatgtgaatttgaaaacatctactatctatgatgttcagttatatcatgtgaaatatgaggaactgattatacaagcttgatatgtcaataccagtgatacaaatatcaccaaatattgaatccaaccatcaaatatattctgtttggcctgtactgtattaatttatttttgaatgaaaacttgtgattatctggctcagttgaatacagaaatgcaaaacataaatctggagccaagtagtggtcacctcctttaaaaagacatgctctctatcttctatttctgtccctatttaactggaatcactgtgaggtggtaccatttgaccttgtcaggtatttgatattgtgaaccctggttaattggaacgatgaatgcgaaaattcttagccttccttctgttgaaagaggtttctaaatttgaattctgaaaattatttttattgccctcactcatctataaaattgttaagttccttgaacacagagattatgtctatgtaatttgtgaattcttcacatcacttaatacattgcccatgagaaaaaaa

SEQ ID NO: 856747 - DNA, 542 bp, Homo sapiens
atttctcatctcggttagcaggtgacaggctcccataacatggcatccatatggcgtcaccccttctgttgagcacaattttagggcaagattcataccgcttctctctgtgctcaaaatagatgcccaaaattgggatagaatttacataagttggctgaagagactgtgttcaattaaaaagcttttgttgccaaggaatttttttagttgatacatatgctcctttattgcagtgctttagggggaaagatttcagcactctctcttctctctctccatcttcctcctgctctgcctcccccacttagtaaataaggaggtgggtggatatctccccggaagcctgagtgagcagcaaatgaagaaaccacccatatggaaataacaggaaccctgacccatgagaaacagaagccagtgatgccctcttgcctagcctggggcaackcaagccaaaaagctcttctctgtgtgtattctggcctctgccccagaaagaatgggtcctcccacttgcaagcaccataaatccaatggga

SEQ ID NO: 856748 - DNA, 634 bp, Homo sapiens
aaattatacaataatcaattatccttttatttggcaaatacttactaragattttccatatacaggctacctaatatgttttgagacatctacctttaactgtaaatgaaataaagaagaaaattagaaataagaggaataagaaatcattctggacagtctgagtaaggagaacagtcataacataaatatttggaattgaggaattacacaagattctaaaaattttaaagtgcataattgaataattatattttatcccttcaatctgtatattttaatgatggcagtgagaaacaattctaatgctttagaaaatccaacttttaaaaaatgatttttaaaatttttccctctgatttatggttggctactttgatgaaatcttccattaaacagatacttgctaacatgacctcctccttggtttttctaattttcttaaatttagtaattttgtttcttggttgttgaaaagaaactattttgcatggcacattatgccaagaaaaattaactttattaaataaactgaagtaatacacagtattcctattccataagttttcatattacaaaaaagtttgttgccgggtgtggtagctcatgtctgtaatcctggtgaattgggagg

SEQ ID NO: 856749 - DNA, 634 bp, Homo sapiens
aaattatacaataatcaattatccttttatttggcaaatacttactaaagattttccatatayaggctacctaatatgttttgagacatctacctttaactgtaaatgaaataaagaagaaaattagaaataagaggaataagaaatcattctggacagtctgagtaaggagaacagtcataacataaatatttggaattgaggaattacacaagattctaaaaattttaaagtgcataattgaataattatattttatcccttcaatctgtatattttaatgatggcagtgagaaacaattctaatgctttagaaaatccaacttttaaaaaatgatttttaaaatttttccctctgatttatggttggctactttgatgaaatcttccattaaacagatacttgctaacatgacctcctccttggtttttctaattttcttaaatttagtaattttgtttcttggttgttgaaaagaaactattttgcatggcacattatgccaagaaaaattaactttattaaataaactgaagtaatacacagtattcctattccataagttttcatattacaaaaaagtttgttgccgggtgtggtagctcatgtctgtaatcctggtgaattgggagg

SEQ ID NO: 856750 - DNA, 410 bp, Homo sapiens
cctagtcttgcactttccctacctgcagcattcgctgggccacagttcgcaaatccagttcctttttgaggaagcaacatgaattgaagaggactgaatgatcatggaagacccttgagatgccagagagctgagaattagacactctatagccaacggccctcagatccatttgagaccaaccaatggctgcacaaaatattcagagaaatggagccctcaggcacccaagagaatgcaattagaggaaaactgagtaactgaaagtagtctctagggaaagaggaaagacttgatgaagaaagaaaaggcatctagaagctagggccctttgtctgccttgtggggctargcttggggagtagcttaacctcacctcacttgcctgtgttcctctttctctttctgga

SEQ ID NO: 856751 - DNA, 635 bp, Homo sapiens
ccagagcaatttggagagggctccctactaccagtggcatcataaaaatgacagtgtacttgccaagggcatggtcttgggtgctcctwaagctgttgaactgcaaaaaggggtgccgtttatttgcagaagccacaagaatgctctcctccccaactctgctctttcacttgggtctcaaatcagcttgtctggggccttatctccccaaatcttttattccacttaggggccctcacctcccttcccttgcccatatggcttttcaaattcagcccagtgagccagacagggaactcttctccttcgtcttctctctcttcacagcccccatgatctatctcttcttttctctacattgtaatggaaaaaaagctttttgtctagccatgattgcaaatagaagggggatgtgtgtgtgtgtgtgtgtgtgtgtgtgtgtgtgtgtgtgtgcacatatgcatacccaaagcagtattctcacgagctgttaacagctcaaaggagtcataggtcatcatcagaaaggtttcatggaaacaggaagctctcaggaagatctcacttaccttacacaatggcaaagataattgtgcatcagggtgaaagagtaaagaaaggttacttgcagcaaa

SEQ ID NO: 856752 - DNA, 526 bp, Homo sapiens
agctctccttgcatacacggaacaccatgaaatgagaaagtacagtatataccttttggggttctaagatcataacctctgaaaggacattctgttgacaaagcatgtgtgttctgtagggtatcttatccactgctgaacaagtggtacaattatcacatcctacttttggcccattccagaagcaggaagaatgctattgaattacagttaatattctgaaagcataaatttcaaattggtcttctggctacaattgggggagaatggtggtgctgataaggtgtagtttttctgaattgctaaataatgtttactgttagaaccagtgtaattagttgcgttgtcacttaaaatatgtgccagacctgactgtgattaagggttttgtttatgctcagcctgacaggacacagcacccakagcctctgatttcttggcaggagcagacacacacacaaaggaccagggctttattttcaggttttatttcattcattctttaaaacttttttttttcacagtt

SEQ ID NO: 856753 - DNA, 311 bp, Homo sapiens
cagtgaacttgctttgatttaaggcagtttcccaagataaattaggagggaagatagtcaaaaaaaggaaaacaaaaacgagtacaaaaatgaagscaggaatagttgttatccaaaactgtaaagtctgtcagaatactaacctttatttaacaacctctaggttctgttctaatggtaactatagaaccttcgcttgtttctcaaaatgtgatgttctggtagttcatttgtcatcctgataagattgaagttaagaaatagactcatttttgctttgttgtaactttcctcttataatcttttttttt

SEQ ID NO: 856754 - DNA, 582 bp, Homo sapiens
tactaaacggcctcatgaagctaaaggtagaaaattcactagattaatggttcatkggcaaaatctgtccaaatccttgttaagaaacaccataatgaaatatctgtacacctctaattctagacagcctcatagttggcaaagtttttttactttcagtatttatttagttttttagtcctcataatagcccagaaatggggtagggcaggggattatttctgtctggttgagactggggtctggaggccagctagcctgtccctgagtcacatggctcgcagccagtgaaaataggtgtctggcacccttgcttcattctcagcctgagctggaccattttgccttgggtggctctgcgtgttattttccagccgacttgggatattctcagggatctgacttctttcttagttcatttcttgatctctcatatttgattctgctcttctcacctgacctctgattcctacctacctcaattaaaacttttgtctactcttttgattagtttacttgcagttgctcctgggaaatacctttcacacccaaacaacacttctgcaattactggtactgcca

SEQ ID NO: 856755 - DNA, 638 bp, Homo sapiens
attttaaacatttacattagttgggtggtacctgattttccaaataggccacatagctctaagaacaagtctcagaataatcagatatgtgtgctctgaaaagactctaagctccttgaggagaaataccatgtcatattcatctttttgttctcaggccctaacacagcacctggtacaaaatgtgtgctctgcagatagggacacatattctagagtcagactgcttgggtttgaatcccagcttcaacactcagggaactaagtgaccttgggcaagtgatttaacttctcttctcttgctaacaggacccacctcataaggctagtatgaggattaagtgaagtaacaaatacaaagtgcttagtatataggcaggaattatgctcaataagtatgaattatactgctttatcatcatattcttattcttattctcacccttaatttgaagaaggacttcattagctaaattaatttttgaaactgtaaaggaaaaggctaaattggcttttaataagagatagcmacagctgttttaaaacttatggaaagggttttggggaaacataactgactaaatgcttttcagctaggacagctttgccaaatacagcaaaggtgtcgcataggatcc

SEQ ID NO: 856756 - DNA, 586 bp, Homo sapiens
caggagactgaggtgggaggatcctgagcctgggaagttaaggctacagtgagctgtgattatgcgactgcactataccctaggtaatgagcaagaccctgtctccattaaaaatacaaattaactaggtgcagtggcacacacctgtagtcccagctactcaggaggcagaggcagggggatcactcaagtgatcctcccagggatttgaggctgcagcgagccatgattgtatccctacactccaccctgggcaagaccctgtctctaaaaaaaaagaagaagaaatttatttacttatttatttacttattgagatagggtctcactctgtctcccaggctggagtgcagtggtgcagtctcggctgaccgcaacctccgcctcccaggttcaagcgattctcctgccttggccccccaagtagctgaaattacagaaggaaagaaattttgacccagagagagaaagtagtttacccaagatcrctcaaccaaaaaatatctgactttaggttagaactcagaatttatattcaatatcactattgttgatattgagtataaatatcactttatatctaagc

SEQ ID NO: 856757 - DNA, 648 bp, Homo sapiens
aagctaggggcatcacattttctaatttcaaaatgtattataaagatagagtaatcaaaactgtgtgctactgggataaagatagacatataggccactggaagagaatagagggccaagaaatcaactgacacttataaagtcaactggccttcaacaaacatgcgaagaatatataatggggaaaagatggtttcttcaatacgtggtactaagaaaactgaatattcatatgcaaaagaataaaactgggcctgtatcttacactacacacaaaaagcaattcaaaatgaactacacatttaaacataattacctgagactgtaaaacttatagaagaaaacataaggagaaactttcatgatgttggtcatggcaaatattttaacttataaattgtaacaaaaggatttgggaaggattggtatgtttaaagggaatatttatgggagattatgggttataggctcctgtccatatctcagtaacttcctcagtaaaggagacatggccttgagcccgaatacactgggaasctggaactaagactcaactccttctgaccccttctctcaattaaggattcttttttctcatttcaccaagaacagagaagcaaccaaagatagcttttccacttttccacc

SEQ ID NO: 856758 - DNA, 553 bp, Homo sapiens
aatattttctcccattctgttgttttctgtttaccctgttaatagtttctttttctctgcagaagctctttagtttaattcggctctacttgtcaactttkgtttttgttgcaattgcttttgagtacttagtcataaattattccccaaggccaatatctagaatggtgtttcttaggttttcttctaggagtcttatagtttgaggtcttacatttaaatatttaatccatcatgagttaattttttgtatatggtgaaagataggcatccagttttattcttctgcttatggctggccagctatcccagcacaatttattgaacagggagtccttttcttgttgcttatttttgtcaactgtgtcaaagagcagatggttataaatgtgcagctttatttctgggttctctattctgttccagtggttcatgtgtctgcttttgtaccagtcccatgccgctttagttactgtagccttatagtataatttgaagtcaagtaggatgatgcctccagtgttgttctttttgcttaggattattttggttg

SEQ ID NO: 856759 - DNA, 606 bp, Homo sapiens
taaagttgtctatcaggtccaggaggctttgaaagaatctttagggtttcttaagtgtagaataatatcrtctataaaaagaggtaatttgatttcttcttttcctatttggatgccttttacttcaaaaggctgattgctctggctcatatttccagtactatgttgagtaggatggtgagagagggcactcttgttttgttccagttctgagattcttttaagtgaaatcaaagctactcaattgtttgatctttacctaatctgtggacatgttgagattcacctcacatatgattgtctccttctgaaggagcttatgcaattctcatttggttctcagctttagtcagaagatacaattaaggtcagatacacttgtagtgacatctgatgtgaaattatatgatggtaataatttcaaattaaaataaaatttagtggcagttgtttttattttagataataaaacccatgtacagataaagaatgtgattttactcagatcacataggtagtagcaacattgcagctaaaagcaaatctctttaatctgggtcaatgttgtttttaatcaatccataggtgtagatatgcatacaaaaa

SEQ ID NO: 856760 - DNA, 606 bp, Homo sapiens
taaagttgtctatcaggtccaggaggctttgaaagaatctttagggtttcttaagtgtagaataatatcgtctayaaaaagaggtaatttgatttcttcttttcctatttggatgccttttacttcaaaaggctgattgctctggctcatatttccagtactatgttgagtaggatggtgagagagggcactcttgttttgttccagttctgagattcttttaagtgaaatcaaagctactcaattgtttgatctttacctaatctgtggacatgttgagattcacctcacatatgattgtctccttctgaaggagcttatgcaattctcatttggttctcagctttagtcagaagatacaattaaggtcagatacacttgtagtgacatctgatgtgaaattatatgatggtaataatttcaaattaaaataaaatttagtggcagttgtttttattttagataataaaacccatgtacagataaagaatgtgattttactcagatcacataggtagtagcaacattgcagctaaaagcaaatctctttaatctgggtcaatgttgtttttaatcaatccataggtgtagatatgcatacaaaaa

SEQ ID NO: 856761 - DNA, 557 bp, Homo sapiens
gatttatttctacagaatagagaaacaataatgatagcctagtttaaatacaaaacaataacaaaaaacaacaaaaagattgagagctgaaaaggccaccaaacagttactcatctacagaagcaaagaagccagaggtagtatattagaggacagtaaaaacaaaataagatccaggtgtgttaacaggatggttcaggaactaatgtctgttaatgaacatcagcaaaagtgtttttcttatgtaacatctgcagtgatatacagtaggaaaaataaactatggttgtgctgagaaggcaagagaaaggatagtaagcatagagaaaactactgaattagagcacacccttagccatatgcttctcaacaaccagatgaattaagagaacatgtggatacacttaagggaaaataccttttagctctgtgagtaattctctccaggtgtctgtctrtctatctatctatctatctatctatctatctatctatctatccattcctccatctatctatgaggtattgagcaacataggaaaggtatttcttgcata

SEQ ID NO: 856762 - DNA, 647 bp, Homo sapiens
aataaacatatgaaaaagtgttcaacctcactaatcattagggaaatggaaattaaaaccacaatgagatatcacctcacacctgctagaatggctactacagaaaagaggaaatgtaacaggtgtggragaggatgtgtagaaaagggaacacttgcacactgttgtaggaatgtaaattagtgtagccattatggaaaacttataagtttctgaacaaaaataaaaataaaattacatatgacctagcaatctcacatctgggtatttactgaaaagacttgaaatttgtatattgaagagatgtctgcatttccatgttcattgcagcactttttgcaatagtcaagttttggaatcaacctaagtgtctatcaacagataaatggataaagaaaatatagtatatatacacagtagaatactattctaccttaaagaaaagaaacttttttatttgcagcaacaaagatggaattggagaacattaggctaagtgaaataagcctgccacagaaagacaaatattacatgtttcacttatttgtggaatctaaaacaatcaaactcaaataagcagagagtagaacagtggttaccagagcctggggatggtaaagggatgaggatatcatggtcaaacagta

SEQ ID NO: 856763 - DNA, 601 bp, Homo sapiens
tcattatatgatggccttctttgtctctttttatgttttttcacttaaagtcaattttgtccaatataaatatagatgtattaggccattcttgcattgctatagggttatcataataaastaccacataatgggtgccttaaataacaaaagttcattttctcacagttctggaagttataagtctaagatcaagacgtcagcacatttggtttctcctgaggcctgtcttggcttgcagctggttgccttcttgccatgtcctcttatggcatttttttgtgcacatgaattcctggtgtctcttcctcttctaataaggacatcagccatattgcacgagggccataccctgggagtctcattttagctttatcagtccttaaaaaaaaaaaatcttcaaatatgattacattctgagatactaaagattgggactttaacatacaaattttggaggaaaactggttagcccataacaatgaattcatcaatagactgatatgatcaaggaaagaatcagtgagcttaaagaattttaaatagcaacttccaaaacttaaaagcaaagaaaaaagaattaaaaagaacagaatattta

SEQ ID NO: 856764 - DNA, 688 bp, Homo sapiens
ggagcatagtgtggtaatgaattaaagagtcagagagacctcgactgagatatgagtcagttaaccactcaatcatggagcctctgctctatataatggatatcacataattccacctttgtcagsgtgttggaagtattttaaataacactcaggtgatactgaataataagatgctacaataattatcattctccaacaatttgaataactattcttcaaaaatttgttattctcaaaagtttgtaggttttgcattattccagagcgggcatggcaaaggaatacagtgctttattggggtttagaggtcccaatcagttgatataaatgttacagggtagtattaatgttttagaagattccgttttattgttttatctattcattctacattcattcaataaatacttatttagcatgtgtgggccactcactggacacttcagcttctgcattcttcctaaacaggcatgttaatgtacatgcaaatggggattccacctatacttataagtcaagaggtagttcaagcatcaccttgtcagtgcagctttctccacttccccaaggtccttactccagtcttttgagtctccaagaatttgggggctaaccttttatgtcaagcttaagacattgtattagaattgtattattatgaattatattataattgtccagttta

SEQ ID NO: 856765 - DNA, 598 bp, Homo sapiens
gtcagacctctggtaggtctagcaggttgatggttgctgactgatcagggtgatggctgctgaagtttggagtggatgcaacaatttcttaaaacaagaaaaaaatagagtttgctacattgattgactcttcctttcaaaaaatatattcatgtagcatgtgatgctgtttgatagcattttgcctacagtagaacttcttgcaaatatggagtcaatcctctcaaaccctactggtactttattagataagtttatagaatattctaagtactttgttgtcagttcaacagtgttgacagcatcttcaccagaaataagtttcatctcaagaaactattttctttgctcatccataagatgcaacccctcattcgttcaaattttattatgggattgaataatttgtttccatcttcagggtctacttgtactccagttctggtgcaatttcccccacatcwgcagtaactttctccactgaagtcttgaaccccctcaaagtcatccatgtggtttggattcaccttcttccacactctatgaatgttgatattttggccacctcccatgaaaattaatgttcttaattgtatct

SEQ ID NO: 856766 - DNA, 521 bp, Homo sapiens
tgggagcaggaagtgggagggatgtggggcccctaccctggggatctacagggggcagctggctcagcggggtcctcagcaggtgtgactgcctgggggaaggggcttaaggggcctggagcccctactttctccttcccttgccttccgctctctgggactgctgggccttggttgtttctagcccagtggggttgagccctatagcggcatcccgagccccttgcctgcccgcagatggggaggggagtgctcaaggtcacatgggagttaggggcagggctaagatgcaaggccgcatacccggttgcttccgtcatcccccccaccacctctgctggcccggagtcatccttgcatggcacggagctgttcctgcgttccagcaccgtgctgggygctctgcactgtgatctagttgactccttgctcccacgtggttcagaaagcgaggccctggccctggtggcagcaagcagctgtcacctccacctgcgaatggggatgaggatcccagctcc

SEQ ID NO: 856767 - DNA, 641 bp, Homo sapiens
ccaattacctttcaaataagcagcaaaattagagcttgacttttagttatcttgcttctaccttacactctagtaacaagcaaagcaatatgtaagagaaggrgaaggaacaactgaagaattagatggttcacagccctggaatattgtagttgactgtcaggtttagttcatcattggtagtccttctctttcatgaagccctccttaaattcctgttctcctccagtcagcttcaagatcttgtttcctctgaattttcatagtgtttcatgactttttggtgcgatttttcttttattaaaattgtttatgcaaatattttacaagctccttatggggaaggccttgtattagttagttttatatcacccctagtatctaacactgagccttgtacctagtaagtaaacatttgtcaactaaatggttacatactttgtaacagtcacaagaaagaaatccatacaataaagactcattattattctgaccatcaaatgacaactgtcatttatttttcaggtatttattggtaacacggatattatgatctttcagactccttttaagaatattttgatgccttaatccattctccagacaaaactcatgaccaagagcagtaaagagcttccacc

SEQ ID NO: 856768 - DNA, 509 bp, Homo sapiens
agaaagcttccttctagtttttatccatgcatattcacttttacaccttaggcctcaatgagctcccaaatatcacttcaartattctacgcaaacaaaatttccaaactactgaatccaaagaaatttaacactggaagatgaatgcacacatcacaaagcaatttctcagaaaatttctttctttttttcatctgaagatatttcccttttcaccataagcccaaatgcactcccaaatatcccttcacatatactaccaaaacactgtatcctaacacctgaatgaaaagaaaaaattatctgtgagaggtgaatgcacacatcacaaagtggtttctcagatagatagcttccttctagtttttatcctgggaatttagtttcttcacctgcggactcaacggtctctcaaatgtccattcacagaattggcaaaaaaaaatttccaaactgctgaatccaaagaaatgtttaattctttgagatgaatgcacacatcacaaagc

SEQ ID NO: 856769 - DNA, 578 bp, Homo sapiens
tatcttcagattaaaactagaaagaagctttctgagaaactggtttgtgatatgtgtattcaactcacagtgttaaaccattctatggattgaccagttggcaaacactgtttttgtccattcagtgaatagacatttcggtgctcattgagaacaatggtgaaaaagtgaatatcccaggataaaaactggaaggaagctatctgagaatccacgttgtgatgtgtgcattcacctcatggagataaagctttcttttcattcagaagtctggaaacactgtctcacagaatccgtgaagggatactcaggagtgcattgaggcctatgttgaaaaaggaaatatcttcagagaaaaactagaaagaagctttctgagaaactgctttgtgatgtgtgcattcatctcacagagttaaacctttctgtggattcagcaatttgcaaacactgtttttgtccattctgtgaayggacattttggagctcattgaggccaatggtgaataagtgaatatcccaggattaaaatgagaagaaagctatctgagaaacggctttgtgttgtgtgcattcac

SEQ ID NO: 856770 - DNA, 572 bp, Homo sapiens
aaaactttccttagatcagcagtttggaaacactgttgttgcagaatctgtgaagggatattagggagttctttgaggccaatggcaaataagyaaatatcccaatataaaaactagaaggaagctatttgagaaatcgcattttgatgtgaattcacacatcacaaatcacattgtgatgtgtgtattcatctcacagaattaaaccttccttttcattcagcagtacgggagcttaaataggccaaagtggaaaaaccgagtatctcaggaaaaaaacctgaagcgatctatctgagaaactgctttgtggtgtgtgcattcatccctctgacataaaatgctctttttattcagcagtttggaaacactgtttttgtagaatctgcgatattatatttgggagcacctagaggcctatggtgaaaaaggaaatattttcagataaaaactagaaagaagctttctgagaaactgctttgtgatgtgtgaattaatgtcacagagttaaacctttcttttcattcaacattttggaaacactgtttttgtcgaatatagtaagtgatatc

SEQ ID NO: 856771 - DNA, 498 bp, Homo sapiens
aaagaagctttctgagaaaatgctttgtggtgtgtgcatttatctcacagtgctaaaactttgtttggtttcagccgtttggagaaactgtttttgtccattctgtgaatggacatttgggagctctttgaggccaatggtgaaaaagcaaatatcccaggataaaaactagaaggaaactatctgagaaacagcattgtgatgtgctcattcatctcacagtgttaaaactttcttttcattcagtagtttggaaacactgttttgatagaatctgtgaagggatatttgaaagctcattgaggccataggtgaaaaagcctatatcccaggataaaaattagaaggaagttatcttacaaaccgctttgagatgtgtccattcatctcacagagttaaaccttttattcagcagtttggagamcatgtttttgtataatctgtgaagggatatctgtgattgcatggaatcctatgctgaaaaaggaaatatcttt

SEQ ID NO: 856772 - DNA, 658 bp, Homo sapiens
aagagaatagggggttttggctaaaatttccaagtagaatatgataagttaccactgtttcttatagcaatgtatcttaccatraggcattagattttgttataaaaaataacaaaagattaactgttacactttcaaacagaatttacaagaaacatgaaagagccagaatttgccggtttcagaaacagaactagtttccctttccagtctctgcaaagagctaagtactctaaaggtaagaaaggtcatcaaaataaatgtcatttcaaagttgtggatgttaagaccctctcgtatatactttaaactagacaaacataattctaacattcttaagagtattagctcactgcacatagactttcagcccaagtctgagaagggccagtttcaaagatatttgtgagtatgctgcttgtgagtgtactaaagcaagcaccataggcttcacttgtgaacaggaggatctattttaattgcctggtcctctctttctccattatgtgctgggcatgtggaagaaatacactgtctcaatggatttgtaaatagagaaaaaccataatttaaaaagtgcacaatagacactgcacccaaggatcccatccacattcggtctggatatagaggttgagatcttgaatatcaaacagat

SEQ ID NO: 856773 - DNA, 638 bp, Homo sapiens
taaattcacagatgtataatactcgagaaaccacttaaggtaactaacttacattttcaaactgggaagagctaattatgaatggatctttgtatgtgactaccaactgacatgttcaattgatatcaatttttaattttccagattaacccatttcttccttattttcatttcattaaatgttactacctaccacactgtttaaactaaaaattttacaatctatttcacttctctatttctttaatattatttatcaatatatttttctcaaaccctgttaactcttccttcaaaatatcccaattggatccttctcactaccatcttgttaccccctggcctactctaatagccccctgcaaaatctctccactcatcttctggcctctaataatgttctttcatgaagtagcccaaatgatcttttgaaaatcttattaatatcataccactcctctactcaaaaaccccatggtggatttatattctgcactcaatgaaatggaatctttctaccttggcctacaagaccctagatgacctggatccaggctacctccccaaatccatcccttacaattgtccacwtttatactgctccagacagtttcgatattcaccaaatatacaatgtg

SEQ ID NO: 856774 - DNA, 587 bp, Homo sapiens
gatttatattctgcactcaatgaaatggaatctttctaccttggcctacaagaccctagatgacctggatccaggctacctccccaaatccatcccttacaattgtccacatttatactgctccagacagtttcgatattcaccaaatatacaatgtgcttttccatatccttaatttaatctattttttgtagacacttatttcagagattagaagccacttacttctaaaataatggtcaatattgtggaaatgtgtattgtaagtgtaatcttttatttattcattcaattgaaaaatgtttatatgacacctacattgtgttatgcctctcaaataaagtagactcccagccatcacagaatgttcacaaactcattcagggttagggtttagaccaaaagtgattatcagaggagaaatattagtgctaaccaaggaatcatcttttcaccattagtcacctacttttccaaacagaattatasctcctgaggtgaaaagatacataataactctattttaatctattaatgataaatagtatataaatactggccaacagctttctaaattttcttctcaa

SEQ ID NO: 856775 - DNA, 630 bp, Homo sapiens
ctgccagctccatgactgacagccggatccttagcgggccacgggggtgggcgaagggagcagtgggatggctcaggctgtaggtgtccattactcctcygcttagctgggggccctggggcattattcttggcattattcttggctctatcagtcgttgtcccctgccaacctccaggacagagaggcctgggttcaaatcctgcctctgccactttcaggtggtatgatttctttcttttttttttttttctgagacagtctcgctctgtcacccagtctggaatgcagtggcccgatcacggctcactgcagcctcgacctccccatgctcaggtgatcctcccacctcagcctcctgcagagctgggaccacatgctgcaccaccacacccagctaatttttgtattttttgcagagatggggttttgctatgttgcccaggctggtcttgaactcctaggctcaagcaatctgcccacttcagcatcccaaagtgctgagattatacgcgtgagccaccacgccgggcctcaggctgtgttattttgagcaagctgcttgccctctctgaggtttgatttcctcatctataaatgtggtcataataggggcccttacatgggaac

SEQ ID NO: 856776 - DNA, 635 bp, Homo sapiens
gcgtgccaggccttccccattgcctcctagtcctccttatccgtggaagcgtcctctgtggaaatctggttccccacagagcctccccagccccacccaggctaggccctgactcagccacgtagattccycactcctccatgaggcaggaatacaccagccccagagcatagcaggccctcagtcaatatctcctggctggctggctggctgactgtgttccagaaagagccctcgacagccccagagaatgggtctcaggtgagggagtgggcacccctcctgggcacccactgtgcgctgggtctcagggagaagttggaagaacagcctgggtcctttcctgggtggtcacactgtgtgccacaccttagagtggtctctcttgggctgctcctgccctggcaggacaggaggtgaggatggaggaggagggtggggcagagagcacctgtggggcccacgtcaccccactcagggccaccggccactgagaattaactttgcttccttggaatataaggaaaaacccgttaactgtatccagacatgaaatcagatctcaggcagaagtaatgagttcttgttttatgttaaatttagcagagactgctattgttctcatggaaattttg

SEQ ID NO: 856777 - DNA, 522 bp, Homo sapiens
gtgggagcaggaagtgggagggatgtggggcccctaccctggggatctacagggggcagctggctcagcggggtcctcagcaggtgtgactgcctgggggaaggggcttaaggggcctggagcccctactttctccttcccttgccttccgctctctgggactgctgggccttggttgtttctagcccagtggggttgagccctatagcggcatcccgagccccttgcctgcccgcagatggggaggggagtgctcaaggtcacatgggagttaggggcagggctaagatgcaaggccgcatacccggttgcttccgtcatcccccccaccacctctgctggcccggagtcatccttgcatggcacggagctgttcctgcgttccagcaccgtgctgggygctctgcactgtgatctagttgactccttgctcccacgtggttcagaaagcgaggccctggccctggtggcagcaagcagctgtcacctccacctgcgaatggggatgaggatcccagctcc

SEQ ID NO: 856778 - DNA, 615 bp, Homo sapiens
aaaactaaatgtattacaaacacatgaaaaaaaaaattcactaaagtgtgtagagaaataaggagccataaacttkggaagtgtgtggagtctgtaagactgcaggcaaaaggaactgtatgtaagcactgtcttctaattcataaatttgtttcccaaggggtataggctgagatttttttttttttttttttttttaagaaggagtttcaatcttgttgtccaggctggagtgcaatggcgtgatctcaactcactgccacctccacctcccaagttcaagccattctcctgtctcaacctcctgagtagctgggattacaggcatgtgccaccacacctggctaattttgtatttttagtagagacaggctttcaccatgttggtcaggctggtcttcaactctgacctcaggtgatctgcctgcctcagcctttcaaaatgctgggattacaggcgtaagccaccacacccagccaggctaatgattcttaaaccactatttatccatactggagtatagtataaactatttatctatactggagttaaactattaagtgaattgatgttagattgtggaagacaggttttttaccattgaaatgggaggt

SEQ ID NO: 856779 - DNA, 601 bp, Homo sapiens
actctctttttaagaatttgattgctattaataaaactgctgtgagccttctagtacatgtgtttttgtaggcagaaaacctcatttatattaattaaaattcctggrccctggcatagtcttttgggaagatttttagcttcagcttcaatttttttaaaaaatatataaagtatgttttatttatatgtcttaactcaattttggcaagttaaatttttatagagatgtatagatttagtcagtattaagcttcacaaaaaccttgactttcttatccagggtattgtaaggggaaaataaaataaatatctttctacttttgcttggggtgcataatgttctgttagcatctgtctcactagggtcttttatccagattctattttaaattagataccaagtttatatttatttaaataaaataatcaaatgaatcaaccaatctataataacaaaaaattatcatgtgtttttcctggtgcttacaacttcaaagaagtaattacagatatttaaaactataaatctcattataagataaaagttttgatttctaaaaaatatttttattcttacctcagtcagttctcaatttctt

SEQ ID NO: 856780 - DNA, 633 bp, Homo sapiens
tctcaggtcacttaccacccaaattagcaattgttaatagaaccagatcattagtttttgctgtactgatttccgtgtcactgcctgagtgcacatttcaatggatagaggatattccaggatggcctcttgtacatgagcaagaagtctggtgagttttgataaatggctccatttagagcatgaagaatgacctaactgaaaatgctgaccactgaattgggaaggctaatgaccaagaataaaaagtctagttcatatctatcaaataaatagaagaaaaactaaattattcaagataaggcaaataataataatgttaataataaaatagtaatcataatcacacaacaaagagttaccaattgagaacctactctgttcccagccatatgttaaatgatttgcaaacatgagtttgattaaccctcacaataacataataaaggaaatgttataatttcaaatttaatgatgaagaaactgaggctttgaggcaataatacaattaaaagtattacatgtggagagcacaaagcccaaactccttctgaytgctcaagatgccaaattgctgttgactagtaatgcatagaaatgttttcttctctgttactatgtatgcatgtgttt

SEQ ID NO: 856781 - DNA, 532 bp, Homo sapiens
ctatactaatcaatatcacagtaattaaaatcattcatgattaatgggctggcatttttatagggcattgttgtttgcaaaagcatttcacmatctattttgtctaactgcccagtaggagcgagccccaaatcacctggctaccttttgtcctttttttccatctgaactactcctgtctttggaataccttgccataggatgcaattgtggatttcccctctttctgtgtgagaaaatccttttctctcacaggcaaagactgctgctggaatttaaagattgccacttattttgccaactattcattgaatttaccttctctctatacaaaaaaaacccctgagataccaggactttgagaggccaatgtattactttgtgaccctaaggctatacctatttgcattatttctctctggaagacagagtagtcaatactataattcttctcttatcgactctagactgagactctaaattttgagttctaatcctggcactgagattaatgtaatcatggaaaattgac

SEQ ID NO: 856782 - DNA, 642 bp, Homo sapiens
catacatatttatcagcacattaagtgtaaatgatttaaatgtaccaattatatggtgtagattgccaactagatacaaagaaaaaaaaagactcattatatgtttcctatgagaaacacacattaaatctaaacataagttgtttaaaagtaaaaagatatagaggaaggaatgaatagatacagcacaggagatttttagggcagtgaaactattttgcacggtagtgtaagggtggctataacacattatcatttgtcaaaatctacagaactgcacagcaaaaacagtaaacttaatgcaaattgtggacttcagttaataatcaggtattgatattgattcaccaattgtaataaataatgcaagataattatgatacaagaaactgtgtgaaagagaggaggaaatggaagaaagttctctgtaatttctactggatcttaaacctaaaattacactaaaagaaacttgttaattttctttaaaaaattaatagaaaaaaagcatactaattgtaataaaaaggaagttgtattgtctatattaatatcasataaatatatgttataataaaaagattatttcttaataaatggataaataaatgaattcatccaaaggatgtataattcaaaatg

SEQ ID NO: 856783 - DNA, 589 bp, Homo sapiens
cattcataacgggtaaattcttgaagttctaactccacaataaaagaaaaacttacagcacattcataataatattggatttgtagtttcaatcacaaattaaaaccaacaataatgtttttatgcccattatccattgtctctatgttaatgaattccattgatccatcaacttatatttagggtttctgattgtctattttgctgacaagtcaataccttcaactcattgaaaccatggaaaattcataagatgtgcaatagaggtgagttgatgtcagatggctatctgataattcttcccacgtgtgggttactctgactctgagtatcaaaaagaaaaagtccatctcttcctagagaactgtgagattttcagcctctcttgcagctagattgagagcatgtgatctagtttttcaagtcagtttttcccaccttagactttgaattggaatttagggcaaaaaccatagaacaccaattttagcaatagtggcaacatcaycaaggccccaggaataggagcagcaatagtagaagcagtgcagtgcacagggagaatacagtatttggtgctgacagtgac

SEQ ID NO: 856784 - DNA, 638 bp, Homo sapiens
taaattcgagttacctaaaaattaattgctttttatatgatgttgaaaaaatttagccacattttttcattactctattaactattgttttctgttcagaagcaaataattatccatgactatawgtcatggatattctaatgacttagacaaagaggtttgttttctttcatagatctttgttttagacaatagctttgaaatctgaaatgacattgtattccagggtatacagccaaagccttccacttttcaaagagatattgttcctgtatatcatgaaaggaaatcaatctctcaaaaaactaatggagtctgaagagctattgggatttcctcagtcttcattgtattaccagcttgccagttttctagaataccccagtctcacaacagtatcacgcctgttttgtatgagttcattaatactttatggaagataaggctgtttctcagatatttgggactgttcacatactctaagattctgagtttgagaatgccatttgagatgggcactcactaaatgacagcttaaaggtgtactacatctatggctcctgtgttcctgttctcataatggctactgggatatttggctaataagttgcatgctagaagaatgtaatgaatttcaa

SEQ ID NO: 856785 - DNA, 515 bp, Homo sapiens
acacacaggactggtctaacaagtcctgatctctcaggccaggccgcctccttctcctcccccattatccatgtgcctctccaaggccctccactgggacagttcacactgagttttctctaatcctgagaagagactgagttacttacctggatccctgtgcaaccttgccaaagacacctcacctagccttaaaaggagaaagcagggctttagggagaggccgataaggaaacaaagataagagggaggggcaaaaaaacagaggaaggtgttagactaaaggaaggggagaggccaaatgcctttctccttcctacaagaggagagagatcaggtacactatgaaaaataagaaaaagcctcattgaaatgcaaaggtattgwttaggtctcatgtcataaaagagaaatcctaaaattaactaagacaccttatatccttccataccctagactcggaaaaaaaaaatattcatggaaaagcttaaccttagagtttactaggggtcacc

SEQ ID NO: 856786 - DNA, 577 bp, Homo sapiens
gagtccctgcaagtaggcctcagtgtgagcctgcagcctgcagggccaaacgttcaggtttctgtcatttgatctgatacaagcttaagtactgattgcaatcatttttgttgagttgtgtgtgtgtgtgagagagagaaagacagggtctcattctatttcccaatccggagtgcagtggtaccataatagctcactgcagccttgaacttccgggctcaggcgatcctcccacctcaccctcccaagtaactgggactacaagctacgccagtaggccttgctgttttctttttaaaatttttataggccgggtgcggtggctcacgtctgtaatcccagcactttgggaggccgaggcgggcggatcacgatgtcaagagatcgaggccatcctggccaacatggtaaaaccccgtctctactaaaaatacaaaaaattagctggatgtggtggtgctcacctgtagttccagctacttgggaggctgaggcaggagaatcgcctgaaccctggaggaggatactgcagtgagctgagatcrcaccactgtactccagcctggtgacagagcga

SEQ ID NO: 856787 - DNA, 642 bp, Homo sapiens
taccatttaaactaaagcaggaaatggggtattagtgtgtgtgaaatttctgcaaaatttagatgaaatactggacagaacagggaaacttgtctctgtgaaatgcctgcctatggagaccagtgggagccaaaactaacaggcatgcagttagcagaccatttagaaaagagctatcttgttcagcagaataccagacagactcaggaatttgtggcatcagaaacaggcagcatcaagctgtgttggggcccgtcctccacctccacccagaacaccaacattcaagtgcccaatccactccatcccacccaagtcggaagatgttgtgttttgtttttattttctcatggaaaagttaatgagagaagctagggatttggaagccctggccttagctgaaagcgaagtgaatcatgagactggaaacaggggtgcttattcaaaatgtgcatatagcatggttacatccttggccgttggcaaagacagcatcctggtcacccagacatttctgcagaaactgactagctgcagagaaagacctccacattctgatttgtggaattcctcaaacaaaacagccagctccccaccacttaacccmaaatgaagttttccagttggtaatccccatccaag

SEQ ID NO: 856788 - DNA, 556 bp, Homo sapiens
actagttggtgagacaaaataaacaataaaagcgtgatcaggtatcgaaagtttggccaggcgcagtggctcacacctgtaatcccagcactttgggaggccgaagcgggcacatcagttgaggtcaggagttcaagaccagcctggccaacatggtgaaacctcgtctctacaaaaatacaaaaattagccaggtatgggggcaggtgcctgtaatcccagctactcaggagtctgagacaggagaatcgcttgaacctgggaggcggaggttgcagtgaccggagatcgcaccattgcactccagcctgggtgacaagagtgaaactctgtctcagaaaaaaaaaaaaaaagttctataggaatttaagaaagtaaaagtaactgtagagtgattacttataatggaagaagtagatacttcaggcagggttgtttgatgtggtgggarggtacaaggtacaaagaacttctctttccatcctcatctgctcttttatccattcacccttattcaactatttgtagtatctgagatgttctgtagactttgata

SEQ ID NO: 856789 - DNA, 654 bp, Homo sapiens
catctgtgtgtccctctatccatctatttatctggcttactttttgatgcatttcaaagtaaattgcagacattagtagttttccaactaaatatgtcagcatgcaaataaatatatgtaatttttcttttgatataaaatttatatctattgaaatacagaaatcttaagtgtacattctatgagtttagaaaaatgcatacacctgtacaacccaaatccctgtcaagatatagaacttgtcaccccagatactttcatcatgctccttttcagtccacactctcattctcatccccatagcaacaactgttttgaagtttttgtactatagtctgttgcagaatttcatatttcatataaatggacccatacgatatggaccgtctgctgaaggcatctgaaacccttcactaggataccctaaagccttttactccatttttatttctcaagccatctcctttattctctcaggtagacattattccattaattttcctaagttgtgtcagactctttggaatattgcagctgtcttcagtcctcataagaaatgaaagaaagggaaaagatttgctgctttccttacaacmgtgagatgcttactattctgtagctaaatctagaatatagtagttaggagtcagggag

SEQ ID NO: 856790 - DNA, 593 bp, Homo sapiens
ctcaggctcttgtgtcttctgactggaatgtgccctcactgagccggcaccttgggatgtgttggagcagcatggaaggaagagagtggcactaaggggcagggatggaactatgccattagctcaagagggagctgcaggctcggctatgggcaggctcggctacagcagacagagtgcccatcaacccctctcagagggcgtcagcgtgggcaccaccaggagaggctggaggctaggtcatggattggctgactccaagatgcccagcacctcttgctcccatgtctaaggggtactgtatggacacatgaagctttgtccttgtcctgggcccagaaggtaccagttgatgctgcctctgccacctcttagctgtgtgcccttgggcctgactctttaactaagactcagatgccttatctgtaaaatgcaaggtttaagcgccttcctcccaaccctaatgcttgatgttctaacttatccaaaatcctatttcgggggtggggggtggtcctaaggttgaaaataataaaatcaaggtgcaaagaagtgaaagcaagtctctcaagsacacttggccttttgggggc

SEQ ID NO: 856791 - DNA, 614 bp, Homo sapiens
gctgtgtggctttgggcaagttatttgtctttcctaagtttcattttctttatgtggaaaatgkgagtgataatagatacctctcaagattctggtgatgattaaatgaagtgatgtgtgtaaagtaatgactgtggtgtttggcacacaggatatatgataaataaggggctgtggcagtgattggcacatagtagatgttcaataaatgttgaatgtatccatgaataataacacttcccacttgtgtgcattacaaaaccctcctccaaacagctgagcttggatttagacctcacaattgttcagggttgatcttctcattttacagtgggaaatggaggcccagtgaggttatggtaacttgcccaaggcttcccagctggtagatggaatggggtcttagttctcctacctcccagggcaaggttgctgccaccagtccaccctggacagctcccaatctgtgctgggagactgacctcatccttcctgatgagctgcccctgctccttggagaccaggcacagagcctgtgctgacctccccagcacaacctgggggcagaagcaagcgggccgctttctgtccatttcatcttaatacaacattca

SEQ ID NO: 856792 - DNA, 629 bp, Homo sapiens
gttataggagttctttatagccaggatacaagtcctttaccagatatacgacttgcaaatattttctctcagtttgtagtttgccttttcstttacttaatggtgtcttatgaagcacaaaaacttttaattttaatcaagttcagtttgataattttttcttatagattgtgtttttgatattgtctctaagaactctgcctaatcaaaggtcacaaagatttactactgtattttctcccataagttttacaagtttagtttttatatttaatcttggtgcattttaagttttagtgatttgtgaaggccctaaattcatttttgcatacagatatccaattgttccgacatcatttgtttaaaaagactatcctttcccacagtgaatttcaaaatggttccagctattttaggtcctttgcattttcatatgaattttaggactagtctgtcaacatctgcaaaaaaatggttgctggaattttgataggaattgcgtgaaagctatagatcaatttagaattaattgccaccttaacaatattgagtattcccatccatgaacatggaatgcctctttatttttttacgtcttcaatttttctcagcagtgttttctagttctc

SEQ ID NO: 856793 - DNA, 629 bp, Homo sapiens
gttataggagttctttatagccaggatacaagtcctttaccagatatacgacttgcaaatattttctctcagtttgtagtttgccttttcgtttacttaatggtgtcttatgaagcacaaaaacttttaattttaatcaagttcagtttgataattttttcttatagattgtgtttttgatattgtctctaagaactctgcctaatcaaaggtcacaaagatttactactgtattttctcccataagttttacaagtttagtttttatatttaatcttggtgcattttaagttttagtgatttgtgaaggccctaaattcatttttgcatacagatatccaattgttccgacatcatttgtttaaaaagactatcctttcccacagtgaatttcaaaatggttccagctattttaggtcctttgcattttcatatgaattttaggactagtctgtcaacatctgcaaaaaaatggttgctggaattttgataggaattgygtgaaagctatagatcaatttagaattaattgccaccttaacaatattgagtattcccatccatgaacatggaatgcctctttatttttttacgtcttcaatttttctcagcagtgttttctagttctc

SEQ ID NO: 856794 - DNA, 512 bp, Homo sapiens
atgaatgactctaaggagagctgggccctggtacagggaggggcagaggtctgtctttggaaggctttaggaagaagggagaggtggactggaagactcagatctagggctcgggggaaagcaytgggccatgaggtagattggggacaagtcctatatctgccgtttgctagctgtgtgacctcaggcaagttacttaaactctctagtcttagtttcccatcagcaaaatgggctttattgttccccggctcatggaatcattgtgggacacaatgagatcagggacatgagagtaacactggccaagagctcagatggggagtcaaagtcctgatcaaagtctggctctatcacttattagagctgtgtggccttgccctttgatactcagcttctctgagccccagtttcctaatccacaaaatgggaataagtgtactcagccacaggtatccttgaagagaggcttaaataggatttttttgcatgttaatagtgctttgcaaaat

SEQ ID NO: 856795 - DNA, 473 bp, Homo sapiens
tcaggtctgtgggtagagagtcagggaaagacattttggtgcattatgaggaagaattgtaatgtagagctgtgcttcatattccccrtgcatacctctgccttagcacctgcttttatgacagtcttctctacaatgagacgacatctttctcatctctgtattctcagcacctaatccagttcctggcacagtcctcaataaatgtttattgtcattcctgtgattattaattactgtcatgaatgcccactatgcagatcacttttcttgctttatcttgtttaactctcctaatgctttagaagtaagtatatttattaccccactctacagttaaggaaaccagagctttgggaggttaaggaatgggcaaaatcacagccagtaggtagcagaggctggatgtgaaattaggtctgtctgactcaaaaacctgtgttcctaaccatcctgcccaccaggatcctgga

SEQ ID NO: 856796 - DNA, 623 bp, Homo sapiens
aaaacaaaacaaaacaaaacctgaggtatttcttagaacacgaagcatgaatcacttacaccagagatgagaaaagcaccatcaggtgcttaaaacacaattataattggaaagaccaagaatttgtggttcatttctagcaggtgaacaaatgtatgtttataatggtgtaaaaaccctggtttccccttcccattcccggtgccttcccagtgtgcttggaacactctactgtgttattcacctgacggattaagctcagcagaggcaagctgcctaggcatgtcgtgtaattcagcattaagtatcctattgattcactgaagtgctgccatggatgttaatggagacaaatattgtggctgtgatttttcaaagggctgagtaattcccgagcatcaataacgtgtgtcatgatgtaatgcagggagacctccagatgcttgacttgaggccaactacggagggcagagctgatggaagggcccgttggatactgacccagggcttggggagatagcctgcactttctccagacctaccatcagtaaggatggtggaaattggggtggggcagggactgctgatggcrtttcctagtcactcatcacaaggtcactgat

SEQ ID NO: 856797 - DNA, 466 bp, Homo sapiens
tggcgtactgtgatttttttgttgttgctatggtcctttctacctggatgaattccatctccctcaytggaccagaagctcctcgaggaaactctgcgccctttagactccaatcttcttggagaagctacagggtgtaggagaaagaacatgagtttggaatcgctggaaactgtcaaatctcagctccttccacttttttcgctgtgtaactttagaattcctttagcctcgtttttccttctttctttccacatagcatggggccttcaactgctggagggtctgggcggtcatttatccttgctgggcctcagaggcctcatgagtggtgcctttaagagtgcaatgaggccgcagcagaaactatctctaaggccagctcttaaattctctaacccatgctcctggccaactctcctctgtccagccgcaggtcctcatagaaaggcagagacactgaata

SEQ ID NO: 856798 - DNA, 581 bp, Homo sapiens
gttgaaatgaaagaaaaatgttaaaggcagctagagataaaggtcaggtcaccrgcaaaggacaccccatcagcccaatggacctctcagtagaaaccctacaagtcagaagagattggcaggcaatactgaatattcttaaagaaaacaaattccaacccaaaatttcatatctgaccatactaagcttcataagcaaaggagaaacaagatccttttcagacaagcaaatgctgagggaatttgttatcaccagacctgccttacaggagctcttgaagaggagcactaaatatggaaaataagcccattatcagctagtataagaaacacactgaaatacacagaccaggtcgtcatagaacgagacaataacaaactctgaaatagagtcagtaaacagactaacaccaaaaaaagctcaggaccagacagattcatagctgaattctaccagatatgcaaagaagagctgaaactattacaaaaaattaagacagagtaactcctccccaagtcattctatgaggccagcatcatcctgatatcaaaacctgacagagacacacacacaaaagaaa

SEQ ID NO: 856799 - DNA, 587 bp, Homo sapiens
cggtgagagcgaggatccttgtcttgttacagttctcagagggaatcctttcatcttttccccattcagtattatgttggctgtgggtttctcatagatggcttttattacctcaagttatgtcctttctatgctaattttgttgtgggtttaaatcataaagggatgctggattttgtcaaatgatttttctgcatctattgagatgattatgtgatttttaaaatgttatgcatatgtggtgtatcacatttattgacttgcatatgttaaatcatccctgcatgcctggtatgaaacccacctgatcttggtggattatccttttgatatgctgttggattcgtttagctagtatttgttaaggacttttgcatctatgttcatcagggatattggtctgtagttttttgttgttgttgttatgtcattttctggttttggcattagggcaatattggcttcatagagtaatttagggaggactccctctttatcttgtggaataatggcartaggattggtatcagttcttttaatgtctgagagaattcatctgtgaatccacctggtcttggacttttttt

SEQ ID NO: 856800 - DNA, 611 bp, Homo sapiens
ttaaaaatgcccacactactwttttgaaagtaaatgaggtaatgtatgtgtcagaacccaatacccaaagcgatcgtagtaagaggtggggcctttgggaaggcattaaattgcttagggaatgagggtggaaccctcatgaatgagattagagccttataggagaggttggagggagttgcctggcctccctctcccatgtgaagactcagcaagaaaacattatttaggaagcagagagccctcatcaaacaccagatctgctggccacctgatctggcactttccagccttcagaactgtgagaaataaatttctgttgtctataaatcacccagtctaaggtgttttgtgatagtagcccagacagactgcaatggtataaaagtgcttcatcaagagtaaacacagggagcaaatattagacattccatctccaggcagggcagactgcagctggaacacagacccaacaagattttatttatacaagaaaagggaccattaagttaagggctgtttgcgtggaggtgccatgagggagcagagtgtgcatctgagctccgcctgcctctccgcctcctggctcaggctgtccaaatctgaatcac

SEQ ID NO: 856801 - DNA, 554 bp, Homo sapiens
ggagggtacatcagctgaatcttggctctcccttcaccaccccttcttccccagctggctccagagcacacgctcatgtccttccggaaggccctcgagcagaagctgtacgggctccaggctgacattaccatcaggtaggtgtagcggaggggagatagttcctctacccctcccacacgcttcggcatccacctgggtctctgctgggggaacctctggtctcagagcctctgagatgggaggaggaagacttagattatccacagcagggcaggcaccctgttcctgcagactccaggatgtaaaatagaggaaagaacaaatgctcttggtgcaagcaggagcactgccacagagccacttgaagggaaaaatagatgatagagctacaacactctcatgagggaaataaagcaagttgcagagtgatacattcactgtgactccagttaygttttaaaataccacaaaaaagtgacatatacactttctccatgtacatatataagtagatattagtataaatggcaggaagaatccatactaatctc

SEQ ID NO: 856802 - DNA, 657 bp, Homo sapiens
gtgcagcaaatcaccatggcacacgttaacctatgtaacaaacctgcacgtcctgcacatgtatcctggaactcaaaatcaaattaaattaaaaaaaatctattactttgtcttgtttaaaaaaatgagttacaagttacatacaataaaatatgcccttttgaatgtgtagtcctatgagttttgacaagcactcgtggttatgtaatgatcactactaccatgatcaagatatagaatatttttatcacctctcaaaaaaaaaaaaataaagtttgggcattgatccagaagaaatagaatgccgagaatgaaagtcttatatgggaggaacttcaactcctccatgagttttattggcaactgaagccacctttctctttctgatgatgctctttcccctttgcttgaagactcttaacaagccctcaaacaggctcatctaagagatttacctgaccagagaccctaatttgtcttttgttccatccataccctcttctttgtctctaaggccttaaatgttgtcagatcccaacatgttctgggagccaatttaaaggcraatttgcaagatgacagaatagccacaaaaaatggcaaaactttgttaatttatatcagacttgtgggtttgtgtgtatgtgtgtgtatttt

SEQ ID NO: 856803 - DNA, 646 bp, Homo sapiens
cgttcattcattcattcattcaaatgttcattaaatgtctaatatgttcacacacagtattttaggtactggagatatarcaataaactagggaaattaaaattttctcatgtaacttatattctagtggagaaagagaatgaacaaatgcattaaaatatacagtattttagaaggttatctatgtaatatgaaccccaaagtatctgagacaggtctcgatttagccaaagttaggcatgcacttgtgatacagcctcaggagatcctgatgacatgtactcaaggttattgggggtacagcttgcttttatacattttagggagaaatagtacatcaatcaatacatgtatgatttacattggttcgacctggaaaggtgggaaaactcggagccatggcttccaggtcataggtagatttaaaaattttctgattggcaattggttgaaagagttattatcaataaaaaggaatgtctggtttatgataagggattgtggagaccaaggttttatcatgcagcatgacatctccaggtagcaggcttcagagagagaatcaattgtatatatttcttaccagacttaagatctgtgtggatgttaattctggttggctcttcctgaattccaaaagggagga

SEQ ID NO: 856804 - DNA, 406 bp, Homo sapiens
tttttattttttatttattaatttattgtttttagagatcgtgggtcactgcatcctccacctcctaggctcaagcgatcctccaccycagcctcctgagttcctgggactacaggcacttgccaacatgcctggctaattcttgttttctttttttaatagagactaggttttgccatatggtctagtctggtctccagctcctgggctcaagggatcctcccaccttggcctcccaaaatgttgggattataggggtgagccagtgtgcctagccacttcatgagtctttaacttttattccccagctcttatcactctatagcaagctgtgctcatcttctgaacttacaactagaattagcaaatgccctaagaggaaaagtcatcctgactgtcgggttca

SEQ ID NO: 856805 - DNA, 633 bp, Homo sapiens
atgatcccaaagaagcatcttttcatgcttttttttttttttttttcttaagatactggatctcactgtgttggccagactggagtgcagtggtgtgatcatagctcactgcagtctctgaactcctgggctaaagtgatcctcctacctcagcttccggagtagctgggactacaggcacgtgacactatgcctgactaatttttcaaatttcttgtagagatagagtcttgttttgttgcccaggctggtctcgaactcctgccctgaagtgatcctcctgcctcagccttccaaagtgttaggattaaaagtgtgagccaccaagccctgcccatgatcaattttaacttgcaattgcatcatttaagaaaaaagttttattcagagctagtagctacagctagcagtacattcagttgctggtaacaaaatccagacagactgaacaaagtagggatcatattctctcatgtaaggacaaactaaaataaagctgtcctgggctggtatgaaagctcaaagrttaatagagaaccagactcccatctttctttagggcatggctttgcatcttcaagcacacatatgatgtttcctagaactccagacattgtgaacatgttttaggaa

SEQ ID NO: 856806 - DNA, 612 bp, Homo sapiens
aagtaaatgaacgtgacattcttctttgtacctcttccattaaaacgctatctgtgaaagaatagaatctgatgggtaatgcgcagaaactaaagcagtgaataatactcattactctcagagactattcagcttggcattatttgcttttcctcttctgatgaaaatctctaaaaatttttcagaagctatgaatataaaaattataacctaaggattcccagcaggttgaattatttgctgaaacacttacgaacagcaggtgtttagagaatatgtggcatcaaaagccattttctctcagccaaagcattcttttcacatggaggcataaaatgctatcaagattcagatttaaaaatgctgaggcatctgttattttttctctcccatctctgtatttgagtttttttttcatttttaggttattttaggcattttatcttttgtatcttttggtagtaaacaaaatattatttatttattattttttctgtaattctttggacttaatcacttgtagacaaattaaacatattcattatacaatttttagtcagtagttctctgawtactcccaatctgaggttaataggaattataggcattatc

SEQ ID NO: 856807 - DNA, 593 bp, Homo sapiens
ccttggagagtcaggtggccccactggcccagtgccctagtgtttcattgtccctgaatttagggaaaggccaaaagaggggttgagaggctgcaactggtgacccaaagatcacagctgccccttccattctgtacctgctctcccttggagcaccttaaatctcagagtcctgtttcagctcccccaagttccttctgtacccaccagtgcctccaaagtacccacttgacactctggtcccagaaatgagagttagatagtgatttcaggtcctcgccagcctccccaggccacgcaggtcctgggtgcagagggaggagcagcccatggccctgagcagccagggagggaggctgagcagtggccttgagtgtggtcactctgaatttgggccaccccagaagccgagggcagagcagcctcctgagattctggatgctggaaggggtgaggcaggaggggaagcatagccagcaactgccagagaatgacccacacaccagcttctgtgccaggagggtactgtgttaccttgggcargttaaacagcctctctgagtttccattttatgcatgttcaaaaatgagtt

SEQ ID NO: 856808 - DNA, 639 bp, Homo sapiens
catccttggcaagtcactcaacatctctgtgccttaacttcctcatctgtacagttggaaatataacatgcctgccctgcttatctcatggagctcctgggaggatcaaaattaccagtgtatatgaccatgccagaaatcagttaagtgtgaggcacgttaaagcattttaaagcattatgtttggaaataatttcaagtttacaaaaagttacgaaatgagaaatggtacaaagaatattcatattcattttatccagatttacttattgttgtagtttaacccatgtattatttattcttattctctgtctcatgtatatatactatatggacatgtggttatatatgtatgtttatacataattttttcctgaaccatttttatattatgtatattatggctctttacccctgaatacttaacagtgtgtttttcctaagaataagattattatatgccacagtatagttaacggttgtatacatttacattgttacaaatactcttatctaatccatcacccgtattacaaattttttgcttggtctaatartactctttatagcattctcccttccagtgcaggatccagtctaaggggtcagatattgcatttggtcttcatgtctttttag

SEQ ID NO: 856809 - DNA, 641 bp, Homo sapiens
taattttatgttgttttaagccactgagtgtgtggtgatcggttatgccagaaatagaaaactcatatgctactcttattattaggcatgaagsccacacttgaaaaaggaatgctttactctcttagatgattgagctaaagatgatgaccttgaatttctgacataaatggtctctataaaccatcatctatccttatctttagattagatacctgtaggtcacctataaataaaatggtaataactaatgggacaaaacccctagaattaacatctgatgacattatttgtggttgcttctgctcgtaagagtggggatatgtgtcagaatgaagaaaagaaatgctccctgaagtaaaggaaggcaggattccttggggaggaagataatagttatttccttgaagtggggcaaattaacaaaggaaagatcaactgttagtcaaatggcctggcctcagcctgggagatggggaaatgcctcacctggagcagcaccatgaaaatgacaagatggtttgtagcagagaaagatgtgccctgtcctgaagaaagaatgctctgggccttcacatagcaatgggatgggactggtacattacttccttagtaagcaggaaaacactgtgttcacaggt

SEQ ID NO: 856810 - DNA, 453 bp, Homo sapiens
ctgtatagcatatagttttgcaatgtaatttaatttttatgtagagccttttggctcataaaaatctggagggtctgaaagaaaaagccttcagagacaccagttcctccatctgccccaracaactggagcagaaacagagggtatcacctcatgagagggtgctgatttctaatcactagtgtctcaaaaattaacatgataaacttgcataatcccactttggactgtaatcctccacgacatagacaaaaagtcattaccagctccctctttcagagggttctaagaatgaaataatagatgtggtcaagacttctacacttgaccttggctgaaaggcagagaagcaatgtgactgagacttttgaagaacagtgtcctggtccctattctaagagatgctaattcactaagtctggaaagggatccagttagttctgacgatcagcc

SEQ ID NO: 856811 - DNA, 626 bp, Homo sapiens
tcatctgaaaaacctgttaaaattcagactcctgaccccatcccctgagattctgatgatcaatacccatttttatcacgtttctctcattcagataccaatggctcctagctaaaactctgagagacactgcacataacaaacaatcctaaaatatattaacatgttgtatttgtgtaatgcctttacctagaaaaaagggttttctgaggtatcacctcatatttctaacaatcatttacagacaagaacacaaatctattaataatgccagttagtttaaaaataaaaaaaagggaagagtttttacttttactttctgaagtatattatatgatgaaatacctcagacaacaaagatgagagattcaatatactccttaggtgacaaataaaaaacacagatttcaaaatttcaaattactgtagttaatataatttcacacttcctactcccagaagtttaagaaaagaaagagagtcacagtataatttaaacacatggatgaacttatccttctgttcccacggctaaattatggtctgggctagtrcaatacttagaatagaacttggcaaaatgcaggtgagtagcagaattgacctgcagcacacatggaccaaaa

SEQ ID NO: 856812 - DNA, 618 bp, Homo sapiens
tgtaaatagttttgtgatttatttyttgccccatatgtaaatatttagagtctcatttcttgcaaacttatttgaagctgagttgtgggtttgggttttgtttgtttctttggttgcagggtggggtggggggtggcaggggagggaggaagggatttttgtacctggagatggagatatcttgtggtttaaagcaaatgtcccactgaaagtgattcaaatatcaacagaattatttcaggttaaaacagactgctttgtgtatgtgtttcctttttgacctaatatgaattataatgagatagtgggggtgattgatttggggaattaggaccaaaggacacatgttttcatgacacatcctgttatgcccaggggtacgctatttgaggaaaggggttaagtgtctcctgtcgttatctatttaccaccttttgctgcctggccaaatttcccccaagtcaaacactgttccctgtagagcggtggagacctcttgatccatcctggagagtctgggctgacttgctgcttcctgctcctgaaggagtccacactccgctcttggagcctggttcccgagtgtgcacttctcaggaaactgaatcagcttatctc

SEQ ID NO: 856813 - DNA, 602 bp, Homo sapiens
ccagggtgcagaggggcatctctaaagaamccgttctaatattgatttaatgctaagagcctggcagttttccctgcagccctggggcaaagagagggttgacccttcaaagcaagtgctgtttcctgatcttctggcttcctgggcacacagcctagctttgggcaaggggaggtgtctatagggaccaagggggctatatcctcactttgaggaatggggtctgtggggtagcctccgcctccaggttgaaaggcagctatgggatcagtgtgacccacttccccgatataatcaatagaataggcatggcctgctttcccaggcctggaacaaacaagggccccgacccctagattagcagagcatccaatttctctgtattagagccctccatccaattataaagaagaatccaatggggagcgtgcttcctctatccaagggaccagtagtgcttccaaatctccacaagtagtgccttgtggagatgttactgcaaaggactcccaatccagaccccaaaagagagctattagatctcaagcaagaaagaattcactgtgagtccacacagtgaagtgaaagccagtttattagaa

SEQ ID NO: 856814 - DNA, 602 bp, Homo sapiens
ccagggtgcagaggggcatctctaaagaaaccgttctaatattgatttaaygctaagagcctggcagttttccctgcagccctggggcaaagagagggttgacccttcaaagcaagtgctgtttcctgatcttctggcttcctgggcacacagcctagctttgggcaaggggaggtgtctatagggaccaagggggctatatcctcactttgaggaatggggtctgtggggtagcctccgcctccaggttgaaaggcagctatgggatcagtgtgacccacttccccgatataatcaatagaataggcatggcctgctttcccaggcctggaacaaacaagggccccgacccctagattagcagagcatccaatttctctgtattagagccctccatccaattataaagaagaatccaatggggagcgtgcttcctctatccaagggaccagtagtgcttccaaatctccacaagtagtgccttgtggagatgttactgcaaaggactcccaatccagaccccaaaagagagctattagatctcaagcaagaaagaattcactgtgagtccacacagtgaagtgaaagccagtttattagaa

SEQ ID NO: 856815 - DNA, 605 bp, Homo sapiens
cactgcatcgtcatgtgtcctgcccttgtccttgaacaggcaggctgcagtcttagagtactcagtttgcagaagagaagaacaagcccagcaataattgcagctggcatttatgaggggttcactgtgcctggcactgtgctaggtgtgtcataagccttggctcattcatcttcacagcaatcttgtaaggattcctttaaaatgaacaccaaaaaattaccttaattgttttcatcccattacaaaagtcatacatggccccttaagtattcacacattacagaaatataccagagacaaagtccctactcattccatcccccagtgacaccccaggatgcttttcctgtttccgctttgtccgttgccatgggtagaagttgcacctgctgccgtgactatgggctgggatcagagaggcgaactcacctgcctgggccaccagctggttaggaacgaggcagaggcggggactgtgcttctcattagcatrgtcacctgtggctgtggctgcggctgctgagcccagagcaggatacgcaccaccctggatggtggggccctggctgtgggaactggattggagttggggaggtgcttta

SEQ ID NO: 856816 - DNA, 634 bp, Homo sapiens
aaatattacttcacctctataacaaaaaaatgtctaggccttttagccagaaactggacttgagttgtcaaatggtgactcactcccacgtttctggacttaagccagttcatgaactttaggcccttggactgatagagagtccgggcccccttgaggaagagccctgcaagactgtgaatatttcttgaagccatctccaacattatctaacgtcatttacaaaggttattgcatactggagaaagagaaatatccagatgtttcagagattactagacactcatatgaattgacaataattgctgggaaccaaaactatctctctggtctattagttaaataaaaacatggaggttagggataagagtagaattgacctaagtcagtctcttatagggccagtagagcaaaaactcactctgtggctatgtttttcccagttctttaatgtgtaattacctccttcaaccatagatgacagtgagaataaaaaggaccaaatgcaagttgttttgacttcctctcttcaccaggaaaattaaccaaaagcgcttctgattcccagagaaaactgctgagttgagtcctaccrtcaaagacttgaaaaaatatatatattcaatttaactca

SEQ ID NO: 856817 - DNA, 586 bp, Homo sapiens
ctttatcagattcctcattattcccagtgtcacctgcacccttctgcactatgcagagaaggtagtgtgattcgagtggagtgtccatgtgatgtgtttcattgtattcttttcttctcttctgttctgtttctttcccttctctttcctttcccacctcattctgtttttcacttttttcttcttcatttctttctttctccctccctcctttccttccttcctaccttcttttctctccctccttctctccctttcttcctttcttccttctctttttcccacctgcctgccataacgatcatgtcttgcctgaaaggacaatgattaatagcatttccttacatttgtatagtttttttaagtactgtcctctatccatttcaacgatttcctttgtcgtctcacttgatccttcataccagcccccatgaaatgaagcagagcagccatttctaaaattattgaaaaggaggtcrcgcaatgagttagtaacaaagccaggacaatgagccatgccactcatttgtttattcattcattcatttattcatattgagttctgcactgtaaaattcattacagg

SEQ ID NO: 856818 - DNA, 613 bp, Homo sapiens
aacacaatccctctttatcagattcctcattattcccagtgtcacctgcacccttctgcactatgcagagaaggtagtgtgattcgagtggagtgtccatgtgatgtgtttcattgtattcttttcttctcttctgttctgtttctttcccttctctttcctttcccacctcattctgtttttcacttttttcttcttcatttctttctttctccctccctcctttccttccttcctaccttcttttctctccctccttctctccctttcttcctttcttccttctctttttcccacctgcctgccataacgatcatgtcttgcctgaaaggacaatgattaatagcatttccttacatttgtatagtttttttaagtactgtcctctatccatttcaacgatttcctttgtcgtctcacttgatccttcataccagcccccatgaaatgaagcagagcagccatttctaaaattattgaaaaggaggtcacgcaatgagttagtaacaaagccaggacaatgagccatgccactcatttgtttattcattcattcatttattcatattgagttmtgcactgtaaaattcattacaggttcttacagggagtc

SEQ ID NO: 856819 - DNA, 595 bp, Homo sapiens
tagaacttcataaagccttggaagaagtcagacacattcaaaatttatttttgctttaaaatgacatttgttcaaactgaattgatagaaatgaaaattagttatttcagagaagccacaagctccaggcacatgcaaggtgtttggacagataagtgtgatgagtactgtatgttggtgttgaaagggttgggaagggagcccacacacctatgtagagggaatcacactatgtgtctggcttcatgtggctgataaaataatggagccaggggaaggagatagttccttttgaaagggcttcaccaaatttccttccttcccccactagccaatcaagctgcttctctttgtcctctgctgagaggtgacttttcattcttctccaggtgcaaggtgtcaaagaaatggaatcataggggaagaagcttgcccctgtagagggaaaatgagctgcactgggtttggcaggatttggtggctgtttcatgttggctattgtaataagttaagggaatgggaattatgcyaatgaacaatactagtcagttgcctcattcctttcccctcatctgaataaattcttgggctcagt

SEQ ID NO: 856820 - DNA, 629 bp, Homo sapiens
agaatacatcttgggttttactagacactcatcttttgtgttaccacagcacaccgagcatgctgctttgttagcatttagcagtataatattgaaattttcgtgctatttttcatcttccaaatggaaggtgtgctactcatgggtagagactttcttttatctttataattccatcctttatcccatgtctgccaaatatttgtgtttacaaatatttggggaataggttgtgtactactaaaacagagtaatgtaccagcttcaatgggagaataatcgattaagatctgcctaaagagttggggaaaattctcagaggaggagaaaaggatagtcaacaagtatcaaaatggataggatagttgaaaataactatgaaggagaaaaaagaaagacaaaagagatgtagtcacagggtacagaatgagcaaagagagtcatgacttataaatgtgcctggtgtgctaaggaaatagtgaatgatctgagagctgggaatgagatgtaattaagcacaaataggaaagagrtggcatagtgtaggtacactgagaatagattttgttaaaggagttgtatagaaggattagagtttgagtcatgttgcactgggcaatgtggggcta

SEQ ID NO: 856821 - DNA, 542 bp, Homo sapiens
gaagtgtggagaaaatcctaccttccaaagctgttaagcgtacgttgcaggttagtgattacaagaaagcactcggaggcagcaatggkattctctccctaaactgagatgatactcatagtggcaagaatggtttgtaggaaaataagtgatcagttattgagctcgtccgtgataagtgcttttctccatcattttatttaagcttcacaggtgccctatgtagtccgtattattattattcccattttgcagatgtggggcctgaggcacagagaggtcagccttcccaaggccataccctgaggaaatgacgaggcagaatctgagcccagggcagtttgacttcagctcttggagataacttgggccacttctccatctgtgccctgcggccggcatcaccttcggtttgtatggtgctctccggtttataaagcccgttcaccggcatcatcttactgaatcctcccaaacacatctgcgggagacacaggtttaacagacaaggaaatcaaggcttgggggcactgagggacctg

SEQ ID NO: 856822 - DNA, 624 bp, Homo sapiens
catgagagggaacggcttcaagccgtgagaggatggatagggagtggactgggaggatggattgggagtgggcggtgctgactccctgggattacttgcctgggtctcctggggagaggaccgggctggakattgtggactcatcaagcctaagcgggtggtaaaaccctggttgtggatttagattgtctagcaactgcataagatgaccaaggactcaacacagctgcttgagggagaagttggaggagtttgacaaagaaaggttggagagagaggaagggacccaggatcaaggagtggtttggaagtgagcagagctgtttcagccaaggagctaggaaacgattctgtcctaggggttgggggtttggcatttggctgagtggggaggacacacattcacacctgtgcaaagccaagtgggtatgcatggacacaaagtagcagtcagtgggcaagatcggctcccttctgcagccccaccccaggatgaagtggcaccccactagaagggatgcctgctaggaggggtgagggtctcttctaagactcctggtctctcccctttaacttcccctttaggccctccatgtccggtgtgaccaggacacaggaggtcac

SEQ ID NO: 856823 - DNA, 557 bp, Homo sapiens
agacaaaagggaggcctgcctaggggagacaggggagatggaggcctcgccactgagggcacggtcccatcagctgtgacagtgctgacgcatccaggagtgggcactgcctctacctcccaacatctcccagagctctgggtcttgcagagaacaggagagcacagctggatgctcctttgtctccatcctggaaccattagacaaaggaggtttcttggttttgtgtggagaagaaagggaggctggagatgcagggtgagttgtggccagcaggatcataccagggcagggtgctcccagaggcctgctttagagatcaccgcaactggggactgagccaagggaagggattgctgtgagtgttcttgtctcctggggggctcagttcggagtaaggaaaacacagccatcagtttttaggamcttctctggccaaacgcttgacctaccttgcctctgttcccacaacaatactgcaaggtaggtgttattaccctattttacaggtgggaggagacccagaggggtgcccttgcccaggtcaggcagtcctc

SEQ ID NO: 856824 - DNA, 611 bp, Homo sapiens
ggcaactgtgtttgttctcactctggcatgaatatatttgtgtgtgggtgtgaagttttccatataattttgggaactgtcccttctatcaaaatatagcccctctaaaatgtcagctggggaggggactgtcagggtttaaggtgggcgtggggtagaacacgccgcctgactctcttccccggcgtttcatttttcccttgggatttcctggcatgctggcttgcccaccccaatacaactcctgtcgaagaggagacttctaaatacatctgagccaacctgtcattttcaaagacatttccctagatactaaggaagaacaaaatcaatgggaaacacaaaaagcatgaggcctgacctgcctgtttttcaggtccttcttttgttagccatctctccaggctcttccgcctcagtgtgcaccttccgtgtttctgcagcccctttcctggattcccagctccttggctctggctttgtcacagcatggaaggcacaatatcgwcccagcattcccccagtggagctgttccctcctcccagttcccacaggtcaaggtccttgtgagcaaagctgttcccattcatggtagttacctgtgctcact

SEQ ID NO: 856825 - DNA, 668 bp, Homo sapiens
ttcgtgggggcagagactcctgccaggtgagggtacctgtgggtggggctcaggtcccagcaccctggggatgggggaggcaggggtgttggggctgatgtgggaattgggaccccaccctttcccgctcatggaccacctgtcccatcctgcgaatgtgccccctctcccctgcagggagacagcggggggcctcttgtctgtgagcagaacaaccgctggtacctggcaggtgtcaccagctggggcacaggctgtggccagagaaacaaacctggtgtgtacaccaaagtgacagaagttcttcctggatttacagcaagatggaggtaagatccctgcagcaggacactgcacccagcaggctgggaacttcctcaggtggggaccctggaggagcacccaggttgtaggcagaggtcccctcagcgtccccatattcggggggtgttctggacagggtcaaatgtgatgcctggggtcaaatcccagctgtctgtgtttctttccctgcttttcttccctcagaacagagctcagcgggttgaaaaagsgtggacctacaggccaggcaggcagttgctgggcagatgttctcccagaagtatttttttgtgtaaggttgcaatggactttgaaaacgtttcagtttctgcagaggattttgt

SEQ ID NO: 856826 - DNA, 500 bp, Homo sapiens
ttcatatacgtattcccccacgtgtgtgtgtgtgtggtgtatgacttatatcttggggactgttycacattagcacatatagagagttatttcatttttttataaatgactacaggatgtaaaactctctgaataaactataatttatttcattacgccttactgatgggcatttaagttacttcaactcttctgtaacaaacaatactgtaataaagtggacttaaatatatgtctttgtacatccatgtaggatatctgtaggataaatttccagaactgttggatcaaagggtatgtacattcccccacaatatcatttccaaatacatggaaaagtctgagtgagcatagtgaacacctatatattaccatctatattctacaattaacatttgctctatttgttttatcatatatctatttattcatccctctatccatcagtccatcttattttttggatgcatttcaaaataaattacagacataagtacact

SEQ ID NO: 856827 - DNA, 531 bp, Homo sapiens
tggaaattcgtccctaagggagcttcgcactggccctcgagccaccctatgagctgagcgcccctgacaatctctaaagtggctggctggtcgaactcttgctgtctctccccgacaaatcctttcgcctggagggcgaaagcatcgcctctcatctggcggcctagaattcctaggaccaggtttcccccgcccccacctagtgctccaaaggctagacaccttccctgggggctgtgttgcgaaggggtgggtttgggcggggaagccctcaattaggagctgaaggtcgtagtttttagggacagtgtctcaagggagaccctatctcagctctcatctctacctctgaaaataacagcctggagggcaggagacgctgaagttcagggctaggaacccagtaaaayatttttcaaacattagtgggacagacagggagcaacccttgaggaggaagggagttgacaccactgagctccagttgggccctttgcttcctgccttagctgccaaccttgcccttaccca

SEQ ID NO: 856828 - DNA, 612 bp, Homo sapiens
aaaactgatgcatcgctacaaaaatctctttaaatggaagcaaaaacgaagaataagtcatgtaattgacttggtaagaaatctcatctgaatttcagaccccattcttcccatcagggggcactgttgtataatcattcatagcactttagttttttctcccatctccaagcccctccacctttccatcttctctagtaataagatacatgttcaggtcaaatggaatcccagaatttttcagagagatgtgttttatttacttattccttcaaaatggatgaatattttaatatttatgttttttaagcctgatctttgtttcagataacgtaaaggcaaatcggaggtgtaaaagattccgaaaaaatacaatctgtcttgaagttaaatttcacactttccctactatgtacttctttaaagtaaaagctagattttatatatttaataattgagtgtcaaccctatcattttcaccacttcctcatatgaaccatcttgataaaggaactacccatattttaagacggrcaacttgagctttaggttattttagtttccaaatttatattattataaataaacttttaaagttcataagggaataac

SEQ ID NO: 856829 - DNA, 601 bp, Homo sapiens
catgtattcctagagatgcaagaattgtgaaccctgctctcaagtccatgaaccacctgaattataagcaaactttgtatgcctagatcataactcgtcagaatttcaaagaaactttcactccaaataattgcatagtgcttcaaagtgcaggccctatggccaggcacaagtggctcatgcctgtaatcccaatcctctgggaggccaagacggggagatcacttgtcagtttgagaccagcctcgccaacatggcaaaaccccgtctctgttaaaaatacaaaaaaattacccaggcacagtggcacgcatctgtagtcccagctactagggaggctaaggcaggagattcacttgaacctgggaggcggaggttgcagtgagcagagatcccgccactgccctccagcctgggcgacagagtgaaactccatctcaaaaaaaacaaactaacaaaaaaaaacaaagaacaaagtacaggccctagagyttgaatacctggaggtggattctagcaacaccacttagaatagaactgtatatccacaggaagttaatctttctgtgccttgatttcctcatctgtaaaatggggataa

SEQ ID NO: 856830 - DNA, 627 bp, Homo sapiens
cctttagagtcctctgatgaagcctcccgagtctgccttcgagccagtggggagggggagaggaggatgattacagggcggcccccccaggggcatctcaagacactcccaggacagcatggacaggcatggaccctcctgccctgtggctcctgccaggacccctcccctgagctgcccagtgggtgaaagtgggcagtggagaaagaaagtccagggtcaaacgggaaggtcgcaccccctaccagcagaagcccagaaacacgagcagagccaggggcccctgcagggctgctgtgccccttctctcttcccaaataggagtgagcacacctggacctctgagagggcaggagggtggctcctctccactccacggacaaacaggagtggcctggctacataaatttgtgccatcctcactgctacctttggaatagcaactttgaaagggaaccaccctttgggaaagaccaagggtcccaggcctgccccgcctatcactccaaagctcctccttggcagtacccgccccccacccctctgctacagtgggggtgacckcccactgtcagacagtggaaggggctgcttgtcagaaggacaggcctttcgtctccactcttt

SEQ ID NO: 856831 - DNA, 561 bp, Homo sapiens
cacgatggggtataaaccagtccctcaagggctggggagcacctcgaggccaggcagcagctgctccccagcccactctcagcaacacccccagaagttgggcatggttctgcacctcakacctcctggctgccaccaggcctgggtttcagtggctcaggtggatggggtggggctgaggctaagggggctaaattggccccttgaggccaagaaaagggctgaggtggccacacctggcccacccagctcctcccagtctgggtatggtacaggtgcaatccttgccccacttcctgggccgagtctggggctagaggagggatgtctgagaccagacagttatctcgggcagagaggaggctccctaaccctcctcactgagcactactgcctgtccccttcccactctaagctgggtctcactgaacccctcaaagacagtgttccatgcttcacacagaaaaaactgaggctcagagaggtcaagtggtagcctgtaacaacttcaccttgaaggagatgaagtttacctaccctggagtaggggcaactggcagg

SEQ ID NO: 856832 - DNA, 623 bp, Homo sapiens
agaacaaggatgcaaaaatcctagaaaaacattagcaaactgaatccaacagcacatcaaaaagataataaatcatgatcaagtgggatttatcccaagaatgtaagaataatcaacatayacaaataaataaatgtgatacatcacatcaacacaatgaaggtgaaaaactacaagttcatttcaataaatgcaaaagaaagtagactggataaaattaatcatccattcatttacaaaaaacctttcaacaaattttgtatataagaaacatacctcaatacaataaaagccatataggaaaacacacagctaatatcatactgaatgggaaaatgctgaaaacctttcctctaagaactagaacaagacaaggatgtctacttttaccactcttattcaacagaatactggaagtcctcgccagagaaattagacaagataaagatatataggacattgaaattcgaaaacaggaagtcaaattttccctttctgcaaatgacatgcttttatatagagaaaaccctagtggcttctctacaaacccttaagctgataaacaaattaagtgaatttgcaggatacaaaattgacatacaaaaatcagtaacatttccata

SEQ ID NO: 856833 - DNA, 605 bp, Homo sapiens
ttagggcaaaggcactaatttctatgagtgtcattgcatttttcagcaccacttttttaaaacccaattttatttaagaatatcattgataaagttgtagaaattatcaattttattaaatctttaaatagaagacacatttttattattctgtatgatgaaatggatattcacatgaagcaattctgctgcatattgaaatatgatggttgactcagtaacaaaagcacttgtgtgattgagttatgagctgaactagccactttttcaaggggagtcatttttacttgaaagaataattgacaaacaaaattatggttatttggacttggttgtatagtagaggttctcttgaaaataacggaagtgagcctgttatttcaagggaaacaatgacaatatttgctgccagtgataaaattcaagctaccaagtaaaaattagaattttgggaaacttgtattcactactctaagtttgacagcttcccaatactaaaagacttttctgttgagatcagtggtgmtactagcaaatgtaattttgtgatgttctatttaaaaaaatggtgaacatttgcaagatctggataactcaatgaatca

SEQ ID NO: 856834 - DNA, 621 bp, Homo sapiens
cagaccacaacagtgaatggttttggaatcagtgactcccattatctctatcccaaagcagagaaatgaaaccctggatcctcatgccaaggcagttttatatatcggagccactgtgacttctcagtgttcatggccctctatattgccaatattcaaaggaaaccagaaaagagggaagccagagccccgagtctatgcttgggccttgctctggatgttgaggaaaggagttaggcacagacgaccagtccaggatggacccttgggaacacacgtttttgtgatgaaatgaaacttgtatggtatgacttcaatttagggatcaaaatataggagagagagagcaacagggacaaactgcttctgatgctagaggagggacagagatcttcctgctgtgattagggacctcttggaagagaggagtcattgaagctgatccttgatctcatttagacttaagtgagggctggtgaagaatgatttatcagttgggatgaaaatyttggacaccaacagtaggtcatacctatactggaattaaaggaactagaggccatattactaaactttttttttaaaccatcatcagtcattttaagcatttactgtgtattt

SEQ ID NO: 856835 - DNA, 624 bp, Homo sapiens
ttttttcttttataaggtcactaatcccatcatgagggccccaccctcaggacctaactaacccgagttaccttccaaggaccacatctccaaataccactatactgggagttagacttycaaaatataagttttttgttgttgtttttgggggtggggagcaaatattgagttcataacaggtgagatggaggaaaaatcaatggagctgaatgtaaagaacagagtgaaaaaaagtattgaatggatcatccaaatgaatcttaaaaattgctaagaattttggaatgaatagagatgaagaagaaatagcaaaccaggtgctaaaatcatcagtgaatgaggagattgaagaggaggcaggtagttgacagcaatcagaaagatgattgtgtgataaagtctaatgttgtctatttcaaataaattatgtttttgaagaaggaggaagatgaaaatgtttgaaagaagggagaaagaaacagccacctcacacccagtctctgatgtgggaataaaaacaaaactagccacactaaagatagttacagggaaataaggtgtaattgttggccaggtaagacaagagatagaagacaagaactttgagacagcagttgaaaa

SEQ ID NO: 856836 - DNA, 593 bp, Homo sapiens
gttgatgggaatgcaaaatggtgcagctattatgaaaaacaggaasggggttccttaaaaattgaaaatagaattatcacatgatccagcaatcccatttttttagtatatatccataataattcaaagccggatctcaaagagatacttgcacacccatgttcattgtagcattatttgcaatagccaagaggtgcaaggaacccaaatgtccactactgaatgcatagatgaagaaaatgtggtatatatacacaatggaatattatccagcctaaaaaatgaaggaaattctatcacatactacacatgagtgaatatctagggcatgctaggagaaagaagccagtcacaaaataacaaacactatatgatttcacttatatgaagtatagtagacaaaatcagacgagagagtgacaccagcaagatggcagagtagaagttccttcagcatcattctcctaccaaagtacaactaaaaactactcaaagagaagaatactaccctaaattcaccatatattggggaggggagtggaaaagccacctggacccacagaatcaagaaatgcttcaactagtaaggggaa

SEQ ID NO: 856837 - DNA, 593 bp, Homo sapiens
gttgatgggaatgcaaaatggtgcagctattatgaaaaacaggaagggggttccttaaaaattgaaaatagaattatcacatgatccagcaatcccatttttttagtatatatccataataattcaaagcmggatctcaaagagatacttgcacacccatgttcattgtagcattatttgcaatagccaagaggtgcaaggaacccaaatgtccactactgaatgcatagatgaagaaaatgtggtatatatacacaatggaatattatccagcctaaaaaatgaaggaaattctatcacatactacacatgagtgaatatctagggcatgctaggagaaagaagccagtcacaaaataacaaacactatatgatttcacttatatgaagtatagtagacaaaatcagacgagagagtgacaccagcaagatggcagagtagaagttccttcagcatcattctcctaccaaagtacaactaaaaactactcaaagagaagaatactaccctaaattcaccatatattggggaggggagtggaaaagccacctggacccacagaatcaagaaatgcttcaactagtaaggggaa

SEQ ID NO: 856838 - DNA, 601 bp, Homo sapiens
caaagctcagagcaggaatcaatgaaacagaaaacagaaaagcaatagagaaaaccattgaaacgaaaagcatactcttggagaattctgataaaatcaatraacttctagcctcactgagttgaccagggagggaattttatactttttataactgatgaattcaatcaagaaagcataatttagattcgtatgtacccacttttcaaaactattatttggttgaaaaggtttttcaactaacacattttttgggggaaaaatatttgcagtaggattactttatatgacaattcattttaagtacacgagatttctctaatacatctattgaataaaataagacactatttatatattaaagaaataagggccaggtgaggtggcttacacctgtaatcccaacaatttgggaggctgaggaggaaggattgcttgaggccaggagttcaagatcagtctgggcaacatagtgagacccccatgtctacaaaaaattaaaacgttagctgggagtggtggtgcacgcctgtactcccagctacttgggaggctgaggcaggagggtcacttgagccctggagtttgaggctgcagtgag

SEQ ID NO: 856839 - DNA, 633 bp, Homo sapiens
actattatttagctaataaaactaattcaaaatcactttattgatttttcctactacctgataacaagcaagattaaaacttgcagttgcttaatagtattacacaagatccatgttggtaacaatkagggtaagagaacaggacctggtactcttattttgttaaaatatctatgcttgacttccatttcaggccatgatgaactaacaaaaaaaacagtataacctgctgctgtttaaaaaaactagacaacaggacaaatacatgaaacaaccacttttagacattgacctcgagaagagtataatccctaaaagaagggaaagaaatgagatgagccctaggatggccacagctttctactaagaggcagttcatagactgcagtacaaaggaatttaatcagaccttccttgctgactaaattgggatatattttaacaagatgttggaagtaagagaaaaactagcaaagaatatgaagcaagccaaaaaaaaaaaaagaagaagaagaagaagataatgcaaattaagaaattttatttatttacataaaagaaaggcaattatactatttggcctaacagtatctatttactggatcaagagataacttaattaaaaaatataga

SEQ ID NO: 856840 - DNA, 639 bp, Homo sapiens
acagggatccaacaggagggtggccagaggagcagggagtaaaactccacagggaaaaggaattatctmgcggaactttgtaacaatttgaacagggtgagaaacctcctggccagaactcaagggagggcacaaatcctgcgtacagacttcacaggcagggtaagaactaaagcccttttctctcgcagctggaaggcagatatcctcaggtatgttttcaagcccaccttgccctcagcctggaaacagactccacgctgttggtgggggcacagtgagagtgagactggcccttcagtttgcatgggagctgggtgaggcctgtgactgccagctttcccccacttccctgacaacctgcatgactcagcagaggcagccataatcctaataataggtaacacaactctagtgacctgggaatctcatcccatcccccacagcagccccagcaagacgcgcccacggagagtctgagctcaggcaggcctagccccgcccccacctgatgatccttcccaatccactctggtagtggaagacaaagggcatacaaccttgggagttctagggcctcacccaccaccagtctctctccaccctactacagctgatgctctctggaaagtgccacct

SEQ ID NO: 856841 - DNA, 646 bp, Homo sapiens
aaatattaagttggctatttatttaaaaaatatccctgtacattttyaagatctaaaagccattatcaaaagaaaatatattttcagatcaatcctttcaccactttagcttgtatatcttaaaattctagagctagagaagcactaaagaaataaatccaaaacagtcataaaaatcagaaagtaatttgacttgagactattttataaaaaatccttagccatataggatatcaggatgtgaaaaactagagtctgtgaaaacttgaggttaaaaattctcatgaattataatgacctaattttttaaaatcttaaattacaaaagcataactcacattaaaatcaagaagtgcatccatctgattctgaataattggtacagtttttaggagtttttctgtgttcattgttctcataactccatcagccctgttatgaaaaaaccagagaaataaacaaatgaatctgcaattaaatctacatttcaaactccccccctggttttctactaaaacagagaaccaagttgctatgaaatgtcacatatttttaagtcattatggaacatgaaaactgaagcagagatcatacagaaaaaacaaaaacaggcaacacaatatgtcaaatatcaaggtactcattt

SEQ ID NO: 856842 - DNA, 616 bp, Homo sapiens
tttatatatctgaaaatgatatattgtcacttgtgcatttttaaagctggatttctaccaaacaaggctttgttagtcttggatgggtgctttggctcatccctgtaattccagmactttgggaggccgaggtgggcagattgcttgagtccaggagtttgagaccagcctgggtgacatagtgaaatcccatctctactgaaaatataaaaattatttgggcatggtggcacacacctgtagtcccagctacttgtaatgctgaagcgggaggatcacttgagcccaggaggcagaggttatagtgagccgagatcatgccactgtactccagccttggtgacagtgagaccctgtctcaaaaaaagactttattcgtcttaaggaaattaatatgctcattagcattacatattgagtcttgttaaaataaaactttagacaaattaaatttggcagttaatttgagcaaagaaacaattcatgaattgagcagcaccctgaaggagtaaaggttcagagagttccacccagcaatgtggatagtcaggatttatagacagaaaaagaagtgacatccagacatagtctgattggttacaggtccacgtttgtg

SEQ ID NO: 856843 - DNA, 658 bp, Homo sapiens
aggaagggaaaaagggaggaagggaggggacccctaagtagggccaaaggtatatgtgaaaaaacctacagtaatagaatatttaatattttaaaatttccaaarcactcataagtacataccatttgatcttcagaacagacatgtaaagcgagtaatgtaggtatcattaacctcaatttacagatgaggaagctgacaccaggcaaggtcacgtgacatgcacaatgtcacaggtgttagagcctgaactagaactctaacatttctgaccttcaacccagtgctctttgtattacaccacaccacagactaaagagacatgacaaataggtctgtcaacgtatcttagagacatgagtcggtagtaggtagaagattcacacacattctggcacccggggatatgatttggcaatgtgtaagttatcctatgctgtcattgctcacagtctgaatcatgtacattattcccactgggggaatatctgagcatcatctcctaagtgctattttagcaatagcactttgctaattatgaagacaaaattactttattagatcataaggaaacctgtcttttggttttatcaggcatttgtttctgctggttaaaaatcttttggtttcccttataagaatttacttagccaaaatg

SEQ ID NO: 856844 - DNA, 553 bp, Homo sapiens
caccttctttgtttataaaaatgggtcatcctgttgataatttcwtttgctgtacagaagctcttgagtttaattatatcccatttgccaatttgtgcctttgttgtgtttgtttttggcatcttcatcatgaaatctttgcctgtgcctatgtccagaatggtattgcataggttgtcttccagggtttttatagttttaggttttgcatttaagattttaatccatcttgagctgatttttgtatatggtataagaaaagggtccagtttcaatcttctgcatatggcaagctagttctcctagcaccatttattgaattaggagtcctttcaccactgcttgttttggtcagccttgtcaaagatcaggaggtcagaggtgtgagatcttatttcaggcctctctattctgttctattggtctatgtgtctgtttttgtaccagtaccatgctgttttcattacagttgccctgtagtatagttaggataatgtgatgactccagctttgttagttttgctcagcattgccttggctattaaggcttttt

SEQ ID NO: 856845 - DNA, 386 bp, Homo sapiens
ttccggctgttgtagggttctctttttcaggcttatactcatgatcttgtctgaagcttttgagggcagactgccagtcctggagaaatagtagatggcmagtttgtgggttttttttttttacacgaatttgaggaaaacccaatgaatttgatagcccaattgagacaatttcagcaaatctgtaagcagtttgtatgtttagttggggtaatgaagtatttcagttttgtgaatagatgacctgtttttacttcctcaccctgaattcgttttgtaaatgtagagtttggatgtgtaactgaggcgggggggagttttcagtatttttttttgtgggggtgggggcaaatatgttttcagttctttttcccttaggtctgtct

SEQ ID NO: 856846 - DNA, 593 bp, Homo sapiens
atagtattgtccctacacacacacacacacgtatccagtacagatacaaccccataggtatagacagcatgtactgaggcagatacatatatgggaataaatgccatctggccacttgcctggggccaaagccattgcttccagttcactttcctcctcatgctccattcaatcaagaagtactacagattgggcccttgctgcatcctggcatagatctagatccacacagtacaggcccaaggcaggacagcaagacccaaagcaggaagaaaattgtggggagaggaagcaggagaacagtctgggtaccctggcgacatttgcctgagaagggaggaggctggtaaggggagagaaggtgataggggattctgggagctatagcagagccaggaggccccctccccccgactgccctgctgctcaaaggcccagggtatgcagggcagcctgtgcccagcctttgagccaggtgagtcagcctgacttctgaatattcaccactgcagcagttccaccattcccyacagcccactctgcacacagcagccagaatggtctttcaaaatctgatcttatcactccctgct

SEQ ID NO: 856847 - DNA, 611 bp, Homo sapiens
aataaaaacaaaaaatagagaaaaataaatygataaaataactcatgagatttcccaaaaacaaaagaacatgaatttccaagctgaaagaccaccatatgttaagtacaattgatgaaaataagtgaacactaagacacatcattatgaagtttcagaacactaaggttaaagataaaattcaaatagaaaaaaaatgggaaggtcacaatgaaagaatcaagaattagaatggttttaaacttttcaacagccatactaaagaaggcaaaggagtgacatgtttaacgttctgaagaaaaacaatttacaaattagaattctgtattagtcaggatgggcttggttatactacaataacagacaactccaaaatctcagctgttaacacattcaactcagttcagcagggacccaggctattggagttttcatctatttccatagtagaaaaggaaacatgacaaatggctctcttaaaaattctgtcaaggtgatatcaccaaattggtacagtcaaagcaacctggctttattctctcccacaaaaaataaataaataaaataaaatccagtaccaagattatcaccagcattatcccagaactcaa

SEQ ID NO: 856848 - DNA, 631 bp, Homo sapiens
agcagcctggcgcccgtatatccatttagccacaggtgacaggggtgggtggctccactgctcctcttttcattttattaaaaccctattttaaggccaytgtcaagaagagtgacttaattcctttggaacatagagctaagagactggcaaactgtaaatctggctctttcttgactgctcctcagaaagtacaagaaatgggaatttagactcaatttcaaataccatgtgtaaactgagacacagggcagctcattaggagtgtgttcacagccaacaggaacccaaggccaccctcaaacattccttttccagaaagtcctctctaattacatacacacagacagacatgtgcatacatacatatatgtatatatatgcctgtacatatgtgtatatatgcacacatctcgtatatggatacacacacgcacagcaggactattcaccccaagtgcaatgtgtttgagttcgacaatgaggtttagattctaatctggcacaggacattgtcttggcagggtattcagccttttcatctgcactggtctccttctgggggagccaatgagatccattctattcccaaggcccaagagtggatcccagcagccatgttatcctacat

SEQ ID NO: 856849 - DNA, 474 bp, Homo sapiens
actgtgacaggaaaggaaggaagacatctggggacatttttgcacctttctgcacactgccttagttggtggtagagttttcacacactcttctctgagaagaagctaccttgctgaacaccattttgaaagtaacccagttctagtacagcccacgcatctccatcctatactcagtggagattccattgccccatatgcttcaggtcctcactctccattcctggggaacagactcaagttctccccaactcttagtggctcattaggtaaactcaccttgcttgtaacagattttcacttatgtccaaaaagacaaagaacacattaacctctaacmagtttctattgtctcaagaaagctgaatcattatgagaaattcaagctaaacaaatctgaaccttttgacaagaaactgaagagaagaattcattccttctcactggttttcaaccaaacaactctcactagta

SEQ ID NO: 856850 - DNA, 603 bp, Homo sapiens
ttttttcaggcacccaggaccatcccagactctacaggactttgcacaaagagaactacaaggccacagccctccaggctrgaagatctcaccaaaacttaactctctcatgtcccattcccttaggctctgcaaggtcactgattaattttaatgtcatcaaataataactttgaccttaggagttaatagactttaatattgaatctctcccaattcaactacttcctcatttgacagtaattgtttgaaagtttggtcttatgttgaatcaaaatcagcttcttagctatttctcactggccccaattatgccctctggggttatatagtctactgaggggtaaagctaaacaatttttaaaagagttgatgtcctttaatgaggtggttaagagaggcttcttgtaggacaaggtgtcatatgagaacaagctttaggcaggcctttcagaagtcacctttgaatttccattgatcccatttcctctgttaggctgtgtttaggatttgtgttcttcacttgaaataagccaggagtaggcaggcctctggttcttagatgaaaatcctctgaggacatcttctgttgccaaatattga

SEQ ID NO: 856851 - DNA, 625 bp, Homo sapiens
catcgaaggtactgaaatgtaccatgtgtggtgagatagggggtcagctgcccaaagtccttggttcacctttgtttggatataggttattgaacttattgtatttatygatagctgaaacatttattggccacattgggtgtataaagggccttgacctaggtgaaaggatataatccctatattgaaagtattatgctctaggaaatagggctagaaagagaaagcataggaggagaacacaaggatggtaagcagggaggaggactgtgctgaatgggggctgaatatggctagttaggacacatcagatcattaggctgctgcgctgttacatagggctctttgggagtcttagaagggtggcatgttagaacatgcaggatattatctggttttgaaggcaaacaggtagatcaaataaaggggtttatttctattattgaggttatataaaaccttgccactcagagtgtgatccacagcagcattagtatcacctgggagctaattagtcatgcaggattttaggccccactccagagacactgactctcattataaaaaagtgaaggagaaataaaatactttacagacaagcaaatgctgagagattttgtcacca

SEQ ID NO: 856852 - DNA, 453 bp, Homo sapiens
taagacccaagagacaaaaccaaatggccccatggttttcaaccttttttttttttaaggcagtttctctctgtcacctaggctggagtgcagtggtgctatcttggctcactgcaacctccgcctcccggcttcaaacaattctactgcctcagcctcctgcatagctgggattacaggtacccaccaccacactggctaatttttgtgtttttagtagagatggtgtttccccatgttggccaggctggtctgaaactcctgacctcaggtgatgcacctgccttggcctcccaaagtgctgggattacaggcgtaagccaccactcccagcctcgaccttttatgtcttagagtctttttattgtctatttatcaytttatgcttgaacaagaaaacaaatgaagaaatgtgaatatggctttaaaataacctgggagttattaaccaca

SEQ ID NO: 856853 - DNA, 472 bp, Homo sapiens
caaaaagcttaaccaccacaatcaactaggcttcatccccaggatgcaaggtttggttcatcatactcaaatcaataaatgtgattcatcacataaacagaactaaagacaaaaaccatattatctcaataaatgcagaaaaggcttttgataatttcaacatccattcatattaaagactctccataagttaggtattaagggaacatacctcaaaataataagagccatctatgacaaatccacagctgacattatactaaatgggcaaaagctggaagcattcttcttgaaaaccagcacaagatagggataccctctcttaacactcctattcaaaatagtgttggaagttctggccaggaaaataagrcaagagaaagaaataaagggcgttcaaataggaagaaaagaagtctaactatccttatttgcagatgacatggtcctatatctagaaaaccccataggt

SEQ ID NO: 856854 - DNA, 625 bp, Homo sapiens
aaaagataacattggactgataaccgagaaaaaaatagacaatagaaaaaattaaattcagctaaagctgtgcttagaggaaattttatagccttaaattccatatactagacaaaaaggctaagcatccatgatctaattatttttctcatgaagacagaaagaaaactgtaaaataaactaaaaaatactagcaagaaaaaatggtaaaataggaacttaatgaaatagaaaataaatgaacactaatgaagtcctttaaaaagactagtaaaattcatacacccctaggaaaaaaagagaaaacacaatttaaccaacataaacagtgcaaaaaacgagtcattctcatagattctacagctttttaaaagaaaatacaagaattttttagaatatgaaaataagaagtcagatcaaggagacaaggcttttgaaaaaccttaggaggaaattgaaaaatttgggtagttctatagttattaaagatgttgaagtctctgaaaaaccacagtataaggaaaattctggacctaatggctttgaaagttaatttccccaaacactaaaggaatmaatattaccaacataaccaaaaaaaaaaggaaaattattacagagtgat

SEQ ID NO: 856855 - DNA, 421 bp, Homo sapiens
gaacttccccaacttagcaagacagcccaacattcaaattaaggaaatccagataaccccagtaagatactccatgagaagatcaaccccaaggcacataatcatcarattttccaaagttgaaatgaaggaaaacatgttaatggcagccagagagaaaggtcaggtcacctacacagcaaagtctatctgattaacagtggacctctcaatggaaaccctataagccagaagagattgggggaccaatattcaacattcttaaagaaaagaatttccaactcagaatttcatatctggccaaactaaacttcataatcaaaggagaaataaaatcctttccagacaagcaaattctgagagattctgtcaccgccgggactgcctggaaagagttcctgagggaagcactgaatatgca

SEQ ID NO: 856856 - DNA, 634 bp, Homo sapiens
ggagaaacagacagcaataaaataatagtaagggacttcaacgctgcactttcaacaacrgatagattgcccagacagaagatcagtaaggaatcattggacttaaactacactttaggccaaatgaacctaacagacatacagaacattccatccatgagcagcagaatacacattcttcttaagcaaacgtggaaattttccaggacagatcatatgttaggtcacaaaacaagtcttaaacttaagaagattgaaattgtatcaagtattctttctgactgtaatagtgttaaattagaaatgagtatgaggaagaaaaccgtaaaatcaacaaatacatggaaattaaacagcacactcctgaacaaccaataagttaaagaagatatcaaaagagaaatttaaaagttcttgaaagaaataaaaatggaaacacaatggatcaaaacataagggatgcagcaaaagcagtgaaagggaagtttatgaagataaacacctacattaagaaaaaagaaaactctcaaataatctaatattaaaccacaaggtactaaaatgaacaaactaagcccaaagtcagcataaagaaaaaataatacacatccaagaagaaatcattaaaataagg

SEQ ID NO: 856857 - DNA, 634 bp, Homo sapiens
ggagaaacagacagcaataaaataatagtaagggacttcaacgctgcactttcaacaacagatagattgcccagacagaagatcagtaaggaatcattggacttaaactacactttaggccaaatgaacctaacagacatacagaacattccatccatgagcagcagaatacacattcttcttaagcaaacgtggaaattttccaggacagatcatatgttaggtcacaaaacaagtcttaaacttaagaagattgaaattgtatcaagtattctttctgactgtaatagtgttaaattagaaatgagtatgaggaagaaaaccgtaaaatcaacaaatacatggaaattaaacagcacactcctgaacaaccaataagttaaagaagatatcaaaagagaaatttaaaagttcttgaaagaaataaaaatggaaacacaatggatcaaaacataagggatgcagcaaaagcagtgaaagggaagtttatgaagataaacamctacattaagaaaaaagaaaactctcaaataatctaatattaaaccacaaggtactaaaatgaacaaactaagcccaaagtcagcataaagaaaaaataatacacatccaagaagaaatcattaaaataagg

SEQ ID NO: 856858 - DNA, 609 bp, Homo sapiens
ttttaataaagtcaaacatatgcacataagaataccttcatgttactttactgtcccatttgtctttaaatccttatgctaatatcacattgttttgttaaatatctaatgtatcaaatactcccacattttaaatccatttacaaaatttcattaactacacgtatttgctttctcttcaaatggacttcaaaattttattagctatttttacttgtttattcttcaggagtactttaaaatcactaccacatttcaaaattactctcaagcctaatgggatttttataggcattataaattaatttagaaattgatttttaaataatgcttagcctttcaagaatgtggtatgccgcataatttagtcacttctacttttcatgtcccatggcagtttattttttttcaaataggttttgcttacatattattaagggacataatatagacagctgatgtacaaaagcaaataggtgtatataaatcaaagcacccattatacaatatacgcatacctacacaataataaagatttgctttggcacctgagacrtctttctgtcctacttgtagtcattgctagaatacttatttgtaaccagtttc

SEQ ID NO: 856859 - DNA, 603 bp, Homo sapiens
gtgtatataaatcaaagcacccattatacaatatacgcatacctacacaataataaagatttgctttggcacctgagacatctttctgtcctacttgtagtcattgctagaatacttatttgtaaccagtttcaatagtcagggtcctggcagaaaaatagatgacacactcaaagggattattgctaagaattcatgaaaagtctattgaaagaggcaagaacatgattagggatccaacaaggggtgaagaaacacgcgggactgacagcaacaggaagccatcaccttgactagcctgaagggtaaggaaaaggtgttgtgcagtttccacaacccagtgagagctgtagctatggaaggagatggcctgagctgacacctggcctgaaaggaaataaacagcaaataaatactatgatttctgtttcaacactttgctctccagctaatgccctcatttcccaaatccaaacaaaaggaaaagagcagaggaagccaagtgatatattccgaaaaagtcaacctccctaccaggtagaaaastgcaggaaaggacaaagaagagctctcaagagcctaatagatgagaagatagacaaa

SEQ ID NO: 856860 - DNA, 574 bp, Homo sapiens
aagactgaaatgaggacactctccaaaaaataagagtgggagaaggatttcaggtgatttctcttttctttggtttatcagtatagtggacccatacccagcaagcatttaattyaccaccacccacctccaaaccctgccctcccattccactttgaactagactttgatgctcatggtcaaaaggtaaagaagatgaaataatgtaatctttgtcttctgaatttctagtatcccaggtcattcttcttaagggattattcagggtcattttttactgtaattttcaccttatacctgtaagatttcaatgacaccgtattttcagatttttttgtactattaacttatattactcatgattgataattaaaaaaattgatattaaaaaaggtgaaatatcacctccttccatgaattgacattttgaattgtgaaccagaaacccgagcagcctggggtggggatcgcgcgtctttgctctctcaccagaactgtcagccttcagagaggggactgggggtggggtgatttatatgtcactacagacatcatggaaattctcagcgtggca

SEQ ID NO: 856861 - DNA, 596 bp, Homo sapiens
ggtccacattaacccacacagcttcccaccctggctgcccctcaccccagctggtccacgtgtccacaccacccakagcagcaccgttcacatccactgactcagccaagatttcctgagggtcagcctggcaggaattttgcccattctacagatgaggacacgaaggtccagaaaggggtgggactgggttccctgactgctgctgggccttggtccatggcatccactggctctcactggtcaaggcaaggaaggcccctgggaggggcacagcatttggtgggtacagaggaggaggtgggtttgcagggctcagggcctgaccatgggctctgaaggcagaggacagagtctgtacaggggattagacatggccactgggtccagttatggaaacagccgtccccgctcccctgccactggggtgctctgcccgaccggagggggaaccaagcttgcgtctcccgcactcatgaagggagcacctctagttcccagggccagatggagtgagggcaagagttggggaggtctaatttgcatccaggtttctggtttgaatactaagcagatggatggtggtggcatttgct

SEQ ID NO: 856862 - DNA, 590 bp, Homo sapiens
tttttaaactgtaagagaatgtcaaccaaacaggcccaggracagggacaatgtaggctaggagcttaggactatgctccgtggagacgcctccaaaaaaatcaagctttgaaagctactactgagaggtggactaaagaccagaggtggcagcaagatttccctggtccacagcagttctcagaggagccccagactcaggcccacccacttcctcattcacgtgggtccctgacaagcttaccttttgggtccaggaaaccatgttcctggaagagccaccagccatggttaggactcagaagttctgtaatttcccaacaggaaaagacagaaaagggcaacagggcatgtgtgtgcccacacagacatttgcctgcgaccatgtgcactcacaccacgtgaatcgcacatgcgcacaggcaaatatacctatccacacactcatagacctccagccgcacctgttcacacaggcacacacacacacatacacatcgcacccatattcctgtattaagatgcacctatggagtatgtacagatgttacacaaacatccacacacatcccatacgcttaaatggatca

SEQ ID NO: 856863 - DNA, 608 bp, Homo sapiens
gcagttctcagaggagccccagactcaggcccacccacttcctcattcacgtgggtccctgacaagcttaccttttgggtccaggaaaccatgttcctggaagagccaccagccatggttaggactcagaagttctgtaatttcccaacaggaaaagacagaaaagggcaacagggcatgtgtgtgcccacacagacatttgcctgcgaccatgtgcactcacaccacgtgaatcgcacatgcgcacaggcaaatatacctatccacacactcatagacctccagccgcacctgttcacacaggcacacacacacacatacacatcgcacccatattcctgtattaagatgcacctatggagtatgtacagatgttacacaaacatccacacacatcccatacgcttaaatggatcagcataaatacacaaacatgcatctatgcacaaagtataaacacatgcaaatacacatatttacatrtgtccagtcatcatacacttccgtggataaacaggtacatgtactcaattcacttattgtgtaaagttgtatacacattgcaactcacacaaacacatgcatgcatatacacacacgggtataca

SEQ ID NO: 856864 - DNA, 442 bp, Homo sapiens
catgcagagatcttcttcatccgccccccccttttttttttttttttctttgacrgagtcttgctctgttgccagcctggagtgcaggggcgtgatctccactcactgcaacctccgcctcctgggttcaagcaattctcctgcctcagcctcccaagtagctgggattacaggcatgcgccaccacgcctggctaattttttttgtatttttattagagacggggttttaccatattggccaggctggtctccaacccatgatcttgtgatccactcacctcggcctcctaaagtgctgggattacaggcatgagccactgcgcctggcctccttcctttttctagctacagagttgtctattgtgtggtcaagctgcccctactgatggacatttgagtggtttctagtttttttacaattacaaatgatgctgccatga

SEQ ID NO: 856865 - DNA, 512 bp, Homo sapiens
gcgtttgtattctgtcctttttcacttaacacttctccacattaataacaattgtttgcaaacataattttaatggctgtacaatttttcactatctgaatatacatgaatgtatttacccttgctgttactgctagacttctagattgtttccagatttttgctattataaataaattctgccatgttcttctttgtccaccttctggatatttgtctctcaggattaattcctggaagtggagctcctggaatttcagctttgagctccaagtttggggtttttcttggccatgcttggaggggattgtttgtaggaagctctggccctgtgacttcacagagccccgggcctggcctgcttctccacatctgtgatgttcggtagagactcacttgcacccacgytgaatcagcagacgggcagagcagggagcaccagagcctgctgaggatgaggagtcagaatctcttaccttttgccccctggctcattcctaaggctaaggaca

SEQ ID NO: 856866 - DNA, 627 bp, Homo sapiens
aacataaatctttcacatttaagtggaacaatggtgacacaaagacaatcctgaaaaatgactcttcaatactttgaaattctcataaacaaccttttctcaagaaggctataaaaagagtcagttttgcctgagtcagagcaattttagctaattaatagcaccctctggacctatgaaaaattgacattctccatgacagaccaagtttgggatgtggctcataaagaagctcccaacgagacttccatgcttattttctcctttagatccagagcaaacatcagcaaactatgactcaagggccaaatctggcctgcaggctgtttttgtaaataaagttttattggaacatagacacactcttttgtttatgtattgtctatggctgcttttgggctccaaggacagagctgagtagttgagtagctgccaatagtcatatggtccacaaagcctaaaatatgtaccctctggctcttaatagaacaagtttgctgacccctgatctagaggaatgatttccctcttctattattcttttgaactgaaagtcagkagaccttgattttagactcactccatcctgccagtaaacttctatgtgactttgggccagtaattact

SEQ ID NO: 856867 - DNA, 474 bp, Homo sapiens
ctcttcctccctctagagcccaccagtctggattagggtaagcctatgggctaaggaggtcaaatacacttgactggctccatttattccatcacgggccaygctaggagctgtcattttagggacacacaggaacatcactgtctctgtctttcaaatggctttatttgctgcttttgactcaggactaggttggccagatgtaataagtaaacatataggatgcctagttaaatttgaatttcagacaaacaagtcatttcttagcataagtatgtctcatgtaatatttggcctgtctttaccatactgttgaccatatctttattgttagttatccaatactcaaaggcttaagataagcctaggtatatgggggaagaaggatgacatgacatccttctggtgaggtgcttacttttaggctggagtgcagcacatttttagtacaaatatgtcccatgcaacatttga

SEQ ID NO: 856868 - DNA, 626 bp, Homo sapiens
ttgcccacattcagtctctagctgcaaatatggatctgtctgggttcagagttccgacaggtaaagggaaggtcaccttgcatatctatgaggtgaactgcaagcaactgatcaacaaatttagtctaccmatttgtagcagagaaccaagattttcatcaggctaaagagcttcaagtaacaaatcccacagtaaatcgtcctgtttgacacaaagtgagtatgacaagcagaaaaaaaaaatacatgactagtgttttcctttaagatgtttcagttgataaatttaagagttgcttaactccaaatcccccaccctacccatgactttggtcatcggtaacagagatttagctgttctggaatgagaacagacatttgtactgtctattatagatggaagagttaaaactactctgagttgagaatacatgccaacacactggatgagacaacgagaatcagaagaaccttagaagtatgtatatcaaatacaagttgcttcccaaaattaacatcttgagaaggagctcactttctttaactgccttcagagaaagctcacacaccacacttgcaatgcagccttgtcacatcatagttaccccttggttttgacccaaagc

SEQ ID NO: 856869 - DNA, 528 bp, Homo sapiens
aggcaacccaggaagcaagcaagggcaaaggaggttgtgcattctttaggggagggaggcgtctgtggaaggcccttgcctgccaccttctccattctcagcagtgtccctcagaagaagcactgctggtgtcacaagggctgggatgctaacccctaaatctgacaactttggtgaaattgctactttgatatcagagaccatgccttccatgtcttgggtattccaacaatattgtcccacagtgccttgtagagagcgacacttgggcaaagccctgattcaactaaaacacaaagcacagtatattctgataaatatggctggaatttttggttcttttgtacacttatgtatccaaaaagtttagacctctgcttatcacatagttggtgctcaataaatattttttgaatgaawacatgaatgcttaaaacctcattgcaggccattctccctgtggtcagaattgagtagtatttctaattaaccctcaacaaggtagcttatggctcatcagcaaagcaa

SEQ ID NO: 856870 - DNA, 547 bp, Homo sapiens
agcacatggtctcttgtgtytggcttcttccacttagcatgttttcagagttcatccatgttgtaccaggtatgagtgcttcaatcctttctattgccaactactattccatcgtatgaacagaccacattttgttgatccactcattagctgatggacatctggggtgtttcactttttgtctgttaaacataatgctgctctgaacattcacacacaagcttttgtacggacatatgttttcacttggcctttgcattctcaaagtgttttcacaacattctctctttcatgtattacatggctacttaattttccgatggagaaaagtgaggcttggggcagctaagtgactttctcacccactcaactaccctcagcaaaccacagtaaacccatagtgaagagccagtactcctttcataataccacactgcctatggttacggctccctctcctgtgaaataaatttcaagcgacagtgtgcagatgagggaaaacattttttaggtaaggaactccctaaatcattctcaatacgttaat

SEQ ID NO: 856871 - DNA, 587 bp, Homo sapiens
ttcctctgctaaggatgcttccmcacatccacactcattccacttggcctagttaattcctgcttctccttcaactatcagctgaagaatttcatcttcagggaagcctcccatagatcccaaagtcaagtctggttcccttgttatttattctcatagcaccatattcctgccctgcccccagggttattctgagaaatctgatgctcctgttctcatagactgtcagttcctttaggtcagggaccatatctgtctgtgatcactactatatcaccagtgcctagaacagtttgtggcacatagtagatgctcagtaaatacctattgaatgaatgaataaatattatctcctctaaatagctttaattgacactcctctccctctgagattcaggctttctttctcttcttagttcccaggacacttagtttttatctcttatcatcttatgctgaactgttctggttatgtttgtcaccccttctaaactgtgactgtgataaggcccaggtcctgtttgtttttctatcccaggagcacagctccgaaactggtgcagactaatttgtccattgtaaaatgt

SEQ ID NO: 856872 - DNA, 567 bp, Homo sapiens
atgacttatccaagtttgcacaactagtaacaaatgatacatcagatcctagtctgtctgactcccaaatctttgctttctttgacacacccagatgtgttacccccagatgatctagccaatgatgamaacattgctttcagcatccatggaaccccaagcctctggcttaatgtttgcatttgtgttcacaggggtttcaaactccgcctcttgttccaagattcagtccatcccctcattatgcagacggtaggccttgccatcttgagaggcagtgtagggtgatgtataatgaaatcacaagttccagggtcagcccctctctgcctcagctttctcatctgtaaactaaggctaatgacaagacttacctctaatgagatcagcttaagcaaagctctcagaactatgcctggcacatgagttgagtgagggtggcccttgtctatgaaaaagcaatgagtgcactgttgattgagcccctactctgtgctctgcacagtgtaaggaactccaaggattcaatgataaagaaccatagataaacagtttcacagagcttag

SEQ ID NO: 856873 - DNA, 545 bp, Homo sapiens
gctcactaactgaggtgctccagctctactgcctggacacagtaggtgtacggccttagccttctttctctaaagagactttaagtctcatcaactggatgggacagtggaacaagtctttggtcagacagtgagggagggtgaaggggtgatagctccttgtgatttctctcagctcaggaaacctgtggccaagatggaggactctagtccatgggacagcctggcctcctcaccatgaccagccagctccatggagagactctggatggtttattcagttgttcaatcgtgtatccacccattccttcaaaaatacactgactgcatgtattagttattactattgaaatgtaggtgtgcaagggtctgtaatgagcattgagggaggcatatattatcgccattttgcagatcccaaagctggcactcagagaagccaggtgacttcctcatatctwgtggctatttaaaagggcaggctcagagttctgactcgagtttgcttctccctaaagctcaggctcttaaaacacacacataaa

SEQ ID NO: 856874 - DNA, 704 bp, Homo sapiens
tagttccttgttattgttcagaataaataccttagacgaatatcttccagaagtcttgtgttttaaacatactgaagtaatgaaacgtgataaacttggtacattgtagtttggatttygcatggcacactgtgattttggacttctgtgttctgatagcttggtcatgagctgaaagggttcaaggctattgcccttcggagtaccgtgctgctgaataacgcaaatgtcagctcaggaacattggaaaagcagcagcagttgaattagcagaatgtatttgagattcatccatgtaaatgagtttgagattcattcattcaccttttgtaaaccagttgacgaaagaaaagaattattgtgcagaaaaggcagttttatatttttataacaatgaaaaaaatgagtaaaaaattttaagaacagttgaggtgaataggtaaattgacaggattagaaactgtgagaattgctttggggagcgcaaaggctactgcggtccagccatactgagctctcaataggtaccacgtactgagacctgtccatgtcctttccacacattagctcattgatcctccctatggcactctaggcaggagttactagctgcattttgtaaatagaacctcaggcactaagaggttagatgacttgcttagggtcacaccgatcctaggggtggagccaggatccaaacctag

SEQ ID NO: 856875 - DNA, 545 bp, Homo sapiens
attagaaattaatataaggatcccagaccctatttttttttttagtggtattgccagcttaatagtttactcttyggttgtgcctaatgggtgattcaaactatccaagcgatttctaaattcaattagtacattttttatgtttagaagttttatttcttttctcagatcagtttggtcacttaaaaactcttgttctaataccgtaatttcaatcccctcctttctttctttacacacattaagtatcctaattttatcctcactgtgtgattatttcagtgtttgtggtctctgtggtcttcaccctatttgttacctaggctgactctcattcaagatggcttatttccattgtgcatgtctatgtgtaaacttactgaactcggaactttattctttgaggcctgaattcaggacatttctccccagaggaactgggcttgctatctccagacacctggcagcactaacaatccggacctatgctatgatacattctcagcttggatttttctggctttacaggtaggttggattccagc

SEQ ID NO: 856876 - DNA, 481 bp, Homo sapiens
gggttcaagcttgtggactaagaggccaaatggtggagtttatctggtatatgaccttcttctgggaacactctgctggtaagggaaaaacgcctcaagtgagcttgtgtataatttcacattgcgtgtggsgcccctcccaagtgctggcaggccactgagcaggcagacaacaccccatcaagggaagaatcaggggagaaggggcataaaccctggaagcatgccagcatataaaactccaggtcaaagttcaagccatgcatttgactctctcaagtcgcccccttggtcctcttccaagtgtacttgacttcctttcgtttctgctctaaacttcttaataagctttcattcctgctctaaaacttgccccagtctctcactttgccttatgcccctcagtcaaattacttcttctgaagaggcaagaagtgaagttgctgcagactcatacagattcgcggccattaacctactt

SEQ ID NO: 856877 - DNA, 563 bp, Homo sapiens
tactacaattcagtttcaatcttttaaaatgtcgattttaaaatgctgagattttgttctctcttctgtacctggattgcaagctctatacacacatctgtcttactcaytgctctgtcttcagcccctagccaaatgcctgtcacagagtaggtctttaataagagttcattcaataaacgagtgcaagttttcttgaagctaatgaggaaactttatctatttcttcataacacctaaaagaggtacctgaaacttaccctgcaagttcaggaattacatgaaaacgtgaagtcccaaaagaacctaaagtttccatggaagagatctttccaagatagagccttcagggcaaattgtctgatatttgtatggaataacatgtcttcttttaaaaaaattgttatcatgtaggtataatggctagaagattgggcagaatttatactaagtaattgattttgttaatgcctttatagggaagaaatttttatattgtgagccacataagagaattaaggaagtactggaagaagaacgtcatattaagagagatgaatgcc

SEQ ID NO: 856878 - DNA, 411 bp, Homo sapiens
ttctgattgtggtccttttttgggagtatttttcttttaataattttctcaaaattttctttgataattggtttgttgaacctgtttttttccyaccttggatcagattaagttattcattttccagattatttagaattgagcattctctcataagtcttgggtcttccctcccattcttccttctttctttttttcgagacagggtcttgctctgtagtgtgctaccactcccagctaatttttaatttttttttttatatagacggagtctcgttatgttgcccaggctggtctctaactccagggctcaagtgatcttcctgacttggcctcccaaagtatagatgtgagcttctacacctgtagtgctagtattagagatgtgagcctctacgcccgtccctctta

SEQ ID NO: 856879 - DNA, 564 bp, Homo sapiens
ctgaaagcattgtgctgtcatctgctaagtgtctggtgaaggctcagggaactttcaatcacagtggaaggtgaagttgggagcaagtgcatcacatggtgaaagcaagagcaggagacagagagaaagagagaaagagggtgggaggtggtggtgtgccacatatttttaaatgaccagatctcacgagaactcatcatcacaaagacagtaccaagccatgagggatccacccccatgattcaaacatctcccaccaggacccatctccagtattggggattacaattcaacatgagatttgagcagagacaaatatccaaactatatcacttggcttgtgtctgggaagtgtgaatccccaggctgaatgattaattagaatgacaatagaggcctgctcaaggtggatccccaggattcaagtacrgctgcatcacaggcatagggaggccttgtagacttgtccttgtggcatgggccatggagccaatgcaccatgtggattttattgaaaatatctgccctttactagagagactataaaccccatctgaaatatgc

SEQ ID NO: 856880 - DNA, 607 bp, Homo sapiens
ttgttttctataatttaagcagactaaggattgacatacagacaaatttgtctgcagcaatatctagcatgctctccctgggttatctggtctgtaagggaggaaaaagtaacacagcaggcctaagagaaccatcctttaaaatcaccctagcccttcactctgccttcaaataaactaagaaaagtcctgctcttgattatcatatatttaatacatttctctcaatggcagagaatgtatagattattggatatgattctttaataatcatatttttgcctagcagtgtgtttttcgatccaaatgaccattggagcactgatttgtcagtttcttataaatagctctggtctatattgaattgccatgatctaaagatgatatttagggtaaaggatattagagtgctagagatataagaggacaaatggtgctaacctagttgagctgtgtaacttctctgccatcctagaccagactaaccccgattacctgttacaaagtgcttttatctgctctttgcttcayaatataaatgcaattgccttttttgatacatacatatttgagtcccaggaaaaggcatatagcagtatgacacaag

SEQ ID NO: 856881 - DNA, 536 bp, Homo sapiens
ttgcataggtccggtgactctgatgaagagtgacaactccttaatgactggatattaactgctatatttagtgagagaaaagcagtccccactagtgcaattgtagcactggcaatgttcattccaaaactgttctgtatctaaaaaagaataagaattttcaattaatatatgcagcacgtacttcattcctttggcaacaattcattgaaacaaacattgattgaatattgtttacacacccactgatatcctagatgcgaggctaacatcaatgaccaaagaaagatttctgtcccccaccctccatggagcttatattctagcaataaaaacaaagaaaaaagtaaacatactataggtaaattacataatatttttgaaagtgattaagtactaggggctaacagaatgggataaggagaatctgggaatccaaagagaggagtgggggttcatgatattaaatagaaatgacactggggagaggcakgaaagagctgtgggtgccagccaggaggatatctgggggaata

SEQ ID NO: 856882 - DNA, 556 bp, Homo sapiens
attgtggtttcgatctgcatttctctcatcattgtgatgttgagcactttccatatgcttgtcagtcatttgcatatcttcttttgagaattgtctattcatgtccttagcccactttttgatgggattgttttttttcttgctgatttgtttgagttccttatagattctggatattggtcctttgtcagatatatagtttgtgaagattttctcccactccgggttgtctgtttactctgctgattatttcttttgctctgcagaagctttttagtttaattaagtcctatctatttacctttgtttttgttgtttttgcttttgggctcttggtcttgaagtctttgcctgagccaatgtctagaaggttttttctgatgttatcttctagaatatttatagtttttaggtcttaaatttaaggctttgatctatcttgagttgatttttktataaggtgagagaagaggatccagtttcatttcttctacctgtggcttgctaagtataccagcaccatttattgaatagggtgtcttttccccactttata

SEQ ID NO: 856883 - DNA, 557 bp, Homo sapiens
tttccccttgaatccataattagatggatyatattttttcttaatctgcagactttctggggttattttcttttgtcttagacatgcttgtcactttgtagtgtctgaaatattcacagtgaattgataatcaggagattctgctcagtgtctagagtgaagattgtttaggtgttcatgcctttggccatgtggcttagagtttggacaaagtggtcagctgctttcatttgtaaatgattccttttcagagcacactttcaaatggcatatcaaactaatattaactgggtcaaatgacatgcgtcaattttttttttttaatatcaaagcagctgatacattgttccaagtgagtataatagatagtgaaacttccatttcgggtttggaaaaatttcaaagatgtattcctggggccctttcctacgtaaaaattgaataaactctaaatgacctgtggggaatttggcctatagcttcattgtaaccaacgcacatgatttaaatctcccagactttcagccatcttgtgtcctaatgaaaggttaacattt

SEQ ID NO: 856884 - DNA, 593 bp, Homo sapiens
tgacgtaaggagacacaaagtttgggacaacagaatggttcctacaaaagtaaagtactaactgacttcccagtgtagttggtaaagtgcttytgaagtcaacactgaaaaagaaactggcagcatgggagcagcgttttattccagataaacagccttctagagagaacacttttgacaagcaaagtcatgtgtttataaactttagtttatatccaatattcacttttgaaaatggttacagttaaggaaaaggcagggtgacatctccaattctctatttacacaggacttgtttctaagatgggaagacagctggttttgtggattcaggatcaagctagatgctgcgtgcctttgaatttgcccctggataccttccaaggctcgagactttgacattatgaagcacaactggtgagagctcaaatgatgaaaaccttaagagagactaaataaggcttgattcctcccttttgcaagcaggaattccaggtgaagcaccagatgtacagagaagctgcaagaagcagacactactttgaaggcagtcggacagcctattggcaatcagtgatatctacgctcaccat

SEQ ID NO: 856885 - DNA, 575 bp, Homo sapiens
ccattttgcctgctcctacccattctctaattagtatattttttctcattaatctataagaatttttgtaatggtaagaatattaatatttttaaattagaagttgaaaactataactgtttcttaagacaactatgaaatagttaatatcatcaaaagcattaaaacgttcttttggtaaagcagaggaaatggaaggggcagtgaagagtaaattagataaaataattctgtgtcaaaacctctccccttttaaaacaacagcaacaataagaaaacaccacccatacaaatcatgatagagcggcaccttggatcgagtcctgtagctatgctagatagccccacaccttcccagttaatcagctataggatacctgagtggggaagaaagtgcacgtgggcactgtccaaccccagtggccacagggaaggcagggtattttgcagaattggagccagcaagtaagcagtcygaattccgagttcctgggtgccaactggagtgagctgagtgatcactaaaaaacaatataaatgggatccacttccaccttcaggatgggcaggattaa

SEQ ID NO: 856886 - DNA, 622 bp, Homo sapiens
ctgaaatttgcctccagtgatttcttcttggactacaccgaataagtttcggtgttcccatataaagatgggaacaacagacactgggggctrctagagcagggagggagggaggtgtgggctggaaaagctacctgtttggtactatgctcaccacctgggtgacagagtcattcttaccctaaaccccagcatcatgcaatgtatctgtgcagacctgcatatgtaccccttggatctaagataaaagttgaaattttttaagaaagagcacagtcttaaagtcagtgtgttgctttccccagagtgtctgctttttaagcagatctgctttacagttttctcagatagcagaataaaagtttctttaccttattaaaggactcttgggcaacaggtactatagatgagggttgtgggtattttggggatggagactgaattgatgtggaccacttccctgcctggattaaggagttaggaaggttgaggctttggagggctttcttcctggaacaagctatgggctatctgcacagcatactgtgcaagtaaccttttttgatggttccaaccagtccaatgaacttgacaccttctccccacctcccactccctggcc

SEQ ID NO: 856887 - DNA, 646 bp, Homo sapiens
tatttaataattttttaaaaagaacttttgaaggaatctgttgggtcttcattaccaagggaactaaaagaaagaaaaagggaaaaaacttatttagcatctattgtattaccaggcaaattgttccatcttatattcggttactgctataaccactagttaaaagcacagttttattttcctcatatttacgatttaacagtatatacaacaatgctatctgactccaatcattataactagaaataattttttcaactgaaaatagtaaaagtgccaaaattcaagtattttccaaaaacatgtatgcaacacaaatatcaagcctaaaaaacttatcaggaagatgtttattttgcttgctaaatgataaatgaatgtgtaacttctaattaatttgctggtaagattagtattgaaaatatatgctgtgaggttctatagtctacactagagaatggtcccaaatatggctctgtatttcttagtgagctacagaggaaaacatcatagccataaaagcaaatcaactgctcccaaattattcttgscactatctgggaaaaatgtctcccacccatcttcacacagagatcccttcagttaaaaacaaaaacaaaaaaacaacacaagtatttcttcaaac

SEQ ID NO: 856888 - DNA, 629 bp, Homo sapiens
ttcttcaaacattttcccatgtgggctgatagtttaatgccaaaactcagtataatacgaacagttctctaagaggacaaaagtgtgatgcaagtacatatttctctggcttagtcamggaataaaatttaagaatatctttaagaggttgaaaataggcagattgtagttttgtctaacttatattaaaaaaaattccaattgagttataattcacaaagaacaaggtgcacaaaaacctaagtgtatagcttactgaatttcacatatgtcaatgtaccacctttcagatcatgtggaacattaccaggactaaggttccttcatgtcccttcccagtcaatacacccctaaaaacagcccctactttaaccccaagatcacagattagttttgcctgtttttttaaaaccttcatataaacatggaatcacacatttaggtattattttctgcctggcttctttcatttaccattagtccacaacccactcatttttaagaagtaaattcattgcccaatatttaaaagtaaggatttttaaaaacaatgagatttctagcttcaaacaaacaaacaaacaacttggcaacaccaagccaataagaccaaatgagatcagcaggag

SEQ ID NO: 856889 - DNA, 548 bp, Homo sapiens
tctcttcatctgtatcttctgtaatatcctttataataaaccagtaaacataagtgattccctgagttctatgagccactctagcaaattaatstaacccaaagagggtgtcctgggaaccccaacttgaagaccattggtcagaagttcctgaggcctggagttgtgatctgtgggaagtggggcgccgtcctgtgggactaagccctcaatatatggtttttgaggctatctcccaggtagaacgcatcaggattgaactggaggatacccagctggtgtccactgcaaaattaattgcttgcttaagtatgtgaggaaaaacccccatacatttggtcatagaggtcttctgtattgattgttgttggtagtgtgaaagcagaggaaaacactttgagtttgagtgtgtttcctattagaagtagccactagccacatgtggatatagagcacttaacatgtggctagtgtgactgagaaaccaaatttttcaaattaatgtttattactttaaatttaaatttaaataaccacatgtggctagt

SEQ ID NO: 856890 - DNA, 554 bp, Homo sapiens
tcttggagtccccgattccaggccttggctcttggayggcatctctgaacctaccctgggtcagagaggaggaagcccactgccctgaaggaagtcccatgcctggcagcattcacaacaagctaactgaagagccactgggccttaagtgatcatcagtggtaccatgatagtactctccataggcctgtggtggtggtggacaaggggagagagtcctttgcctaaggaaggggagggaacagtggaaaggactttgtttgtgattttggtgcctgcttagccacagtagagtacccagtagagttctaaagatcccgattccaggcactgactcctggacaacatctctggatttgcccggggccacttgccaccctgaaggcaaggacataagaccagctggcttcaccacctgctgactgtagagccctagggccttgaatgaacaaagatggtaggcaggtagtggttacagtgggccttgggcaagacccagtactgtgctggctcaggtctgacacagcacagtctcagagatgatggccacaggg

SEQ ID NO: 856891 - DNA, 646 bp, Homo sapiens
ccctaaaactattgaaataaaaacaaaacaaaacaaaacaaccccctaaaaacactaaaaaaagatacaagtgatggtaaggcaagctctaactgctcatgccctatgtggccttgttttggcatcctttgttaaatgagagagagagagagagagaggtgtgtgtgtgttcatgttcatggatttttcttttcttttctttttttctttttttttgagatggagtcttactctgtcacctaggctagagtgcagtggtgtgatcttggctcactgcaacctccacctcctgggttcaagcaattctctgcctcagcctcccgagtagctggtattacaggcacccaccaccacgcccagctaatttttgtatttttagtagagatggggtttcactatcttggccaggctggtcttgaactcctgacctcgcgatccgcccgccttggcgtcccaaagtgctgggattacaggcatgagccactgcacccagcctgtggattttattttccaccaatacctagctcatctgtcttatacttggtgccatgaaaaattaaaaaaaaaaaaaagaaaaaagacagagaacatgagaaggatccacwagaaactaatgcaaagctataataggctgagcaacccataa

SEQ ID NO: 856892 - DNA, 686 bp, Homo sapiens
gcataaaataaaatatgtaaaatttcagaagataayaagtatactaaaataatcaaagcattaacataactcatacttttccatgtattgagcaataagcaattttagacagagtatactggaaagcaatgaccagttgggtcaacatctgtatacatggagatagtgattacgtctaaatactactataacttcaaattattgatgagtataagttatattccaagacatttgcaataactataatgccatattaaaatatctgtcatttctcttgctgataaagtgaaatgtattgcacacagtagtgtgtttgttatttacatttatagtttaaggtaatgctaaatttcagttagagacaagtaaaaattagatcagatatgttttcctatccaacttcatggatcccagaaatctctttataatcctgttggtggtctgtggatcccagatcaagatcttatgctaggacttcctgtcagttgtcctctctccctgtcctctttactaggtcgccgtgacctgcttcccagatcttcctcattgtcacagttttgtataaatatcttagaatgtcactaatatcaggataagttcatagcatctatgagagtaagaaagcttgagctgtcaattttgcttcaggctgcaaaatacagtaatacaatttttctttccttccc

SEQ ID NO: 856893 - DNA, 551 bp, Homo sapiens
attccaacacataagtaataaaaagcacacactcattttcttaaacatgttatttaagattgtatgtgtggtactctcacttactatgtagtaagtcaataaaacttagtttgtctataaaggtwaagcatccctaatctgaaaatccaaaatccaaaatgctccgaaatctgaagctttttgagcagcaacatgacaccacatgtggaaaatcccacatgaaagtacttaacacaaactttgtttcatgcacaaaattattaaaaatattgtataaattaccctcaggccacatgcataaggtgcatatgaaacataaatgaattttgtggttagacttcggtcctatcctcaagatatcttactatgtatatgcaattattctaaaaattgaaaaaatctggaatccaaaacacttctcatcccaagtatttcaaataagggatactcgacctgtattataacaggtatttttatttgagaataaaaatgtaccacaaataggcaacagaggcaactagtagacaagtggaggatttgttgacatagtg

SEQ ID NO: 856894 - DNA, 539 bp, Homo sapiens
ggccctttaaggtctaacattctgtggtacactctatacctatgaggagcatttgaagagaaatagcaatgcttgamcaaaaggaatcaactctctaatgatggaatttcagatattgtgccataacttggggaaatagagatctgaggctgaagaaggtaggtctacctgataccaatcaattcaacaggcatttaaagagagcctactataggccagataaataaaatagcttctgatttcaaggagtttttgtttcagtggcaaaaataaacttgtaagaaaacaatgactgtacgggagaatgaggcactgcaagagaagaaaacacaggcagtgagtgaatacagagaagaggcacctgaaacactttagagtttcatggaaggtttcccaaaggaggtgaaaattaggctgaagcatgaaggacaagtacttcttaaaggcctcataggagaaaaggggtaaatgtgaatgtctttcatacagaagaagcagtaggtgaaatgctaagaggtgtgaattagcaggatgcctgt

SEQ ID NO: 856895 - DNA, 598 bp, Homo sapiens
aatagaaacttcctaaccttagacacacctggaactgtaagttgtcaagtctgaataaccttctcctgctagttattagattgttctctcttctgctggctgtggaaatgtgtaacaatccaactctccctgcatagtcaatggactaatttgcaaaaatttggaggaagagcataaatattaaatgcagcagaagcagtaggctaagtgaatcttctcacatttcttagaagtttggtttagataacgaacctactggtggtaggaaaaacaaagttttgacttgaaacctttttatggggaggtggtgtagggagcaaattataccattcttcataccttgcgttgcaattttaaggtgttgcaacttcctgaactacaaccttggcagcctaagaacagtattttcacttgaacccctcaaagcaactcatttaatacgcagtcatttatgccttcttttctcccaccccacattctttctttcattctgcaagcctttactaatggtgtgctatgttttaatcactatgwtaaacctggatacattgtataaccaatgcaatgtgagaccatgttatttatattggttgtttgg

SEQ ID NO: 856896 - DNA, 596 bp, Homo sapiens
ttcttatctagaagttcaggagtgtggctaaaggcagtttctgatgaggttatgagcttccaaggtgtttctaaattcttagtgcagacaccctcccttttggggcaaagcaccctctctcccacatctactaaagaaaacccaaaaaaccaaaaaattaaaaaattaaaccaagtaccaaaattgaaaatattactgaagtaaaacctctaatgaggagtggcatctgaactatctgggataccactactggacacggtcttgtagaggcagcagtctagttttggtgcttgactctttaataggaattgttaaatggaaagatgctctaaggactaggtgaaagcctggactcttatttttttttcttttttggtccctcataataaggagcattgttactattacccctttcccaatgcctcctcattgacctagtacactgggttaaaagggaactaaaacatttwaaaaaaaaaaaaaaaagtttactggttttcattcatctcactccttttgcctggagatcagggccaaacatcaagcatgttgggaggggcacaatttaaagcaacactgttgattgtaaagcattt

SEQ ID NO: 856897 - DNA, 621 bp, Homo sapiens
tccccttatcccccaccccctgacaggccccggtatgtgttgttcccttccctgtgtccatgtgttctcatwgttcaactcccacttatgagtgagaacacacggtgtttagttttctgttcctgtgttagtttgctgagaatgatggtttccagcttcatccatgtccctgcaaaggacatgaactcattcttttttatggctccatagtattccatggtgtatatgtgccacattttctttatccagtctatcattgatgggcatttgggttggttccaagtctctgctattgtaaatagtgctgcaataaacatatgtgtgcatgtgtctttatagcagaatgatttataagcctttgggtatatacccagtaatgggattgctgggtcaaatggtatttctgattctggatccttcaggaatcaccacacggtccttccaaaatggttgaactaatttacactcccaccaacagtgtaaaagtgctcctatttctccacagccttgccagcatgttgtttcctgactttttaaataatcgtcattctaactggcatgagatggtatctcattgtggttttgatttgcatttaaaaatatataatttaaatgtcaaat

SEQ ID NO: 856898 - DNA, 623 bp, Homo sapiens
tacagaatgatgccatgactattktcatccaagtaacaatgaaatagtagtagaataatcaacaatatttgtgactgtattttcacagacattttaacatagtaaattcataattaatataaaatactaaattcagatttctagacagtaaaattatgtatgtattaaaatttaatatattaaatcaattagaatttctattattatatatccttatatcagtagcaaacttttatagagcagaccaatagaaaaaaggttaactggccaggtgcgggggctcatgcctgtaatcccagaactttggaaggctgaggtgggcagatcacttgaagtcaggagttcaagaccagcctggccaacatgatgaaaccccatctctgctaaaaatacaaaaattagctgggtgtgattgcaggagcctgtaatctcagctactctggaggctgagtcaggagaatcgcttgagcccaggaggcggaggttgcagtgagctgagatcacgccattgcactccagcctgggcaaaagagtgagactttgtttcaaaaagaaaaaaaaaaagaaagaaaagaaaagaaaaaaggttaactcacacacacatctatgtacatacatatcca

SEQ ID NO: 856899 - DNA, 586 bp, Homo sapiens
gtgaaacccattagtggccctggaggagggggcacccagacacagcaacagatgaaccagctaaaaaacactagcacaatcaataatggcacccagtagcaagcacagtgtatgaccaccactattaggcctggtgacgactggaaaaagactataaaactccctccaaaggatctaagaatcaaaacttcggaagtgccctccacactccaaacaagaaaatgagtttgaagattattgtttgaaacgggagttactgaagggaatttttgaaatgggctgggaaaagccacctcctgttcaggaggagagcattcccattgctttatctggtaggcatatcttagctagagcaaaacatggaacaggcaagagcagaacctacctcattcccttacttgaacggcgagatctgaagaagcacaatatacaagcagtggtgcttgttccgactagagaacttgctctacaggtcagtcaaatttgcgtccaggtcaggaaacacatgggaggggccmaagtgatggcaaccacaggaggaacccatttacgagatgacataattaggcttgatgataccatgcac

SEQ ID NO: 856900 - DNA, 636 bp, Homo sapiens
ttatctgtagaaaacctaggctggaatttaggtttttaaactattttctatagaaaccttgaagcacttgaagtttcaatattcttactgtatctcttcatagaaacatatttattaaagaacaatattttaaaccttttcctgttttagattttgttatactttcattttgtctatgtgatttggcaaacaaagtaacttttatacaatttgaaaatgatatccaatttgtggagatttggagaaaatacaacctaaagcaatttaataaagatcatatatgacttagccagtttcactgtgtatatttattactcagaataatatcttgattctgaaatggcaccaagacagaaataactcaattgtatgagagttcctcatttgccaccagaaagtactttttctttcctgtaatatttttccatcttatgaatttgtgtatatctttatctacttgcaaatgatttgatggtcatttatttttttctgtgtttggtatctcytctaaaatagaatacattttgactgcatgataaagattttccaatataccattgcttaaatattacaataattttggagctaggcagctgctgcattggttgcatagtctgacaaggtatcttgtaattt

SEQ ID NO: 856901 - DNA, 613 bp, Homo sapiens
ttagaactaggcctttgttggtgcttggtcttttatcatatttaacagagttattccctactttcccacttcttcccagatgttttaaaggctgtaaacctttcaccatgaaaaagtctgtcttaatttatactctatgtataatgagaaacgcctagtttcaggcttatgtatccaatttacttgaaccatttaatatttagcttacaagaaaagttccagcttgtgaagaacaaatgaaatgggctgcaatttgtgctaaactattttaaccctgagtatgtttgcaattggaaaaagtgtgttatgagaatgaacaatagttctttcctaatgagagaaggaaacaagctgggttgacttggctacctttcactttaaccagcctaagggagtaactcctaggttctctctttctgttagtttagaagaaaaaattactcaacatatttagtacatttaagataatgaatcatttaggcctatcactacctcagccaacaggtagtgataggaaggacagcatagtaactgcaagaaaacaaaatgtgtaatctctstatctttcctacagatttagaacaaagccaaatgactatggcaacatttagaa

SEQ ID NO: 856902 - DNA, 460 bp, Homo sapiens
tttcataggattgcttgacatttattattaatatgcaagacaaatatttatcaactgactcaatgtatctatgaggtagcagagcaaaacacratttaaataacattactgtgacattatttgacccataaaaagggtttgaacatataataagcaattgcttgcaaagaaatgcctcataataaattataaattatgtatctttttatcaaaacaattttccaaatattgtagattgtcaacacttgattaataaatttgagattattaattgaaaccaataaaactgcttttcttgataaagaattaaatacatctaattcatcttaaataagcccaactttattcctggttttccttatgtaggaaggctttactgaattgagagacagactgcattaggtcctaccatgtttgaaaaagtgctttacaataaagatgagattgtaaagccctctcc

SEQ ID NO: 856903 - DNA, 597 bp, Homo sapiens
ggattgcttgaggccaggagttcaaaaccagcgtaggcaacatagtaggactctttttttttttaacaacaacaaaaaaaatacgaaaattagccagtcatggtggtgctcacatgtggtcccagctattcasggctgagacaggaagatcgcttgagcccgggaagccaaggctgcggtgagccaagatcgcaccactgcactccagcctggacagcagagtgagaccctgtctcaaaaaaacaaaaacagaaacaaaacatagtgtttgtgaaatttggttaaggaaaatattgaaattaattttttaatttcacctatttcttttgatgttattttattttattttattttattttatttattttattttattttattttattttttgagacagagtctggctgtgtcacccaggctggagtgcagtggcacgatctcggctcgctgcaacctctgcctcctgggttcaagtgattctcctgcctcagcctcccaggtagctgggattacaagcactccaccacgcccagctaatttttgtatttttagtggagatggggtttcactatgttggccaggctggtttggaactcc

SEQ ID NO: 856904 - DNA, 594 bp, Homo sapiens
gggaaatccaaggagaaagagagcactgtggctagggggtcagagagggcttcctggaagaggcgcctgagggagagaagagccctggtagggaaagggagaacaagggacagggacagcattggcaaaggcatggaggagagttaatgggccagtccaggactgtacatggaggctctgtcaccttgttgggggtggaggggatgctatgaccgtggaagccagacaggacagaaggggcctgaggccatgccagagactcaacagggacagctcttcagagagtggggaggttctgaggaccttgagcgggtcagtggctgtatgccctctcggggtcgccacggccacactgattggggtgagctggaaggcgctgcaggggggaggagtcccctctagcattgacacaagcatgggacaagaatatggagaggagtttggggggcggagaagggcacaatcaaggggctccccttttcttggcatgagccatagaactcagaactgggcacagggtgaagtkcttggggctcatggggagaaaggctcaatggaaatgcaagggatcccggcttcctgggcatgccggag

SEQ ID NO: 856905 - DNA, 623 bp, Homo sapiens
aaagggggaattaaggctccatttctattcagccacaatccattcccagaaatcaagaaatattcatgagctgcaagcattggatggcaatgtctctctgtcatcatcaggaatgacagattcctcagagaagaggcagagctcaggtttcccatcttttctaagcacgtcactcagtaggatttcaaatacagacaactcttgaatgaatgcagtcactacccacggaagcaaaggttggaggatgggaaaattcagcagaatgttgaagactatggagttggaatcctgactccaccactggtaagctgtgcgacattgtgcaaaccacatccccttctgagccagggacgatgggcttgctctaagaatgaaatgagatcatccctggctttttttgagtaagcactcagtaattggtagctctgtgaggtatggcatccctgaaataacaggtgcgtgctgtcgccaaactctcacaattcaggcccacaaactcaagcctttctcagtatcagcagacytactgccttgatgttctaacaacccctaatgagtatagtatgatcatcagttaaataaacaaacaattagtgagtgagcagaaggctcttcctcagcac

SEQ ID NO: 856906 - DNA, 386 bp, Homo sapiens
gattgtatggtttttttttttttttgaaaagtgtctcaatgttctttatccatttttttaaatgrgattatttgtgttttgttgttgttgagatgtttgagtttcttgtattttctggatattagtgcctcgtagaatgaatagtttgcaaatattttctctcattcaacaaaattgtttcttcacttcgttgattgcatcctttgctgtgtagaagatttttagtttaatattgttgcatttctctatttttatttttgttgcctatgctctcaaggtcttagctataaaatctttggctagaccaatgcacaaagtgtttcttccttggtttttatgtagtactttatagttttggatttcatgttgaaatctttaatttatct

SEQ ID NO: 856907 - DNA, 386 bp, Homo sapiens
gattgtatggtttttttttttttttgaaaagtgtctcaatgttctttatccatttttttaaatgagattatttgtgttttgttgttgttgagatgtttgartttcttgtattttctggatattagtgcctcgtagaatgaatagtttgcaaatattttctctcattcaacaaaattgtttcttcacttcgttgattgcatcctttgctgtgtagaagatttttagtttaatattgttgcatttctctatttttatttttgttgcctatgctctcaaggtcttagctataaaatctttggctagaccaatgcacaaagtgtttcttccttggtttttatgtagtactttatagttttggatttcatgttgaaatctttaatttatct

SEQ ID NO: 856908 - DNA, 568 bp, Homo sapiens
tctctttccttccactgtctatgaccagcagctgagaataggcccattcatcagcagttctgccagtcccagttgttattgcttatgtttcctctgacactacattttccccgacttgaaatatatgtcatgatttaatccaccaggatgaatggtctgatgtacaaccgtctcctcaatcccactgacactttatgaaaatgctccactaagtccgataaaagggcagctttatgttttgaatgcttatgactttatcagataaaatcccagtataaagaattactgggatttcaggccagttccagactaggagagaaaagaaccctatattgaagccatgtgcgttctcttttgtatataatcacagaaagcttttgaagatggaaagcatgtgcgttatactcactcatgtgcagtgaaggtgaaaatatgatgctctcaaatgaacctgcgttctcagctccctcccactctgcatcttccagcaaagctaggctgagcctgcttttcttggggcmcaactgagcagaaacaacatggctttggagtcatccggacgtgggtt

SEQ ID NO: 856909 - DNA, 613 bp, Homo sapiens
agggttttcaaatcaagtcaatcctatgggttagctagggcgaggaccaccacgccatttgttagataaggaaaatgagacataggactcagaagattcactacaaagtcttgcaccrtgaggtggggggtgaatgaccattgactcatcaccaaactactctctacactaactcttcatggcaattccttgagctcttctccttttcatcctgggaagtctgctggtcaaggggctcagcccatagctcctaggggtagaagaggggatcacacttggttcttggctcttcctgaggccatgcctgcaagccattttcaaggctctgttgactttagcattaatgaaatgagctcttccatccagggcatatgtgttagtttgttctcacactgctataaagacataccaagactgggtaatttataaaggaaagaggtttaattgactcacagttcggtatggctgaggaggcctcaggaaactcacaatcatggcagaaggggaaggggaagcaagcactttttttcaccaggtgacaggacagagaagagcaaaggaggaacttccaaacacttataaaaccatcagatctcatgagaactcattgact

SEQ ID NO: 856910 - DNA, 531 bp, Homo sapiens
tcccagggcaggcatataccaaaagagagggagagggaggggaagagagtgagtcatacataaactcaagtgacaaatcactcctagctgggtcaaaaagggagtagagaggggccaagtgtgtggggtcagggaagtccctctatatgaaaactagagaaggaaggggataaaaattccccagatttttgttatcttaaccagctgggcttaatgtttaacccctggacaaccaggtatgtggtcatctggctccaggaggggatgagctaactatctgagcaggaggtcgctcccccagcatcaacttctgttccttcctgtgccttcctgggaccatcctaagacactgttgatttcacttccataagcctctgagatgagccagaacagtgtgttaataaaatccagtccaaggctatgttgtgtctaagactgcaagttcagagcctgttctatttccaatccaaaytgatgtccagccacatggaccactaacctcatcagaggttctgtaatgaggtttaatag

SEQ ID NO: 856911 - DNA, 608 bp, Homo sapiens
ttttagaggaaaaaactacatttaagtatcaatgaataccttttgctcatctgctgtaactataggaaaggaaataagaagttgttatcctaaatatatagaggtaaraattaaatatggtctctatcaattttcactacaaaataaaccttgcaaaaaactagtggcttcaaataaccatttatttagttcatgattctgtgggttggcaatgtgggttgggctcagccagagtacatctatgggtctcaccaagactcacgcatctgcaatcagctgcctatcaacttcaaggcattcatttcgggcatcatctggcccattggctggggctgctggaggaagtgagccacatgtgtctcatcatccaccaggctagcccagggcttgttcacattaaagatctcagggttctaagaccaagagcagtagtgctaagactccttaggcctagactcagaacttgctcaaagaaacttacatcacattttactggttaaaacaagccataaggccataccagatttaaagggtaaggaaataggctccacctctggttgggaagaactgcaaaattttgtggccatttttgcaacctaccaccatct

SEQ ID NO: 856912 - DNA, 630 bp, Homo sapiens
cctcagtaggagctgttccatttgtcttgagtctagtgggccatcttgggatttttttttctttcttttccctccctcccttcctccattctccttccttccttccttccttctgagagggccataatatgttttagagaaaaagtcaactgttttgagagtttattttaatgattataagctttgtttaatttgttagaggtcaaaagtcatatttttggttcagttctataactataatacacaatggacacagttaattcttagtcttgtatgtatatgtgtatctgacctatgtactggtgtgtgtagggggacataaaggaaaaaattgttccctttaaaaatatgacatgctgagtaccagtaccaaacactgttctaggtttcagtatagggcagtgaacatatatgacaaaccttcattttcagtgcacttttatttgagactcatatattatcattgagcataaaaacattagcatttgttatttcttcytccctatacctatccctgatcctcctctttctattgttttcatattgttcttatcaacattcatgtttgtgttcccctaagtaaatgtctaaccagatactttcttaatatacaacattagagggacataa

SEQ ID NO: 856913 - DNA, 630 bp, Homo sapiens
cctcagtaggagctgttccatttgtcttgagtctagtgggccatcttgggatttttttttctttcttttccctccctcccttcctccattctccttccttccttccttccttctgagagggccataatatgttttagagaaaaagtcaactgttttgagagtttattttaatgattataagctttgtttaatttgttagaggtcaaaagtcatatttttggttcagttctataactataatacacaatggacacagttaattcttagtcttgtatgtatatgtgtatctgacctatgtactggtgtgtgtagggggacataaaggaaaaaattgttccctttaaaaatatgacatgctgagtaccagtaccaaacactgttctaggtttcagtatagggcagtgaacatatatgacaaaccttcattttcagtgcacttttatttgagactcatatattatcattgagcataaaaacattagcatttgttatttcttcctccctatacctatccctgatcctcctctttctattgttttcatattgttcttatcaacattmatgtttgtgttcccctaagtaaatgtctaaccagatactttcttaatatacaacattagagggacataa

SEQ ID NO: 856914 - DNA, 569 bp, Homo sapiens
agtgtacaggggtgattataaagaccagacccctggcctcagctccagaattacakctctcacctgttgaatgcctaatagatacctggcaatatgctagacttttcaaatattatttcatttacttccctcaaatacgctatggtatagaaattgtgttattgttgttgtcattgttgtttgacaaaacaagaaaaagaaatttagaaagataaacaactttcccaaacttaaacaactgttggatacaagagttatccaaactaggactgaactccaatacattatcatttatcagatctagggcatatctagaactatttagcaagatcacatttttaatttcctacttagtaaacttagtaatatcttgtgaaaaatgtaattatccttcatccattttagaatttgtgagtcaattatttccattgccggtaacattttcatgtattcttctaatattactcattcttatgaagtttatattatgattatgtggttacatttacactatatgagatccaattttcaagtatttatacatttcactatcatgggcaatctcctgc

SEQ ID NO: 856915 - DNA, 608 bp, Homo sapiens
ggaggatagggtatgtttgttttgtgtttttaaaattgtttgctctctgcatttccccaaagacatccaggctgtgcctttacygtcagcttgtttctttggtcagtgtctgccactgtgttcctgacctacagacttgaaaggcttgtgcagttgtcctggccttcagtatctgaggggcactggttccaggatttccctccaatattaaaatctgcagatgctcaaaccccttacctaaaatcggaaattatttgtagaaaatctatgcatatccttctgtatacttttagtcaactatagattacttataatggctaatacaatgcaaatgctatataaatttttactgtattgttttggatttttttgttggttttgtttttgaatagtttcgatccccagtttgttgaatctatgcatttggaacccgtggataaggagggccagtcatatagggcaaatgtgggactggcttctctctaaagagagggataaagtacacctcagatgcgcagatacagtctggctgcagttacactgggataggtatattccggactttccctgaagttgtcaacttctgactcagtcacattcttgacctc

SEQ ID NO: 856916 - DNA, 627 bp, Homo sapiens
atgtaattcttatccttgcttctctattggtaagccctcttccccgaccctcagtttctcaagtttgcctgtctttgattttctgcagtttgaataagatatgcctaggtgtagttttttggtattttgattagtgttctctgagcatcctgaaactgttgtttggtttctgtcataaatttttggaaattctcagtcattattgcttcaaacattttttctgcttctttctcccatctacgtctagtaatcccattgcatgtatattacacttccttttgtagttggatattctgttccatttttttcagtttttctcttcaaatttcaggtttggaagattctattgatattcttcaggttcactggtttttccttggccatatccagtctattgatccatggcattcttcatttctgttgatttttttttttatttctaccatcttcttttgaattcttttttacagttttcattttctgcttacattccccattkgtccttgcaagttgtctgctttttccattagaactcttagcatattattcatagttactttaaatcctcaatctgataattccaacatctctgcgatatctgagcctgttctgatgcttactcggttt

SEQ ID NO: 856917 - DNA, 572 bp, Homo sapiens
aacacatttttagaattgtgtagacttcataagtatgcaaaacaaaaacagctggtatcaagcaccacwtgatcacctttaaattcagaaacacacttgacaaaatgcgacaccccttcaggatgaaaacactcattaaataaggaatagaaagtacttccttgacctgataaagggcatctatgaaaaatccagagctaacatacacaaatgggccataaggacaaatggccaaaagatgtcaacatcattagccatcaggggaaatgtaaatcaaagccacagtgagataccacttcacacccgctaggatggctagaatcaaaaagacaggtaacagcaagtattaataatgttgtggaaaaattggaaccctcaaacactgctgatgggaatggaaatggtgcagcctctttggaaaacaagtctggcagttcttaaacagagttaccatgtgaaccagcagctctgcccttccaagagaagtaaaaacatatgtcagtataaaaacatgtacactaatgttcatggaacattattaataacagtcaaaaaatggaaaaaacctaaat

SEQ ID NO: 856918 - DNA, 585 bp, Homo sapiens
acagaatgatatcttgcctataattcagaaggtaatagtgaacaaatgaagagaaccagagcttagtggcacaaaagcctaggttagaaaagtataataaagtgaagtgaaagaaagttggaaacaaataatatatataggtataatcccaatcttgttaaaaaacgtctttcactcaccctgtaatcaagactggaagacggtaaatcactatttatgttgtctgagtttttgataatgagcacatattgctttgcaaaacaaatagtgcagtaaaaacaagggcagcagtactaagggtggttaaaagtataaagtaggtgagaattaagtagaaacttgggatttgtgtcagaggagagtagtgatgtcagagggatttcagttgaatggtgaaattcaagttctttatttagagtcaaagactgaggaagagctgatgtccaggacacttggcaaagaaagaaggaaaggagggctgctagtttgggtgacggcytcatcatgaagcttcctgggcgcattgaactatgcatcaccacggaaaagagccagagggaggggagaggtgatgagcaacctttg

SEQ ID NO: 856919 - DNA, 585 bp, Homo sapiens
acagaatgatatcttgcctataattcagaaggtaatagtgaacaaatgaagagaaccagagcttagtggcacaaaagcctaggttagaaaagtataataaagtgaagtgaaagaaagttggaaacaaataatatatataggtataatcccaatcttgttaaaaaacgtctttcactcaccctgtaatcaagactggaagacggtaaatcactatttatgttgtctgagtttttgataatgagcacatattgctttgcaaaacaaatagtgcagtaaaaacaagggcagcagtactaagggtggttaaaagtataaagtaggtgagaattaagtagaaacttgggatttgtgtcagaggagagtagtgatgtcagagggatttcagttgaatggtgaaattcaagttctttatttagagtcaaagactgaggaagagctgatgtccaggacacttggcaaagaaagaaggaaaggagggctgctagtttgggtgacggcctcatcrtgaagcttcctgggcgcattgaactatgcatcaccacggaaaagagccagagggaggggagaggtgatgagcaacctttg

SEQ ID NO: 856920 - DNA, 499 bp, Homo sapiens
taaagactagcgggcactcatcagtcaatccagctcaatggtgctggggactcccaaacgcgggagaaatgagacagaggttgacatagaaccagtgctcctttgtgtgggttgtgcactgcacagcttcaaggggtgttttgcaaatcccacccatcatatatttatgcagttgttatgatgatttttttctggcatcagtggaagtaaagcatcaaggaagaggtgctgttttcatttccctttttttttttaattgtgcagaaagtttattaggaattactttcaggatcaacatctgtgtgggaagggaaataaacaggttactaataaagaagaggaaattgggcctcagggcaggcaccacaaaacctcagccccaccttgagagstctgaaaatagttgtaatatcctcatattgactgatcacccgattcaagccaccccaagaatgcaacctggccttgtgagaggtcattcttttcagctgaaggaggg

SEQ ID NO: 856921 - DNA, 523 bp, Homo sapiens
acaggaaatgaataaaggaccacaggcttggctgattggcagaagacaatggaggagctagtgtttgacaaaacagtaacgacacctctgatggcagagcmgcgcagttagcatcttcttcccaaatacagcaaattacccagcaagggcaggaagctttggcagaattaatcactacctggaaaacaatttcacactagaataaacaggagagagagggaataacaaatgcattgcattgtccagttgttaacctgggccttgatatatattaaaaaacaaggcaattacttccagcaatgacagaaactcatcttgtttagcaaaataagataaagaagtctgggggtggagagccagcgatctgagcgaagacatcctgagatgataaatatctcatgtcaagcccgcactcagccgcaggcttcttggaacagaggcagccagctccgttccatctgagggagcagaggaaggaggaaaggcacagaacattggaaagggagcgggcgtcagctaccaa

SEQ ID NO: 856922 - DNA, 604 bp, Homo sapiens
caacctcagctcgaagtatgaaaacgagcatccacttccgggtgtgcaggctgggcatctccacacagaggcgttccataggcttcctgggattttgtggaaagtctgaaaggcatcaccacatgcctgggctcgttacccctgacaaaattggcaaaatgtatagaattctgaaaaaacaggagagagcttaagaatctttcctcaaaatgctccagcaaacacagggggacacgtgtcccaagagggcatctcatgtttaaaacaacaaagcaggcagggtcatcagcaaaggctctgaggaaggagaacctgctttcagatggttgggcatttttttttgtggggtgggtggcggggcagtattttagttttattggtgaggtggcaaattattgtcttttaaacagacatatttagaccattgcatacttgcgtggcctgtgataatttgaaaaaagatggtttattacyggtttgtacgtcttggaggatttctagtgacacagggagaaggcctcctggtcttgcttggggccctcccctgtgggtgtcaggagccctgacccatgcttgactcctcctttctgctctgagggggcgc

SEQ ID NO: 856923 - DNA, 628 bp, Homo sapiens
ctttgcactggaattgtgttttatgagcacattaccagaagttgaaatcttgtaaaacagaaatttttgaaataaaaataaaaggagacttaagtccattactattggcaaaatgggaaatggaggcracttggtagcaatgtgcatgctataatgtgattgtgctggctgctggttttcatccaggccttcatctgcagctccagtctgagccccatggaaggggtcacctgggtttgcccccagccacatggaactgtggagtgattttggaagcctaccttgacagacatagcccacctgagcttgtgtggccttcttgaagtgtgctgagcctccaaaccatcaaatgaagcttctagcccctagggctctggtcttcagccccctgctcacttcccactcctcgttaccacaaaaccacaaaaacaaaccgacaaacctaaatactggccaccttgtgtgagccaacaaggccttcacctctctgagcattcttgatgtatgtgaggagatcagtgcgtgggacttgagcagtcaggagatgccacggacaaaggggacctcggatggaactgtgggtggccatgcggccagagggcaggtcaggggtccaggtctgtgccgg

SEQ ID NO: 856924 - DNA, 628 bp, Homo sapiens
ctttgcactggaattgtgttttatgagcacattaccagaagttgaaatcttgtaaaacagaaatttttgaaataaaaataaaaggagacttaagtccattactattggcaaaatgggaaatggaggcaacttggtagcaatgtgcatgctataatgtgattgtgctggctgctggttttcatccaggccttcatctgcagctccagtctgagccccatggaaggggtcacctgggtttgcccccagccacatggaactgtggagtgattttggaagcctaccttgacagacatagcccacctgagcttgtgtggccttcttgaagtgtgctgagcctccaaaccatcaaatgaagcttctagcccctagggctctggtcttcagccccctgctcacttcccactcctcgttaccacaaaaccacaaaaacaaaccgacaaacctaaatactggccaccttgtgtgagccaacaaggccttcacctctctgagcattcttgatgtatgtgaggagatcagtgygtgggacttgagcagtcaggagatgccacggacaaaggggacctcggatggaactgtgggtggccatgcggccagagggcaggtcaggggtccaggtctgtgccgg

SEQ ID NO: 856925 - DNA, 628 bp, Homo sapiens
ctttgcactggaattgtgttttatgagcacattaccagaagttgaaatcttgtaaaacagaaatttttgaaataaaaataaaaggagacttaagtccattactattggcaaaatgggaaatggaggcaacttggtagcaatgtgcatgctataatgtgattgtgctggctgctggttttcatccaggccttcatctgcagctccagtctgagccccatggaaggggtcacctgggtttgcccccagccacatggaactgtggagtgattttggaagcctaccttgacagacatagcccacctgagcttgtgtggccttcttgaagtgtgctgagcctccaaaccatcaaatgaagcttctagcccctagggctctggtcttcagccccctgctcacttcccactcctcgttaccacaaaaccacaaaaacaaaccgacaaacctaaatactggccaccttgtgtgagccaacaaggccttcacctctctgagcattcttgatgtatgtgaggagatcagtgcgtgggacttgagcagtcaggagatgccayggacaaaggggacctcggatggaactgtgggtggccatgcggccagagggcaggtcaggggtccaggtctgtgccgg

SEQ ID NO: 856926 - DNA, 595 bp, Homo sapiens
atgaaatgactgacaattgagatgtgatggcatataactataactattatatgtaatacgtgtgtatgtatgtgtayatatatatgtacacataaatattattaataataaaatgaaatacctagagggaaggaatgttacacaaagaggccttgctaagtttctcccagtttattaccattaggatgtaccctctttgtccagtcatacttctacacaactgaccattcttcatcaaacctaaacacaaaaatacacagttttcccttggctttgggttttcttttctgaagaatcttctgtcttatgtaacttcagttaaatacatttgtatgtttttctattgttaacccgccttttgttacaagtttttaaaaatttaaaagagaagaaatccaaagctgcctctcacttccctctgactccaggttctttgtattttaaaggctctatgaatacttgaaatagaatccattagagaaaaaataataataataacaaaacttcaaacagaatacatgtgaattaagttatcattttctcaactcttaatatttggagaggatttggctggtaacgaaattctcctcagagc

SEQ ID NO: 856927 - DNA, 622 bp, Homo sapiens
gcctttgagttgatcttccatgttttagaactctgataggcatttggatgtggctgaaaaatattgagacttattaratggaaccactggattggactttgaagggccagtgaaattttaaatgcagtatcattagagtagacgtgtgtgcatgtgtttattaggtaatagataatgaaagtaatacttaacatttactttttttttccacgtgccaagccctatttaataggcatcatctgttttaatccttacaattccatgaatagcctcattatacagataaagaaaataaggcttaggcagcttagggaaatttgactgaggtcccacagttgttggctatattcaatgccagagcccatatgcttatagaacagggagttcccatgtactgtatttccaataatctgcaacctttgaggatcaaccgagattgagaaatcaggatagtaaggctgtagaccaaccactttgcaagaatgtgtcctctgggggaatatccctgaatatttttgacactagaatggtgttcacataactttcctcaattctatgattgtgaagatcatataatttctattttaaagattgcaatttgtcctggagagtcaagattatt

SEQ ID NO: 856928 - DNA, 491 bp, Homo sapiens
ctggctttgctgtgcttataacaaataaaaacgttctgggacctgtttgagaggaccatgccatttaaactctgtgagctaatgagaaggccaaagcatacatttgataagctttgtcatctttttgtctgcagatcatagaccttgcattttaatttactatacataatgctttcttaatgagttccagtggatggccattgaaacatgctggagcagctgccgacgtgattatgggggagaaaaagcatttatttgatttacgtgatatgcagttagggtaactaatatttgcagccggggtacaataatggcaaggaaaaaaatttgcagtattactgtggacaggagaaaggtgctgaatcaatttatttttccygtacatgtgaaaactactaattgaaagctaatggaattgcattttaaatgttgagtatcttgctagacattggttagcattgtgccagaaagttcatattaagccaatgcaa

SEQ ID NO: 856929 - DNA, 680 bp, Homo sapiens
actgcagcgtggccctggctgagctggtgcttgtgaggaagcctctgcttgtgtgcaggggtgaacagcagctcaccccttcccatgcacagtcctcaccttactaccttcacccttactggaagcatctcttgacttctctttggccagccagaccctcccagctccctgtgctccccatttaaacaccttccctccctgagcttagcccatggctgggtggggaggcgtgagcactgtttgcatttggtcagggcctagaagggatcaaggaggcctcatgaggaccatgtcatagccccaccctcactccccacccctgacctgagcaaacctgtttggctggattgatgatggagaggcaggcagtgaccagaccaagagacgccttggatggtggagaataggtgaccctctgttgggtaaaagaggactcaagccctcacacagtgagttggctaactttttgtctcaacagtgggcgggggtagctgtctgcctcctggagctggcccttcctgggtcaaaatgcagaaggagatggtgagaagaaccacaccagagaggctrgagtaggccagcctggcttgggaccgagtcccgagtccctggctggaccctcggttttcccttccgtggcagggctcacctggatccttaatgccgcccttggaggagtt

SEQ ID NO: 856930 - DNA, 546 bp, Homo sapiens
ctttatccccaggcaaatgaagtggcttctgcagaactggaggttgtcatgtccgactgatcttaaccacttaccagctccatgtctgctgcaccatatcagaactgatgtccgacagtaaactctgtgcagtcccaggagagctgcaggcttgaggacaccctaatacccaggaaatctccttccttcctacttacttcctcctaacgggggtcaacctgagatgaaaccccaggaccaagccccaggaagcgcaaggtacatgtggcctccaggaggagccagtgaaaaggggtacggactcaggcccacaggccaatccagcctctgcagtcactggtcaggtgaccttgacaatctcaaagcctcagattcctcatttgtaaattacgtgtaactgccttcaggtcagtggtgttaaggaaaataattttatatatacacatacacacacatacacacacacacacacacacacacacacacacacaygaccaagttatcacaggtgttctgagcctcaaaacacaccccagtatttccact

SEQ ID NO: 856931 - DNA, 630 bp, Homo sapiens
gttataggagttctttatagccaggatacaagtcctttaccagatatacgacttgcaaatattttctctcagtttgtagtttgccttttcstttacttaatggtgtcttatgaagcacaaaaacttttaattttaatcaagttcagtttgataattttttcttatagattgtgtttttgatattgtctctaagaactctgcctaatcaaaggtcacaaagatttactactgtattttctcccataagttttacaagtttagtttttatatttaatcttggtgcattttaagttttagtgatttgtgaaggccctaaattcatttttgcatacagatatccaattgttccgacatcatttgtttaaaaagactatcctttcccacagtgaatttcaaaatggttccagctattttaggtcctttgcattttcatatgaattttaggactagtctgtcaacatctgcaaaaaaatggttgctggaattttgataggaattgcgtgaaagctatagatcaatttagaattaattgccaccttaacaatattgagtattcccatccatgaacatggaatgcctctttatttttttacgtcttcaatttttctcagcagtgttttctagttctca

SEQ ID NO: 856932 - DNA, 630 bp, Homo sapiens
gttataggagttctttatagccaggatacaagtcctttaccagatatacgacttgcaaatattttctctcagtttgtagtttgccttttcgtttacttaatggtgtcttatgaagcacaaaaacttttaattttaatcaagttcagtttgataattttttcttatagattgtgtttttgatattgtctctaagaactctgcctaatcaaaggtcacaaagatttactactgtattttctcccataagttttacaagtttagtttttatatttaatcttggtgcattttaagttttagtgatttgtgaaggccctaaattcatttttgcatacagatatccaattgttccgacatcatttgtttaaaaagactatcctttcccacagtgaatttcaaaatggttccagctattttaggtcctttgcattttcatatgaattttaggactagtctgtcaacatctgcaaaaaaatggttgctggaattttgataggaattgygtgaaagctatagatcaatttagaattaattgccaccttaacaatattgagtattcccatccatgaacatggaatgcctctttatttttttacgtcttcaatttttctcagcagtgttttctagttctca

SEQ ID NO: 856933 - DNA, 583 bp, Homo sapiens
ctgagttctgctcttgcggccagccggtggggccggacaacggcacgggccccgcccccgtgcactgccgyctgtctctcctgtttttttctgatttcctttttactttcttctttcccttctcacacttactgttactttctcctttccttttcctttgctcttctcctggcgccaagtccctggccccttctttttccagatagagccgggctggggagaggaacttaatggtgggcgtgcttagctgccgcgcttgtggcttttgctctttcccgttttgttccttggtcacagttaacatacaccgtggtggccacttttatggactgggtggtattcatgcctgcagcttccacttgatgtcaccctgggcttgccctacgaatgaagtattccccataggctgatgttcagcagcctcacagttaaatggggtacaaagccggaatgcttcacagagtctcttataaaactgacttaggctctcatcagctccttgaagcacttctgaaatcttctttatattcattgctttccttctaccaactcgtagcccctgcagaagtgcctcttggtacct

SEQ ID NO: 856934 - DNA, 457 bp, Homo sapiens
caaagccttttttttttgagacggagtctcgctctgtcacccaggctagagtgcggtggcatgatctcagctcactgcaacctctgcctccagggttccagcgattctcctgcctcagtcaccttagtagctgggattacaggcacatgccaccacatctggctaatttttgtatttttagtagagatggggtttcgccacattggccaggctggtctcgaactcctggcctcaagtgatccgcccacctcggcctcccaaaattctgggattacaggcatgagccaccgtgcccagcccaagatcttcttcatttcctaactctcccctgcctgctcagcctcaggtaggtggaggggagaggaagggaggaaagaaagaggggggcctagattcaaaaggaggtggggtctttctttctgtagtctrcaaagagggagggtaggtagatcccaaa

SEQ ID NO: 856935 - DNA, 605 bp, Homo sapiens
agacttttctctcagttgcctagtatgcaaaggcggggccttaaatgttttgctcctctaaagcatttaaatttaagagatgaacctgctaatttgtcctaaaagttatatatgtcttttaatatagtcatggctgaaaaatggctaagacagttagcacctgactctagttttaaattaactgagaaaataatccttcagaaaatcattgatgttgtccacatacatgtgttcttacctctcgagaggaaaatgttaatgcttttgtcattggaactcagtttgggacttaccactataaattggaggttccagaatgtctgttcttcattccttattttgttcttgttttatgtggattttgtttctggaatctgaaattctatcattctgtgtctgtctctggaaagaactcaatctctgaatcattgaatttctattaatcagtttgtttaaatagaccatctttcttgagaacttgtgcaaaataggttaaacaaatcctttttttttttatrgagcaggttaaaattagaggtaagcagaagcttttgctttttgtcctttccaactataactgaaaataggatgcttccctaagtttt

SEQ ID NO: 856936 - DNA, 592 bp, Homo sapiens
acaactcatagtttttttgtaagtctgaaatcatgtcaacataaaaagtttaaaaaattcgcatggaggagagtttatcaagcactggtcatgctttaggagtgcagtgcaggcagcatgctattctctawtttatattttaggaaccctgtgagattgctatgtacaactataaagaatttagatcagaacaattataccctgaaaaaaaatctgtttaatcccagaagttgaaggactggtgctataaaaaaagttattcctgtgggtggcatatatatgggtgcaaagcactgtattaagacggaaaagaggatacagtagacccctggcacttgtagactgaatattctcagtctcaatgatatctgaacttctgcacttagaacaataagttgttcgtaatagggactaagagaatatttgcttagtaaatgaatagtaggcaataatttgtaattttgctagtaataacttcaaatggcaagtgggcagggttgactttcttagctagtttgtgtctcactgactgctcaacattcagatttcaacctagcttggattttcttattttttaaattttttaaaattt

SEQ ID NO: 856937 - DNA, 616 bp, Homo sapiens
tcagtatgtgtctgatatactgattttccagggagctgcccaagaaattagtttttttctagcccaaccattatgccagtaggaccccacacgcactctagatgcctcagaactactgagaacaaagacagctgggtgttaagctgctacatcagaggactcatggtatggcagacagataccacagaaagcaagagattgccagttcctgaaaaacagaaaccaggaaatccctctaattaggaatctacatgcacaaatacagagaagatactttcacagagtagaattgaaggtccccagaatctctatctgggctgattgtaaaagccagtctgggaagacaggaagaggtggctatttcttcaaatgtatagataccaatgcaaagctacaaagaacacgaagaaacagagaaatatgacacaaaagggaacaaaataaatcttaagaaactgatcataaagaaatggagagatatagaccaggcacagtggctcatgcctgtaattccagcattttgagagcctgaggcaggcggatcacctgaggtcaggagttcaagaccagcctrgccaaacatggtgaaacccatctctactaaaattacaaaaat

SEQ ID NO: 856938 - DNA, 656 bp, Homo sapiens
gctagagaaaagaaaatgttattaagaaaagcrtaaggaagagaaaatgtatttactattcattaagtggaaatggattatcatacaggtcttaatccttaacatcttcatgttaagtaggctgaggagaggaaagaagaggaggagttggtcttgccatctcaggggtggcaaagatagaagaggtagatgaggtgaaaggggaagtccctaagctctcacctctggatgatcttggggctctgcatatgcagttggtggaggctaaggcagagatgtaaactgcctgactgagtgtcacatactcagagcctctcaataaagactgggagaagtattggttgcagacaactaacttaatagctgagcactaagctaaccaagtagagattcagtggccacacatgacgaatactgattttacagaattcgttaacaaaaagccactaaccaaacaaacaatcactacaacagggagcaacaacaacaaacattgagaaagagggaagaatatgatttccagaattgttacattatatgtttaaaaggcctagttttcaacaaaggagccatggaagaaaacatgaaagcatgacttctacacaggaagaaaaggcaatcagtacaaactatacctgacaagccagatgttggct

SEQ ID NO: 856939 - DNA, 550 bp, Homo sapiens
ttatcataaataaattgaataaataaataagagataataactgttggcaagaatgtggaaaaattggaacyattgtacactgttagtgaaaatgtaaatagtatagcccctatggaaagcagtaggactaccatatgattcaccaatcctacttctaggatctcagtttttcaaagaaacaattgaaatcaggattgggaagagatatttgcactcccatgttcattgcaacattattcataattgccaagatgtagaagcaacttaaatgtccattgacatatggataagtaaaatgtggtacgtactcatgatggaatattagtcagccatggaaagaaaaatgtcatatccaacatgtttgaaacttgaggacattatgctaagttaaatatgccaggacagaaggacaaacaccgccaattccccttatatgagatatctaaaataatcaaatttatagaagcagaaagtagaatcatagtttcctggggcagagggcagagggaaataggaagttcccatttaatgggcataaagtgtcagttac

SEQ ID NO: 856940 - DNA, 595 bp, Homo sapiens
ctatttcaattcccctgtcttgataaattggctctgtctaggcaacatgcaaggtgatcccattgggcggttacatgctgtcctgatttttggtcttatgaaagttttttttttctatgtagatagcttttcacttggtgtccctgcaggagggataacgggtggaactttctatgctgcatcttgatctacctgtcccctagaatacttattttgacatatggagaatatatatcttttaaagcatatatggtgcagtttcctaaagtgaaccacattacatcaaatagaaatttttaaacaaatatatattttaaaatgttttatttttaatttttgtggctacatagtagatggatatatttatggggtgtatgagatgttctgatataggtatgcaatgtgtaattatcttgtcatggagaatggggtatccatcttctcagtcatttatcctttgtgttacaaacaatccagttatactcctttagttattttaaaatgyacaattaaattattttgactacagcaccctgttgtgttatcaaatactggatattaataatcacattatgcagcatggggtatctgtccc

SEQ ID NO: 856941 - DNA, 597 bp, Homo sapiens
tgcagtggaaacagcctgaagcccacagttgatgtagatgctgatgccacaatccttataccgtctgcagaaccatgagccaaataagcctcttttctttacaaattacatagcatcaggtattcctttatagcaacatgcaactgactaagatagaagcattagaaaataaattaaggaagtgagtacatgtaaacaagagaaattgttaaagaacttagccctccaaaactccaatgtttgaagactcagcacagaagactgagaaactagagcctggaatgaattagtaaaataaaaacagagtagaaatctgggaggccaaatgagaaaaatgtttccaggaagaagaatttatcaactgcaacacataaacatttggatctaataatatggaaaacattaagaccttccttactaagaagaaatttggtgataaacgcctgataggattgagttaaamtgtaaatggaagggaagaaagtgagaaaagatttgctgtcaataatatcaggtaatagggcagtagcttaaggagaaaatgggttcatcaaagtttattttggtttctgcttttcaaattgagagacatcactg

SEQ ID NO: 856942 - DNA, 516 bp, Homo sapiens
gaaaaatccagaatttcagatattctatctacttaaacatgtttaaaggatgttttgttttgcaggctctttttagatttatttctatatggttaaaaaccaatgttttaaaaatgacacttataaggccaggcacagtggcccacgcctataactggagaactttgggaggcttaggagggaggattgcttgagtgtaagagttcaagaccagcctaggcaacacagtgagacccctgtctctacaaaaaaacaaaaacgaaaacaaaattaatcaggcatggtggcatgtgcctgtagtcccagctaccagggaagctgaggtggaaggattacttaagcctgggacgtcaaggccacagtgagccatgatcatgccattgcactccaacctgggtgacagagtgagaccctgtctcayttatacactgctggtgagaatgtaaattagtacaacctctacagacaacagtatggaggtgtcttaaagaactaaaaggagatctaccataaaag

SEQ ID NO: 856943 - DNA, 516 bp, Homo sapiens
gaaaaatccagaatttcagatattctatctacttaaacatgtttaaaggatgttttgttttgcaggctctttttagatttatttctatatggttaaaaaccaatgttttaaaaatgacacttataaggccaggcacagtggcccacgcctataactggagaactttgggaggcttaggagggaggattgcttgagtgtaagagttcaagaccagcctaggcaacacagtgagacccctgtctctacaaaaaaacaaaaacgaaaacaaaattaatcaggcatggtggcatgtgcctgtagtcccagctaccagggaagctgaggtggaaggattacttaagcctgggacgtcaaggccacagtgagccatgatcatgccattgcactccaacctgggtgacagagtgagaccctgtctcatttatacactgctggtgrgaatgtaaattagtacaacctctacagacaacagtatggaggtgtcttaaagaactaaaaggagatctaccataaaag

SEQ ID NO: 856944 - DNA, 421 bp, Homo sapiens
ctggtacccacaaattcatcactggctatctcacaracaagtatatttcttacatgagatttatttccacctccaatatttttgctctttatctaaactaagaaaacaacatatttactgtacttaacagaaatcctttgaaaaagtggtgagatgagaaagaaatgagagggagctttccggatttttaaaacttggttttgaacctctcttacttgggcaaatttcttaacacctcaaagcctcagtttgctaattaggttagctaatttataaattagagtggttatgatagtagtaatagccctgcctactcaccccaagggatagttggatcaactgcaataacatttgggaagacattttataagttgtaaagtgctgtataaatgccatgtatcagaattattcaatgacatag

SEQ ID NO: 856945 - DNA, 492 bp, Homo sapiens
acttaacagaaatcctttgaaaaagtggtgagrtgagaaagaaatgagagggagctttccggatttttaaaacttggttttgaacctctcttacttgggcaaatttcttaacacctcaaagcctcagtttgctaattaggttagctaatttataaattagagtggttatgatagtagtaatagccctgcctactcaccccaagggatagttggatcaactgcaataacatttgggaagacattttataagttgtaaagtgctgtataaatgccatgtatcagaattattcaatgacatagtacaaattttagtcctgaaggccaaatgtctatctttttctagtctttcttactttttattttttttccgagatgcagtcttgctctgtcacccaggctggcgtgcagtggtgcaatctcagctcactgcaacctccacctcccaggttcaaatgattctcctgcctcagcctcctaagtagctgggattac

SEQ ID NO: 856946 - DNA, 678 bp, Homo sapiens
atgattatgtcattctgttcagaaatcctctgtgatttcctattgccttcaggacagtctaaattcttggaccaagtccttccattgtctagccttgctctacctgtmtagaattctcttcactcaactcaagctatggtgatgttcctcaggcttttaccttgtatcctttgctagcctttgcatccttactgttacctctatactaaaaaattcagtctgcacaaatgatatcttttccctaaaaccatctttgattctttagttttgagcaatttctttattctttgaatttcataaagtgtaatgtgtttcataacacatatacatttgtaatctctaaaatatataattttttacctctagttctgttactgattcaggcaaattttcgttcttttttttttttggagacagagtctcactctgtcacccaggctgcacgatttttgctcactgcaacctccatctcccgggttcaagtgattctcctgcctcaacctccctattagctgggattacaggtgcctgccaccacgcccagataatttttgtatttttagtagagacaaggtttcaccacattgccacattgcccaggctggtctcgaactcctgacctcaagtgatctgcccgattcggtctcccagagtgctgggattacaggcatgaaccac

SEQ ID NO: 856947 - DNA, 657 bp, Homo sapiens
agaagtcactgacaggtggcaacagccttctcttcttcaactttgcatgatcttcagtacctaacctagaacatggcattaaaatatttgctaagtaaatctgactctttttaaattatatcccaactgaattgccataaaaagaatcctcaagatctatataagctaccataaccaaagagcaaagcaacaaaggaaatgataaggtggatactttacatacaaatcaatccaaaagtatatactgaggattaaatgtacataatgtgtaaaagagactgggatatatgagaatttgtaagatatataccaagttataatctattttggaaacaagataaatatacattggccattattttgagaaaaatatgtaacagtatattgcaagatagagatacattgtgctgtattcatgttgaagatttaattcagatgtggtagaactgcgtcacagaaatgttaagtgaaacagctatttcccaatagatagaataactgcgtttctaattatttattataaaattcatttaataaaccagattctaagttaatgaagkacagaaaccatatcctatacttctatattctttccagtacctagcacagtaatgagaacataatatatactaaataaatacatgcatttgactcaga

SEQ ID NO: 856948 - DNA, 536 bp, Homo sapiens
ttacttctgtatccagtgagaggcaggagtcgccaaagagcaaattctgatgttgttgggaaaataatcacttcggtggctctctygagcttaccaacagaaagtgagtcctcacctaattccctggaggaagggtgtatgagcccttctgtggctggtcatagtcaggtccttcatcataccacatggtgtggtccctgagagggaggcaaacacattttcatagagctagaaaggatccttagcataaaaggctaaaaatcatctactccctccttttcaggtataaagcagtacttctcaaactaccagtagggaataacatttttaaaaaaatttcaatcgaccacagacttatacttttggaaaaggcaataaaaatgtattgttaaatattaaaaggacaaacaaaatgcaagccactattttttcttcaattcaacagatataaaaataactctgtaaagttgctgtgaaatatttctaaatgtttaccattaattgctaaatgtatctttttataggctagtaacaaa

SEQ ID NO: 856949 - DNA, 628 bp, Homo sapiens
acttttaatactaagttgaataggagtggtgggagagggcatctttgtcttttgccagttttcaaggggaatgctttcacctttttcccattcagtataatattggctgtgggtttgtcatagatgctcttattactttaggtatgttccttcaatacctagtttattgagagtttttaacataaagtggtgataaattttatcaaaagacttttctgcatctattgaaattatcatgtggtttttgtctttacttctgtttatgtgttgaatcacatttattgatttgcatacgttaaccaaccttgcatcccaaagcctacttgaacatggtaaataagctttttaatatgctgctgggtttggtctgctagtattttgttgagaatttttgcatctatgttcattgaggatgttggcatgaagttctttgttgttgttgtatctctgccaggttttggtatctgatgattctggcctcacagaatgagttagggktgacacccttctcaattttttggaacagtttcagcaggagtggtactagctcttccttttatatctggtagaattcagctgtgaatccatctggtcctgggcttgttttggttggtaggttattcattac

SEQ ID NO: 856950 - DNA, 314 bp, Homo sapiens
cctgagctcaattgatccctcaactttagcctcccaagtagctgggactacaggcacatgccaccatgctgggcaaatkttttgtattttttttgtagagatggggttttgccatgttgcccaagctggtcttgaactgctgcgcccaagtgattcattcacccaccttgacctcctaaagtgctgggattagaggcgtgagacacctctgccagcccactgatttcttttttgaaccgaaagcatagttgatcaatgcaaaagctaataattggatattaacaaaattcaaaactcttgcactttaaaagaca

SEQ ID NO: 856951 - DNA, 546 bp, Homo sapiens
tgagctggtcagctgtcgtgtcaaatcacaaaaagagagtgaagtctggccatggcatcaggcagttgaagctgaagtcagcggaggagtcttccattctctgttttccaggacaggattctgcttaactcttaggaaaaaagcctggtaacagtaaggaagagggtatactgaggtgtgaccagcctcctgtcttatcatagccaggaaacctagattttaaagtttttctggggtctccttggccaagaggggtttgttcagtcagttgaggggtctttggattttctttttattccacatttcttccttttagccaagatctgccacagtcagcatcaatggccaaattgtttgtaccatgtcgttgccaggatgctgaggctacctgctccagatccatccagtcccttggtgggacccttgtggccaagagacttacagccarttgaacatcttggccagacagaaatagaggtgggcaggtactcatcaacccctaaggtctatcaagcaatataaaggccaaaaggtagggctaccaat

SEQ ID NO: 856952 - DNA, 546 bp, Homo sapiens
tgagctggtcagctgtcgtgtcaaatcacaaaaagagagtgaagtctggccatggcatcaggcagttgaagctgaagtcagcggaggagtcttccattctctgttttccaggacaggattctgcttaactcttaggaaaaaagcctggtaacagtaaggaagagggtatactgaggtgtgaccagcctcctgtcttatcatagccaggaaacctagattttaaagtttttctggggtctccttggccaagaggggtttgttcagtcagttgaggggtctttggattttctttttattccacatttcttccttttagccaagatctgccacagtcagcatcaatggccaaattgtttgtaccatgtcgttgccaggatgctgaggctacctgctccagatccatccagtcccttggtgggacccttgtggccaagagacttacagccaattgaacatcttggccagacagaaatagaggtgggcaggtactcatcaacccctaaggtctatcaagcaayataaaggccaaaaggtagggctaccaat

SEQ ID NO: 856953 - DNA, 632 bp, Homo sapiens
gtacagagtgaagatgaatggctacccatctagaaagaggggagcaggcatccctgtctcctatctctttctagcagataccaggggtacatgagggagagaaggaagagmgtcctctttccctcttctgtccttgcatacccaagtcctggtgaccttggcaggtgctgccatgggtgccacagcagcttgcacccatgaagcagggagtacctagagaataggaattatcagccagactcagtggctcacgcctgtacaacccagcaccttgggaggccgaggtgggcagatcatgatttcaggagtttgagaccagcctggccaacatggtgaaaccccgtctctactaaaaatacaaaacttagctgggtgtggtggtgcatgcctgtagtcccagctactcgggaggctgaggcaggagaatcacttggtcccaggaggcaaaggttgcagtgagccaagatcacaccactgcactccagcctgggcaacagagtaagactccatctcggggaaaaaaaaagagagaataggaattatccgctcttacctatgtttctataccccctacagtcagtagtcttggagtttcctagacctcatttatgctgtggggaaaagcaagagag

SEQ ID NO: 856954 - DNA, 591 bp, Homo sapiens
gttgacttcagattgtctcccagaggaaaaatggcacaggactaaaacaaaaaaaacagttcatttctactaagtgatacagtaataataytgtataagccatagaattagttaaatacatcatttaattttctttccaaattgtccacttttaaaagattatgcttaaatttggctcatataaacaccaaaaattacagagcagcatatttaagtgaaacaataatagtacagttcagcattatagtttttgaaccacttccacatatatatatatttttcacatggtatgttaaaccctcttatgatgtcgttttattatagaggaaggaactgtataatacacttacggtgacttgcccacagtcctacagctaagactagaaatgagatcttctgacaatctccggtgctcttaagggaagagaacaaaaaatgactttttagtataaacatagattcactctgaaaacttactaaacagtttttgtgatgctttcatgctgcagttttggcaacacataaattcaaggcatattgaaaatatccacatagagttcaacttccataaattttagcttattttaaaaa

SEQ ID NO: 856955 - DNA, 655 bp, Homo sapiens
taccatgctactgattcctgaagcatcaatggacacagcatgatttcttaatgaagatgggaagtagacactgatttgcttcattggagattctttgaattgctctacttattgtagtaagtgaggagattgagcaagggatttttcctaagagtcttgctaaatgatgctaggcaaaacttaggagagcagcaaggaaagtactctgttttgtactaggcattgttactagattgccaactctaaagacagagttggcttttgggggttatcattagtgcattgaaagagtcaattccattactctgtcttgtcctataggtaagaatccactaggaactcagagagtctttttctttcatggtgcattaaccatttctgctgagtgcagctcatttccctccctctacctgttctcccaactgttgctgtggacgtgcaggagagaacatacctagtatatagcctaccatatgccaggacggtacattcttactcttaggaagaatggtgttttcctggtcttcatcttaatttattaccctcttttrgaaaattttggttggttttccctttgttttctaattttttctaccattaaaagtgtttgaagtgataagcataaagggtaacttttgaattgtttagttttgtg

SEQ ID NO: 856956 - DNA, 594 bp, Homo sapiens
agatttcaagggtaatcagatatggaagattaagaaattctcactaaaccmactttgcagggttcctgttaaaagtagcttttacaaggaagtgcacaggtgggcctagaagaaggttcaagagcctgactaaagtttggtcaagtaaagactgtcactagcattatgcccactggtagtaagcaccaaataaatgattaatgaaaaaaaaatggaggatatatagcagaattcccccccctttttttcatttcttttactcaaccaatgtttatgaaatgaaggcagtaaagagtagtggtgaaaagcccagactatgcaacaagaaacatagttttaaatcctggctctacttcctaagtgaccataaacaagttactatatctctatgtgccttaatttcctcatctgtgacacaaggaaaattacaatagctacctcatgatgttattgaaaatatttagtgagataatacattttaaaattctgtataatgccttgaacatagtaagccatcagtaaatgctagctattcttactgtttttatcaggtgctgttataatgatacaacagttgtgaagaaaagcagggga

SEQ ID NO: 856957 - DNA, 481 bp, Homo sapiens
tgaacacctttatgcacataaactagaaaacccagaggagatggataaatttctggaaatatacaacccgcctagattaaaccaggaagatatagaacctcttaacagaccaataacaarcagcaggattgaaatggtaattttaaaatcttgatggattcacagcttaattctataagacattcaaagaagaattggtaccaatcctattgacactattcaaaaacatagagaagatgggaatcctccctaaatcaatctatgaagccagtatcaccctaatatcaaaaccaggaaaggacataacaaaataagaaaactatagaccaatatccctgatgaacacagatgcaaaaatcctccacaaaacactagtgaaccaaatccaatagcatatcaaaaagataatccaccatgatcaactgggtttcataccagggatgcaagtttaacatacgttaagtcgataaatgtgatacac

SEQ ID NO: 856958 - DNA, 576 bp, Homo sapiens
ttttagttattattaagatgaaaaagatgtgattatgtttaaaacctaatgaggaattggtagaggagggaagactgaagctatagcacaagggataataaggtcccagggaagaggattccmaagtacaggtgaaaagattagtactggttgggagaaaagacactctttctttgtaagagaagaaaaaaaagtgaatgtagaagaaactaaatcttgaaggcaggtaattctcacttaatagtttcttctctttttctttgtgaagagtttaaacatcacataaacaacatgttaaccatttagaactggtcttacattcttgggctacctagaaaactatgtactgttaaaatgttattttatataacatgataatttcttagttcttacaacttcctgtattcagcaatccacattatataaaaaagtttacgttttctgtacaaacgaatttatattctagtgacattaatgtatatctcctatttggagaagtgaggaacaaatagctaagtgtttgttgttttaacattcatatagaataatgatcaaaacatgtgcttcattctgctc

SEQ ID NO: 856959 - DNA, 567 bp, Homo sapiens
ctccttcaagaatatctctaattacatcaggtggcatgcgtagtgagcgaatttctgaaagtgattcgggcttaatgtttccaactgctagtttagcttcattgactaaaggctaaaagagaaaaaggccatttttatcttcaaattatatatttctttaaatcattaactcttgaaaaattatgttttattgtcatttatgcaaaatgactatagttactaatgttctctctcttaaaatatcaaaatgctttcaatcatacaaggtgtaaaaaatgttcaacttgagacagtaagacgtcttgccaccacaactgcaataacctaatttggaaaatctaacttgttttgagacaatttgtcattttcaagaggctctttatatcctaggactagctgactaatttaatcaactggagaaaaagagcttaacagtatatcttaatttatctaacacattttttccctctgcaatcraaaccatatggctcttggaaaacaaagattatttttaattatcatccattaatttatacttttcctggaaggctttccttcttgttctct

SEQ ID NO: 856960 - DNA, 567 bp, Homo sapiens
ctccttcaagaatatctctaattacatcaggtggcatgcgtagtgagcgaatttctgaaagtgattcgggcttaatgtttccaactgctagtttagcttcattgactaaaggctaaaagagaaaaaggccatttttatcttcaaattatatatttctttaaatcattaactcttgaaaaattatgttttattgtcatttatgcaaaatgactatagttactaatgttctctctcttaaaatatcaaaatgctttcaatcatacaaggtgtaaaaaatgttcaacttgagacagtaagacgtcttgccaccacaactgcaataacctaatttggaaaatctaacttgttttgagacaatttgtcattttcaagaggctctttatatcctaggactagctgactaatttaatcaactggagaaaaagagcttaacagtatatcttaatttatctaacacattttttccctctgcaatcaaaaccatatggctcwtggaaaacaaagattatttttaattatcatccattaatttatacttttcctggaaggctttccttcttgttctct

SEQ ID NO: 856961 - DNA, 639 bp, Homo sapiens
acacataattttttaaatgctgaattatgccatgtttggcttgttcaccaaatatatattaaaatacggagtaaaattttaggacttgttagggtgtgaaaatgaacaaaaccggttttcmaaacacattctttagaatgttagcatttcatagttaaagaatttaaataatgttggaaagggaaagactcaggcttctatttgtaagcacttctcaattttttataaccaggtatatggtgtctatcctcagaaatgaaataaaactgggagtaaaattgtcactgtatattttaacaacatttttgaaataccagaatatgatgaaatgaatacaatttcttaagtgcaacatgagccaagcatacgtgattaatgccagtctacttatcatgtttatttattttgagctcaacattatttttcctcatatttcctctagttaatcactagtccaaaatgggtataaattatatataaatgagaagacaaacactttaagactataatggttaacataagcagttgttatttttgcatatcaccaaatcagtgactgaaacatgagcatatgtccccacatcctttattgcacgtgttcactcagaccacacgtacagaggctctcaaaaaatttta

SEQ ID NO: 856962 - DNA, 562 bp, Homo sapiens
tcagcccctagttttatcttttaattataatatagacagcaacctcaacaacaacagcaatgatgatgatggtaatgagaatgatagtaataacatatattattgaaagtttatgaaatatcaagcacccagctaaatgggtcactctatttaacatttacagtattacttcagggaaagtcttagtattattatgcttttaaatatgaaaaaaattaaacatttatttgagtgactgctcagggttccaaccataatatgacattgagactggaaaggttggctcaaggacttttgacattattcaaagtggtacttggtccaggtaattgtgagtaggtctaaggactctagagaatttctgtctgcaaatcaagcttcccctgttccctatgacatgttccctacatgattgtgtcactgtcctctggacagcttcatgacagtttcacttttatttcatttatcataatgaacataaccaaaatctttcaaatttgtaatgatctaygaaaaacaaagcaaaaccagaaaattattctagtcttattatagagatgca

SEQ ID NO: 856963 - DNA, 575 bp, Homo sapiens
aacccacgtccggatgactccaaagccatgttgtttctgctcagttgkgccccaagaaaagcaggctcagcctagctttgctggaagatgcagagtgggagggagctgagaacgcaggttcatttgagagcatcatattttcaccttcactgcacatgagtgagtataacgcacatgctttccatcttcaaaagctttctgtgattatatacaaaagaaaacgcacatggcttcaatatagggttcttttctctcctagtctggaactggcctgaaatcccagtaattctttatactgggattttatctgataaagtcataagcattcaaaacataaagctgcccttttatcggacttagtggagcattttcataaagtgtcagtgggattgaggagacggttgtacatcagaccattcatcctggtggattaaatcatgacatatatttcaagtcggggaaaatgtagtgtcagaggaaacataagcaataacaactgggactggcagaactgctgatgaatgggcctattctcagctgctcgtcatagacagtggaaggaaagagacaggaac

SEQ ID NO: 856964 - DNA, 622 bp, Homo sapiens
agggttttcaaatcaagtcaatcctatgggttagctagggcgaggaccaccacgccatttgttagataaggaaaatgagacataggactcagaagattcactacaaagtcttgcaccrtgaggtggggggtgaatgaccattgactcatcaccaaactactctctacactaactcttcatggcaattccttgagctcttctccttttcatcctgggaagtctgctggtcaaggggctcagcccatagctcctaggggtagaagaggggatcacacttggttcttggctcttcctgaggccatgcctgcaagccattttcaaggctctgttgactttagcattaatgaaatgagctcttccatccagggcatatgtgttagtttgttctcacactgctataaagacataccaagactgggtaatttataaaggaaagaggtttaattgactcacagttcggtatggctgaggaggcctcaggaaactcacaatcatggcagaaggggaaggggaagcaagcactttttttcaccaggtgacaggacagagaagagcaaaggaggaacttccaaacacttataaaaccatcagatctcatgagaactcattgactctcacgaga

SEQ ID NO: 856965 - DNA, 536 bp, Homo sapiens
tgttctcccagggcaggcatataccaaaagagagggagagggaggggaagagagtgagtcatacataaactcaagtgacaaatcactcctagctgggtcaaaaagggagtagagaggggccaagtgtgtggggtcagggaagtccctctatatgaaaactagagaaggaaggggataaaaattccccagatttttgttatcttaaccagctgggcttaatgtttaacccctggacaaccaggtatgtggtcatctggctccaggaggggatgagctaactatctgagcaggaggtcgctcccccagcatcaacttctgttccttcctgtgccttcctgggaccatcctaagacactgttgatttcacttccataagcctctgagatgagccagaacagtgtgttaataaaatccagtccaaggctatgttgtgtctaagactgcaagttcagagcctgttctatttccaatccaaaytgatgtccagccacatggaccactaacctcatcagaggttctgtaatgaggtttaatag

SEQ ID NO: 856966 - DNA, 568 bp, Homo sapiens
tgaataaacgaatgaacttttgttgcatagctaatatgatttcagttcaactagtacagaaggtcccttacttgttaacagggacttgaaaccaatgtattcagtcaacaagtttgcctactggatcattcactgaagaaatgtttattgggcacctaccatatgccaaacactgttctaggaactgagagtttatcagtgaatacaaaagacaagatctgctcttatggggctaactttctaaaagagggaaaacaaatgggccaatctgattgatgggcttttaacagaataagatgactgactatttcactactgatttagctattctagcaacacttaagtacaacttttaaaaaatgaatttgttgacatctactatttccagatgctcttctaggcattttggggagaacaagatagattatatacacaaagacatcaaaatttacctgatgggactgagtagcacagttgtcamaaactttagtacatttgttttaaaacactacttacagattttttttttaccacacctatgacctgggttattaaatttttatgttac

SEQ ID NO: 856967 - DNA, 580 bp, Homo sapiens
cacaaatgactccaaatagtcatcttgagcgatcttgagcaaaaagaacaaaactagaggcatkgttctcctaatttcaaaatatactacagagctatagtaatcaaaacagcatgatactagaataaaagcagacatatagaccaatggaatagaatagagagcccagaataaatccattcatttacaatcaattgctctttaacaaagctgacaagaacacacaatggagaaaggacagtgccttcaataaatgatgtcaagaaaactgggtatccatgaggaaaataatgaaattagtccctaatatcataccatatacaaaaatcaactccaaatggattaaagacttaaatgtaagacctttaaatgggtgtatggataaagaaaatacagtgtgtatgggtgtatacatatcacacacacacacacacacacacacacacacacacacacataccagaatactattcagccttaaacaaaataaaaaacaaaagaaagaaattctaccatttaccacaacacggatattgaggatttttgcatcagatcattattggggttcaagataaaaaca

SEQ ID NO: 856968 - DNA, 557 bp, Homo sapiens
gaagaatcactttgaacccgggaggtggaggtttcagtgagccaagatggcaccactgcactccagcctgggtaacagagcaagaatctgtatcaaaaaaaagagtcttagaaccacaatagtttaatgaagagggcccacgagacacaaccttaagattcttagagacctttttgtttaactctgaggatctataaggcatgagacaaggtcatctggtggtgctcatttgggtgacctttaggattcagatggcttcacttgcttgttgttacattggcagagattgctggaatgctaggcttagttgggactgttgtcccaagtgcctacacatgacctctccatcatggaagcttcagagtggccaaatttctttttttcttttctctctctcttttttttttagttcttataagaaaataygaaagaaatttttttgaattttttaattttttaatttcaatagatttttgggaacaggtggtatttggttacatgaataagttctttagtggtgatttctgagattcaggtgcacccatcacccaaacagt

SEQ ID NO: 856969 - DNA, 557 bp, Homo sapiens
gaagaatcactttgaacccgggaggtggaggtttcagtgagccaagatggcaccactgcactccagcctgggtaacagagcaagaatctgtatcaaaaaaaagagtcttagaaccacaatagtttaatgaagagggcccacgagacacaaccttaagattcttagagacctttttgtttaactctgaggatctataaggcatgagacaaggtcatctggtggtgctcatttgggtgacctttaggattcagatggcttcacttgcttgttgttacattggcagagattgctggaatgctaggcttagttgggactgttgtcccaagtgcctacacatgacctctccatcatggaagcttcagagtggccaaatttctttttttcttttctctctctcttttttttttagttcttataagaaaatacgaaagaaatttttttkaattttttaattttttaatttcaatagatttttgggaacaggtggtatttggttacatgaataagttctttagtggtgatttctgagattcaggtgcacccatcacccaaacagt

SEQ ID NO: 856970 - DNA, 540 bp, Homo sapiens
tgcctaacgcaaggactatgtctggtgaagaggtgaatcctatytactctgtgcctggcctaaagtaggaattcaataaatacttgttgaatgaatggatgatgaaaggaaatcccgattttccttttatatattaaacttcctaagtgatgctaaatacgatctgaaaatattaaatagtacttacattcaaccatccttaagggcacccttaagtcttgacatttgctgaagtaggatgaaaaagtgttttagaatcacacaggtatgaatttaaattcctaggtgatcattaactacctgtgtttcaacttttctaaatgagaataataatacctccctcgcagagttacttagaaagtagaataagataaaatacgtgaagttcctgctactcaaaaacattagtatgttatctctttctattctctaattaatgagctttctcctgaatttctgtctgccctattcattgtacactaaatactatattttaatacacacacacacacacacacacactctttcaagttaatatat

SEQ ID NO: 856971 - DNA, 616 bp, Homo sapiens
tggacagtgcagtaaccaagccaagagccccaagtgtgttaaacagagaaaatggtcgcatttccttctaccaatgggaatcaagatcttatagggcgagggcagaggtggttagccaaggccttgtccttcttcctgaaagacatagcccttgggcagagatagagtcagccgagcatctctctgcctcagtggataaaatggaaactatcatagacacttgggaagaccatgagactacgaaagggaagctccaggcttttctactgagatgttgattggaaacttaattcttctgaaagtttgactcccaccagacctcagatgtggcccctaaggacagaaaactgggcatgttaagtcaggccaatggttgcagctgtgttgagactcttaaaatgacaccaaaagagagtgtgtgagatggcagggcatcctctatgttgctccccataccatggacacacttccatgttgctcttcagggtctagaattratctgtcatctaagaatgggtacttctatgctacctttatattattttttatttttattttgtattctatctcagggagagcaacctttatatgattttaggtagtcattatcgtaaaa

SEQ ID NO: 856972 - DNA, 603 bp, Homo sapiens
gaaacaaaacaaaaaagttgttaccaaccattccttgcctccttgcaaaaaggactgccttcttcaatgagtggagtggaatggagaaaaagacagcaattttctcwcggtttctcctggtcataactgtaaactggccataggcttctctgcatgctttcagactgaaaagacttgagtgaaggaattcaatctaaggtatgaaaaatggagaaaagctttagaattagttctctgtggatctaagagatccctatgcagcagcagattttcagatactctagtaggtccctgtatttgggggatcttgacttttcatctttcagctcacagcaggcacttgactctctgtgctactaacacttaaggtccagccacttttcacagcttgtcccaaagtcagtaatttccctggtgaccagcaagggctctaggggctgagatgagcaacttatgacctgtgtgaatggtcccagagtgggagggggcatgggaagacctgcagaagggcctgctcacatgtctcctcctgtccttctcagacccccacctgcactgaggaacacctcttttcccacccctctgttccattcatttaatgga

SEQ ID NO: 856973 - DNA, 551 bp, Homo sapiens
tcctctcgccttgacctcccagtgctgggattataggcttgtgccaccatgcccggttctcaaaaggttaaagactgagtaaccatatgacttagcaattctactcctaggtatgtccacaagagaaatgaaaacacacaaaatctaacatgcaaatgttcataacagaattattcacgagctaaaaagtagaaacaatccaagtccatcaactgatcaatggataaataaaatgtggtctagtcatacagcttcggaatactatttggcaataaaaaagaatgaagtacctccatgctccaggtggatgaaccttgaaaacatgatgctaagtgaaagaagcaagacacaaaaaaccacatattgtatgattccatttatatgaaataggcagatccctagggtcaggaaatagattgtagttgccaggggttaggggtgggggtgggcagactgcagagggtgataattaaagaatatgaggtttctttgttgaatgatgagaatgttctgacactgmctgtggtgatggttgcacagcgctgaacata

SEQ ID NO: 856974 - DNA, 354 bp, Homo sapiens
tgttagctttttttttttttttttaatgagacggagtcttgcttggttgcccgggctagagtgcagtagcatggtcttggctcactgcaacctccgccttctgggttcaagcaattctcctgtctcagcctcccaagtagctaggattataggcacgtgccaccatgtccagctaatttttgtatttttagtagagacagggttttgccatgttggccaggctrgtcttgaactcctgacctaaggtgatccacctgcctcggcctcccaaaatgctgggattataggcgtgagccaccacgcctggctcaataagccatttttatttttttattttatttatttatttatttt

SEQ ID NO: 856975 - DNA, 630 bp, Homo sapiens
ggagaggaggctgctgtttagtaatatgctctcacaaaaattaacacaaatttctcctctcagaacatttctgaaagtatttttaaacctggagatcctttcccctttctaakaaatcttccttttcctttttgctatccttgcattgcccaaaacagacttgaaaaagaactaccagtagccctgggatagacagccactgttgaaaaagacaaatgaaggaacagggatggagctaagtaaatcaagaacgatccctgacctcagagcatcctcagtctagtgagaatggcatgcaaacaacagcctaacttataagtgctttacctgagacatatgcaagttactatggaatgcaaaggagtgtctgacgtctttcctggggagtaagaggaggcttcacagaaaataaggatgagtcggagctcacctggcagggagggggaagatcattccagtcagagagaacatcatgttcaaagccacagaactggttctttaagaaagcaggtaagtaggtggaaattaagagtgtatatggaccgggcatgatggttcacgcatgtaatcccagcattttgggaggcggaggcaggcggatcacttgctatcagagtctgagaccagcct

SEQ ID NO: 856976 - DNA, 630 bp, Homo sapiens
ggagaggaggctgctgtttagtaatatgctctcacaaaaattaacacaaatttctcctctcagaacatttctgaaagtatttttaaacctggagatcctttcccctttctaagaaatcttccttttcctttttgctatccttgcattgcccaaaacagacttgaaaaagaactaccagtagccctgggatagacagccactgttgaaaaagacaaatgaaggaacagggatggagctaagtaaatcaagaacgatccctgacctcagagcatcctcagtctagtgagaatggcatgcaaacaacagcctaacttataagtgctttacctgagacatatgcaagttactatggaatgcaaaggagtgtctgacgtctttcctggggagtaagaggaggcttcacagaaaataaggatgagtcggagctcacctggcagggagggggaagatcattccagtcagagagaacatcatgttcaaagccacagaactggttctttaagaaagcaggtaagtaggtggaaattaagagtgtatatggaccgggcatgatggttcacgcmtgtaatcccagcattttgggaggcggaggcaggcggatcacttgctatcagagtctgagaccagcct

SEQ ID NO: 856977 - DNA, 454 bp, Homo sapiens
tgttaagtgattattcatttatcttcttctcctgagttacaagccttcatttcccattatctgctgcccatccatgtctcattatctccagaaaaaggtgaatacatatacaattttrtgtgacatcctttgtatacagacccttatcttttcttggaatattgcatagaccatttcttctaaggaagatgattccccaaaagattttcaggtacactgagaccttgttttatttattatgtaaccacaatgtcttccatagtcttgtaatactagaaatttaataaatgttgagctgaaaaggaatttttatttgaagatataattcatcttcacctgtgccaaacactttacatggtgatctataataatttttcaaaagtatgaaatgctgacctgtttccttagtaaaaccttagtctcaacttcatgagaggtgagtcctctatgtgac

SEQ ID NO: 856978 - DNA, 684 bp, Homo sapiens
agtaccctggatcctacataaaaagagaaagctagatcctaaaggtaattttatcctgyggtaagtcccacccattttgaggttgtcacattcctccaaggctgccagacatagcactgtatatattttggttttcatgtaagaagctgaaggtaaattcacaggtttgctcctcaccattcaacaaaccattaattagtaagcttctaccatgtgccaagtaccgtatgcctggaaatcaggcaatgcagtaagctccagggaacaacagacaggaaagaattatgtacagactgctgctgataaactgagtgagtgtacttatgattttctaatccttccaaatatattccctctggaatcagctgcagattgtgttcgttttctgtttatcaagaaatcattcttctcaattgcaacataataatgttatcactatgactaaatcagtgtatttgatttcgacctagtttcactgtcacaaatgatacctgactagataaaaccatggattatcaacaagaaagtgcaaaagcagagcctactgagaaacatttttggacgtatctttagattaaaacactagaaaatatcaccttgttttgaactgtggtttgttgtgattttaagtgacacaatcaaagatctatttcctcttcaacatgaacaaacttaactcactag

SEQ ID NO: 856979 - DNA, 512 bp, Homo sapiens
atttttgcattgttcagtatgtgtcccctctttctgtttttaaaatatgttcacctagaatctgatcgcagttaactaccctggtttcatttgatgctgactctttttcttcctcattggaaatgkgtgtttaatttgttcattcatttactcaaagcattggttgagcttcttgtaaatgccccccgaccccccagaaaaagactcttaaggttttgaaggcagaaatcttatgtaattcattttgacatctcctttagcatttaatagtgtcattcacaaataaacaatcaaatatttactgaatgaatcgatcctgttgcaaaactttgagtgagaccttcaggcgtgaattttaagttaatctgttcttacagcatgtaaaacagtttttatctcattctgttacgctcctgtgaattccagtactctcatctatctctgctttcctttctgtgtcagctgtttttctcaatatccagttttaactttatctgaatttttttgtcaat

SEQ ID NO: 856980 - DNA, 514 bp, Homo sapiens
cgaggtcttctaccacgtttttatttttcttgcttggctttctttgaaatttacatcccagaagaatatcctggaacttttatagatgagggagttccttgggagagatggaaaggggaggaagaggaaatgggaagagattggcgtgggtgcaaggaggaggaggtaatgatcatttaaaggagaaacggaggatggaagtggggtggcgtgcagagctgtggtggaactcagcctcggagctgggcttggcggggttggagaggccctgggctgcaagcaggggatcctgtgcctttgaggtacagactttgaatccacagaagtgtgtgtgtatcgccccacttgatcccagcttgctttccttcatccctttattcattcatctgaaagtcctcatgggaatttgttttgtgactgttactggggacacagcagtgtacaagacaggcacgtttcttctyctcttggagctttcgacttggtatcagcccatttgcctctgtgaggagag

SEQ ID NO: 856981 - DNA, 678 bp, Homo sapiens
tgtggccaccttctctctgtgccccacatggtggagagagtaagtcatctggtgtctcttctttacagggcactaatcccatcgtgagggccccttcctcatgacctattacctctcaaagacccctctccacataccatcacgttggtgatcagagcttcaacagatgaattttgggggacccattcaagccatagcattctgtcttagttgattattcagattgtaccttttggcctcttcagaaaaaaagaaaagtatattcatttttctaaaagtaaagaattccttttgggagcaatcgtatgacatttacagtaagttaaatacatttgtaatgtgtaaccatcataaaatactataatggagatattttctctgtttggcccccgtgtgagtcattctgcctgaggtctgtgggattacccattgtgggtgagcatccctaatctgtgtgtcattgtgttatgaccacagaggacacaaggttttcttcccaaggtatcattcagcatttccagggaaactccatggaacactgactgatttccccttccccmctcccactctgcctatcatctctcagcattacaggccattcctgactcagtacatcatcagagtgaattttccccactatccttaacacatggaaaatgaacaatgtgaacggctaag

SEQ ID NO: 856982 - DNA, 573 bp, Homo sapiens
aaaaaaaaaaaaaaaagggtgataaagccaggctcaaaatttaggttttttgattttagttttgtatttttcattaatccatgatattgtgaatgcacagtggttcaatcatagagttcagggaatgtcattttctctatggctgaattgtctcttctaaactgtgactacagtactttgcctctgatgcggcactgagcctattcataccttcccatatgcctttgattttctggtgtctaaatctgtctttctccacactgagctagagatgaaaataaccattctgagcagaaaagcttggttaaagttttaagttctcctgtgccatgaggacataattttgctgactgcttctttcaagactgcctttaccttttcatttcttagactataagtgaagggattcagaagaggggtcaccattgtggggacagctgtcaccttgtcaaaaccmattgaatgactctggctgggcctcacatacctgaagatgttgcttatataagcgatggaaatgacggtgatgtgggaagcgcacgtggaaaaggccttccgacgtccttgggctga

SEQ ID NO: 856983 - DNA, 612 bp, Homo sapiens
tgcgatttttacaacgaagggaaacagtattgtatagtaattaagagcatgggttttgaagtcagatagttcttggtttgactccacttaacacctgagtgactttgggacagttaacrtctcaactcctcagttgtttcatccatcaaatggggataatatgaacgccatagaattatcctaaaagtgaaataagatgaagcatgtgaggcctttggcaggtttcctgacacatggtaagtgctaagtatctgagttaccgatgactggggctgaataaaggtcatccactttctaagcattagtgcttgaaagacagacaatgtttaatgtattctcataaataggaatgctttgcttctgaaacacttgtctaggatagactgctgatgggtttgtaattggagttatagtaggcctttatctctatagatttatggagaaataaatttctgtctagaattaaagttcttaatttgtgtttatagatctctcatacatattaaaggagtctgtgaacttgtacttgcatgaaaaaatttgaatttatgaatatttgtggtttttttctagaggataatttctctcaatggggcttatgtaattttgttt

SEQ ID NO: 856984 - DNA, 681 bp, Homo sapiens
aatacagataattacatgacaaagtatacttacattacactgcttgtagaacgattggtaatttcttcattcaaatatgttaagaaatttgaacttcaagtatttttttcctactccatatcattcattattctttaaatgctttcactgctccagttttgaattctctataaacctacctctgttttagctgagactcctccttataccacacttaatcccctttgcagaaccataccgaatggttattcaattttggctggaatactccatctgtcttcccttgattgagaagctatctttttataacctctaattacttttctcagttctttttcttagtcccattgaagaagtctaagtcttgatttatactaagtccaagtgttataccattatttaatcatttcatcctgcatatctagtgtatctcaaacttcgaatagtcctctgagtttcaaggactacatttttgccaaaagaattttgatttggtaatgaatcaagacattagacacgactgaattaagcataggtccttgacttctattttagatcactggtaaaatgatcgaaagcttctgaactctcaattattttttcagcagtaggaatgtaatttcctgtctatccagtcratttctatttcttcagtggatccatccagaaaattgaagtttt

SEQ ID NO: 856985 - DNA, 573 bp, Homo sapiens
gccacgccaataatcttaatgcaattgaaagcagttaatccaatactgaaagccctctccagggcttgagtaaagtgtctgatatgcttagcacatcaccctgggctctctaggagcyggccctgcctctcagatccaccccattggcttcctgcacaccagcaacaccgaacagtttgcagttccctaaatgaaccaagctgtgacattccaccctgccatttcctgtgccgtgagtgtgaaggatgctttccatgctccacccagggcccctaaccccaggccctgcgtctatgggctaatgataactcacagctggccttggccccatgggaaccactttgcccagaagattctgaccccctaattcaagggtagtccttggccaatgactggctgacactgggagtcaagtgccagggctcccagtagcccaggctaaagctggtctgcaccttggaccacagccctgctgagatctcttgccctggtgctatcctcactttcccaggctctagggaacctgacctaagacaacagggatgcccttgaccccacctttgtcctggggca

SEQ ID NO: 856986 - DNA, 624 bp, Homo sapiens
ggtgccagctggcttttcttcctaagttaccttgcattctatatccctggctayctgatgtcactcaggaggcaatgccttgaggaggcaatataattggatgaagctaaaaggcttgcaaattctgccattgccaaggagagccctgagacaggaacaccctctactcagacaggctcggcttctctgtgtctcagaaaccccacgcatgctgcctccaccctggcaccactgccctgcctctctctctgtgagtgagaaatggaggaaaagagggagctcagaggcaggaggtcagaggaaaagagagaggctagaatggcaacaggcttgatggatggaggaggaagtcgcagaagacgatgagaaggtatgggaggagtgggggaaagtgtatttcaaatatttaagtattggaaataagaccacatattagagtttttggagagagttttcctttaaacaacagaccttgacctagttctccagcaaggtcttctgcagcaaagtctccttgcatccctcactttactacccaccttgagtctgcaccaatatttccttttcctagacaccctcacctcattcctggcctggcaagtgtaatcctccaggcctcagctc

SEQ ID NO: 856987 - DNA, 522 bp, Homo sapiens
tagcagtctaaaaggacggcactgaaatggcctggcaacagaacagatttggtataggggagactcggcaatcctgtagcatgaatgaaatacaactgggaggctcaatgtgggagcagaaacagagatcgtgttggataagctggagataggacaaaagaggatatagggaggtggatgaaaaaaaaaaagactttgggaaagtatgataaggtcccaccggatgtggtggccgacagaagccgtggaggctctcctgctgtaggtagctctggagtcccagcatctgctattagtccctccccgggggctcaccagggacacaactgcccttctgagatgacaaccactaagctctccacatgctccttggatttcccaaggtcaggaatcatagagttaaaaagawgtgtgtgcgtgtgtgtgtgtgtgtgtgtgtggtgttggttttcagctccgtctgttgaaaggacctagaggcaaagcaaagatgccccaacagcaacagggacacctccctta

SEQ ID NO: 856988 - DNA, 609 bp, Homo sapiens
ggagcacattcaaaccaaagcactaggttaggtataataattttgggccattctttctgattcatttatttgggtctgtggtggtggtggtttgctcctcagtttgtttctttagctctacagtctycattttcatctcattctgcagtttatcatttgtctttgagcgctggtttttatattcaagtacttactaatttctagacttttgagttttgtggagtgttttctttttcttcagttgtgttttctttcaaattgagttctgcctctgtcttttacttattatgtgttcctctcctttattctttttgctgtgatatgcgctcagttgccattttgtgtctcattatcttgcttgtgcttgaagtggtcacttgtcttcatgtcatctctttgttgaaatgtagtatgagtaaattctctttgtccactttgacattgtttcttttgttactcctaggcaaaatttgagagctagggtattacaattttacttttccatagtctgaaggtaaaacatctctagagttgggttcagttcttatttgaccactgggttctgctgtcttttctgagattttgttaaattttcataacctagtttca

SEQ ID NO: 856989 - DNA, 611 bp, Homo sapiens
tgctgtctttcatgttgcacatgcctattgctgttttctaaggagcatatttctaagcagatcaccctgaagttggttttcaggacaataaatgtgcaaacactcgaagctgtcsctgcctctgccaggtgctctttcctgctgcttttctcacctgcacaatgtttccacaattccctttggtgttgttgatctgaaaggagataaaatcttccccctcgatgccggtgcactgtctgtcattgatcctcacgccctccctctcaaaaccgagctggaagagcttgcacttagatatggacacttccatttgggctgctttgcaggtcacctctgcatcgataatgtcatgtgagtctgtgggaacagttattacgaaaggcaaatcagtggagtcggtcttgctgcaggagtgggagcaaagcatcccatttccattctcctttagaagaggcaaatgacctccactccaaggctgcagcatttctaattatgctttgatcaaaccaaatgagcatatgaattcattcaaagcagtaacctgggcattagcagagcctttttaaaaggataaaaatgctaataaagtgtcttctgtcttttctttacaa

SEQ ID NO: 856990 - DNA, 637 bp, Homo sapiens
cagttcccacagagcatgccactcccattaccttacacttgagctcgcataggtactttgacaagccagccttctgaaggcgattcaagggatatgcagctattatagaaaggccagactggggaggacattgaacactggatttagggaggtcgatgttactttatatcaataagtaggtctttggaggtttcgaacagtggagcaatattatttagaaaaggaattccatgtggaggacaatttggaaggagaaagactccaggaagacttatataagaacattgcaatggaaagggaaaggagaaatgtgagttagatgtttaaagaagaatcaatagaatttggctactgcaaatgataccattattggaaataggggatgctggaggttggcaaaaaagagatggggccagagaggaggtacaatagtttctaggcaaggaggatctgtttccttgccttttgcagcgtctagaggctgcctgcattctttgactcacgggccccttcctccatcttcaaagtcagctgcatggcatcttcacagctccttctgcctaggtgtcctttgtttctgtyatcacattgcctctggctcaaccctcctgcttccctcttataagaatccttgaga

SEQ ID NO: 856991 - DNA, 567 bp, Homo sapiens
gcctatctagaaactggtagcattagctgtgtttcttttatctgtcatataggaatgacaacttaatgcccaatgcataagtagtgcatttagaatagttcttaggcacatcgtctgagcatagtctttaaygccctcttatgttttattttcattttagttcttttacaaagcttcctcatctggcaggaacagaacaaaatttcttgcttgccaagaaaatccaaacccagtggaagaaatttggactagattcagccaagttggttcattatgatgtcctcttatcttaccccaatgagacaaatgccaactatatatcgattgtggatgaacatgaaactgaggtatgtgaaattgttggtactttttatattttgcaatccgaccgttttatgtggattgtaatgtagggtcaagtaaaagtagaaatttgttaatagtgaattattcagtatccactatgtgttcgacatggtgttaagtcctgaggccagaataagactaaggcatggttcctttgcctaagtaagttgaggcagacaatggaatacttcagacctcaaa

SEQ ID NO: 856992 - DNA, 567 bp, Homo sapiens
gcctatctagaaactggtagcattagctgtgtttcttttatctgtcatataggaatgacaacttaatgcccaatgcataagtagtgcatttagaatagttcttaggcacatcgtctgagcatagtctttaatgccctcttatgttttattttcattttagttcttttacaaagcttcctcatctggcaggaacagaacaaaatttcttgcttgccaagaaaatccaaacccagtggaagaaatttggactagattcagccaagttggttcattatgatgtcctcttatcttaccccaatgagacaaatgccaactatatatcgattgtggatgaacatgaaactgaggtatgtgaaattgttggtactttttatattttgcaatccgaccgttttatgtggattgtaatgtagggtcaagtaaaagtagaaatttgttaatagtgaattattcagtatccactatgtgttcgacatggtgttaagtcctgaggccagaataagactaaggcatggttcctttgcctaagtaagttgwggcagacaatggaatacttcagacctcaaa

SEQ ID NO: 856993 - DNA, 453 bp, Homo sapiens
agttcagaaatactgatcctcatacctaaagtaatgctccttttaacaaatgacartttaggtttgctgaattaccgatagattgtatttttaaaaatacaatagatagattgaattatcgatagattgtatttttgaattacattttttaaaaaaatgagtttttgtgttatttaaaacataaaattggaagttttacatatgtgaaatgatttctacaatcaaaataattaacatacccattatctcaaaaaagcttcctctcgtctctttatattcccaccctcccaactcttccttcccacttcatccaatccctaggcaaccattcatcttggtttctgctgtcagcatgattattttgagatctgtccatgttggcatctttgtcaatagtttttctttcttttgctgagtagtattcccttgaatggctatagcacagtttattcc

SEQ ID NO: 856994 - DNA, 592 bp, Homo sapiens
actcaaaagcaacctacagattcaatgcaatctctatcaaaataccaatgaatattcttcacaaaattaaaaaaaaatccaaagagattgtatggaawcaaaagtatcctgaatagccaaagcaatcctaagcaaaaagaacaaagctggatgtatcatgctaccagacctcagaatatactacaaagctgtagtaaccaaaacatcatggtactggcataaaaacagacacatagacctatggaatagaataaagaacacagaaaatccacatatctcagccaattgattttttacaaagatgccaagaacactcattggggaaaggatagtctcttcaataaatggtgcttggaaaactggatatccaaatgcagaaggatgaaactagacccctgcctctcaccctatacaaaaatcaactcaaagtatctcaaataaccaaatataagacccaaaatggtaaagctactagaagaaaacataggggagatccttcaggacattgctctgggaaaagattttatgaataaggcatcaaaagcacaggcaacaaaagaaaagtaaacaaatgggatcacatcaagctaaa

SEQ ID NO: 856995 - DNA, 535 bp, Homo sapiens
tctcttgaccacctccccaatgtttcctcactatgtagagaaacctctggtccgagttggtgtgtttcttrattttgaaagtggaagtgtgagttttttgaatgtcaccaagaattccctcatatggaattacccagctggctccttaaattttcctgtcaggtctttcttttacactggccacagatgacaaggattaagaaacctgactgttcgggaactccatatacaggggagccagcccttcactgttgatacaaagaaatcatacttttcaggcttttttctactttagtgtcacttcattttattgctattaagtagaagatatgtaaaatgcaaaacatttttgtacattttcttacaattaaaataatctcttatggcccattacctaaaatatgtattgtgattttcaagtgtttgtgaatttattggatggaattctggaaatatgtgggtgtgtgattcccacttaattatcccatgcaggaacaaaatttgcacatcatggacagacaggattttgtacaat

SEQ ID NO: 856996 - DNA, 507 bp, Homo sapiens
acaaagggtatttatgagtaaggaagagatgtaagcactgagatttaaggcaggaagggataggcgaattctactgttttgtgcaaatgcacttgggtttatgataaggactgcccttatctatgaagctgytaacccccaagccttgaatggaaaagataaacaccagctttcagtcttttgtttgtacaacaagaaggcctggacaacagaaacctatgttctagattgattccacccatactttgttcctgcagtcatgaaataccttgccaggaagggattgccttttaaaattcttttggtattggaagacacctctggctacccagaaaccctgagatcaagtagtctacttacccccaaacacatctctctaatttgccccctagatcaaggggtcataataagaattttaaggctcactgcactctatggaaaggactgtcaatactacggaagagaaccctgacagaacttcatgaaattctgaaaaaaattacatta

SEQ ID NO: 856997 - DNA, 481 bp, Homo sapiens
agccaggagggcaagcaaaagtggcagtggcataacttcttcacgttggtgacctagctaggtagaggatgccttggaggaaygggagggtgtccagaggccaagagaatactcctgtctcgccctcggctcagagccagatctcatcactgctcacgctggacactcgatagatatagcccagcactgggaggcggatgaaacctgcgggatcaaagaagcccgcggggactcagtaacgcttgttccttggaatttggagagctctctctgcctcctgggcacttggaggcctctggcataagcacagggctggggggcagaggaggagggtggcaggccccttccccagtaccttggctggtgaggaggccgccgggctccgggtccagaagctctggccggctgttgttctgagccatctgccggtctgctggtttcactgctggttgacaaagagggcagtgttcaggacgaggag

SEQ ID NO: 856998 - DNA, 600 bp, Homo sapiens
taaaacttagggaagcatcctattttcagttatagttggaaaggacaaaaagcaaaagcttctgcttacctctaattttaacctgctcyataaaaaaaaaaaggattggtttaacctattttgcacaagttctcaagaaagatggtctatttaaacaaactgattaatagaaattcaatgattcagagattgagttctttccagagacagacacagaatgatagaatttcagattccagaaacaaaatccacataaaacaagaacaaaataaggaatgaagaacagacattctggaacctccaatttatagtggtaagtcccaaactgagttccaatgacaaaagcattaacattttcctctcgagaggtaagaacacatgtatgtggacaacatcaatgattttctgaaggattattttctcagttaatttaaaactagagtcaggtgctaactgtcttagccatttttcagccatgactatattaaaagacatatataacttttaggacaaattagcaggttcatctcttaaatttaaatgctttagaggagcaaaacatttaaggcccagcctttgcatactaggcaactgagagaa

SEQ ID NO: 856999 - DNA, 600 bp, Homo sapiens
taaaacttagggaagcatcctattttcagttatagttggaaaggacaaaaagcaaaagcttctgcttacctctaattttaacctgctccataaaaaaaaaaaggattkgtttaacctattttgcacaagttctcaagaaagatggtctatttaaacaaactgattaatagaaattcaatgattcagagattgagttctttccagagacagacacagaatgatagaatttcagattccagaaacaaaatccacataaaacaagaacaaaataaggaatgaagaacagacattctggaacctccaatttatagtggtaagtcccaaactgagttccaatgacaaaagcattaacattttcctctcgagaggtaagaacacatgtatgtggacaacatcaatgattttctgaaggattattttctcagttaatttaaaactagagtcaggtgctaactgtcttagccatttttcagccatgactatattaaaagacatatataacttttaggacaaattagcaggttcatctcttaaatttaaatgctttagaggagcaaaacatttaaggcccagcctttgcatactaggcaactgagagaa

SEQ ID NO: 857000 - DNA, 547 bp, Homo sapiens
tcttcttttgaggcagtagtagagactggcatttcagggccgtgctgctagaaaagtccaacaaccagaccacgagtctcattgctcaacagaatgaagctcagaaaaccacccacagatttttttaaagtggtatggatagaatgaaagtgaaaggagtccttccagaacccttaataaaatcaagcctatttccaagaagataaattctaaaaggtagggacctcatctgtgtattcacgacagtaccctcagctcctaacaggccccaaatatttgtttaaggttgagtgttgactcctccagggttgaccacggagagagatcctggtgcacagtagaaagtggggaagtaagggtacaaggtgaatcgtgggcaaaaaagtcttggtgaaagtttgggttttgggaggttttcrttgttattgttacaaattttggttttgaatttggttaaatgttttttatgcatctgagataatcatatggtttttctcctttattctattaacatggcgaattacgttaattgattttcaaatgttaa

SEQ ID NO: 857001 - DNA, 594 bp, Homo sapiens
cacagggtcaggatcatcactatccctgtcttccacctccacatcccgcccygctgggaggtcttcaggggcagtaacacacatggagctgtcatctcctgtgataacaatgccttctttgggatccctcctgaaggacctgtctgaagctgttttacagttaccttttaaaaaatatataagtaaaaggagtatgatctaaaataatagtaaaaagtgtggtatagtaaatacaagaccagtaacgatcgtttattgtcaaatattttctgctgtatgtaattatacatgctggactttcacacaactggcagtgcaaatggttgggctataccagtgtcaccaggaacatatgagtaaagcattgtgctaagaccttaggacagccgtgatgtcactaggcaactgtgagttttcagctcctttaggatcctatgggaccaccgttctgtctgtggcccattattattattattattattttattatactttaagttctggggtacatgtgcagaatgtgcaggtttgttacataggtatacatgtgacatggtggtttgctgcatccatccaccaatcatctaggttttaa

SEQ ID NO: 857002 - DNA, 549 bp, Homo sapiens
catcaacacttggacttatgtctccatccgtctccccttcctaccccaccayctgctccttgcctctctggccttgtgccccccgactcatcattgtctgtactggacactctccaagtatagcacacagttagaggcactgattagaaaacagccagcaggtctgcctttccatgtgttgccttaacctttgggcccacgggcctcaatgactagcctgagcttcacctatttactttttaagcatagtctttcagagcaggctgcattggtcaaggcatcccaacagcttgcccctttgagttcctaaatactcccaatgggctttttcctttgtttagacttggaatggtcagcggaagggtggaaggtgggaagcatgtatgtgtatttgcttgtcagggaagaactatggtgtccttgggtgtatgctaatgggtctgtctctctctcccctacacagggcctggagcagtcattgatggtgtaaactcggcctccagagcactggcttgtctctggctatcagggaccctcttagcccacttc

SEQ ID NO: 857003 - DNA, 528 bp, Homo sapiens
ttgaatggcctttgcgtttttataagggtttttttaaaaaaaaaaaaaaaaaaaaggccaggcacggtggctcacgcctgtaatcccagcagtttggaaggctgaggcgggtagatcacctgaggtcaggagttcgagaccagcctggccaacatggtgaaaccccatctttactaaaaaaataccaaaaaaaagagtcaggcgtggtggcgcacacctttaatcccagctactcaggaggctgaggcaggagaacacttgaacctgggaggcagaggttgcagtaagccaagatggcgccactgcactctgcactccagcctgggcaacagagactctgtctcaaaaaacagagtaggcaaagagaccaaatgtggtacatgcatcctaaaatatttactagctggctcttcatggaaaaactggcccagccttccsttagcctcttcctcccttctgaggagactaacctgtttcttcccaaagcaggatccgagccaggagacactgagcctttggagttaggag

SEQ ID NO: 857004 - DNA, 540 bp, Homo sapiens
caggtccctcagtgcccccaagccttgatttccttgtctgttaaacctgtgtctcccgcagatgtgtttgggaggattcagtaagatgatgccggtgaacgggctttataaaccggagagcaccatacaaaccgaaggtgatgccggccgcagggcacagatggagaagtggcccaagttatctccaagagctgaagtcaaactgccctgggctcagattctgcctcgtcatttcctcagggtatggccttgggaaggctgacctctctgtgcctcaggccccacatctgcaaaatgggaataataataatacggactacatagggcacctgtgaagcttaaataaaatgatggagaaaagcacttatcacggacgagctcaataactgatcacttattttcctacaaaccattcttgccactatgagtatcatctcagtttagggagagaatmccattgctgcctccgagtgctttcttgtaatcactaacctgcaacgtacgcttaacagctttggaaggtaggattttctccacact

SEQ ID NO: 857005 - DNA, 558 bp, Homo sapiens
gagacaaaagggaggcctgcctaggggagacaggggagatggaggcctcgccactgagggcacggtcccatcagctgtgacagtgctgacgcatccaggagtgggcactgcctctacctcccaacatctcccagagctctgggtcttgcagagaacaggagagcacagctggatgctcctttgtctccatcctggaaccattagacaaaggaggtttcttggttttgtgtggagaagaaagggaggctggagatgcagggtgagttgtggccagcaggatcataccagggcagggtgctcccagaggcctgctttagagatcaccgcaactggggactgagccaagggaagggattgctgtgagtgttcttgtctcctggggggctcagttcggagtaaggaaaacacagccatcagtttttaggamcttctctggccaaacgcttgacctaccttgcctctgttcccacaacaatactgcaaggtaggtgttattaccctattttacaggtgggaggagacccagaggggtgcccttgcccagggtcaggcagtcct

SEQ ID NO: 857006 - DNA, 517 bp, Homo sapiens
ttaaaatccccaagtcactcagtgagccatgggacctgaatccgaacctagtttatctggagccataatctgggctcctcccatttttccatactgctttccaaaagcattgyggttcactctttggatggaaccagtcccgttccgtatgctgtgatctatccctgccgtggaattcctccgaggctccaactccgcagccagagaagctgctctctggcctccgcgggcagagctctgcttatgacttcgtcttccagaggtccacatttctccccttgacgccccctgtctaccacctccacctggaaatttgatctttactgtgctcagtgatcacgaaattggtcaagcctattcatgttccttctcatctagaattctgtgtgattgttttagcataaactgccccgctcccactgtatcatttcacgatctccttttaatgtttttctttcagttttgcactgacagtctggtgacaggtgctgccagggtgcaagttacattgcaatgt

SEQ ID NO: 857007 - DNA, 696 bp, Homo sapiens
ttgtaagtattcaaaataaagacaaaatcccaaataaagcagaaagaaaatatgaactaaaaattttcatcactaaaactctaagggctaagccagagaagggaaggctcaccttaacaagctgtctcctctccttgccatcggaacctacacaatctattatttttggtaaatttacacctcctgctaagcgaaattctgctttaaatgactgtatagtcaccagatttccatattctcctgtgtggtccacctaataaaagtataaacatgattgataataggtcagatacactatttgcacttaaagaaaaatacattataaatggcaattttaatattaaacagagaaacaaatgacgatgtgatagtggttaagaactacaactttaggccgggtgtggtggctcacgctcgtaactttaactactgtttcatcaaagattcactaatatatgtaagtcatctgagaaataactcctcacgaaaacataaagtaaattttggaaaacagtagaaggagttttctgggttataactgctaaaatctggcattttgaaggaaccattcagcgaaatcacctagctgatatagctagaaaaacagcagttaatccacaygatacagctacatttcaaatcaagtaactagatactaagcactaaactgcaaaatgaaaagaaagacaatgtatt

SEQ ID NO: 857008 - DNA, 544 bp, Homo sapiens
tttaactttgaaagcatattttaagttttaatctttataaacctcgaaattatgtttaggtatattcttccatacatatcttaattataatttttaaatgatagtctgtatttgactctatgtaaatataaaaacatatttaagtatgttaagatgtaaagttatactactaaagagaaatttaagcatttccttccagttgagtatgctataacaatcttgaagtctgtgttaccatgagagagtctattagaatttaaaggattaggctgggtgcagtggctcacgcctgtaatcccagtgctttggaaggctaaggcgggcagatcatctgaggtcaggagttcgagaccagcctggccaacatggcaaaaccccatctctactaaaaatacaaaattagctgggcgtggtggcacattcctgtaaatgccaccttttcaggaggctgagacattagaatcacttgaaccggggaggcggaggtarcagtgagccttgatagcgccactgcactctagccttggtgacagagcgagactct

SEQ ID NO: 857009 - DNA, 544 bp, Homo sapiens
tttaactttgaaagcatattttaagttttaatctttataaacctcgaaattatgtttaggtatattcttccatacatatcttaattataatttttaaatgatagtctgtatttgactctatgtaaatataaaaacatatttaagtatgttaagatgtaaagttatactactaaagagaaatttaagcatttccttccagttgagtatgctataacaatcttgaagtctgtgttaccatgagagagtctattagaatttaaaggattaggctgggtgcagtggctcacgcctgtaatcccagtgctttggaaggctaaggcgggcagatcatctgaggtcaggagttcgagaccagcctggccaacatggcaaaaccccatctctactaaaaatacaaaattagctgggcgtggtggcacattcctgtaaatgccaccttttcaggaggctgagacattagaatcacttgaaccggggaggcggaggtagsagtgagccttgatagcgccactgcactctagccttggtgacagagcgagactct

SEQ ID NO: 857010 - DNA, 612 bp, Homo sapiens
gtgtgtaacgggctataccatgtagcctaggtgtgtaacgggctataycatgtagcctaggtgtgtaacgggctataccatgtagcctaggtgtgtaacgggctataccatgtagcctaggtgtgtaataggctacaccatctaagttggtgtaagtgtactctatgatgcttacacaaagacaaagtcccctaacaatgcatttctcagaacgtatctccgttaagtgatgcatgactgttattgaaaacattatttgactacagcacagaaataatgaagtcagagaggtctagataggaaaggaaagatggtgatgagctctatagaaaagaggagtaaacatttgaaacaaagagatggacaagtctgtggaagcatgttgcataaagtgctttaaatgttttacttgtggagatggcatttgcaatattttgcatcttatgtaactgaattcaacccctaacgtgcaatgagtacctcctatgcacagaaagcagagctagatgtggcacctgccctcagggagcacacaggacaactaaagaaaacatgagccctagtcttgcccttggaacatgaatctcactcttctggtagggagagaaaatg

SEQ ID NO: 857011 - DNA, 516 bp, Homo sapiens
cctaattttaatgaaaagaaatgaaaaatatgctgggagtgggggaagaatggctcaggagagttattggacttcaaaaaccctcaaaaatcttttaatgatgtaagtgtaaaggaatcagaaacatactgatgaaattccccttgatatccacatggtgcttacagattctggagggaagattccagcaatgaaatctgctgttttttatcaaacccaaagtatttgagatgcctggtgaactccaatatggtgtaatcatgtcttttttcataacagtctcttctcccaaagccagaaggggaaggaaaggcctaattaaagagcgttggtttttaaggtcagagtcttaggggggtgtccacttgacatcatctgccaagttgtttgtggtgtttacactgacccacagatgtgctgtgaatrtacaacattaaaatgttaattgtctaatcttgtgctacttttcaacgtacatttggcaagacttgttgcatgttaagttcgaaaacagta

SEQ ID NO: 857012 - DNA, 392 bp, Homo sapiens
gaaggagcaaatttaagtgcattcagacgtgggagagggagattggccagctaaggagattggwcagggtggatgcggagcttctaagtccagaggaaaacaaatgatcagctcacggtaacccgggtagccgggccttccacagcgctgattccacagtctaaaacttctagaccttcaggtggccggttcaatgtttccgtttaggtcatgagctcggcaacaaattaagtaaagtgtccccagtaaatgctgataagccccaggaggaaacaggggcatccccacgcataccaaatgcactcattagcatccctgctattatgaagaatagcaaaatgaccttgcaatcattagaagcttaaaatgctatgacttaagtttagaaggac

SEQ ID NO: 857013 - DNA, 591 bp, Homo sapiens
acctgttactggcaatgcttccccttttaatttgtatcttatttggaaagagcttcaaaattaggtagttgaacttggtaacaatatacaayagcaacacataggctaagactaagggaaaaagaagctcacctttgaacaaccacaagagttttgagtaaagggtcattcctgtgtcatgaataagtgagagtactgaaaagctccatttcaaattgatatgtatgattatatttaagctgattcaaaaacacctactgaccatcaagctctatatgtaatgctggaagagtttcttcctctccattgataaaccaataatttcactgtttgtcttgagtcttcaaaactgctgatttataaagtcaaagagcgtctaaggataaaagacattgagaacagagacatagtagcccagaaaggcactcttctagcactcttctggtcccacatttattcattcaataaaaatttattgagccacgctgtttccaaggaattgtactaggtgctgcaatgcaaagggttatgacaaaactgtctgtaaatgtaggatctgaattggtctttgatagttttcctgatttgaga

SEQ ID NO: 857014 - DNA, 658 bp, Homo sapiens
cacttagaaatataactcaggagtctgtrcatctgcagagattttattcccactcaggaaagcacacttatatgtaagcaaacgtcacagccctgaatatacacttgaattttgtttctaaaatgactcattcacaagtattagaggtagcagtttctcttgacactgtctagacattttaaaatgcgaacagcaactatggggactcgggaagggcagatacggctagacaagaacaaggttctccctgcttctgcttatagtgatcaacaagagttaatttgcattgaaacctatagcagaaaagattgcctaccatttactgagaatcccagtgcaggcttaactgaaatttgggtactttgaagaatggataaatatttcctttgacttagaatttagagtaattcatcacttcttaatctaaacaattcacagatgttttcagatgttagttttaaatttaattaatatgtattcctgtgtacttagtacatgcctgtattttggcctgaatactacttgaaatgttcctgtatgcccccaaaagtttcattgttttataggcaatatcaagtttgtatctctcaattggagtgttgggaaatagaaatggatccagttttggtgctttttcaggcctcctgatttattttat

SEQ ID NO: 857015 - DNA, 516 bp, Homo sapiens
ttaaaatccccaagtcactcagtgagccatgggacctgaatccgaacctagtttatctggagccataatctgggctcctcccatttttccatactgctttccaaaagcattgyggttcactctttggatggaaccagtcccgttccgtatgctgtgatctatccctgccgtggaattcctccgaggctccaactccgcagccagagaagctgctctctggcctccgcgggcagagctctgcttatgacttcgtcttccagaggtccacatttctccccttgacgccccctgtctaccacctccacctggaaatttgatctttactgtgctcagtgatcacgaaattggtcaagcctattcatgttccttctcatctagaattctgtgtgattgttttagcataaactgccccgctcccactgtatcatttcacgatctccttttaatgtttttctttcagttttgcactgacagtctggtgacaggtgctgccagggtgcaagttacattgcaatg

SEQ ID NO: 857016 - DNA, 617 bp, Homo sapiens
ttaacgtttttctcatgcttctgtatgaggcatgtggcatttaaactcttttacagccagatcccacttcccagtggaaaactgcccggaggatccactaaacttctaatgataaaaaggtccttctccactacctcaagccacagttaattatctccacttgccgagtccttctgtctgcattagcaggcaccagatcacaccctgaacatcagtccgcagtctgactcactagataaacactgctgttccaggagcaatattttgaagttgtctcagtgaacttaattagttttcttctacattatttcctcactagcttcttgttttctctgatggaggatgcttctgggacaccctttctctcttttaaactaacagagaactaaccttacactgtcagtcctgttttctgttggttctctactgcagtgcagcccttctcccaaaaacacacccatcttttaccaggaatctgacttcattttggamataaaagtagtacgttgtttgctctgcactcttcctccacaaaaggagtgaaaaatagaattttctgttgccagtattaatagcactttagagaaaccaagccgtcactccttaggttttattgt

SEQ ID NO: 857017 - DNA, 585 bp, Homo sapiens
gcagactgggaatgcgagagctcttgtagccaatgcccagccctgcaaatctgccagggaagcagaacagagccaagtggaagtagtgtcctactgggcagggttgggcrtctctcccttatccagtggggtctgctccttggagtcaagggtctgtcatgcatccgagggtttggggtctatctctcctcaggatgacccaatgttcagatggcaaggagaaggcactgcccacagccccagctctccatgtgaccacctaccacaagagtacctccctgcagtgtcggcttggcttatgaaccacaagcacacagggaggggtgcggatggggaatctcccacctgcatctggtctgctgggtaaaatccaactggtgtcagtgcagtccaagtcaccgggagacatgcagtttgtgcttctgggaggaagaaagggaaatacaaacagtgcacaccattctctgttaactgccctgggaatgaagaggtgaggcaggctgtataccacagcaggtgtacatcaggtgtacagttcgggatccattcatttgttaggagtgttttctagttttcactaagtac

SEQ ID NO: 857018 - DNA, 554 bp, Homo sapiens
catcaacacttggacttatgtctccatccgtctccccttcctaccccaccayctgctccttgcctctctggccttgtgccccccgactcatcattgtctgtactggacactctccaagtatagcacacagttagaggcactgattagaaaacagccagcaggtctgcctttccatgtgttgccttaacctttgggcccacgggcctcaatgactagcctgagcttcacctatttactttttaagcatagtctttcagagcaggctgcattggtcaaggcatcccaacagcttgcccctttgagttcctaaatactcccaatgggctttttcctttgtttagacttggaatggtcagcggaagggtggaaggtgggaagcatgtatgtgtatttgcttgtcagggaagaactatggtgtccttgggtgtatgctaatgggtctgtctctctctcccctacacagggcctggagcagtcattgatggtgtaactcggcctccagagcactggcttgtctctggctatcagggaccctcttagcccacttcttcatc

SEQ ID NO: 857019 - DNA, 533 bp, Homo sapiens
gaatccaggtgtctcaagggacaattaagagtatgactgcctcttgtccctttcgagtagtcctttgagggttgttttatctttctcccattttaaccatattttacaagtctaacaagacttgagagggtgatgctctgagacttcacttgtgttcttgagacacatactcgagtgggatcttggttccattactttccagttctgtgacttggctactttctataaccgctctttcccttggtttcctcatctggaaaataggaataataataacactcattctctagtgcatcccatggtgaatgctagctgaaatcaacatatgtaaaaggctttgcaaatgcctggtttaacggaagtgctctacaaacagtattgaagaggatgatgtcgattatgatagtaaaaatagattctgagacactttgtatttccattttagaagtgcctccccttttttttttctccttttctctttctgagactattaaaggtkgttcttatcagtaagggcagcttttccccttttc

SEQ ID NO: 857020 - DNA, 624 bp, Homo sapiens
agtgggtccagtgaagtgcggagagtgtgggctggctgctgttaagacgcctccacctccacctccccgtggtgctcccaccatctgcctcttgcgctctctgctacctggttcccagttttgctctccattccaaatccccgcaggactccccatgcagatgagctactgaatgccctaactttctgctttcctgacttcattgtttccagtgaccatcccatctggacccaatgtcaccagtgcagccacgtcgtggaccctgttgccacactggagatcaactgatgactaccctgctgatccttccagtggtctggctcctgactccctcaccccattccgattgttccatggcttcactaaggcctccagatagtcgcgtgcttgcttccttttctcccaaaccaggccatccttgttgttgcccccttttctatctcaatggtccattatttgaggcgctgtcctgccttgagcttctggccctgcctctctrcactcctgtggcagtgcccgcagtgcccagttaaactacaataatctgcttagtacttggctgttgccctgtgattacaaggccaccacctatcgggcagacaggaagacagatcatagaattct

SEQ ID NO: 857021 - DNA, 610 bp, Homo sapiens
acgtggaatttagaaagcaccatgaatgcgtactcactttaaaatgttagattttaaaacagaaaggagagtctatcaaatgaagccgcttgagagtttttataaaacccaaagagaatatatattamcatataacattgttatatgtcatcaatctggagggttgataataacattgatatctggatgttatcaaccctacagataacattcagagcttggttactgtcttcttagtaaatatctatggtatactgagctctctgcctttaccacatattatatagtttggctggcagctttgttttcaataagtgcttttctttgcaagaaaaagatgctagtgagtgccatctatcatttctgctagatcatcttccaaaatcccaaagaacagcactgtctgcttttctctttctgacagagaaacctctgaactggatgctaatattttgcagaccaagcatgagccaaaatggattaaaaaatctaagctggcatatctgcatcagtctaagcagtttcaaaggaagaactgcaatgttaagctgattattgtagctatggttctcccttgtccggtcccctccccgagttctgtattttatag

SEQ ID NO: 857022 - DNA, 644 bp, Homo sapiens
tagaacagttcttgtgacctgagagtgaagaagcacctggtgccagtctgaggaaaggatctcggctgccagttctaatacacccacatcctcttcttgaggacatgggactgagcagtgagcactgtaactgaagatcgaggggaatgcagaggtttcagaccacagcactgattttgattcccccatatcctattgatcactaaatttgataacaggagtaaagtgggggttttgaagagtgcactggattcccgaagatctgctggcagcttacaagctctggtctgctcacagagcttttagaattgtttatggtatatggaaagaatgctaatacgactgcagtcttctaaaacaagtctagttacatgaatgtataagagagaacaaatagtagattttcaggcaactcttatcaacatttaatcttttaaagaaaagaaaaaagcctaacttgagatccattgcctggactatatcatagggaaatttgtaaaagaggaatataaaaaataaggcaagagagcttaggcagatggaaagaaaacaaaacagaaacttttttagcacatgtcatatttagtggaggtctcccagtctagataatgacatcatcaytggtttccctttgacaatttttc

SEQ ID NO: 857023 - DNA, 606 bp, Homo sapiens
attgttcacttatctcttaaaaaatttaagtacgtatctttttttcagaaacacaattccagagttgtggcttaacagaagttaaaaaatggaaatgaagttaagttttcctgaaaggcaaccatatttgtacagcaaaattcctcttggaccataaagaaagcttgaaggtgttttttaattttgcaagtatgtgcatgcatatgtgtgcttgtgtgtgtgtgagaaagatagagatacagatagaaaaagagacagacagaaagagagggagagacatctctgggagtgagtcaaatggaatacctacattggtgactgagtgtcctggaattaaaatctgctatcccatttttaaaatgtatgtatgtgtttatttatttatttattttttgagatggagttttgctattgtttcccaggctggagtgcaatggcgtgatctcggctcactgcaacctccgcctcccgggttcaagtgattctcctgcctcctcctcccaagtagctgggattacaggcatgtgccaccacacctggctaattttgtatttttagtagagacatggttyctccacgttggtcaggctggtctcgaactcctga

SEQ ID NO: 857024 - DNA, 482 bp, Homo sapiens
cttgactgatatttgttcacaaagactagatttttgaacaaaatacctgcattgctccttttcactactttttccctgtatcyctgtcttcacctcccacacctcatcttcttttcccctagaataggtgcttccattgctttctgtgaacatagtaatgcaggttccatgagcagtaaatgagggacgtgctgattatccatcatcttgcatctgtttccaaaatgtcctctctggttgaatttcacccaaacatagaaatatgtgattgccattagcaatgggctcccctcttctctctctctcctcctcaaccggacacatatgtgtctaccccttttggcatgtcctactgagatttcttttttttttttccctgagaagaatggcatgttctggctgatcagaaaatgctctgaactcccagggaggttgtgtttcctggtagaaatcccagtaagaacagagtcttgtagtttcaa

SEQ ID NO: 857025 - DNA, 400 bp, Homo sapiens
catcacagccgtggctgactcagtacccaacccctgtagcctggttttcacaggcttctccttagtcaagcctgggggtatccacctccccagcctggccccagagmaaccaggccaccctcctgtcacacaccatccagacagtctccaggtctgtcagtcccaaagaatgtatttgggggtttcgaagaccttcgcagccccagaaccaaggagacattgtcattgactcacatgctcatgtatttgaacatttatattcactcattcatttgatccacagacttagtgagcggctacccaggaccaggcatgaaacaaagacctcacccaggtggatgtcaagggcccaggagggacgaagctttttttttttgagacagagtttcaactcttgttg

SEQ ID NO: 857026 - DNA, 595 bp, Homo sapiens
ctttctaccctgcccccaacacgcgtccctcagaagactctaagcagggtgcaggcagggagagtcaggcacggtgggggagagggctgagctctggacctgagttctcctcctaggtctgtgacatagacaacctaatgacttatacaacctttctgagcctcagttttctcatctgtacattggggatgaccatatacatctggcaggattgtgggaaaagcccagagttcaggacctgacacacagcaggtgcctggctggagtttagtgggattggagaatgcagctcttggaattttacccagaaatgctttctcaaccctgaggtatatccccaaactttttgtttgcaccaattctctctgacctttgtccttccagatatctttttctttacacgtttttagggactaacgcagaggaaactttatggcccttcaacccaaaacgttaattagaggataacgcaacgtstagggtgaatcctgagaagagggggcaggaaaagaagagaattgcctgacccctgcccccagcccatggctgaggacagagaaaaggggcatcctgagaaaggccatgtcccgcataa

SEQ ID NO: 857027 - DNA, 654 bp, Homo sapiens
tgccatcagggagtttacattttagtgaggaaagggatcctacggtaaataccccagagatgtctcctgtcaaacaggagagaggctgagagtgccaaggagacggggtttgcaatttcaaataaggcgatccgggatgggcttcctgagaagagagggttgtgtaaaaacttaagtcagctgtcattattcccaaaatatgggacttgttttaactagaaaatcagtgtctgactttagtgattagttggttcaaccgctccattttgcagatgagaaaactgaggttagactggatggtgatgaggaggtgccttgcccacagtcacttgaatgggtagcagagtctggaaccgggtgttttgggttccaggcatggctagtgccccatctccgtgctgcaagggcaaagaagcccagacttcccacggcgcacactctgctagcaggtgcagtaaataaaaggctccatctcaaagagagatgatgagagacaccattaaatgtttctgagctgggctggtggtcagcacrccttcctctgtgcagcactcccaaacaagtggccataaaagctttatggtgactggacactgaatggcctgcctcgaccactgtgtcttctcagccactcaggcctctgcctcttcacca

SEQ ID NO: 857028 - DNA, 590 bp, Homo sapiens
atcagaaagcccaagggagctgggaggcctagatctgacctagggatacayaccaactaggaggggggtcagcaggggcccaagaagagagatctcggggaggtctcaggaatgggcattgagccattgctagagtcagggctccagagaaatctatctgaagatgtctaaggcccgataaaccactcagaatactgggggcagagtcccaacccaggaaaagaggccgccagagactgggatgaggtggtccaggccatgaccagaaccccggaaaagctggctgggatttaggttccaggtggatctggaataaggtggatcaaagccagctggtaggtgaggagcccatgtgcttggggatgagaaggacagatgcccagtggtgttcactcgggcaggctgaggtgtggggctgtggcattcacggcatgctggtgggagcacaggctggagtgagcgcgaggtggaagatgacattggaagggtcacctgagggccctactgacggtcacagaggccacatccctcctaaatatcacttcctctggacctagagctcctgatcaagaactctcccaggatccaaa

SEQ ID NO: 857029 - DNA, 590 bp, Homo sapiens
atcagaaagcccaagggagctgggaggcctagatctgacctagggatacataccaactaggaggggggtcagcaggggcccaasaagagagatctcggggaggtctcaggaatgggcattgagccattgctagagtcagggctccagagaaatctatctgaagatgtctaaggcccgataaaccactcagaatactgggggcagagtcccaacccaggaaaagaggccgccagagactgggatgaggtggtccaggccatgaccagaaccccggaaaagctggctgggatttaggttccaggtggatctggaataaggtggatcaaagccagctggtaggtgaggagcccatgtgcttggggatgagaaggacagatgcccagtggtgttcactcgggcaggctgaggtgtggggctgtggcattcacggcatgctggtgggagcacaggctggagtgagcgcgaggtggaagatgacattggaagggtcacctgagggccctactgacggtcacagaggccacatccctcctaaatatcacttcctctggacctagagctcctgatcaagaactctcccaggatccaaa

SEQ ID NO: 857030 - DNA, 393 bp, Homo sapiens
aggagttcaggtgtggctgagctgggtcttctgtctcagggtatttcacaaggctgcagtcagccagggctgtggtcacctcaaggcctgtttggggraaaatccacttccaagcttaccaatgaagttgttgtcaggattcagctcttcatgtgttgttggaatgatgacctcaggtccgtacagaagtctgtcctcaattcctcgccactgagactctccatagggcagctcaaaacaaggcagcggcttcatcagagaaagcaagcaagaagagtgagagtgagaatgagcaagagagagagagatccccagcaagtccaaggtcatggcctttaataacctaatcttagagagcaacgctccatcatgtttgccatattctgtttgtta

SEQ ID NO: 857031 - DNA, 614 bp, Homo sapiens
acaacaaaagcagcagagagcctactcacccctacttccagccaataytccatcccctaccccaggataaatgcaatcccagcttctaatattgtgcactggttttgtctgttctttgaactttctgtagcagagttatagaatatgtacacttctgtgattggctcatttcagccaacataatgtctgtgagattcatccttcttggatatagttcaagttaattcattatcattattgtattgtattgtattcaataaatattactacaattcattcatccattctactctccagcatttgggtagtttccagtttgagggcataagtagtagaagtattgtgaatattctaggacatgttttcattaaacatacatgcagctctgttgggtacagtctaggccttggagtggaattacagttctcagaaacaaaagaaaataaataaattcaagtttgatatagacttgactgctgcaagacacagattccctgactgcagtgaacccgaggtggccgtgagcagtggaaggagtgtgcttgttaaaagggcagatgtgatgctgggagacatgtacaaatctcaagagattattcagggaagcaccagat

SEQ ID NO: 857032 - DNA, 604 bp, Homo sapiens
ccagtcagcccaccggttgtggatcaggcctgggagtcactcactagataatggtgtagacacttcataggaattgcgatgctaaagaaaaaaagccttcattctcaattaagaggaaaggaagaggaaaaggaggggaagcaaacagcaaattgacattaattatggcaactccctttaaacgccactgataatatgctgtctgaattcccttcccatcaacctctggatctcactatgggttgggcatcccctaaatggcaggatggctccaggctacagcacagagccctgtgtttcagatgtagggaaagtaaagtgaacaatagaaaaattccacatggcctttgcaggcctcataccgccattccacaccaccagcagaagtcagctctgccacctaaaacctttgcccatccctgagaaagtcctcagcatcctaaggctacaaaagtctaattggttgtaccraagtggatagaaccttttccaacaaaccccacccaaacctgcacccacagctatctgttgtccacccactatttgtagagaagtgcattaagagtttcaggatattatgggatttttagatgtccccttctgg

SEQ ID NO: 857033 - DNA, 613 bp, Homo sapiens
gtgggtggatcttgttggaatggggcagagtgaaggaaaatycctcttcaacagccctctgctgctttttctctcccactggctaatttacgaatctacataaactctctataagcgcttgagacttgaggatgaagataagccagtgggttgggtgttaactactgtaaggatctggagggagagacaattgaggaaaaaaggtgatttttctactttgtcacaactaaggtacgtgagcctaatctattttgtttttttctctttttatttgtgtcatatctttttcatacagtgggtgttttgctcctacaactttccatacctgtgtccttgttgatttgagtttttcacagtgtcccatgatgtgagagctgtcaaccgttagtattataaagctctgtacacaatggatgttacgataaaatagtctagtggccatcaggaaattgttgccctattatctctgccagtgggaacatctatttcacagggctcagaaaatgaattaaaggttctgggtatgatgaggagattccctagaccaaatgacccctgctcttaccagtgacggaaaacaaagtcctaattgcggcttcgacgatctcgagac

SEQ ID NO: 857034 - DNA, 606 bp, Homo sapiens
ggaggctgagacaggtggatcgcttgagcccacgagtttgagaccagcttaggcaacatggcgaaaccccatctctacaaaatacaaaaaattagccaggcacggtggcacatgcctgtagtcccagttattcagcaggctgagggtgggagaatcacctgagcccaggagtttgaagctatagggagcmatgattgtgccaccgcactccagcttggataacagaatgagatcctatctaaaaaaatatatatatatatatatatatacacacacacacacacacacatttttttttagtgtacagttctataatttttacatatgtatagattcacataagcactgccacaatcaggattcaaaatagtgccatcacacccctaaaaactccctcatgttttccctttataatcacagcctctcccattcgtaactcctggcaaccacagatctatcctccatcagtattttatcttctcaaaaatgagaaatacagcacgtaaacttctgagactacttccttccccatcccccagcatcatgccttggaaagtgctcagctgctgcatgtgtaaacagttcattcctttctactgctgagta

SEQ ID NO: 857035 - DNA, 575 bp, Homo sapiens
gcgaaaccccatctctacaaaatacaaaaaattagccaggcacggtggcacatgcctgtagtcccagttattcagcaggctgagggtgggagaatcacctgagcccaggagtttgaagctatagggagccatgattgtgccaccgcactccagcttggataacagaatgagatcctatctaaaaaaatatatatatatatatatatatacacacacacacacacacacatttttttttagtgtacagttctataatttttacatatgtatagattcacataagcactgccacaatcaggattcaaaatagtgccatcacacccctaaaaactccctcatgttttccctttataatcacagcctctcccattcgtaactcctggcaaccacagatctatcctccatcagtattttatcttctcaaaaatgagaaatacagcacgtaaacttctgagactacttccttccccatcccccarcatcatgccttggaaagtgctcagctgctgcatgtgtaaacagttcattcctttctactgctgagtagtatttcattgtatggatataccacaact

SEQ ID NO: 857036 - DNA, 575 bp, Homo sapiens
gcgaaaccccatctctacaaaatacaaaaaattagccaggcacggtggcacatgcctgtagtcccagttattcagcaggctgagggtgggagaatcacctgagcccaggagtttgaagctatagggagccatgattgtgccaccgcactccagcttggataacagaatgagatcctatctaaaaaaatatatatatatatatatatatacacacacacacacacacacatttttttttagtgtacagttctataatttttacatatgtatagattcacataagcactgccacaatcaggattcaaaatagtgccatcacacccctaaaaactccctcatgttttccctttataatcacagcctctcccattcgtaactcctggcaaccacagatctatcctccatcagtattttatcttctcaaaaatgagaaatacagcacgtaaacttctgagactacttccttccccatcccccagcatcatgccttggaaagtrctcagctgctgcatgtgtaaacagttcattcctttctactgctgagtagtatttcattgtatggatataccacaact

SEQ ID NO: 857037 - DNA, 536 bp, Homo sapiens
cccatgagcttgaatggcctttgcgtttttaaagggttgtttaaaaaaaaaaaaaaaaaaaggccaggcacggtggctcacgcctgtaatcccagcagtttggaaggctgaggcgggtagatcacctgaggtcaggagttcgagaccagcctggccaacatggtgaaaccccatctttactaaaaaaataccaaaaaaaagagtcaggcgtggtggcgcacacctttaatcccagctactcaggaggctgaggcaggagaacacttgaacctgggaggcagaggttgcagtaagccaagatggcgccactgcactctgcactccagcctgggcaacagagactctgtctcaaaaaacagagtaggcaaagagaccaaatgtggtacatgcatcctaaaatatttactagctggctcttcatggaaaaactggcccagccttccsttagcctcttcctcccttctgaggagactaacctgtttcttcccaaagcaggatccgagccaggagacactgagcctttggagttaggaggt

SEQ ID NO: 857038 - DNA, 692 bp, Homo sapiens
tgaattttctcaaagtagttgttcactgttgaataccaaatttgacacaaaaacagtctccagtcttatataattttaatttttataagagagacaacctcatgaaaaacaccaatacacactktgtgttgtgtggattatgacgccaaaataatcactaccattctgaactctgtaatctccctcacctattaatttggctatttcttgcccaattttagacaatattctttcttcataaaatgatttcatatcagttagacctagatcctgctcattttcccaaaattttctttatttttattttgttttgttggtccagctacatcaatttttcattcaaaaatacatgtagacaaaattgtaactaaaaggtcatcaattttaatgactaatttggcaaaaactgatatcttacaaaaattgccttaagctccagagtctgcactagattgagaattagtgttagccaaggacactgctagagaggagatgggtgaatgggcactgagatgatggctaaggcccaaagcacactgttcttgccttactgccagggggatattgacaagcttgacaagaacaagtgcatggacaaaaacagaaggcagtggtgaaggcagcggtggctgctacatcagtaaagctcttggcttattattagtcggccagctgttaaactattttctttc

SEQ ID NO: 857039 - DNA, 614 bp, Homo sapiens
aatattattttaatctctaggaaattacttgggagaataggagagaaacaaggccatgccctttctctaggttcatttaataactgttgaattaacagaacatgcttaagctatattgcttatagcattattgttcataaattgcaaaaactagaaacaacataaatgtatgtactttgtgacttattaatacaatggatactatgtagtggtaaaaatgaatgaattacccatatagaccataaaatggatgaattgacaaaagagaagacaatatataaggtgattctatttacataaagttcagaaacagacaaaattagaaagtattatttaggggtatatatatatatatatgtaactagtacaagaaaagcaaaggaatgattaacaaaaaatattgtggggtgaaggagtgtgatttgattagttatggtacacagatgcttcagagtcagctgtattaatacatttcttaagctggttggttggtacatagaaactcattttataatgaaaaaaattgtatgtacagtagtccttagccacaggggatatgctcmaaaccccccatggatgccccaaactgtagacagtacctgaatagactatgt

SEQ ID NO: 857040 - DNA, 614 bp, Homo sapiens
aatattattttaatctctaggaaattacttgggagaataggagagaaacaaggccatgccctttctctaggttcatttaataactgttgaattaacagaacatgcttaagctatattgcttatagcattattgttcataaattgcaaaaactagaaacaacataaatgtatgtactttgtgacttattaatacaatggatactatgtagtggtaaaaatgaatgaattacccatatagaccataaaatggatgaattgacaaaagagaagacaatatataaggtgattctatttacataaagttcagaaacagacaaaattagaaagtattatttaggggtatatatatatatatatgtaactagtacaagaaaagcaaaggaatgattaacaaaaaatattgtggggtgaaggagtgtgatttgattagttatggtacacagatgcttcagagtcagctgtattaatacatttcttaagctggttggttggtacatagaaactcattttataatgaaaaaaattgtatgtacagtagtccttagccacaggggatatgctccaaacccccmatggatgccccaaactgtagacagtacctgaatagactatgt

SEQ ID NO: 857041 - DNA, 614 bp, Homo sapiens
aatattattttaatctctaggaaattacttgggagaataggagagaaacaaggccatgccctttctctaggttcatttaataactgttgaattaacagaacatgcttaagctatattgcttatagcattattgttcataaattgcaaaaactagaaacaacataaatgtatgtactttgtgacttattaatacaatggatactatgtagtggtaaaaatgaatgaattacccatatagaccataaaatggatgaattgacaaaagagaagacaatatataaggtgattctatttacataaagttcagaaacagacaaaattagaaagtattatttaggggtatatatatatatatatgtaactagtacaagaaaagcaaaggaatgattaacaaaaaatattgtggggtgaaggagtgtgatttgattagttatggtacacagatgcttcagagtcagctgtattaatacatttcttaagctggttggttggtacatagaaactcattttataatgaaaaaaattgtatgtacagtagtccttagccacaggggatatgctccaaaccccccatggatgcccmaaactgtagacagtacctgaatagactatgt

SEQ ID NO: 857042 - DNA, 632 bp, Homo sapiens
gctggccctctcccaggtgccatgggatcctcagtgccttcttgaatctgtctggtctcccatttgggtccctagttacctccattagactgaagctgctgctctgacagctgccagctctgtccagcagggcacattttgcctgggacgctgccctctgcttgtgcccctgcctgtgcctcctgtgttaacccagcagaggctttccttcttccaactcaagaccctcctgacttgaacctggaatagtcctctcacctgcctgcctccctggctatgcatgcttggtttgctgaccactaaatgtcagttaaaacttattctcttctcagataaacttgctctgcaccccttgtgcatccacatctcactcatctacttccaggcagtcttgagagctgacaccctctttccctggctgggtcacactgtttccttcccaggatcagaaatagacacgacctccatttttacctgtaaatcccattcttccttttacactcaccctctggtctcctggatggagagtggagtcatcctgtttayagcaacaagttggcaattgcagcaatgccctaagcatcctccgtgcctcaggcctcccaggccctcatctgtattccacagttcag

SEQ ID NO: 857043 - DNA, 575 bp, Homo sapiens
taccttatccatatccgttccttcacctccattttatctctagcccatcattggctctagagttcctccagaagaattcacaaattccatagtctggtattcaactccccttaaaatctagccctgatccatatccccaaatgtaataagtggtattctttaatctgaatatcatactccagcagaatatattttctgaccagaccagagacatgccatagaacattctgcctctgtatcttttctcatttcatgcccctgccaacaatgctcccctcccactgcagcctttagagttcaactcaagttccacctgctccctgatgccccttcctgggctcagcctcccactggccctgctcatggccactgcttgccccttgtgggatggggagccacatcctgcatgcagagccagagcgaatcaatgagtgaggtgtgctccttcaagggaccccgaggagagccactgcgtcctctttgctgattcccccttgatggcatgtgcctgtgctgatgacttyggttatgtgcttcaattcctgttctggaagggggcttagagccttggccct

SEQ ID NO: 857044 - DNA, 530 bp, Homo sapiens
ctgttacaggggtgagactgttatacctgggaaattcacagctcacttcattattcacttattcaraaatactcattgcaaacctattacgtgctgcactcttccaggcacctgggatgtggcagtgaaggagacagaccagctgtctttgggcttcctcctgatgctcacgttccagtgcagtcaagatctttaccaccatcgacattctaataataaacacaactcctacgttcacagagcttcagagtttacagagtgtgttgatgctcattagcctacttgatcctctccaaaaccgtgggcagtaagaattattattatcatctttcataaatgctcacaatgacattttttttctcattttaacatctctgtcatcaggtgggtcttgcaggggatggcatgctgtaatgaaattggtggcccttattttctttcttagtgttaaataaaagaatggtaggtcttacaatccatgccttagatttaataaaatacaaaactatccctgttttgcagatgatgaa

SEQ ID NO: 857045 - DNA, 458 bp, Homo sapiens
cagtgatccttcctatctctaaataagcttagatcatagtctctagttcagtttagtacaacasccatttattgagtatctatgacgtgtcaggcactgttctgtgtgctagggttgcaaaatgggtaaaacatcgccagtccttaaagagccagggtaattgactccgatttacattgggctttagttgttaggtgtcagtgcattgtattttctcaatgataataaacattttgttggtaacagaggctgaatttaatttttttgtatctttccagaggtgattctagtaaattttcagtttatctcactttgtcacttgaaagtgagttaacatttcttaaacactctctttgtgtcgaggcatttttaaaaaaatgtcttatttctagtggccctaggaacttctggaaaagtgtcagtttgtactacagtagttattctggaagaaagagaat

SEQ ID NO: 857046 - DNA, 666 bp, Homo sapiens
tggctataaatactttatatttaaaaattaaaattcttgaattataccctgtattttgcctttttttctcatgtaactattttaatgaggtatcattcacgtaccataaaatttaactttttaaaagatacaattcagtgtgtcttagtatattcacaaagttatacaactatcatcattatgtaattccagaacacttttctcaccccaaaaagaaaccctgtacccattagcagcagtcactcccattcctccttccctcagcccttggcaactactaatctactttctgtctttatggaattgctaattctggacattttatacaaatgtaatcatgtactatgtggccttttgtggctggtttctttcatttagtatagttttcaaggtccatccatattggatcatgtatcagtacttcattgctttttgtggctggataatatttcatttattaatataccacgttttgcttatccattcatctactgatgggcatgtgtattggaatactactatgaacatctatgtacaagtttttctgtgtatatatatcttttttttttttttttgagacggagtctckctccgtcgcccagggtggagtgcagtggcgcaatcccggctcactgcaagctccgcccgccaggttcacgccattct

SEQ ID NO: 857047 - DNA, 438 bp, Homo sapiens
ctcttttcataaagatattaaccccatcatggggcccaaggccccacctccatagaayatcacgctgagggtcagggcttccacatatgaatttgggggagggcataaacgttcagtccataataagggggagagtggaggaggcaagttaggaggcttctccagtaaatccttgagagagatggtggtggtttgaaccccagggttttggtaattctttttaaaatttctttaaattttagattcggaggcatgtgtgcaggtttgctgcatgagtatcttgcataatagtgaggtttgggcttctagtgcacccaccacccgaacggtgactgtactcagtagataatttgtttaaaccctcaccaccatcccgcccattctccccgcttaaggactccccagtgtctattatttacatctttgtgtctatgttta

SEQ ID NO: 857048 - DNA, 642 bp, Homo sapiens
cttcgagaccaacacactccggcgagactgacatgatggctgcctaaaccaaactcactttttctcatcatgctsacatggccccataaagcaacagacaggaaagccagcccaccggccaactggagtcatgggtcagatgggccatgaccttggtttagtagcagattctgtcctgcagttggttatggagccccgcacgaccccagttcttgaacagttctgaaagtagtcaagggctactttccccccatgggtatgtcatgggactcgaacccagtgctctatccttagcctgcatcgtttataaagcattccctcagtcatcgtctcagtcctgaggaaactgacggagatcccagatgcctggctgccctcgcgttggtcacctgcttggcatcttcgatggtttctgctcatttcacttgctatcaatcaggttctgagaagagtttcaagaacatgcaccctgatggccagcccagaccccatggccgtgacatgcccctcactgcctggcccagggtttgttaaagatataagaagctgttggaaccagctgtgaattttaaatacaggtacgaagtgagattaccacaggtagcttcttaatgctttctctaaacccatccttaaaactct

SEQ ID NO: 857049 - DNA, 387 bp, Homo sapiens
aaactctgtctcaaaaaaaaaaaaaaaaaaattgtgtgatgtagctgaagtcgtgcacagaggaaatttataacattaagtgcttatattagaaaagaaaaaagtcttggataacttatctaaattttcactttaagaaactaggaaaagaagcggtaatgaaacccaatgcaagcagaagaaaagaaataataaagatgaagcataactcaatgaaattaagaacataataatagagaaaaaccaaaactatccaaagaactcagcagcaacaaaaaccccaattaacaaatgtgcaaggacttgatagacatttctcygaagaaaatatgcaaatagccaacagcacatggaaagatgctcaatgtcactcatcattaggaaaat

SEQ ID NO: 857050 - DNA, 451 bp, Homo sapiens
cttatggaaaaataagggttggcacaaaatggggtgatgatgatgcttcgttcaaccttacctgcacacaatggtctactggaaagggcacagatayggcaactcatcccccaatccagcatgtaggttctctccactctgcctacactatcccatcaagagaacgagctactcacttgaccaggactcatctggagcctgtttcaataggctaccaaggagaacagatgttaaagaagaaaccttcaccaacttcccagtagtcaaatgcataaaatgttcttcttcttggctcctaagtgctcctacagaatttctataccaatgatgaaaatattaaaagtataagatgtcctaatgtgtcttaagaaagatcaatcttaacactgaaaatgttgtgaactcgtaaccaagtttcatttcttttttcctccatggaaatctctcctgg

SEQ ID NO: 857051 - DNA, 451 bp, Homo sapiens
cttatggaaaaataagggttggcacaaaatggggtgatgatgatgcttcgttcaaccttacctgcacacaatggtctactggaaagggcacagatatggcaactcatcccccaatccagcatgtaggttctctccactctgcctacactatcccatcaagagaacgagctactcacttgaccaggactcatctggagcctgtttcaataggctaccaaggagaacagatgttaaagaagaaaccttcaccaacttcccagtagtcaaatgcataaaatgttcttcttcttggctcctaagtgctcctacagaatttctataccaatgatgaaaatattaaaagtataagatgtcctaatgtgtcttaagaaagatcaatcttaacactgaaaatgktgtgaactcgtaaccaagtttcatttcttttttcctccatggaaatctctcctgg

SEQ ID NO: 857052 - DNA, 587 bp, Homo sapiens
gaggagtgaatgaagggggcggagcatagagctgtgtgatcagagcatgcctgggagatgaggtggcctcccagaggaagaggttagcttctgggagcttgctttcatcacaggtaaccctcaccccttaacttagacttgtgtctgctcccaggactcgaggaatttgtcctctaattaaggatctctgcctcaattaaagtaccagttgctggtactttacttccctcctgttcctttgttctaagtttgctggaataatttcctttctcagtttgagcctgacctcaacagttagagggtatagaaaatagtttacagttgactctggaacaacgtggggattggaggtgcgggggtcacctcctgtgcagttgaaaatctgtgcatgtcttgtagtcctagatactagggaggctgaggcgggaggattgcttgtgcccaggactttgaggccagcttgrgcaacacagcaagaccctgtttcttaaagaaaaaaagagaaaataatgtatatagcttttgactcccccaaaacttaactaataatagcctactgtagactggaagccttcctgataacataa

SEQ ID NO: 857053 - DNA, 607 bp, Homo sapiens
attgccaacatgttgtgcaaactttagtacataaaatagtttgaaagaaaaarctgctttgatgcattggcttcgattttcatactcagcctcactctttgccttaaattcaacccatgtagaacttaatagaaatcatctgttttttccccaacacacattttctcctgaagggcatatgaaggctgtggtaaaaatcgcacattctcagctgatagatgagagtatgtgtgtatgtgtgcatgcatgcatgtgtgtgattgtgaaagaattaggctatttccatctaggtagtctttcacataatagaaaacccagttttctagacaaaccgtagttaaagattgatttggcagcaaggaatagtcaatgactggttcaaatcatgaacttgcatgatctttcattttacatgttctttttctgtttttacctacaaaattacagtgtttggttctaacctacaaaataggtttcgcatccaatcctcctgggttttaaatcaattatgagtgcacaataacgtatatttattgtgtactcctagatagttttccacgtttgtgagtgtgtgtgtgcatgcgcatttgagatttttaaaagtctt

SEQ ID NO: 857054 - DNA, 607 bp, Homo sapiens
attgccaacatgttgtgcaaactttagtacataaaatagtttgaaagaaaaagctgctttgatgcattggcttcgattttcatactcagcctcactctttgccttaaattcaacccatgtagaacttaatagaaatcatctgttttttccccaacacacattttctcctgaagggcatatgaaggctgtggtaaaaatcgcacattctcagctgatagatgagagtatgtgtgtatgtgtgcatgcatgcatgtgtgtgattgtgaaagaattaggctatttccatctaggtagtctttcacataatagaaaacccagttttctagacaaaccgtagttaaagattgatttggcagcaaggaatagtcaatgactggttcaaatcatgaacttgcatgatctttcattttacatgttctttttctgtttttacctacaaaattacagtgtttggttctaacctacaaaataggtttcrcatccaatcctcctgggttttaaatcaattatgagtgcacaataacgtatatttattgtgtactcctagatagttttccacgtttgtgagtgtgtgtgtgcatgcgcatttgagatttttaaaagtctt

SEQ ID NO: 857055 - DNA, 663 bp, Homo sapiens
cgattttcatactcagcctcactctttgccttaaattcaacccatgtagaacttaatagaaatcatctgttttttccccaacacacattttctcctgaagggcatatgaaggctgtggtaaaaatcgcacattctcagctgatagatgagagtatgtgtgtatgtgtgcatgcatgcatgtgtgtgattgtgaaagaattaggctatttccatctaggtagtctttcacataatagaaaacccagttttctagacaaaccgtagttaaagattgatttggcagcaaggaatagtcaatgactggttcaaatcatgaacttgcatgatctttcattttacatgttctttttctgtttttacctacaaaattacagtgtttggttctaacctacaaaataggtttcgcatccaatcctcctgggttttaaatcaattatgagtgcacaataacgtatatttattgtgtactcctagatagttttccacgtttgtgagtgtgtgtgtgcatgcgcatttgagatttttaaaagtctttttatagtattagtccctgagatagtgtagcatgccagtgcttaagtatggataaaacttcttggtccytgttttaacccagcacaggactgccagaccaatgaaaacatgtttgtattctttttataa

SEQ ID NO: 857056 - DNA, 516 bp, Homo sapiens
catatcaaaattgtccaagtgggacctgacctttgggcctttggatccatgttgcattcatagccatttagatctgaccccatttcaagtgttcagaaaaatgagaaacaattttacaatagcaaaattgggccctccaacccttccccacaaaattgaatgaaatacaaggaggaaaaacaaatggagatatttgtgagaatgactgacttccttctgcaaacagaaatgggcaagttatcagagttaaaattgccttataaagtatctttatacagcagaagagatcatcagaaatgcattttttggctcaaatttccttttatttctcccttgggatctctctttctgactttttaccccaactctctctctcttttttttttttttttttttwgagacagtctcgctctgtcacccaggctggagtgcagtggcatagtcttggctcactgcaacctctgccttctgggttcaagtgattttcctgccccagcctcccaagcagttgggact

SEQ ID NO: 857057 - DNA, 516 bp, Homo sapiens
catatcaaaattgtccaagtgggacctgacctttgggcctttggatccatgttgcattcatagccatttagatctgaccccatttcaagtgttcagaaaaatgagaaacaattttacaatagcaaaattgggccctccaacccttccccacaaaattgaatgaaatacaaggaggaaaaacaaatggagatatttgtgagaatgactgacttccttctgcaaacagaaatgggcaagttatcagagttaaaattgccttataaagtatctttatacagcagaagagatcatcagaaatgcattttttggctcaaatttccttttatttctcccttgggatctctctttctgactttttaccccaactctctctctctttttttttttttttttttttragacagtctcgctctgtcacccaggctggagtgcagtggcatagtcttggctcactgcaacctctgccttctgggttcaagtgattttcctgccccagcctcccaagcagttgggact

SEQ ID NO: 857058 - DNA, 512 bp, Homo sapiens
catatttttaaaccaccagatcttgctcgaacttattcatcaccaaggagatggtgctaaaccattcatgaaaaatctacacccatgatccaaacacctcccagcaggccccaccaacataagatttggaggargcatgcaaactatattactggggatcacttttttttttttagatgaagtcttcctctgtcacctgggctggattgcagtgacgtgaccacagcttactgcaccttcaaacttctgggcttaaggaatcttcccgccttggcctcctaggtagctgggaatataggcatgtatcaccatacccagctaacttttaaactttttgtagagatggggccttgccatgttgctctggctggtctcaaactcctggcctccagtgatcctcctaccttggcctcccaaagtgctgggattgcaggtgtgagccactgcacccagacaatatcctttcctttcctatccaaataagaataatctatcctcatcttgttgtttgt

SEQ ID NO: 857059 - DNA, 712 bp, Homo sapiens
catactcatacacgcattctctcacacacacactcatacactcacatacacacattcaaacasaaacaaccccccatacaccctccacacactcctctagtgtctgggggcttcagactctcacagcttgaagaggagacacgcatctctgctgagcgagcctctctacttctctgattggtaaacggtggctctgaacggggtctggcctcttccaagaagcaggtggttttttggcagaatcaaggggtcgcatggattttctctgcttgttttattaagacttcaaaatacaaatccctttaaaacaatcagtgaaccacttaaaccaatgctaatattatcctgtgggatttatgcaaaattatgtgaccaataaggtgggtctcttttgaattcccttactgttctgtctggccagtcctgctgctggagtcaccccaaaagctgtggcaggggagtcactgcaggggcagctccagcccctccagagagggggtcagtcaagagcatttgtcaggggaggtcaggagggctgtgtccctttccctcccttcatctttttcagaggatgccagccaaggccacaacgccagagggggcagacgtaggtaggtccaagccacagtcacaactgagagaagggggacacgcaggcatgtctgcagcgagggcccaggccgtggagctcacatggggctgtgaggggtta

SEQ ID NO: 857060 - DNA, 712 bp, Homo sapiens
catactcatacacgcattctctcacacacacactcatacactcacatacacacattcaaacagaaacaaccccccatacaccctccacacactcctctagtrtctgggggcttcagactctcacagcttgaagaggagacacgcatctctgctgagcgagcctctctacttctctgattggtaaacggtggctctgaacggggtctggcctcttccaagaagcaggtggttttttggcagaatcaaggggtcgcatggattttctctgcttgttttattaagacttcaaaatacaaatccctttaaaacaatcagtgaaccacttaaaccaatgctaatattatcctgtgggatttatgcaaaattatgtgaccaataaggtgggtctcttttgaattcccttactgttctgtctggccagtcctgctgctggagtcaccccaaaagctgtggcaggggagtcactgcaggggcagctccagcccctccagagagggggtcagtcaagagcatttgtcaggggaggtcaggagggctgtgtccctttccctcccttcatctttttcagaggatgccagccaaggccacaacgccagagggggcagacgtaggtaggtccaagccacagtcacaactgagagaagggggacacgcaggcatgtctgcagcgagggcccaggccgtggagctcacatggggctgtgaggggtta

SEQ ID NO: 857061 - DNA, 523 bp, Homo sapiens
gctagtactggccaagaggctgggggcagaggtgcagtgtgagacttctagcctggagcatttaattcttagtacaaggctccctagcattcttstcccgctgttccctgcttggtgatactcgaggtaatgcagcccccattagccttagtcttagagcaagtttgatggaaaacagagcaccccacacctccctgcagatgtagcatgagtgagaaaaacaactactgatgtttgaagttaccaagatttaggagttgtttgttattgcagcaaaacctcacctattctgaccaatcatggtggaatttctgtgtgtgtgtgtgtgtgtgtgtgtgtgtgtgtgtgtgtgtgtgtgagagtggtagtaaaaaagagttccttcttcaccaaaaagaaaaaagagtcagcacctttatgtgggttctcatattaataaaatatttttactggtttataaaatagaacatctctgagaatctgtagcttacagaactacagtgtgggatgtctataaagacca

SEQ ID NO: 857062 - DNA, 500 bp, Homo sapiens
catgtaagactagctccacatttggaagtaaatcaatgtgatccactgtgctaacaggctgtagaagaaaactcacacaattgmatcaattgggacacaaagaaagcatttggaaatttttaccacctgttcataatttttaaaaaactcagcaaactaggattagagtgtcacttcatcatctacaaaaaacctatagccaattttaggcttaatggtgataactgaatgttttcccctaacatttggagcagttacaagtgtccactctcaccactcttcaacataatgaagttctagccagggcaataaggcaagagaactagaagatatacagatgagaaatgaagaaatatttgcacacaccatagtagtctatgtataaaatctcaggaatctacaacaaaaacccaagaactaataacagtgagttcagcaaggtctgaggatttagatcgacacacaaacatcaatcatttctcaaccttacatctgattag

SEQ ID NO: 857063 - DNA, 610 bp, Homo sapiens
taccacgtcatccagagaaaactgggatccttgagcaaagacgcttccgttcatggcratcatggcacagccgtcgtagtacaggcggtccccgtcacaacccttctggttggccagcaagtaaatcccaccgttctgaaaaaggaggaccccatagcggagtggtcagctgtgtccaccaccctcacctgccacctgcccaagtacaggaacctccgccgagtcccgctaggtcatcctgagtggtcccaccaccgcagagataacgcatatgtgtggggaagcacagacctgtgaagctgcggcgagccccgccttgctaggtgccaggctctacacaaaacatttgtttttccttcacaacaaccctacaaggcagaccccatcacctccctcaggcatgatgaggttcagacaagccaaagaaagctctgcatgatgaagccaagactcaaacgcggctcagctagacccacatctgccccgtgaaggatgaaccagcactggccctcgcacgtctcactgcccaacagcaggagcagcaaacgtacgggtgttccctacgcctcaccatgatgcccaacggacaagggagcacgttccggttcct

SEQ ID NO: 857064 - DNA, 563 bp, Homo sapiens
agagaaattaagaccagctagttgtttaccaagacaaaccccagttgagttacttacctagggatccgtcccaggctaaagwctgctctctatcatcctagaagcaggaaaaaaaagcccctcatcttccctgttggaagttaactcaaactccataaaggagtttcctgccttccatcatcatggaagtaggaaaaacttgccttctgtgtgttggaatccaacaaaaggagttgtacagcaaaataaactttagatctcaaccaaattttgggagatcgtggattctctggaggggttgcttccaagcctcagcaaattgtcctattggtttgagccataaagatagcacaagctagtaccaagcactgatagatttgtcaaaggtcaggggcacttccactcagaattgctccgtggttactaaaatgtgaaccccaaatattagagacaggtctcagttaatttagaaagtttattttgccaaggttgtggacatatgcccatgacatagcctcaggaagtcctgacgacatgtgcttaaggtggttagagcacagttt

SEQ ID NO: 857065 - DNA, 610 bp, Homo sapiens
acaaaattacataagccccattgagagaaattatcctctagaaaaaaaccacaaatattcataaattcaaattttttcatgcaagtacaagttcacagactcctttaatatgtatgagagatctataaacacaaattaagaactttaattctagacagaaatttatttctccataaatctatagagataaaggcctactataactccaattacaaacccatcagcagtctatcctagacaagtgtttcagaagcaaagcattcctatttatgagaatacattaaacattgtctgtctttcaagcactaatgcttagaaagtggatgacctttattcagccccagtcatcggtaactcagatacttagcacttaccatgtgtcaggaaacctgccaaaggcctcacatgcttcatcttatttcacttttaggataattctatggcgttcatattatccccatttgatggatgaaacaactgaggagttgagaygttaactgtcccaaagtcactcaggtgttaagtggagtcaaaccaagaactatctgacttcaaaacccatgctcttaattactatacaatactgtttcccttcgttgtaaaaatcgca

SEQ ID NO: 857066 - DNA, 602 bp, Homo sapiens
aaaaaaaaaaagaaaggaataaatgaatggctacgccataggcagagcagcagagcagcggcatggggtgctcagctgtttatacttattgttacttcttgattatatgctaaacaaggartacattatacatgagttttctgggaaaggggtgggcaattcccaaaactgaggacttttccccttttagatcatacaaggtaacttcctgatgttgccatgacgtttgtaaactgtcaaggtgctggtgagggtgtcttttagaatgttaatgcattataattagcgtataattacagtgaggacgacccgaggtcatgttcatcaccttcttggttttggtgggttttagccagcttctttactgaaacctgtttctgatggcgaagctcctggcctttcccactcagcatctccatgattcctgctgaaattagacagccccgttccaacatccctcttgtcatctccaactgctatcctggctatcaccgatctcttgtaggatggtggtgcttcttgtaagaagcttcacaccagtggcttttttaatgcattcagggaagtggtttttcaagtttgtgtgtttgttttagccctcc

SEQ ID NO: 857067 - DNA, 602 bp, Homo sapiens
aaaaaaaaaaagaaaggaataaatgaatggctacgccataggcagagcagcagagcagcggcatggggtgctcagctgtttatacttattgttacttcttgattatatgctaaacaaggagtacrttatacatgagttttctgggaaaggggtgggcaattcccaaaactgaggacttttccccttttagatcatacaaggtaacttcctgatgttgccatgacgtttgtaaactgtcaaggtgctggtgagggtgtcttttagaatgttaatgcattataattagcgtataattacagtgaggacgacccgaggtcatgttcatcaccttcttggttttggtgggttttagccagcttctttactgaaacctgtttctgatggcgaagctcctggcctttcccactcagcatctccatgattcctgctgaaattagacagccccgttccaacatccctcttgtcatctccaactgctatcctggctatcaccgatctcttgtaggatggtggtgcttcttgtaagaagcttcacaccagtggcttttttaatgcattcagggaagtggtttttcaagtttgtgtgtttgttttagccctcc

SEQ ID NO: 857068 - DNA, 613 bp, Homo sapiens
attccagggttacctcatgaaccaaaattattgttggaactccagctattatatcttcaggaggaagggaagaagaggagcatactctctctctttgaaggatacttttttggcagtcayatgtcattttttttaacttacatccagttggctaaaacatggatggtcccatggccatacgtaggtaaacaagaggctgggataggcagtctcatctgtgaggcctttgtgctgagctaaatttggaggttctgtcactgaggaataggagagaatgggtattggagtcatagcagcttttccccttgggtacagatgaatcatttaaaagaaagacattttccacctaaagtctgcaatatttcacttatgccagagacacccttagagctgcaaatgcgatgaccaaaatagaaaacacactgaaagagaggaggtaatacattgctgcagaccaaaaaagagaattgtatcttggagcactctgaactcttgagtttagctttctatttttttgtgtcttgtcttgggtcagatttttataatcctaatctggaaccataaaatgaaagtggtacatttaatattgacaagatcattaagtgatggggaa

SEQ ID NO: 857069 - DNA, 605 bp, Homo sapiens
tgccaacatgttgtgcaaactttagtacataaaatagtttgaaagaaaaaactgctttgatgcattggcttcgattttcatactcagcctcactctttgccttaaattcaacccatgtagaacttaatagaaatcatctgttttttccccaacacacattttctcctgaagggcatatgaaggctgtggtaaaaatcgcacattctcagctgatagatgagagtatgtgtgtatgtgtgcatgcatgcatgtgtgtgattgtgaaagaattaggctatttccatctaggtagtctttcacataatagaaaacccagttttctagacaaaccgtagttaaagattgatttggcagcaaggaatagtcaatgactggttcaaatcatgaacttgcatgatctttcattttacatgttctttttctgtttttacctacaaaattacagagtttggttctaacctacaaaataggtttcrcatccaatcctcctgggttttaaatcaattatgagtgcacaataacgtatatttattgtgtactcctagatagttttccacgtttgtgagtgtgtgtgtgcatgcgcatttgagatttttaaaagtctt

SEQ ID NO: 857070 - DNA, 609 bp, Homo sapiens
gatgagaaggttagctgggcaggcatatagaaggacgccatggcatgtgcagaagcacagaggcgtaggagaccgtggtgttcgggaaaataagtactgtaatttaatgatactgagcggaaaagcctggttgattgtagcctctggtcttcaagcgccttgaatgccaagcaaatgactttataactagataaaagagagccactggagaaatttgagctgaggcaagaatctgcctctcccttaactacctcagtggcttgttttctacatttgattcagaacaccactcctgaagttgtctttgggcattgctttgataacgtgtctaccagttagaccctaaatactcagacaactggtttcatatgcatgatatgcatttaggtaaaataattccgactctattgacagaaacgcatgtgtgtatatcagggtttcacaaactttttctttaaagggccagatagtaaataatttaggctttgtaggtgatatcatctctcacatttattcagctstgctttgtagccatggacatataacaaacccgtttatgttacaataaaactttttatggccactgaaatttcaatttcatatagtttt

SEQ ID NO: 857071 - DNA, 528 bp, Homo sapiens
aaaataattgaactcagtctgtaaacaatcagcctatttcccaaaaatgaaaagacatgtcaatgcaaagaagcagtagtgccaggtgtgctttatagaaggaaagaactgtttatttggtatatgtttatggttgtagcctattatttattaataatgatcttagattttaaaagacatcaactatttagctttgattccctttgacattattggcatagaaaaagaaatctggatatctgattccctccatcttgttttgttttgttttgttttgttttaaatcattctggcatctctattctctttgccaacacccaaaaatagcactcgatcaagccacagaagtaatgaattaagcatggtggtagatctgtctgaaagatgtggaccacttttctagcaaacaggtatcccatgaagtgttgggagtctgtcctactcayagtaaagtggtcatgggtagttcctgtgctttgcctcgtgggatccaacattttttgcattcctaccctaatcacccaaaag

SEQ ID NO: 857072 - DNA, 558 bp, Homo sapiens
attttcatttcattcacagggattttatttcacagacttgtctcctaacctaatctttcccacaacctcttcctgcaataaagttagaaaacatttttgaaaagtcactcataatgtatctgtaacttaytattttaaattaaggaagaaacacaatttgaaaccattttctcatgtaaataacacgcagccaccttctctgtctgggtaggtagggaggattcagctaagcatcaactggttacatgtgctatgatttccaacagataaacactggttctatctgaaaacaatgacctcatgcttttcttcctacaaacaagtcaagttaatacaaagtcatattcatttcagaaaacattttcaaaccatttttgttgttatattttaaggacctttcttctcttgttcaaacagtcctgatattataccaaaatgtagcatttgcccttttataattattttacactgtcagttttacatcaactaatacttattatcaaacctaaatattcaagattatcttaaaatgatgctatatttgtcaaattatccaat

SEQ ID NO: 857073 - DNA, 558 bp, Homo sapiens
attttcatttcattcacagggattttatttcacagacttgtctcctaacctaatctttcccacaacctcttcctgcaataaagttagaaaacatttttgaaaagtcactcataatgtatctgtaacttattattttaaattaaggaagaaacacaatttgaaaccattttctcatgtaaataacacgcagccaccttctctgtctgggtaggtagggaggattcagctaagcatcaactggttacatgtgctatgatttccaacagataaacactggttctatctgaaaacaatgacctcatgcttttcttcctacaaacaagtcaagttaatacaaagtcatattcatttcagaaaacattttcaaaccatttttgttgttatattttaaggacctttcttctcttgttcaaacagtcctgatattrtaccaaaatgtagcatttgcccttttataattattttacactgtcagttttacatcaactaatacttattatcaaacctaaatattcaagattatcttaaaatgatgctatatttgtcaaattatccaat

SEQ ID NO: 857074 - DNA, 445 bp, Homo sapiens
tgtcattgatttatcaaatactatacatatgttggctaattgtaagaaacaaaagaaatggatcattgtctggaagctataactcccaagttaacttcagaccaaatttttataattttattgcatatatrtgaatgcaactgcaagaattaataataaaatatttcaaaataagatgaccaaaatgaaattataagttaaggtagacagaggttgaattacataatgtaaatcctcttcagattttcacaaaaagaactaagtgctgtgggaaaagaggtgtactgtttccccgtaattgcattgtgtcctaagcaattcttgatgaggtaggtttgcagccaagaaggcaagttgagctttatttacctcttttcaatgggtgctatctcttggatgtgctcagaccctgagaagcctatggtctacattttttattttaagt

SEQ ID NO: 857075 - DNA, 495 bp, Homo sapiens
aaggctggactaattatctctagtgtaactcccagcttcagcgtgctcagattgtgacctaattaattcaaaagttcaatcatttgccatattcatactttaactcacaagaagattatatgccacagacaataaagctctctgcagcatttcctcaaacaaagtacattgtattctatactgttcactagccatgtgagaccttcagtgaccaatttacttttcgggtaaatgagcatctattgggttcttctgagaaagcttgttagccagcattttggttaacagtatgcagtgcagaaggggacaaggcatgcaggggcaaatgtagcctccctcagaggccactcaggggaaagatacagaatccytgagcctgttccagccactgacagtcccttcctgggctgctagccaaccaacagcatagacaaataactctgctgccggaaatgtgagatgacacctctgtaatctactgaaggatccctacat

SEQ ID NO: 857076 - DNA, 495 bp, Homo sapiens
aaggctggactaattatctctagtgtaactcccagcttcagcgtgctcagattgtgacctaattaattcaaaagttcaatcatttgccatattcatactttaactcacaagaagattatatgccacagacaataaagctctctgcagcatttcctcaaacaaagtacattgtattctatactgttcactagccatgtgagaccttcagtgaccaatttacttttcgggtaaatgagcatctattgggttcttctgagaaagcttgttagccagcattttggttaacagtatgcagtgcagaaggggacaaggcatgcaggggcaaatgtagcctccctcagaggccactcaggggaaagatacagaatccttgagcctgytccagccactgacagtcccttcctgggctgctagccaaccaacagcatagacaaataactctgctgccggaaatgtgagatgacacctctgtaatctactgaaggatccctacat

SEQ ID NO: 857077 - DNA, 583 bp, Homo sapiens
ctctgtttttcagttttttacttagataatcctacaagttcctgaatggcacataataggagctcaatatatattggttactctttagggaacactgagggacatttctttctgtcrttatttccggtccttgtttgctcagaagaaatattttctattccattctctctaatcatttaaagccaatttaggtcatcattctttaaaatatgtttctattttgatgattggatttttaaaaaataatggtcacttttagaagacaaagttgtttaattctgtttccaatcctactaactatgttttggagcatttcgaagcagaatgtatcttatagaaatcatttgtctattcattttatattatatttctattcattctatattttttgtactaagtttttttcaaaaatagtgaatgacaaaaatgaatgacagacatagatgagatataatgttaggaaattgataaatctttattaaactttattctgacttttgtatttattttatatcacctctaactccagataataagaaagtaaaaggttacacaatatttactagtgaataggtcaagcacc

SEQ ID NO: 857078 - DNA, 620 bp, Homo sapiens
catcactagtcatcagagaaatgcaaatcaaaagcacaatgagrtatcacctcataccagttagaatggcaatcatttaaagtcaggaaacaacagatcctggacaggatgtggagaaataggaaagcttttacactgttggtgggaagcattagttcaaccattgtggaagacagtgtgacgattcctcaaggatctagaactagaaataccatttgacccagccatcccattactgggtatatacccaaaggattataaatcatgctactataaagacacatgcacatgtatatttattgtggcactattcacaatagaaaagacttggaaccaacccaaatgtccatcaatgatagactggattaagaaaatgtggcacacatacaccatggaatactatgcagccataaaaaaggatgagttcatgtcctttgcaggaacatggatgaagctggaaaccatcattctgagcaaactatcacaaggacagaaaaccaaacaccgcatgttctcactcataggtgggaactgaacaatgagaacacttggacacagggcagggtacatcacacaccagggcctttcagggagtgtgggggcctggtggaaggatagca

SEQ ID NO: 857079 - DNA, 461 bp, Homo sapiens
gggcaacagcaaggagaggaggataagtatcctacacaggagaaataacgattgctgatttgggctcaatgcttggcccagagcaggcagccaatacatgcttattgattgatggcttgctagttactggtttgtaccaggattgctcaagtaccttctctgatggtttctattagggttagagttgattagcttacataagctacatttgtgaacactttcccagtcccaagccctaccccagccctgtatctcctccattgtagagagaagcagagggatacccagaatacaactactaccaaattctgtaatatgagaattagaattctataacattaatgatacttggccttcatgggtgagggtagaagcagaagacagactaacttaatcaacttratatattcaatcaaaagttaagcctaaacctttttttttccccctctgtaaactgttca

SEQ ID NO: 857080 - DNA, 461 bp, Homo sapiens
gggcaacagcaaggagaggaggataagtatcctacacaggagaaataacgattgctgatttgggctcaatgcttggcccagagcaggcagccaatacatgcttattgattgatggcttgctagttactggtttgtaccaggattgctcaagtaccttctctgatggtttctattagggttagagttgattagcttacataagctacatttgtgaacactttcccagtcccaagccctaccccagccctgtatctcctccattgtagagagaagcagagggatacccagaatacaactactaccaaattctgtaatatgagaattagaattctataacattaatgatacttggccttcatgggtgagggtagaagcagaagacagactaacttaatcaacttaatatattcaatcaaaagttaagyctaaacctttttttttccccctctgtaaactgttca

SEQ ID NO: 857081 - DNA, 558 bp, Homo sapiens
aaaaagatgtttaaaaacgttacaagggaagctatgccttctgaagtctatccttagttgaaacagaaaataaacacmaaggtaccagatccttaaattattttgaaccacagaggttgaaattgttttgtgatcttcagcagaaataaaatctgtacatgattttcttttatgccttttagtttacagtctttattagcaatttcagtgaatttgtagagcatagtaataggtatttactgtccacttatatatatcagcatctggtcatgcacgaaccattaattctatatttctatttcaataattctaatatattatttctataaatgtaatatctgtatgtggcaaagagcctttcttctcaagatcctgaaaagctggttacctgccctttgagtgccacagtcctgaactgcttgttcttgacatcttgcatattacttcagagttccccactgtgcagactctcaggtattaactgtaaaaaactctttacatgccattattatctgtaatctctatctcttctactttaaattaatgtttctagaatta

SEQ ID NO: 857082 - DNA, 595 bp, Homo sapiens
cctgaacaagctacttaacccctctaagtcttgtttttgtctctacctaccttacatgattgttggagaattagaaataatatacgcaaagtgcctggtacccactaaaccctcagtaagttgaagctattgttaaatgggtgggaacaatttcagcaaggaagggaaggaataagagaaaatgagcaaaatgggtgttgggatgaaggtgggagtcagtggaaatgtcatggccagtgcaggattatggcagcctaaggggaatatataatctagaaatggcatatgtgctgccccctttctctcctgcattcatatcagatactaccaatcaatcatgtattctttactgctgcaccaagatatggcctcacaacactcatcactttgttctaagcagccacggtcaattgaagggtattggcatgaagatgaaacccatttgtcacttctgtactaacagtttcttggaggatgagggatgatgtgtccctaagagtacacataatttcacaatttgtgccatgtayccagttaaaataaattggtggaaggaacaggggtgacttatctatgcagtgtgcagcacaatcga

SEQ ID NO: 857083 - DNA, 573 bp, Homo sapiens
gtttactattacgaacattaaatacattttatattgctattaaactgcttcatgtatattaaatgtacattctcaacataggaaactaaacagattaatcctatattctttgttatcttttacccttttgaatatatagtaagagaggaatgtgaataaaccagttctatatttgataggcattcataatttttgttaattctttgaggtgagagctgaacaaatatttggtttatatattaaggtaaaacagaagaaaaaataaaacaaatctatacttagtatttttttctggaagaatggctcagcagggctaagcaagattttgtttacaaacctggtttccatatttggtgagcttgcatacaaaccaacaatctttggtaactcatgagccattgtctcctgatgttcttatttctgaccagaacatgaagttggcaaaattatccaaaacakcacatcctaaactactctagttacaaccaagaagcttgatttccaaaacagaaatgtgtaactgttaaatccactaaaaggaaaattcctcatttttaggcaattgattatttt

SEQ ID NO: 857084 - DNA, 570 bp, Homo sapiens
tgagggaaggatcctgcatcgtcacctttctcttgtgcttgagagagggcctggacacagacaagtccccttgaagctaaaggaacctcccaggctctgcaactaccatctccccccgwgggaaaacaccaaattccacaaagccacaggccaatcctctcccctcccactccctgggcccggggagaggaagtcccacctttcccaagggtcaaggcttgcctgctttccaaatggccacttccaggatggctttccagaaaagtctccatgcaggcacacctatatgtttccagaaaagtctcaacgcagtccctgcagtctaaggccagcatcggcccatctcccaaagtcagtgtggtgtggcttaacacaccggctcaccctaaatgtgcactgaaggggccctgaactacaatgaaggggacgccccgagccagcaaacccccgaggggctgggcgtgccaggcagctgtggagccggtggaagcagtgaagttggcagcactggcatcgaatgccagccagggaaccaagaaaaggccactcttagtaagaaagtggtgactt

SEQ ID NO: 857085 - DNA, 533 bp, Homo sapiens
acctcctaactccaaaggctcagtgtctcctggctcggatcctgctttgggaagaaacaggttagtctcctcagaagggaggaagaggctaasggaaggctgggccagtttttccatgaagagccagctagtaaatattttaggatgcatgtaccacatttggtctctttgcctactctgttttttgagacagagtctctgttgcccaggctggagtgcagagtgcagtggcgccatcttggcttactgcaacctctgcctcccaggttcaagtgttctcctgcctcagcctcctgagtagctgggattaaaggtgtgcgccaccacgcctgactcttttttttggtatttttttagtaaagatggggtttcaccatgttggccaggctggtctcgaactcctgacctcaggtgatctacccgcctcagccttcccaactgctgggattacaggcgtgagccaccgtgcctggccctttttttttttttttttttaaacaaccctttaaaaacgcaaaggccattcaagctca

SEQ ID NO: 857086 - DNA, 533 bp, Homo sapiens
acctcctaactccaaaggctcagtgtctcctggctcggatcctgctttgggaagaaacaggttagtctcctcagaagggaggaagaggctaagggaaggctgggccagtttttccatgaagagccagctagtaaatattttaggatgcatgtaccacatttggtctctttgcctactctgttttttgagacagagtctctgttgcccaggctggagtgcagagtgcagtggcgccatcttggcttactgcaacctctgcctcccaggttcaagtgttctcctgcctcagcctcctgagtagctgggattaaaggtgtgcgccaccacgcctgactcttttttttggtatttttttagtaaagatggggtttcaccatgttggccaggctggtctcgaactcctgacctcaggtgatctacccgcctcagccttcccaactgctgggattacaggcgtgagccaccgtgcctggccytttttttttttttttttttaaacaaccctttaaaaacgcaaaggccattcaagctca

SEQ ID NO: 857087 - DNA, 692 bp, Homo sapiens
ctggcctcacctgctgccccacactgtccagacatacctgtggcctggtgttgcccaaacctcccgactagcctgtgcttatctgctgtctctactggccctgcttaaccactgccccaggctgggacagaactgaggcctgctaaattgctgcactctccccatgcccctcagcaccagagacagagccctgcactggggtcagccagcaggagtctggtactcagggccactgagctgggcagctcacccgtgggagcctcagtttcctccaggtcaaatggacctaactatagtaaccccctcatagggtcagcttgtggggactcagcgagatgacatacctgggccgagaaacagcgtcacccttagtcgcggctcctactaaggggggccgcaccttgggcgtgcagatgggacttgaggctgagctcagcctcccgcctgcgctgtaacccgggctctcctgccctgctgggcctcagtttcctccttggcgaattgagaagaatagctctttcgtgcttctcctgcagaaggaatgcaggccccccgtgctggctacagacttgcgatactggggtcttccgtgaaccccgtccttcatggggctgggcatgggaacccactgccctcaaaagccagccctcccccayccttccccctgagccctcccaagccacccacccaca

SEQ ID NO: 857088 - DNA, 623 bp, Homo sapiens
gtaaaggcaggaaggatcctcccctggagtcttagagggagcgyggccctgctggcaccttgattgtgcacttctcacctccaaagctatgacagcatccatctgtgttgttttaagcccccagcctgtgcaggtgcagggcatgacatagctgttatccgatctccaagaactggccccgttgtgcactcagccaagcccatctgccaggttgtcacaagatgtctcaacacaatgaacctcccgactcagtgaggaggcacgcacggggcataggggttgctcactcctgtgtggggctcgcagcacactttgcccaggagtgacacagtgtgtcccacccaccggcgccccaggaacaaaggccaggtcacacctgcacagccagtggcctccatgactgctgcacagtcctggccacagcagatggtcccagaggtggctggcacccctcaggggaccgtcttgctcatctgtccccctttctctccctccatgtcctcttctccctctgcctcctcatccagccttcagtgcagggattctcaactgggggtggttttgccccccacgtacactggcaatgtctggggacatttctggtttgctttcacaacttgggg

SEQ ID NO: 857089 - DNA, 633 bp, Homo sapiens
tggctctgcccctctccaggagaacaggccgcccaaaccatsgctccttccaacagccctaggggctggtgcagctcagatgagagctctggggtttccaggaagccttcataaaacagcttatgatttgagaggctccagcagggatgtgggaacatctcaacttcagccctttgaaaacttgaatggacgtttctaccccacaatcacggtttcatcttaaacatggccagatcaactgctgaaaagcctcttttagcccttgagccaagttaccagtgaaaagttggggtcatttcactggttaaaaactagatcattttggtgacagtaaccaatgtccttatgttttgctttttagctcaaagtcatgatagagaatataaaatatttaaaaagatatttatgagatagtatttaatgagacttggaaagggtcttttctcgtccttcttgccgcttcagtatgaacaataatatatgacacaatatcagccaagcatctgccacaggccagactctgaattaagcactttgcaaaggttacttatgataactcagtgatgcaaatactcttgctatctccattttacaaatggggaaactgaggcctagcttttccatcaggataag

SEQ ID NO: 857090 - DNA, 544 bp, Homo sapiens
aggccacccaacttccacaaggagccccccatggcccttgagcagtagatgagagccggcagtgcttgggctttgaagatacacacagaccaggattccattcccactctgctgcgtggccctgaacaagttacttcccctctctgggctctgggattgcaacagtccccagtgctggtccaagtgaggtggaacatctgtgcctgccagtaatgaggctcctgctctcgccgccgatagcctggaagtattagtattttctaatattagtgggagtaagtcagtgctggggaggaggcacagagatgagtctcaggcatcatgaagatcctctctcctggccacagtagttgggatctggccccaggctcacctgtgctcagcaaagcagaagcctgcactgagcgggacccatcrtccctggcaggcccccccggcttcccgagtgagcctacagggtgggcctccgctgcaccgggcagctggggacctattccttccggcccagcccccgttctcccagagaagagtcctgggatccccg

SEQ ID NO: 857091 - DNA, 544 bp, Homo sapiens
aggccacccaacttccacaaggagccccccatggcccttgagcagtagatgagagccggcagtgcttgggctttgaagatacacacagaccaggattccattcccactctgctgcgtggccctgaacaagttacttcccctctctgggctctgggattgcaacagtccccagtgctggtccaagtgaggtggaacatctgtgcctgccagtaatgaggctcctgctctcgccgccgatagcctggaagtattagtattttctaatattagtgggagtaagtcagtgctggggaggaggcacagagatgagtctcaggcatcatgaagatcctctctcctggccacagtagttgggatctggccccaggctcacctgtgctcagcaaagcagaagcctgcactgagcgggacccatcatccctggcaggcccccccggcttcccgagtgagcctacagggtgggcctccgctgcrccgggcagctggggacctattccttccggcccagcccccgttctcccagagaagagtcctgggatccccg

SEQ ID NO: 857092 - DNA, 507 bp, Homo sapiens
gaaacaatggattagacaaacttgaggtgcagggatcccgcagggcagttcaggggtgtattctccagacggttgaycccaagggaaggagtctaggcagatctgctgcccgtcacctcgtcgcctccctgtcagggcctcctcctcactgtaggtccggggattggggtggttgagcagccccgcttcctcccttcgtgcattcacacatgctgttccttctgctacggtactcttccccgccccaccccaccccaggcggacagaagcacccacaccacgcctgcctgttgccttcctccccaggactagtggcttcttcctcccttctctgggcctcagatggtccctgtcctgcaaagacaccaccgtctgaccacctttagttatgtgtgtcatctcaaggaagcccaagcactcagcacttaataagtgctcaataaacgtggtgttgattgagattggattgagtcggtttgcctcggccagcgacctgctgtatgggga

SEQ ID NO: 857093 - DNA, 543 bp, Homo sapiens
tatcatcctacccctccctctagaggtcccaaagacggagaaaagctttgaggagaggctgatctycaaggctttcctgctgaagtttgtgaattcctacacccccatcttttacgtggcgttcttcaaaggccggtagggacatcttcagcctttccccaacctcgcttctcccaggtccaggagagggctctccctccccacaggttgggggcacctggagcccagggcagggcagacaccgtggcacccgcagccaaagagggtcagggagaaggcctgggccctgctgaggctccagagcagcgggaccctgggcagcagggagtccaggtggcagggaacccaggcagtggggaccccaggcagtgaggaccggggagtgaggacccgggagtgagggccctgggcagtgaggaccctgggccgtggggaccccaggcagtgaggaccggggagtgaggacccggcagtgagggccccgggcagtgaggacccgggagtgagggccccgggcagtgaggactctgggcagagaggacc

SEQ ID NO: 857094 - DNA, 620 bp, Homo sapiens
tttataacaactcaataagctattttatccccattttacagatggagaaattgaagttctgaaagattaggtgacctattcttccagaataastagtaaagctagaattggatgccatgtctgtctggctctaaaacctatgttctgtccatggggccacatcaggataaccattggaaaggcatcccagcctaccacatctctgcttccaggggtatattgggggccacctgcccaatccttgcaccctacttggcagtgaggaagccatggggacctctcattcactgggatctctggactgggcctcagggcagtgacaggcctttcctactatttcagctcacatctgcttacaaattaagtgggaacaaggcctctgcagctgagaagtatgcctgcggggctctgtgctgaactgacttgccagaagactagctagttaaagacctatcacttccacaggagctgatcacaaggcagagaggaagtaactcagcttcccagaaaaagtcttccttggggctatgtgaagaaaggaaactgctccctggttcattcttttctctactacgaaaccccagcaagaggttattctcagtgctcagatgtggcctcta

SEQ ID NO: 857095 - DNA, 614 bp, Homo sapiens
cagatcccctgaaatcaggaggttgagaccagcctggccaacatggtgaaacaccatatttcataaaaatatgaaaatttgggatacggacgcatgcctgtaatcccagctatgggaagctgagacatgagaatcacttgaacctgggaggcagaggttgcagtgagctgagatcacaccactgcactccagcctggccgataaagtgaggctctgtttcaaaacaaacaaacaaacaaacaaacaatgcacaggcaggctttattctttctctctgcgtgtctgcaggatgccagtctatgaggaccaaaagctcattccctgggaaagggagtcagctctaaatgggttttcttcacctctgattattctctcctgtaacggaacccttggagagcctctattttcaagttatttagaaaatgagacctcttacttaaaaaaagtcatgtggtattaaatgtcttcttgtcctcagaatattaggttagtgcaaaagaaattgcagtttttgtcattacttttaatggcaaaaactgcaattagttttgcaccaacctaatacttcttagtcrtacttcccctcagttctccaagccaagaagctcttattt

SEQ ID NO: 857096 - DNA, 602 bp, Homo sapiens
catacattctcatatactttaaatcatctctagattgcttataatacctaacacaatgtaaattctatgtaaatagtggatatactgtatttcttaaaatttgtattattttttattgttggagtgttatttttattgttttttccccaaatatttttgatctgcagttggttgaatctgcaaatttggaacccgagggtacagagggctgactgtatctgctttgttggagtccatctgattcattgtctaaatacaattaattgctccaaaatggctagtccatgcccccttattttataaataaggaatctgagactcagaaaggccaagtgaagtatcttcaatgttcttacctttgttcaagaaccctctgaactaatggtccagagtggggtagggactccaacaagacccggagaggcaggaagctcagtggtgggagtgcaggctcaaagtcctcctccaccttgctttaaatttcataacctcgctttaagttttaagtttcataaccttagtgagtggcttagcccctcgattkccttgtctgtaaaaggcaataggggagatatgatacccacttcttaggtttgttgtgg

SEQ ID NO: 857097 - DNA, 544 bp, Homo sapiens
tttctggggttcttaaatgtgaggatttttatcagggttggaagggtttctatgtgactctaccctaaaggtgggggataaagaagtaggcctccaaatggcaggctgagctggcaaggagggccragagaatctagatggaacacagggcaggcacaggaagagcatgaaggattgaaatgtacattctgtggtattaggcattgctgaattctgcactgtatcatcaacatcaggggaaaataagaaaaagacaggtgctggatttagttaacttgacttattgccatagcctccttgctgatctccccatctcactccaccttctaagccatcatgcacactgcagccaggagaatcctctgaaacatcactttcattatgctgtacgccttcccaggcaccttctcacaactgtctacaagataaagggcaaactcatttgcttagtgtgtgtgcatacgtgcatgcgtgtctgtagggggagtaagaccacagagctttttaaattctctgaagttttactgataaagcactcacatta

SEQ ID NO: 857098 - DNA, 549 bp, Homo sapiens
aggccagactggggaggacattgaacactggatttagggaggtcgatgttactttatatcaataagtaggtctttggaggtttcgaacagtggagcaatattatttagaaaaggaattccatgtggaggacaatttggaaggagaaagactccaggaagacttatataagaacattgcaatggaaagggaaaggagaaatgtgagttagatgtttaaagaagaatcaatagaatttggctactgcaaatgataccattattggaaataggggatgctggaggttggcaaaaaagagatggggccagagaggaggtacaatagtttctaggcaaggaggatctgtttccttgccttttgcagcgtctagaggctgcctgcattctttgactcacgggccccttcctccatcttcaaagtcagctgcatggcatcttcacagctccttctgcctaggtgtcctttgtttctgtyatcacattgcctctggctcaaccctcctgcttccctcttataagaatccttgagattatattgggactatcaaggta

SEQ ID NO: 857099 - DNA, 518 bp, Homo sapiens
ttattagaaaccaagatgtaagggaggtgtccctgttgctgttggggcatctttgctttgcctctaggtcctttcaacagacggagctgaaaaccaacaccacacacacacacacacacacacgcacacacwtcttttaaactctatgattcctgaccttgggaaatccaaggagcatgtggagagcttagtggttgtcatctcagaagggcagttgtgtccctggtgagcccccggggagggactaatagcagatgctgggactccagagctacctacagcaggagagcctccacggcttctgtcggccaccacatccggtgggaccttatcatactttcccaaagtctttttttttttcatccacctccctatatcctcttttgtcctatctccagcttatccaacacgatctctgtttctgctcccacattgagcctcccagttgtatttcattcatgctacaggattgccgagtctcccctataccaaatctgttctgttgccaggccatttca

SEQ ID NO: 857100 - DNA, 666 bp, Homo sapiens
atacttacattctccctgaaaatggtaatgttgtccataacaggatcctcaaaatgcatgaggtaatggaaaaatgaaatttaaatttaaagcaaacaaaattttaacacaaccaagacagttcctattgtcctagttgtattccctaacaatggaataaagcttacatctgccctcaaatgtatcaaatatttcagaaaacatttttctctttagtctgtattatttgatgtctgcttcccctagtctcattcttatttatttaacaccttaattgtgttacttaggtaactaagaagcattcaaggatgacaagtcggaatgatctgatgaaatgaaattgcattgtctttttttttttagacagatctagatcttgcagaccataacagaaaagctgtctcctctatttttaaagtaatatttatattctttacaaggctctctcttgaattttaaggaggaacagtagcgtgactgcctcatcctttccaataacaaaacctttgataatggctcctggaacattagattatkgtttttcctcaataaacgcccattttaagttcacttggaacattatgcctccttgataaaagtctgagttggaactgagtgatctctctcaccttgggctatctgctgaaaccagttttagggctctag

SEQ ID NO: 857101 - DNA, 572 bp, Homo sapiens
tgccccaggacaaaggtggggtcaagggcatccctgttgtcttaggtcaggttccctagagcctgggaaagtgaggatagcaccagggcaagagatctcagcagggctgtggtccaaggtgcagaccagctttagcctgggctactgggagccctggcacttgactcccagtgtcagccagtcattggccaaggactacccttgaattagggggtcagaatcttctgggcaaagtggttcccatggggccaaggccagctgtgagttatcattagcccatagacgcagggcctggggttaggggccctgggtggagcatggaaagcatccttcacactcacggcacaggaaatggcagggtggaatgtcacagcttggttcatttagggaactgcaaactgttcggtgttgctggtgtgcaggaagccaatggggtggatctgagaggcagggccrgctcctagagagcccagggtgatgtgctaagcatatcagacactttactcaagccctggagagggctttcagtattggattaactgctttcaattgcattaagattattggcgtgg

SEQ ID NO: 857102 - DNA, 618 bp, Homo sapiens
ttcaaataactgaaactaggttatgaaaatttaacaaaatctcagaaaagacagcagaacccagtggtcaaataagaactgaacccaactctagagatgttttaccttcagactatggaaaagtaaaatagtaataccctagctctcaaattttgcctaggagtaacaaaagaaacaatgtcaaagtggacaaagagaatttactcatactacatttcaacaaagagatgacatgaagacaagtgaccacttcaagcacaagcaagataatgagacacaaaatggcaactgagcgcatatcacagcaaaaagaataaaggagaggaacacataataagtaaaagacagaggcagaactcaatttgaaagaaaacacaactgaagaaaaagaaacactccacaaaactcaaaagtctagaaattagtaagtacttgaatataaaaaccagcgctcaaagacaaatgataaactgcagaatgagatgaaaatgragactgtagagctaaagaaacaaactgaggagcaaaccaccaccaccacagacccaaataaatgaatcagaaagaatggcccaaaattattatacctaacctagtgctttggtttgaatgtgctcc

SEQ ID NO: 857103 - DNA, 632 bp, Homo sapiens
ccagctcataagcacatgaaaattccacattgatcgtgcggtccctggtgatgatgttgccagtgttgttggcrctttcgatccagagtgtgtttttatacatgatatgcgtgccattggactgcagaacaaggggaagtcagaaatcgttacatctgggagtgagtatgtagcttgcatatcaaatccatatccctgaaagtggagaaatggcttccttccatacataatttagaggccagtataaatcagcatggagctagccttagcatttacttgggggaaaaaaaagtattacaatagatatcagcagcacccttcagtctgataaccttgaatacccgtggaaggtgatttcatctactactgaattctaaccactaccagaccccacttatctgtgggaccccaagctaggaatagcatgaactattgccattgctgggtaatagaaatcttctttttcaatgcttaattcaaaatctcttctccaccaaatccatcaccagacatgcctacaaggaccaacatgaacaagtgcaagtttcacctccttactcctttcagcctctggtaaaagttttaaggaatagagccatgaatagaagacacagagcaagatggaaaaagaa

SEQ ID NO: 857104 - DNA, 609 bp, Homo sapiens
tgctgtctttcatgttgcacatgcctattgctgttttctaaggagcatatttctaagcagatcaccctgaagttggttttcaggacaataaatgtgcaaacactcgaagctgtcsctgcctctgccaggtgctctttcctgctgcttttctcacctgcacaatgtttccacaattccctttggtgttgttgatctgaaaggagataaaatcttccccctcgatgccggtgcactgtctgtcattgatcctcacgccctccctctcaaaaccgagctggaagagcttgcacttagatatggacacttccatttgggctgctttgcaggtcacctctgcatcgataatgtcatgtgagtctgtgggaacagttattacgaaaggcaaatcagtggagtcggtcttgctgcaggagtgggagcaaagcatcccatttccattctcctttagaagaggcaaatgacctccactccaaggctgcagcatttctaattatgctttgatcaaaccaaatgagcatatgaattcattcaaagcagtaacctgggcattagcagagcctttttaaaaggataaaaatgctaataaagtgtcttctgtcttttctttac

SEQ ID NO: 857105 - DNA, 526 bp, Homo sapiens
agcaaaataagttgactactcagaaaacacagacacattggtagaacacatmatcgaaggatttaagcttttttttttcttttacattattctgacttaattttaactgtaatattcttaaatgtgaaggaaaccctttatcaggattgtggaattaaagagcatttcttcattaagcatgcctttacttgtagttcacacatttcatttacataaacaagtgttaagtactactcagcactatatgttcttcataatagaaaatacaaagattcctttcatgaaagatccgagttaaaagatgcaaattataaacaatgtcacacatgaaacaaaatgaagtctggctttcctgatgccaaagagacgttgagagttccacaaaacaaacagaaatgtaaaatcacagccgggcatggtggctcacacctgtaatctcagcactttgggaggccaacgcgggcggatcacgaggtcaggagatggagaccgtcctggctaaatggtgaaaccccatctctactaa

SEQ ID NO: 857106 - DNA, 526 bp, Homo sapiens
agcaaaataagttgactactcagaaaacacagacacattggtagaacacataatcgaaggatttaagcttttttttttcttttacattattctgacttaattttaactgtaatattcttaaatgtgaaggaaaccctttatcaggattgtggaattaaagagcatttcttcattaagcatgcctttacttgtagttcacacatttcatttacataaacaagtgttaagtactactcagcactatatgttcttcataatagaaaatacaaagattcctttcatgaaagatccgagttaaaagatgcaaattataaacaatgtcacacatgaaacaaaatgaagtctggctttcctgatgccaaagagacgttgagagttccacaaaacaaacagaaatgtaaaatcrcagccgggcatggtggctcacacctgtaatctcagcactttgggaggccaacgcgggcggatcacgaggtcaggagatggagaccgtcctggctaaatggtgaaaccccatctctactaa

SEQ ID NO: 857107 - DNA, 526 bp, Homo sapiens
agcaaaataagttgactactcagaaaacacagacacattggtagaacacataatcgaaggatttaagcttttttttttcttttacattattctgacttaattttaactgtaatattcttaaatgtgaaggaaaccctttatcaggattgtggaattaaagagcatttcttcattaagcatgcctttacttgtagttcacacatttcatttacataaacaagtgttaagtactactcagcactatatgttcttcataatagaaaatacaaagattcctttcatgaaagatccgagttaaaagatgcaaattataaacaatgtcacacatgaaacaaaatgaagtctggctttcctgatgccaaagagacgttgagagttccacaaaacaaacagaaatgtaaaatcacagccgggcatggtggctcacacctgtaatctcagcactttgggaggccaasgcgggcggatcacgaggtcaggagatggagaccgtcctggctaaatggtgaaaccccatctctactaa

SEQ ID NO: 857108 - DNA, 521 bp, Homo sapiens
tttctgtttacttctatgaaggatgttaataagaaagatgtatcaagtttggaaacaataacaaatacaattcaagtgtcttagatgaagtatttaagttgctgcagtaaaacattttgaaatttaggttttacaatgttcatgctaccaaaaaagttaatataaataaagtcttagatttaaagccagaagatcattttcaaatcttaaagtcttgatatatttgagagggaaactggagaacttggaatattagataagatgggcataatttcacatcatcttaaaaatagattattagatctattgggttttttcaggcaaaagttaaaagtatctgtttgaaaaagaggagaaatgaggaatactgctatcttggcttatttattttggcattaatttttaattccaaggacctcaattagcacatttctgtaaactaaagggaaaaaataaagaaawaccaactggataatacttagaagtttcttctgtgggatcctttttggataatctttagt

SEQ ID NO: 857109 - DNA, 598 bp, Homo sapiens
atgttcgttgcagcactattcataatagccaagatgtggaatcaacctaaatgcctatcaatgacagattggacaaaggaaatgtggcacatatacaccatggaatactacgtggtcataaaaaataataagatcatgtcctttgcaggaacatgtatggaactggaggccactatccttagcaaactaatgcaggaacaggaaactaaatactgcatgttcccacttataagtgggagctaaataatgagaacacatggacagaaagaggggaacaacagacactgggatctacctgagggtagagggttggagaaaggagaggattaggaaaaaaaaaaatagaacaactttcgggcactatggttagtacgagggtgatgaaataatctatacaccaaactcgcaagtcacaagtttacctacacaacaaacctgaattatgtacccccgaacctaaaatcaaagttaaaatattcttcaggatcactgaataaaaagctcataaagattcaaaaaagtcatacactcaaagttataaaaaccttstagttaccaaccctcaccaatctcaaagagaatgattagaaatacaagc

SEQ ID NO: 857110 - DNA, 623 bp, Homo sapiens
actagggggatggtactaaatcactagaaaccacccccatgatccaatcacttcccaccaggacccaccttcaacatttggaattacaactcaacatgagatttgggtggggacacaaagccaaaccatatcaacaggctactctcacataagccctatgtctttgttttgctatcacaggtggccccagacaagagaaaagttttgctctatggaccatctaggttccaggagatccatgtcaactctccatgtgcctccctgtttcccccaaaaccatgtccagttaaacttgggagaaacagtgaaaatcatgcttgaggaaattttagggaaacatgccaacatttttaagtatggcttgagtttctaatttgactttaagattgtctgaaatatctcttctattgtttactgccttcattatgttttaaatttggtagttgtgatagtagtctgatattcttggaatattcttggaaagccttggartattttccctttgggtcataaaggattcatctaggaaacgtttttcaatgagctactgtgagaggaattcagagagagtctgacctgccttgattagttcaaggcttagcctgcctttaccagagggagtt

SEQ ID NO: 857111 - DNA, 614 bp, Homo sapiens
tcattgcaatacctgtttactgtcttcctgatttcattgcttcccttcatgcaatgctcaagaaagcagccagagaagatctgaaaaaatgtgagttgtgtcatgtcatgtcttggctgaaactctccatttgtttcccaacttagattaaaagccaatgtttttaataaggcctgacaggacctgcctacctcccccattacctctctgatctcatctttgataactctccccatctttcactctgctccagccacattcatctccgtgctattcctcaagcatgccacatctgctcttgccacagtacctttgcaaatgcttctcattctttttggaatgttctttcccaagatatccacactgttattcccttgcctctgccaggtctttatataaatgtaatattttcactgaagtcttcaactttgtagctcacattccaacttctctgctttaacactttaaaaagtctgtagaacttaatatccagcatcccatattttktttttttttttattatctgtctcctcatatagagtgaatgtatgctctatgagagcacagattttttttttcttccttttttaaagatggaatctcactccgtcacc

SEQ ID NO: 857112 - DNA, 614 bp, Homo sapiens
tcattgcaatacctgtttactgtcttcctgatttcattgcttcccttcatgcaatgctcaagaaagcagccagagaagatctgaaaaaatgtgagttgtgtcatgtcatgtcttggctgaaactctccatttgtttcccaacttagattaaaagccaatgtttttaataaggcctgacaggacctgcctacctcccccattacctctctgatctcatctttgataactctccccatctttcactctgctccagccacattcatctccgtgctattcctcaagcatgccacatctgctcttgccacagtacctttgcaaatgcttctcattctttttggaatgttctttcccaagatatccacactgttattcccttgcctctgccaggtctttatataaatgtaatattttcactgaagtcttcaactttgtagctcacattccaacttctctgctttaacactttaaaaagtctgtagaacttaatatccagcatcccatattttgkttttttttttattatctgtctcctcatatagagtgaatgtatgctctatgagagcacagattttttttttcttccttttttaaagatggaatctcactccgtcacc

SEQ ID NO: 857113 - DNA, 503 bp, Homo sapiens
tttttcttgtttattctactgccagtactacacttttttgattactgtagctttatggtaatctttaaaatgtgtttcggtaagtgcccccattaatccaaccttttataagccccataggcttttcttccagatgaatattttgtcaagttctagatatatctttgctgaattttaattatgttcaggaaataacatacatctaataatatcaattatcccatctcaagacatctttctctatttaaaccacttttacttttataattaaaatttagggggcttttttggggttgctgttgctaattatatacttcttacacatttattttcatgctcaccagtgggatcattcccagattttttgtaactttgaragtaacataatatatatattttaacaagctttatttagaatatattgaatggtacctatttatttttaactacctactcacctgaactctttgatgtttcataatcttcagttactcattggctag

SEQ ID NO: 857114 - DNA, 503 bp, Homo sapiens
tttttcttgtttattctactgccagtactacacttttttgattactgtagctttatggtaatctttaaaatgtgtttcggtaagtgcccccattaatccaaccttttataagccccataggcttttcttccagatgaatattttgtcaagttctagatatatctttgctgaattttaattatgttcaggaaataacatacatctaataatatcaattatcccatctcaagacatctttctctatttaaaccacttttacttttataattaaaatttagggggcttttttggggttgctgttgctaattatatacttcttacacatttattttcatgctcaccagtgggatcattcccagattttttgtaactttgagagtaacataatatatatattttaacaagctttatttagaatatattgawtggtacctatttatttttaactacctactcacctgaactctttgatgtttcataatcttcagttactcattggctag

SEQ ID NO: 857115 - DNA, 586 bp, Homo sapiens
ttctggctactagaaacatagacttcatgagaactctgcagcattagccaataaaccctaaacaaagattgtccaatctgtggaccacaggctgcatgtggcccaggatggctttatatgtgacccaatgcaaattcgtaaactttcttaaaaaattatgaatttctttgtgatttttaaaagctaatcagctattgttagtgtattttatgtgtggctcaagacaattcttcttcttccaatgtggcccaggcaggccaaaagattggacacacctgccctaaaccatgataatatttaggagaccaagaagacataaccttgaactctcaggccaaattatatgaccctaatgaatttcccattttgaaaacttagagtagtgtgacaagccatatggcccagagtgaagccttttatctctttctaaaggtggcattctggccctgcttgcctccsttgtctctcctctctccttcacattctcttctgacttattgagttactctcagttccctaaaagctctgtgtcatgtcgtcaggtttttttttttttttgttcgtggacactttcctctgtttgatg

SEQ ID NO: 857116 - DNA, 606 bp, Homo sapiens
atcattttacttaaagacatgtatcaagtcaccttctaaccttatcctctccaggctagactatgtcaactgatttatcttgccttcaaagattctwctttcttactgtaataatttctttaagtcttctctattttcctctaaattcctagcaatgtaggaacaaatatttgaacatgttatttcagagggtttaaatggtacacagcattaggaaagcagtaagagccctggccctactagaaggaagagaagcctggattccagcactattttgatgattgatgagaggttccttgagtttgcaaaactgagcttcaatttctccaaatttaaaaaccagaaatatcctattttatctaacaaggtctttgattggggtgggagaacgtttgaatttaaagcattttgtaactgtaactattattattttctgctaaccacagtcaaaaaggaaattctgcctattaaataaaaactacgagaagcctttttacacattaatatcaactgaggataccacctttctgtttttaaaatagttgaaaactattaaataaagtatgattctgcacctattcactgggacatatttaattttttaaa

SEQ ID NO: 857117 - DNA, 577 bp, Homo sapiens
ttctccacagctttgccagcatctgttgtttcctgactttttaataatcgccattctgactggtgtaagatggtatctcattgtggttttgatttgcatttctctaatgaccagtgatgatgagcttttgtttatacgtttgttggtcacataaatgtcttcttttgagaagtgtctcttcatatcctttgtcctcttttgatggggttgaactaaagagcttctgcacagcacaagaaactataatcagagtgaacaggcaacctacagaatgggagataatttttgcaatctacccacctgacaaaagtctaatatccagaatctacaaggaacttcaacaaatttacaagaaaaaaaacagactccaaggttttaaaactaggaagatgatggtgttactgaccgaaagagggagttctgttttagggctgtgatgaggcaacggtgtccaatgagttgttttagaaaaagtgagtgcgagatsgcaaatattgtaaaatctgatgttgaaaaagaagatttaagtgggatattaatttccttttcaagtcctttatcaccaagtgtcctagtc

SEQ ID NO: 857118 - DNA, 577 bp, Homo sapiens
ttctccacagctttgccagcatctgttgtttcctgactttttaataatcgccattctgactggtgtaagatggtatctcattgtggttttgatttgcatttctctaatgaccagtgatgatgagcttttgtttatacgtttgttggtcacataaatgtcttcttttgagaagtgtctcttcatatcctttgtcctcttttgatggggttgaactaaagagcttctgcacagcacaagaaactataatcagagtgaacaggcaacctacagaatgggagataatttttgcaatctacccacctgacaaaagtctaatatccagaatctacaaggaacttcaacaaatttacaagaaaaaaaacagactccaaggttttaaaactaggaagatgatggtgttactgaccgaaagagggagttctgttttagggctgtgatgaggcaacggtgtccaatgagttgttttagaaaaagtgagtgcgagatcgcaaatatkgtaaaatctgatgttgaaaaagaagatttaagtgggatattaatttccttttcaagtcctttatcaccaagtgtcctagtc

SEQ ID NO: 857119 - DNA, 464 bp, Homo sapiens
ttaatacttatttggctgttaaggtcatgagtgatttgatctccatgaagttgtgtcttcctctttccaacctcacaccttagcagtaaactcgagctcactggaagtgatcattacttgaagtcacacttggatgactgttattaaaccagagaggagaaatcatgctacgtatagaaatggtagtattagtaacacaccaatgttgttattttttaaactgagttggccagaactgctttgaactgatattctgcttatgtgagctgtgtctcaacattttaaaagcaaactgatacatttaacagatacagacatatgggcacacccatacacataccccaaygtagatttgctagattgaaaatgtgggccatttaaaaaatatagtattgatttgaaataagtagtcagactagctcatgctgctttcagagtaggacacacctgttcctcagtgggtg

SEQ ID NO: 857120 - DNA, 557 bp, Homo sapiens
tgcgtctacattccaacaactaggaaagatgtgcacttttcctttaaaatcactttctggaagtsttataacaaacccttttcttcatgtccccttgcccagtgtttagtcacatgagtatccctaactttaaaagagacttggcaatgtagtcttcatcctgtatgaccgcatgtcccattaaatattggggtgttattgctaagaaagactgagtgagtgaatattagagaacagcaaatggtctgagctccagatataaataaaccattatcaatagaaatgtcaatagccaagcaacttaaaaagtgaactcactagtaattttaaagatgccaggggccaggcaggtggatcatctgaggtcaggagttcaagaccagcctggtccacatggtgaaaccccgtctctactaaaaatacaaaaatcagctgagcatggtgatgcacatctgtagtcccagctactggggaggctgaggcaggagaatcacttcaacccagggcgcagaagttgcagtgagccgagattgcaccactgcactccagcctgggtg

SEQ ID NO: 857121 - DNA, 555 bp, Homo sapiens
gccgccacatggactgcagggatccaccagtttattcactcatcagttgaggaacatttgggtggcttcctgtttggggctatttcaaatagagctgccaggagcatttgtgtacaagtttttgcatgcacatgggttttctctgcattggttagaaattctggagaagaatggctggatctcctgttagatacatgttcacctttttaagaaattgccaaactatttttccatagtgagtgtacgtgtgcataccattttccaaagcgcaggtttacaccagcagccagacgcttcaggtgaacccgtcgtacagttttctaatcttctctgtgcagctctctctgctcagttctgttaactccagctgccccgtcttccccctacacacagacctgtcgcttcaattctgcaagtctgctgagctcccsctagggcctccctccctgaaccagggcctggccactctctgaaggcagcaggctggagtgattgcaggactcagcatgcttgcttcctgtctctcacggacctttgtcccacattgtctcatgt

SEQ ID NO: 857122 - DNA, 517 bp, Homo sapiens
ccagtttattcactcatcagttgaggaacatttgggtggcttcctgtttggggctatttcaaatagagctgccaggagcatttgtgtacaagtttttgcatgcacatgggttttctctgcattggttagaaattctggagaagaatggctggatctcctgttagatacatgttcacctttttaagaaattgccaaactatttttccatagtgagtgtacgtgtgcataccattttccaaagcgcaggtttacaccagcagccagacgcttcaggtgaacccgtcgtacagttttctaatcttctctgtgcagctctctctgctcagttctgttaactccagctgccccgtcttccccctacacacagacctgtcgcttcaattctgcaagtctgctgagctccccctagggyctccctccctgaaccagggcctggccactctctgaaggcagcaggctggagtgattgcaggactcagcatgcttgcttcctgtctctcacggacctttgtcccac

SEQ ID NO: 857123 - DNA, 538 bp, Homo sapiens
taagggtgtgtgtatataaccaaccacttgattgaataaggtcccttctcgtgtaaggcagccaagtgccccatatgtaagaaagagagaagaactctttcttctgacttcgagggatccacgtgtaaggacattatgagcgcctgcacggacactccgtgcagtttggtgatcattgtggggtttttcctgataatgctttctttttaaatttagaaataattcacaataaactataaaaagcattagaagtggccagacacggtggctcacgcctgtaatcccaccactttgggaggccgaggcaggtggatcacctgaggtcagaagttcgagaccagcctggccaacatggtgaaaccctgtttctactaaaaatagaaaaattagccaggcgtagtggcrcatgcctgtagtcccagctactcgggaggctgaggcaaaagaatcactcgaatccgggaggtggaggttgcagtgagccaagattgtaccactgcgctccagccagggtgacaatagtgaaactccgtctcaa

SEQ ID NO: 857124 - DNA, 650 bp, Homo sapiens
ttcaactctatagactgtgacctcctgaggagatggaacattcttgttcacttttataggatgtgacatgacactgcctggcatctagtggccggtccactgtgttggcagaatgggtgaataaaagtgattcaaaaatgtagacataaatgaattttaccttggctacgttgtatatgctgaaatattgggacttctgcaaataagcttacagaaccaaagtaaaccctcttccatgcagcagagtggactggataaaacagggagaacatgagcagaggaggcaagaaaaaccagaaggggtagttagtgagctgattcaggatctgccagtgccttaataggactgtgattctaagcaggccaatggacaactgaactgatttcaggattttagacttggctgctggaaggaattttgaagatcattcaactgttgaagcttatgttaatttctaaaagttgagtctatcaattagtatctcggagcaggctcctctccagtgaggggggttgctcacttggctaattcaaataatgaactcatacgacccacgtgggctgaaatgctctctctggcattgttgtgggcaggcgctgtgccggttacttctttgtcaggygtgcactttggcaattagtatgtaatt

SEQ ID NO: 857125 - DNA, 500 bp, Homo sapiens
tgttattacaagtgtcagagttttaaaaattaagaagtgtataaagtcagaaagttacagtaagccaaggtcagtttattattgaggaactttgttgtayacatttagtgtaacctagatgtacagtgttcataacgtctacagtggtatacaataatgtcctaggccttcacattcactcactcactgaatcaggagagcaacttggagtactgtaagctccattcacagtaagtgtcctattcaggggtacgtttctttttttttttttttagacagtctcactctgttgccaggctggagtgcagtggcgctatcttggctcactgcaacctccgcctcctgggttcaagcgattctcctgcctcagcctccggagtagctgggattacaggcacacaccaccacacccagctaatttttgtatttttagtagagacgagacggggtttcaccatgttggccaggatggtctcaatctcttgacttcgtgatccact

SEQ ID NO: 857126 - DNA, 565 bp, Homo sapiens
ctcatcggaacatactgaaagatgtwtccgtctggccttatttttggacaatgggaaatatatttatgcaaatatctccctgaagtttctcatttcagcctcatctgtgaaatgtgtgcctggctggccagggcctccccactccacagtcactgtctgggccacgctgacatagctgcggggtggaggatgctgactctggccggtccttgaaggcagccaagggctgctgtgcagccagctgccaacctcaagtaagcgatgctttgggcagaggagcccttggattccctgcccttttgcccttgacttcaaccgatgatttgccattgagctgtgataggctgctttatgctgagttataagcgttccgggccttttagacattattccccatcacttttctagattcttcactgcaaattacgaagaagccacaagcgtacatttgcaataggaattagaccactacctcagttctcttaaaattaaagctgttgcagcctagggagggggaatcaccaaaattatcatctgattaaaccatgttttaactattgctaag

SEQ ID NO: 857127 - DNA, 562 bp, Homo sapiens
cattattccccatcacttttctagattcttcactgcaaattacgaagaagccacaagcgtacatttgcaataggaattagaccactacctcagttctcttaaaattaaagctgttgcagcctagggagggggaatcaccaaaattatcatctgattaaaccatgttttaactattgctaagaaactcagacattttatgaaacttgccacctatcactctggaagttctgtctacccagatagcttcgcccagtaccaaaatgacattccactgtcagcaaagatgcccgcaactttagctttgaaaacatccatttagtaatcatctgcatgacccacttcagccacagcgttttcccataaacgatggctgtgaggagcacaaattgtatgtgcctccgtttcctcagctgcacgatgaagataattatatccatttggagaactgttgtgaagtgtacataaaaattatgtagatgaaaggatattgtgaacagtgtaaagcaatayacagatgtaatgcgtaaatattattgctcgtgggaccttcgtgattccctag

SEQ ID NO: 857128 - DNA, 600 bp, Homo sapiens
cataaaattagcaagcgttacaaccagcattcaaatttctctttatgtagctctaaagacgttctgccttctgtgactttaaagaggtagtaggtggggagaactgggtacttccytccactcctgttttggaaatcatggctggagttcaggggctggtacagatgggacatgacatgtttcccacatatgtcagaaaaaggttgagacccactcaaatcacattactgccattcagcactagccatttttcacataatggcacttgattatgaactcagtgagtttcttaagatgttttttcttattcatgcgaatgttttagttggtcaaatattatgtatttggtttatctttccattttaaatttatattgtatgttagatttactgttaaaaatattcatatccgtagtatttatgatttatctaaatactgtaactttaaatctgtaacttttctattatagaaaaaacttgtatatacttaggatttcagtagttggacagaggtatctttaatattttttgcagtttccctttacaaaaaaactctcatccttgcagtaggagttccatgatttgaacccctggagcaaaa

SEQ ID NO: 857129 - DNA, 606 bp, Homo sapiens
gagcaatttgttgtttacaccctacaaagtggtccctggtgccatccttggttggttggtttttttttttttttttgagccrgagtctcattctgttgcccaggctggagtgcagtggtgcaatctcagctcactgcagcctccatctcctgggttcaaatgaatcgtgtgcctcagcctccctagcagctgggactacaggcatgtgtcaccagacctggctaatttttttttttttttctgagacagagtttcactcttgtcacccaggctggagtgcagtgctgcgatctgagatcaccacaacccccgcctcctgggttcaagcgattctcctgcttcagcctccacgcccagctaatttttgtatttttagtagacaccaggttttgccatgttggccagggtggcctcgagcttctggcctcaagtgatccaccctccttggcttcccaaagtgctgggattacaggcatgagccactgcacctggcccctcgtgccgtccttttgaagggctcagtgtgagggcagtgctgaggtctggatgctgctctcaacgcttttcctgaacgatccatctttccatttaaactttgtaggcatt

SEQ ID NO: 857130 - DNA, 629 bp, Homo sapiens
tatatttatgggattaccgaacagtttagaaatgatatcctctgttctgtgcttgcaagccaaattgccatatgctctttccagcactggacagacactgagtaaatgtcaatcaaatgaattcatttttctctcagtccagttattatatgcaaatattaatgaacaaagatctttctgggtgccactcaggatacaataaaagatttcagttttctcattcacttcaacatttgtagcatgtctcttctgtgtcaggcattctaattagtgagacgagggatgccacccaagtgagggagaatgttctatttattgattcggttgttatatatggagcaatttccatgttccacgtattttattagtccctgtgaatatacagaggcaaagtccctgtcctgtcggggcttacatttaacaaagagtaagttaacaaagtggtgataagaaccacggtagcagtaaacaaggtgatgagagagtagttagggaggcygcttaattagggtggtcacaggaagacctgtgcagctggcatttgagatactctctagaggctgtgaatgagtcatggaaagataggaggcaagagtgctccaggcaaagggaacaacaagtaccaaggt

SEQ ID NO: 857131 - DNA, 557 bp, Homo sapiens
aaggtagtagctgtttctgcaatcaatccagaaataataagctgggcatgtttctttattaacttctgttataaacataaaaatatatatctgcaagtatgtcaaggaaagaaaaatattggtggttctgatattttctttcaacactttgttatttggagttgtcgtcttaagaaataacatgataaaatattgatatacaaaaatacattaagatatattagtcaccatatattcaaggattgcagatagcatgagagtgtgagatgttcttgagataactttgttaaattcttaaatatcacaatataccctcctgaatttaattttagaacatttacaggggcaactgaaacctatcaaagaatttagccaggattatataattatcatataatatattttctaaatgtccatgtcactgtgtgtagatcaaatcagcattcagtttcttccctgccattgtcacttgacattatttctataattaaactaayattaacacttcctattctttcttgaaattgctaaagaaattacatttggctaagtaatac

SEQ ID NO: 857132 - DNA, 601 bp, Homo sapiens
ggacaccagtcatggggtgcactgggcctctgcattcagcaagtgggacaaaactcaggcaatctgcaacctccaggtttgtgtgaattcacatgatttctcaactagaaaatcagccaaatgtgtgaagttctggaaatccggttttatacataattgaatttctctagaaactggagttttaggagttataagtcctcccttcccagtgactaaatggatccttttttttttttttttttttttttttgagacagtcttgctctgtcacctaggctggaatgcagtggtgtgatctcagctcactgcaacctccgcctcctggattcaactgattctcctgcctcagcctcccaaataactgggcttacaggcacctaccaccatgcctggctaattttttgtatttttagtagagatggggtttcaccacgtcggccaggctggtctcgaactccttacctcaagttatccacccacctcggcctcccaaagtgctgggattaaggyatgagccaccgcacccggcctacatttttttttttaaaggtttagcctggtgattttatagctcatctaggttgtaaggaatagcaatgaa

SEQ ID NO: 857133 - DNA, 610 bp, Homo sapiens
gagcaatttgttgtttacaccctacaaagtggtccctggtgccatccttggttggttggtttttttttttttttttgagccrgagtctcattctgttgcccaggctggagtgcagtggtgcaatctcagctcactgcagcctccatctcctgggttcaaatgaatcgtgtgcctcagcctccctagcagctgggactacaggcatgtgtcaccagacctggctaatttttttttttttttctgagacagagtttcactcttgtcacccaggctggagtgcagtgctgcgatctgagatcaccacaacccccgcctcctgggttcaagcgattctcctgcttcagcctccacgcccagctaatttttgtatttttagtagacaccaggttttgccatgttggccagggtggcctcgagcttctggcctcaagtgatccaccctccttggcttcccaaagtgctgggattacaggcatgagccactgcacctggcccctcgtgccgtccttttgaagggctcagtgtgagggcagtgctgaggtctggatgctgctctcaacgcttttcctgaacgatccatctttccatttaaactttgtaggcattgaga

SEQ ID NO: 857134 - DNA, 687 bp, Homo sapiens
cctctttctcttgggtttcaagatgtaaccttgaagcaaactacagaagsctgtttcctttagccttaaaatagactccacgtccctccgtttttctccagatatactcccttcttatttatctaactgtacgctagcatctaattatgtgccttctttgaagatttgggggctaatcttgagacagacagaccaagcctggagacccagctgcagagttccagagatggcctcagagggctaatcagcagccccgccactgttgagatgatgccagaccatgtaccaggtggactgggacccaagatagccactggaacaagatgcacaggcatcgtcctcagcacagttctggcatgcctttcgtatcaagttctccctttttaaactctttccttccccaccaaaatttgaagtagttgctttggatgggaatccaaccacttccccacgactagttttggttaataaagtcactttctttctaacaggcctcacgcttgttaattctactctgcaagcagcgagctttgtgttacataaatgatcacaattcagaatatataaatcataattcagaataagttatacattccctttaaatgaacttatgtaaatgtatttcacgtttgtacaaataagagaaaagtacggaaagatgctagccaaatttttaactaggaaggg

SEQ ID NO: 857135 - DNA, 665 bp, Homo sapiens
tggactgggacccaagatagccactggaacaagatgcacaggcatcgtcctcagcacagttctggcatgcctttcgtatcaagttctccctttttaaactctttccttccccaccaaaatttgaagtagttgctttggatgggaatccaaccacttccccacgactagttttggttaataaagtcactttctttctaacaggcctcacgcttgttaattctactctgcaagcagcgagctttgtgttacataaatgatcacaattcagaatatataaatcataattcagaataagttatacattccctttaaatgaacttatgtaaatgtatttcacgtttgtacaaataagagaaaagtacggaaagatgctagccaaatttttaactaggaaggggtgggtgatggaagtggcattggtagaccagaggatgtgactcattattaaaatgtagaaacctcaatatcacttggattactagcaaaagcatatatgacccatttaattcacatcactaaaataaaatgagtaaataattttataacaaaagagacagtaaacagaacagacttagtagaagcaagctgggtctagytggaacgttgtcacaacgaggaggtttcaaaggatggaagaactcgaaggtgttatgatcctcaggaag

SEQ ID NO: 857136 - DNA, 665 bp, Homo sapiens
tggactgggacccaagatagccactggaacaagatgcacaggcatcgtcctcagcacagttctggcatgcctttcgtatcaagttctccctttttaaactctttccttccccaccaaaatttgaagtagttgctttggatgggaatccaaccacttccccacgactagttttggttaataaagtcactttctttctaacaggcctcacgcttgttaattctactctgcaagcagcgagctttgtgttacataaatgatcacaattcagaatatataaatcataattcagaataagttatacattccctttaaatgaacttatgtaaatgtatttcacgtttgtacaaataagagaaaagtacggaaagatgctagccaaatttttaactaggaaggggtgggtgatggaagtggcattggtagaccagaggatgtgactcattattaaaatgtagaaacctcaatatcacttggattactagcaaaagcatatatgacccatttaattcacatcactaaaataaaatgagtaaataattttataacaaaagagacagtaaacagaacagacttagtagaagcaagctgggtctagctggaasgttgtcacaacgaggaggtttcaaaggatggaagaactcgaaggtgttatgatcctcaggaag

SEQ ID NO: 857137 - DNA, 641 bp, Homo sapiens
tcatatggacagtgatattattcaatttcatcccaggctatgttcaaatgatcacaaaatctagatttttaaaatacttcagaactctagtaacactgataatgctctcctatgcttaaaaagccaagcactyaaacatgtggcaatactatatatgacctgtgcttagaaactagggatcagcaaacacgcttttacatttaacttaatttaattattattattattattattttttagaaaggtcacactctattgcccaggctaagtacagtggtacaaccatagctcactgtagccttgacttcctgggcacaagtgatcctcctgcctcagcctcccaagtaactggtactacaggtgcacatcaccatgcccagctatttattaaaaaattttttgtggagatggggtcttgctatgttgctcaggctggtcttgaactcctgggctcaagtgatcctcctgcctcagcttcccagagtgctgggattacaggtgtgagccactgtgcctgggcacaaactttgtaaaaaccagttgacaaatattttaggctttatgagctgtacggtctctcttctaagtacttaactttgcctttaaactaggatagcagccatagcagccgtaaacaccat

SEQ ID NO: 857138 - DNA, 569 bp, Homo sapiens
tgtacacacatgtttatagcagcacaattcataattgcaaaatcatggaaccaacccaaatgcccataaatcaacaagtaaagaaactgtggtatatacataaatacaatgtaacactactcagccayaaaaaggaatgaattaatgacatttgcagttacctgggtgagagtggagactattattctaagtgaaataattcaggaatggaaaaccaaacatcgtatgttctcactgatatgtgggagctaagctacaaggacacaaagacataagaatgacacaatggactttggggacttggggggaagtgtgggaaaaagatgaggaataaaagactacaaatagggtgcagtgtttactgctcagatgatgggtgcaccacaatctcacaaatcaccattaaagaacttactcatataaccaaacaccacctgtaccccaataacctgtggaaaatataaataaaataaataaaataaaaaataaaaatatataaaagtaacatcaaagatgattaaataataataactacaacaacttttcaagacatagtacaataaagtata

SEQ ID NO: 857139 - DNA, 402 bp, Homo sapiens
aagtgcagtggcacaatcatggctcactgcagcttcaacccgggttcacacaattctcccacctcagcctcgtgagaagctgtgactacagctgtgcrctaccacacctggctaatttttgtatttttcatagagacggagtttcaccatgtggcccaggctggtcttgaactcctgggctcaagcactccacttgcctcagcctcccaaagtgttgagattacaggcgtgagccactacgcccagccactttttttttttcctttttattcagtcagtttttgtttcttatattttgaaactgtattgttagatacacatacatttatgattgttattataggggagggaaaaatggtttccctaagttctttagctgggtcattaatttagtttacatga

SEQ ID NO: 857140 - DNA, 569 bp, Homo sapiens
cttggcctctatcttccttgttgctcctcccagcctttccataacttacccatccacagcccatcagcaggaacacatgagaatgtgggactttgtttctttttttcttagttgtatgaattccagattaggccttatggatacttgtctactaatatatctgaagtttgaaaacaatccctgacaatattgtaggtgcaataaatattagtcaaataaacatttaagtgccaaggtggggtggtagtggttgggggagctttttttgattaaacagaaattccttcaagtagaacttgagaaaggacactaaatacagtcatcttaacccaggccagaacctaaatttattggtttgcctaacagtcttattgtcatggcaatatttgctaagatgagccttctttagataaaaatgaactctcatttagtggtggatgaaaaaagaraaattgctttatcatatagtttaatttggctcggtctactaagaccaccagggttgatgtattcctccatttttggtgtgatctttttcttcattcaataaagttattaaatatatggca

SEQ ID NO: 857141 - DNA, 488 bp, Homo sapiens
agcaagtttcaactgctttagttaatagattctgagttgtatcattgtccagtgtttctggaattttattaggatcctgaatgtaccttgattggaaaaaaagtaaaaaatgtgaagcaatgaacttygaaattttacttgccataaagtcagagacacaattaatttgaaaatgcagcatgaaccttttatagaggaaaaaaagtgactttaagagccaggcagtttgttctctctagtttctcatagcacagaaaaatcaacaaaaccaattgatcaagtgggagtaaagtagttacctgcctaaccatcaggcccggcaatgattataaggaaaaataaaagtggcagtgggaatagtggtggcatctctagctcttcacttgaaagcaggaaaaagtcatcccttttctctgataagcctggttgtggtccctttattgtctcaagcacaaaaatgtggacatagatttcttgcatgtgattag

SEQ ID NO: 857142 - DNA, 488 bp, Homo sapiens
agcaagtttcaactgctttagttaatagattctgagttgtatcattgtccagtgtttctggaattttattaggatcctgaatgtaccttgattggaaaaaaagtaaaaaatgtgaagcaatgaactttgaaattttacttgccataaagtcagagacacaattaatttgaaaatgcagcatgaaccttttatagaggaaaaaaagtgactttaagagccaggcagtttgttctctctagtttctcatagcacagaaaaatcaacaaaaccaattgatcaagtgggagtaaagtagttacctgcctaaccatcaggcccggcaatgattataaggaaaaataaaagtggcagtgggaatagtggtggcatctctagctcttcacttgaaagcaggaaaaagtcatcccttttctctgataagcctggttgtggtccctttattgtctcaagcacaaaaaygtggacatagatttcttgcatgtgattag

SEQ ID NO: 857143 - DNA, 526 bp, Homo sapiens; identical to SEQ ID NO: 856718

SEQ ID NO: 857144 - DNA, 588 bp, Homo sapiens
tctgccctcccttgagtggctactcactcaagacctctgtcaagtgyccaagaattgcctgggtagaagtgcagagatgaatttcgggaaggatttacagctgcccacagtgcctatttccctttccaagtatgatttcttaaatgtgcctattttggtttaacttcttattttgagttttttggatacaactagaacaagcacaataaataatcatctatccaccgtctaaatacaattgttaggccaggcacggtgactcacacctgtaatcccaacactttgagaggccgagatgggcaactcacgaggtcaggagttcgagaccagcctggccaacatggtgaaaccccaactctattaaaaatacaaaaattagctgggtgtggtggcccaggcctgtaatcccagctactcgggaggctgaggcatgagaattgcttgagcccgggaggcagaggttgcagtgagctgagaacatgccattgtagtccagcctgggcaacagagcgagactccttctcaaataaataaataaataaataaagttgttgatctttcaccatatcatttaacatgtataaagat

SEQ ID NO: 857145 - DNA, 634 bp, Homo sapiens
tcaattagttaggggcatgaaagtcaggatttatcatgggaaaggaatwtgcagtttatattctaaaactgcacttttcagacaactgatttgctgagctgaggggagtgtcatgctattatctaaataaacttcatattttacaacagccataacagaatatacaaagataatgtcaaaacaaagaatgcattctccctattatacatgccatttggtttctcatgtaccagtattatgaaaaaggaaattctggctggatttcctggcgccatggctcacacttgtaatctgagaactttgcgagacccaggtgggaggatcgcctgagtccagaatttagagaccagcctggggaaaaaaaaaaaaatgcctgtagtcctagctactcagggaggctgaagcaggaggatcacttgaatctaggagttcaaggctgcagtaagccatgcttatgccactgcacttcagcctgggtgaagctaaacatattaaaaatattagaaatgttactcttacatagatgtttctaccattgacaataactgtttgactaatatcaagtcaacaaaaatagtgtaagaaataaaagttattggctgggcaccgtggcactcacctgtaatcccaacac

SEQ ID NO: 857146 - DNA, 526 bp, Homo sapiens
aaaaatgcattttcattttgagasgtcaatgtagtagtctttaagcatcataaaaactctaactgaaattaagtaaactattactgataatctgtgagagacttataatcaaaattaaaatttaaaatagctgtacaaacctgaactaaaatttgcattaaatattcaagtaggatagagtttcaatatttaaaataaattatactttaaaatttatgtcatgaatgcaaggagtaatagggaactaattgtgatggtccaccttaggtatatgttaaatattatttgggaagactgtataaatttgggagtttatgtaataatgatacctttttttctagcagcagtatttcaaatgaacatttacacacacaaaaatacacacacacagagagatacacaaagttactttgttcagtgtagtcccaacatggcatttataaatatttaaattattaaaataattgtttaaattacacaaatgacattacagaaaggaaatgagctaattttcttctttcaatta

SEQ ID NO: 857147 - DNA, 637 bp, Homo sapiens
tatttattccgaagtctttatccacaccccttatagtgacacaatgtaaacacaaraaaccttcctggccaccatctgtctccttctcaaggcagtagtaatttcttccaaaaaagcagtttggtaaacataataagctactttaaattactaattactaatgttaacccaggctgaaagtaaaaagatataaactatattctaagttttgccacaaatgtgctgataaattttaaattgatctcatggtttccacatgtaaaacaagaccactttcactcctattctttgtttccccaaaatatattttgaatataaacacaatatttcacatttctaaatctcccagtattttccaccaaaccagtttgctaagtgaattattttggtacgatgtctagtattcttttaaaggatccataagtaactatcgtgataattctagatgccagtcatcaagtattaaaataggaacatctcaagaaatgttgtctctgacaagaagcagaatatgtgaaatcactccagatctcttctcttgagtttttatcatgcttttctgatgtttgagaattgtgtaacctggattagtttttggtgggagaataatattctatacaggatatatttacatgtt

SEQ ID NO: 857148 - DNA, 637 bp, Homo sapiens
tatttattccgaagtctttatccacaccccttatagtgacacaatgtaaacacaagaaaccttcctggccaccatctgtctccttctcaaggcagtagtaatttcttccamaaaagcagtttggtaaacataataagctactttaaattactaattactaatgttaacccaggctgaaagtaaaaagatataaactatattctaagttttgccacaaatgtgctgataaattttaaattgatctcatggtttccacatgtaaaacaagaccactttcactcctattctttgtttccccaaaatatattttgaatataaacacaatatttcacatttctaaatctcccagtattttccaccaaaccagtttgctaagtgaattattttggtacgatgtctagtattcttttaaaggatccataagtaactatcgtgataattctagatgccagtcatcaagtattaaaataggaacatctcaagaaatgttgtctctgacaagaagcagaatatgtgaaatcactccagatctcttctcttgagtttttatcatgcttttctgatgtttgagaattgtgtaacctggattagtttttggtgggagaataatattctatacaggatatatttacatgtt

SEQ ID NO: 857149 - DNA, 624 bp, Homo sapiens
ctctacgaccttaagaaaactacttcacttttcattgtactgtgtgcaaaatgaagacgtttgttttgaagagagattgaatgaatgcattataataaatagtgtctggtacttagtgagtgttcacaaaacagttacttttttcctattatctaaggctttcatcacatatatgaggaaaaagaggccagcacaaattatattgggatattatggttgattagtgatactattcctgaaggaaagtggtttcatttatacattcttcttgatttcctgtgcccctcctttctttccttaaatattctttagtagtgtaaagtatgatagcataggtctctctgctcatgtgctttaatgttacattgctacattatcattttgcacttcctgctatcttactcttaatggtaatgtaaaagagaaaatgtgtcacctaggtcccatgtcccctgtcccctgccttaaagattcagttcatgacctgtcattccaaaactaaaatactaaagtatsactgatatataacagtatatatatatgtgtgtgtgtgtgtgtgtgtatatatgtgtgtgtgggggtatatgtgtgtgtgtgtgtgtgtgtgtgtgtgtattgcactgc

SEQ ID NO: 857150 - DNA, 615 bp, Homo sapiens
tctttcactaatagttatgtcaattcaattgagattccmtgtactgtaataagtaaaataaaacacaatcaataaattatactaccaacttatctaaagtattatggttcctgataacacagtttttgaagtttctttccttgaaacaggacattttcttgatatccatagaaataatgctaaaattgatcaatcgaggttgaactcaattcaatacttaaattactctatctgtctggacatatttttcaccttagacagaaaaaaatagcttttttacttttgctcaataatgttcataaaaataaggaaaataaatattttctattatttttaatatgtgtcaggcaccatgcaagttactagggtgaacaaaatagctctcaggaggcttatattctcatggtagaaaactgacagtaaataaataaagaccccacagtagtgcctgtgagtgctataaagataagtcaaggtggcacattaaaagctgtatgtgaaagtgataggactggtcaggaaatgcctttctgataaggcagaaactcagtaaatccatataaaacatagatgtcaaattgagtaacattattattttatcttgtagaaaaatgt

SEQ ID NO: 857151 - DNA, 618 bp, Homo sapiens
cgatggggcgggacgaatgactgaggtcatttgtcgaatgacctcagggccacacaagttgggctggagagaagggtattggaaggtggaraagaatagaggaagaggctggaaatggaggcttggcagggagcccttgactatctgggaaggagctgaaaatggatctgaagttagcacaaatgacacaagaaaaaataaaaactcgaagagttctgtaaccttgaaagagattgaaccagaagttgcaaatcctttcataaagaaaacatgaggcccagatggctttctgagcagggtcaagccatcgcagaaggaacacataattctaacccgaacaatgtcttctggagaaaaagagagaacactccccagcttcttgggagactggcaagagcttgactccggttggaaaagaatggcctcagaaaggaaaattacagacaaatctcactcatgaccttggatgcaaaaatcctaaacacaatattagcaaatggaatttggcaacatattaaaaagattactacatcatgacaagtcgggtttatcttaggaagctaagactgatctaacagaaacatcaattaatacaattcattagcaaagaaaagccat

SEQ ID NO: 857152 - DNA, 618 bp, Homo sapiens
cgatggggcgggacgaatgactgaggtcatttgtcgaatgacctcagggccacacaagttgggctggagagaagggtattggaaggtggagaagaatagaggaagaggctggaaatggaggcttggcagggagcccttgactatctgggaaggagctgaaaatggatctgaagttagcacaaatgacacaagaaaaaataaaaactcgaagagttctgtaaccttgaaagagattgaaccagaagttgcaaatcctttcataaagaaaacatgaggcccagatggctttctgagcagggtcaagccatcgcagaaggaacacataattctaacccgaacaatgtcttctggagaaaaagagagaacactccccagcttcttgggagactggcaagagcttgactccggttggaaaagaatggcctcagaaaggaaaattacagacaaatctcactcatgaccttggatgcaaaaatcctaaacacaatattagcaaatggaayttggcaacatattaaaaagattactacatcatgacaagtcgggtttatcttaggaagctaagactgatctaacagaaacatcaattaatacaattcattagcaaagaaaagccat

SEQ ID NO: 857153 - DNA, 504 bp, Homo sapiens
atcaaacccattagcactcactctccatctccctcccagccccaggcaaatactcatcccctctgggtcttgggtctgcctgttccgggcattttccacccacagaatcatgctctaggcaaccttttgtctggcttctttcagcatcgtgtgctttaggttcatccgtatggtagcatgtgtccgtactaccttctgtttgtgggtgaataacgttccaccatgtggttagaccacaattagtttatccattcactagttcagggacacttgggctgtttctagcttatggttgtgaataatgtcgacataaacgtttttgtaccagttttcgttttcagttccttagggtacatacctaggagtggaattgctgggtcaggtggtcattctgtgtttcttgaaactgctgatgcacaccccagagtccccatccggggtgggatgggcggstgttcagtgagtgctgagttcaccaccttcgtcacatgcctgggcagaagg

SEQ ID NO: 857154 - DNA, 576 bp, Homo sapiens
agatttatcttcacattttgagattctcctgcttggtctagtccattgtttgctttcaaccatatcttgtaattccttccatgaatttttttattacagaagttcttttttwaaaaaacaaaaaactatgcctttggtaaatttctcattcatatcctgaatttcattttctcactactttatattagttttcagctatctcctgtatctcatagagcttctttaaaaatcagtattttagctgggcttggtggctgatgcctataatcccaggaggctgaagtgggaagatagcttgatgccaggagttcaagaccatcctggacaacacagtgagacactctctaaaaaaatttttttttaatttaacaagtgggcatggtaatatatacctgtagtcccagcaacttaggaggctgaggtgggaggatcacttgagcccatgagactgcagtgagctatgattgtgccgctgaaattcacccagggcaaccagagcaagaccacatctcaagaaaataaataatcagtattttgaattttttatttgatatttcaaagatttctttttggtta

SEQ ID NO: 857155 - DNA, 638 bp, Homo sapiens
gtttatttggctcacagttttgtaggctgtacaagaaacatggtgtcagcaactgcttctggtcaggacctcaggaagcttctactcatgacggaaggtgaaaagarggccagtgtgtcacatggtaagagagggagcgagagggagcaagagggaagggagaaggtgccaggctcttccaaccaaccagctctcatgtgtactaacagagcaagaactcatttattaccgcaaggagggtaccaagccattcatgaaggatcaacctccatgacccaaacacctcccatgataccccatctcccacattgaagatcacattgcaacatgagatttggaggggacaaacattcaaactatatcagaggaaaagcatttctttttactccttcctaaaatcccactaaaaggacaaaataaaaggaggagggagacaaaaaaacctactcaagtcacacacaaaaaactgggagtcagaaaagttttggtgtttttttagcagcaatattggaagctagagaaaaactgagcactattgtcaaaattctgaaggaaagtgatttctgacctagatttctgaagctagaataaaaaatagtgttcatactataaagtggtaaaaagtttgcttcccatgt

SEQ ID NO: 857156 - DNA, 609 bp, Homo sapiens
gagagccagagaagagttgggttgaaatagcaataaaaagagagaaaactaagcaaaggaaaaacataagacaatgatttaactgtaaggaatcaaaaagctgygtaggaaagaaaatctattcatagtacaccacatggctcagctgtaaacattatctacatagttactacaatgtaaacactgaatactgagtaaataaagaatatggtctaactgtatggaagggatggggggataggagccatgtgttgaggagtggatgaaagggagttaaattctcaccttccataatgaaaaaccaatagatatggaggtaaattccaaaagattcatctgaagagtttaaagtactacccatgggaagggaaaatgagaaaaagggtttcagggtggtcattgtttttcctattagtccttataaagctattcaacttattaaactacaatatgcttaaacttctgtcaaacaaaaactaaaatgaaacaaaacaaaaataaatgattacaatccaccaccccccatgtcatgttccctccatcccagtatctgtcatgaattattgtaattactctctaatgtctgccttccatgaagtcagggactct

SEQ ID NO: 857157 - DNA, 626 bp, Homo sapiens
gagaagactattaagttgcttcccagtagccatgttgcaagactacaaatattcagtgtagaaggacaaaaggcaattcagatcaaacatcaggatgaggttaattggatagcgggtgatattatgcataatcttatttttcaaatgtatgatgaaggagaaagagaaatcaatataacatcagctttagcagaaaaaattaaagtaagtatctctaacagattggttatttgtaagaactttttaaattttatgtttgtaagactgaacaagccgttttatgggtagcatctaaaaaagaagcttgtcacagaaaagttatactatcatttcaaattgtaagcagaataagcttttttcatggaataggttgaaatgcaaatgattcatatgtgacaaaattatacttagaaaaatgattttgacacttaaaaatctaggttttggcattttgtttagttgtgctcttcctgactagctgtttttctgcaatcataatcaacatcaccaccttgataaagctagcaataaattggtagcagttctgaaagcactaaacaaaagatctgttaaaggcaagcagtgaaacagtgttgttaactrcagagcctctatttggccattgg

SEQ ID NO: 857158 - DNA, 601 bp, Homo sapiens
tcctttaataataaaatacatccctttactgtcatattastgggattttaagagacagtgaaagtaggtgtatatgtttaatgtgccatctttcccaggggatttattttatcttgtatgccacattgcatcttttttcaaatgagctttacagtttattctgaaaatacctgtaaacacttaaattccattcctcagaaaaattaggcttttctccatcatggtatattttttactttttttccctttctttacctttcacagagtaaaattttgccactgcaaagatctacatctggtcaaatctgatgaaattagctttggaatcagctttaggaaccatattactcatggaagtagattaggtgatgtcttcggtttatgtcatcataagcctgtctgttattatttggactttatctaaattgccattcagtttaataacagatgcccagaattctctaaaatcccactggtgaaagatttgaaagaattcatggtaaatgctgaggacatccttaaacctggcttctttaggtatttatttcctttccttaggcttgtatacatggtctagcattagattaggtactacattgta

SEQ ID NO: 857159 - DNA, 641 bp, Homo sapiens
acggcagcttaagcaacagacatttattttcttatagtgctgaaagctggaagtctgagatgaaggtgtcaacagggtttctttctactgaggcctatctccttggcttgcaggtggctaccttctcccygggtgcttacatggtcttccctctgtgcatgtctctctcctaacctgccagtcacactggattagggcccacctatatgacctcattctaccttaatcagctctttaaaggcccaacctccatatacagtcacattctgaggttctgcagttaggacttcaacatatgaatctaagggggcatagctcagcccataacactcttcttctgactctccaggtcctgattgttacccctcctggggcctggttacacttcccatccttgggatataagatcagttctatctttgacttgtgataacttaagcagatttctactccagccagtcaaacaattcctcacaaagataattacccttttagcaaaagctgctctgtgatttttccagaatatgaggatcagaaatgttaatactgtctttatatatatgaatgttaaacagcaacagtttccagctatctcttgacgttttcattttgaactgatctcaaatttctcaaagcttcct

SEQ ID NO: 857160 - DNA, 593 bp, Homo sapiens
cttctgcacagcaaagaaaactatcaacagagtaaaaagacaaccctacagaatgggggaaaacatttgcaaactatgcatctgacaaaggtctaatatccagcatctataaggaacttaaatatacaagagaaaaacaaacaactccattaaaaagtggacaaaggacatgaaaagacacttctcaaaagaagacatacatgccgccaacaagcatatgaagaaaagttcaatatcactggtcatcagagaaatgcaaatgaaaaccacaatgagataccatctcacaccagtcagaatgcctattattaaaaagtcaaaaaataacagatgtggtgaggttgcagagaaaactgaacgcttatacacagttggtgggagtgtaaattagttcagccattgtggaaagcagcatagcaattcctcaaagagctgaaaacagaactatcattcaacccagcaatcccattactgggtacatacccagagcaatataaagcattctgccataaagacacatgcacrcgaatgttcattgcagcactattaacaatagcaaagacatggaatcaacctaaatgcccatcaatgag

SEQ ID NO: 857161 - DNA, 569 bp, Homo sapiens
tatgtagtaattttaaaaataataattactcagcraaatgtcatactcactgccaatgctcaggcttccctgggttggttgggaaacacgtgtttgcttgccctgtagctcagccggcagattgctacttatttaaataaatccctcattcctgtaatcctagcactttgggaggccaaggtgggcagatcatctgaggtcaggagttcgagaccagcctggccaacatagagaaaccccatctctactaaaaatacaaaaattgacgagttaatgggtgcagcacacgaacatggcacatgtatacgtatgtaacaaacctgcacgttgtgcacatgtaccctaaaacttaaagtataataaaaatacaaaaattagccgggcgtggtagcaggctcctgtaatcccagctactcgggaggctgaagcaggagaatcacttgaacctgggaggcggaggttgcagtcagctaagatcattccattgtactccaacctgggcaacaagagtgaaactccgtctaataaaaaattaaataaataaatgacataataaatatatattcatt

SEQ ID NO: 857162 - DNA, 625 bp, Homo sapiens
tttttaaaaagctataattatgcaaaattacaactacttttttaaacctatacatacaggctaggtgtggtgctcacatctgtaatcccagcactttgggaggctgaggtgggaggattgcttgagcccagggttacagtaagctatgattgtgccactatacttcagcctgggcaataaagggataccttgtcacttaaacaaacaaacctctacacagaaagaaatgcaagagaattttcaattataaaccaagatatttcatactatctgcattatcttgcacatttaattaagtacatattcacaatgtgttcaccaatataatggctctcagttaaaaaacagacaaagtaaataaaactatcttatcatttactttgtgtgcctagttaagtcatacaaatttaattgctgataaaagctataaaatttcagtgcagtagatagaagtttgatggctaatgtacctaaatgaagagtcaggaaaccacaggtctattcctgcctttattctctccctatctaagttcaaattacataagtacataattcatcatgtgttcatagatgtgagtctgttgrtcttccacaaagacaaggtaaagctattacctaatcctct

SEQ ID NO: 857163 - DNA, 510 bp, Homo sapiens
attcagattagcctgagaatctctgactcctgagacactctaagcctcccttaccagtagaagtaygtttccttcttgtgttgagatgtctagctttcctgtgataatctcaggggagcatgcattgaaaaaggatgtcctttgttcccaagcacaaggaccctctgtttccatcagtcccataactacagctgtgtgtcaatatgcttatagtgccagaaaaactggatggtagtaggttatacacctaaagaaattacaaggttttgtgaatatgtgtcagcagaaactgaagaatatgtatgaaaatagattctaaaggtattagatcagcagtccccaacctttatggtaccagggactggtttcgtggaagataatttttccatggacaaatggaggggtggggatggtggttggttttgggatgaaactattccacctcagatcatcaggcattagattctcataaggatcatgcaacctagatcgcttgcatgtatagttcac

SEQ ID NO: 857164 - DNA, 576 bp, Homo sapiens
gactaggtctcctgtttactttggaggctcttatatttttgtgcagtctaattgtgggtggagaagagatggcagyaatgcctaatattagacgttttgttgatgctaataaacaggggattaggctagttttttttaacctagttatatcttgacatttgaaatgggtttcttgtagacagtatattcttgagcttttttaaaaaattcaatcttgagttttacccaaatgataatttctgtcttttaattggtacatttagactattttgtaattattgatatggttgaattaaaatcttccatctcgtagtcattttccatttattccatctgttctttgattcttttacttgtttttgtttttggtagagatgggattttcctatgttgctgaagttggtctcaaaccctggcatcagtgatcctcccacctcagcctcccaaattgttgggattacaggcatgagccactgtgctcagccttaattttttgtagttttttttttctttttggttctgtgattcctctttcctctatttctatattgttttggattatttgggtatttttaa

SEQ ID NO: 857165 - DNA, 617 bp, Homo sapiens
aagacctagtatttgacagcacaaggtgactataatcaataataatttaattgtacatttaaaaataactaaaagggtataattagattatttgtaacacaaaggagaaaagcttgaggggatggataccccattttccatatgtgattattacacattgcatgcttgtatcaaaatatctcatgtcccccataaatatatacttatgtgcccacaaaaattaaaaataaattttttaaataaaatttttagtagcatcatctacaaaaaagttttaaaaattaaaaaattaaagtacacacacacggttggttacctcaatatactcagaaattgcgtttaataaatttaaaaccctctttttatttaaaaagaaaaaactcttagaaaaatatgtatatgtatgtaaaaggaagtttcataaatctgataaaagtcatatactaaaaattaggctggtgccatgtgcctatagtcccagctattcagggggctgaggtgggaggatcacttgagcctgggaratggagggtgcagtgagccaagataacgccactgcactccagcctgagtgacagagtgagaccccatctcaaacaagaaaagaaatgagacac

SEQ ID NO: 857166 - DNA, 586 bp, Homo sapiens
ccatgttggtcaggttggtctcgaactcccgacctcaggtgatccatctcagcctcccaaagtgctgggattacaggcgtgagccacygtgccaagtcagaatgatcagtcttaactttagtcattctaataggtgggtagtggaaccttactggggttttaatttgcattactttaatgtgtagtgatgttgaatatcttttctattgaatatttgtttgctattgatatcttctttagtgaatctttgttcagatcttttgtccatttttaaatgttttttcctgagttttgaaggtttttatatattctacatacaagctatttgtcagatatgacttgcaaatattttctctgagtctgtagcttggcttttcattcacttaacgctgtcttttgaagagcagaaactttaaatgttaataaagtctaatttatcagttttttttaataggtcacgcttttggtgttatatctcaaaatcctttgattaacccaagatcagatagattttcttctattgtttttctagaagtttaatacttttaggttttgcatttacatctgattcactttgagtaatgtt

SEQ ID NO: 857167 - DNA, 499 bp, Homo sapiens
cttctctatctagccaactcttcctcagcctaggtgactcagttttaccgccactgtctgtggggagggcgagccccttcctgacccttctctatgttcccagaattcccagaacctaygccaagagaccagccagctgagcacatgcattccagtcatctctatttgctcctctcatcaggcctctaggctgagactttctggggagcaagagccatgtttctgcatcaccccttagtggagaatcctcctcataataggagctaatgaaaagttgttgagttgttcataaaataaaagtaatatgtaacaatttaccacaaggctacctataaagaattatgaagaaaatccaatgtttattgcaaaggatgtctattaaatggtgtcccttgggtaaatgtctatttggaatccccacaacagaaaatctacttctaactaaaattaaaaataacaccaagcaagcagaacaaaaagtagagtttcgttttgttgt

SEQ ID NO: 857168 - DNA, 508 bp, Homo sapiens
ccctgggcacatcccatcagctcagtaatccttcattctcaacagcagacatccaatttggatccaaagcctgaccattcacaggaggatcgtytggggagataaaagtagagcctgctttgggagcagggaggtggttatgccagagttgagtcactatcactcttcaagaggccggagcacttgtactcagcactggggaggggaagcgtctggtgcttgtgttctcccagaactccgtccctgcctacagagggctccagccagcatcccttgattaacactgcccacctccactcactcctttctctctgggccaggcccaggccacagcagttttcttttgttatctcatttaaaccttaaatagtggtcttgggaaacatgttttctgtgtctttattctccacaaatgaggaatcacagcctccagatatatcaggtgcccatttagggcatgctagtaataatcacaaagtctaatgtgtatcgagcccttactccatgt

SEQ ID NO: 857169 - DNA, 602 bp, Homo sapiens
tgcaaatgctttgctcataaagctgtcagmactgggatctaatgtctgtacttttaatgatgcatttgattagaaggtaattttattcacttggtggcagtccgacctgtttggtgagggtcgcttttcccctcctctttcccccactttttctctcctatttgaaacatttatgaagttgtgatgctcaaaataatctaataagtaaataagtaaatccatcaaagcaatgtcacaatgtcttctcaccaccagcctgtgtgggtgtgcatgtgtgtgtgcatgtgctgtgtcacataacaggataaagtgaagagtgaggtggttttttttttcttttaatttcacatgagattcacacctggaatctcttcttttataaccttacattctcttcactttactccaagtcctaataactgtcatgactttataatgcatcacactttgcacattgtttccatgttctttcatgtcacttatgcctcacaataaagctatgacatagttctacctctgatgaaggaacagaaactgggagattttattacctctttgagaaactcagagtaattcaggaatttaaaactagacctcagtct

SEQ ID NO: 857170 - DNA, 558 bp, Homo sapiens
gagagctgttttcacattttatcagattttggtacagttatataacattttcagtcttgtcattgttatcacagtacaacttttgcagaatgtggagactacatctcacacrtatatactgctgcctctgctaagttgccccatatgttcaaaactcatattttatacctattccaagacaagagattttcctttgtaaattgaaaccaatgtcaattttagagtgaccgcgtcaaatcattattcaaaattaagcaccatagtattcttaaaatagtatatttggttatgacattgtcattgtttgatattttgcattgcttctgtctcatttaatccatgaagcttctgaattactttgttgtggtattttgctgcgtcattatggtatttccagagtactcagaaacacagacacctgttttgttgacttgtaatacaacctgaaaacagaaacacggagctgggctgcactcatgatttcaggaccaagggcagttcttctatgggtctttctactgatgtatgccagttagggctgtgaatggttacactact

SEQ ID NO: 857171 - DNA, 604 bp, Homo sapiens
ctgacaggtaaagcacaagcaaaggtttggaagaggggctaagcaaggatgtttkggggacaaaaaaggagaccaccttgccttgaatatagagttcacacaagagcagcaggggagaagcatgaacgtcagtttggcatcagggggctggtttttcctcattccaagctcttctcatttttctactttatttacttgaaaactctctttctccttaatctttcagtcagttaatctttacacctccatgatccttcatttcttttcccctttgatgatttctgatgctctgcttctgaactcttcctaagttctgccatagtgattcccctctgtctgtactgctgttcctactgctttgctttgcagctcttctgcatttgactgtgagctcactgaaagaaaggaccgtggcatgtgcatctttgtgtctccagaatttaattagcacagggagtaatttataaggggtgaatgaatcagtatggagatttataccaaggaccctcaacttcactgaaggtctttaatgatggtgctgatgttagtggtggtcgtggcggtatttaattattttttctaggtagggatcccttctttcctc

SEQ ID NO: 857172 - DNA, 610 bp, Homo sapiens
gggtggagctgcctgccagtcccatgttgtgcacctgcacttctcagcccttgggtgatcaatgggaccgggagcctagaaggagtgggcggcacccgtcagggaggctcaggcygcactggagcgcaccacggggggacttgggcatggcaggctgcaggtcctgagccctgccccatggagaggcagctgaggcctggcaagaatttgagcacgacatgggtgggccagcagtgctggggggactcggcaccccctctgcagctgctggcccgggtgctaagcccctcattgcccagggccggcggcgccagccgttgcctctaagcagggcctgccgagcccacgcccacctggaactcgccctggcccacgagtgccatgctgcagcccaggttcccgcccacgcctctccttctacacctccccgcaagcagagggagcaggctccagccttggccagcccagagaggggctcccacagtgcactggcgggctgaagggctcctcaagcgtggccagagcggatgcccaggccgaggaggcgctgagagcgagtgtgggccgccagcatgttgtcacctctcacaaggattaaagtgaagagtgc

SEQ ID NO: 857173 - DNA, 639 bp, Homo sapiens
gggaatctgttgtctacacataatcaacaaggaagattagtttatgggaatcttaagtccatcctgagtgcacagagataaattctaaaaataaagctaacttctattttttttttttyccccctggggtaagtgctgagcatattttcagagacttgagactaaagtgcagcatcgggcattattctcagtctcacagcgccaccttttggcccatgttctcccttgttttctgaaggtgaaatccaggcagctggttcctggggtgatttttacaatcctactttcttggctatggcttgacataatttccctggagagttcagtcttagggtatgatactataccttggatctgcaaagcattaaaagggaggatattgtcagatatatgatctagccatggacacaggccagatgcattcgtaactgaaagagaaggccctcttgtctggtccactcctaacttgtttgattttgctgctatctatcagcaccttccttactaatgcaggatggctcagttaatttctttctttggtcttccagttatgctgttgagagcttgctcatggccatatataagaggtgacaacaatggcttttcagaaacaataccaagagagcaatagaaacactt

SEQ ID NO: 857174 - DNA, 640 bp, Homo sapiens
tgttacaggtgtatgaatactaagtaagagctaggcaaattgaagaaagcctgggttataattttgtttctcttgtaattagaaaggcaaattttcagtaaaagtcaacataaacaacatacgtaatattttgcttctcagattgttctcacatgaacataaagaaccagtatctaattttgtaaatcaatggcatataaatagtaacaataataatggcattgactattgaagcaaattcatgtacattttgctttgttttacatttgtctttgggaaagcctttgattttagataagcagggagaaagactttgcctttctctgattccattctgccatggttgcagtgttccagtgctattttaaatacaatctttagcatccccatcttttcacctttaagcactttaacttgacttttctccagttctataccccataaaataaagatattcagtgcatcagtctcacagttacatcataagcatttcagtgagctttcctataaagagttkagaataccatctggtacatagtagtaaatgtaaatattagctgccattagaacttctcagacaggtgtatctatctagacatacagggatgtgtgttatgtgattatgtttgtgtgtgtgtat

SEQ ID NO: 857175 - DNA, 403 bp, Homo sapiens
gggactccttgataacagaagatctgatattgtgtaaaaaaaaaaaaaagatggggaccccttactttaacgttcttctgaggtaccaccacccatgtatcctgagcactcctatttctkgctacaatgcagttctttcccttcactcttcctttcatctgctcaaactacttgcagagactcaactgcagccaatgtacgtccactcaaaatccaaggagttctgattggtggggtttctttcagctgcattcacgtgtcggtcaaggcagacggcaggggatgttagacgatatgtgcgaaaccaacctactgctgctgacacatttctcattcttttttttatatataattcctatggcaggcggggggttcagggcagggcagcgttgggggatggagt

SEQ ID NO: 857176 - DNA, 612 bp, Homo sapiens
gggacacaggtgggcagcaattaaggggagctgatatccgatggcccaacctcaacctcagcacatcaccttcagcctcagtgtcctcagctataaaataaggtactcaccatacctatctcacagggccgcactgagggcagatgaagtcctaaatgaaaatgcacggtgcaaagaaccatgcaaaccattcattagaaagcgctctctctccttcacacacacacacacaaacacacacacacacacaccccttccaaacagctttctagctttccctgttagaattgcccattgcaacaatgaacaaaagtcaacattcttcacctttgccttgatggaactgcctatctttaaaagtgaattaagaaaataagcaaaatcctcacttatagattgtaattccacttctcaagatctgcagcagagacatatgtaccaggaacgacagaagtatctattgcagcaaaatattggaaaatactgaaatatccatcaatcagaaaatgcttaataagctaggatgcaaccaaaatcattagatgtttgcatttgtggtagtggtgarcacagctgccttccaaaatcatgagctattttatagcagctaaa

SEQ ID NO: 857177 - DNA, 429 bp, Homo sapiens
catgtaccagaggagaccaaaccattgacatttgacttttcttgatgagctggacaataccaagctggtcccacagggcttcatctctctggggcagcctgcggctctgacccacacccgtgctgctacagttgcacttgctgggacctccctgtagaaatgctgggaggctggcccctctctgctgcctaggctgtgaaaggtctccatttcaccagcttcaactctcagaacaacctatggagtctctccaccttttctgtggatagcagatgccttgtttggcctgaatttggaatgatctctaatcttttacttccctctttgtcgttcaccctggatacagagaggacggaaaatggcactaaagctttttgcatcaaagygatgccttgggagtctgtgttctctgtgcaaaggtcctcgcat

SEQ ID NO: 857178 - DNA, 412 bp, Homo sapiens
gaagcaaccccttctgctcttaaggcagtaagtcatttttttttcttttttttcttttttttttttgagacaggtctcaccctgttgtccaggcgggagtgcagtgccgkggtcacaactcactgcagctcgaactcctgggctcaagtgattctcccacctcagcctcccaaataactgggactacaggcatgtgccaccttgcccagctaatctttgtatttgtttcataggcacagggtttttgccacattgcccacgctggtttcaaacttctggactcaaatgatctactcacctcagcctcccagggtagtaagtccttaagtgagagatggaaaaggactgtggctcacaggagatccagcccagctcctgggctagaggttctacctgggtgtttgcagtcaaa

SEQ ID NO: 857179 - DNA, 632 bp, Homo sapiens
gggaataaatggccacatataaatcgaaagcacacaagaacaagcaagctataaaccttgtccaacagaaaatcaatagcagtgatttttattttaggtcagcggcctatcaattataaagggatgggagatcacatttagtcattatttagccagggacagaaagagtaaactgaaccatatatttctatatttcttcatagaagcttgatttttgtaggagagaagggttcctattgaaatgacaattctgcacatgtgaaatgtgtggtatttttgtgccttcttaatgcaatgaatgcaacagagaccaaattagaggcaaatgaagtgaagtggaggtcagaatgtacaggacccaggatacatggttgatgagaagagaagagatttggagggatgacttacggcctttaaaaacatcaatttagagttttctcacttaaagagggaaatatagacatatgataaactgcaagctgcctttgggactgagatcaccatttacctaatctactattaatctggctctgttcatacactgactttaatcgtaactccattaagttcygttttaagaatcagatgctcactgtttctgatataaaactaagtaatttatagtctgaaac

SEQ ID NO: 857180 - DNA, 386 bp, Homo sapiens
cagtggctccacatatacaagttaaaagtaagtcagtcttggaactttgccttttggttttgtcgttggccttctttacttaaaataataattataagaagtaatgaacgcctgtccacatccatttttatctggcctagcacaattaattggctatgagtctttcgactcttaaggccctcggccataggaagttctgccgagggaaaaaaacaaaatgacactgtagaatcatatgacttctcctgtgacaaagtctccttttatctctcaagtayatggtgcaatatagaagtggtgggaaaaatagatttgtctactgttaacaagtctctaacaatttagacactgaggaccaggcagggtatttcttgcatttgatttat

SEQ ID NO: 857181 - DNA, 463 bp, Homo sapiens
ccgagagagttttaaaaaagaaagtccttgtgttttcatcagtaactttgttgtgtatcagtgttttcccttcatgtaacttaaatgtccactaatgcaagtgaaggcaatctatgcctaatttcttcactaaatattctactaataaatgatttactgacaaaatgaaattatataactgaaaaggtttaaaaatgataagaaatatcccaatggaagctgttttttaaataatgttattactgtcagtaacaaaattatgatgacacaggtccaacaccttttaaaagagaggaggtaaaaaggagagttggatatgaagaatctcagactgcagtgcagctctgagaaagtctcagccaggtacatgggtgcccgggagcagagattgcctgtyagaagggccccatgagggcagaagtgacctggctctcgtgtccctgccatgatcagtcattggctg

SEQ ID NO: 857182 - DNA, 573 bp, Homo sapiens
gcacacccgtaatcccagctactcaggaagctgaggcaaaggaatcacttgagcccaggtggcgaaggttgcagtgagccaagattgcaccactgcaatccagcctgagtgacaggagtaaaaccttgtctcaaaaaaaaaaaaaagtggattagtggttttctgggggctggcagaggtatgggatttatttttggtgtgatgaaaatattctaaaattggaaaattggttatagtgttgggtatacaagtctttgaatatactaaaaaccattgaattgtatactttaaatgggcatattgtacggtgtggggattataccttgataaactgttgtgtttaaaaacataacagataaccgtcagatctgccccatcagaatttcataatttggcataattggggctcaaacaaatgaggccttgtgttgcaaatataggcaacatctgcaagttaccaggagcaaagttgygaaatggtagctgtaacctaggagagatggataatgatttttccaggatgctctgaaatccacactaaatggaatctgctggtgcatactttatgccaca

SEQ ID NO: 857183 - DNA, 590 bp, Homo sapiens
atgagaaatggagcaggaaaaagtggtttaggctaaaatcagaggggtgcattgggaataatgttttcattaaaagctatttgaaggagtctgtaaggaaaaaaagagccactgtatgttcagctggggagagtgagcttcaaatatgtgcttttgggaagatgattttgatggcactatgaccagggaagtgattggagagaggagatatctcaggcaggaatttgagtttgacagtgcattgcatcactccaggcaggagttactggcaacctgagctgatgaggacagtgacaaagaactgtcagaaggaagagtggccaagagaggttttgcagaggaagaatgggccagatgtgactgcttatgcaatatagtaatggaaacatggactccgagccagatctagttcatatggaagcaaaacattagccccagtgatagagttgtcatgaaaatactgtgtgctgcmtttatctttctggattgttatcagtcattattactttgtatttttgaaaaatacctgcaattttaaacattgtgtatcttcttttgtttcttgcattttcaaatgatgctttgaacca

SEQ ID NO: 857184 - DNA, 552 bp, Homo sapiens
aggctggggtgcagtggtgcattcttggctcactgcagtctcaacctactgggctcaagcgatcctcttgccttagcctcccaagtagctgggattacaggcacacaccaccttgtgaggctaatttctgtactttttgtagagacagggtttcgccatgttccccaggctggtctcgaactcctgagtccacccagcttggctttccaaagtgctgggattacaggtgtgagccactgtgctgggcctctttttagccttttaataagcagggcagactctggattcaggatgcgatgatcaggtctggcttaggaagccttttttgtcttctgtgagaaacaactcctggagctgattggcttttgggctgagtaacagcttgatgtcagggcctcctggggaatgcaacatctcctaagaaaccaatggtctagttgccacaggagtctcagagaaaaaactggcagtagtactcaaatagccttcagactatctgaggtttctygggacttaccagtcctgcctcagatgaagccccaggcatccttg

SEQ ID NO: 857185 - DNA, 621 bp, Homo sapiens
gccattttgcagataagaaatcagaagctctaagaggctatgattcacacctgggtatggagccatgcagaagacatagcatgacccctggcacagtagcaagcacttactgracattcacaattgtattaaaaatggtaggatcaaggcttgaacttggactgtctggccctgacacccatctcattccaatacacactgtgctttctcaggaaactgctacatgctgggagagaggtgggaggaatgaccagttggagggaattcacttggagtctttcttttcctgggtcagtctgtgggccacacagcagagggaagacctgatgatccacagactccacgtctgcctctgttctgaaaccaaatggccgtgtttgcctcacgtgtcttttaaagaaggtttccctggctgttttctagaaaagggcttatgtagttttgtgattctgaatcacgacaccttctacctatggtctctgaaaggtgcatggggaacttactgtgtctgcaagtctggaggattcaggcaaaaatcctgcccttaccctaaaccagatatgtttaggcccaacatcctataaagtagggtgaggtggtagtgctgcctctgtgcttaat

SEQ ID NO: 857186 - DNA, 485 bp, Homo sapiens
attccagtcaaagcccaaaatataaaaactgtttctattgttccacyaagtagtggcctctcggtgcttctgacaagtgatttagagtaaagtggtctgctcccacaggggcttgcaaatcttcatgcatgatggttcggtcgagaaagccgaagttgcccagtcaggaaggtggtgatgcaaaggtcagatgaataagggaggagttcattcatcaacccgacatgtgagcatggctgggacagtgcgcaggacgaaagccatctggtagctttgcttgcaagaccagattaagaaagcaccagcacaaaaaccacaaaggagaagatgaagctgtatttccggaggaaagcaaagatttctacccaaagctgaggtaagagctttattttttttttccaatgatgaagaaagaatcctacttccctctgatttgcattatttttagcacatatgcctcagcattggtgcccaataggtccggc

SEQ ID NO: 857187 - DNA, 526 bp, Homo sapiens
agaaggaaatggtgagcctaaagatacttggtccttgctctcaaggagcttacaattcaatggggaagacaggcatcactccaggaaagtgcaaatatgcactaaaagaagtcacataaagaaagtgagcccagctctatggaaaccaataataaaatggaaatcaactgaggctgtaaataaggctttcttgaggatggattctttgaccatgattggaatggggagtaggagttaaccagcatactgtgaatccagtggtgaggaaaatcatattaatcgaaactttagttcatatacatgtacggttaacaagatacagtatgacaattttgatcagacaaatcatgattagtaattagttacaacatgctcaatgtggctcaatcttgtcatattatctgaaagtaaaattatgggtttattatttcagtaaagaggaataatattttgcgtattaktaggtagaaaagatttttttaaaagagtaataacaaggtttttttttaaaaagtaaactgattcc

SEQ ID NO: 857188 - DNA, 585 bp, Homo sapiens
taattcaacagatttatcttcacattttgagattctcctgcttggtctagtccattgtttgctttcaaccatatcttgtaattccttccatgaatttttttattacagaagttcttttttwaaaaaacaaaaaactatgcctttggtaaatttctcattcatatcctgaatttcattttctcactactttatattagttttcagctatctcctgtatctcatagagcttctttaaaaatcagtattttagctgggcttggtggctgatgcctataatcccaggaggctgaagtgggaagatagcttgatgccaggagttcaagaccatcctggacaacacagtgagacactctctaaaaaaatttttttttaatttaagaagtgggcatggtaatatatacctgtagtcccagcaacttaggaggctgaggtgggaggatcacttgagcccatgagactgcagtgagctatgattgtgccgctgaaattcacccagggcaacagagcaagaccacatctcaagaaaataaaataatcagtattttgaattttttatttgatatttcaaagatttctttttggtta

SEQ ID NO: 857189 - DNA, 535 bp, Homo sapiens
ataaaatctgtcatggtaaacgttaaaaaattatctctttctagttcaattaatggatatggwtaaataattgtatgccttaaagcaaacatcttatttaaatgtttaaagcacacgttatttaaatgttaatacaattctgatgaagaaatgtataaattctagcatacaagaccaaaaagactagaatgtatactcagcaacttaagagttaggccaattggtcatagcaccatatgctttatgtattccaagaacagaatatttactttcttgtatgattttcgatagcatataatagccaaaagatcaatatatataatattcccattatatttaccacctgtaacattcatttggcacctgttactaattttttaatcacaggaaatagatctccctgaaatagatttaaaactttatatacggtatagtctactttatagggtaaaaaaagctatgtatacatgtaacttgattattaaaaattattgtcaacaatttttaaatctaaactttgaggtgcttcattcac

SEQ ID NO: 857190 - DNA, 588 bp, Homo sapiens
aaattttgtgcgcaagtatattaaaatggaaatgaagttaattaatgaaatgaataaaggctacaaactaagtatgaaaaaagtgcttgaaggaggcaggggaaggcttctaggaggagaaggcagttgatctaggttcgaagtgtggttacgacttgacagagggaaaggcgaagggtagagaggtgtgaccaggtgggcacatgttccagacggacggagccacaggagcgtgaatgtgtctgggggctctgggaagtgccgtgcagttttacatggccacagcatggccacgtggaaggaatggtccaaagaggcagaagtttggtgccaagccgacttgagtttgagtcctggcttgatcagtcaaaccaccagagtctttgagggggcatgggatgattaaacaagtattttgggactatatctcttgtgttggcatgagggacagattagagaattagaggcagaaactaacttttgagrgaggcagagaaagtgtcgtcatttccatttttcaggatgggaaactgagtctcagagaccctatgacttgcccaggtcatgtagctgtgaagtggggaagca

SEQ ID NO: 857191 - DNA, 620 bp, Homo sapiens
ggactgtgacacagaaatgtagctcatagtatcatcgctgcctgcacagaaaagtacatcatacttttcctacagaggacctcatggaagcatgatcctaaatgcgctgggtgggcaggaaggggcctactggaggcagggggaagaacattctagaacaaggaaatggcatttacaaaaatatgcaagaatgagagagagcatgacttacacagggaataccaggctggtgtggctgagggtgggtggccaggggaggggtgagggaagctgcagggtgccacgatgaaggacctagtatgtgatgctgaggaacttgggcagtgtccggaaggtggtgagaaccggggtaagatcttatttacattgtggaagagttgctctgcctgcacagtgcaaggtggactagagtagggtaagaccacggccgggtaatcagggaggagattaccaagagggagaagacacaaagtctggtggccaatcagctgcagagagtgatggggacaggcgasgatgaagtggagctctgaaacaggagccagagactcccaaagtccgcaaaaagagcacactttgaatggcacagacccttttccttccactcaccctcccacatt

SEQ ID NO: 857192 - DNA, 636 bp, Homo sapiens
tccttttatacctggacctcatctcaagccaccacaggcttagtaagatctcaccaccctgcacaccaccagccaaagggtgtccagcaagcgatcccagctcagaatttcattttaggggctactccgcagggctgcttctggtatcgactttcttagtttaggtttccccgaggtcagagactgagacaaggccctgagtgcacatcatttatttggaaggtgaacctagaatgcacaagggaggaagtgcagagagagacccacagggaagggagaaaagccagtgcaggttgtggcatccaatgtgggcgattgaggtcatgcccactggggatcctcggaagtgtcatgtagactatggctcagctgcagcccacccagggaagctgggggatttacacaccaatgcttttcccccattggttaagggttgccctggggctttcaactcccagaatttcaggatgaggcagctctgcacacaggccaggcaagctcttactgcactgaaaaacacaaaayaaaaccaagctatcaatgccggggcttgtggtaggaacgtgtcagcaggaatgactgtccactgcagctgggggacacccagcgggggcccggggcttgctggttggcatc

SEQ ID NO: 857193 - DNA, 628 bp, Homo sapiens
cattcagtacaccttgtgcgctccctggctggatccagctcccttgcaagttgtgaatactgctgtcatcctgccacaatctgctcaaaaacctcagagagctccctagagrtggaccacagcaaatctcttctcagccacttgtcttccaaaggtcatctttgtcccacctgccacacttacattgcacaacttcctcttgctgcaacttgtgtccaattctaactattctcactgctccactagacaagccctactcaggtatgcttctgtgccttaattttgtggttccttttgctgcaagtaacctttctttactctttcaccctgatgcacaattatctttgccattgtgtaaggtaagtgagatcttcctgagagcttcctgtttccatgaaacctttctgatgatgacctatgactcctttgagctgttaacagctcgtgagaatactgctttgggtatgcatatgtgcacacacacacacacacacacacacacacacacatcccccttctatttgcaatcatggctagacaaaaagctttttttccattacaatgtagagaaaagaagagatagatcatgggggctgtgaagagagagaagacgaaggagaagagttcc

SEQ ID NO: 857194 - DNA, 536 bp, Homo sapiens
aggcaaacagttgcattcctttgagtcttttgatcagtgaagccacttttttcacgtgaaaggagggaggagaggaatagtcaattatgcatttatcttgtgctcagttaatctccatttttacataaggtaaaataaacataggaagtagaggaagcagttagatatgcattcctctcagttgaacagagggatgatggcttttagttcttggtttttgttctctttctgtagaagattagcttctaatttattaatacattgtagggtgaaattcaacagaactgtcttagggtaaagatattggggctcacaagagatttccttgtgaggaaattgtgagggaagaatgtagccttttatcttgtagctatctatttaggaacaaagtggaaggcaggtttgcctgaccgagttcccagcttaatgtttccctttggcttagcgagtttggggtccagagattttattttccwttcagatgccataggaaatgtaacaactgtagaaacgagatttcagagctgggcctctca

SEQ ID NO: 857195 - DNA, 545 bp, Homo sapiens
ggctacctccacctagatttcaaagggtgcctcacaacctcagtctcaaagctctgaactgccacaaggcagggtgtggcagagagtccccactacggccatgcccagcagagctrcagggtcaagaccactgcagggagcccccaatagggcaatgcttagtgaggccatgcaagacagccacccctaaaagccccaaacctgtagagcctgcagtgccagccagcgggcagtgccagccaggaagagccataagtatccaactccaattcctgagagctgcagtgtgggcttcatccagcaaagccatggtagtggggtctcctgggggaatggggacccaatccccactccagtgcgtctggaagctaagatgtggagtcagagattattctcgagcctcaagatataatgttgtttgcctcactgggttccggactaacttgggatttattaccccttgtttcttgcctttttctcccctttaagaatgggaatgtctacgccatgcctgtcccattattctattttggaagtatataact

SEQ ID NO: 857196 - DNA, 538 bp, Homo sapiens
tgagaggcccagctctgaaatctcgtttctacagttgttacatttcctatggcatctgaawggaaaataaaatctctggaccccaaactcgctaagccaaagggaaacattaagctgggaactcggtcaggcaaacctgccttccactttgttcctaaatagatagctacaagataaaaggctacattcttccctcacaatttcctcacaaggaaatctcttgtgagccccaatatctttaccctaagacagttctgttgaatttcaccctacaatgtattaataaattagaagctaatcttctacagaaagagaacaaaaaccaagaactaaaagccatcatccctctgttcaactgagaggaatgcatatctaactgcttcctctacttcctatgtttattttaccttatgtaaaaatggagattaactgagcacaagataaatgcataattgactattcctctcctccctcctttcacgtgaaaaaagtggcttcactgatcaaaagactcaaaggaatgcaactgtttgcctct

SEQ ID NO: 857197 - DNA, 613 bp, Homo sapiens
cctttaaaagcatgctatatgaacattaagtaatggtttgcattgtaagtattgtaagcaatgttggccttgggatgctaatagctgtgaggacaccacataccaccagcaaakgtggtacttctactattactgaatcacactatttcaaacatcatctgtaatttaggatttgagattatttttcagcagcacatgttcacacgggaaaatatcccctttggtttttcattcactcgtcagcagataattactctagaagcttttataaaagataagttggtgtttctcattactgaagaagttacattattgggaagaagttctgatcaccataaatgttaatatctctatgttccacatcttattttaaaaatgtttaaaagtattttagaaatggaaattaggaataacagaatgatatgatgtgaaacagagtacccagaagaactgtgatagaaatagatccatcattatagcatgaccaatatataaaactttgtttttattttttcttaagccactgagattatagtttgtcattgcaacataatttagcccattctggcaaatgtggatgttttcattgttttattcattaggaaacagttct

SEQ ID NO: 857198 - DNA, 670 bp, Homo sapiens; identical to SEQ ID NO: 826258

SEQ ID NO: 857199 - DNA, 543 bp, Homo sapiens
ccctccccttgtccccccatcccctgacaggccatggtatatgatgttccccttcctgtgtccatgtgttctyactgttcagctcccactgatgagtgaaaacacgcggtgtttggttttctgttcatgtgttagtttgctgagggtgatggtttccagcttcttccatgtctctgtgaaggaaatgaactcattttttatggctgcatagtattccatggtatatatgtgccacattttctttatccagtctatcttccaagtctttgctattgtaaatagtgctgcagtaaacatatgtgtgcatgtgtctttatagtagaattatttataatcctttgggtatatactcagtaatgggattgctgggtcaaatggtatttctggttctagatccttgaggaatcaccacactgtcttccacaatggttgaacttatttacactcccaccaacagtgtaaaagcgttcccagtttctccacaacctcatcaacatctgtttgtttccagattttttaatgattgccattctaactggcatg

SEQ ID NO: 857200 - DNA, 542 bp, Homo sapiens
ctcatacatataggaaggtggtcccataaaattctagtggagttgaaaaattcccccctcctagtgacattttagctatcataacactgttgcacaatgtattaccttttctacgtttatgcatatttagatatataaatacttaccattgtgttctaatccctgcagtattcagaacagtaacacactgtaacagatttatagcctaggagcaataggcacacctcctaccaccatgcagtttaaaaccagataatcagtatgttgagcccattgagcactttagtactgcatcctgcattggtatgattatcttatactttgcacatttttattttataataatttgtattcattcattcgtctactttccaacccacttgttccaggtcaggatagtgggtcgctggagcctctcccagcagctcccaaatgcaaagtggaagccagccctgaacagggtgccattccrtctcacacacacccacactcaatagactgtgatcttttagacaagccaattgtattaggccattcttgcg

SEQ ID NO: 857201 - DNA, 571 bp, Homo sapiens
atatatatgagatctgttttgatggaagcaacaatcaaggtggagtctaatatgaatttgatgttctgatactggtccagytaaataatggggttacagtaattatattaataatttcaaaggctctataaaatgtttaccatatgccagatatagcttcccactcttttacatatataaatgaatataatctttataacagtatcgtggtggtagcattacttttgtccctatttcatagatgaagaaaatggagggttggagaagttcagtaaactgaccattatcacccagtaagtggtaaagcttgattttgagtccactgaatctggctgtgggttttttgttctttccttactgtactagggaaacagaagatcagagagaaatttagtcctgtgaagaattttgaattgaggttatgccaagcacatagatttagaatacattatctctaaatctcacagcaattctcacattgattaactcttatgctcttaaagaacagagaggatacctgagttatctaagcagaaaataaatgggagtcagagctgcaattcaacctcag

SEQ ID NO: 857202 - DNA, 638 bp, Homo sapiens; identical to SEQ ID NO: 820876

SEQ ID NO: 857203 - DNA, 519 bp, Homo sapiens
gatgacattttatttttatttttttgagatggagtctcactctgttgcccaggctagartgcagtggcgcaatctcagatcaccgcaacctccacatcctaggttcaagagattctcctgcctcagcctcccaagtagctgggattacaggcatgtgccaccacacctggctaattttttgtatttttagtagagatggggtttcaccacgttgaccagcctggtcttgaactgctgacctcaagggatctgcccacctcggcctcccaaagtgttgggattataggcgtgagccaccgcgcacagccagacatggtgactttttaatctcttattcttttttatacttccctgtgttgattgagcattccaaggatgtgctatctttataatccagaagaaattaggaatttagaatttaggaaaaaatatacgtatgtaaaaaactggaagaaaaccctcaaatggccataccttttggttggaattatagatacatttttttctcctttcttctct

SEQ ID NO: 857204 - DNA, 519 bp, Homo sapiens
gatgacattttatttttatttttttgagatggagtctcactctgttgcccaggctagaatgcagtggcgcaatctcagatcacygcaacctccacatcctaggttcaagagattctcctgcctcagcctcccaagtagctgggattacaggcatgtgccaccacacctggctaattttttgtatttttagtagagatggggtttcaccacgttgaccagcctggtcttgaactgctgacctcaagggatctgcccacctcggcctcccaaagtgttgggattataggcgtgagccaccgcgcacagccagacatggtgactttttaatctcttattcttttttatacttccctgtgttgattgagcattccaaggatgtgctatctttataatccagaagaaattaggaatttagaatttaggaaaaaatatacgtatgtaaaaaactggaagaaaaccctcaaatggccataccttttggttggaattatagatacatttttttctcctttcttctct

SEQ ID NO: 857205 - DNA, 718 bp, Homo sapiens
gataaaataattcagcaatgtttccagatacaaaattaatgtacacaaataagtagttctcctatacaccaacagcaaccaagctgagaatcaaatcaagaactcaacctcttttgcaacagctgcaaaaaawaaataaataaataaataaaatacttaagaaaatacctaaccaaggaggtgaaaactacaacgaaaactacaaaacactgctgaaagaaatcatagacaacataaaaaaatggaaacacatcccacacccgtggatgtgtagaatcaatattgtgaagatgaccatactgccaaaagcaatctacaaatacaattcaattcccatgaattgaattcttcacagaactaaaaaagaaaaaaaacccctaaaattcacatgaaaccaaaaaagaccccacgtagccaaagcaaggctaagcaaaaataaccaatctggaggcatcacattacctgatttcaaactatactataaggccatagtcaccaaaacagcatggtactggtataaaaataggcacatagagcaatgaaacagaatagagaacccagaaataaacccaaatacttacagtcaactgatctttgacaaagcaaacaaaaaacataaagtggggaaaggacaccctatataacaaatggtgctaggataattggcaaaccacatgcaggagaataaaactggatcctcatctctcaccttatacaa

SEQ ID NO: 857206 - DNA, 467 bp, Homo sapiens
atatacaataagatgcaaactcttagatggttaactatatgaggtaattgtatattctgtataaccaccattcaaaacaaaaataaaacatttccatttccatcacccaagatagttctctcttgtccctctccagtcagttctcccctctccctggaggcaactttccagctttcattactatccattagtgttgactgttatagaatttcacgtaaatagaaccatatataatctgtactcttttgtgtccagcttcttttacttagcacatgtctgtaagatgtatgcatgttgttgcatgcataaatagttcatttcctttttgaatcatctgcctttgtattactatactacgatttgttctggatacattttcccactgatggacatttgggttgatccgactttgcgtgactgtgaaaaaagsctgctataaaaatttgcattcttctcaaaatcgtttt

SEQ ID NO: 857207 - DNA, 574 bp, Homo sapiens
tgttcacttgatccttctgagaatactttggtcacttggtttctaggataccacattctcttggttttcttcctcctctgtctcttctgctagtttctcctcttttctaaatcttttaatgtttaaatgcctcagggatcagatcttggcctcttccataattatacctattacttaggtagtctccacctgtcgagaagtcctactgattgtacttcaaaatatattctgagtttgaccacttaggactacctgtactgctactccccggtctgggctgtcaacacccctcactggaactactccaacagcttcctacctggtttccctgtctccaccctttcccattctcaacacagcagccagagtgatgcttttaaaatgatacattagatgcagtcacttctgtgctgaaatccagccgaaaatggttccctaattttattcatgtaagagtcaaaatccttctaatggcctacacaatgcccccaaatctgccctactcctgcctctcatttaccctctgacctcctcttctactgttcttcmtccttgctcttctctcttgcttgct

SEQ ID NO: 857208 - DNA, 617 bp, Homo sapiens
ttgccccccaaaactctgaaagtcttccaaaaattgttccatagaaaaatacagaaaaggacaaggttatgcagaactaggtcaacactttaaaagctgattaaagaggagaaattttgatttcatttcttaggaattttgcacttactggctggaaggtggaaggcagaggcattatgtgctatttggccctggcccagggtttccttctacttcctccctggagagtggggagtgggggagggtgtagcataatgattagagcacaggatctgaagcttcaaatccagtgccaccacttattggctgtatgatctcaggcaagctacttttctgtgctttagtctcctcaaatgcaaaacagtgataataactctatccattcccaaaggtttttataaggatcaaataattaggcttaaacacttaaaatctggagcatggtgtcatccatttctgtcaactcctaccttgaaaacgtaccccgaagctcttgcttcctaccacctgcaccatgaccmcctaaggccaagacaccatcgtctcatgcctggactgtggcaatgctcctaaccagtctcctctctctactccagctccactccagtctgttctcc

SEQ ID NO: 857209 - DNA, 563 bp, Homo sapiens
gaaatagagaaaggtgagaagtaaaacttacagtagagctttaggacataacagcaaaggatagagcagccataaagaaagaagaaaaacattacatttgacccttgaacaaggcagaggttaggggaactgacccccctcgggggtcagttgaaagtataactttttgactctccccccattttttttttttttttgacagagtctcgctctgtcgcccagactggagcgcagtggcacgatcttggctcattgcaacctctgcctcccaggttcaagcgattctcctgcctcagtctcccaggtcaacctgggattacaggcacccaccaccatgcctagctaatttttatgtttttagtagagacagcgtttcaccatgttggccaggctggtctgaaactcctgacctcaaatgatcagcctgcctcggccttccaaagtgttgggattacaggmatgagccacagcgcccagcctgactcccccaaaatttaactaatagcctactgttcactggaagccttaccaataacagaaacagtccattaacacatattttg

SEQ ID NO: 857210 - DNA, 291 bp, Homo sapiens
acagagggagactctgtatcaaataaataaataaataaaagttttcctgaggccaggcatggtggctcacacctgtaatcccagcactttgggaggctgaaaagggaggattgcttgaggccaggaattcaaggccagcctggtcaacataatgagaccccatctgcattaaaaaaaaaaaaaaaagaagaaaagttaccytgaaacaataacataaggctaaattatgtttagaataccctttgatataacttgaagtacattttagagttttttcaaaactgataatta

SEQ ID NO: 857211 - DNA, 354 bp, Homo sapiens
tcactgctgtatgcccagcgctgcagatggtgactgacatatagcaagtgttcaataagtatttattaaatgaatgaacgacattaaatgactggttattctaaaaagtgatgtaagcagatggytgttagattattgcagaggcaaaatccagagaagtaggatttggcccttctagtctctgctgccagatagtcctgcatgctgaatgaaatacatccaactacctaatgatttcaattcactcacctgtgacaccacagcccaccaaaaatcttggatatttaagaggggttttgtggggtaggggtgaaatagatctctgcttgcctctggattaatctcaaagattag

SEQ ID NO: 857212 - DNA, 423 bp, Homo sapiens
atctggctactttttatttttggtagaggcaagatctcgctatgttgctcaggctggtctcaaactcctgggctcaagcgatcctcccacctcggaattacaggcctgagccaccatgccaggattacaggcctgagctaccatgctggcattacaggcctgggccaccatgccaggattacaggcctgagccaccatgcccgccttgtagtcctactttgtttttgtttttttaaagaagtcccctttcttcctggttggctgagttgttttttttttttcttttttaaatcatgaatgggtwttcaattggttaaagtctttttcttcattcttcatctcctgaaatgatactgctttctctccttcatcctataaatatggggaattactatgattaattgattttttattgttaaacaa

SEQ ID NO: 857213 - DNA, 423 bp, Homo sapiens
atctggctactttttatttttggtagaggcaagatctcgctatgttgctcaggctggtctcaaactcctgggctcaagcgatcctcccacctcggaattacaggcctgagccaccatgccaggattacaggcctgagctaccatgctggcattacaggcctgggccaccatgccaggattacaggcctgagccaccatgcccgccttgtagtcctactttgtttttgtttttttaaagaagtcccctttcttcctggttggctgagttgttttttttttttcttttttaaatcatgaatgggttttcaattkgttaaagtctttttcttcattcttcatctcctgaaatgatactgctttctctccttcatcctataaatatggggaattactatgattaattgattttttattgttaaacaa

SEQ ID NO: 857214 - DNA, 560 bp, Homo sapiens
tggcttgaataacattaacttatggagccagctctaaagtcagactgcctggattcaaattcaggcttcattgcttaccagctgtgtcaccttcagtgagtacatgagcatctctgtgtcaggcactgtcctaagcaccaaggacccagaagtaaatgaagtaaatgatatagacgaagtcttggctattgcagagacaggcagtaaacaagtacattggcacattcggtctaatgtgtgtgtttcccacaaagctcatatgttgaaatcctaaccctcaaggtgctggtatttggaggtggggccttggggactgattaggtcatgagagcagagccttagaaacgaagccccagagagctcccttaccccttccaccacgtggctctctatgaacgaggaagcaggccctcaccagacacctaacctgttgtgccttgctcttggacttcccaacctccagaactgtgaggaatacatttctgttgtttataagtcacccagtctacagtaatttgttaagcagcctgaacakacaaaaacagaaatgcataggagta

SEQ ID NO: 857215 - DNA, 524 bp, Homo sapiens
atgttgcaacatcacaggtgagggatgctgagagatagagaaaaggctatatttaagaaagttgacagagaaaacttgaaaattactcaaacctgactcagcaaagatttctgctatgtgctgcatatccctgcatggcctgtagcccccaggactcgggggttaatctccccacgttaaatcctataccacttaatgagctgagtgaattgggcaaatatcatgttgccccggcctcactgctcttctgtgaaatggagattgcgatcacggtgtctacctgttagacactatggtggtctgaggattaaacaaaagaagctcagtaactttgagctcttgttattgctgctgcttatttgttagggaaggaagaaaaaaagaaaccagaaaactcctaactgatgcgcatcgtggagttctgstgagggaaaagagaagaaggtgtctgaaatgactcttgggcttcaaactctggattttctcatagaaaaattttatttctactgttcaagtgcagagtg

SEQ ID NO: 857216 - DNA, 556 bp, Homo sapiens
gcttcttgcttatcctcataggagtggatcataacaatgaccataaaacaatatttatctggccctgccctagcttctctgtgggcctccagtccctacagtctctccccaattagttccgagagtccctagagaggtctcacatatgctatttcttggccatcattccacaagagcaccagctttctagaagcctttcagcaactccatgactggattagatggccttccaatgatcccctggtaagaacagtcccccggtttttgacatttgtcatcttccccacatcgagagttcctagagggagctctctttctctcattaatttcatgggcttggcacagtgaatagacgtggcaggaacttggaagatagtcattgaatacagagcaaatccaaaactgtggtgttgagcaaaggggctctgcagagagtcggagcagaagggagcccaaatttggggtgagctagaggsgaagtcaggaggatgcagtgtgtgacaggagtccaggacaaaggatagcagtccagacaaatggaaaatatgttgggaga

SEQ ID NO: 857217 - DNA, 658 bp, Homo sapiens
catatttagtggaggtctcccagtctagataatgacatcatcaytggtttccctttgacaatttttctcccaccacaaaccaccacccagtgatcttgcctgccccccacatcttgatccttaagtctttctctcattttattcttttcagctttttgtcttttactttgcttctacttctcctactccaaatgcttctccctgcttatccgtactttttcatttgctttaggagagagcacttattcaataacttcccgtcttcattttcctagacaacattaaattcttaagtgcttttattgatgcctttaagtgttgccaaccctctagtggaactgcaaaacctattgggatagcacagttataaagaattagatactaggtatagaaaaatcactgtgcatatactgtatatgttatataatagtatcatatatggggaagaactttaaacttcttgaagaaaaaagcatttccaaatcatgtatcctagaaaaagcttaacaaggtttaggacaccagaagggacctggaattttaaagacgttattctttatgcataacacttggcattcttttcttaggaaaagaaaggagcttaggctttcttttcaagaaagccaagtgtcatgttatacataaagaataacattta

SEQ ID NO: 857218 - DNA, 620 bp, Homo sapiens
ctggttgtcaagagtacagcctctagtctaggttctaattcctgrgctgattgaccaagagtacgacctcggataacctgttgaagatttctgctgcaacttctttatctataaatataacggtaggacgcagctcaaaaaacttgttgtgagaataagtgtatctggctcccagtcagctcttcataaatgttagcaataatcattaatactatgtagtgagcttgctgggaaatgtctcaggatgtgctaggcaggctgaatgttgcctccttggttcccttttcccacctcttgggaaacaggggatatagggagaaacttcacagctagaccacctgggtcccatattttggggtttttaccaaagtgtttttgtctgtggatagttgctagttgacctttctgtggggggagtgaggcctgggaccccctagttcaccatttattgatgccactcataatgtctgttttgaagacttacttgttgttagtatcattagcatataatgtcacttcattagctccaggcggttaaactactgtaatgtttcaattcatttgtaactccacaccaggaagtccctcacaggggttaggaaatcaaagcccatagggtt

SEQ ID NO: 857219 - DNA, 548 bp, Homo sapiens
atagagtggcttctatcatctattgcattgcatttgccacatcgagaagataatgaggggccaggcatggtggctcacacctgtaatcctagcactttgggatgccrtggtaggcggatcattcgaggtcaggagtttgagaccagcctgaccaacatggtgaaaccccgtctctactaaaaatacaaaaaaaattagccaggtatggtggcgcacgcctgtagtcccagctactcaggaggctgaggcaggagaatcacttgaactcaggaggcggaggttgcagtgagtcaagattgcaccactgcactccagcctgggtgacagagggagactccatatcgaaagaaaaagaaaaaaagcagaagagaatggagactattttcttttatcttattaaggaaggtatcttgaaaatatctttccctactcctaatcttccatttgagcctctccaccaatctctgtaacaaccctgctcattgcctattgcggttttggcattcccctggaaggattgcaggatccaatatactgccataagaagt

SEQ ID NO: 857220 - DNA, 600 bp, Homo sapiens
aagtaggctaaaacttaaaaatttattaaaaaaaaaaaaaccctgatgccatactgagctgtcctaacccagacagctgaacataaccagacagtatttgctccactaatctctttaggtggggggttgaacttcactcagtttccagatggagactggggaaagttgccatggaaatggtccaatgccaaaaagcaggctaccctgagagaggagatggggtgggggcagttgcagaggggcctaacataaaggtggctggaggtaaggcccctcagggactacagaatctgcgggcaaataaatttacagaatatccccattcattgacaggacagtttggtttacagctttacaggctttgggctgggaaggtataagagagaatgagacatatgtggtctgtgctctcccagagcacaagaactaacagagccagtggcatctgaaattgcaataccatgtggctatttgtatayaccaccaaaagtaaagtttgcggggtccgaggaaaggcatgctcagtgctgtcagcctgggaagctggatgacactggaactgagactttggagatatgtaggattttgccaggagaaaaa

SEQ ID NO: 857221 - DNA, 570 bp, Homo sapiens
aattttaggtaaatattgaacctggttaacctgttagtttggatatttcactttttgctattttcagagaagggtatrggcttacatgtgttaggggctcattctagattcaccccgcctcaacttttaacctcaagtggaccagaaacaaagtcaaggaggtgcccaccagcaagtcaagaaggtgctgctaaccacacccagtgggataaagggttccaggttgacgcaaggctgtgtatgcccagatatgagagcgctgtggagttcaggcatctcacttcctgcactgcttcaaattaaacccctgaatgcaccgttaagtgctacagcagacctcttgctatgtgtgtgtgcatgagacaggagatgctaaggaaatagggaaagacagcctctgtttgttttacacaaatagctaaaaattggacttgacttatgcaattttgtgaatcgccctataaggaaaataccgcaaacctttaatgcacatactgctttttttccggatttgtgcttggtgaaaggggaaaataaaacaaaaccaaaaacaatgaaatctgactacac

SEQ ID NO: 857222 - DNA, 585 bp, Homo sapiens
atcctggatacaactgcagcgattctcaatggtagggtagggaatggatcccagtgcctcctctatgggccttcttagacccatcccaaggagagggggtggggcatgctgccacaacctaraatttagcagctagccagatgtaaggtcaccaggaaagaggtgaggtgggtaaggatgagggccagatctagtttagggacctgaatttctgtatctcaagcaaaagagactctcaactctgctcataagccaccaggcccaactccttcctgggctaccccatggcaggccaggtcatctagctggcccgggaactttagaaaatttctaaagagcagggggtgcatcgtggggaaggaggaaggggagagagtggcatatctaagagctgtctttagggtgacatccacatggcatcaagacctcagcctttaggtctatcagaaagggcagtgggacctagcttctccaatcatgattcactagcctggcatcttacagcatttttacaaaacctcctttgctttcttggatttttgttacgaatgttaaaatgaaagcctagggacattgaacaattta

SEQ ID NO: 857223 - DNA, 590 bp, Homo sapiens
ctctccacgtattcccctggtgccaggttctccaccctctgtgtctttgaagttgctgttccctctaccttagactgaaggtgaactccaatatcccttcattctgagcctaaataccaaggtccttgggcagaaggggtcctcccttcccgccccgtgttcatctctctatcatagcacacagtactctgggtcatagtaatggatttctatgtccttcgctccccaccctcccaacccccttccccgggctgggagctagagctgcaaggctggggcaggcccttcagtcagcaaaaaagcaagggcttcctcagctgcgggcccagggctaggctgggtcagacataaagaaaagactgaccctgggagctcactcagatggggagagagtcaggcaaacagtgagccagtggagtgctgtggaagtcagggcagagtgcagtgggagcccttaagcatggagaggaggcgggcaggtgagtgggtaggaggagcggtcttacaggcagagggaacagcataagcaaagacccaagcyttgggaagcgtgggggatagggctggagaggcatgggaggtgcagggag

SEQ ID NO: 857224 - DNA, 492 bp, Homo sapiens
aaatcaggacaagagctgggtttagaacctggatcacgtgtggcttttctccatgatcacaaaccccagcttcytataattaataattggatgtattaagtgttttatggagcagtccagccagagagcaactataaaatggaaacatggaccagcttggtaaagggaaagatgaaattgtagaattaatttgtttgttcgttcattgagtatttcataacaataaacttattgtatttataaagggaaaaacctctgggtgtaatttggctgcctggttgtttatatcctacagtgcagtttcagtatgtttcatgttagtgtgcctgttttaaaatgttttacttcattatcgtaagacgtttttaatgcaatgaaacttcaagccagaaaaatcttagaaaattaacgaaatagggagtagagagaaatggagatagcattaaactaaatacaaagaaaaaattgaaacaaatttttttatttgacaaa

SEQ ID NO: 857225 - DNA, 746 bp, Homo sapiens
aaaaattctagaggatactagaaatccatttctggatcttttttttttttttttttgagacagagtcttgctctgtcgcccaagctggagtgcagtgatgcaatctcggctcactgcaagctccgcctctcgggttcacgccattctcctgcctcagcctccggagtagttgggactataggcgtccgccaccgcgaccggttaacttttttgtatttttagtagagacggggtttcactgtgttagccaggatggtctcgatctcctgacctcatgatcctcctgcctcggcctcccaaagtgctgggattacaggcataagccactgcacctggcctctggatcattttttgactggtaacctgacttggtgatcctagtaaaagacagcaacattgatgggggagagcggcacttctgttaagaagtatagtgcagcaatgtgaggaggcatctaagagaaataaaaaacaacaacaacaaaaatgcctacattccactgaactacaaatattattcaagagaaaacttgacagtctttgcctcataaataattagcaattttgtcacccatttttgcatgttatcattaattaggtattgtggattgaatgtctgtgttcccccaaaattmatatggtgaaatcttaaccccctatggtttttggagatgaggatttgggaaggaaattaggggttatatggggtcataagggtggatccctcatgatgggattagtgccct

SEQ ID NO: 857226 - DNA, 552 bp, Homo sapiens
cagcctatactttctttaaaagtgctctgcagactgcagagcattatataaattaaggttattatttttatkgttaggtgattattaaccaagatgacgtggtgagtcaagtgcacagtcagacctggaactcaaatcccctgactacctctctaaggctttttccacaactttatgtaacacttgtgttcaatactaagccattgttatcaaattctcaaatttgggttttatactaaccatttgtattgaaaaaaaatggtgccatgcataaaacaaaatcctttaagattacatgaaataaatgtaaacccaaggaattgatggtctatccaagccaaaagggggaaatgtagataaggatatacagtcgtgcaccatataccaacagaggtcctgtaagatgataacgctgtatttatactgcacctttcctgtttagctgtgtttagatacacaaatacttaaccgttgggtcacaactgcctacaatattgagttaggaaaatgctgtataggtttgtagcctaggagcaacagaccataccacat

SEQ ID NO: 857227 - DNA, 552 bp, Homo sapiens
cagcctatactttctttaaaagtgctctgcagactgcagagcattatataaattaaggttattatttttatggttaggtgattattaaccaagatgacgtggtgagtcaagtgcacagtcagacctggaactcaaatcccctgactacctctctaaggctttttccacaactttatgtaacacttgtgttcaatactaagccattgttatcaaattctcaaatttgggttttatactaaccatttgtattgaaaaaaaatggtgccatgcataaaacaaaatcctttaagattacatgaaataaatgtaaacccaaggaattgatggtctatccaagccaaaagggggaaatgtagataaggatatacagtcgtgcaccatataccaacagaggtcctgtaagatgataacgctgtatttatactgcacctttcctgtttagctgtgtttagatacacaaatacttaacygttgggtcacaactgcctacaatattgagttaggaaaatgctgtataggtttgtagcctaggagcaacagaccataccacat

SEQ ID NO: 857228 - DNA, 533 bp, Homo sapiens
gtgaatgaagcacctcaaagtttagatttaaaaattgttgacagtaatttttaataatcaagttacatgtatacatagctttttttaccctataaagtagactataccgtatataaagttttaaatctatttcagggagatctatttcctgtgattaaaaaattagtaacaggtgccaaatgaatgttacaggtggtaaatataatgggaatattatatatattgatcttttggctattatatgctatcgaaaatcatacaagaaagtaaatattctgttcttggaatacataaagcatatggtgctatgaccaattggcctaactcttaagttgctgagtatacattctagtctttttggtcttgtatgctagaatttatacatttcttcatcagaattgtattaacatttaaataacgtgtgctttaaacatttaaataagatgtttgctttaaggcatacaattatttawccatatccattaattgaactagaaagagataattttttaacgtttaccatgacagatttt

SEQ ID NO: 857229 - DNA, 607 bp, Homo sapiens
gagccagagaagagttgggttgaaatagcaataaaaagagagaaaactaagcaaaggaaaaacataagacaatgatttaactgtaaggaatcaaaaagctgygtaggaaagaaaatctattcatagtacaccacatggctcagctgtaaacattatctacatagttactacaatgtaaacactgaatactgagtaaataaagaatatggtctaactgtatggaagggatggggggataggagccatgtgttgaggagtggatgaaagggagttaaattctcaccttccataatgaaaaaccaatagatatggaggtaaattccaaaagattcatctgaagagtttaaagtactacccatgggaagggaaaatgagaaaaagggtttcagggtggtcattgtttttcctattagtccttataaagctattcaacttattaaactacaatatgcttaaacttctgtcaaacaaaaactaaaatgaaacaaaacaaaaataaatgattacaatccaccaccccccatgtcatgttccctccatcccagtatctgtcatgaattattgtaattactctctaatgtctgccttccatgaagtcagggactct

SEQ ID NO: 857230 - DNA, 608 bp, Homo sapiens
tcctttaataataaaatacatccctttactgtcatattastgggattttaagagacagtgaaagtaggtgtatatgtttaatgtgccatctttcccaggggatttattttatcttgtatgccacattgcatcttttttcaaatgagctttacagtttattctgaaaatacctgtaaacacttaaattccattcctcagaaaaattaggcttttctccatcatggtatattttttactttttttccctttctttacctttcacagagtaaaattttgccactgcaaagatctacatctggtcaaatctgatgaaattagctttggaatcagctttaggaaccatattactcatggaagtagattaggtgatgtcttcggtttatgtcatcataagcctgtctgttattatttggactttatctaaattgccattcagtttaataacagatgcccagaattctctaaaatcccactggtgaaagatttgaaagaattcatggtaaatgctgaggacatccttaaacctggcttctttaggtatttatttcctttccttaggcttgtatacatggtctagcattagattaggtactacattgtatctttac

SEQ ID NO: 857231 - DNA, 582 bp, Homo sapiens
taaccaaaaagaaatctttgaaatatcaaataaaaaattcaaaatactgattattttattttcttgagatgtggtcttgctctgttgccctgggtgaatttcagcggcacaatcatagctcactgcagtctcatgggctcaagtgatcctcccacctcagcctcctaagttgctgggactacaggtatatattaccatgcccacttgttaaattaaaaaaaaatttttttagagagtgtctcactgtgttgtccaggatggtcttgaactcctggcatcaagctatcttcccacttcagcctcctgggattataggcatcagccaccaagcccagctaaaatactgatttttaaagaagctctatgagatacaggagatagctgaaaactaatataaagtagtgagaaaatgaaattcaggatatgaatgagaaatttaccaaaggcatagttttttgttttttwaaaaaagaacttctgtaataaaaaaattcatggaaggaattacaagatatggttgaaagcaaacaatggactagaccaagcaggagaatctcaaaatgtgaagataaatctgttgaa

SEQ ID NO: 857232 - DNA, 543 bp, Homo sapiens
cgtaatcataagaaacagctcatacagctctcaaagcctaagtatttactacctgacgctttccaaatagtttgtcacccctgtcctagaggggaaagacacatttaaggaacaaaatttggtctagagttgggaaaactggggttcgataagaaccaaaagaaaacagttgtggttagaggtatggtaagtgaggatgagatcaagttggagagagaggaagggccagatcatgcgtggagtattgcagagctatgactagtttcctaggccactaaagatgaaataatataaaacaggtgagtgatatacacagttctgcaattcaaaaaaatcactttggcgtaaaatgaggaaaatgagctggagcagtgcaagagtgaaagaggacttttcattgaggcagctactacgtggttagaatgagagmccatgatgactcggacttgaatgggcagaacgaagatatacagttgtcccttggtttatgcaggagattggttccaggatccccatgtataccaaaatctgcacatacaactc

SEQ ID NO: 857233 - DNA, 635 bp, Homo sapiens
gagaagactattaagttgcttcccagtagccatgttgcaagactacaaatattcagtgtagaaggacaaaaggcaattcagatcaaacatcaggatgaggttaattggatagcgggtgatattatgcataatcttatttttcaaatgtatgatgaaggagaaagagaaatcaatataacatcagctttagcagaaaaaattaaagtaagtatctctaacagattggttatttgtaagaactttttaaattttatgtttgtaagactgaacaagccgttttatgggtagcatctaaaaaagaagcttgtcacagaaaagttatactatcatttcaaattgtaagcagaataagcttttttcatggaataggttgaaatgcaaatgattcatatgtgacaaaattatacttagaaaaatgattttgacacttaaaaatctaggttttggcattttgtttagttgtgctcttcctgactagctgtttttctgcaatcataatcaacatcaccaccttgataaagctagcaataaattggtagcagttctgaaagcactaaacaaaagatctgttaaaggcaagcagtgaaacagtgttgttaactrcagagcctctatttggccattggaaattattg

SEQ ID NO: 857234 - DNA, 635 bp, Homo sapiens
ttggaattgaaagcatttgtggacagttcatctaataaaggatttcttataaaaaccacaaagagaaaataatgrtgttcttttgagacactatatattctggcagacactgcatactctgagtgggaccgttacatctggcttttgcctacgacaattcttttttagtaggcagggtataaattataaattttaaataaataatgcataatcttaaaaaaaacaataaaaccaaaccagaactgactgccttttctttttatacacatgaaaaaatttcaatgaaaacaaactatacccttggtaaatgcacagaatttgaatgtaagttcagcatgaacgtcgaagagttcatgctgtcataaaactctcttctaagtaacttttccggtttgaacacatctttatgaatacagagctgctgtgaggcttcacttattttgcacagaaagtgatttcatttccaattcttgtcctgcttccgttttcatggctatccacatcgttaggaaacttggcatagtaaggtgtccagggctgggatttgtatttggggaactaaattactcactaataaaaaaaattttttttactaattccatatttcatcatttagtaaatagccttcatcataa

SEQ ID NO: 857235 - DNA, 635 bp, Homo sapiens
ttggaattgaaagcatttgtggacagttcatctaataaaggatttcttataaaaaccacaaagagaaaataatgaygttcttttgagacactatatattctggcagacactgcatactctgagtgggaccgttacatctggcttttgcctacgacaattcttttttagtaggcagggtataaattataaattttaaataaataatgcataatcttaaaaaaaacaataaaaccaaaccagaactgactgccttttctttttatacacatgaaaaaatttcaatgaaaacaaactatacccttggtaaatgcacagaatttgaatgtaagttcagcatgaacgtcgaagagttcatgctgtcataaaactctcttctaagtaacttttccggtttgaacacatctttatgaatacagagctgctgtgaggcttcacttattttgcacagaaagtgatttcatttccaattcttgtcctgcttccgttttcatggctatccacatcgttaggaaacttggcatagtaaggtgtccagggctgggatttgtatttggggaactaaattactcactaataaaaaaaattttttttactaattccatatttcatcatttagtaaatagccttcatcataa

SEQ ID NO: 857236 - DNA, 628 bp, Homo sapiens
accttgtacatttcaatatcttgcctctaacaagtccaagagccaggaagagaaagtgaaagacttttgatatacatttacaagaacctacaattacaaataactggttatgattgtctggktgagttgtagaaggttgattgctttagaaagaaatagtaacttaatcttactgaaaatgactcctacatttcactcccttttttgggagagagattcttaaaaacaagttttctttaggatgagttcacatggggcttcttaacttggatgctgttgctcagaacagcaccttgccatggataacagttcttgattacgtttccacgaataaatcaggtgtgcttccagactcaccccttgaaggttcaatcttgtctaagaagcagattcatgcacagaagcttgtggctgctgcctgagaggacaagcctgcctcatgtggagggtctggaagaacatctgcagcggagggtgcttcctataaacaatgactcattaccgcactggccacagggtgtcctcgggtcacccgaggagacagcctgtatggccctgtatctttggacaataacacccgcaaaaccagaggcagcgggaaaggacagttgaagtttagtcaaagggt

SEQ ID NO: 857237 - DNA, 536 bp, Homo sapiens; identical to SEQ ID NO: 838807

SEQ ID NO: 857238 - DNA, 536 bp, Homo sapiens; identical to SEQ ID NO: 838808

SEQ ID NO: 857239 - DNA, 482 bp, Homo sapiens
agccaggagggcaagcaaaagtggcagtggcataacttcttcacgttggtgacctagctaggtagaggatgccttggaggaaygggagggtgtccagaggccaagagaatactcctgtctcgccctcggctcagagccagatctcatcactgctcacgctggacactcgatagatatagcccagcactgggaggcggatgaaacctgcgggatcaaagaagcccgcggggactcagtaacgcttgttccttggaatttggagagctctctctgcctcctgggcacttggaggcctctggcataagcacagggctggggggcagaggaggagggtggcaggccccttccccagtaccttggctggtgaggaggccgccgggctccgggtccagaagctctggccggctgttgttctgagccatctgccggtctgctggtttcactgctggttgacaaagagggcagtgttcaggacgaggagt

SEQ ID NO: 857240 - DNA, 527 bp, Homo sapiens
ttaaaaggcagaatttggggaagggaatccaggcaactgaagtraactgaattgaactgaactgaagcatgcaaagtgcagaccgctgggggttagaatagagagtggcattaggggaaaggagggtaccgcaagcgagaatttggagcttgtggacagtccagaatgccacacaaggacatgtgaactccagacagcaaaacaaccaggtcttctaaacagatgagtaaatggattagatctgtgatattgggccaatactccaacactattcctattcccaaataccatcaatgattgatttctgaagaaaagtttatttagacgcaggcttgtaccttgtaaggacaatgagccctattagctgcttctcacacgtctgggtgaaacaggacaagccagttctttgacagagagcagtcatgaattccagaaccgtctcattccggaggactttgtaactcacatcagcactaaacaggagcttcctttcaaaatatgacacagaaatggcaaacccaggccaa

SEQ ID NO: 857241 - DNA, 639 bp, Homo sapiens
tgcaaggagattccaaaaggtttgtggaaaaatagaattaaaaggtaagaatttaaaaaactacctttatttcttaccaagagttttaccaaggtcaagacacttttataagcaattatatcagccatttagtccatccctagagaactaagggtcctgggaatttaaccacatcagtgcagtcttttttagcttattaacgaaagaaaaatgggtgccctttacattgttttatattttaagattataaaacaaaaaaagtcagaaggagccaaatcagcagtaaagtgtatgcctaatgatttcccattgaaacttttgcaaacttacccttgtttgttgagaagaatgagtagaagcattgttgtggtgctttccagggaagctttcctggccatttttctgctcaagctttggcaaagtttctcaaaacactttcataataagcggatgttaccattctttggccctccagaaagtcaacaagcagaatgcctggagcatctcaagaaactattgccatgacctttgctcttgatgggttggcttttcctttgactggaccacttccacctctcrgtagtgattgctctgattgtgctttgtcttcaggatcgtactggtaaagccaggtttcat

SEQ ID NO: 857242 - DNA, 593 bp, Homo sapiens
aagagttgctccaccaaactaacagagctaattaggaaagagaagtcatgggatataggaaatagaagagaaaggtaaagggtayttccagaatgatgaaaaagttaatgaccaggccagtgatagtaaagctgggtgagagaacaagtgatccagaatggagctggtaagcaggggatatcatcgaatatgcatacaagaatgaaatgaagttgaaaaccttccagttgtaattgtcactactgaaatgggactcctatttttatgagatagtctgaggttgaattagtgtgggaggctgaataaccaaccctcaagagatctcctgatccttggaatctgtgaatgttaccttatgtagcaaaagacgctggcagatgggactaaattcaagatcccgagatgtggagattatcctggattattggggtgaatcctaaatgtaatcacaaaggtctttataagaggaaggcaagaaagtcaaagaaggagataggagatggacaacagaagcaagaagacagagacaagaaatacaggtgttctccagcagctggaaaagtcagggaaatggatggtctcctggatcctcc

SEQ ID NO: 857243 - DNA, 563 bp, Homo sapiens
aaagacactcacctgtgactatccgtattcttataatggatcctaagttatcatccactactacaatgagcttccaggatggagaaaagagtacaaatatataataacaagttagaaaaagaattctactggtcttgcaggagaaaggtttaaagctcacaagtgcaaaagaaagaatatacaaaagtgaaatacgtcctcccactagctagttgaaatgcaagggcacatgaaactcagatctataagaaggaaaagcaaagtgctttttttctattcttttattgtgacagcttctgcaccatgaatgctggtctatttagtaccagctgattctctctcatgcaaacttcctcctcatgtgtaatttttgcataaaaggttttgcttttaaataccacctcctccaatttcctactaagaaatgttttcatgtgtttagagtaaagtaatcacgatggttaacttgcaaatgaattaaaactacaaatgtcaggagtttytgagagctgacattaacataatattcttgagggattgtgctgctccagctaattggactg

SEQ ID NO: 857244 - DNA, 635 bp, Homo sapiens
ccttttacatacaatttaaggaaaaagattaagttgccgtctattgacgtcactcgctgcracacactgcttgtagccccacactcatcgcctggttcctgcctctatatattttttgtgtgctgtttcattgcctcagactccattcccaccttttttaacctggctgaatgtttgtgtttcttccacgctcagtacaggctccagaagttcaaggtagcttctctggaactcatctctttgtcccctcttccctggtgatacctctctcagcacttaccatattatgttgatatttggtatagggggctagtctctaccactggtctacacattccttgagagcaggaattgtcatatgtatcccatggcatagtgattgaccattaacacacagacaataaatgttgtctgttgaagtatacattgattgattcattggctgtcaccattttagcctgtatactgtttaaaattgtagttacattctaactgggtttagcattgcaaattacatctgtaatccaccaatgtgtgataaataggtgctggtgatgttttctgcttagaaaacatattcgtgagtgacttacagaaagaagatttagtaataaacataggtttttagtagtcag

SEQ ID NO: 857245 - DNA, 633 bp, Homo sapiens
gggaataaatggccacatataaatcgaaagcacacaagaacaagcaagctataaaccttgtccaacagaaaatcaatagcagtgatttttattttaggtcagcggcctatcaattataaagggatgggagatcacatttagtcattatttagccagggacagaaagagtaaactgaaccatatatttctatatttcttcatagaagcttgatttttgtaggagagaagggttcctattgaaatgacaattctgcacatgcgaaatgtgtggtatttttgtgccttcttaatgcaatgaatgcaacagagaccaaattagaggcaaatgaagtgaagtggaggtcagaatgtacaggacccaggatacatggttgatgagaagagaagagatttggagggatgacttacggcctttaaaaacatcaatttagagttttctcacttaaagagggaaatatagacatatgataaactgcaagctgcctttgggactgagatcaccatttacctaatctactattaatctggctctgttcatacactgactttaatcgtaactccattaagttccrttttaagaatcagatgctcactgtttctgatataaaactaagtaatttatagtctgaaacc

SEQ ID NO: 857246 - DNA, 618 bp, Homo sapiens
ggatggttggaaggtctaaaaataatatgtcagagagatagtatggtccctggcacagagtaggtattaaatattgatagttctaattattgacactatgataaaggttagtgttttttaagtttgacagtgagaatcaggtggaactgagcttagaggatgtggctgaataaagaggtggttgttgaataggccaaactgtcctggtgactttagttcgtgatggggccagtgtttgcaggacatttgtgtaactgtgcaaggttcatatactcaatgtgtggcaagtcaatacactgagacaccaagttgcagcagagaaagaggtataactgcaaggcagctaaatcaggagacaggaggaagccaaaaagctaccccccaagaaatttggggatagagattttaaagggtttaaatgagtggtgggaagaggtgtggaggtcagtgatttatcaaagcatgcagggtgaagtcgtgggatrgggacatgaaggaactgcatttttttttgctgatttggtttcttggtgagggtgttcagactgattggtatcagccattcgctggaatccagaatctaaaaaacatctcaaataaaaagtcttaggcttctga

SEQ ID NO: 857247 - DNA, 646 bp, Homo sapiens
aggcatggaagtgtacagtggtaatcttcagtaatagcctaattcttctggtcgatgccattcttgaggcaacaacctttagaatccttattgggtgttcagagttgctgtcagrctagtaaagctatggctggaccccaaatgctcttgggggctgcatgtccacccctctcttctttactctctgcatatccttaaaagaagaccctgttgtgagaggtcactgagtgtaactccttctttggcaatggctaagaacaaagcttacacatctaaagaaagctacctgttactgtgatcacctcataccttatgccctgatctcagtaactgactttctgccttggtgcttcacctggtgctagactcctagagtctatcttgttctgtctagtattcccaagaactggattctatctcctaaatcctgatatatggtcagcttctcattacttctgccagactgttctactgccagctggcttgctggactctacctattacctgctgccaagttctctgcattcttgttccacccacttgaaagccagcctcccagatgatgaagtgtgagatcatctgtcagcgtcttttcaggagatgacacagcctttgtcctgtcactattggctaccttctgcattgt

SEQ ID NO: 857248 - DNA, 505 bp, Homo sapiens
aggaaaatgaacaaatacaaaatctccaaattatgaggatccattctacccctgctgctctgacagcggtgtgggaagggaatmttataatttaatttcagtattttatggggcctgtgtgtctggggtgagaccttcacaactctttttccagtggtatagctgttttccccattcagctggaactggagagtaagaggaggctacagttgaaggaatgttcttccttcgttgtgataagaatctaggaaagtcttttctactgaaaaatcggcttttgtaatgcagaggtttctgaaggactctctcaatgactattcttcccgtcaaaagggaatcattctgggatcttcattttgaagaccttatggagttcctggaggtaaagctcaggaaagagtagcgggcctcctgaccgagcgcggtgtctcatgcctgtaatcccagcactttgggaggccaaggcaggttgatcacctgaggtcaggagtttgacaccagcctg

SEQ ID NO: 857249 - DNA, 351 bp, Homo sapiens
tctaaaaatgctatatactgtatgattccaactacatgacatgcyggataaggcaaagctctgaagacagtcaaaaaagatcaatggttgccaggggttcaggggatggaatgaagaagtgaagcacaatgagaatattttgtaaaataccctaatgatagacacacataattatacacttgccccaaaccgtataaaatgtgcaatacggagagtgaacctaatgtatccatgaactttaggtggttataatgcgttactgtaggttcatcagttgtaacacatgtaccactctgatagaggatgttcgtaatgggggaagctgtccatgagtgagggcgggagtatatg

SEQ ID NO: 857250 - DNA, 351 bp, Homo sapiens
tctaaaaatgctatatactgtatgattccaactacatgacatgctggataargcaaagctctgaagacagtcaaaaaagatcaatggttgccaggggttcaggggatggaatgaagaagtgaagcacaatgagaatattttgtaaaataccctaatgatagacacacataattatacacttgccccaaaccgtataaaatgtgcaatacggagagtgaacctaatgtatccatgaactttaggtggttataatgcgttactgtaggttcatcagttgtaacacatgtaccactctgatagaggatgttcgtaatgggggaagctgtccatgagtgagggcgggagtatatg

SEQ ID NO: 857251 - DNA, 575 bp, Homo sapiens
acctaatgtatccatgaactttaggtggttataatgcgttactgtaggttcatcagttgtaacasatgtaccactctgatagaggatgttcgtaatgggggaagctgtccatgagtgagggcgggagtatatggaaatctttgttcctttctctgaattttgctgtgaacctaaaactgctctaaaaaaaaataaactcttaaaaacattagcccatactcaatatatatattttgtatatatatttactgtatcatatattatatgcatttgtatttttaaggatacatttatgcaacatccatcacaaagtgatagattcatcaaaaaatcttcatttctctatttgaagcctggtttaatcatgaatattatcaatgagtacttgtcacttaaaaacaattttttaagatcaatatgtgttcctcaattagtcttggcattcagatcattcttcacttgaaggattaaaaaactggataaattttaattgtggctttgaaaaaactttacttataaatttactgcagcttgatgaattttattgtcatttgttgcatcatttcttcgtgaat

SEQ ID NO: 857252 - DNA, 575 bp, Homo sapiens
acctaatgtatccatgaactttaggtggttataatgcgttactgtaggttcatcagttgtaacacatgtaccactctgatagagsatgttcgtaatgggggaagctgtccatgagtgagggcgggagtatatggaaatctttgttcctttctctgaattttgctgtgaacctaaaactgctctaaaaaaaaataaactcttaaaaacattagcccatactcaatatatatattttgtatatatatttactgtatcatatattatatgcatttgtatttttaaggatacatttatgcaacatccatcacaaagtgatagattcatcaaaaaatcttcatttctctatttgaagcctggtttaatcatgaatattatcaatgagtacttgtcacttaaaaacaattttttaagatcaatatgtgttcctcaattagtcttggcattcagatcattcttcacttgaaggattaaaaaactggataaattttaattgtggctttgaaaaaactttacttataaatttactgcagcttgatgaattttattgtcatttgttgcatcatttcttcgtgaat

SEQ ID NO: 857253 - DNA, 628 bp, Homo sapiens
aatcttgtctttctcttgagttgctgtatttagttgagaagtttcactggtcatttgtcactcaaagtatttattaaatcctatttcttattctttgggatcaaaaagaaggccgtgttttcactcatataagaacaaagaaataaatatcccaatctcactcttctcctaacttctgatctcttgctgctgctctccaatggccaaacacatcagggagcaaatgagacttttggtgcaggtcagtgtcccagggcacaaagcagagacgaatggagagtgcatttggagagacaaaaagcggatagcacagcacttacttcttacgatttttcttcatgtggatatggaaactcttttggttccagtttatattcttaagccctccatcgttaaaggaacacagaaatctttagtaacaattctaagacatattactacatatttaaaacctagacatatgcaattgaatttttctttaaatcattcataaattcactatcaatctcataattgtgaaatcacaagatayatctacttgaaattctgaaggtgataccaaatgttatgtccaaaagtgatatggtttgggaaaaaaaattagaaagagaatatactagtatttctg

SEQ ID NO: 857254 - DNA, 619 bp, Homo sapiens
tctgaaatgacttcctatgctgctctcccaccaatgacatttataatggtctctattctttctgaaggaagacgcctggaggatgtgagtcctttgattcgaagaagctcacagtactctgtaagattctaattataaatacaaaacattaaaatgttttgcccattattttccactattttcactcctgtttattgaaaactaatgagataatgcgttttcaaagcacacttaaattattgaactttaaaatacagtaaccaaattatcatactcctaaagcaattttcaatctttttaaagtataaaatagtacctgaaaagagcataacacttttttaaatttaatttttatttataattagcacacggtattgtacatattcatagggtacaatatgatggttcaatgcatgtatagatagtgtaatggaatccagccattctattactgggtatatccaaaggaaatgaaattggtaggtctagcagacatctgcacacccatgtttattgcagcacaattcacaataacccatatattgtwtaaacctaaatgcccatctaatgatgaatggattaagaaaatgtcatacatatacacaatgaaatacgattc

SEQ ID NO: 857255 - DNA, 622 bp, Homo sapiens
ttccttttaggccatacgtcacacaagtttatgatggcacatctgtcccataatcccactggacatcatgaacagctctcaccataagtggcacaacagaggctattggtggaaccagattattcaagtcataataatcaagttagcatccaggatccatctgcttttctcgtaagcgaagcatggttgctggcaattaattttcctcattgaatcattagttttattaataatgtttgatatttgtaatggaagagattttggggtattctatagctttctattacacatgatcaattaaaattggcaaaagacataagtattcactgtctaaccataggtcagctatagcaaaatcctctattctgatatctatttcaattatgaatctatgtacagatatttttctgattttctaaattttcctttcatcgtagctattactttctaccacacaattaccacaccttgcattttgactttcagccctctattagtacttcatgtccttctacagacattgcaggtcatcatgycccagtttctgattctcccatcaggctgtattaccttccttataccattcagttgcattcgttttagaagctttggctcctctgct

SEQ ID NO: 857256 - DNA, 621 bp, Homo sapiens
ctgactatctcctattttctgatgcagatgtatattattaatatgagtgatatatcatctgattaatacaatttgcaacaatgagcacatgtttatrgtaacctagaccagattcttacttatcttagatcccttaattaagagttgaaagaaatgtgttatcaaggacctaatttttaggcatcgctaagaagaaacataaaagtatcagaaatatttgttagtcacttccctcctataatttgtttggcagtttttaatcttatttttgttgcttaagaatttcctaaaataaaattaaatatacatatatgttttccctgaataattctgtctgaaactcaataaaatctttcaatctgctattcaaatctattattcacccaaaaaccaatcagaaaacacatctggtacttttttgtactcattgcctcttcccatctgacttattttctttcttgatctttcaatactcacatattagatctataataccacttgttttccaattatttcctctacaccattgcctctttttgtatttttacttcaaattatttcttttgtttggttttcatctctttattcagatctcaacactggccatttccttagttcatc

SEQ ID NO: 857257 - DNA, 601 bp, Homo sapiens
atctattatggaaaacaattatccgtaattaaggcaagataattgtctcaagaattaagtatataaataaattttgagagaatctttaaataaagaaggaaaaatatgtgaatamttggaataagtaatttccaagacttaagatgtatttttagaaaaagttcaagttgagaaggaagtaaagctaattatttttttaatttaaagaatattgaacaaatgagcttcagagcagtaaagaaataatactgacagaggctacaagggagccagtctaattatgtaacttactgtagagacaaaatcaagatggagcaagctggtcaataattgttgttttatctaaaactctatgtaattgtaattaattgcattttaattaggaccttcaatgcaagaagagaaaccaacattgacttttcctggaatgtaaggtacgatttaactattcaggtaaagaaatgacagctgtagaactggatctcagaggccatctgaaaactcaaaaatactacgttctctttatctctagcttttctctcttaatctctctgtgtgagtgattctctttactggcatattttcaccacatggcaagaaa

SEQ ID NO: 857258 - DNA, 622 bp, Homo sapiens
attctgtttcatatgtccctaaattatttttcaaatccaaaacatgtttgttactgagattacatgcttgaatagaattttttagaaagaaaaccttcatatgtcttcattatactatgaccaatagtatagtcaagaaaggtcataaaagtctccgagcctgaaattatttttccaattaactgtataaaatgttaaagttctgggtatagataactttttctcaataatggtagcaaagattataataacacagagtcgttgaatttagaactatggttcaagttctacccgtccaacttagtggcagtatgactttaggagtaaacaaaatcttatctaaaaacaagcaattaataaatatcactttaaatcaatattattatgattgttcaaataacagaatttaaacatactaattatatacttatatgtttaaattatttcagtttacaaggatacacatttaatacttctccaaattattatctagcataatccaaaagagcatgctttaaacrgtactcgcccaactcacaaaaatacaattattagtgatgctcacctagagtgaaactatttactcatttgcccacagctagcaaggcttgatagaatgaaa

SEQ ID NO: 857259 - DNA, 633 bp, Homo sapiens
gtgaatttaatgatacatgtattctattgtcactagtggttagaatggacaatttgcatatagaaatagtgtcatacagtacaaaaatttaaaaacaaaacaaatattcaaaacataactaagaatataaaatcaccttatcactccctggtcctgcatagctatttgttgacatttatattaaagccttgagctattttaatgtattctcaagtttaggaaattttatgtgaatttgtatcaaattgacaattttactaatctctgtgtatttactttttgtaaattaaatgaattttacagcacccttgattcatcagctgcacagatttagcaggtttatggtgaataattgcatatattttttaacactgagtttctatcaaaaagaaaacaatagaatttgcaaacaaatgcatgaacaatttgttagtctatataactctcccacatttggaatagtccttcctgtataagtggaagtaaaaagctagctttycattcataattacgattagaattaggcatgctttaattgtgttgatgctctcttataccagttaataaatctctctctcatatcaaattgatttaataaaaatatcctgtgctatgttttttctcctgaatgga

SEQ ID NO: 857260 - DNA, 541 bp, Homo sapiens
gaggcggaggttgcagtgagccgagattgcaccattgcattccaacctggtcatcaagagcgaaactccatccaaaaaaaaaaaaaaaaaaattggattttatctstttttatctctagttaggtgatttgagaagaatttcagaaagaatggctgtactgtctattgcatggtgacaggaagcaggaataattttatgattaattatctttaccttatctaaaaagaagagatgacaaaagcaaagctaaacctgtcattgcaaatagcacccatttatactggctagaggaaaagagatatggggaattttttgttgtttgatgcttcataatttttctatattcagacaggactatgaggtagccttgtttctgtcttaatcaattagcaacaggatgatcttgtttgatattaatgttttgtaaacttatttgtgtttaacaagagaacatgaaggcctcaatgatattgttgagacagctcccagatgtttcggatcaatttgttctctcttagtaacaataggctccttgcagtt

SEQ ID NO: 857261 - DNA, 622 bp, Homo sapiens
tctatcttaggtacataccatagcttttgtatccattcacctattgataggatttggagttgcctctaacttggggttgtttttaagtaaacctgcaataaatattcatgtacatgtcatgtctatacatatgctttcattttcctattcttcagaaaatacctaaaactgggatggttgggttatatggcattagtatgcttaacttttgaaaaagattgaactcttttctaaattaatagcagcactaaacattttcaccaataatgttttgtttctttcttcctttgcaatatataactgttattttttcccgtcttagagcactagctatgattttcaatatgaaaaatagaaatgaggagaaacggtactctactcttgccaggtacctgatcttggcatggatattggggaaaacccacagtttcttaatattaggtatggaactagctgtaggacttttaaaaatgttcttattcaagttkagaaattaccactaatagtttgctggaagttttcaatcacaaatggatgtcagattttgtcagataattttagttcatcagttaatataattacataatttatgttattttttcatgtatttctaaattggttt

SEQ ID NO: 857262 - DNA, 592 bp, Homo sapiens
caagatgctgtctcgaaaaaataaaataaaagataaaataaaaaatgtaatttaatttagagagagagggaaatagaaagagctcctggagcacaatagttttattataatcattagattatggcttgaggaaatctgccccaaacatctctaaagaactaataaggatataggcacctcagtgtttgaaaaggtagcttttaaaggcataaagccagttgccttatcttaaggaacagacattcactgtcagactataggacaacaccctcagccctggtaggtatgattggatttccactctagcattcactgggcacaatagctacgcgctcttctcaaaggatgttggaagacacaaaatgacctcattgctggtatggtgtccgcaataatatctcccagctgctctaggctgtattcacaacaaaggaagcttgactttgtgcagccctccaggctgttaactctcaggagcccattcatctacacagacatatggataggaacaacgtgggggtggaggtggaaaaaaacagwgaaaaagaaaaaaatgctaacatatttcaatttcataaagagtcaagtgtta

SEQ ID NO: 857263 - DNA, 625 bp, Homo sapiens
atcacagttctctggaagtgagcttttgtgttttgctctaatcagcaggatccaactttactactgtcatggagggaattacagtaattctaccaacttttgaggcaaccttcttctgacactgtgtgaaacagactgaaaagactctaaagatggagagagctcaatgcttgagaaaaggaattctgtcctttgaaaggtctctagaacaaagggtatgcaatatgtttatcacttcaacttcagaaacataataggctctagaaacacattctcattgatctgtttctactgcttctgttttttttttttctgcttcacccaatcgtcttcctatttttatctctttcattccactctggagccatgttgcttggtcaggccacccttcaaaataaatgattttttccctctttcatgttatacctgttttcttaattcttggctgttacttttctcagttaacctttggcaaatcataatgaaattaaatttagctggttgtagagagaaagagtcattgtagaagttgggatggtctggaagtgaattaaaaagtattttgatagccctcagaatgtggacaaaaatagyaaaaatccagctgggagtcagtgtatctatt

SEQ ID NO: 857264 - DNA, 481 bp, Homo sapiens
atatttatcttaatcttttaagtttttatatatcatccaraaaaatgagatatctataatagtctttcagttctgtaaacttttctcttttttctttctttaattttttttttactttttatttttggtaacaatggttttacatatttatgtggtagatgtaccattttgatacaagcataaaatgtgtaataataaaatctaggtaattgggatattcattacataaaatatttataatttatgtgtgttgggaacattccaaatctcttcttctagttatttttaaatttacaataaattattattaactgtagtcaccctattgtgctactgaacactagaccttattctattaaccatcccctctttataaccccccgcaaacccactacccttcccaacctctggtaactgtcattctactctctgtctttatgagatcagttttctttagttcccatatataagtgaaaacatg

SEQ ID NO: 857265 - DNA, 388 bp, Homo sapiens
aaggtgatttattcaattacccatagtatgttattaacatagctatgacttctttgtatttgttagaaattttatattaagaaatatatacagtagttcccagtagaaatttatataaaatactctattttacatatgtaatgaaatctaagatttaaaagagattctttactctggggaaaataatggtggattaattaatttggtactcttttagggcctttctaaattaaaactccacattacaatttccaatgcagcccacaaacttaaatttatgaagaaatttaacaaatctactaagaaataaattcaaaatctgtaaaatatgcaattttaatgtyatttaaaacttttattgcaaatattcctgttattagcaaagtag

SEQ ID NO: 857266 - DNA, 626 bp, Homo sapiens
gataaaaaaataaataccatgcaaacaataaacaaaagaatgccatagaggcaaatttttaactgacaagcttgacattagaacaaggaatgttattagcaatgaattgtgacattacataacaataaaaaggttaattcacaaataaaaatgtttaaactttataaatgaatagaactgaaactagaaatagaaaaatgtacaattattgttgaaaacgtgaacacttcactcttagtaactggtataccaaataaagagaacatcagtaagaatatagaagacctgaacaatgctctcaatcaattgacctaattaatatttataccatactcattctaaaatatcagagtatatattatttttatctatacagatcatatttaaaagatagatggctttctcaaccaaacaaaaccacaaaaatgtcaaaataattaaaattagagcaattgatgttctaactttaaaagaatttaaccagaattcaatagcagaaatctgaaaaaatcccctcagattyagaagctgaacaatttgtttttaaatggcagatttgtcaaaaagaaagacaccaggggaattgataaatacttatttgaatgagaataaaaacatattaaaca

SEQ ID NO: 857267 - DNA, 626 bp, Homo sapiens
gataaaaaaataaataccatgcaaacaataaacaaaagaatgccatagaggcaaatttttaactgacaagcttgacattagaacaaggaatgttattagcaatgaattgtgacattacataacaataaaaaggttaattcacaaataaaaatgtttaaactttataaatgaatagaactgaaactagaaatagaaaaatgtacaattattgttgaaaacgtgaacacttcactcttagtaactggtataccaaataaagagaacatcagtaagaatatagaagacctgaacaatgctctcaatcaattgacctaattaatatttataccatactcattctaaaatatcagagtatatattatttttatctatacagatcatatttaaaagatagatggctttctcaaccaaacaaaaccacaaaaatgtcaaaataattaaaattagagcaattgatgttctaactttaaaagaatttaaccagaattcaatagcagaaatctgaaaaaatcccctcagatttagaagctgaacaatttgtttttaaatggcagatttgtcaaaaagaaagacaccaggggaattgataaatacktatttgaatgagaataaaaacatattaaaca

SEQ ID NO: 857268 - DNA, 586 bp, Homo sapiens
cctgactggatttgcagaataattgctcagaattaaaatattgatccagagttttacattacytatcccttttgttccttgtgagctgcagccagagatcactggttggctcacagaaattagcagggttagtccaaaatgtagacaataactttaaaacagctaatgagtctagaatttaatgacaaatgtataataagttttgaaacataatttctttctccagtcttcatctttgttaaaaacaaatcatgataggactaagctgtttgcaaaataaactttagtcctatacttggcctgtttatttgcatagagtgtagcaagaataattattttgacataggctttttaaattggctttgatggaacgctgttccacaaggaatctcagataggacttcctgaagctgaaaccacccatgggtttttaccctcgaatacctgtgaattggtaaactccactcttcttgaggtcccaagaacatggggttcctggacctgttagaaagtgacatgctttactcaccacacgttaggaaccctgcatggggactgtgtagacaaggtatgaggccagttttcc

SEQ ID NO: 857269 - DNA, 586 bp, Homo sapiens
cctgactggatttgcagaataattgctcagaattaaaatattgatccagagttttacattacttatcccttttgttccttgtgagctkcagccagagatcactggttggctcacagaaattagcagggttagtccaaaatgtagacaataactttaaaacagctaatgagtctagaatttaatgacaaatgtataataagttttgaaacataatttctttctccagtcttcatctttgttaaaaacaaatcatgataggactaagctgtttgcaaaataaactttagtcctatacttggcctgtttatttgcatagagtgtagcaagaataattattttgacataggctttttaaattggctttgatggaacgctgttccacaaggaatctcagataggacttcctgaagctgaaaccacccatgggtttttaccctcgaatacctgtgaattggtaaactccactcttcttgaggtcccaagaacatggggttcctggacctgttagaaagtgacatgctttactcaccacacgttaggaaccctgcatggggactgtgtagacaaggtatgaggccagttttcc

SEQ ID NO: 857270 - DNA, 586 bp, Homo sapiens
cctgactggatttgcagaataattgctcagaattaaaatattgatccagagttttacattacttatcccttttgttccttgtgagctgcagccagagatcactggttggctcacagaaattagcagggttagtccaaaatgtagacaataactttaaaacagctaatgagtctagaatttaatgacaaatgtataataagttttgaaacataatttctttctccagtcttcatctttgttaaaaacaaatcatgataggactaagctgtttgcaaaataaactttagtcctatacttggcctgtttatttgcatagagtgtagcaagaataattattttgacataggctttttaaattggctttgatggaacgctgttccacaaggaatctcagataggacttcctgaagctgaaaccacccatgggtttttaccctcgaatacctgtgaattggtaaactccactcttcttgaggtcccaagaacatggggttcctggacctgttagaaagtgwcatgctttactcaccacacgttaggaaccctgcatggggactgtgtagacaaggtatgaggccagttttcc

SEQ ID NO: 857271 - DNA, 582 bp, Homo sapiens
acaattatactgccataagttaggaatacttacaactagtttccaaattctgtagatgccaggcagacagagagagacaaacatgstccaaattttgttcataggagtataccttgctcaattattaaatgctgtaaatagctcaaaataaatttccatgactctgaaaaagaaaacaaggatcagcaatgttccaagcaagtgtcagaaagattactgcagttttatattagtttagtctgtttagttaactcttactttgcttgatattcatgaacattccagctcttcctttattccaatgtcacaatctccaaagttatcagaaacttgcatttgagagcacgtgttaaaattctatagctgattataaaccatcttttaaagaggatgaaaataagacaacaattttctgtgaataacaaaatgtctaaaatagttacagtcagaaacatgattgacaaagaaatttgattatctccgtggtttgcaataacttaacgtaacaaccttaattgtgattgacagcatacactcacaccttagaattttagatatcccatacaattttggaacacatat

SEQ ID NO: 857272 - DNA, 618 bp, Homo sapiens
aaatgttttctatatttgcagacttttcctatgatggcaaaaggatgtcagaagtacagcaagcagcaaatttatttgaacatgtcttattcagtatataaataatactataacaatatgtgaacaagaaatatctctgaaagagacatgctgtggtgagagtattttgaaaccagaatttagaatttctttactatgtgaattttattgtttaaaattttatgtgtataaggatatcacattaaaattctcatttgtgaagagtaagtacttaaaaatcatattttacagcctgttgagcattttaatatttgaagggcttcagtgtgtttttcatttattcatgaaacaaagaatgatacatatgaagtgttaaaatagccgatacaataagctattaagaataacttgtgaatatttaaaaagatagaaatttcatagttatattgcaactaaagcctttgttacatttttactattttagaaatctaactgaatcaaaattggttttcaagaatttgacattttctttcacgtatccatctttgataatgatggcctaattaaccaggccycactgtccttagaaaataacagaaatagattgtctgaattaca

SEQ ID NO: 857273 - DNA, 415 bp, Homo sapiens
tccatatttcctcaatctgaaagctgacctgatttattatctaagtccgtaaatagaatmaaattgattagtcttaaaataatagccactattatctaaagggaagaaaaatgtagtaaaccgaagagtggtattcatgagtctgtcccggtcacttgaaaataaaatttcaataggtgtccaagcaggatgtgacaagccttccctgccttccctcccctgtccctgtttcagcagagatcagtctgcactttgaagctgcaaatggcatgtgagttgttttcacaaacccatgatggataatggctaatgggtagtactgtggtaacaaagcactaagttttgaacaaaatagctgtgggacttgaggatattttagtgcttcttttgcttcacaaacgcaccaagtttccta

SEQ ID NO: 857274 - DNA, 611 bp, Homo sapiens
ttctgaaaacccaagttatgaggctccattaaggcaatgaatgataaaattaaaaatctctggctaatgcaagatggtacacgttctcatatactaaatgcccatctaattaaaaaataactgattgctaaactatgagttattgagaatgagttcaaatatgagagatcacaaaggatttccaaagtaaataaaattcaaaaaaaggcattgttaaaggagtaaaattttgcagatgaagatcagccaagatggattaaccaggttgagaaacacatcggcaaactccaaaaggtagatgggaatatgataaacagaggacagcaagacctcttcctggaaaaactggactgtccaattttgtaggaatattagaaatcaagggctgttatgagaagtgtagctactttatgaatgatgatgagtggcctttgcacaaaatcagttactatttacagttttctctttttaaaaaaacatgagttattcctatgggataaataatcttccrttaccttcatatacccagcaaaagcacagtgtctgaagaaaagaagtagccagtaaaaaagcataatgtgagtaaatgaagaaatgaatacaggaataaa

SEQ ID NO: 857275 - DNA, 616 bp, Homo sapiens
gtttctcccacctcccaatctccctttttttattttgtgtataatctcatgtgctsttttcatttcattgtaattttcttcataattaagaatctatgacttatttcctttccctatcatttcctttctcgtaacatagcaaaacaatgtggcaaaatcagtgatttgttacttaagtaatgtaatcagtgctcatttaaaaaaacaaaaaaagaatattttaatcatattttttctttatgagtctctacttgtttgcacatatttgtagtagggaaaaaagttgatatagtaaacattattttccttccttttctttttctttattctagcagttgctcattgaatcaactggtataccgaaattctgtcttttgagcaaaggcataggtcccagacagtggagtgggaagaaatatgtagagacagtgtctgggggaaaagggaagaaaagaagaatatttgtgcactctaacagcagagacaactcatatgctatttctttgcatctgaatgaagtcaacaaaactcatggaaaacagacactgttctctgagttctacaaaaaaacagagcctgaggcaaagaacccgtatgttaacaattatttggcaag

SEQ ID NO: 857276 - DNA, 560 bp, Homo sapiens
tctggcctccaaaaatcctaacggttacttatatgtttaagtttcatagcactgtccagtttatttcatggtttgcattgttccaaatttagatataatttmtgtattatttttatatgaaattggaagtattcaagcagtaacacactttataaggaagtatccctgagagaatttcactgattgtgttttaataagatgagatatactaagatttcagttccatattattgtcttgttgtagaaactgtccttattcagtgatgcagaaaacatttagtttcctcttaaattcatagattcctattgagatacaaatgaattggatctggccttagagttttaatattcatattttaattttttatgaatgtgcttttcccctactaatctcttcttttcagcacacacttttattaatactaagtaacaacttttgtcttactagcatccatacttgctaacgacagatagattagcatagaaaatcactaataaaaaaacttaataaaagagttctcaaagtatatgacttagaaactcactaaaaagtgtttaaa

SEQ ID NO: 857277 - DNA, 620 bp, Homo sapiens
ggtggtgctagagggagacgcttttacagagttccttttttttttgaaacaaagacatttctgagtgtctaaactacattcttccttaaaaacccaggagtagcttctgttgcaataactgttttagtcaaaaaatgaggtgaaaagttaagctgacttttaaccattgagctccttaaaacaatttttttttaaatcttattacagtatttcagctaggacaaaatgctgctaaacgaacaatgatcacacaaattatacgatttctgagcgctctaagggtaagcagaaattaacaccagctggttgttaatgctaactttaggcatttaaaaagaatttgcaagacagaatcccaaaccagtttcttacctattgatggttctcaggttgtacactgctctctaccatgctagagcaggaaaaagaaactcgtttttcctgttggaagtaagctctgcctccataaaggagttacctgccttccatcatcatggaagaaagaaaamcttaccttccttgttggaagcaagtaaaactccaaaaaaggaggagttgtacagcaaaataaactttagatctcgaccaaattttgggacatcagaacaagcactaatagg

SEQ ID NO: 857278 - DNA, 585 bp, Homo sapiens; identical to SEQ ID NO: 837155

SEQ ID NO: 857279 - DNA, 467 bp, Homo sapiens
atgtaaatggataagaagttgcttcttatggatgaacaaagaaagtggtttctgaatatggaagctactcctgatgaagatgctgaaaacatagttaacatgaccacaaaacattatatcacasaaatagttgttaaaacagtgacaagattttagagcattgaatccaattttgaaaaggttctactgttggcaaaatgctaccaaatagcatggcatgcttcagaggaagagtcaatcgatacaataaactttattgttgtcctattttagaaatttttgatagtcacccaaacttcagcaaccgccaccctgatccatcagcaaccatcaatatggaggcaagactgtccactagcagaaaggttaaaactgctgaaggctcagatgtttgttaccatttattagcaatgaagtatttttaattgaggtatatacattgcttttttagacataattctactaca

SEQ ID NO: 857280 - DNA, 602 bp, Homo sapiens
atatatatataatttatacatttttctatgtataaatatgtataaaatttataaatgtattttaatattaagctcaaaaatggaaacctgtgttattgctcctaatcatgattccccytttccagtagaaggttttatatttatcattgtcctttgtcatgtgacttgcactaccgtaatatagggaggatgttattctccacctccttgtcaggttgatcatgtgatttgctttgtcaacagaatgtgtgtgaaagtgatgtacacgaggctgggcgcagtggttcacgcctgtaatcccagtactttgggaggccgaggcgggtggatcacgaggtcaggagatcgagaccatcctggctaacacggtgaaaccccgtctctactaaaaatacaaaaaaatagccaggcatggtggcgggcgcctgtagtgccaaatactctggaggctgaggcaggagaatggcgtgaacccgggaggcggaggttgcagtgagccgagagatcgcgccactgcactccagcctgggcaacacagtgagactctgcctcaaaaaaaaaaaaaaaagtggtaagaaagtgatgtacacgagttgtcactg

SEQ ID NO: 857281 - DNA, 616 bp, Homo sapiens
tctatcttaggtacataccatagcttttgtatccattcacctattgataggatttggagttgcctctaacttggggttgtttttaagtaaacctgcaataaatattcatgtacatgtcatgtctatacatatgctttcattttcctattcttcagaaaatacctaaaactgggatggttgggttatatggcattagtatgcttaacttttgaaaaagattgaactcttttctaaattaatagcagcactaaacattttcaccaataatgttttgtttctttcttcctttgcaatatataactgttattttttcccgtcttagagcactagctatgattttcaatatgaaaaatagaaatgaggagaaacggtactctactcttgccaggtacctgatcttggcatggatattggggaaaacccacagtttcttaatattaggtatggaactagctgtaggacttttaaaaatgttcttattcaagttkagaaattaccactaatagtttgctggaagttttcaatcacaaatggatgtcagattttgtcagataattttagttcatcagttaatataattacataatttatgttattttttcatgtatttctaaat

SEQ ID NO: 857282 - DNA, 547 bp, Homo sapiens
gaggcggaggttgcagtgagccgagattgcaccattgcattccaacctggtcatcaagagcgaaactccatccaaaaaaaaaaaaaaaaaaattggattttatctstttttatctctagttaggtgatttgagaagaatttcagaaagaatggctgtactgtctattgcatggtgacaggaagcaggaataattttatgattaattatctttaccttatctaaaaagaagagatgacaaaagcaaagctaaacctgtcattgcaaatagcacccatttatactggctagaggaaaagagatatggggaattttttgttgtttgatgcttcataatttttctatattcagacaggactatgaggtagccttgtttctgtcttaatcaattagcaacaggatgatcttgtttgatattaatgttttgtaaacttatttgtgtttaacaagagaacatgaaggcctcaatgatattgttgagacagctcccagatgtttcggatcaatttgttctctcttagtaacaataggctccttgcagttttaaaa

SEQ ID NO: 857283 - DNA, 269 bp, Homo sapiens
gtagttctttaaaactgattaactatgaggatggtaagactgggggaaaggataggccaaaacttggcctgaacacgagtgtcagctgatcttgaaagagtttctaattttagtgtaattaaaataaaaatttttaatagcttcacctattgccacataatattaattaggcctccaaagacaagaaaagctcctctatgaaccacttttacgggaatctctgtgccctcttagagtttcaagtstgcgacttgaaagatttaaactac

SEQ ID NO: 857284 - DNA, 606 bp, Homo sapiens
cacactactattacatcacttctttattgaaagcagaaatatgtaatatgtgttgtttggctctaaaaagagaatgactgtcatttctggaaaagttagacaagtaaacacctcatatttattcggagactttagcttgagtagtttttttgtgtcttctgatagtattgttatcaactatttcaaagttagtatctatataccctttttccttaagtaatcatgcatatttccagactattagtaaataaaaataatagatactcttcagtcaaaagaaattctattttagatcttcaaataaatcaacatagtttcattctcttaaaagagacttgaaagaaaatattgagatcccataatcaattatgctataaaacttttcacaaggaaaatttaagtcaacagtctcctataaaactttctgcagggttggaaatgttttatatccaggctgttcaaaatggtatccaccaccatgtgcccttctacacatttgaaayatggctagggcaacagaaaaaaaaatgaattttcactttaatttaaatttaaatagctacacgtggctggtcacagcttattggagaatgcaggttaagtaaa

SEQ ID NO: 857285 - DNA, 542 bp, Homo sapiens
cagattgggccactggttaacactgagtgagagaaggagagaggcctggattgttccatatgaaaaaaaaaatcaagagtggaaaataattcctgccacctccatcttcaactatatattttatttttaaattggataaatggccagtgtaagatgaaaaccaagaaaaatgccagaaactgagacttagactgtatgtccattgtggtagatagaaacttgtgaacttactaagaatcaatgtatctctgttgcagtgtgatggtctttcctcatggtctcccaaatttctaagggtagttggttcccagtatgtctgccacattgtgatcacaaatatcatgatcatgaagaaatgctttgtttggaaatgcctacaaataatgatggaagggcccaattgaaagtaaatattttkctgaaattatccatttaccaattcattatcattaacaatgaactcaacataacattagtctaatgagatagctcatttttttttttaaaagttatgtgtcgaatatatcctttaaacatgtcag

SEQ ID NO: 857286 - DNA, 634 bp, Homo sapiens
ctcatgtagttttttaaataccaaaatattcaagaagtctaggttttgagaaaatcattgccagactgaaaattacctgatagtaaaatctctgagtaaatttarattttaaaaattttgtcagaagcaattggtactcaaagaacacaaagatttgtaaatttcagggaagctaaagttttctaacagcctcaaaaattttatttcccaacactactttccccaaagagaaaagttttgttgttgttgttgttgttgttgtttttgagacagagtctcgttctgtcacccaggctggagtgcagtggcacaatattggctcactgcaacctctgccccaccccaggttcaagcgattctcctgcctcagcctcctgagtagttgggattacaggcatgtgccaccacacctgtctaatttttgtactttcagtagagacggggtttctccatgttggccaggctggtctcgagctcctgacctcaagtgatccgcccaccttggcctcccaaagtgctgggactacaggtgtgagccaccacgcccagccaagaaaagatcttaatacataagtaaaatatagaacagtctccttgtaagtgtttccaacacataaaagaaaggggaggatct

SEQ ID NO: 857287 - DNA, 668 bp, Homo sapiens
gccaagtgcagtggctcatgcctgtaattactttgggaggcttaggcgggtggattatcagaggtggggagattgagatcagtctggccaacatgatgaaacctgtctctactaaatacacaaaaattatctgggtgtggtggtggatgcctataatcccagctacttgggaggctgaggcacgagaacttgaacccaggaggcagaggttgcagtgagccgagatcgcaccactgtactctaacctgggcaacacagcaagaccctgcctcaaaacaaacaaacaaacacacaaaacatatatatatatatatatatatatatatatattatatatataattgcatttataatttaaataattaaaatgcctctaatatataaggtaaagcattcactttcttatgacattatttaatgtcataagaaaaagtctttatatatctatgaagataattttgactgaattaatgacatgttttataaaaacaaaatttcaaacgtagtaaaaaaattgaagtctaattaaccttaaaacaagaaaaaaatwtgaatgaaactctagtcaagtaaaacaaaatagaagaaaaagcaaccgacccatcaactctttacctccaagccttcaattacagatacttttatagccaggttaatttaaatattta

SEQ ID NO: 857288 - DNA, 629 bp, Homo sapiens
gcctagtaatctgcattctctaccaaagataaaagagctcagagaccacctgttagataccgtcacagaagagttcttcatagttccttcttggccttgacaaagactttaaagccagaggagtgacagaaatcctttctcttgaaggcctgtatgtcagagagtgagggatatgaagcaaaacctggattcgaggcctggttgtacctctgctggtcgagggctgtgagcaagtttcccagtctttctgagcctcagtttcctcatccatacaatggggaaacagtagctgctaggtcacagggtcctcatgagaagtaaatgaaatcatttacatagctggcatatagaaggcattcagcatgtgctaatggttaggatttgaacaactgctttctgagaacagaaccagttcccttaaaatcagctactctattaatgactttctcccaaaccctggatttaaattgtgtgttgagttttactggaaaacaaaagagaggagggtggaagactggatctggtgcagatagccaaaaatcagtcagcatctcccctacccagatgggcaaggaacagagagggtcgccggaagtctgggtcrctggtttcagagttgctagttaaag

SEQ ID NO: 857289 - DNA, 642 bp, Homo sapiens
taaatttagtgcctcctcttgtcatttgggcctctctcctgattgaaaagaattaattgccgctcaagtccacctacrtgtctgcctgccttggctttgatttctgtcacagaagtggctcttcctcactccccttctgtccttctcttccacccccagcagggttggaggtggaaagcttttcaacagccaaaactggtgtctgtagactgaccgtgttaaagcctccaacaggagagggaatcagaggctcaagttcaggagcaagggaagccacagattgccatggcctcatctcccagaaccgtgtggcaacgtgaagcttggagggtgtttcggagctgcaggatctgcctccagtgctgatactgtaagtacccaggacaccttccaggggcagaacttcacacgaggactcctttgcaggtgtctaagcttagcgtttctgtgcggaaatctgggggctggctctgtggactcactgaaagctctctgctgacagaatcagataatcagctaatacctgaccccgccgcgtcctgagccttggactgatacataacaatgtcatcaggcctgccttctaagagccttagccagcttacctcctctttcagagagtctgccctgggtaattattcc

SEQ ID NO: 857290 - DNA, 554 bp, Homo sapiens
agtacatgtgttggggaacatgtgtcatttctagtattaaaaacacatcactggcaatatcagtatcaatgaattgattctgtttgaatgatttttttctatgcactsaagtaccattgtaatgtgattatttatgtagacagcctgtgttacagggatacctgtttcttttaattttttaatgtgcccactagactatgtaaaatgtaaatgagcctgcattgtagtgctagtggatcactctattggcttgggtgatgggacactgggacttattagcaagggaggcaggaaacagctccctagagctgctcatggcaatgtccagattgagatggtcctgccaggggcatctagaaaccaacagtttgaggcaccctgtgctcaggtgcttaaggcactcttaagcacattgcagaaggctgcagaccatggtgggcaggaggcttggcttgggaatccagctaaggctgaactggcatccacctctgtcaacctgatgagtgattctgggcctcagttttcctgcctgctaaactgaaaacaagctcaga

SEQ ID NO: 857291 - DNA, 504 bp, Homo sapiens
aactacaggagcggtaaaattactactaattgcacaattatctgattatctctggtaccaaaaatacatgagatcctttccacctcccagctacttaaagaattctcagggacacttcttggggaagcagacagatcgcgcttgtcaaaacctggagagaccaaaggatgtaaggaaaggggatgtttgggtgagggtggcaaagggaatcacatgtagatccctagggagtagaagaaaaagtttagaacaggctggggaagaaatggaatgcaggagagaggctggcagaagatggtgatggccatgaattatataaatcacagctaaaagagcttatgagatcgtttaattccaacattatccctattctgaaagtgagatccatagaggttaggccacttgtccaagcacttaggagctggaaggtgtggaggaatgagggtggactgtggtggaggagatggggggctgttcamacctagctcaggcccagcacagtgg

SEQ ID NO: 857292 - DNA, 526 bp, Homo sapiens
catacaatgtaatattattcagccttaaagaggaaggatattctgacacatgctacaacatggatgaaactggaggaacttgtgctaaagaaataagccagtcaccgatagacaaacattccacttatatgaggtacctacagtaatcaaattcagagatagaaagtagaatggcatttgccaggagctggaggaagggaataatggggagttggtatttcatgggtacagaattttagttttgcaagatgaagagttctggaaacggatggtgttgatggttgcacaacaatatgaatgtacttaacgctacggcactatacacctaaaaacaccttttttttttttttttttttgatggtggggagggagtctcactctgttacccaggctggagtacagtggcgcaatcatagttcrctgcatccttgaactcctggactcaagagagcctctcatcctagcctcccaagtagctgggattacaggcttgtaccaccatacctggcttttttttttttttttc

SEQ ID NO: 857293 - DNA, 583 bp, Homo sapiens
aaaggttgctcatcacctctcccctccctctggctcttttccgtggtgatgcatagttcaatgcgcccaggaagcttcaygatgaggccgtcacccaaactagcagccctcctttccttctttctttgccaagtgtcctggacatcagctcttcctcagtctttgactctaaataaagaacttgaatttcaccattcaactgaaatccctctgacatcactactctcctctgacacaaatcccaagtttctacttaattctcacctactttatacttttaaccacccttagtactgctgcccttgtttttactgcactatttgttttgcaaagcaatatgtgctcattatcaaaaactcagacaacataaatagtgatttaccgtcttccagtcttgattacagggtgagtgaaagacgttttttaacaagattgggattatacctatatatattatttgtttccaactttctttcacttcactttattatacttttctaacctaggcttttgtgccactaagctctggttctcttcatttgttcactattaccttctgaattataggcaagatatcattctg

SEQ ID NO: 857294 - DNA, 583 bp, Homo sapiens
aaaggttgctcatcacctctcccctccctctggctcttttccgtggtgatgcatagttcaatgcgcccaggaagcttcatgatgargccgtcacccaaactagcagccctcctttccttctttctttgccaagtgtcctggacatcagctcttcctcagtctttgactctaaataaagaacttgaatttcaccattcaactgaaatccctctgacatcactactctcctctgacacaaatcccaagtttctacttaattctcacctactttatacttttaaccacccttagtactgctgcccttgtttttactgcactatttgttttgcaaagcaatatgtgctcattatcaaaaactcagacaacataaatagtgatttaccgtcttccagtcttgattacagggtgagtgaaagacgttttttaacaagattgggattatacctatatatattatttgtttccaactttctttcacttcactttattatacttttctaacctaggcttttgtgccactaagctctggttctcttcatttgttcactattaccttctgaattataggcaagatatcattctg

SEQ ID NO: 857295 - DNA, 576 bp, Homo sapiens
acacatttttagaattgtgtagacttcataagtatgcaaaacaaaaacagctggtatcaagcaccacwtgatcacctttaaattcagaaaacacacttgacaaaatgcgacaccccttcaggatgaaaacactcattaaataaggaatagaaagtacttccttgacctgataaagggcatctatgaaaaatccagagctaacatacacaaatgggccataaggacaaatggccaaaagatgtcaacatcattagccatcaggggaaatgtaaatcaaagccacagtgagataccacttcacacccgctaggatggctagaatcaaaaagacaggtaacagcaagtattaataatgttgtggaaaaattggaaccctcaaacactgctgatgggaatggaaatggtgcagcctctttggaaaacaagtctggcagttcttaaacagagttaccatgtgaaccagcagctctgcccttccaagagaagtaaaaacatatgtcagtataaaaacatgtacactaatgttcatggaacattattaataacagtcaaaaaatggaaaaaacctaaatttcc

SEQ ID NO: 857296 - DNA, 592 bp, Homo sapiens
tatgcaaaacaaaaacagctggtatcaagcaccacttgatcacctttaaattcagaaaacacacttgacaaaatgcgacaccccttcaggatgaaaacactcattaaataaggaatagaaagtacttccttgacctgataaagggcatctatgaaaaatccagagctaacatacacaaatgggccataaggacaaatggccaaaagatgtcaacatcattagccatcaggggaaatgtaaatcaaagccacagtgagataccacttcacacccgctaggatggctagaatcaaaaagacaggtaacagcaagtattaataatgttgtggaaaaattggaaccctcaaacactgctgatgggaatggaaatggtgcagcctctttggaaaacaagtctggcagttcttaaacagagttaccatgtgaaccagcagctctgcccttccaagagaagtaaaaasatatgtcagtataaaaacatgtacactaatgttcatggaacattattaataacagtcaaaaaatggaaaaaacctaaatttccatcaattgatgaatggaccaaaaaatgtggtatatttatacaataaaa

SEQ ID NO: 857297 - DNA, 624 bp, Homo sapiens
aagtcctggagacagtccagtccatccagagaccaaacagcaggatccatgcccactaaaccacctggtaacaggctggccacccacaggccccactgcaaaaggagtagcagccacatgacccagctccaaccccattaaaactagaagaaaagaaggcaaaataaaataattgtgacagggctgacaggacaattgtggattaagtctcagttctttttaaaagggttacattgaagataaatcttgactgcatctttagaggaattaaggtaaccttgatgaacagtagaaggaatcacatgtgaaattccttgaataaaaatttactggctttaaataattttgtctaatatataacatacaatttaaaaaactctttccaaaaaaagactagaagatatgtttgctccttcaaatgcagacaccaacacaagacgacagggataaaaaagaatcaggcaattatgacgccaccaaaggaaactaataaagctccaacaatcaactccwaagaaatggagatctaataactgcttgaaagagaattcaaaataatcatattaatgaagttcaatgagatgcaaaacaatacaattagacaactaaatgagtttaggaaga

SEQ ID NO: 857298 - DNA, 567 bp, Homo sapiens
tcaagaacacctgcattcggggactgggaacaagtgaagaagcccaagaagaacaaaagtaaggtgaagtcagaaagggagaaggcaaaccagaggagaacagggaaggaggccaaagggcagagggaggaagatgctgcagaggcctgaggccgaggttgagaaggcgccactgaattcggtgtctgggaggacatggctagtggaaaggctgcggcaggggcagggagtcaggagtggaaggaaaaggaggtgataacatctcttcagacaagtggtgaggaaaggaaggacaaaggagcaaggggaggggatattctctgtccctctcaggcacaaggaagccctgtgatgtctgcaggctggactctgggctcagggatctgctggagaagaaaaaacatcaaatgccacagggcgagacttaactgatgaaataggtaccagaggaagtcagaggagggaggcgggagtgacaagggcaaagttcagcttctgaaagatggattrtttttttccatgaaattagaaagaaagagaaagcgaattaagagaaagaaggtcttt

SEQ ID NO: 857299 - DNA, 558 bp, Homo sapiens
caagttggttgctatgttgctagagtcatctttttttttttttaactttgctatagtaaactttcttacatagattttagaccmataatcatgatttctaagtattttacattgttttttatttttttttttcatttttttgactatggtaaactacacataacaaaatttatcatcttaaccatttttaagtgtacagttaagtagttttaaatacatccatagtgttgtacaactcccatcactaccatccatctccggaattcttttcattttgtaaaaccaaaactctatacccattaaacaatgtccccctcctcccagaccctggcaaccgccgttctactttctgtctctaggaactcaattactctaaatatctcatataagtggaatcacacagtatttgtccttttgtgactgatttatttcacttagcatcatgtcttcaggggtcatctatatgaacttctttacttttttaagactgaataatattccattaaatgtataggccacattttttttcttgcctttattttatactattcttttttt

SEQ ID NO: 857300 - DNA, 558 bp, Homo sapiens
caagttggttgctatgttgctagagtcatctttttttttttttaactttgctatagtaaactttcttacatagattttagacccataatcatgatttctaagtattttacattgktttttatttttttttttcatttttttgactatggtaaactacacataacaaaatttatcatcttaaccatttttaagtgtacagttaagtagttttaaatacatccatagtgttgtacaactcccatcactaccatccatctccggaattcttttcattttgtaaaaccaaaactctatacccattaaacaatgtccccctcctcccagaccctggcaaccgccgttctactttctgtctctaggaactcaattactctaaatatctcatataagtggaatcacacagtatttgtccttttgtgactgatttatttcacttagcatcatgtcttcaggggtcatctatatgaacttctttacttttttaagactgaataatattccattaaatgtataggccacattttttttcttgcctttattttatactattcttttttt

SEQ ID NO: 857301 - DNA, 617 bp, Homo sapiens
ttaaagtgacagacttttaaactgttcaccgatatatctcaatacctaaaatagtgcttgacacagtwgattccgaaaaaatgttttttgaaatgagtgcataagtcattggaaagatatttataatgctgtttttatttgcttttctccagttttaacctgctctgtgactttatgtttctgctaccgtaaatctattatttgttgccaaatcggccacacatcctctggttttattgtgtggtggtggcaggcgggtgggggggcaatctttgttttaaggtttaaattaaagtgtagtgcacttctatcccaaggagaagaaaaagatcatatagagatgaatggaaattagaggtatgagtggtatattagtcagggttctctagagggacagaatttacaggatagatgtatacataaaggggagttcattaaggagtattaactcacacgatcacaaggtgaggtcccacagtaggctgtctgcaagctgtggagcaaggacaccagtcagagtctcaaagctgaacttggagttcgatgtttgagggcaggaagcatccagcacgggagaaagatgtaggctgggaggctaagccagtctaattttttca

SEQ ID NO: 857302 - DNA, 648 bp, Homo sapiens
tttgtaattttagtagagatgggatttcaccatgttggccagggtgctctcaaactcctggcctcaagtgacccaccckcctcagcctcccaaagtgctgagattacagggtgtgagccaccgcacccggccgttaacaacctccttttcacctgattactttctataaaagccctatcactaaagaaaggcacatttggaggtactgggagttagggcttaaacatatctttggggagtgtggagaaacaatcccactcaagacagtctcagcagagtgtgcagcatgcacaccatcatttatccctagagaagaaattttaactgattagattttctctcaaaaaaaaattttccccagcgactttaatgttaataatgtgcgtatatggttttatttctttgcaccatgtgaacaactttccaaatacattattagtccaggaaaatgggatactccttttggaatgaggagtcaacaagagaaagaaaggttggctgatgaagggaagtcccatgcacatgcagagaggacagctggtgagcacggcctcttcagtgagagatgctgaaaagggtaagagggtgggcagagatttcaaggcttgtttcttcaacgctaaatgaacctggcagcccaacccacaa

SEQ ID NO: 857303 - DNA, 648 bp, Homo sapiens
tttgtaattttagtagagatgggatttcaccatgttggccagggtgctctcaaactcctggcctcaagtgacccaccctcctcagcctcccaaagtgctgagattacagggtgtgagccacygcacccggccgttaacaacctccttttcacctgattactttctataaaagccctatcactaaagaaaggcacatttggaggtactgggagttagggcttaaacatatctttggggagtgtggagaaacaatcccactcaagacagtctcagcagagtgtgcagcatgcacaccatcatttatccctagagaagaaattttaactgattagattttctctcaaaaaaaaattttccccagcgactttaatgttaataatgtgcgtatatggttttatttctttgcaccatgtgaacaactttccaaatacattattagtccaggaaaatgggatactccttttggaatgaggagtcaacaagagaaagaaaggttggctgatgaagggaagtcccatgcacatgcagagaggacagctggtgagcacggcctcttcagtgagagatgctgaaaagggtaagagggtgggcagagatttcaaggcttgtttcttcaacgctaaatgaacctggcagcccaacccacaa

SEQ ID NO: 857304 - DNA, 516 bp, Homo sapiens
agatgtttgagtctgagcgccagagggtaggtgtaactgaaggaatggggcatggagaagatagactggaatcttatctccccatcctgttccccaccatgaaaacaaatgcctgagctctcttgggaagagttactacatgcttgctgagagggctcttttcttcgaaaactctgtgagacacaggacacaggcatcatgatgtccaggtgaaaaagtatgacagagtgggacagatgatccatgtccttattttttcagagaaaacagcctggctgtagagaagggaggctaaaagaatgaaaagggattctgaagcactaccctggtttctttgagaagaactgtcaggacgtggtgtccatagaacctacatctcaggaagcactagagccacggtagctggaagcgcagatcactgctctcccctgccttcatggacactgaacacyaggaaaaataaggggatcctgtaaccccaggttttggcaccattgcaaacaagacacctctggg

SEQ ID NO: 857305 - DNA, 627 bp, Homo sapiens
tctcatcaaaatctatggaggtcaggagaaagtggtacaatatttttcaaatgctgaaagaaaaaaaatcaatgtggaattctaaacttagrgaaaagcaaatccttcaaaaatgaagataaaatcaagacattttcagaagaaaaaaatgtaaagaaagtgttctcagaagatccaccctgaaataatggctaaaagaaattctctgaataaaaacaatacgaaaaaaagaagaaaccttgaaacatcaagaagaaagacataattcagcaagcaaatgtatagattttcttttttcttaagctttctaaattatgtttgatggttgatgcaaatattatagcacagtctgatgttctaaatatatgtgcatatttaaaataatatgaatcatattataaattaacataatatataaatatatttcaaatattcaaataaaattataaatgatataatgtaagaagtcataaaagaaaatatgctttctatgtcacttgaactgataaactaatgatgacagtggaatgtgatgttatttatacatactgtaatacatatagcaaacattaaaaataagtatttttgtgttttatgtatgctcaaagacattccatatcaataaaa

SEQ ID NO: 857306 - DNA, 635 bp, Homo sapiens
tgacacctgcctaggattcactgagagagaattactaagaaargagtgatggccaaagaccatgcaggctttgttgctgtggtaaagtggtcttttctgtctgctccagatgtgggcaagaaaatacaaagaagtttaagaagatttagtttaaatagaactggattgattccaaaaggcttaatgtttgcacaagagaatcccaaatcagatctaaaacataatcactgcttgagttcttagccttcctattagctattagattctgctaattatactctaaagtgtgaggagtgtttgctttgtttcttgaatcaaagcaccagtctttcctaaaatgcattgccaacttatagccattttcaaactattcaagtgagtcgatggaatctctctccagagacagtattgcaaagtggttgtgaacataacctttgggctagaaagagctgaatttgactaagaaatctctactgactttgcgtaaattattgaactccccattgcctcaaaagtgaggatgagaagtgtatcctaagaactaaatgttataagggataaaaagtgcctagtatagagcctggtacatgttgaagtactgtaggatgatcatcattatctatgtgttgttgctt

SEQ ID NO: 857307 - DNA, 637 bp, Homo sapiens
ctgagatataacagaataaggaaggacatcagagaagcagcttttgtgagggaggctttggcaggctgttggatgtctgcattcattccttcatcaaacatttacagagaaatttctatgtgctaattctctactaattcctggccaaatgaaggaaaaaaaataaatggttcctggcacctgaaagtttatggtgtagggtgtcacagatgtgtctccctacatatgtcctacaatttgacaagaagaaacttggactggtgaatttcaatgtcaagtttagtcagctacaaagctttatgatatagttcaggatggggagggaaaaactaagcacagtaaagccagaatagtatttcacaagaaatacgaagttatgttaatagaaggaacactacccttatgtataggatggattctttatgtaaaatcactttatgtaggagatcaccagagagaaataagtcctgaggcacagcatctagttgcttttgaaaacactgtggaagamatagcactattttaaagtggaagtcctccaccatttcgtactctctctacatctataggatcggagctcagtcctcaccttccttccctccaacatccactgctaggcaccacagactacagacag

SEQ ID NO: 857308 - DNA, 637 bp, Homo sapiens
ctgagatataacagaataaggaaggacatcagagaagcagcttttgtgagggaggctttggcaggctgttggatgtctgcattcattccttcatcaaacatttacagagaaatttctatgtgctaattctctactaattcctggccaaatgaaggaaaaaaaataaatggttcctggcacctgaaagtttatggtgtagggtgtcacagatgtgtctccctacatatgtcctacaatttgacaagaagaaacttggactggtgaatttcaatgtcaagtttagtcagctacaaagctttatgatatagttcaggatggggagggaaaaactaagcacagtaaagccagaatagtatttcacaagaaatacgaagttatgttaatagaaggaacactacccttatgtataggatggattctttatgtaaaatcactttatgtaggagatcaccagagagaaataagtcctgaggcacagcatctagttgcttttgaaaacactgtggaagacatagcactattttaragtggaagtcctccaccatttcgtactctctctacatctataggatcggagctcagtcctcaccttccttccctccaacatccactgctaggcaccacagactacagacag

SEQ ID NO: 857309 - DNA, 640 bp, Homo sapiens
agatttactgcaactcgacatcatagtcaactatattttgtcctaaaattttaaacttttttatttttaaatttctaattcctccaaattggtgtatatagtatgtgttacatccacatgactaaccaattctaccagcaccatttaataaataatcttttatccactgaattgaaatatgtatatatcctgggctctaagattaactcttccagttgtctattctttcgctagtaccatactctttttagtttacaatgactaacacaagtttttgaaactggtaaggcaagacccttactatatttttcatattcctagtcattagttcttccataacaactttaaatgtatgtaacccagtttcacagaatttttcatattttggtatctgcaaattcttttaataggaatcaataaaatctcatactgagaggccatatactgtagagagcagtggttaaatatatgaagttttactttttagctaagtcaacttggacaaatgtcttaaccttttatataaaataacagtagtacttacgcactagtctwacaaagatgaaataatacctattaggcatctaatatagtgtcacacacttgtaggaattgctcaataaatactagttacacaatc

SEQ ID NO: 857310 - DNA, 646 bp, Homo sapiens
agagcagtggttaaatatatgaagttttactttttagctaagtcaacttggacaaatgtcttaaccttttatataaaataacagtagtacttacgcactagtcttacaaagatgaaataatacctattaggcatctaatatagtgtcacacacttgtaggaattgctcaataaatactagttacacaatcaaatcctactgacaaaggaaaaagaccgacctgtaactgggaaggaggaaaactccttgagggtggagacttggttttccagtaaggaattcagagtacaaagtgatgtgtgagtttctaaaactacttacaggttttaaatcccaagtgcatttaaaaaaaaaagtccagcaaagtttattttaaaaatgtaaagacgaacatgtaaaaccatagggggaaaattctggtcctttcccaaatttcaatcataatttttatgtatttggtctattttattttgccttactttgtaaatatggtcacaaaactaaacaattcaaaagttaccctttatgcttatcacttcaaacacttttaatggtagaaaaaattagaaaacaaagggaaaaccaaccaaaattttcyaaaagagggtaataaattaagatgaagaccaggaaaacaccattcttc

SEQ ID NO: 857311 - DNA, 533 bp, Homo sapiens
gactaggctcatgcactagtgcccaacaaagcaaaccaaaccaaaatggagttgctcatgctaagackttaggggagcacatagcttctagaacacactgggttttgtttttttctcctgtaaatctttaacatttctgatagcataggtattagtatgtggatctatttccatgggagacaccattcagccggcctacagtctcactctcatatgggaccatgcagaccttgctaactattttctgagctccaacaaagatcagactgctcctcagtacaacattctgggcagccactgtcaattggctttgaaggtgaaatcagttccctatccataggatgatgtaggttaaagcaaactaaatgtggccagagaaggactcttctatatttgagtccttgtggatgaactgtaacctagcttaatagacaaaattgaaaacctaacttaatagtatgtacccataataatagctgagtgttggccaatcccagcagccatatttcaaccactcatagactgctgagtat

SEQ ID NO: 857312 - DNA, 607 bp, Homo sapiens
gaatactatgcagccataaaaaaggatgagttcacgtcctttgtagggacatgaatgaagctggaaaccatcattctcagcaaactatctcaaggatggaaaaccaaacayggcatgttctcactcataggtgggaatttaacaatgagaactcttggacagaggaagggaacatcacacaccggggcctgtcgtgcggttgagggaagggggagggataacattaggagatgtatctaatgtaaatgacatgttaatgggtgcagcacaccaacatggcacaggtatacatatgtaacaagcctgcacgttgtgcacatgtaccctagaacttaaagtataataacaaaaaataaaaaaaagataatgtatttaaacccaaaaaactataggtagttttcagcctggtgcctatgatattctcagagtttattaaatcgttgtctttctcctatatactcacatcacccatgtacagatatttctatagagagtacagtatcttaatatttagttctaattattcagttgtgagtagggcaaggccccctgagatcttctaaagaaggtaattgacactttcataaaatgtcaaaccaagaaacag

SEQ ID NO: 857313 - DNA, 550 bp, Homo sapiens
ttatttgttgtgcaaaagcttttcattttgttttaatcccatttgtctatttttgctttttttgcctgtgcttttggagtctaatcgagaaaaccattgcctagaccaatgttgtgtagtttccccctaagtttttctctagtagttttgccatttcacatcttttttaaagtctttataatccactttgaattgatttttgtgtatggtttgagataagggttcaattttattcttctgtgcatggatatccagttttctcgaaatcatttattgaagatattgccctttttattgtgtattcttggcacctttgtttaaaatcaattgactctttatgttcagtttattttaggctttctattttgttccattagttaatatgtctactttatgccagtgtattgctgttttaattaatattactttgtattatagtttgaaatcaaatagtatgayatttccagctttattctttttactcatggttaccttgactatttgagcttattttgccattccacatgaattgtaggtttttttttctatt

SEQ ID NO: 857314 - DNA, 625 bp, Homo sapiens
caattgagatagcttgatctaagctcaaaattcttctgtagctgggactacaggtacgtrccaccatgcccggctaatttttgtatttttagtagagacggggtttcactatgttggccaggctggccttgaactcctgacctcaggtgatccacccctcccaaagtgctgagattacaggcgtgagccaccacgcccagacaaagctgaaaattattttcagtaatctttggcaaaatatctttgacatgggcagtaaagtatccccaatcctttatttcctactcacactgctggttccttttgtgcttttctttgtccttccagggcctagagacatttgtgttctatactctggacctgtaagctccttttttttctcattgcattgatgaaattcttttatgtgggggtggtgaacactcaattcccatgttaactagcctaccagattgaaagttcaagaagcctgctctcacaggatcctttgctgatcttccaaggtggaatgtggatagaaatgtttattgaatgatctgagatgacactggagtcattggcatcggtggctattaaccttgtcaagaataacctttggcatgttcaaaaatgaaagctgcagtgt

SEQ ID NO: 857315 - DNA, 625 bp, Homo sapiens
caattgagatagcttgatctaagctcaaaattcttctgtagctgggactacaggtacgtaccaccatgcccggctaatttttgtatttttagtagagacggggtttcactatrttggccaggctggccttgaactcctgacctcaggtgatccacccctcccaaagtgctgagattacaggcgtgagccaccacgcccagacaaagctgaaaattattttcagtaatctttggcaaaatatctttgacatgggcagtaaagtatccccaatcctttatttcctactcacactgctggttccttttgtgcttttctttgtccttccagggcctagagacatttgtgttctatactctggacctgtaagctccttttttttctcattgcattgatgaaattcttttatgtgggggtggtgaacactcaattcccatgttaactagcctaccagattgaaagttcaagaagcctgctctcacaggatcctttgctgatcttccaaggtggaatgtggatagaaatgtttattgaatgatctgagatgacactggagtcattggcatcggtggctattaaccttgtcaagaataacctttggcatgttcaaaaatgaaagctgcagtgt

SEQ ID NO: 857316 - DNA, 610 bp, Homo sapiens
acatgaggaggtaaaagaggtggcagctctggaaggtgggcaccacgggctcctcctgctgccccaccacgcctgcactgatggagtccacctgcaggtctcatccagatttagggctgatttatttccgcacwcagagggataaaggggggccaattaaaacaatgagccctagcaaatgcaaaaacactcatggtcataacatgaagtgaaagtaaaatataaataattttcctagatattcttacaaatatgtgaaagccgattgtacacctgaacagtgctggggtgaaatggtggggctgaaggaaggaaacagactcagggtcccttggattaaaactgtgggtcactcaatagggaaagccaaggcacaaagtcctgtgagtcatcaaggtggagtcctggcagaaggccttctcagccatgtctgggccctggttatagagaccatctctacacccacaccccaatcgaggcaggaatggccatgacagcatggtacacctgcccctcacccagggagatgaagtgtccatcagttctttgatgatgttctgtgtggagctctgcaaagacaaaccagcagttaatcttgcacgcaacagag

SEQ ID NO: 857317 - DNA, 620 bp, Homo sapiens
taaagactattatacattttttattacatctttgtgagctctctccaatataaattctttgatgttgagtaagctttgagaatgggtcagaagtttcaccacattcattagagttgtaaggcttttyttgaatatggatattttcagggaaaataagctttgaggattggtaaaatactttttcacattcattacaattgtaatagttttctagaaaatgagtactatgatgtttactaatatttgagtcatggttaaaatttatctgatttttattacaaaagacagatttcaaaaatttatgttgatatttattcataggaatacatggttctgtaggagcagctgacagaaactgaggcttcttctgaaatattctatattctttgtctcctttcacagttaaatgtttgttatgactagttgtcaaatattggctacatagattataacattccttttgtccttcaccttcacctatactttcccagtttttccataagcatatattttcaaggccacagctcccatatcttcccagtgttgcttttttgaatgaatcttgtatgccttgctctggtaaaatgccttggttgtaataagaatacacagctgaaaga

SEQ ID NO: 857318 - DNA, 497 bp, Homo sapiens
tttcattaaggcagtgagcaataagagctagtaaatattgtactttcttcaaaaaaattaagtgtttgttttgaargcagaggaaaaacatgctattcagtttttaattacatgaatgattgtatgttttgagatgttgcactacagtttcctaaaaagtcctgttactctcgtagaactgctctacatttggcctgtgccagtggccatgtgaaagtggtcactctcctggttaacagaaaatgccagattgatatctatgacaaagaaaatagaacgcctttgatacaggtatattagagccaactcttttagcatgacatggatttgatttgcatatatagaattaaaataaattgatctcatttaaatataactagttggtgaaacctgtggaatgtgtattttgaattcttggaatttacattctgtttcttggtctaacacggacaggctgtccattgccaggaagaggcttgtgccgttattctgctgga

SEQ ID NO: 857319 - DNA, 434 bp, Homo sapiens
tgagaaaacacattgcagtcaaaattaaagatatccatccataaattacttttatttctcattaaatgagcacagtcattastatattaataacagatatgtttattattacatattcatcagtgcggctttcaataccacttgaaacatgcatatcatcctagagacgatcggttttccagtgcttcttatctgatagacattactgcaaagccattataaattactgaggaggtatttggttaaaaaaagaaacaataaatcatactgtccatatgaatcaactcttgttaccggacaagagtttaacagtatttatctggtaattcctatgttaactggaaaacatcatggatgtattgccatatttcctttttatattggtgcaaccttctacattttttgcagttttataaagtcattattgtagcagg

SEQ ID NO: 857320 - DNA, 618 bp, Homo sapiens
gcaggaaagatcttgagaaggggagtccccagarttcattcatgtacttcatggcatttatctctgccatcgtgatagaaaaacaaggcttagcaaattgaccctctgcttctgcagcttgctgacccctggtaatagttagaacagaagccaagctaaccctggaggcttggactaattctagcaatgataaatacagcttgctttgtggctagtcaccctgcctagaggactgaatggccaatggtaacaaccattgcgcttgttatgcactggtcaagtctcccattctgctgagccgatgctggcagtgcctctgcagaggaagagtcaagcccttcagaaatctatggtttcgggtaattgggtgctgcacctcattatggtcattaccaggatgatatctccttagggatttcctttagggaaagcaatcactttagcaaagtctgaaaggcaagcatctttatctggttcctgtcatcccagatgtcaaaaacatccgtgaagctgtgttctagggtattatgaaaattactccaaggcatttcaaaaaaatggctcacactctattctgggatctcttcactcttttatttcagtccctgactaaaatgt

SEQ ID NO: 857321 - DNA, 618 bp, Homo sapiens
gcaggaaagatcttgagaaggggagtccccagaattcattcatgtacttcatggcatttatctctgccatcgtgatagaaaaacaaggcttagcaaattgaccctctgcttctgcagcttgctgacccctggtaatagttagaacagaagccaagctaaccctggaggcttggactaattctagcaatgataaatacagcttgctttgtggctagtcaccctgcctagaggactgaatggccaatggtaacaaccattgcgcttgttatgcactggtcaagtctcccattctgctgagccgatgctggcagtgcctctgcagaggaagagtcaagcccttcagaaatctatggtttcgggtaattgggtgctgcacctcattatggtcattaccaggatgatatctccttagggatttcctttagggaaagcaatcactttagcaaagtctgaaaggcaagcatctttatctggttcctgtcatcccagaygtcaaaaacatccgtgaagctgtgttctagggtattatgaaaattactccaaggcatttcaaaaaaatggctcacactctattctgggatctcttcactcttttatttcagtccctgactaaaatgt

SEQ ID NO: 857322 - DNA, 527 bp, Homo sapiens
atttgatcaactgaaagaaagggtatcagtgattgaagatcaaatgaatgaaatgaagtgagaagagaagtttagaggaaaaagagtaaaaagaaatgaacaaagcctccaagaaatatgggactatgtgaaaagactaaatctacgtctgattggtgtacctgaaagtgacagggagaatggaaccaagttggaaaacactcttcaggatattatccaggagaacctccccaaccaagcaaggcaggccaacattcaaattcaggaaatacagagaacgccacaaagatactccacgagaagagcaactccaagagacataattgtcagattcaccaaagttgaaatgaaggaaaaaatgttaagggcagacagagagaaaggtcagattacctacaaagggaagcccctcagactayagcagaaattctacaagccagaagagagcaggggccaatattcaacattcttaaataaaagaattttcaacccagaatttcatatccagccaaacgaagcttcaaaag

SEQ ID NO: 857323 - DNA, 531 bp, Homo sapiens
aaaatagtgacacaacctatcaatcaaaatggctgggatccagcgaagacggtgctaagaggaaagttcatagccttaaacgcctacatcaaagagtccgaaagagcacmaacagacaatctaacgtcattcctcaaggaactagagaaacaagaataaaccaaacccaaatgcagcagaacaaaagaaccaagatcagagcagaactaaatgaaattgaaacaaaaaatctacaaaagctaaataaaacaaaaagctgattttttgaaaagataaataaacattgataggccattggcaagattaatcaagaaaagcagatagaaaacctaaataagcacaattagaagcaaaagatcattcaaggctactatgaacacctttaagtgcataaactacaaaacctaaaggaaatggataaattcctggaaacatacaatccccctagcctaaagcaggaagaattagaaaccctgaaccgaccaataagaagcagtgagattgaagtggtaataaaaatattaccaacaa

SEQ ID NO: 857324 - DNA, 630 bp, Homo sapiens
tggatttctttaaatgtttggcttgtatagttcttttttttttcttttttttttttcttgagacaggatctcactctgttgtccaacctggaatgcggtggtgtgatcttgactcactgcatccttgatcttactatagcctcgacctcccaggcacaagcaatcctcctgcctcagctgctggagtaacagggactacaggcctgtgccaccatgcccagctaatttttgtattttttgtagagatagagttttgctatgttgcccaggctgttctcaaactcctgagctcaagcaatccacaccacctcagcctcccaaagtgctgggattacaggtgtgagccaccacacccagccagatagttcttaatatactctaggtattggtcctttttataatatatagtttgcaaatattttccccattctatagctgggttttttaccctcttaagatctttcacagagcaaaagatgaaattttgatcaggtttaatttattgatttttaatggatcataattttggtatcaagtataataactgcccacttagtatygactcctgaagatttactccaattaatttttaaataagtttaatgttttgcatttaagttcatgatatat

SEQ ID NO: 857325 - DNA, 617 bp, Homo sapiens
gtttaatttattgatttttaatggatcataattttggtatcaagtataataactgcccacttagtattgactcctgaagatttactccaattaatttttaaataagtttaatgttttgcatttaagttcatgatatatttttaattaatttttttataaggtatgaaattcaggtgggagcttttcttaatgtttcagtaccatttgttaaaaggtttgggcatatttgtgtgggtctatttttgggttctatattctgctccattgttatatgtatttatccttacagcaacttactgtaacttaacatcaaaaagaggaattgcttccattttattcttttaaaaagttgtcttaacttttttaggtccttggtcttcccatataatttttagaataagtttgtgtaagtctacccaaacaacaacaacaacaaaacacaggctgggattttgataagaactacattaaaccagtagataaatttcaggagcattgatrtctttactatgttgagttttccaatcaatgtacctggtaaatctcttcaattatttatcacttttttgatcagtaaaattatcattttgtaattttaagcatacaaattttatgca

SEQ ID NO: 857326 - DNA, 623 bp, Homo sapiens
ttccctttcaaaacagttggaaatcctaaggtacgggtactaagaagatagcaatatccttcttaagctggtaagaatctagccccacagggacaatttggcaatcctgtttctggaagccaggactccagagatttgtcttagtgatggacagatactcctctaaccttaaggcatgagggctgtcaaaacaaggctctgaatagtgccttcctgctcatcaatgtcatcacaatgaaggagagaacaggttttcgttttcctgaagagtggtcagtaggagtgcagtggtttggcatagatcggctccagaacataatggattaaaaccaagaagaggcctccaaggaagatggcactaaggaaagccagcaggacatagcggccaatgaaaaagtcatccacaatctggagaaagaaaacatcaaaatgaaattactaccagttagacaccctggctgggttaacctgaactccatgatgagtgggccaagagttagttcatgtgtataacttccagtaacatcctgccctgagtctcctctrtacatgagaaaaaagaatcttttcctcaactccctgagcaggagacacaagaagggattaatgagggacagggaaca

SEQ ID NO: 857327 - DNA, 646 bp, Homo sapiens
aagatgtattttgttattctttgattggaggcactactggggtttacagatcaggactgcggatactggatgttctgtaatgtatgggacagtcctcacaacgaagaattgtcctgcatcctgtgcaamttttgagtatcccacaggatactcatttataattatctgagtgtagagcctaactccggtttttgtataaacataatgtattttttggcacagtttaatatagtaaaattccaggaatgcaactctaatgtaaatcagaggacaattatactgtatttgtggtgtggaactttgaacaacgagttgttcatcactatagcaaatcacataactgaaggcagcacagctcgtggtatttgagttgccagaactacacacctgcatagtctgcatttgaagcttttgcattcatggtgattctaagtttaggtgcaagcatctgactactgtacttcattatgtattctagtgtagtcagcctgaacatttgtatatttaaacatatgctatttcattacgaattactttccatttaaaatcaacttctgtatatcatatagagatctagttttattcttttcctattggagaatcatttgtcccaacactatctatgaagttctttacccattgaatc

SEQ ID NO: 857328 - DNA, 622 bp, Homo sapiens
tggttttccttttcagcattggagacaagtcttaagcaaacacattcctctaggttgctggttttctttacccttatggtttaaataccacgaaaatattagctatgagaagttataaagttattggaaaggagggtctaagcatgaactggtaaaaaaaatacgtttattgaatcaacatttatgatgttcccaccatgtaaagcactgcgctacaagctggggatgccaaaggtgaataagatatcttctgacagaagctcaaggtctattggagaacattgtcctgaaaacaagtgtccatattacattctgattaatggtaaaagcgaagtgcagtgggaactgcaatagtgagaggggctttacaaaggaaatactctgcacaggcacatttaggaaagaatcagagtgaaaagatgacagagtgaggggagatgggacctggggcccacctgcatgcctaacttctctggggagcagtctgycctcattagggccacatgggcgccatctcggtcactctaacacgcccggggtttccccatctctgggtctttgtacttgctgtttccactgcctggaactagccctcaaccccaagcactcctgctactatttg

SEQ ID NO: 857329 - DNA, 606 bp, Homo sapiens
gccttaacattatgaagtgccgaattacatgttttagggtgctcagcggccagaggattgggttcatttggcttattgtgtagctgagaaggtgtctcactgtgggaaagagttctaaggtctatttctttttttcttttatttatttatttatttatttatttatttatttatttattttgagatggagtcttgctctgtgacccaggctggagtgcagtggcatgatctcagctcactgcaacctgtgcctcctgggtttaagacattctcctgcctcagcctcccaagtagctgggattacaggcacgcaccaccatgcctggctaatttttgtatttttagtagagacggggttttaccatgttggccaggctgttctcgaactcctgacctcaggtgttccacccacctcggcctcccaaagtgctgggattacaggcgcaagccaatgcacccggccctaaggtctgtttcttaagctaaagagtaggaaaagactgatggacagagaggragctgaactttaagcttggcatcatttgaaaagctggagttctggtaaatgggagagtagctactttatgtgaattttaggttcaattt

SEQ ID NO: 857330 - DNA, 606 bp, Homo sapiens
gccttaacattatgaagtgccgaattacatgttttagggtgctcagcggccagaggattgggttcatttggcttattgtgtagctgagaaggtgtctcactgtgggaaagagttctaaggtctatttctttttttcttttatttatttatttatttatttatttatttatttatttattttgagatggagtcttgctctgtgacccaggctggagtgcagtggcatgatctcagctcactgcaacctgtgcctcctgggtttaagacattctcctgcctcagcctcccaagtagctgggattacaggcacgcaccaccatgcctggctaatttttgtatttttagtagagacggggttttaccatgttggccaggctgttctcgaactcctgacctcaggtgttccacccacctcggcctcccaaagtgctgggattacaggcgcaagccaatgcacccggccctaaggtctgtttcttaagctaaagagtaggaaaagactgatggacagagagggagctgaactttaagcttggcatcatttgaaaagctggagttctggtaaatgggagagtarctactttatgtgaattttaggttcaattt

SEQ ID NO: 857331 - DNA, 529 bp, Homo sapiens
caaagtctagaagatctgttttttacttccacaaagtcttcagtctcaggtggggctgggagggcccgcactaagaggcagaggtagatttaggagcaggggatatctcatggctatgagtgggggcrgcgaggctgcagtgtggccttggtctgccagcccaggtgtaagctggacccctgggtggaaagaattccctcgggggctcgtgcccgtggtcatcagctcacaatccagacagatgtcaagccgacaaacaccaaggggagtttagcccgttagtggtagcatctgtctaattcctattaggtaaggggagggcacaggctctctgggttccagcgtagcacaatgggtctgtgctggagtagtggcaagtgagccctaccccagagcttcccctcacggtcctcagtccacagtgcattgttaaggaatggatgctcctctgtaccaagtcctgtgctaggtctaaatgtgatgtgacccctccttctgaggagctgtcctgccttcctcccaggagacc

SEQ ID NO: 857332 - DNA, 567 bp, Homo sapiens
tacatacgtgcatgtgtctttatggtagaatgatttatgttcctttgggtatatacccagtaatgggattgctgcatccaatggtatttgtatctttaggtctttgaggaatcaccacactgtcttccacaatggttgaactaatttacactcccaccaacagtgtataagtgctcctttttctcttcaacctcgccagtatctgttattttttggctttttaatcatagccattctgactggtgtgagatggtatctcactgtggttttgatttgcatttctccaatgattggtgttgttgagctttttccatatgattgttggcgctgcatgtatgtcttcttttgaaaagtgtctgtttatgtcctgcaaagcactttcatactcactttctcataagattcttagaaccactggtgagttaggatgtctattattatcatctctatttaacatcaaagwtattgaagttcagtggggcttaatgccttgccatgagccaaagctaggaagtggtgcctctggcttttaattccaacctctttctccaaatccccacctgattc

SEQ ID NO: 857333 - DNA, 582 bp, Homo sapiens
ggattttatagtttatctgagcagacatcgattcacgaatcacacagtactgggtggtaagtgggtatcactccactgcagggtggagagagagayggtgagaggtgtttgtggaagaaatacaaggaacacagctttgactaggtagtgacagcccctagttagaggtcagttggtggtttccagttgccaaagtctctagtttcattttactccttatgttgggcttcggtttgcttacagaggaacctaaaaccctgggtctgcctcagtctaatggtcttccaattaatttttttttgcaagtgtgactgcaaatgttttttgggtccacctggaccggagaattaatggattttctgattcaggattatgtaaaatcaagaagattaggttaaaagaaaacaatccatcaaaataagatggactctattgagtctgttaatagttttgacatatagaggtgagatatatacatagtaattaagaacatggactctggtctggcacagtagcttccacccataatcccagcactttgggagaccaaagtgggaggatcccttgaggccaggaattcaa

SEQ ID NO: 857334 - DNA, 633 bp, Homo sapiens
  misc_feature 1, 2, 3, 4, 5, 6, 7, 8, 9, 10, 11, 12, 13, 14, 15, 16, 17,18, 19, 20, 21, 22, 23, 24, 25, 26, 27, 28, 29, 30, 31,32, 33, 34, 35, 36, 37, 38, 39, 40, 41, 42, 43, 44, 45,46: n = A,T,C or G
nnnnnnnnnnnnnnnnnnnnnnnnnnnnnnnnnnnnnnnnnnnnnnattaaatcttcaatgtgaaacccaaacctacaaaacctagaagaaaactgggaaataccatttggacataggccctggcaagatttcatgatgaagatgccaaaagcaattacaaaaaaaaaaaaaagacaaatggtacctacacaaaaacttttctgcgcagtgaatgaaactatcaacagagtgaacagacaacctacagaatgagagaaaatatttgcaaaatatgcacccaacaaaagtctattatccagagcctataaggaacttacaccaattaacaggcaaaaaccaaacaaccccattaaaaaatgggcaaaagacacgaacagacacttcttaaaagaagacatacaagaagccagcaaacataaaaaaatgctcatcattaccagttatcagagaaatgcaaatcaaaaccacaatgatatatcattttcacactagtcagaatgacttttkttaaaaagttaaaaaagaaaaaagatgttatgaagctgcagataaaagggggcacttatacactgttggtgggaatgtaaatcagtccagccactgtggaaaccagttttgagatttctcaaaga

SEQ ID NO: 857335 - DNA, 644 bp, Homo sapiens
gttgcgtgcctgtatcaaaacatctcatgtaccctataaatgtatacacctaccatgtacccacaaaaactaaaattaaaaaggaagagaggaagggcagcygctgcagtgatgcagaagctcctcgcctccaaaccgcaagcggcttctctgctgcgccttgcttgagcttttcaggggcatctgtctgtgggagcttccctcctcccttggcttctgcggggcaccttctcgtcctcctctgttctctcacctgccttcttcacacacagtggctgccaggctcctggaggtgctggcctggtcctctgctctgtttctcggtggctcttccagagttcccgttgttcatacctttggcttcaggggacactgccctgctgatgactctttctttccatctttcgtctctgctgagacctctatgtccacggccttccagacatccccacgttctggctttcaggcaacttcaacttcacatggtcaatcgcagcccttctcttttatgctgaacctgctcttcttcctgcaattcctcttcaggtgagtggagccaggatcttcccagttgccagggcagaatacagagtatcattccttcactgagcccacacccaactggtcactgtaggagacccctg

SEQ ID NO: 857336 - DNA, 616 bp, Homo sapiens
tggcaacatactgagacctcatctcttttttttttaattaaaaaaaaaataagaagagtcaggtgaatttaggaatrtattttatttatcccaatatatccaaaaatagtatacttttaacatgtattcaatataagaattattattgagatatgtcacattcttttattcattccaaggctttaaaatccagtgtgtgttttacagcacatacaatttgaatgctaaattctcaaagaaaatgctcgatctttatttagatttcataacatctacaattgtaaaaaatgaattcacatactcaagttgttccaaccatacatacgttttccaatcactgaattgagtatcaatgttaaaatttaagttaattaaggtgaaataaaattaagaatttagcgtctcaattgctgcatttcaggtgctaaatgaccacatgcagctgccagctactctgctggcagtgcagatgtacgctatgaaagcagcttagagttggtgtccactctgggtgcaactctcccagtcggcccgccgcactgcagtcactttgccatgctaacatgcacattacacaggaaaaatcagtaatgttgatactgtcttcatttcaaat

SEQ ID NO: 857337 - DNA, 566 bp, Homo sapiens
tattttattttattttatttaacccctacaatcatagatgagcaactgttttacagcataagaaaayggcatttattttacaggtgacaaactgaagctcgaggtgttttgctgcaagtgtgaggtctctggcccagcaggcagtgaatggggttttgaactcaggactttccttctagccatgctctcttcattgcagcctttgggccccaaggagaccaggtttcccctgatcacgtttttgttattgttttatttttcctcctgtatactcaagggagcatgttcaatcgccaaccttctatgttatgttttaaaactgtgtccagtcagccctgggaatgtgagggaagggggctcccagagccagggcagccccgggagccaggacctgtgccatttcagccagaagtctcctcctttatctgacttatttattgaatttccacatataagaaacatttctaccacttaaaaaatgtcagggatagtatgaatgaaagaaaggcacaggtgatttgaaaccttcattttaatcagtgttttctatttcttttattttcaaa

SEQ ID NO: 857338 - DNA, 610 bp, Homo sapiens
acttcaggagcttcagatcttcttcttggggatcccgtggggagctggatcctcagatatttaggagcggacaggtcctcacaggcttccaccttcatcgtcttcatcagtctccgtttattgtgagctttcagagcttatgctgaattttcttgctatgttcaaatcaccagggccccaagccttggacctatgttgggctttgatttcatgagagcgtgttagaggttactcatggaacacctgtcaggccaaggtaaaagtgtataaggtgggtcctaccctggcacacttagcctgtctttttaagcttgaaacatttaaaagtatttagagatcttgttgatgaagactctgattcaaagtcagaacttggagaaattcagatagacatcctgagaattttcagcagaaagtaatataggctttttcagctagaagggccatagctcaccattgtggatcaattcagggaactggggtgctggagaaagcatgatccatacagtcccaccagacttttgcctcttgccaggaagttggagagattgragattattgttgttgtatttcatgtgtactttgtcgtatatgttaactcttgtactaa

SEQ ID NO: 857339 - DNA, 607 bp, Homo sapiens
tttgtcgcccaggctggagtgcarcctggagtgccacaattatagctgactgcagctttgaattcctgggctcaagggatcctcccacctcagcttcccaagtagctgcgactacaggcacatgccaccatgcttggctaattaaaaatttttttttgtagagacgggaccttaccatgttgctcagactggtcttgaactcctggcctcaagtgatccacccaccttggcctcccaaagcactgggattacaggcctgagccattgcactcggcctaagctgaaatgttttggttcctaaaagtgtccatgtgtaagaaaaaagaactgtaggtctttggaccatatcaaggttttatttacatatccccctcttccctacacccaaaattgaatgtagaaaaagtgagggtgttgcaaatacaagtgacagtaacaaacttcgaatgaggttgaacctttacagcagcagtgaagccatgaacgatctcttccgggtgtcctagaggagccctcgtgccttacaggaagttctagccctgtgcagccaacacacacctgtatttgttcagatgtcaccttggtggcacagtgcagatccagggga

SEQ ID NO: 857340 - DNA, 528 bp, Homo sapiens
tgaagcacctcaaagtttagatttaaaaattgttgacaataatttttaataatcaagttacatgtatacatagctttttttaccctataaagtagactataccgtatataaagttttaaatctatttcagggagatctatttcctgtgattaaaaaattagtaacaggtgccaaatgaatgttacaggtggtaaatataatgggaatattatatatattgatcttttggctattatatgctatcgaaaatcatacaagaaagtaaatattctgttcttggaatacataaagcatatggtgctatgaccaattggcctaactcttaagttgctgagtatacattctagtctttttggtcttgtatgctagaatttatacatttcttcatcagaattgtattaacatttaaataacgtgtgctttaaacatttaaataagatgtttgctttaaggcatacaattatttawccatatccattaattgaactagaaagagataattttttaacgtttaccatgacagatttt

SEQ ID NO: 857341 - DNA, 621 bp, Homo sapiens
atcataacttagaatagatggttttgcttattcctttttaatttgagtgccttttttttcttttacttgtctaattgctctggctagtgcttccagtaccatgttgaataccagttgtgaaggcagcattcttgtcttgttcctgatcttaggggaagaatttcagtctttcatcattgaatataatgttagctgtgggtttttcataaaggccctttcattatgttgagaacattcccttccatgtctagttttctgagtgtttttatcatgaaagaatgttgggttttgttaaattcctttactacattaagatgatcatgtgattttttttcattcattctattaatgtgatatatctgttggtttttcttttcttttcttttcttttttttttgagacagaatctcactttgttgcctaggctggagtgcagttatgcaatcaaggctgactgtagcctcaacctctcaggctctagcaatcttcccagctcagcctccygagtagctggaattacaggcatgcaccaccacatctggctaatttttgtgttttttgcagggactgggtctcactatattgcccaggctggtctcgaattcctgacctcaagcaatt

SEQ ID NO: 857342 - DNA, 609 bp, Homo sapiens
agtaaagatacaatgtagtacctaatctaatgctagaccatgtatacaagcctaaggaaaggaaataaatacctaaagaagccaggtttaaggatgtcctcagcatttaccatgaattctttcaaatctttcaccagtgggattttagagaattctgggcatctgttattaaactgaatggcaatttagataaagtccaaataataacagacaggcttatgatgacataaaccgaagacatcacctaatctacttccatgagtaatatggttcctaaagctgattccaaagctaatttcatcagatttgaccagatgtagatctttgcagtggcaaaattttactctgtgaaaggtaaagaaagggaaaaaaagtaaaaaatataccatgatggagaaaagcctaatttttctgaggaatggaatttaagtgtttacaggtattttcagaataaactgtaaagctcatttgaaaaaagatgcaatgtggcatacaagataaaataaatcccctgggaaagatggcacattaaacatatacacctactttcactgtctcttaaaatcccastaatatgacagtaaagggatgtattttattattaaagga

SEQ ID NO: 857343 - DNA, 587 bp, Homo sapiens
taaccaaaaagaaatctttgaaatatcaaataaaaaattcaaaatactgattattttattttcttgagatgtggtcttgctctgttgccctgggtgaatttcagcggcacaatcatagctcactgcagtctcatgggctcaagtgatcctcccacctcagcctcctaagttgctgggactacaggtatatattaccatgcccacttcttaaattaaaaaaaaatttttttagagagtgtctcactgtgttgtccaggatggtcttgaactcctggcatcaagctatcttcccacttcagcctcctgggattataggcatcagccaccaagcccagctaaaatactgatttttaaagaagctctatgagatacaggagatagctgaaaactaatataaagtagtgagaaaatgaaattcaggatatgaatgagaaatttaccaaaggcatagttttttgttttttwaaaaaagaacttctgtaataaaaaaattcatggaaggaattacaagatatggttgaaagcaaacaatggactagaccaagcaggagaatctcaaaatgtgaagataaatctgttgaattaat

SEQ ID NO: 857344 - DNA, 594 bp, Homo sapiens
tacaacaaaaacaaggagaaaggccaggcacggtggctcacgcctgtaatcccagcactttgggaagccaaggcaggcggatcacaaggtyaggagagtgagaccatcctagctaacacggtgaaaccctgtctctactaaaaatattttttaaaaaaactagccgggcgtgttggcaggtgcctgtagtcccagctacttgagaggttgaggcaggagaatgtcgtgaacccgggaggcagagcttgcagtgagccgagatcgcgccactgcactccagtctgggcaacagagcaagactccatctcaaaaaaaaaaaaaaacagggagaaaaacagtaactccaacaaaatctgaatcatcttttgactttttaaaattgagagccattattactaggggggaagaaaaagaaaaaaatttaaaatttaaaaaaataaaaccgagagccttcatttaccattgtattccacccccaactaatattaacaagaatgacccatccagaattatacagttgtaagttcattgaaatctaggtcagtcataagtattttggggctgcaaagtacaatatcagaacctattcccaaa

SEQ ID NO: 857345 - DNA, 574 bp, Homo sapiens
tctgtttttctactttattttgttggcgttatcagttaccctgattccttcttaaatgataagtcacaccttgyttcctagaatgagcccaacttgtttggatggattatccttttttatatactgttagtattcactatatactttaaaatatactttataagctatacgccatcaagtgtatataatttaaactatctgctaatgagggttattacggcctgaaatatttttccttctaatgcctttatcaggttttgttattaagttattctggcctcataaaatgggctggaaagtagttccttttctattttctggaaaagtttgtgtaagattataagaagaattttccagtacatccttttagacctgtggtttggggaatggatttatttacaaattcaatttaattttaattagtacattttacttactaaaaatagtattagctggttatctacttctagaatctgcttttgttaagttgtactgttcaaggaattttatctaaatttttttaaaaatggaattatgtcttaatatgactaaaagttgacaaagtgtcaaagat

SEQ ID NO: 857346 - DNA, 640 bp, Homo sapiens
ccccaaagaagaaggttatgccaggattaaaaattgggtgttgaactccgagagctctgtcccttccagcataacccactagtacagaacgctgactttcaaaagctggtgaggctcagccactccagggaatcagagctctaacatcagagtggctgagctgggagatacccaaaaaggaccatctcagtcaaatccttgttttatagatagtattattaataatgttttcaagtgcagattggagctggatatttttatatacattagcaggggtgcttccaggttataggtagatttaaaattgttctgattggcaactggctgaaagagttattatcaatagaaaggaatgtctgagctgccataagaggtttcagaaaccaaagttttatcatgcagatgaagcctccaggtagcaggcttcagagagaatagactgtaaatgcttcttatcagagttaagatctatgttgatcttaacgctggtcagcttgtcttgaaatcaaaaagggaggaggtcataatgaggcttgtctaacaccytcttcctgtcatgacctgagccagtatctcaggttaatgttggaatgccctggccaagaggagggatccattcagaggatttggcggaggaact

SEQ ID NO: 857347 - DNA, 644 bp, Homo sapiens
gaatgttctcttaaaggaagagaaaagatccttcaaaaatgcacttgaggattcaaagacaaggacacggggacagggagactataaaattgcctcttctgggataacaaggggctgagtagccttctcctttacttggtgacttaacgttgaaaagaaaaagaaaaagaaagctttatttcagcattaggcacatggttggcattcaccatgtgtttattaataataatgacttatctgtgccaaaatccctttagagcaaattgtctcacatccaaatcccagagtgagccaaaggatttcaatgccctagcaggaagctggaaggctctggaacaattcactcatagcaaactccagcccacaccatagagcattttctctcagacactcagccccacctccacccataccccacagctagtggggcgacccctgtatcttatttagtttgtaaagggaagtcactttttctcacctataccaggctttctgcatttccttcacaagacaaacaaggttctccctttgttcttccttctgagagtatgaacaaagatagccttcataaaagaggmaattgtagcagtgtccccatgacccaatggtgatgagaatgctgggtgacttccctgtgcctgttc

SEQ ID NO: 857348 - DNA, 569 bp, Homo sapiens
tgacactttgtcaacttttagtcatattaagacataattccatttttaaaaaaatttagataaaattccttgaacagtacaacttaacaaaagcagattctagaagtagataaccagctaatactatttttagtaagtaaaatgtactaattaaaattaaattgaatttgtaaataaatccattccccaaaccacaggtctaaaaggatgtactggaaaattcttcttataatcttacacaaacttttccagaaaatagaaaaggaactactttccagcccattttatgaggccagaataacttaataacaaaacctgataaaggcattagaaggaaaaatatttcaggccgtaataaccctcattagcagatagtttaaattatatacacttgatggcgtatagcttataaagtatattttaaagtatatagtgaatactaacagtatataaaaaaggataatccatccaaacaagttgggctcattctaggaarcaaggtgtgacttatcatttaagaaggaatcagggtaactgataacgccaacaaaataaagtagaaaaacaga

SEQ ID NO: 857349 - DNA, 637 bp, Homo sapiens
gaacaggcacagggaagtcacccagcattctcatcaccattgggtcatggggacactgctacaattkcctcttttatgaaggctatctttgttcatactctcagaaggaagaacaaagggagaaccttgtttgtcttgtgaaggaaatgcagaaagcctggtataggtgagaaaaagtgacttccctttacaaactaaagaaatacaggggtcgccccactagctgtggggtatgggtggaggtggggctgagtgtctgagagaaaatgctctatggtgtgggctggagtttgctatgagtgaattgttccagagccttccagcttcctgctagggcattgaaatcctttggctcactctgggatttggatgtgagacaatttgctctaaagggattttggcacagataagtcattattattaataaacacatggtgaatgccaaccatgtgcctaatgctgaaataaagctttctttttctttttcttttcaacgttaagtcaccaagtaaaggagaaggctactcagccccttgttatcccagaagaggcaattttatagtctccctgtccccgtgtccttgtctttgaatcctcaagtgcatttttgaaggatcttttctcttcctttaagaga

SEQ ID NO: 857350 - DNA, 641 bp, Homo sapiens
aatatcacaagtacaaaccattaccttagtgaattaccaagtatccacatctgggaaaatctttcagggcattgtgagagcagsgatgatgatgtctgcaatgtgcttggcccttcatatgtgtctgatccagtttactttcggggacatccgtcatcaccattggaatccagacacacaccatgaaacgtgagtatgagagcacttaaatgggatgacaggccgggtgcgtggctcatgcctgtcatcctagcactttgggaggctgaggcgggtggatcacctgaactcaggagttcaagaccagcctgggcaacatggcgaaatcctgcctctataaaaaatacaaaaaaaaaaaaattagcccaggcgtggtggcatgtgcctgtagtcccagctacttgtaagggttgaggtgggaggatggcttgagcctaagaggttgaggctgcagtgagccaagatcacaccactgcactccagcctaggtgacaaagtgagactctattaaaaaaaaaaaatccacttttaaaaagaataaaacaaaggaaaaaaatgggacgacagacatccagcccaacaagccctttgcacaggcatcctggctgttcttactcttagcccatcttcccttggggccg

SEQ ID NO: 857351 - DNA, 622 bp, Homo sapiens
ctggaagggctagatgggtccggaaaggacacctggaagcagttagggyaagacttcccaatattcagtaggaagcaaatcctatgccagggccttggcttgccgaaggactcagaaaacaggttcaaaactaggtaaatggtttgtaaggttataacttggaagattcacttttaaagttgtcttaaagccattaacaacaaagtttgggtttttgactggaattcattcaatcgagtagcttagctgtcccatttttgctgaatggacacaaaataagcccacgtgcaatcatgcaattaactacaatatagttaatccaggaaatgttgtatctttatgatggaacagctgagcattttaatttattcattaatttatttgttcattactgaaataatgattgggtccattagatgctctacaaattaaatctttttgcacttgttcagtaactattgtgaattcctaacagatagcatattttattatattgcctttttaacttaagtttgtgcccaagagttgaacagaccaaatattttaggattatatattcatggagccataaagtgaaaggcgtagatagatgttggagtggtgattaacgagaaactagatg

SEQ ID NO: 857352 - DNA, 626 bp, Homo sapiens
gttatgccaggattaaaaattgggtgttgaactccgagagctctgtcccttccagcataacccactagtacagaacgctgactttcaaaagctggtgaggctcagccactccagggaatcagagctctaacatcagagtggctgagctgggagatacccaaaaaggaccatctcagtcaaatccttgttttatagatagtattattaataatgttttcaagtgcagattggagctggatatttttatatacattagcaggggtgcttccaggttataggtagatttaaaattgttctgattggcaactggctgaaagagttattatcaatagaaaggaatgtctgagctgccataagaggtttcagaaaccaaagttttatcatgcagatgaagcctccaggtagcaggcttcagagagaatagactgtaaatgcttcttatcagagttaagatctatgttgatcttaacgctggtcagcttgtcttgaaatcaaaaagggaggaggtcataatgaggcttgtctaacaccytcttcctgtcatgacctgagccagtatctcaggttaatgttggaatgccctggccaagaggagggatccattcagaggatttggcggaggaact

SEQ ID NO: 857353 - DNA, 540 bp, Homo sapiens
aaaggagattaaaacagttagtataaatatgcaccacatgttcaaaatagtaaagcatccacaaaattagaaatataagagatataaaaatgactcaactcaaatttctagagatgaaaaagacaatgtctaasattaaaatacactggatagcaaataacaacttggatgaatctccagggaattatgcttgtggggagaaacagtcccaaaacattacagtataattctattgacaaaacattttgaaatggcaaaatttcaggaatggagaacagatcagtggttgtcaggacttagagatgaaagaggtggtagaggggcaagagagaggtggctgcaattataagaggacagtacaaaggggacttgtagtgttagaactgttcagtattacaactatggtggtgaatacatgaacctgcacaggtgatcaaattgtatgcaacgtaatagacacagatagagacacctacacacagggtgcaagtaacaccaggaatctctggataacattggtacattgtatcaatgtcagta

SEQ ID NO: 857354 - DNA, 639 bp, Homo sapiens
atgtttcggaagagaaggaagtctctgaacacacgagtatcccctcactaatcataaactgtcaccaaaagcataaaatcatgcaattttaaatgtcatctagttgagtcccaaagaaattggggcccaattttctcagatgaaaagaaaattgaacagtattatatacaattgttcttaaaagagcaaaataatttttcttctgaaaatacaaagcaaattgttacaaaataaatggagtgtttcacacttaggtttgtaaaatgtaatagcttgaattggattttcaaatatgctgtcacctagaaaactgatatgaggccatttcgacaccagcagcccaagcgggggttttagtgcagcattaaaagaagtaaccttccaaagccaacaacagaaactcaaagaatgactttcaggtactctcagatagctggaaatgtgagtttggggctagagtggggagaagtgggaaggaagcagtcaagagaaccgaagaagtaattttgtcagattcactgctcagcacattcacagaaagcagcattttttagctcctctcctttmgtgatccaacattatccacttttctcatgcttacatcagcaactaaacacatatcctcttagtgtcctgttt

SEQ ID NO: 857355 - DNA, 608 bp, Homo sapiens
ttgttttctataatttaagcagactaaggattgacatacagacaaatttgtctgcagcaatatctagcatgctctccctgggttatctggtctgtaagggaggaaaaagtaacacagcaggcctaagagaaccatcctttaaaatcaccctagcccttcactctgccttcaaataaactaagaaaagtcctgctcttgattatcatatatttaatacatttctctcaatggcagagaatgtatagattattggatatgattctttaataatcatatttttgcctagcagtgtgtttttcgatccaaatgaccattggagcactgatttgtcagtttcttataaatagctctggtctatattgaattgccatgatctaaagatgatatttagggtaaaggatattagagtgctagagatataagaggacaaatggtgctaacctagttgagctgtgtaacttctctgccatcctagaccagactaaccccgattacctgttacaaagtgcttttatctgctctttgcttcayaatataaatgcaattgccttttttgatacatacatatttgagtcccaggaaaaggcatatagcagtatgacacaagc

SEQ ID NO: 857356 - DNA, 590 bp, Homo sapiens
tggatttcgatcaggattagaataaatgtgtagatcaatttgggacatcatttgaacaatattaaggtttccaattcagaacatcgtatggctttccatttatttagatagtctttaattttttcaataatgttttatagttttcagtgtaccatatccttgattaaatttattcctaggttttttattgttttgtttgccatggtaaatgtaaatttcccccttattttgtttggatttgcttttcaaattgtgcgttgctggtgtataagatacaactgatttttgcatgttgatcttgtaccctgcaactttgctaaattgattaactgtagtggcttttttggggggagggggatttttggaccatctgcaaatacagatagttttacatctttcttttcagtttgtattttttaatttatttttcttgcctcatttttctggctggaacttctagtacagtgttgagtagaagtggtgaaagcagcatctttatcttgttcttgatacttgcrtggaaactttagttgttcaccaccaaatatgatgatagctatggattttttcatatatgccttttatcagct

SEQ ID NO: 857357 - DNA, 587 bp, Homo sapiens
ataagtctgctccgattttatattccttctggagtcagttttgataatttgtatgtttctaggaatttattcatttcatccaggttatctaatttgttgatgtataattattcataatattcttttctaatcatttttatttttgtaaggttggtagtaatgtctccattttcatttctgactttagttatttgcatcttcttcttgatttctttctcagtgtagctaatgtttgtcaatcttgttgatttttttctgggaaaaaacatttggtttcatttattctctgttgtttttatattatctctttaatttatctctgctgtaatctttatatttctctctgctatttttggttttaatttggtctccttataaaaaatgtttgagtatgtattctgaactaaattatgctcccccattcatatgttgaagtgctaatccccagtgtgactgtatttgaggataaattcattagagaagacagtcaaggttaaatgaagtaataagsgtggggccctcgtatgataggattggtgtccttataagaaggagagacatcagagcactctcttgctctctgtgca

SEQ ID NO: 857358 - DNA, 409 bp, Homo sapiens
ttccacctagatttcaaagaaagtcataattgtaaggtcagctgagagagaatggacaaaagagagaggagacccaagttcaggcaagcctttattaacctgctggctgccctcttaacagtcagaggagcagctctgagcttacaaaatgaggggtttatattgggtaggggagtttgggggagttctttggtatggccacatcccggggttgtttgctggttaattttgccacatatcactttgtgacatttatggtagaatttacaggagggtgtaggtaaaatttgtttatgcttcccatgacatccccctgtgcagtctggatggcttgtaattagggttacaagcaagggtttgcagcaaggcctgataggtaaagtstgctggcttcactgtggcacctaca

SEQ ID NO: 857359 - DNA, 647 bp, Homo sapiens
tttatcctttttttatgtttttaaagtttttattatttattaatttatttgagataaggtcttgctctgtcacccaggctggagtgcagtggtgcaatcacggctcatacagccttgaccttccagactcaaatgattgtcccacctcaccttcccgagtagctgggcccacaggcacaagccaccatgcctagctaatgtttcttttttttgagagacagagtctcgctctgttgcccaggctggagtggagtggcacattcttggctcactgcagcctccacctccaaggttcaaacgattctcctgcctcagtttcccaagtagctgggactacagatgtgtgccaccatgcccagctaatttttgtatttttaggagagacagggtttcactatatgttggccaggctggtctcaaactcctgacctcaggtgatccacccactttggcctcccaaagtggtaggattgcagatgtaagccaccacacctgacctgggttttttttttttttttttttttgagatgtagttcgctcttttgtgccccaggctggagtgcagtagcacaatctctgctcactgcaacaacmacctcccaggttcaagcgattctcctggcctcagcctcccaggtagctgggac

SEQ ID NO: 857360 - DNA, 648 bp, Homo sapiens
ctagaaagttgtttctttttaatatttattcttttggtcccaaacctttaattaatgctcattttctaaaaatccccaaatttcataaaatgaaaaataaaaattgaaagagataagcattgttgataaatccytaatggatttattttggatataataattcacatttttttttaccagtgcagaatcatattatatttggtgatctacaatcagcttttcctccctcacttattgatatattgtggttacctttctaagtcagtacatatacatcttccgggttatttctgttataagtaaaaattttagccaagtgcacagagatcatacccatttaatcatcactaagatcaagaaacatatgaccagaagctcacctcaagcttctgacccctatcattcctcctgccagggtaactattctgattttgctcactctcagttacttttgccctgtttgcaaaattttataaatggaatcagatgttatgtacacttttatgtctgacttcttttgctaacattgtttataagatccattcaaatcatagtttgcttattctcattgctacatattattcagttttgtgaagataccacaatttatccatttttaggttgattgttttcagttttgcactgttt

SEQ ID NO: 857361 - DNA, 466 bp, Homo sapiens
aatgttggtctgtgtctcagatgtaacttctgtaccctgggccaatttctaataaacattttctctgtgatttttggtaggaaatctaaaattcagcctttctcaaattagcctcatgatcttcactgtacaatctatttctccacaagtatttcttttttgtggttaatagcatcaccatattcaccatatgctcagctgctattacaaggccatgtgtaaccacttccttttcttacctccaaatggcagctcaatccctttagttgcttctctgcagtattcatggagctgtgcttctgtgtctatgaccaccgttctgctcaaaccttyacctccttttgcccagacctcagggaagcctctgaccacgtgccttatctctgattctgctcccactcactacagcctccacaatgcttttaaagtcattttttcaacaacacaaatctgatcatgtacctct

SEQ ID NO: 857362 - DNA, 466 bp, Homo sapiens
aatgttggtctgtgtctcagatgtaacttctgtaccctgggccaatttctaataaacattttctctgtgatttttggtaggaaatctaaaattcagcctttctcaaattagcctcatgatcttcactgtacaatctatttctccacaagtatttcttttttgtggttaatagcatcaccatattcaccatatgctcagctgctattacaaggccatgtgtaaccacttccttttcttacctccaaatggcagctcaatccctttagttgcttctctgcagtattcatggagctgtgcttctgtgtctatgaccaccgttctgctcaaaccttcacctccttttgcccagacctcagggaagcctctgaccacgtgccttatctctgattctgctcccactcactacagcctccacaatgcttttaaagtyattttttcaacaacacaaatctgatcatgtacctct

SEQ ID NO: 857363 - DNA, 624 bp, Homo sapiens
ctgattaatgcatttgtgtgtgaatatatttcagtttttctccatttctaaaaacattcactctgtttaactcttccagacctttactatgtgtagttttgtattgctgattagtttcaggactgctgctctatattctaaaacagtggttcccaatctttttggcaccagggaccagattcgtggaagacattttttccacagacaggggcttgggcgaggggtggttttgggataaaactgttgcatcgcaggtcattaggcattagagtcccatatggagtgtgcaacctagatccctcgcatgtgcagttcacaatagggttcacgctcctatgagaatctaatgccatcgctgatctgacaggaggtggagctcaggcagtaatgctcaccagcctgccgctcacttcctgctgcgcagcctggttcctaaaaggccttgggccagtacctgtccatggcctgtaggttggggacccctgttctaaaattttagtgaatattttgcttctatctatctgatggctgttagggtaaaaaatgtyggtcatacattatcacttaaactacgtcagctgcagatgaacaaaaactcagtaaattggcagattcatcatgata

SEQ ID NO: 857364 - DNA, 485 bp, Homo sapiens
gccggacctattgggcaccaatgctgaggcatatgtgctaaaaataatgcaaatcagagggaagtaggattctttcttcatcattggaaaaaaaaaataaagctcttacctcagctttgggtagaaatctttgctttcctccggaaatacagcttcatcttctcctttgtggtttttgtgctggtgctttcttaatctggtcttgcaagcaaagctaccagatggctttcgtcctgcgcactgtcccagccatgctcacatgtcgggttgatgaatgaactcctcccttattcatctgacctttgcatcaccaccttcctgactgggcaacttcggctttctcgaccgaaccatcatgcatgaagatttgcaagcccctgtgggagcagaccactttactctaaatcacttgtcagaagcaccgagaggccactacttrgtggaacaatagaaacagtttttatattttgggctttgactggaat

SEQ ID NO: 857365 - DNA, 626 bp, Homo sapiens
accttgtacatttcaatatcttgcctctaacaagtccaagagccaggaagagaaagtgaaagacttttgatatacatttacaagaacctacaattacaaataactggttatgattgtctggktgagttgtagaaggttgattgctttagaaagaaatagtaacttaatcttactgaaaatgactcctacatttcactcccttttttgggagagagattcttaaaaacaagttttctttaggatgagttcacatggggcttcttaacttggatgctgctgctcagaacagcaccttgccatggataacagttcttgattacgtttccacgaataaatcaggtgtgcttccagactcaccccttgaaggttcaatcttgtctaagaagcagattcatgcacagaagcttgtggctgctgcctgagaggacaagcctgcctcatgtggagggtctggaagaacatctgcagcggagggtgcttcctataaacaatgactcattaccgcactggccacagggtgtcctcgggtcacccgaggagacagcctgtatggccctgtatctttggacaataacacccgcaaaaccagaggcagcgggaaaggacagttgaagtttagtcaaagg

SEQ ID NO: 857366 - DNA, 630 bp, Homo sapiens
gccattttgcagataagaaatcagaagctctaagaggctatgattcacacctgggtatggagccatgcagaagacatagcatgacccctggcacagtagcaagcacttactgracattcacaattgtattaaaaatggtaggatcaaggcttgaacttggactgtctggccctgacacccatctcattccaatacacactgtgctttctcaggaaactgctacatgctgggagagaggtgggaggaatgaccagttggagggaattcacttggagtctttcttttcctgggtcagtctgtgggccacacagcagagggaagacctgatgatccacagactccacgtctgcctctgttctgaaaccaaatggccgtgtttgcctcacgtgtcttttaaagaaggtttccctggctgttttctagaaaagggcttatgtagttttgtgattctgaatcacgacaccttctacctatggtctctgaaaggtgcatggggaacttactgtgtctgcaagtctggaggattcaggcaaaaatcctgcccttaccctaaaccagatatgtttaggcccaacatcctataaagtagggtgaggtggtagtgctgcctctgtgcttaatttctacagg

SEQ ID NO: 857367 - DNA, 606 bp, Homo sapiens
ctataaatcttagtaaatagaaatcatttcatcattctaatcacttatcagagcagtaaataactatagggcactatttaccctgcctaaaaatgaaatgattagtaagaatattctaggtgccayctagaacttgtcagcccctaactgtggattcctggattatagcacaataagacacatagaaaagaattatatcttttgaaaaggtaaaactgatttaaactactttttctttccgtctatcagctctatgacctgtcaaatcccaggtctttgccactctggctgaatgtctcctttgctctgcaccactctgtgtgatagctgctcttttttctggttcacatatttcataaaaataaatgaactttttaaaacacaaaaagtgcatttgctttttggtgccatctcttctcagcttctttcttcctgttgaaaaagtggcaatatttttctttttttcctcctttggtcctcaagtactagcattgcatttttctcttgccctttgtgacttaggcaagattcattttatttctcgtttttattttcttgccttacggaaaaaagatgatttgatgactttctctactcaaagatgtg

SEQ ID NO: 857368 - DNA, 604 bp, Homo sapiens
gtatttgataactgtaggaacaggtttccttcaacaatataaagatggtcattattttagatagttatttgtacctccattgtttgtaattactcatagatatcttttaagtaattggtgaggcaatcactatattactttatcctctattaaatattcatcaataatgtcagattctcacaattctgctgaacacagtaaatttaaactttatgcagtgccatcattttttataatagtatacatagcaaaacacaaaagccagaatttattccaaagtgggcctcacatgaaagcatgttatgcgcctcccttgagtgtacctgatattgagtgtacacattcatagctgaaggcaaatacaacataaatgttcctgcctgaatcagagcaatatcaagatcaatgtcttcagctaccactgtaaatgtcaaaatcaaactggcaattatcacatgctagtgatagcacaatatttcagaagtccagaaactaaatctgtagctygtaggaaactctattcatcgagtaaccaatgaagtaacacatactcgaaatgtaatatgaaatttcctaaaagccaacttatatttcaccttcaaaa

SEQ ID NO: 857369 - DNA, 601 bp, Homo sapiens
gttgacttcagattgtctcccagaggaaaaatggcacaggactaaaacaaaaaaaacagttcatttctactaagtgatacagtaataataytgtataagccatagaattagttaaatacatcatttaattttctttccaaattgtccacttttaaaagattatgcttaaatttggctcatataaacaccaaaaattacagagcagcatatttaagtgaaacaataatagtacagttcagcattatagtttttgaaccacttccacatatatatatatttttcacatggtatgttaaaccctcttatgatgtcgttttattatagaggaaggaactgtataatacacttacggtgacttgcccacagtcctacagctaagactagaaatgagatcttctgacaatctccggtgctcttaagggaagagaacaaaaaatgactttttagtataaacatagattcactctgaaaacttactaaacagtttttgtgatgctttcatgctgcagttttggcaacacataaattcaaggcatattgaaaatatccacatagagttcaacttccataaattttagcttattttaaaaactagataaac

SEQ ID NO: 857370 - DNA, 564 bp, Homo sapiens
ggctggtctgaaactcctgagctcaaacaatcctcctgcctcagcctcctgaagtgttgggattacaggtgtgagctactgtgcctggccccccaccctcttttaaagttactggtgttgacgtgtatcttctatttttcttcatactcacataatcaacatagtagtcctcccttatgtttcaagacccccggtgggtgtctgaaactgcagagagtatttagccctatacagtatatacttttttcctacacatacctataataaaatttaatttataaaatgggcacagtaagaaattaacaactcataataaaatagaacaattataacaatatactgtaataaaagttatgtgaatgtggtctctctctcaaaatatcttactatactctagtcacctattttcagagggtaattggctgtggtaactaaaaycgtggaaatcaaaacctcaggtaaggaggtgactactgtatatattgcaaataaaaaatcaaatttggttaaggagagactttatttgtagggattattgcaaatggggatgggtggggactgtgg

SEQ ID NO: 857371 - DNA, 631 bp, Homo sapiens
ccggccaattttgtagtggtttttgttgtcgttgttgttgttgttgctgttttgagacagagtatcgctctgtccccaagcyggagagcagtggcacgacctcggctgactgcaacctccgcctcccggattcaagcgattctcctgccccagcctcctgagtagctgggagtacaggcgtgtgccaccacgcccagctattttttgtatttttagtagagatggggtttcaccatgttggccaggattgtctccatctcttgacctcgtgatccacccgcctcggcctcctaaagtgctgggattacaggcataagccactgctcccagcccaattttgtagttctaataaagacagggttttgccatgttggccaggctggtctcgaactcctcatctcaggtgatacacccgtcgtggcctcccaaagtgctaggattacaggcatgagccactgcacccggcctaaacagagtatttatagttgtaaaatatagtgttttcctcatgtggatagtgctgaaggttataactttctgagttatttaccagccctaggattacagcatagtcccagtgtttgttagcaaaacccatcttagagtggatatttcctgaggctgctatcca

SEQ ID NO: 857372 - DNA, 612 bp, Homo sapiens
gaactcccgatttatagctcgtcattcaaaagaagggaggccctcagcttgcaattgacatctgaagtgatggcagccttgtgggactgaacccttaatttgttgcatctgatgccaactcaaagtacataacatcagatagaaccgcacgaagtccagctggtatctgaagagctggagaactggttgatgtcagggaaaaaaaaaaccccacacatttggtgccaggagtgttctatgggtagaaacagatcacagtagtgggtatcagaagtattatggataaaacacagttccaaattaataatatccaaatgatcaataaacataagatattcactatcattagtcatcaaagaaatgcaatgacattccactacatgcccaaaggaactgctaactttttaaatgataataccaaaattgataaggatgtgtaactactggaattctaatatactgctggcaggaatagaacgaagtataaccagtttagaaaactttttggcagtatagctgctagagctgaacatatgcatatgccatggacctgcaaacccactcctaggtgtatgcrcaagagaaaatgaatacatattcgcgaacagaaga

SEQ ID NO: 857373 - DNA, 547 bp, Homo sapiens
ttctgctctcaccgttaatctttgtttttctttatgtttccataaaaatacccctcatgcccaagactaggagattggttcgacaaaatacggtgtagtgtgcytacgttaggtctttggtgctgattgatatttgttctgatgtatgttccttccctttgcagatccttacctcacaaggcctgaccagtgtcttcaataaacccacttccttgtttgtgaaacatctggggaagtattaaatgggggaaaggaaggaattaacagcccaccaaaatggtgtgaaaattactttaaactcaaaacatcttcacaatcagcagccacagaaagaaacattatctaaacttaggcagagcctcctgaattacagcttctatgaccccctctgagggagtttcccgattgtgagaagactcatcctaggatcagcgagtgaggatttagctgtcccttatcatcacaaggcccaatagaaacttccctactttcccatggagtccaaaccccactccccctctctgttaagttggtatataaaccttta

SEQ ID NO: 857374 - DNA, 566 bp, Homo sapiens
actggctgaactgtgggctcagaaattgggtctatcttctgctctcaccgttaatctttgtttttctttatgtttccataaaaatacccctcatgcccaagactaggagattggttcgacaaaatacggtgtagtgtgcctacgttaggtctttggtgctgattgatatttgttctgatgtatgttccttccctttgcagatccttacctcacaaggcctgaccagtgtcttcaataaacccacttccttgtttgtgaaacatctggggaagtattaaatgggggaaaggaaggaattaacagcccaccaaaatggtgtgaaaattactttaaactcaaaacatcttcacaatcagcagccacagaaagaaacattatctaaacttaggcagagcctcctgaattacagcttctatgaccccctctgagggagtttcccgattgtgagaagactcatcctaggatcagcgagtgaggatttagctgtcccytatcatcacaaggcccaatagaaacttccctactttcccatggagtccaaaccccactccccctctctgttaagt

SEQ ID NO: 857375 - DNA, 538 bp, Homo sapiens
gacccacgacccagttcttccctagctaccctatcctgagcttggttagtcataacccataggggtcagtggcctggaaagatgcagcctgccacycgagcggccagtgtgacttgacagagttccggctctgctccccgtgactgaaatgaaagtggggaagctcagagcctgtcacattcgtaagggagatgcttcagaggctgcacgaggcagatgggattccaagatgaagggtgggaaatggtaagactgtaaccccagaaactgcgtaaagcaccgtgtggtgcatcttagccctctgtgccagaactgcccgacccctatggcactctgctgaattcgatccttgaaattatggatcgtggagaaaactagattctcctgcacagcagatgacctggccggagggatgattcagccctcagattttgaaggagtgaaagaacaaaagtggcaattataaattattttgagtatttcatataaacgccagtcatactatggtactacgacgtggggacacaagagggcacca

SEQ ID NO: 857376 - DNA, 618 bp, Homo sapiens
gaagccagcagaacatctctcgttcactctgtgcttcctttctcctgttcctggggctcaggctccagccctgctgggcagccccctccrtggcctcagctccccttgcaccccccagctctgggcataccatcttctccccttttcccttcagccctggggcatggtaacaactgcctgctgttgtcaatagccccacccagtgtggctcctcggcttttttatcacctgaattaaaaaagcattccattcaatccccacctttaacaaacttagtatggactctgatacactcagtaaatgatgattcccacaagtacacagatactaggaaaataaagtggactattctcggatgatgataaagggattgcagggatcaaatcccaacagcccacgggaaagactgccgcagggaggacgtgtccacagggtgaggcagggccacgtgcttctgtggccacagatgaaggaggtgcctggctctgctctgacctggctgactgcatgcgtcttctttaaaagctccacgtcatctcccagatgtggaagccgaggctcagagggcaggagtgacctgctggtggggatgcagctggatccaaaggaggagctaga

SEQ ID NO: 857377 - DNA, 645 bp, Homo sapiens
ggaggagctagagccaggtcccccaacccctagccaggaggccaaatgctcaacctgggcctggcagcgctcaccctgacttgggtcctccttgtgtgttacagtcaaagagggctacaaagtccagtcagatgtgaacatcacactggagtttcgaacctcctcgcagaatggcgtcctcctggggatcagcactgccaaagtggatgccattggactagagcttgtggacggcaaggtgggtgcttcctctccatgagggtcttcctccccccagtgtcagagacagagcaattgagaaacagcagattcaaattcacaactatctattttcatggagtcaaacaatggtcccattactattttaaaaacagatattgctacaaaaaaacctttttggtttattttttaaaagcttttcaaaaataactttttatatgtttgaaagtaagctttcagcaaaattacaactataatacaaagaactttttttcctgaaccatctgagaataagctgctgacctgatgccctatcccttctaataattttttttaactttttatttggaaattwttacagattcataggaagttgcaatgaaatgtacagggagggccccatgcaccattcacccagacccaggt

SEQ ID NO: 857378 - DNA, 413 bp, Homo sapiens
tggacttgctcagatttgggaagtgtttattcttccagcagatgtttactggatgtttgctgtgtggctggcastgccttaggtaatgcatatctattgataatggaactgacactgcgcctgtccatggaggtttcaggaggtctttgtcagttacactcagtggcatgcacagaacatggctcatttctggagaaatttataaaagaatttattctttataagttttatgcctgtcagaatttggcctctgagcttaattgaatgtgtttctcattctacagaatttttggaaatattttaactctgtttctgaaaaacctgtcacgcgagaggattttatgtctgtcctcagcgatattgagtacatcctcatcaaggcatcgtatggtcaaggattacagcagagcagg

SEQ ID NO: 857379 - DNA, 582 bp, Homo sapiens
agatatttttcattaaattatgaaatataatattaatatgtacttatttagattacgttttaactgagctttaaaatattgaatatgtacctgattggaatcagggcaaatggctaagttgattttgaaatctccattgcatgtttttcatgggaatttgtagctcatttaaaatatgtcgaggaagtcatgaaattggtgaagcgaattcgctaattattgtcttaatagcttcaatatgtttttcctgtgatggatccttccactaaccctgtttcagtttactcttcagaaaaatgctaaacttctaaagttattgccaataatattatttttagttttgtgatttgaaacattgaaagtttacatttttttttttcctttggggatgacggatcttatgataaccatcctcagaagtgagggttaatatgtctttgtgtgcatgtgtttagcctgtgaatgccatgtgaaaggctcccattctgccgtgtgccatcttgagaccgggctctgygactgcaaaccaaacgtgactggacagcagtgtgaccagtgcttggtaagatgcatgtgactaat

SEQ ID NO: 857380 - DNA, 609 bp, Homo sapiens
gaaacacagaataaggaaaaagtggcggatcagagagcctgaattcagatgctctttccactgaagttccagagcagggtgtgtcattacctcacgaggcaacagcattttttatcatagctgccmattaccaagccatgctttttcacacgtttattgtcaaaaaaaaatcctgtgacatttatctacaaagcaaagccacatcactgtaggagaccagtggtgaagactggtaaagtgtttccagtttataaagcattttcacacgcatcatgttgtgtgttcatcactgtgatttatagaggtgggtaagacaagaacgatgatcatttttcttttctggaaaaagaaaccaaacctcagtgaggtgaagagacttattatccaaagtcagggaagaaaattttggtgggggacctgggccagaagcctgagaaactcaagactccaaaccctatattctttttcaatcttaaaggctacaatcaccaaacctctggtcctaactttttttttttttgagatggagtttcgctctgtcacccatgctggagtgcagtggcatgatcttggctctgcctcccgggttcaagcaattctcctgtctca

SEQ ID NO: 857381 - DNA, 609 bp, Homo sapiens
gaaacacagaataaggaaaaagtggcggatcagagagcctgaattcagatgctctttccactgaagttccagagcagggtgtgtcattacctcacgaggcaacagcattttttatcatagctgcccattacmaagccatgctttttcacacgtttattgtcaaaaaaaaatcctgtgacatttatctacaaagcaaagccacatcactgtaggagaccagtggtgaagactggtaaagtgtttccagtttataaagcattttcacacgcatcatgttgtgtgttcatcactgtgatttatagaggtgggtaagacaagaacgatgatcatttttcttttctggaaaaagaaaccaaacctcagtgaggtgaagagacttattatccaaagtcagggaagaaaattttggtgggggacctgggccagaagcctgagaaactcaagactccaaaccctatattctttttcaatcttaaaggctacaatcaccaaacctctggtcctaactttttttttttttgagatggagtttcgctctgtcacccatgctggagtgcagtggcatgatcttggctctgcctcccgggttcaagcaattctcctgtctca

SEQ ID NO: 857382 - DNA, 630 bp, Homo sapiens
tatgtgtctgtgtgtgtttgtgaggttcaaataaggttaatatagttttcttggcccaagtaagtagacatatgttaaggtttcttaacaaactcttcttccctcttctccctctctcctttcttttttttttctttctttaagactgtgaagtatgggtatatcaaacaaatctcatgtgaaattttggaagaaagcagacataccatcacaggcaaattgttcccttgcttcatggcatcaattagaaaattatggcaagggctgggcgcagtggctcacacctgtaattccagcactttgggaggctgaggcaggtggatcacttgaggttaggagtttgagaccagcctggacaacatggtgaaaccccatgtctactaaaaatacaaaaattagccaggtgtggtggtaggcgcctgtaattccagctactggggaggctgaggcaggagaatcacttgaacctgggaggctgaggttgcagtgagccaagatcgcaccattgcactccagcctgggtgacagagtgagatcccgtctcaaaraaaagaaaagaaaagaaaaatatggcaagaacttgtttcaggtatattagcatataaactcatcatttatatgctaatacat

SEQ ID NO: 857383 - DNA, 471 bp, Homo sapiens
atagataccctctgaccctttacagaaaacatttgccaacccctgctttaaacctcttttgccttcatgttgggtcattgccattgttgtctttctagggaagcagccaggtcagtgcccatgtaaggaaggttatacaggagaaaaatgtgatcgctgccaacttggctataaggattacccgacctgtgtctcctgtgggtgcaacccagtgggcagtgccagtgatgagccctgcacagggccctgtgtttgtaaggtaagtggggaggtcagagacacccctgagcttcctttgagcttctctggaaaaggagtgttttccattggctccaatgatcagttcttgagcaaagtggtaaggtttaagcagaactccccttgccccttytctccaagccacaccgagttggctgtattatatatgcttggactcacatgggcatctggcttctttttttgtacctctgg

SEQ ID NO: 857384 - DNA, 534 bp, Homo sapiens
agtctcatagggcacctgagtgttggacagcatttcatagcctgtacttgcatctgatgatayaaagaaggttttctagccttgttagactttatgttgtattattcaaataagaacttctgctcttctggtctggttcctgagcagtgtgtttggtgaagtctcatccccgtctctgagataaactttctgggtccctggatcacttgtttatgaagtgttcctcacattcccgctttgtttagtttgccataggctcagcttagagcctccatggcttagtggagggcctggcatacaagaaacaacccagggaaggttccagcaatgggactgctgtgctgctccctcactttgagtaccgtggcaggctgtgctcatctgaagctcacatttaggaacagatggaatactttctgctttgttatatttcaagaaaatgcaaactggtgattctgcaatgtggaggttggtttgtaggcttgggccttccttgcaatgatgtgttcccattcccccctccccacttatgcc

SEQ ID NO: 857385 - DNA, 633 bp, Homo sapiens
actataaagctttaataaaatactttgtcacaatctctaaatactattgtaatcccacatctaataaactctatcccttcaaaagcataattttctattaatctagctaatgtccactgtgcatagttcccttcattaattcagtcaacagacatttcccaagagcaaagtgtatgtggcaatggagatacagcaatgaagaaaacacaggaggtttatggccttcacagagcttttgacttggggaaaacagataataaactgactcatataaccatgttaaacattacaataacgagaaggtgtcatgggagcatataacagggaactacaacctagtctggggtcacggaagcccctcactaagagagtaaagtttaaacagacacctgaaagatcagtaggagttatacaggagcagatggggttacagtagagttccagaaacaggaaatactgagtatgagggaccagaggtcaagaagaacatggaatgactgagaaaaatcctaatgactagaggaagagcgaggatgaagctagaccagcagtgggggcttggggggstcaattacacaatcacacagggtctcatacaggctatctaaaggatatgggtctttatcaaataaa

SEQ ID NO: 857386 - DNA, 576 bp, Homo sapiens
gtactacctcagtgaatttgtwttaaggccaaagaaatcatgacagttgcataacccattttacaaactgtacacagtaacatatgtacatgggaagtcctggactcaagaaaaggtgcctctcctgccaaccttcttgcccaggggcctgtagcgctcctgcccccgcttgagagtggcttcctgggggtcttcatgcctgtgtcttctcactgctgctcttcaaatctagccctcgaggcctccacaacgctgatgctgccattctactgctcagggctcaggggttgtaaggtggacatgaggctcaggacacttttatactctgttttcaatttaaatagtctattgtggcccaatactggaacatcttataactttctctctttttgtttttttcctttgggctttcttctttaggcccgaaaactttttctatgggaaaaattgatttatggttttcagattgcattgaaagggaacttcaggacataactcattcagaaattaggagatgcggccaggcacggtggctcacgtctgtaatcccaacactttgggaggccaaggcaggtg

SEQ ID NO: 857387 - DNA, 621 bp, Homo sapiens
gcaatgcagatgaaacagaagatgccatrtaggactttcatagctagagaacagtcaatgcctggcttccaggcttcgaaggctgacgctcttgttagggactaatgtagctggtgaccttacattgaagccagtgctcatttaccattcagaaaatcctaaggcccttgaatctgaagctaaatctacctataccctgccaatgactaacaaagcctcggcagatgacagcagatttgtttacagcaaggtttactgaacgttttaagcctactgttgagacctactgctcggaaaaaaagatttctttcaaaatattactgctcattgacaatgcacctggtcacccaagaggtctgatggagttgtacaaggagactgttgttgttttcatgcctgctaacacaacatccattctgtagcccatggatcaaggagtaagttttacttttacttaagaaatacacttcataaggctttagctgtcacaggcagtggttcctctgatggatctgggcaaagcacattgaaaaccctcaggaaaggattcaccattctagatgccattaaaaacattggtgattcatggaaggaggtcaaaatgcaacatgaacaggagtt

SEQ ID NO: 857388 - DNA, 621 bp, Homo sapiens
gcaatgcagatgaaacagaagatgccatataggactttcatagctagagaacagtcaatgcctggcttccaggcttcgaaggctgacgctcttgttagggactaatgtagctggtgaccttacrttgaagccagtgctcatttaccattcagaaaatcctaaggcccttgaatctgaagctaaatctacctataccctgccaatgactaacaaagcctcggcagatgacagcagatttgtttacagcaaggtttactgaacgttttaagcctactgttgagacctactgctcggaaaaaaagatttctttcaaaatattactgctcattgacaatgcacctggtcacccaagaggtctgatggagttgtacaaggagactgttgttgttttcatgcctgctaacacaacatccattctgtagcccatggatcaaggagtaagttttacttttacttaagaaatacacttcataaggctttagctgtcacaggcagtggttcctctgatggatctgggcaaagcacattgaaaaccctcaggaaaggattcaccattctagatgccattaaaaacattggtgattcatggaaggaggtcaaaatgcaacatgaacaggagtt

SEQ ID NO: 857389 - DNA, 560 bp, Homo sapiens
agaaaggctaaaatacatagttctttaacagaacaaaatgaatcttcaatgaggacrggttaaaggagcgatttcagagctgcaaaacatagaaccaaactctgatcataatacagtaataatagtagctgctatcagtgcccagcccatatctgtcagccttatcacttcaaaaagcaggacttccacatgccagtactggcccctctgtacctgaaaatttctcctgaaggctgccctgttctagggctcacagatcatcggtatcaaggaattaatattctccaagagcacccctccgctaatgactggcagggtgagtgcgtaaatacctcaaccctctccaccgctagtgggatagacatgaagcatgtgtctcagcaattcccacgcagagttttcctgtggaactaagcttcagtttcagatacacacatgtattttatgcgatgccttcctttcctatatcactttttccttgctggtgttccttgtacctcccaaataaatggcttgcatttgaacccttatatcagtgtctccttcttgggcaagccaca

SEQ ID NO: 857390 - DNA, 583 bp, Homo sapiens
cagctaagaaatggggaattatgcttcctctcctttcggtcagagtatctacataaattatttggaattcttctgcaagggacattttttaattctctcctatgtatttacttattcaattatttatattcatataatgaatacatacacagttatgaatatttattttatatttttggttataacgcagtattatgttatttgttttattgattaaattttttcctctttgcctattgggaactcttcagttggctcctgtgtccttttggcatttgtggttttttcttttttcttttttagcactttcttaccttctggcactataagatgttccccctgctactgcttactggaactaatttcagcagttctcttgcttgcaatcaccaagcttaactagaacatagatttacttggattcttagttccatgttcttactattttattttcttagctctatgtgctagtgtgtgcatttgttcattgtgcgtgtgttttcatgtrctcactaggtggaaaggcatgccagaaagagaattatgatgatacagaggaccaaaaaaaaaaaaaaaaagggtt

SEQ ID NO: 857391 - DNA, 635 bp, Homo sapiens
ctgtgatgacatggtcaagggtttgaccrtggaagcaggtaactgaagtagggcagagaaaacatttaccaaagtgaggaagttcaggaactgagaggtaacaatgttggttagattattcatttggatgttgaaattgccaggaatggtgacaggagtagcagtagaaggaatacagtgatctaggtgtgaaaatcatcagtgaatggggcaggattaattagggtcagttgatgatagccaggcagggtattaagtgagtttcctccaccttcttgccaaaccactatgcaatctcagaaagaacactatttagcagctacctggtacaacagctattagaattacatgagatcatgtgcaatttaaaatgcctaaaaaaaggtctggcacatttaatggtgatgctgttgttatagtcatattaatgaatcaacttgcactaacaaaatgtctaatatatgccaatcatgggaatagatgctattcattttaatatatcctttatttctttgacctagagtcatagattattaaatctagacaggatgtcaaaagtcatctcatccaaaggtcccctaacaagagtcaaaggttagttaaatgcataaaattacctgtgaagtccattaaat

SEQ ID NO: 857392 - DNA, 593 bp, Homo sapiens
taagaaagacgatatgcaatgtaaaaggtgaaaattacaatgagataagcaggtagctgatacaataatccagacccataactatggtgataaaagtaacttaaaggggtagacatagttttttaaaatgytttttgaaggaaaaaaagtcaagacatttttcatggtaataatgtgagtaacagattgacaaggtcaataagtgaaaatggagtacaagtaataggcaagcacactaacctgtcctactttggtgagatgattccaaaacctgtctacacactggaatcatgctctggagatccttaatgagtaggatctatgcatttgatatagagagatgtataaataggaatctcgggaaattcctaccttgtacaagctcttgaaacaaccaagtgtgagcacagtagtttatgctcaagattctgcaaccgtaccatctgtggaccacccctagccatgtaacaggattaggaagataaaaatgaattccaatgggttgccattagcagtaatggtagctgctttaccaactctagccagcttggcaagtggcttcaaataaaatagtgtgagagcagtcaccatgt

SEQ ID NO: 857393 - DNA, 649 bp, Homo sapiens
ggaaaccccaagagacaatgagtttttctgtctgtccatggaccattgtrgggaacagagcaggaaacatggagtccacagacctgccctctgccccgctcctccctcccagctctctgaccttggcttggattgcattgcctcatctgctctctcatttataaactgagtgactaaacctgcttcaaggatcattgagaggattaaatgaaataattcatgaaaaaagcactcagtaagctctcaatgccatataatggtgtgtcacggtgatgacgggggctcacaataataccacatggccactctctctctgccagcacagctggggggccccgggggtctccctccttcctctcacctctgtggacacatagctgcaaaagctgagcaggaaggcccttggagaaccagcccatttgataaagtaaaggaggtggctctcgactgctgggaggtgtgctgagcttatagatccatttcctagaaatgctgggacgaagcagccaggaattctgattagtctgctgggtctgcagacttgataatattgcctgatggaaagggctaagtgcaggaaatggcatctgctctgaggtaacaggcctcagatatttaaaaaagcatataaaaatagatatcgacatgt

SEQ ID NO: 857394 - DNA, 325 bp, Homo sapiens
accaccacgtctggctaatttttgtatttttagtagagatggggttkcaccatgttggccaggctggtcttgaactcctgacctcaagtgatccacccgccttggcttcccaaagtgctgggattacagacatgagctaccgcacctggcccatcctctagtttcttaattaaccattggattgaactgaagcttactgcttacctttgagtaatggtcaatacagctgcactatttctgctcatctgtgatcaagaatattctaccactggtggaatcatttccatgatcatgagaagaaagagagcatattaagggaattaaa

SEQ ID NO: 857395 - DNA, 652 bp, Homo sapiens
tattgtagtctaggcttatggttttctagtctattctatgggttgcattccattactttcattattyattttgatacccaaattgtcccagattttgcaagtgggtgtcttctcaagctggctcttaggtccctctgacatgttcccattgtgttttgagcaaccgcttactttgtggcacatcaagatgttccaggctcattttgtaccttccctgcccctgccctgaaatcagccccactctccaaagaggcctggttcctctcagtggaagatggcatttaaaaacccgatctggacccttggttggctactactgctggggtgtcagacttttaggccctttcagtggacacagttaggaaataaatgatacagggtcacacacaaccacacatacacatgtatgtttgttactatatgtgtggatatctgtatctgtatccatctataaatatatgtgtacctctatatctctataactatcactatattgtggattcacatcaataccttccattccaagccaacacgtcaggattctttttagcctttctcctttctatatttgtaaatctcttctccaacaaacagagagaaacctgactcccattatcttgagtatattgacttatttgctccatctggcctt

SEQ ID NO: 857396 - DNA, 633 bp, Homo sapiens
ctggaatcttctttaaaaagcaaattccggccgggcactatggttcacacctgtcatcccaacgatttaggagaccgcggtgggaggatcgcttgagccccgaaatttgaaaccagcttgggcaacatagcaagacctccatatctacaaaaaaataaaatattagccaggcgtggtggtgcgcgcccgtagccccagctactcgggaggctgaggcgggaggattgcttgagcctaggaggtggaggctgcagcgagcctgatgttgtcactgccctccagcctggtgagagtgagaccttgtctcaaaaagaaaaaaaaaaaaaagcaacccagagttgtgggaaagaactgagtgtcattctcaatgtttttaacctacgtgctaaccgcgcaccttctacctaggctgcgcgacctccgcgcccggatccatggcgccccctcttctcgactcccgatgcagagctccgatgcagagctcagcgccagccactcacaaggagcctggcaagttttatcgaattggtgaacgaagttcgaaagctctaccctyggagatccttattcagtaggtctgaggtagacctaggaaacgcgcattttatataaatcctacctctgacggcaaac

SEQ ID NO: 857397 - DNA, 597 bp, Homo sapiens
acaaatgtaaacactcatgttaccatcacccaaattaagatattgtaaaacattttcattactctagaaagttcactcatgcctctctccagtcactacccctgaggcagccastgtgctgatttcccatcaccatacattagttgtacctagccttgaacttcatagaaatagagtcatacatacttccttgtctgccttgtttctcaacatgatgttttgaaattcatccatgttgcacctaacagtaatgagtcgtaatttattaatgagtagtagtgtattgtacaaatttgtttattcgttctcttgttggtatttggattgtttccagtttgggactattgttaataaacctgtgaatctgcaagcctattttgtggacatattgtttcatttctcttcggtacataccatggagtacaaacactaggtcatagagtaggtgcatgtttcactttattagaaactgacagttatcggctgggcgcagtggctcacgcctgtaatcccagcactttgggaagccaaggtgggtggatcacttgagatctgggcttccagaccagcctgatcaacatggtgaaaccccgtctc

SEQ ID NO: 857398 - DNA, 565 bp, Homo sapiens
ctggacttcctgggtcacatggggacttggagaacttttctgtctagctagaggattgtaaaygcaccaatcagcggtctgtgtctaaaggattgttaacgcaccaatcggcactctgtaaaaacacaccaatcagcactctgtgtctagctaaaggattgtaaatgcaccaatcagcactctgtgtctagctaaaggactgtaaatgcaccaatcagcactctgtaaaatggaccaatcagcagggcgtgggcagggaaaaataagggaataaaagctggccactccggccagcagtggcaacccgcttgggtccccctccatgctgtggaagctttgttctttcgctcttcacaataaatcttgctgctgctcactctttgggtccgcactacctttatgagctgtaacactcaccgtgagggtctgtggcttcattcctaaagtcagcgagaccatgaacccatggggaggaataaaaaactctggacatgccacctttaagagctgtaacactcactgtgaaggtctccagcttcactcctgaagtcagtgagaccacaaa

SEQ ID NO: 857399 - DNA, 565 bp, Homo sapiens
ctggacttcctgggtcacatggggacttggagaacttttctgtctagctagaggattgtaaatgcaccaatcagcggtctgtgtctaaaggattgttaacgcacyaatcggcactctgtaaaaacacaccaatcagcactctgtgtctagctaaaggattgtaaatgcaccaatcagcactctgtgtctagctaaaggactgtaaatgcaccaatcagcactctgtaaaatggaccaatcagcagggcgtgggcagggaaaaataagggaataaaagctggccactccggccagcagtggcaacccgcttgggtccccctccatgctgtggaagctttgttctttcgctcttcacaataaatcttgctgctgctcactctttgggtccgcactacctttatgagctgtaacactcaccgtgagggtctgtggcttcattcctaaagtcagcgagaccatgaacccatggggaggaataaaaaactctggacatgccacctttaagagctgtaacactcactgtgaaggtctccagcttcactcctgaagtcagtgagaccacaaa

SEQ ID NO: 857400 - DNA, 565 bp, Homo sapiens
ctggacttcctgggtcacatggggacttggagaacttttctgtctagctagaggattgtaaatgcaccaatcagcggtctgtgtctaaaggattgttaacgcaccaatyggcactctgtaaaaacacaccaatcagcactctgtgtctagctaaaggattgtaaatgcaccaatcagcactctgtgtctagctaaaggactgtaaatgcaccaatcagcactctgtaaaatggaccaatcagcagggcgtgggcagggaaaaataagggaataaaagctggccactccggccagcagtggcaacccgcttgggtccccctccatgctgtggaagctttgttctttcgctcttcacaataaatcttgctgctgctcactctttgggtccgcactacctttatgagctgtaacactcaccgtgagggtctgtggcttcattcctaaagtcagcgagaccatgaacccatggggaggaataaaaaactctggacatgccacctttaagagctgtaacactcactgtgaaggtctccagcttcactcctgaagtcagtgagaccacaaa

SEQ ID NO: 857401 - DNA, 622 bp, Homo sapiens
tttgtgtttaatatccttctcttttagagaagtattaggttttgcctctactgctgttattggtggatacccattctggggtggcctttctgtgagtagattgctagaacaccastccttcttggtttataaagtattccctcttggtttataaagtattgctatctccagccaattcacaactcatttcttgataaagccctacatctgagggctggagaatttagaaaaattaacagctctgaatgagggctggagaatttagaaaaattaacagctctgaatgagcatgaaaaaatcgggaactctttcgccattttacctaggagcttattccattctttaaaatttaatcatgtaatcagcaagccaaagttttgatatcctactacatttgagatggaaatgtatgtattgggtggagagagaaagaaaagaaaaggtgattggaaacatgattaaaaatatgcaagtaagccaggcatagtggtgtgtgattgtagtcccagctacttgggaggctgaggccagggaattgcttgagttcaagagatggaggccagcctgggcaatatagtgagactcaatctctaaaaaaattttttaattaaaaaaatgcaat

SEQ ID NO: 857402 - DNA, 330 bp, Homo sapiens
ctcccatcaggttcctccctcaaaacctggggattacaattcaagatgagatttgggtggggacacaaagcctaaccatatcaggtgggaagagtgggaacagtcccaagctaacatgccacagacatgcactgttcttactgaggtccagtagattttcttaaataaacacttctcaagttcttgtatgcttggtcaacttcctgaatctttagaaggttgttcattgacaattttgttcagttttataatttcatttttagggagagttaccatgtcckcaatcagccattctggaaatgcaactcattccctctcttcagaaatcct

SEQ ID NO: 857403 - DNA, 563 bp, Homo sapiens
tgtgtgtgtgtgtgtgatatttctctgttaaaatggtatctcatggtggcaactatacttctacaaaccttaaacaaatattwgtataaaatagtagtttataaaagaaacacatgagtgctttctctgtttttttatttcttatggaaactatctttcatatatatatctgattatatatatatctgtctcatatatgagaggtaaatatattaatcgatttatggcattgtgggctgactgtaatgaaaagctttcgttccatgagaattcataaatacataaaactcgcctacggagattggagattctcgcaattttgccttatcattaaaataaattgttcacaatgacttagtgcccaatgcacagttatgctcaaagactagttggtagattagtaggggttatggaccacattagccgcaatatgataacaataagattttacatttgctggtgtccaaatcagcatgaatgttaaaatagagactcaggtgatcactcagtaccgcatttaattactcacactaactcctgcaaatatttttttatttttaaag

SEQ ID NO: 857404 - DNA, 608 bp, Homo sapiens
atcttaaaattagttattcaaaaatggtaagagaaattactgaactacctagaaagaaggaaaaacagagatgttaaggagtgtggaggctagcatgagatgtccaagtgaacagtgaaaatgagggataaaaattattcagaagatatatttggagataaataataaccagattttagagaaagaaatgagacttcagatttttttttaaaaaaggagtcctgagcaaaataaacataattaaatccacatctagtcatatcatgataaaacatcaaagacaaagacaaagtattaaaagtgaccagagaatagaataaagattatctacaaaggaaacaacctgatggatacaagatttctcatcagcaacaacagacgccagaagggaataaaataatgccttcaaagtgctgctggaaaataactggcaacctaaaattctacgtcaggcaaaactaacattcaagagtgagtrtaaattgaagaaatgttgagggaaagaccaaaagattttactacttacagacacttaattaaagagctattagagtatatcttcaataagaagaaaattaaacccagaaaggaaaaaaatgaaattcaaa

SEQ ID NO: 857405 - DNA, 634 bp, Homo sapiens
aacttaaatccttccccttaaaaaaagaggggacaacattcctctcctctgagggaagcccagcattatgaagcaaaaatcgggagtgaaagcaaggccaagcctaactggcatgctgaagcacacagatgcttttgcacagaaaatattttgaaaatgttttcttttccttatagcccccagctttggtaataatggcttccctagatcattctgttagcactttctgctgctcagaacagggtagtgggatttagaatttagaaaacatcccgagaactgtaattaagcaattgtcatagtcccagaaaagaaacaacccttttactttgtaaatgctaggaggatctgtattttttaaaatcttagaacactaactagctaaaaagatagaaagaaaaaaatctttcttacaatatgcctgtagcacggctccaaaatccagtccctctctctcttcttttttttttttttttttttttttttagatacaggaatttcttacacaactttccaagtaaaatattcaatccccaaataatatatttagtaraatccttacaacatgagaaattgtaaatggcatctgtttccgttgaaaatatttttaaattagaaaacatcttaagcactg

SEQ ID NO: 857406 - DNA, 604 bp, Homo sapiens
catacattccacacacccacaccacacatactacatgatcatatataccacacacaccatacatacaccacatgctcagccataccacaccacacacacacacacacacacacatcagcacacacacacrtcacacacattttacatacacaccacacacacacaaagcatgcacacaccacacacaccacatacacacaagaccacacacacacatcatacataaaccccacatacacaccacacacattatatatgcaccatacactcacacgcacatcatgcacacacaccacacacatcacatatacatgccacacacacacacattacatacacactaaatacacaccacatgctcataaataacacacatcacacacacacagacaccatgcatacacaccacagagcacacacataacccacacacatcacatactcaacactccacccacacaccacacaccacatacgcaccacacacacacacacacacacactgcacacacaatacacatacacataaaatttgcatgaaataaacataaaggaaatgaacaccaagattcatctctcttgccctgcatattggattgaaaca

SEQ ID NO: 857407 - DNA, 414 bp, Homo sapiens
aaggaagaactaacttaggctgaattctattaagacaaggttatcacaatatttacaagattatttatcaggattatatcaattaaatattttgggggaaaaaattgccatacaaaaatcatattaaaattgagccaagcagtgaaacaactctgaaatggcctagaaataacatgtatttgatattcactttttctgaatacagatgtgatcttcatgccatcattgaccccaggtggtaaggatcattaatgtttctagaatcctacactgggcagctgatgcctgtaatcctagcattttgaggggccaaggagggagcatytcttgagcccaggagttagagagcagcctgggcaacacagcgagaccccatctctacaaaaatattttaaaacttagccgggcatggca

SEQ ID NO: 857408 - DNA, 611 bp, Homo sapiens
atcttaaaattagttattcaaaaatggtaagagaaattactgaactacctagaaagaaggaaaaacagagatgttaaggagtgtggaggctagcatgagatgtccaagtgaacagtgaaaatgagggataaaaattattcagaagatatatttggagataaataataaccagattttagagaaagaaatgagacttcagatttttttttaaaaaaggagtcctgagcaaaataaacataattaaatccacatctagtcatatcatgataaaacatcaaagacaaagacaaagtattaaaagtgaccagagaatagaataaagattatctacaaaggaaacaacctgatggatacaagatttctcatcagcaacaacagacgccagaagggaataaaataatgccttcaaagtgctgctggaaaataactggcaacctaaaattctacgtcaggcaaaactaacattcaagagtgagtrtaaattgaagaaatgttgagggaaagaccaaaagattttactacttacagacacttaattaaagagctattagagtatatcttcaataagaagaaaattaaacccagaaaggaaaaaaatgaaattcaaaata

SEQ ID NO: 857409 - DNA, 550 bp, Homo sapiens
tacaggcgtgcgccaccacaccctgctaacttttatatttttagtaaagagtgggttttgccatgtcggccaggctggtctcaaactcctgacctcaagtgatccacccaccttggcctcccaaagtgctgggattactggtgagagtcaccatgcccagcctgtctgttcatttttaatctggggaaacccaaaagcagatttaggcatttgcacaggggcccatccaccaagagctcccctgtagcatgctctgcctgaaccatttattaggagactcctgatgtaattttttttttctggaccagagaagatccttccagtctgcagcctggaaggtaaatgtctagttgccatcttagggagctcaggggctctgcattctgctgtgtgtctgcttcctcaacgccctgttttctgtatagtcccacctgccattgtgcctgtggtcctccatgccagcaactgcagttacagcttctccaaagaataaatccccaagttcagccagggwaaattaggagcgggcatccagggatccaactgcctc

SEQ ID NO: 857410 - DNA, 463 bp, Homo sapiens
tgctccctgggtgcccgcctgtggggtgagtcagcggctggactgagatgacagctcatgagcatgtctcctgggactgtgcctgtggcctgggcttgggccagactccgtcagcaactaaatgcacctggaaggctctcctcagctctgcaaatcccaccagctgcctgacctgctttccccaagccctaccactcctctcgcctactcttaactgccttcgtcaccccagttaggtcaaatggcattctcttcagaatgacctctaccatctgttgagactctgttatctgccaggcagtgttgcaggcatttcccttgcatcatttgatttaactctcataagtgtgctatgggatgactgttattaccttcttttaagatgaggaaatgacactgcagtgacwataactaatttgctcaggatcacaaagctgggaagtgatggaggtgggatcccagg

SEQ ID NO: 857411 - DNA, 552 bp, Homo sapiens
attctcttttataacaagacacaactggaaacactggttattttaccaaggctctgactgaaatacaatatttttagatatgatcagattgctttgaggactgaagttgacttttgtggagcygataaaatgtcccttggagagactggccttgtaccttgtctacatgattcccttacaagcttcctgattttgtggtgagtaatgaatgtcaccttatgacaggcccatgaacctcaagttatttgagggaccttgagaaaagaggtattcatccatttatacaggtattacagacacagtctgagactgagtcagatttttggcttgacttcttaacatagctaggaagccaaggggctttttaaaaagtctaatctgagattctttatgaaaatattccagcaaagccaacttagaacaagcctataggtcattcatcattcttactaaacttttgtaaataatcaggtcaaagactaaacttaaacaaaacagtctgtctatgattatctttggttgaaatgggaggattcgagagaaaaaattatg

SEQ ID NO: 857412 - DNA, 404 bp, Homo sapiens
atgtatcttgttttgtttatccaatcaccaattgatggatatttgagttgtttccactgtttggctcttacaaataatgctgccgtaaacattcatgtgcaagtttttctgtgaacatgttttcagttctcttgtgtatacaccttggagcggaattgctggtgccttgatgttttattcccaaactgctagtatcacaaaataatacccttcagtattgttggtatttatttaggcttaacttcacatgcaacttgggaactagacccggccagtggggagtgcttgcaagaggaacctggaaaagtggaaggtctagakctgtaagtccaagttctcatgttgaaagggcaacatagatgttcttattattcaaattagaccaaaatgtgtttgttctgtgt

SEQ ID NO: 857413 - DNA, 583 bp, Homo sapiens
ctggggatccctgggactcgctgtctcagacagagcctcacccacctcggagctggttctcctgataccacagggcccaagggtatcgtggctgccagggtggggcaggaccagaaactgaactggctgtactcaagaatgcaaatggcgtgagaatagggaagggtgccggccacagtgacactggcagctgcgtcctgcccacacagctggcatgggaattccccacctggagcacacgctgctcatgtcttagttgaggaagggataaggggctaaggagggggtgtccctgaccaatgggacctggggtctaacctgacccacaggatggctgctctgtccaccccagccctgtggacatctcttgcccacccagccatggcaaaaatgaggagcccccgaccatggtgaccctgtctgccagccccaaatttgggactcagagttggacaggccagagtgmggaggaacaccagccccctggaagccccctggaatacgaagccgtcaccgctgagatcatccctaagtgcctgctgatcacccctccctcctccagacggaaggaaatcctacaaag

SEQ ID NO: 857414 - DNA, 584 bp, Homo sapiens
agaattggcaagatgtggtaataatagttggttttactatcatttttagattctttacaggcatcacactccctgattgtcttgttccctcctattacactacacacctgctataccactgatcatagctatagatgcctaggactgtaactgatacaacaacaaagctacaaatggctccaggcccggatagtttcacaggccattccaccacactgttaaggaacagataatatttaaatggatgcaaagcataaataaggaaagaaaatttctaaattctctttatgaagctaccataagaatgatgccaaaacccaaagagacaagcacagaaagaaaatcataagccaatcttatgaatgaacaccaacacaaaaatgtgaattaaattgtctaaaaactgtaagccatgacctaggagacttgaagatggtttgatattaggaaatatcttaaaataggtcttcacattcatagagcctataaaattgcagtagttgggacatggaccccctagtcggacagcaaagaaattaggcagaggaaccaraaatggatccaaacacacccacctagttagg

SEQ ID NO: 857415 - DNA, 577 bp, Homo sapiens
gacaggaccctcagcaagtctctgtgtccaggggtttccagccarcgtggcttgccatgctccaagctgggctcagaggctctggcttcccgaccctctgagagcatctctctgtacacacagagggggtgggggccagtcacatctgctccgggcgatgtgactcagctgtggacgatgacgacatgatcctgagcatgacagggtgggaagcttttcctccttctccagggcctgcgaaccctggaaatgcatccacgatgcaaatagcgacagacatcattagcggacgcatccattctgtttgagctggaaacgctcagggctgcaaggcccttttctgagaagagcggttcctgtcgtcatcctcctctgcaccgcagcgtctgattcccaggagggacagcccggcagttataaaaggctctttcatgacaggcctagaggaattagaaatataattttttcaggcgcttccaaaaaatcaagtaattagagctcatgcacgtaaaagggcccgccatgagatttgtggcttgttttttaaaggaatcaatttatatattaaaacaataaa

SEQ ID NO: 857416 - DNA, 681 bp, Homo sapiens; identical to SEQ ID NO: 824319

SEQ ID NO: 857417 - DNA, 578 bp, Homo sapiens
gagttggtgcacaccctatagccgattccagctstgtggtgccgtcctgctgttatgtgattatttacaggagagttcacttggttcacatcaggggtcactcatgatgggcccttctctgggtctgtcaaatgctaatctcatgtgcagaccatcacagtgtccttttccggccctaaagcccgctgtgcttctcatatccatttctttcccccttgaccatcacagtgtcacacaaagtcgttttctggccctaaagcccactgtgcttctcctatcctttcctttcccccttgtcctaaccttctgacaacacctgaccattttctttttttggagagagggtctgctctgactcctagactggagtgcagaggcatgatcttggctcactgaaacctctgcctcctggactcaagcaatcctcctgccttagcctttctcaaatagctaggtctacgctacaggggtgtgccaccacacatggttaatttttgggttttttttgttttgttttgttttgtttgagatggggccccactatattgtccaacctggtcttgaactcctgggctcaa

SEQ ID NO: 857418 - DNA, 546 bp, Homo sapiens
aaattcttcagtttttacttctattttccctttaagaggaatatctaagaagataatgtttaaatttcagtgtagaaaaccctgttttctgattttgttactaatttctagggaatattgtttgtattttaattattacttggtattggttgaaaatttctttgctgcttaatatatgggtgctgtttatgaatgtttccatgggatactgaaaaaagaaaggtgtgttctctcttaccaagtacagaattgcctctttctccttatgcactgcttctttaattttgttgtttatatgtctgacagccttgtgtgcttatttcttgcccgcgtgttctgtctcgggttggaagggacacgcacgtctcctgccttcacatgctgagatgggtttctgtagcatccccagaatttctgctgaatkaagtgtgtcgggttatttggtacgaacatatcgaatgactatatctgctctaagaattttagttttagcgttatattcctgatgtctcatttatttcatttggcctgatattttattgtcta

SEQ ID NO: 857419 - DNA, 541 bp, Homo sapiens
ggctaatttttgtatttttagtagagacgaggtttcaccatgttggccaggctggtctcaaaactcctgacctcaggtgattcaccccccttggcttcccaaagtgctgggattataggtgtgagccaccgtgcctgacaattaactttcttttcttcagtgccgtggcctttgtacagcaggcaggaagaacctgttgggcggtcccaccttggcctcccaaagtgctgggattacaggcatgagccatcacgcccaaccatgctgacttttacctcccattctttgatgccagagtttttcatttactgaaggcaaggggacaagaccaaataccttgtctccccacttagagaatgagaaagaaaaaaattatgaatatttcttatctgaggaaaatgaaccctttttttttttgagatggagtctcgctcttgtcaccaggctggagtgcagtggygcgatcttggctcactgcaagctcctcctcctgggttgacaccattcttctgcttcagcctcccaagtagctgagactaca

SEQ ID NO: 857420 - DNA, 628 bp, Homo sapiens
cccactttgggatctgggccaagtctccctgcctgtctgggccttggttccctcctctgtaagygtgtggaggacaaggtgacctctaagacctgtccagttctggggtcccacccctgaggactttgcagcctgggctggcagccctgaatgatacgggggacacctgcaggggccgcacccctgcatagactgcagttaattctgggttaagcaaagcctgtgtttcccacacgggcccagcttctgatgtctggaaagatgaggacccgcacttgcttccatcagcagcatgtcctgtgcacacgaaggttgcaccgtcctaaaaacaccactgcgatgacgatctgagcttttaagtgtctcctgctgtctgcagcacgttgagcagaacaccctccaaattccaccttatttggaataagggtctttgcaggtgtaattaattgagagtctgtgatcatcctggttttagggtgggccctaaatccaatgactggtgtccttatgagaagaggagaggccacagagggacacatggagaaggccatggacggcagaggcaggggtcaaggtgacacagccacagccgagggacgcctagagtcacccgaagcggggaggggca

SEQ ID NO: 857421 - DNA, 476 bp, Homo sapiens
caggcacctgtcacctcgcctggctaatttttgtatttttattagagatggggtttcaccatgttggccgggctggttttgaactcctaacctcagatgatccacccaccttggcctcccaaagtgctgagattacaggctcgagccagatttttatttagtactagtttacgatcaaaataatcgattgctctttttaatgttccaaatgacccacacttggccagtgggagcccctggcggcccagctgtccaccctgccggacgtgggtaagtgtcctcacctctggcatgaccaggtgccaggcacactaggacctcaactgccccaccctggagctagccccttctccgaagagagtgtcccaccamcctgagtggcagggcgtgaaagcatggccctcctgcaggcacagaacgcagcctccctctgcctcaagctgtcctgtgtggccgtttccctctctctcatcgac

SEQ ID NO: 857422 - DNA, 545 bp, Homo sapiens
aattcttcagtttttacttctattttccctttaagaggaatatctaagaagataatgtttaaatttcagtgtagaaaaccctgttttctgattttgttactaatttctagggaatattgtttgtattttaattattacttggtattggttgaaaatttctttgctgcttaatatatgggtgctgtttatgaatgtttccatgggatactgaaaaaagaaaggtgtgttctctcttaccaagtacagaattgcctctttctccttatgcactgcttctttaattttgttgtttatatgtctgacagccttgtgtgcttatttcttgcccgcgtgttctgtctcgggttggaagggacacgcacgtctcctgccttcacatgctgagatgggtttctgtagcatccccagaatttctgctgaatkaagtgtgtcgggttatttggtacgaacatatcgaatgactatatctgctctaagaattttagttttagcgttatattcctgatgtctcatttatttcatttggcctgatattttattgtcta

SEQ ID NO: 857423 - DNA, 562 bp, Homo sapiens
tgcagatcagcgtgggcagcagcactctggagggktcagtgcctcccgcctggggacagaggcctctgcttctcccgacccgtaggctgcagtgatccatgcagttcactgctctgtctgaaggtttgacttaggttttaagtgtttttactcagagcaagctgatacatgcgcattttagtaatcgtgataattgttccaacagatttcacgtctgaaactacatcttgtttagaaatcactttccatgtaggagttttccttctgggatgcatttcaagctggggcactcgctactggagacgtcatcggatttactgaggagggtgtgtttgcgtgtgtttggctacctacggatactacagatgaggcgctgtctaattttgtttcacaatgagctgaaatttatccccacaccaatcctctttttgccctacggagtttgtgccttggccccaccctaggtggctccggcaggttcctcagctgtgtgtacccaccacccccaccttgtctgcacgtgactgtgactgactttaggaggccacacaattcaggaagc

SEQ ID NO: 857424 - DNA, 632 bp, Homo sapiens
acgcggacagcattctgcaaggatccgccgtggacatctgggatggtgactggctccatctgggggcgggagggtcggccgtgggtcaggggacctggacggtaagcgccccccacaggcccactggcctcagccgccaatggccctgagtggtcaatggactttctagcccgactgtgttccctacgtccttttttcttatgaatcacctttggagaaaaatgctgatgaattattttaaactgacagaacagactctgtggcaataagatatcaaattacaaacaggacctcaggccgcgccaggcaagggtcgagccgagccgcgtgccctacactgagaggacggactctgccctcacgccacagctgctgctttttctgcagcggctaaacacgcactggccccgcgatgaggatgagcaaggttcaaatgactgcagctcatccacctgcagatgccaactgaccacgttccacagccatgaccacagctctgactgggcaggagactgacttcaggaacctcctcctgataagggaccccgaccacagactggctccggcyggtttacagaggttgtgcgcttgagggcctgtgtcctgagaagacctctgaggtttagggcctc

SEQ ID NO: 857425 - DNA, 444 bp, Homo sapiens
gggcttccaagggagggacctggccgtgctcctggggcccagggccagaaactggaggctacagggtcagagtcttgcccagaaagtgacaaagggggcaccagggagaggccggggagccacctcaggtggccagagctcacagggctggccaggcgaccatagggccctgtgtagttctgggacctgggtcctccagggaggcctcgaagatggcatccaggggtgaggctggcaaggccccctcagcccccggctgccggcttttagctctttatggggatgtggattcccagtacttggattaatcctgcatgctcctaattcagaactgggatgggaaatyccataaataaccccgggctttaaatgcgggctaaatagctcccggcaaagctgcacctgcatcttcttcccctgaaggatcctcagggccttgtgggt

SEQ ID NO: 857426 - DNA, 583 bp, Homo sapiens
aaagaaaaacataaattggatttcctcaaaattaaaaaattctgctctttgaaaaactgttaagagaatgaacacacaatccaaaggcttggagaaagcatttacagatcacatatctgataaaggacttgtatccagaatatgcaacaaactcccaaactcaataataagaaaataaacaacccaattaaaagtgagtaaaagatttgaactcaacgcttactacaggagatggagaataaacagatgaaatgatgctcaacatcattggccaacagggaaacgcaaattaaaaccacagttccatctatcaccacacacctattagagtatttgaaattaaaaagacaaaccataccaagtgctggggaggatgtggaatgtaaaaccatacaatcgctttggcagtttcttaaaaagtttcacatatggctaccgtggcatccagccactccactcctagayatctattcaagagaaagaaaagcattcatccaaagacttgtgcacaatgttcggatcagctttatctgtaagagccaacaccagaaacaacccaaatgcccaccagcaggtgaatgga

SEQ ID NO: 857427 - DNA, 519 bp, Homo sapiens
atagccattatgggaaatagtacggaagttcctcaaaaaattaaaaatggggccgggcgcagtggctcatgcctgtaatcccagcactttgagaggccgaggcrggcagatcacgaggtcaggagatcgagaccatcctggctaacacggtgaaaccccgtctctactaaaaatacaaaaattggccaggtgtggtggcaggcgcctgtagtcccagctacctgggaggctgaggcaggagaatggcgtgaacctgggaggcagagcttgcagtgagccgagattgtgccactgcactccagcctgggcaacagagcgagactctatctcaaaaaaaaaaaattaaaaacttaaaaattaaaaatggaactaccatgtgatgagcaatcccacttctgtgtatttaaacaagacaaattaaagccagagctcagagatacctgcactgccatgctaactgcagcactattcacaacagcaaagatacggaagcaacataagtgatcatcaacagatgag

SEQ ID NO: 857428 - DNA, 570 bp, Homo sapiens
ctgatcagtctcacccctgcagaggcagcttgggggaaagtgaggagctggtgtgaaattccaggatgcccctgmacttgggaagcagcgggcaggagtgtggatgacacgctcctcctcacactccagctctgttctcttgatggattggccacagcgctttattctacggtggtgtcacacggtgggggatgagccatctctcagggcagagctactctgtccatcccaggcagctcccaggggcaccctctgctcctgtgtgggtcctcctgtgcctgctggtggtggatatgggtgattcctgccaagaagccttcagacaagtcagacaccacattaatgaaatcccctccaaggctgaagaccaagtggggtctcagagctgtggacagaacttagaagtctatggacccagagccgatctgtggccatgtgggagtcaccttaaggcctagggacaagccgggcgaggccacaagttcacaggcaactcctttcactgctatagttcagaatcacacttaaaaaccaagagaattggggcagccacagtgattgtgagctagt

SEQ ID NO: 857429 - DNA, 570 bp, Homo sapiens
ctgatcagtctcacccctgcagaggcagcttgggggaaagtgaggagctggtgtgaaattccaggatgcccctgaacttgggaagcagcgggcaggagtgtggatgacacgytcctcctcacactccagctctgttctcttgatggattggccacagcgctttattctacggtggtgtcacacggtgggggatgagccatctctcagggcagagctactctgtccatcccaggcagctcccaggggcaccctctgctcctgtgtgggtcctcctgtgcctgctggtggtggatatgggtgattcctgccaagaagccttcagacaagtcagacaccacattaatgaaatcccctccaaggctgaagaccaagtggggtctcagagctgtggacagaacttagaagtctatggacccagagccgatctgtggccatgtgggagtcaccttaaggcctagggacaagccgggcgaggccacaagttcacaggcaactcctttcactgctatagttcagaatcacacttaaaaaccaagagaattggggcagccacagtgattgtgagctagt

SEQ ID NO: 857430 - DNA, 579 bp, Homo sapiens
acagaggatccccagccctaaatccacaagaaaaacacacatagcctgataagaaatgggctaggaatgtgaacaggaaactttcagtgtggacggccatgcatttaggccatagtgggttcccagcagccrtcagtgcggagggcagggagctgagagcagatcaggctgagccggggtcacgcggggtcccccagccactgagggccctgggcagcaaccacgcagaccccgccccccaggctccacctcactttctgtggcatttctgtgcctgttctgaccacagccgtggcagcaccatgtccatcaggctgcggccggcctggctgtggggtgactgcagcatcccaggggcgggcattctcatcagcgttttggtctctgcagctggcctggaggagtttgtctcacagtctgaggactgactgctctgcacccacccagggtggcggagccccatgcgctgcctgatcttaccattgtccccgctgacggcctttcccacaggacatcacaggcagctcatgctccccgcgtggaccaagccttagagagatgagagtgtcgctgactgtg

SEQ ID NO: 857431 - DNA, 672 bp, Homo sapiens
ctgagggatgggagaggcgagggatccaacagcagcgcctgccctggatggggctgctttggggcctccccagaaactgggttgtgtccagcccctggctccagaaaggaaaccccatggccgtgtgcagaacgggtccacacggtgggcggggacggccatcctgagggccgggctggcccttggctggcgtctgggaactgggatttccgaggggctccccccggccccgcctcactgggcctgagctgtttgtaccatgtgctttaggccgaacacccacatccctgctgggagtctggaattctggcgtagcccaggcagaagctgctcacgtgaccagtccccgggtacatcaccgggcagggcatccccaacatcgcaggcgtggcgtcccagctgcttgcaggggagtgaggcgcatcctgcgtgacccccaccccaggagaggcctccaaagctgagcctggtgcccctggactcggccccaggaacctttcccttggtcgattttgctcagtgtcctctctgtgggaaatcacagccrtgagtaccacaacctgcgtggcctgtatcctcctggagaatcgccgtcttggggaccctgacacagaccccaagctgcccttcccaagcaacgacaatgctgtcctaggacagtgctgggtgcat

SEQ ID NO: 857432 - DNA, 535 bp, Homo sapiens
aactaagccactatgtatagccattatgggaaatagtacggaagttcctcaaaaaattaaaaatggggccgggcgcagtggctcatgcctgtaatcccagcactttgagaggccgaggcrggcagatcacgaggtcaggagatcgagaccatcctggctaacacggtgaaaccccgtctctactaaaaatacaaaaattggccaggtgtggtggcaggcgcctgtagtcccagctacctgggaggctgaggcaggagaatggcgtgaacctgggaggcagagcttgcagtgagccgagattgtgccactgcactccagcctgggcaacagagcgagactctatctcaaaaaaaaaaaattaaaaacttaaaaattaaaaatggaactaccatgtgatgagcaatcccacttctgtgtatttaaacaagacaaattaaagccagagctcagagatacctgcactgccatgctaactgcagcactattcacaacagcaaagatacggaagcaacataagtgatcatcaacagatgag

SEQ ID NO: 857433 - DNA, 554 bp, Homo sapiens
ctgatcagtctcacccctgcagaggcagcttgggggaaagtgaggagctggtgtgaaattccaggatgcccctgmacttgggaagcagcgggcaggagtgtggatgacacgctcctcctcacactccagctctgttctcttgatggattggccacagcgctttattctacggtggtgtcacacggtgggggatgagccatctctcagggcagagctactctgtccatcccaggcagctcccaggggcaccctctgctcctgtgtgggtcctcctgtgcctgctggtggtggatatgggtgattcctgccaagaagccttcagacaagtcagacaccacattaatgaaatcccctccaaggctgaagaccaagtggggtctcagagctgtggacagaacttagaagtctatggacccagagccgatctgtggccatgtgggagtcaccttaaggcctagggacaagccgggcgaggccacaagttcacaggcaactcctttcactgctatagttcagaatcacacttaaaaaccaagagaattggggcagccaca

SEQ ID NO: 857434 - DNA, 554 bp, Homo sapiens
ctgatcagtctcacccctgcagaggcagcttgggggaaagtgaggagctggtgtgaaattccaggatgcccctgaacttgggaagcagcgggcaggagtgtggatgacacgytcctcctcacactccagctctgttctcttgatggattggccacagcgctttattctacggtggtgtcacacggtgggggatgagccatctctcagggcagagctactctgtccatcccaggcagctcccaggggcaccctctgctcctgtgtgggtcctcctgtgcctgctggtggtggatatgggtgattcctgccaagaagccttcagacaagtcagacaccacattaatgaaatcccctccaaggctgaagaccaagtggggtctcagagctgtggacagaacttagaagtctatggacccagagccgatctgtggccatgtgggagtcaccttaaggcctagggacaagccgggcgaggccacaagttcacaggcaactcctttcactgctatagttcagaatcacacttaaaaaccaagagaattggggcagccaca

SEQ ID NO: 857435 - DNA, 323 bp, Homo sapiens
gataaattcctccactggtttgcatatgatccaaaaggatcccagagtacatgaatttatccccagttaccccaagcatagaacaaagattgtgattattctacacagaatttgagtatagaaagttgcatcatgtcattcatttggttattttttcactaattcatcaaatctttattaagaatctgctgtatcaggcaccgttwtaagaaatgcagattgagcagatgaacaaaatagacaaagtctctactttctgcaggttacaatgagacagaagggatagagagactgattttaaaaatgaatgaaatagattctaa

SEQ ID NO: 857436 - DNA, 587 bp, Homo sapiens
tatcttttgtcaactattgttagacatctgggttgattccatgtctttgctcttgtgaatagcacagcgatgaacagacaagtgcatgtttctttttsgtagaacaatttttttttctttgggtatatacccagtaatgggattgctgggtcaaatggtagttctgctttaagttctttgagaaatctccagatgctttccagagtgactggaataatttaatattctcatcaccagtgtataagcattctcttttctccacaacctcaccaacacgttttagtttttgacttttttaatagtaactattttgactggtcactaatgttatgcattaacatatatatttgttatatataacaaatatatgacaaatatatatgtaacacatatataatttatatatgtatttgttgtatataacaaatatataaaaatatatttgttggctgattttatagtcttttgagaagtgcctgctcatgccttttgcccatgtttaaaggggttatttggtttttgcttgttgatttgcttaggatccctatggattctggatattagacttttgttggatgcagagtttg

SEQ ID NO: 857437 - DNA, 587 bp, Homo sapiens
tatcttttgtcaactattgttagacatctgggttgattccatgtctttgctcttgtgaatagcacagcgatgaacagacaagtgcatgtttctttttcgtagaacaatttttttttctttgggtatatacccagtaatgggattgctgggtcaaatggtagttctgctttaagttctttgagaaatctccagatgctttccagagtgactggaataatttaatattctcatcaccagtgtataagcattctcttttctccacaacctcaccaacacgttttagtttttgacttttttaatagtaactattttgactggtcactaatgttatgcattaacatatatatttgttatatataacaaatatatgacaaatatatatgtaacacatatataatttatatatgtatttgttgtatataacaaatatataaaaatatatttgttggctgattttatagtcttttgagaagtgcctgctcatgccttttgcccatgtttwaaggggttatttggtttttgcttgttgatttgcttaggatccctatggattctggatattagacttttgttggatgcagagtttg

SEQ ID NO: 857438 - DNA, 654 bp, Homo sapiens
gcattctttcatgaaagctgagggtaaaagaaaggtgcagtcaaggaattgagaaatatcacattggccaacatattgaaccaacttgaagaaattaactaagtttttrgggctttttattatctcttagcaatgaaacagagtgggctagactgaatccaaagcgttcctgtacctcatgtgtaaaggcagtgtagactaatggtttggagtcaaattacctggattcaaatcccatctctggcaactaggtagagctacttaagcagtagcttagtgtctctgtgcctcaatgtgttagtaaaatgggaacgattttaataatgatacttatccaatggtcttgtttcaactaggtacagcaatccctattaatcattcggaaatgtggctggcacacagtaaatgtcatctttgatcatttcctctattagcttcctgcttattgggggttgacagttttgcttttgctcccatcttgaataaaataatgaagttcaataataactaggcagagggcaaggaaaaaaaacacctactgaaagattggctcataactgaggatagaaatggtcttagcaaccctctagtccaattctctcattatagaaatgggaaaactgaagccccagggaggaaatatttttcctgagg

SEQ ID NO: 857439 - DNA, 595 bp, Homo sapiens
gatattaatttgacaaagagaaagatacacagtagttttctacttaatgacaagcaggaaatagttatgaatagaacaagaccttatagtctccagaagctgcaatcaaggtacgaatgccttatttagaactaaccaacactcaaggcagagcactcatacgaggcccatagaatgtcatcgatgagggaatggggaatgctgcacgagacaaatgtcagcaagagaatggggatgattttgacaatagcagaggagcaagagttaggatagaaagagaattctagaagtgacagcatgaacaaaagcatgcagaaaaataaaatccagcacataaaataaggaagacttttttgtattcaagaaatttgtttttacagcagcatctcagtgcctcaaagattatctttaaaaacagctgttatccaacaactacttaaagcttgaaataaaggaaaacattcccacgccaactctgcactctaaatagaagctgaaaagatagatacaaaaataccaaggccactatggcagcctgatttgaagctttttataaaacaaaaagttctgtgrtctcctgaaaggctcactcctc

SEQ ID NO: 857440 - DNA, 344 bp, Homo sapiens
tctcgaacttctggcttcaagcagtccacccaccttggcctctcaaagtgttgggattacaggcatgtgccactgcgtccagcctgattatcttttaaatatcrtattggctatttgtatatcttatttagaggaaagctcacttaaatcttttgtccttgcttttttttcaaaaaagaaatgctgtatttttcctgtttttaacttacctaatgccttatgatttatgtgtccatgttcatggtgagattggcctgtaattttcctttttttatatcaaccttgatgagttttattatcaagattattctagtccaataaaacaaattgtagtatttcctcat

SEQ ID NO: 857441 - DNA, 516 bp, Homo sapiens
tgggcagggcgcaagggctgtggggtagacgttgggtggattcaggagactgcagaaagcaaagtgggtgttaatgggacttttatttcctgtggaacaaaggacactacacttttctgcaaaagaccaagtagtaaatattttaggctttgtgggccgcagatggcctctgtcatatattccttttttttcttaaaacaacccttaaaaaatgtcaaaatcattcataactggcaggctgtgagctggatttggtttgccaacaccttcttatttcatcacaactaattaccactcttctttagaaatccagtgtttaatgagtttcctttataataaggttgagatttgggaagtcagtttttacttgaggcaaaaaagttgtatcttgattcataattcagaagtgtcattttatctaggttttaggcatagcttctcacctgattggtgaacrtataccctgtttattattagctaaaaataagtgcttgatgccagattcactttttttct

SEQ ID NO: 857442 - DNA, 646 bp, Homo sapiens
gcactacctctgtagtgttatttgaaagtggacatggattaactgcaaatatatgttgcaaactccagtgtaaccctttaaaagctaaaaaaagtttaacaaatatgytaagaaagaagataaaaatggaaatcatataaaatgatcaattaaaaccaaaaaaggcagaaaaagtgtatgtgacaaaagcacaaacaaaaaaatatttgggaggccgaggcgggcggatcatgaggtcaggagatcgagaccatcctggctaacatggtgaaaccccgtctctactaaaaatacaaaaaaattagccgggcgtggtggcagacacctgtagtcccagctgctctggagtctgaggcaggagaatggcatgaacccaggaggcagagcttgtagtgagccgagatcacaccattgcattccagcctgtgcaacagaggcagactctgcctcaaaaaaaaaaaagggcaaaacctggaaaaacagcaataaatatcacagatattaatacaactatatcaataatcacattaaaggtcaatggtctaaatacacctattaaaagagcaattttcagaatgtatcaaaaaataagacccaactatatgttgtctacaaggaacctagctgttgccacctttcaagatca

SEQ ID NO: 857443 - DNA, 628 bp, Homo sapiens
ggagacaagacttgaactcacctggaggctggcatggtttgttgagggcacaaatgcagctggacttgggaaagtgagctcgggtcttgctggagaggactgggttctcagctcakcgctgccagttggagaggcagggacccgtcctggagacagtggctgacccatgcacccagaaaacctgactttctcttctcatgcgactgaactcttcctggacagcctgcgggaggcacatgtgacctgcagaggcaccagccttgtggcttcagggctgggcaggcgctgcccctcggggattgtaattatgttgatcagaactgtcttttccctgggggaaggagggcccttctttttcttcttcatttttccttaaaagaaataaaagacaaaaacaaaaaggactcctcttcatttccttcaacgtgctatggcatcttcggaactagggacttgaaacctaaagctgatcctaatttctgatggatagaatgtgcgtttggggttcttttccacatcaaattaaatctgtcttggactgatttcctggaagtgtttttcattagtataatagtcctcagctgagagatcacaggatcagatactacagaaggggaaatgcaaactg

SEQ ID NO: 857444 - DNA, 604 bp, Homo sapiens
gggtcttaaaaccatctcaattaaggaatagctaacgggttttatctggagaagaccgggggaatatgagatgttggccttcaaagagttaaaatrctcttgcagaaaagggagtagattgctttcccgggagaatggctaatatttcaggagaagaaaattcctttcaatgtaagaaatatctgtctcagactacagctttccaactttggagtggaagttgctgttaggtagtgagctcctgtgcactggacactttatgaatgtaggggtgctggggaagaattattcacatattaaaagggagttcagataaaattatatgaaagcccctttctttgaagccaggtgtgggctggctgcccgggccttcccttctaccttctaccttttgctagaagattcccagcaaacctgctcctcttgttcatagtattatcatgaagattagaagagtgttaaagactaaattttaaaagacagtaaaatcatgactctcacacaatcataaaatgaacatgtgccaaggattttatttaactcgattaatgaggaagtcactcgatattacaactggctcaaaagagaactcaagatccacaca

SEQ ID NO: 857445 - DNA, 609 bp, Homo sapiens
agtgctgtctcgtgatagatttctcatgagatctgacagtttaaaagtgcatggcacttcctcctttgttgtctctctctcctgtcaccatgtgaatatgtgcttgcttccgctttgccttctgccatgattgtaagtttcccaggcctccccagccatgcctcctgtacagcctatggaactgtgaatcaattaaacctcttttctttataaactacccagtagcaggtagttttttataccaatgtgagaatggactaatacagtctgttttcgtaccagtgccatgctgttttggttactgtagccttatagtacagcctgaagtcaggtaatgtgacacttccagcttttttttctttttgcttaggattgctctggctatttgggctaatttttggtttcatattaattttagaatagtttttctagttctgtgaaaaatgacattggtagtttggtagaaatagtgttgaatctatacattgctttgggcagtatggccattttaatgatactgagtcttctaatccatgagcaygaaatattttttcatttgtttatgtcatctgttattttttttagcagttttatacttctccttgtaga

SEQ ID NO: 857446 - DNA, 646 bp, Homo sapiens
atgggggtggtttctaacgggttaaaactgcccccctagtgctgtctcgtgatagatttctcatgagatctgacagtttaaaagtgcatggcacttcctcctttgttgtctctctctcctgtcaccatgtgaatatgtgcttgcttccgctttgccttctgccatgattgtaagtttcccaggcctccccagccatgcctcctgtacagcctatggaactgtgaatcaattaaacctcttttctttataaactacccagtagcaggtagttttttataccaatgtgagaatggactaatacagtctgttttcgtaccagtgccatgctgttttggttactgtagccttatagtacagcctgaagtcaggtaatgtgacacttccagcttttttttctttttgcttaggattgctctggctatttgggctaatttttggtttcatattaattttagaatagtttttctagttctgtgaaaaatgacattggtagtttggtagaaatagtgttgaatctatacattgctttgggcagtatggccattttaatgatactgagtcttctaatccatgagcatgaaatattttttcatttgtttrtgtcatctgttattttttttagcagttttatacttctccttgtaga

SEQ ID NO: 857447 - DNA, 668 bp, Homo sapiens
ccctccggatggatccctgtggtgccaggcaggaatgggctgttggggacccagcgaactctcagggcctttctgctgcttcttcctacccctgtattttgcttggctctctaaattgactcagctccaggtgaagtcggaaacttctcccacaaacagaccttcagcttctctagttggggggcgtgtgttcaggagaggagggtctccctttcccacttgtgcagttcaggcactcacagtatttggggtgtctcctgggtcctgcaggagcagtttgcttccttcagaggtcctgtgggtcctctcgggattgctgatttgttcttgcagtcgatctggagtaaaaattcacaatgtgagtctctgcacgctcctctgtccggagctgcaatctagtcctgcctccagtcagccatgatcttttttaaattttcctacttgaaagaactattaaataacttctaaattagacaaaattacattttcaacactcatttttatgcctttataatttttttgccaataacacatastgccttttaaatacactctgtatacagttttttatatctagtagttttaattattcatatcaactataattttaactcttagtaactctaatttctacacttgatgttagccaaaaggccaagaagtgatag

SEQ ID NO: 857448 - DNA, 630 bp, Homo sapiens
attttcttgatagtatcctttggtgcacaaaagtttaaaatctacaatggacctttttattattattattattattttcagacagtcttgctctgttgcccaggctgtagtgcagtggcacaatcttggctcactgcagcctccgcctcccaggttcaagcaattctcctgcctcagcctcccgcgtagctgggattataggcgtctaccatcacaccagctaatttttgtatttttagtagagacgggtttcaccatgttggccaggctggtcttgaactcctgacctcaaatgatctgcctgcctcggcctcccaaagggttgggatttcaggcgtgagccaccgtgcccagctacaatagatctttgagttgagtaatacaagccctgcttcctttcccctaaagaagcttgagtcaaacctacattactcattaatgcattaatgtgagcacattcttttgatattgagtccataagagaatatgtgcctaggaattcacagaaatctagcagcttggacttccccacactgtagaaatggggtttgaggaacttyatttcagcacaggtcaaggggctccaaatgagtttgggttatgccactattaaggagatattattcacta

SEQ ID NO: 857449 - DNA, 583 bp, Homo sapiens
agtgaactatgatcaggccactgcagtccagcctgggcaacagagtgagaccctatctctaaaaatcaaaacgtactttccttcatcaactactaaggtgttctgaaatatggtttatactgtcgaaacaggatagatgatgcttgatttttttccctttatttatcaattttcagactagttaatgccctagaaagcaccaatggcaaccatttatttatttatttatttatttatttatttatttatttatttttgagatggagtcttgctctgtcgccaggctggagtgcaatggtgctatctcagctcaccgcaacctccacctcccgggttcaagcaattctcctgcctcagcctcctgagtagctgggattacaggcatgtgccacgacacccggctaattttgtatttttagtagagatggggtttcaccatgttggtcaggctgrtcttaaactcccaacctcaagtgatccgcctgcctcggcctcccaaagtgctgggattacaggcgtgagccactgcacccggccaactttttattttttaagatattatttggagttaatatatttttat

SEQ ID NO: 857450 - DNA, 630 bp, Homo sapiens
cctttgtccatcacaatagattttttttgaaatctagattcctcatgattcattgatttcttttctttttcttttttcttttttttttttttttgagamagtttcactcggttcccccggctggagtgcaatggcacaatctcggttcactgcagccttcacctcctgggttcaagtgattctcctgtctcagcctcctgagtagctgggattataggtgcctgccaccatgccccgctgatttttttatttttagtagagatggggttttaccatgttggccaggctggtcttgaactcttgacctcaggtgatccgcctgcctcccaaagtgctgggactacaggcgtgagccaccatgcatggccattgatttcttaattataaagatacattagataattcattgctctttatcattcactttcggtttaagcacagtaagtggatctgaaaataatttcagtatatataaattatatatcattatcacataaagttgatgaaatagtatatagaatgtttgtatgctctaagactaacttttagattttctttttattctctcaatggtgtgcaaagtataaatcaaagccattctgtgaaaaactgctttcctgggtgaaaagc

SEQ ID NO: 857451 - DNA, 627 bp, Homo sapiens
cttcctgtatgcatctaggggaggtcatgagcagctgtagcatatgtgatgttagtgaaccatccctgtaattgaaatccgaaatcccagcaaatgcactgaaagggccataggaatggaccaccctgattggccagcctggtctaactggctttggcctgcaatgacgggttttatttacataactgaagattccagggataaatcctgatttcaggcatagcttgatctaggactcagttcctgcaggatccatgtctgagctccacatcctccttctcaggtttttcagagaacctccagtgcagttcccagtgctccctgtggtgacagtgattctgtgcctcctgtcctcacaccactgagcccgggaatgagagtatgtaggtgtcaggattcccagagcaggcctgaggctatgaacagacaagctgagatgtgggcccacccctgcgtgagtgaccgtggctcagggcccctccctgttgtaggggagaggatatgctaactggcctctggaccttaagggggggtcagtcccacccaaaccccaactgagaaaggagaaggggtggtttaaaataccaacataaagcaaaacrcacagaaatttgagatactgatgtc

SEQ ID NO: 857452 - DNA, 595 bp, Homo sapiens
agcttctgcacagcaaagaaaactatcaacagagtaaaaagacaaccctacagaatgggggaaaacatttgcaaactatgcatctgacaaaggtctaatatccagcatctataaggaacttaaatatacaagagaaaaacaaacaactccattaaaaagtggacaaaggacatgaaaagacacttctcaaaagaagacatacatgccgccaacaagcatatgaagaaaagttcaatatcactggtcatcagagaaatgcaaatgaaaaccacaatgagataccatctcacaccagtcagaatgcctattattaaaaagtcaaaaaataacagatgtggtgaggttgcagagaaaactgaacgcttatacacagttggtgggagtgtaaattagttcagccattgtggaaagcagcatagcaattcctcaaagagctgaaaacagaactatcattcaacccagcaatcccattactgggtacatacccagagcaatataaagcattctgccataaagacacatgcacrcgaatgttcattgcagcactattaacaatagcaaagacatggaatcaacctaaatgcccatcaatgag

SEQ ID NO: 857453 - DNA, 524 bp, Homo sapiens
aacttcattagcttcgcagtaaatctgcctctgagtcaataagtaagtgagtagatgaataaagtcgaagtacaaaggtgtataattttagagcttataggacctaaaaaatgatcaagtcctatgtccttttttaatagttgcagaaaccaggactggagagagtagctttctcatgaacacacagctaaaagtcttaccaaggttgagtggctgtcctaggatatcatgactgcagcctggtggtgctgaacccaaggccatgtctttactctgccactaactccatccctaccttaggaacagttgctgctcatctgccatatataactcacctctccacgtcagggctgcccaatgtcaagggccaggcacaatgaggtctttgtcaaaggactccctggaattacggggcacttacactgggtagccatacacagygtgaacctgttaatggtcttgacctcctcttttggtgctgatttctggagggaagagaaaggaaaagtgcttcttcctctccc

SEQ ID NO: 857454 - DNA, 524 bp, Homo sapiens
aacttcattagcttcgcagtaaatctgcctctgagtcaataagtaagtgagtagatgaataaagtcgaagtacaaaggtgtataattttagagcttataggacctaaaaaatgatcaagtcctatgtccttttttaatagttgcagaaaccaggactggagagagtagctttctcatgaacacacagctaaaagtcttaccaaggttgagtggctgtcctaggatatcatgactgcagcctggtggtgctgaacccaaggccatgtctttactctgccactaactccatccctaccttaggaacagttgctgctcatctgccatatataactcacctctccacgtcagggctgcccaatgtcaagggccaggcacaatgaggtctttgtcaaaggactccctggaattacggggcacttacactgggtagccatacacagtgtgawcctgttaatggtcttgacctcctcttttggtgctgatttctggagggaagagaaaggaaaagtgcttcttcctctccc

SEQ ID NO: 857455 - DNA, 524 bp, Homo sapiens
aacttcattagcttcgcagtaaatctgcctctgagtcaataagtaagtgagtagatgaataaagtcgaagtacaaaggtgtataattttagagcttataggacctaaaaaatgatcaagtcctatgtccttttttaatagttgcagaaaccaggactggagagagtagctttctcatgaacacacagctaaaagtcttaccaaggttgagtggctgtcctaggatatcatgactgcagcctggtggtgctgaacccaaggccatgtctttactctgccactaactccatccctaccttaggaacagttgctgctcatctgccatatataactcacctctccacgtcagggctgcccaatgtcaagggccaggcacaatgaggtctttgtcaaaggactccctggaattacggggcacttacactgggtagccatacacagtgtgaacctgttaatggycttgacctcctcttttggtgctgatttctggagggaagagaaaggaaaagtgcttcttcctctccc

SEQ ID NO: 857456 - DNA, 641 bp, Homo sapiens
aacaacagaaaatatcaggtaccagaaacaaaaaagggctaaaagcccaaaccataagcttatgagcagatgctgatgtyccctaggatgggggtgggtgttaatcatagtacccttggtgttcagtacccttgggttataatgcccatatgaggatagaagatgagccatccttagacctgccccaagcccaggaactggaactaagacaccctcatgaaactggattctataaaaaactataccttaggagaaaaggtagaccagaaaaaaatttgcttgctatcttaatgagacaagaatatttgtttgtttctgtctagctctgtgtaagaatattctcaattttgagcctctacttctggtgagtatagggtttgaatctgcaatattcatatggtcaaggaactcctatgtcaataaataaatataaaaatgatctaaggcgagtgagagcaccagagtttctggaagaagaacacccaaaactctctggagggatattcccacaactctgggcacatggattctcttagggggaaaatgtcctgctgaaaataagctcccaaacatgaaaactatatcaggaaataatccatcatgagcaagagtcaacagacacaatagcacgatgatggaat

SEQ ID NO: 857457 - DNA, 641 bp, Homo sapiens
aacaacagaaaatatcaggtaccagaaacaaaaaagggctaaaagcccaaaccataagcttatgagcagatgctgatgtcccctaggatgggggtgggtgttaatcatagtamccttggtgttcagtacccttgggttataatgcccatatgaggatagaagatgagccatccttagacctgccccaagcccaggaactggaactaagacaccctcatgaaactggattctataaaaaactataccttaggagaaaaggtagaccagaaaaaaatttgcttgctatcttaatgagacaagaatatttgtttgtttctgtctagctctgtgtaagaatattctcaattttgagcctctacttctggtgagtatagggtttgaatctgcaatattcatatggtcaaggaactcctatgtcaataaataaatataaaaatgatctaaggcgagtgagagcaccagagtttctggaagaagaacacccaaaactctctggagggatattcccacaactctgggcacatggattctcttagggggaaaatgtcctgctgaaaataagctcccaaacatgaaaactatatcaggaaataatccatcatgagcaagagtcaacagacacaatagcacgatgatggaat

SEQ ID NO: 857458 - DNA, 641 bp, Homo sapiens
aacaacagaaaatatcaggtaccagaaacaaaaaagggctaaaagcccaaaccataagcttatgagcagatgctgatgtcccctaggatgggggtgggtgttaatcatagtacccttggtgttcagtamccttgggttataatgcccatatgaggatagaagatgagccatccttagacctgccccaagcccaggaactggaactaagacaccctcatgaaactggattctataaaaaactataccttaggagaaaaggtagaccagaaaaaaatttgcttgctatcttaatgagacaagaatatttgtttgtttctgtctagctctgtgtaagaatattctcaattttgagcctctacttctggtgagtatagggtttgaatctgcaatattcatatggtcaaggaactcctatgtcaataaataaatataaaaatgatctaaggcgagtgagagcaccagagtttctggaagaagaacacccaaaactctctggagggatattcccacaactctgggcacatggattctcttagggggaaaatgtcctgctgaaaataagctcccaaacatgaaaactatatcaggaaataatccatcatgagcaagagtcaacagacacaatagcacgatgatggaat

SEQ ID NO: 857459 - DNA, 422 bp, Homo sapiens
atagaagcatgatttgtttcacccctaattctattaggaaaaaactggctgtagtccttgaatagagctcaatgacaatttgaagagtactagagaagccaataaattcattaatagggaagattgttttagctagacaaaaaggtaatagccttcattgtagtagtttaattagaaaaataataaactcccttaggaaggatgaaagcccataattaaaaagatgagctatttggaggaattctgaatagtacctcttctcagatttgttcctagctgctctattcatggtccaaaagcacttagcaagctgaggaattagtggaaaatgtacttaccttcagctctgaagcaggaactttctgggcaaaatgaatgagaaggaatgagctcrgagagaaaagcaagcaagtggaccttgg

SEQ ID NO: 857460 - DNA, 564 bp, Homo sapiens
ttttattttattttatttaacccctacaatcatagatgagcaactgttttacagcataagaaaayggcatttattttacaggtgacaaactgaagctcgaggtgttttgctgcaagtgtgaggtctctggcccagcaggcagtgaatggggttttgaactcaggactttccttctagccatgctctcttcattgcagcctttgggccccaaggagaccaggtttcccctgatcacgtttttgttattgttttatttttcctcctgtatactcaagggagcatgttcaatcgccaaccttctatgttatgttttaaaactgtgtccagtcagccctgggaatgtgagggaagggggctcccagagccagggcagccccgggagccaggacctgtgccatttcagccagaagtctcctcctttatctgacttatttattgaatttccacatataagaaacatttctaccacttaaaaaatgtcagggatagtatgaatgaaagaaaggcacaggtgatttgaaaccttcattttaatcagtgttttctatttcttttattttcaaa

SEQ ID NO: 857461 - DNA, 592 bp, Homo sapiens
taggcatattggattttatagtttatctgagcagacatcgattcacgaatcacacagtactgggtggtaagtgggtatcactccactgcagggtggagagagagayggtgagaggtgtttgtggaagaaatacaaggaacacagctttgactaggtagtgacagcccctagttagaggtcagttggtggtttccagttgccaaagtctctagtttcattttactccttatgttgggcttcggtttgcttacagaggaacctaaaaccctgggtctgcctcagtctaatggtcttccaattaatttttttttgcaagtgtgactgcaaatgttttttgggtccacctggaccggagaattaatggattttctgattcaggattatgtaaaatcaagaagattaggttaaaagaaaacaatccatcaaaataagatggactctattgagtctgttaatagttttgacatatagaggtgagatatatacatagtaattaagaacatggactctggtctggcacagtagcttccacccataatcccagcactttgggagaccaaagtgggaggatcccttgaggccaggaattcaa

SEQ ID NO: 857462 - DNA, 628 bp, Homo sapiens
ttatttttcatgatgtgtgcaatgtggatccaagagggctctgctccacrttgttgctcagggacccagcctgagagaagcccccgtagttttatcacatgaaacacatggcctccaaggtacccacacaaggaaaaacaaaagtgacaggtgagtcacacaggcacttcaccagctcagcttggagttgacactccacacacagtccattaaggccagaactagtcacatgatcattcgtaacccaactataagaaaaactgagaaatgtgaaccaggcgcggtggctcacacctgtaatcccagcactttgggaggccgaggaaggcggatcacgaggtcaggagattgagaccatcctggctaacacggtgaaaccccatctctactaaaaacacaaaaaattagcctggcgtggtggtaggcacctgtagtcccagctactcgggaggctgaggcaggagaatggcgtgaacccgggaggcagagcttgcagtgagccgagatcaaggcactgcgctccagcctgggcaacagagcaagactccatctcaaagaaaaaagaaagaaaaactgagaaatttggaggatcacatgtgatgtttggtgagcacagtgtctctgccac

SEQ ID NO: 857463 - DNA, 628 bp, Homo sapiens
ttatttttcatgatgtgtgcaatgtggatccaagagggctctgctccacgttgttgctcagggacccagcctgagagaagcccccgtagttttatcacatgaaacacatggcctccaaggtacccacacaaggaaaaacaaaagtgacaggtgagtcacacaggcacttcaccagctcagcttggagttgacactccacacacagtccattaaggccagaactagtcacatgatcattcgtaacccaactataagaaaaactgagaaatgtgaaccaggcgcggtggctcacacctgtaatcccagcactttgggaggccgaggaaggcggatcacgaggtcaggagattgagaccatcctggctaacacggtgaaaccccatctctactaaaaacacaaaaaattagcctggcgtggtggtaggcacctgtagtcccagctactcgggaggctgaggcaggagaatggcgtgaacccgggaggcagagcttgcagtgagccgagatcaaggcactgcrctccagcctgggcaacagagcaagactccatctcaaagaaaaaagaaagaaaaactgagaaatttggaggatcacatgtgatgtttggtgagcacagtgtctctgccac

SEQ ID NO: 857464 - DNA, 585 bp, Homo sapiens
gaaactgttgtgagaattacatgaagtaacacatatgagaacacttatgggatgggggtggggtggactattaaatacaatataaacaggaaaatcttgatgattgcatgataatgaagagcttgtttgtttgtttttgccctatttcctagaatctcaaggctgaagtggacattaaagcattgtataggtgaaggtgagggaatgagggctcagagaagctgaatgaatgggtttcccatgagatcgctgaagaatcaggcctgggatcaggccctccaccccttttcagtgctattctcactttagaggctgcctcttgagctagtcctgtctctcagacactccccgaatatgattcgattttcactctattttacacaaagcgtgctctaaagtgctggattctcctgcacagggggtctggcacatggacaagcacacccggcagccggcagtgcacaggaagctgcctccgcacaggcaaggctttatgcagggcatcctgaaaagaagcacttatttcagacactgatcttgcatctcgccrtcttttaagcttgtgtttccttttaattaactaat

SEQ ID NO: 857465 - DNA, 615 bp, Homo sapiens
tttatcaaatgcatacatagttaaagtataaaatacaatagaagttacttttactggccaggcacagtggctcgcgcctgtaatcccagcactttgggaggctgagacgggcggatcacgaggtcaggagattgagaccatcctggctaacatggtgaaaccacctctgtactaaaaatacaaaaaaagtagccgggcctggtggtgggcgcctgtagtcccagctactcaggaggctgaggcaggagaacggcgtgaacccggaaggcagagcttgccgtgagccgagatcgtgctactgcactccagcctgggcgactgagcgagactccatctcaaaaaaaaaaagaagttacttttactggcctcctaagtgatttgcctgattaagcaactctgtccgttctctcattatatcctatcgactgatgttcacagccacctcagtaccggatgccctctagcccgcctgtaaactcctgatccctcctgtggagatgtrtgtggaccaagcgtcagtggtgtttgtacccagatgtgctgtgccagttttgctagttcatataattattcaatgataattatgtaaaccaatgatatatgggtgtgtagaag

SEQ ID NO: 857466 - DNA, 571 bp, Homo sapiens
agtgtctgaggggttttgtctgtggcttgtcctgctacaatgggagtgacatggaacagcytaggtgagtgctgtgcatcactgctaagggaccttgagcttgggaaaccctgtctgtaagaaaactcactcaacttttgccccaggagaaggtattttatacaaaaataatagaaaagatggtcttaaacaaaagctgttcagtgctgctgctcaccaaatgcacaaacctaagacccatggaaatctttctaccagcctatttcttcctccttccccactttctttaactaaaagagaaatttatgaattaatttcagtggagaagtagatggttttttaaccatcaaatacattataattttactagaaaaagtataagcattatacatatggatataaagaaaaaataattatgtgcaaatgcaagaatattggcagtatgttgtgtttgacagtaactctttgataaagtcaactaacagcacaattttttaaaaataggtgtagttttaaaatgcagttgtttggatcttttttttttttttttttttagttattaaatgtttta

SEQ ID NO: 857467 - DNA, 626 bp, Homo sapiens
caacacggcaattctgtccagctagagcggtaaaactgttcatgccctttgaccaaaggatttcattccagggaatttctgcttgaagatggattcaactgtagcaaaagttgtatacacaaagatgctcattaactacagctagcactgaaaaagaaaaaggaagaggagaagtgaggagggaaagggacggaagagggagaaggggaagcagaaacggacagcaggaaggaggaaaggaaggaagatgggagggaaggaaaaatgtcaaacaaaatgaacacatgtaggccagctgcagtggctcatgcctgcaatcccagcactttgggaggccacggcgggaggattgcttgaacccaggaatttgaggctgcagtgagctatgattgtgacactgcactccagcctgggtgatgaaatgagatcctgtctttaaaaataaataaataacacatgtaaaacacccaacagagtgctgagcatttggtgagtgctctacagacagtactatygccattaattcttcctctctactagcagtaagaccagagcaattgagcatctgtcctactggggggcttcagaaggagggtgagtgtcaggggtcttaatgaggagggtct

SEQ ID NO: 857468 - DNA, 605 bp, Homo sapiens
aggacagattcctcaaagcaggattgatggtgtgggcaaagatctrtggatatcgagttgtcctggatgtcaccaaatcgtttcccacaattggagcaatccacgctcaccaacaatgtgtaatatgtccatttctccacctcctcgccagcactgtatgttttcaatttttttttaatgctgccaaactgaaaagaaaataaaactaccatcagaatatacacaaatgtagctgggcatggtggtgtgcacctgtaatcccagctacttggaggctgaagtaggagaatcgcttgaaaccgggaggccgaggttgcagtgggctgagattgcaccactgcactccagtctaggtgacagagcaagactctgtcttaaaaaataataataatatacacaaatgacaaaaaaaggaaaaaaaaaacaggaaaagataaaaagaggctccattttgcaggtgatccctgaaacctctcttttctatgggctagtatctctagaagccccacaaggtcaatcagctcactgccttctcccacaactgtgatggaattgctagcaagaaaggctctcaggagacccctgcacctttcttccctctccat

SEQ ID NO: 857469 - DNA, 542 bp, Homo sapiens
cctggccaacgtggtgaaaccccgtctctactaaaaaattaataaataaaattagcctgggcatggtgggacacacctgtaatcccagctacttgggargctgaggcaggagaatcacttgaacctgggaggaggaggttgctgtgagccaagatcatgacactgcactccagcctgggcaacaaagcaagactccatttcagaaacaaaagaaacctatgcaaatatgtgaaaaaggagggtttcatgcagggaaacagcatgtgcaaaggtcctgaggcaggaacgtgactaaaatagatcatccctgcccttatggagcccacagtctactgggggcagggtagagtaaatacacaaataaattataacacactaagataaacacaatgaaggaaataggtaggtgtggtgagtaacagagaaatcacctttaaatagatggtcaggggccaggcatggtggttcatccctataatcccagcactttgggaggccaaggctggaggatcgcgtgagcccaggagtttgagaccagcttg

SEQ ID NO: 857470 - DNA, 634 bp, Homo sapiens
gttgtagtgagccaatatcactcagttgcactctagcctgggggacaagagcgagactttgtctcaaaaaaaacaaaacaaaacaaaacaaaacaaaacaaaaacctcctctttcaggacaacgtttcttcaactgtggctacaaaccctgaccacccagggatgctgggggacctctgtcgtggacatcagaatcaccacagctgggccccaggaagcagcctttgaaaggaggcctccagatgctccccgtggacagcaggttttgagaagcacagattaaaacctagctcaccatcaacactggtgcagtttcccaggccctccccagagccacctaacgtcactgaggcaggatgtcactgtgatctacctgcacaactgccactcttcatggccctccttcaactttccatgtgtttctccttcatagctaagagggcacaaggggagtgaccctcccttgctaagatctctagagcttgtcacatcccacacctgagtacacaacacttctcttctcatcctgtttttgtctttttctctcacatactcccagacccttaattatgccctggccttgccagcctcytcaccaatgatgggggcactacagactaggaagcttggtgac

SEQ ID NO: 857471 - DNA, 596 bp, Homo sapiens
tttgattgtattatattaaaaaaaagttctccaacttagtccttttccaaaattgtgttggataatttaggccctttgcattttcatataaaygttagggtgagcttgtcaatttatctaaagcaaatctgctggcattttgactgggattgcattgaatctaaacactacgttgtggagaattgacatcttgataatatccagtctttcaatccatgaacaagatgtgtctatgtatttagccctttaattcctctcagttctgtaatttccagttcatgggtcttgtctttcttttattgaatttttccctgggtgtcacattttttccatgctgttattaaacggtatcgtgttaaaatgttcaatttctggtagtcacttgtatacagaaatacaataggtgtttgtatattgaccttactaaactcatttattagttccagtagtatttttgttgattccttaggattttctacatagacaattatgtcatctgcaaataaagagagtttcgtgtcttcctttccaatgtgtatgccttttacttattttgctcaccttatctcactgactaggagcaatgttgaatacaa

SEQ ID NO: 857472 - DNA, 630 bp, Homo sapiens
gtgtttgtatattgaccttactaaactcatttattagttccagtagtatttttgttgattccttaggattttctacatagacaattatgtcatctgcaaataaagagagtttcgtgtcttcctttccaatgtgtatgccttttacttattttgctcaccttatctcactgactaggagcaatgttgaatacaaactgtgagagtggatgtcctagcctcattcctgatcggaaggggaaagcagcctttaccataagcatgatggcacctctgggataacagggtgcccatctagggcatggatggccttgatcgggctggaaaaggtgccttgaattcttggtttgctgaatattaatgatcaggaatggctgttgaattttgtcacacgatctttctttgtttatttggatgacatatggcttttctgttttggcttgttcataatttggtttgttaaccttgattttaaatgtaaaactaactttgtattcatgggataaagtccacttggtcatgatgtattgcactctctctctctctctctctctmtatatatatatatatatgcacacacacacctatatataaaatataaaactacacacacatatgtaaatatatatacat

SEQ ID NO: 857473 - DNA, 507 bp, Homo sapiens
attagataccatgaacaaagcaataayaagaatcaagatgcaagatttaaatggtaatttaaaaattatcaacaaaaaatgttcgggaccagatggattcacagcagaattctaccagccattcaaagaagaattggtaccaatcttattaacactattccacaagatagagaaagagagaaccctccttaaataattctatgaagccagtatcatcctaataccaaaaccaggaaaggacataaccaaaaaagaaaactacagaccaatatccctaatgaacatagatgctaaaatccttaacaaaatactagctaactgaatccaacaacatgttaaaaggataaatcaccatgatcaagtgggtttcataccagggatgcagggatggtttaacatacacaagtcaataaatgtgataccccacataaacagaatttaaaacaaaaatcacatgatcctctcaatagatgcagaaaaagcactcaatgaaatccagcatgactt

SEQ ID NO: 857474 - DNA, 551 bp, Homo sapiens
gaaagatacaaccctcctagcttaaattaggaagaattagataccatgaacaaagcaataacaagaatcaagatgcaagatttaaatggtaatttaaaaattatcaacaaaaaatgttcgggaccagatggattcacagcagaattctaccagccattcaaagaagaattggtaccaatcttattaacactattccacaagatagagaaagagagaaccctccttaaataattctatgaagccagtatcatcctaataccaaaaccaggaaaggacataaccaaaaaagaaaactacagaccaatatccctaatgaacatagatgctaaaatccttaacaaaatactagctaactgaatccaacaacatgttaaaaggataaatcaccatgatcaagtgggtttcataccagggatgcagggatggtttaacatacacaagtcaataaatgtgataccccacataaacagaatttaaaacaaaaatcacatgatcctctcaatagatgcagaaaaagcactcratgaaatccagcatgactttatgattac

SEQ ID NO: 857475 - DNA, 585 bp, Homo sapiens
tcaagagtttttaagagactcttctttgttttgaaagagatatccaaaccgagtatccatacttctattaatagttgtgtttgggcccgctgagaagagggtggatggatattggatagtgagagcaaaarcactgccatgaagcacagctaccacatagagcccagccaagagcagctgccagctttgtttccaagataacagatttattgtatccccaaaccttttggtttagaggtctcacaggaataaaatattactcatttaaatatcctgagaacacagattgctctggtctcagtgtgatggagtaagatgcacatggattttttttccatctaccttgtgatgttgcagcagtgacttacaccccctgagcctcagtcttctcatgcggcaggtgacttccatgacttccaccccgagcctgttttctcatgcataatatgagatcctattattaacttcttagggagggtgtgaagattagatgagattttttaaagtatatataaagttgctgattaagtacctggcttatcatagctttcctagattcttcctttcatactggctttatttgga

SEQ ID NO: 857476 - DNA, 588 bp, Homo sapiens
gacaggaatctgacgagggggtacaacagatcttcgagacaggcctgcttagattgcaaggttctaattcggtcggttgcctgccttttgaaaacctgcccagggaaagcctgagtatccaggaaggtgaacctgacctcccttcagaggagctgacgaaagcccagtgtgtgtggagtagccgtgattcagttctagggtgcatctttcattcttgaagttcaaatggcattgccagtgcttgtggcacccttctgtgcagtagttgcatgtaggcactggctctcctaagatacacaaaagccataacaatctacacatgtccagtgcaccagctcacctcccccaaacccccaacggtggaaaacatatacagggagccactggttttaagcagcaaaatgtgtcctaggaaattggttcttaaagcagatcaccatgaggaaacattctgactgccrgtgagtctgttcctggggttgctgttatctgcttggacatcatctgtaaaaacagcaggaagaaaaatgtggctgtccattacatagcccatgacaataataactgacatctatccatcgcttccta

SEQ ID NO: 857477 - DNA, 635 bp, Homo sapiens
gccgcacctttgagaaccttggaaatgtgtaggtgaagtgactccctaccccaggagagactgggatccttgctggaaggcagatgcagactytgtaatttgagcctccatgtacaaccaacctcactgatgcccacgtgactcactgatgcccacgtgacaggaggatgaccacaaactggccccgctctgataaaggaggagccgtagagatgaactttccagtgtttgaataaacctgagtgagtggatgatgatagtaacggagtcaggccaggagcactggcttcccaggactcagcgttactgagggggagtgtcttagttcgtgttgtgctgctctaacagaatacctgagactgggtaatttataaagaacagagatttatttctcccagttctggaggggagtcccaaaagttcaaggcccacatttggtgagacctgcatcatctaatggcagaagcgggagagagaatggggatgcagagggaggagcagaggagggagaaggagggaacatccaaactcaaccttttgtcaggagcccactcccaaaatggcattaatctattcacgaggacagaaccctcatgacctaaccacctcttaaaggtcccagctgcctatgctgc

SEQ ID NO: 857478 - DNA, 635 bp, Homo sapiens
gccgcacctttgagaaccttggaaatgtgtaggtgaagtgactccctaccccaggagagactgggatccttgctggaaggcagatgcagactttgtaatttgagcctccatgtacawccaacctcactgatgcccacgtgactcactgatgcccacgtgacaggaggatgaccacaaactggccccgctctgataaaggaggagccgtagagatgaactttccagtgtttgaataaacctgagtgagtggatgatgatagtaacggagtcaggccaggagcactggcttcccaggactcagcgttactgagggggagtgtcttagttcgtgttgtgctgctctaacagaatacctgagactgggtaatttataaagaacagagatttatttctcccagttctggaggggagtcccaaaagttcaaggcccacatttggtgagacctgcatcatctaatggcagaagcgggagagagaatggggatgcagagggaggagcagaggagggagaaggagggaacatccaaactcaaccttttgtcaggagcccactcccaaaatggcattaatctattcacgaggacagaaccctcatgacctaaccacctcttaaaggtcccagctgcctatgctgc

SEQ ID NO: 857479 - DNA, 635 bp, Homo sapiens
gccgcacctttgagaaccttggaaatgtgtaggtgaagtgactccctaccccaggagagactgggatccttgctggaaggcagatgcagactttgtaatttgagcctccatgtacaaccaacctcactgatgcccacgtgactcactgatgcccacgtgacaggaggatgaccacaaactggccccgctctgataaaggaggagccgtagagatgaactttccagtgtttgaataaacctgagtgagtggatgatgatagtaacggagtcaggccaggagcactggcttcccaggactcagcgttactgagggggagtgtcttagttcgtgttgtgctgctctaacagaatacctgagactgggtaatttataaagaacagagatttatttctcccagttctggaggggagtcccaaaagttcaaggcccacatttggtgagacctgcatcatctaatggcagaagcgggagagagaatggggatgcagagggaggagcagaggagggagaaggagggaacatccaaactcaaccttttgtcaggagcccmctcccaaaatggcattaatctattcacgaggacagaaccctcatgacctaaccacctcttaaaggtcccagctgcctatgctgc

SEQ ID NO: 857480 - DNA, 642 bp, Homo sapiens
cagaaaagtgcttctgaggtttgactttcccctcccctgaatatttttttaattgaaagaaagaacgtgttataacctcaggcataccttagttataacccaacttgagacggtgttacaattgcctgtgtgggtaatctgtttggaataggatatcctgaaagggctcaaatcattttgttttttttctagttgctgaaataagtctgataaaattttattttttttgcattagttggtttcaaaagcctctttaagtaaaagtgactcagcagctaagttaaaatattgcagtcttttttttttaaagtaaacacaatatgtcctcaaggaaaacagtatttttcagcaagaaatggagacattaatgttgtttactttttacgtatttgtcttaattttcaaagtaagatcacagtgacagagccattaacataaaggttaggaagagccaagaaaaacaattgaactgatgcttgaaccagtcaacccaggtgaatgggtcatttctgcgagagattgagagtcatgaagtatttctctgaaaaaawttcagttctctgttttcattccaatttgctttctgacttataataaccatagtcactggtgttttaaagatcttgacagttgaacatggat

SEQ ID NO: 857481 - DNA, 571 bp, Homo sapiens
caatcaaagtgataaacaagtctttcactctcaaaagatttgtgtaagacctttaaagagggaaagtctggcctgcawtgcactggaaagaatggagcaaagtagagcctggaaatggagaaaccagttcagaggctattgccatgctgcaggtgagcaggaaagaatgaatgaggtcaggtgataggtttaatggccatttgagattggctgctggaggacagggttaggtcttcatcattacattatctccagtacctaacccagtgaccagagggtagtgggctctgacatgctagaattgacaggctttccctttatgaaagatttttatttcaaattgcttttccttttattatttttagggcttaaaagacaaccttcttgcttctgggacatccagcctgacagccaccaaacagttgcatcgtccaagaatcacgagaatctgcctcagggacttgatattttgtatggaacaggaacgggagatgaagtattctcgagctctatacctggcccttctgaagtgaccactccactcttccatccagatccttgctatttactg

SEQ ID NO: 857482 - DNA, 530 bp, Homo sapiens
taaaaatattctcacaggccaggagtggtggctcatacctgtaattccagcactttgggaggctgaggcaggcagatcacttgatctcaaagagttcgaaaccagcctgggcaatatggtgaaaccccatctttacaaaaaatacgaacattagcccagcatggtggcacatgcctgtagtcccagctactcggaggctgcagtgggaggattgcttgagcctgggaggtggaggttgcagtgagccaagatcgtgccactgcactacagcctgcgctacagaggaaacaaagaaaaattcttatggccacttagctagaaaagatctcatccaaatacaataaagaatatgaaactttctggcaatgtattacatagaacagtaacactctttgtaataaagtgctcatttgagacaaattaagtcattctcttagcccccttttcctacttgactgaaataaaatacttgctcagttracaaaaaccatcaaataattcacattttagttgtaatttagtttatacta

SEQ ID NO: 857483 - DNA, 398 bp, Homo sapiens
ttcaagtgattctcatgcctaagcctcttgagtagctgggattacaggygcccaccaccatgcctggctaattttttaatttttagtagagatggggttttgccatgttggccaggctggtctcaaactcttggcctcaaatgatccacccgcctcggcctcccaaagtgctgggattacaggtgtgagccactgtgcccggcccattttccaggataattgtaatttaaaatattttagctcattgtcaaaccacgcagaatgatttttggctcaaaaaatatgatcttgtagttagtcccacttctgagctgtgagaaaccgcaggaagataaagtggtgctttggagaaggacgtattcaccgcccttccttcttccctcccagctctcctttct

SEQ ID NO: 857484 - DNA, 575 bp, Homo sapiens
accaggtaagacgccaattaacacagccagggagagaggaatagttggttaaacaggaagcaataggtgctaacaggacagaatccactggggaatcaacacaataaaagcaaatggaaaagcaaaaggataaaataagcataaatcatttgggtcaggtgaaagggaacaagggcaagttgaaaaagttatgtaaggactaatccttagaataagaaaagcaaaggaaacacgtgagtagaccatcctaggtaaatactgtgctataacacgtttacattctccagttcacataaaagatcagcatccaggcctcaaaggacccactcaacatcaaagtgaaacaagaaggctttcagtctttactgaaattctcacgtcattttggagcagaaaccaaaatggatgaaatggcatatggcaaagcagcatgtgctttgctagggtaagatgtgtttggccaattcatctctttgaaaaactactttgctatcagagyagagtggaaaagatttacttcatttccacaacatactatgacttcagcaactcctttttacccagcctctttaaaa

SEQ ID NO: 857485 - DNA, 624 bp, Homo sapiens
taaatgttaaaaaatatatataaaatatttctcatagactcagctatccaartagccaaatttgtctctattaccacacaggacaaaacagagaagaaagtgaacagttttgcaagactgcaatggactcaggttttataaagcaataaacccttcatgcttttgacggagagaagacagataaagaggaaaacagaaaacaaaacctgagattctgtatgaaatgaagggagaaacattctactttgtaatgtagaagaggaaaacttgaaagagtctaagaataaaactgacaagtttagcaaatggaatgaaaaaataatttgaaactctaaaaatcatttaagaagctatacgcttcttagggtacagaacagggtctactctatcctaggtacagtaggtttacatggggaggggactacaaaattaaaatggcaaagcaacataagacagaaagcattctgataaactagaatcctacgtgcaaaaaagcaaacagacaatacctaggaatatccttatcaagaaagagcctgcaaaaacatagaaaaggctttagttagtgcagcaaaaaaacaaagaaataagggagagaatcagaaaaaatatatatataaagaa

SEQ ID NO: 857486 - DNA, 617 bp, Homo sapiens
  misc_feature 1, 2, 3, 4, 5, 6, 7, 8, 9, 10, 11, 12, 13, 14: n = A,T,C or G
nnnnnnnnnnnnnnaagagaaaatgactgaatcaagcatgcttgcttccacttccataactcatgtgacttcaccagggagggcagaatgagggagggggagggaatgcccaggagtaccactctagtggagatgccttgcctcaatggaacttgaggcctcaggaaaggaagccctggcttaataaccatgaccatgaataataacaacactaggcagagttttcatgtttagagtttgccccattctagctcaggcaagaatcaggggacttggctaaacagggctgagtgaggttgcctttaatttgaacatggcactctcctcttttgtctagaatctcttttcacaattttcatttagttgagtaatacccttaggtatatttgtctcactgacattcattgcatgtaaaatctgtaagaacgatcagaagctgtctttccatctcaaagccagaattctacttagagggaaaatctgggagttcagatacggaaaattctgtcttctcaacaccaagactttccatcaaaaactagtttagtcttttgaatgttttgtccacatgatggtaaatakctgaatatttaacagatatctgaagttaccatcct

SEQ ID NO: 857487 - DNA, 582 bp, Homo sapiens
ccctgagatcagtttatttagattgaaaaactgagatatctgttatgtgttgaagttttattctccaactcatttaggaaatgaagctattttatatctagagtccagcattacctatatgaaagaaaatagttcattagcttcatagtatccttaactcatagcattttttgaagtcccttaaaagagcctatagtctcctatgggttctaatgcagaagagggaataccccgttatgtcagaagtaagcagtttggcagggtaagattgggaagacagtctgagaaacagaactgtaacaagatagctctcttcccacactgctgctgtactatgcccgacaaacatgagaggcaccttagtaaaacatggggctggtttgtcttgacagtcatttgcacagcttttgcataacttttaggaggtgttttcttcctaatatcaaatggagagcgccgcagtgcaagtactagagcccattaaaaagcaatactattcgtyacagcattctctgccatttatgtaggaagagaagcagccagcatcctacctgcagtgtagacctttgtccattgtcaaca

SEQ ID NO: 857488 - DNA, 547 bp, Homo sapiens
gcgcttggcatttgctaaaagtcaagtgactggtggggtggagaggccagggccacagtagttagtatgctgtgacaaagagtggtggagtggtcatctcaagtcttcactgccatagctcacccgctccccaaaccctactgctgcaggaggtcacacgccacctgcggatggagcaaacacatgcagacaagacaggccccccgccactgctggcacacgggacacccacccagcctatggtcctgtctctggctggacaacgtaatcagaataacaggtaatccttactgagcactaactatgtggcagacacatgtccaacaattaatatatagtaaagtgtttaattcttacagcaatattgtgaagtaggtactgctatttagtttatatttcttacctttttccttttatttttaattcttttctgaagtgttaatttctaagttttcctaacttagatttatgttattacttcatatsttctatttactcccttcaggtcttgagcttgttctgaaactgtaggctacagcttttatct

SEQ ID NO: 857489 - DNA, 547 bp, Homo sapiens
gcgcttggcatttgctaaaagtcaagtgactggtggggtggagaggccagggccacagtagttagtatgctgtgacaaagagtggtggagtggtcatctcaagtcttcactgccatagctcacccgctccccaaaccctactgctgcaggaggtcacacgccacctgcggatggagcaaacacatgcagacaagacaggccccccgccactgctggcacacgggacacccacccagcctatggtcctgtctctggctggacaacgtaatcagaataacaggtaatccttactgagcactaactatgtggcagacacatgtccaacaattaatatatagtaaagtgtttaattcttacagcaatattgtgaagtaggtactgctatttagtttatatttcttacctttttccttttatttttaattcttttctgaagtgttaatttctaagttttcctaacttagatttatgttattacttcatatgtyctatttactcccttcaggtcttgagcttgttctgaaactgtaggctacagcttttatct

SEQ ID NO: 857490 - DNA, 540 bp, Homo sapiens
catgtcccatggtttctgaggatgaaaggtcttcatcctttcttctcaaagcctattttcttttyttttcttttctttttttttttgagacggagtcttgctctgtcgcccaggctggagtgcagtggcacaatctcggctccctgcaagctccccctcccaggttcacgtcagtctgcctcagcctcccgagtagctgggactacaggcgcccgccactatgcccggctaattttttgtaattttagtagagacggggtttcaccgtgttagccaggatggtctcgatctcctgaccttgtgatccgcccgccttggcttcccaaagtgctgggattacaggcatgagccaccacacccaaccttcgcctattttctgtctttcatctttcttctttaccttgcttatgagctcattgcaagttacgggctttcctcccggtcatcttccttcccttcctcctccttagaggaccccgcttcccatctctcaggcttctccatcccccacccctgccaactggtgtttagaagcaggca

SEQ ID NO: 857491 - DNA, 516 bp, Homo sapiens
cttttatggtagatctccttttagttctttaagacacctccatactgttgtctgtagaggttgtactaatttacattcycaccagcagtgtataaatgagacagggtctcactctgtcacccaggttggagtgcaatggcatgatcatggctcactgtggccttgacgtcccaggcttaagtaatccttccacctcagcttccctggtagctgggactacaggcacatgccaccatgcctgattaattttgttttcgtttttgtttttttgtagagacaggggtctcactgtgttgcctaggctggtcttgaactcttacactcaagcaatcctccctcctaagcctcccaaagttctccagttataggcgtgggccactgtgcctggccttataagtgtcatttttaaaacattggtttttaaccatatagaaataaatctaaaaagagcctgcaaaacaaaacatcctttaaacatgtttaagtagatagaatatctgaaattctggatttttc

SEQ ID NO: 857492 - DNA, 516 bp, Homo sapiens
cttttatggtagatctccttttagttctttaagacacctccatactgttgtctgtagaggttgtactaatttacattctcaccagcagtgtataartgagacagggtctcactctgtcacccaggttggagtgcaatggcatgatcatggctcactgtggccttgacgtcccaggcttaagtaatccttccacctcagcttccctggtagctgggactacaggcacatgccaccatgcctgattaattttgttttcgtttttgtttttttgtagagacaggggtctcactgtgttgcctaggctggtcttgaactcttacactcaagcaatcctccctcctaagcctcccaaagttctccagttataggcgtgggccactgtgcctggccttataagtgtcatttttaaaacattggtttttaaccatatagaaataaatctaaaaagagcctgcaaaacaaaacatcctttaaacatgtttaagtagatagaatatctgaaattctggatttttc

SEQ ID NO: 857493 - DNA, 684 bp, Homo sapiens
ctctgagtcaaatgcatgtatttatttagtatatattatgttctcattactgtgctaggtactggaaagaatatagaagtataggatatggtttctgtmcttcattaacttagaatctggtttattaaatgaattttataataaataattagaaacgcagttattctatctattgggaaatagctgtttcacttaacatttctgtgacgcagttctaccacatctgaattaaatcttcaacatgaatacagcacaatgtatctctatcttgcaatatactgttacatatttttctcaaaataatggccaatgtatatttatcttgtttccaaaatagattataacttggtatatatcttacaaattctcatatatcccagtctcttttacacattatgtacatttaatcctcagtatatacttttggattgatttgtatgtaaagtatccaccttatcatttcctttgttgctttgctctttggttatggtagcttatatagatcttgaggattctttttatggcaattcagttgggatataatttaaaaagagtcagatttacttagcaaatattttaatgccatgttctaggttaggtactgaagatcatgcaaagttgaagaagagaaggctgttgccacctgtcagtgacttcttttgagttctcatcctatttatattc

SEQ ID NO: 857494 - DNA, 544 bp, Homo sapiens
gtcagatttcctctttaccacccaggcctggatcccttcctctgcactaaagcaagggtccctggggcaaagatatccagccaggccaacaaactgtgagttgtactgtgcactaacagccctgagtcaacaatacctctagactttgttcatatcaagggctgggagggggagaaaggatgaaatgcaagcccagactcactcaagacccaaactaccaaccaattttcaaaggaaaaacaaaggcttagacaacactttatattggaagcaatctaagtatccaatactagcagaatgattaaataaacaataataaatccattcaattgttcctcagctatcaaaatttttcaaatataataacattaaaatacctattaaataataatcaagagaaaaagacataaaaccattaaaaatatattaatactgtctaaaagacaaaaatagaataaaaaacagtaaaggcaaaccaaaaatgttggtaaaaggctgttttggtaaataatgataaaytaaaagtgattttaaaattttaact

SEQ ID NO: 857495 - DNA, 673 bp, Homo sapiens
ttcatgcctgtaatcccagcactctgggagaccgaatcgggcagatcacttgaggtcaggagttcgagaccagcctgggcaatgtggcaatgtggtgaaaccttgtctctactaaaaatacaaaaattatctgggcgtggtggcaggcacctgtaatcccagctaatagggaggttgaggcaggagaatcacttgaacccgggagatggaggttgcagtgagcaaaaatcgtgcagcctgggtgacagagtgagactctgtctcaaaaaaaaaaaaagaacgaaaatttgcctgaatcagtaacagaactagaggtaaaaaattatatattttagagattacaaatgtatatgtgttatgaaacacattacactttatgaaattcaaagaataaagaaattgctcaaaactaaagaatcaaagatggttttagggaaaagatatcatttgtgcagactgaattttttagtatagaggtaacagtaaggatgcaaaggctagcaaaggatacaaggtaaaagcctgaggaacatcaccatagcttgagttgagtgaagagaattctakacaggtagagcaaggctagacaatggaaggacttggtccaagaatttagactgtcctgaaggcaataggaaatcacagaggatttctgaacagaatgacataatca

SEQ ID NO: 857496 - DNA, 618 bp, Homo sapiens
ctgtgatgacatggtcaagggtttgaccrtggaagcaggtaactgaagtagggcagagaaaacatttaccaaagtgaggaagttcaggaactgagaggtaacaatgttggttagattattcatttggatgttgaaattgccaggaatggtgacaggagtagcagtagaaggaatacagtgatctaggtgtgaaaatcatcagtgaatggggcaggattaattagggtcagttgatgatagccaggcagggtattaagtgagtttcctccaccttcttgccaaaccactatgcaatctcagaaagaacactatttagcagctacctggtacaacagctattagaattacatgagatcatgtgcaatttaaaatgcctaaaaaaaggtctggcacatttaatggtgatgctgttgttatagtcatattaatgaatcaacttgcactaacaaaatgtctaatatatgccaatcatgggaatagatgctattcattttaatatatcctttatttctttgacctagagtcatagattattaaatctagacaggatgtcaaaagtcatctcatccaaaggtcccctaacaagagtcaaaggttagttaaatgcataaaattacc

SEQ ID NO: 857497 - DNA, 641 bp, Homo sapiens
catgtcatttgaaaaagtcctccctgatgattcttagacactagtcactctggatttacatgcactactttaaatgtaaacaatgatgatatgctacagcatattgtttctttgatttcaaaattaaggcacgtggcaccttaatttaattctaagtattccatgtagctcactactcctctttgcctttcaccgctctggaaaacatcctcagtcttttccggtttagtacattgtccaaagagcctactgtggaatctcatgtcattttacttttttcagttggcctatttttcataccatttctcatttcctccatatttctattattccctatgaaaacatacctagtcttgtccttctctttgcttttcaagatttagcaatctgaaaaaagttaattaccccaattatagggtgtcacagagtactaatgactcaataaactcacctcgcacacccactaaataacttttcatggtgaaatttgaatattcagcttcacataaaagtcaatgagccaaatgcatgctgtaatagtttatggaactcactgggatagggagctactgaccartgatttataggttcatgcatgttcctggagttcaaagtaaaaattatcctctaaactcacacca

SEQ ID NO: 857498 - DNA, 591 bp, Homo sapiens
atcttagctgacttaagtcaattttttttcttcataatagacacggaatctgattagctgccagtcaggcaatggcttgtctgttcttagaacagatatgcaaccttagtccacataattattttgggaggaggaggcaaagaaccatgtgatattttagggtctcaaatatgaagggtctttaaaattttcatgaaaaatatgtattatgaaaaaattgcgcatggatctcaaatttttttgtaccaaaataaactcatactaacttgttataacatatctgaacagaatctagtttgaggcactaagaagggtaagacatcagtttgaaaggagcccctatcagaacaacatgatgtctgctaaaattgaaacaagaataaatggcaaatttaaggtgaagcttgggtgaaaggatggtgaaatcactgatgctttacaaaaagttctaggagacaatgccccaaagaaatcagcattatgcaaatrataactagttttaagaagggacaagacaatgttgaagatgaagcttgaagtgcatgccattcacatcaattttcaaggaaaaaattaatcttgttcatgccc

SEQ ID NO: 857499 - DNA, 603 bp, Homo sapiens
ctcatagagtaagttgggaaatgttctctcctcttctaatttttggaagagtttgtgaagaatttggtattaaatcttctctaagtgtttggtagaatttatactttttattgctgrgctgtactccattatatgaatataccacaatttattcatccattcacctgttgatagatatttgggttgtttccagttttagaataaagctgctatgaacattagtgtacaaatctttgtatggatgtatgttttcattttcttgggtaaatatttacagtataattgctgggtcatttggtagatgcatggtaactttatgagaaagttccagaccaattttcaaagtggttgtgtcactcctaccagcaacgtatgagacttttgcttacattctacaatcttaccacttaagctgttgccaccgtttgattttagccattctaatgggcatgtagtgatatctcaatgtcattttcatttacattttgctgaataataatattaaaacacattttcatgtgcttattggccattggtatatcttcctttattcagtgccggttcttattttttgcccattttttaaaaattagattttaattg

SEQ ID NO: 857500 - DNA, 466 bp, Homo sapiens
tgtcctgtggctgggggtcctgcctcccttctgagactggttctctggtagcctcagctctgtgcctctcttcctccctcgagctagccccccagcccctatttgccctgtgtctgcagatggctggctgggagggcttcgacctggataggagtcccccactgatcccagccacctgtgaggaggagaacaaggcgggagggaggatttctctaaggctctccccctccctaagacctgggagccagagcttggacagagacactattaacacaaactctgcaaacatggcttctaaaaatagctctggctggcaaggcccacctggcacagactgcacctttgcggctgctggcctgctccccttggagcatgggccatcagtctgtcagcagacatgtcactctgccctcttcccccaggggacggggcagccacagcsttaggtgggatccaggggagagac

SEQ ID NO: 857501 - DNA, 612 bp, Homo sapiens
gaactctctaggttaactgacaggatcctccagcgctgagagaaccccaatcagctgttgacctcctrgaactgtgcaaacactatatgatttaatatatataagcaaagtagtgatgtacacatataaacgaaaatggagattcattaacctcaatgtcttgataaaaataatagggtatctgaacttcagcaatgggaaaggtagagtgttggggaggaacttaactaaagatagattaagacagcagagaccatagttggtgactcattaggatactgaggcgatggagggcaatgacgctatttctgacttcaggacaaagtaccaactcctaacagtggcagtgtcggctcttcctgaccttgcctgcctgcctcaactccctcatatttgatattccagctatactaaattctcccttccaatacagtgctcctccaagcacccaggcatttgtacagtgattttttttttttttgcatgaaatacccttctctagctgaaaaacttctacttaccttttaagaccctaacatgtccacacaataacagttttctatactcctcgccccagcagtttaatcccagtcatttatgcagacaaagtgt

SEQ ID NO: 857502 - DNA, 620 bp, Homo sapiens
aaatgtatgtattttttagtgcaaagacaatttatcctaccttcaatcattttatgtttttcagaaagtagctatttattacacartatgggtcaaatatactagagtttcaatcatttgagtggttttatccataagaactatttacaagaaatttcacatctgtaagtgtgactctttgaataaatcagataatataatgtaatatatatataatataaataaatctattttcttcaacatgttctaggaaatatttatttcataaaataataaagtagtgattttctttatgaaaaatgatattaatatccacaacacataaaatccacaaacaattatgccattaggcccatacacaccaaatatatttttctaaaatttcacaagagtaatttagataaaaatagaatttcacgcattgaactcccctatttagctaaaattttgaatctttgttctaatattggttttatttgcaattcaaagaatggatgtaaaatcaaaagtatatatacattacacacacataatatatatatatgtatatagctataacaaaggatttaatatatgatatgtctgggcaaacaattatcattcccattttacagatagag

SEQ ID NO: 857503 - DNA, 620 bp, Homo sapiens
aaatgtatgtattttttagtgcaaagacaatttatcctaccttcaatcattttatgtttttcagaaagtagctatttattacacagtatgggtcaaatataytagagtttcaatcatttgagtggttttatccataagaactatttacaagaaatttcacatctgtaagtgtgactctttgaataaatcagataatataatgtaatatatatataatataaataaatctattttcttcaacatgttctaggaaatatttatttcataaaataataaagtagtgattttctttatgaaaaatgatattaatatccacaacacataaaatccacaaacaattatgccattaggcccatacacaccaaatatatttttctaaaatttcacaagagtaatttagataaaaatagaatttcacgcattgaactcccctatttagctaaaattttgaatctttgttctaatattggttttatttgcaattcaaagaatggatgtaaaatcaaaagtatatatacattacacacacataatatatatatatgtatatagctataacaaaggatttaatatatgatatgtctgggcaaacaattatcattcccattttacagatagag

SEQ ID NO: 857504 - DNA, 669 bp, Homo sapiens
tgcagcagggccttcagaggatccatttctgtggctgtttccctccttgtgaaatgagtccaagtacagtcacctattttttttctttttcctagttagttcctgyaagcagacaaatagtgtcctttccaggaagcatcaggaaagagaggatggaaggaggaaaaagaagagtcaaagacctaaggctaaggaggccaagctgaggatggctagtccaggagtacctggtcagtgacgtcatacaccacgatgatgccatgagccccccggtagtagctggaagtgatggtccggaaccgttcctggcccgctgtgtcccactaggagacagtaggcagaggagcaggtcagctgaggtccagagtcccagagtcccttccctcccaaggtggatacctctgtactggggattttgggaagagcgacactcacgatctgaagtttgatagttttgccatccagctcgatggttcggatcttgaagtccaccccgatggtgctgatgtagctctctgtgtacgtgtcatcctgaaagttcaggggccaatgaaatcatgggagttaatgaggtgaggcccacttggagagcctccctccagttccctgccccagctgggtctccgaaccaccaagccccaattcccagcactcagctggccagccctg

SEQ ID NO: 857505 - DNA, 669 bp, Homo sapiens
tgcagcagggccttcagaggatccatttctgtggctgtttccctccttgtgaaatgagtccaagtacagtcacctattttttttctttttcctagttagttcctgtaagsagacaaatagtgtcctttccaggaagcatcaggaaagagaggatggaaggaggaaaaagaagagtcaaagacctaaggctaaggaggccaagctgaggatggctagtccaggagtacctggtcagtgacgtcatacaccacgatgatgccatgagccccccggtagtagctggaagtgatggtccggaaccgttcctggcccgctgtgtcccactaggagacagtaggcagaggagcaggtcagctgaggtccagagtcccagagtcccttccctcccaaggtggatacctctgtactggggattttgggaagagcgacactcacgatctgaagtttgatagttttgccatccagctcgatggttcggatcttgaagtccaccccgatggtgctgatgtagctctctgtgtacgtgtcatcctgaaagttcaggggccaatgaaatcatgggagttaatgaggtgaggcccacttggagagcctccctccagttccctgccccagctgggtctccgaaccaccaagccccaattcccagcactcagctggccagccctg

SEQ ID NO: 857506 - DNA, 527 bp, Homo sapiens
gtaagggcaaggttggcagctaaggcaggaagcaaagggcccaactggagctcagtggtgtcaactcccttcctcctcaagggttgctccctgtctgtcccactaatgtttgaaaaatrttttactgggttcctagccctgaacttcagcgtctcctgccctccaggctgttattttcagaggtagagatgagagctgagatagggtctcccttgagacactgtccctaaaaactacgaccttcagctcctaattgagggcttccccgcccaaacccaccccttcgcaacacagcccccagggaaggtgtctagcctttggagcactaggtgggggcgggggaaacctggtcctaggaattctaggccgccagatgagaggcgatgctttcgccctccaggcgaaaggatttgtcggggagagacagcaagagttcgaccagccagccactttagagattgtcaggggcgctcagctcatagggtggctcgagggccagtgcgaagctcccttagggacgaatttcc

SEQ ID NO: 857507 - DNA, 659 bp, Homo sapiens
caaaacagaaagtatcagtgttttaagcaaaaagtcataaaaacattatttcagtcctttgttagtccatgcaatcaactcttrtttcaatcaatattgggctagcagtccatatgaatatattatgaatacattcgttttttataagagtcctagaagctttttttctctctattccaatctcacaatctcagaatttatcagagacctacattcaagagtacttaccatagtcttatagctgtttataaactgccttttaaaaaggataaaaacaaaacaacaaatgtctgtggatgataagaatcttaggacagccacagttaaagctgcaattaacaagaaaatctctttggcacacaattatttaacaaacaattataattattactggtaacatgtactgagacatatatactgaaacataatatgatatcagacatatgatataggaatcttatacaattttggaatatatattgaaaacacattcatatgaatgtaactcaaaggaagttaaataccattttctatctgacaatgctttgtatagaattttaatatagcaaataagccaaatacgcctcttttgggcttcataggaataaatacttaaaagttaatgaggtcaaaaaaagacttaatttagaatttgattt

SEQ ID NO: 857508 - DNA, 563 bp, Homo sapiens
gaataaaattcaatttttattagttccctgaattttttttactagtawgtcctcttttcaatattagttgccactcttaatgatgtggtagatattattatgtatcttggtggtattttagaagtagaatcctttttaatataaaaactaaatgttattttatacaaaaaagtactttctaatatttttcttgaagatggaagctgtttatttttttcctcacttttgatagagacattgtaagaatatatcccttttcttgtaattctgttataagaagaatgatagtgtaagctatgatgatacactgcatctaacatgtggcatgaactagagaaaatgtcactttagtagcagtagctgctattcagctccaggtgattgttgtccagtataaacattgctcttgtatttgtcatatcttctaattttccaccaaaatctagaaatcaggattttggtatgcactctctcatattttaaaaaataccaaatttcaaattttaaaaattaaagcaaaacactactcgttaaatgatacatctcttttgacaagtctataa

SEQ ID NO: 857509 - DNA, 510 bp, Homo sapiens
caatagtgtgtaagtgttccacatcctcaccaatgcttgttttcttttttcttttttttatttttttgataaagccattccmattgactgaggtgatatctcattgtggttttggcttacattttcctgatgatcagttatattggtcattttttcatgtacctgctggccatttctatgtcttcttttgagaaatgtctattattttgccaatattaaaatcaggtttgttttttttttttgctgttaatttccttatatattctggatattatccctttatcagatgtatagtttacaaatattcccttctattctgtaggttgtttctttactctgttaattctttcctctgctgtgcagaagctttttagcttgatgtaattaatttgtctatttttggtatattgttgactgtgcttttgagatctaattttaaaaatctttgaccaacccaatattgtaaagcatttctcctatgttttcttctaatagttttgcagtttggat

SEQ ID NO: 857510 - DNA, 597 bp, Homo sapiens
actatgagtcaattaaacctcttttctttataaattacctagtctcaggtatctcttcataacagtgttagaacaaatatagtatattggtaccacagagattgggrtgctgctataaagatacccaaagatatggaagcaactttggaactgggtaacaggcagatattggaacagtttggagggctcagaagaagacagaaaaatgtgggaaagtttggaactttctagagactttttgaatggctatgaccaaaatgcagatagtgatatagacagtgaagtccaggctgtggttgtctcagatggagatgagaaactgactgggaactggcgtaagggtcactcttgctatgctttagcaaagagactggcagttttttgcctctgccctagagatctgtggaactctgaacttgaaagagatgttttaaagtatctggcagaagaaatttctaagcagcaaagcatacacgaggtgacagagtataaaagtttggaaaatgtgcagcctcaccatgagatagaaaataaagacccattttctgtggatcaattcaagccagctacagaaattcacataagtaacaaggatcc

SEQ ID NO: 857511 - DNA, 574 bp, Homo sapiens
cagactttctatgtatcctgttyttatgaacagctttctcaactgtttggcactacaaatgtcactgagcagtgagggttcatcctgggaaattaggtattcatgactaggcacttgagtcacatagttctataaaaccaataattctgtagttgtaaccatatgcaaattatgatgccaaactttagcccttaactaaattctctttgggacttgcatttaagctgctatatcaaataaattgacaaatttcaattattttacacaataaacgtctattcgtcactcatgtagcagtcaaatgcagttattgatgtttggcaagtggttttcctccacatagtgtttcatggatgcaggatttttccatattgtgatgtactattctctagtgtcacaaatttctctactttcagcagacaaaaaaaaaaccagtagagatggtttggaaataggcacctttacttaaccaccttgatttggaagtgatatacattatttttactcaaattccactggtaagaactggttacatggcagagaaatgtagtcccttgttaggccatttcctcct

SEQ ID NO: 857512 - DNA, 647 bp, Homo sapiens
caaacaggacactaagaggatatgtgtttagttgctgatgtaagcatgagaaaagtggataatgttggatcackaaaggagaggagctaaaaaatgctgctttctgtgaatgtgctgagcagtgaatctgacaaaattacttcttcggttctcttgactgcttccttcccacttctccccactctagccccaaactcacatttccagctatctgagagtacctgaaagtcattctttgagtttctgttgttggctttggaaggttacttcttttaatgctgcactaaaacccacgcttgggctgctggtgtcgaaatggcctcatatcagttttctaggtgacagcatatttgaaaatccaattcaagctattacatttacaaacctaagtgtgaaacactccatttattttgtaacaatttgctttgtattttcagaagaaaaattattttgctcttttaagaacaattgtatataatactgttcaattttcttttcatctgagaaaattgggccccaatttctttgggactcaactagatgacatttaaaattgcatgattttatgcttttggtgacagtttatgattagtgaggggatactcgtgtgttcagagacttccttctcttccgaaacatgttgctat

SEQ ID NO: 857513 - DNA, 569 bp, Homo sapiens
attgttctgtttttaactctttgagaaatcaccatactgctttccataatggctgaactaatttacactcccatcaacagtgtataagtgttcctttttctctgcaatcttgtcaccatctttttttttttkactttttaataatagccattctgcctgatgcaatatagtatcatcgtggttttgatttgcatttctctaatgattagactttttaatatgcttgttggccacatttgtttttctgttttttgtttgtttgtttgttttttttttttttttggaaaagggtctgttcaagtcatttgcacactttttaatggggttgtttctttttcccctgtaaatgtgtttaagtttattatagatgctggatatagacctttatagatgcatagtttgcaaatattttcacccattctctaggttatctgtttactccattgatggtgttttttttttttttttcctgtgcagaagctctttaattagatcccatttgtccatttttgcttttgcttgattgcttttgatgtgtttctcatgaagtctttgcccattcctgtgtt

SEQ ID NO: 857514 - DNA, 465 bp, Homo sapiens
caaatattttcacccattctctaggttatctgtttactccrttgatggtgttttttttttttttttcctgtgcagaagctctttaattagatcccatttgtccatttttgcttttgcttgattgcttttgatgtgtttctcatgaagtctttgcccattcctgtgttcagggtgtattgcctacgttatcttccagggttttttaaataagattttggttttacatttaaatatttaatccatcttgagttgatttttgtatatggtgtaaggaaagtgtccaacttcaatcttctgcaccatttattaaagagtaagtattttctccatttcttgtttttgtcagttttgttgaaggtcaggtggttgtaggtgtgcggccttatttctgggctctctattccattttgttcatctatgtgcctgtttttgtaccagtaccatgctattttggttactatagcc

SEQ ID NO: 857515 - DNA, 644 bp, Homo sapiens
acctgtaaggattccattagtttacagtgttattcttttaaaaatcaaaaaatgtatgcatgcgtcctttaaatttcctacctgttagcaataaagcraaaataatttaagtaggttgatgcaaaagtaattgtggttttgtcactacttttaatggcaaaaactgcaattacttttgcaccaacacaacacattaaactcactaccatcttatagaaatttagctcattcacacagacatattatcagaacatatttgtgaggcactttaaatgtataaaatgccacttttgttttaatgatgtcaaccacctaagaaggcagtttgaagaagtattgctaattgtatttaatattagagtcagcagaatcacaaataatgttttgaattttaaaaagtagtaaagaatcaaaattggaaaaaacttttacttcaaaattgtccttttgtgagcaaaatagatttaattttaattaattaaagaaatctttatgttacctcctcctttcttttttcttctatcattgagcatctggttacttatttaactcagagttttagttcagggtatcaaggagtgtcatggaaacttctaaccctaatttctaatgataaccatgtgtgaagaaaggaagacattacc

SEQ ID NO: 857516 - DNA, 643 bp, Homo sapiens
ctgaaatagtgtagactaaaatataaagaaaaaccaaattgggattttaaaatgcatgagcgcccatctaaaagagccacctacgccttggttttcctcttttttggtgaagttgataaattggcttgataccratgaaaatggcgaccactgcttgaacagcacttcatgccaagaactgccctaagctgtataactgcagcaatcttatgggtggagaatggtggctcatttcatatgtgagaaaacagaagcccagagaacataattgacttgccccgagtcatagagctgggtagagaatggttcagaatttgagcccaggcagcctgaccccagagcctgtccccctgtgtactgtgaggtgacctttctgggtttaagaatcacgggtccaggttatacactgtatcagccttgttgcagctacaagcttggtgtggtcacttcaccatccctcattttgatttttgtttgcagagtttaggtcgatagacattgcgggtatatttctaagtcttattgaggaaataatcagtccatgagtgcctgtagctcactacatgagccatctatctggagatgggcagggctcacacagcacaggccatctttcagttctgcacctgatggacagcacctc

SEQ ID NO: 857517 - DNA, 643 bp, Homo sapiens
ctgaaatagtgtagactaaaatataaagaaaaaccaaattgggattttaaaatgcatgagcgcccatctaaaagagccacctacgccttggttttcctcttttttggtgaagttgataaattggcttgataccaatgaaaatggcgaccactgcttgaacagcacttcatgccaagaactgccctaagctgtataactgcagcaatcttatgggtggagaatggtggctcatttcatatgtgagaaaacagaagcccagagaacataattgacttgccccgagtcatagagctgggtagagaatggttcagaatttgagcccaggcagcctgaccccagagcctgtccccctgtgtactgtgaggtgacctttctgggtttaagaatcacgggtccaggttatacactgtatcagccttgttgcagctacaagcttggtgtggtcacttcaccatccctcattttgatttttgtttgcagagtttaggtcgatagacattgcgggtatatttctamgtcttattgaggaaataatcagtccatgagtgcctgtagctcactacatgagccatctatctggagatgggcagggctcacacagcacaggccatctttcagttctgcacctgatggacagcacctc

SEQ ID NO: 857518 - DNA, 576 bp, Homo sapiens
agagtttgggagggctcccagtcctaggaacaacagcaccaccaaatgagtgactgaccattgaagaaagtcaaaatattttgccccaaaatatatttctttgacttcttttgaaatggctgccgtaggaccagcagactgaaatggccctgcaaagctgtcttgtgggagaaatttgcgtctgtagagaatctccattgttgcagccaggccttccctttctaggcctttcctcaatctaagagagactgagactctgacacttccaaaggtctgaaagggaacatttaccatctatttcctctggggctgtattatgaggggcttcatctagaccgcctttgctggccataacctgtcctgcctctaaaacctggttttggtcatgcgctgagcctgtgttctttctataacctcaagatggtctagaaacttctataccttactggggggttgggacttcattctgaaggctcctgtgggtacrcgttaagtacatttgtatgcattttctcctgttaatcaatctgcctcatgtccgttatttttcagagaaccttcaggggctaaggccaa

SEQ ID NO: 857519 - DNA, 609 bp, Homo sapiens
acaattgtttcagcaatgagtactataatacctccagttccgctggccaaccctgaaaaccaatttcgatcagactacatcaagagcatagcccctatcactgactttgaatattcccaggtaagaaatgcttactgaaatattctaactagtgaaagatggaaccatttttaataaggtttcttattgagaatcaatattgatactaattcattattaactttcttcgaaatccagctctctaaatgcataagaggaatacttattctgtaccaaaatatttgtgtttgttaaaaatattaactacggccaggggcggtggctcacacctgtaatcccagcgctttgggaggccgaggcgggcagattgcctgaggtcaggagttcaagcccagtctgtccaacatggtaaaaccccatctctacgaaaaatacaaaaaaattagctgggcatggtggtgtgcgcctgtaatcccagctactcaagaggctgaggcaggggaattgcttgatcgagggaggtggaggttgcmatgagccgagatcacgcccctgcactccagcctgggcgacagagcgagactcccatctcaaaaaaaaaaaaaaatt

SEQ ID NO: 857520 - DNA, 532 bp, Homo sapiens
cattctttttaatggctgaatagttctccattgtttatatgtaccacaaatgtttgccatttgtatgtcttcttttgacaaatgtctattcagatgttttgcycatttttaaatcagattattagattatttttcctatagtttttttgagctacttatgtattctggttattaatcccttatcagatggatagcttgaaaatatttcctctcattctgtggattgtttcttcacgttgttggttgtttcccatggtgtgcagaagctttttaacgtgatggattccatttgtccatttttgctttgattgcttaagcttttgggctattactcaagaaatctttgcccagaccaatgtcctggagtttccttaacattttcttgtagtagtttcatagtttggggtcttagatttaagtctttaatccattttgatttgatttttgtatgtagtgagagatagggttccaatttcattcttctgcatatggatatatccagtttttttagcaccatttatttgagactgcc

SEQ ID NO: 857521 - DNA, 622 bp, Homo sapiens
tgcatgcctgtggttccagctacacaggaggctgaggcaggaggattgcttgagcctgggaggtcaaggctgcagtgagccatgttcacactacacactccagtctgggcaacagagtcagaccctgtttcaaaataaataagtaaaacaaagcatatatagaaaaaatgaaaatagggatgagtgaaatagatatgtgaggcacatgaaaatatctaacatacatattactaggttccaaaagagaaaagacaaaaaaacaaatcagatgagtgaaatagaaaacaaattgttagatggtatgtataaacccaattatatattaaattaaattaaatgtaaatggactaaacactactactagaagactaagatggtaagactgaaaagcaaaaatctaaatatatgcttactgcgaaggctataccttagctatcaggacacaaatttgtttaaagtgaaagaaaggaaacacacacgcgcacacacaacacaaacaaaaaaatagtatagtatastaatattagaaaaatcatatttaaggcaactattattaccagagagtaagacagaatattccagtcttaaatctgcatgtgcccaataatatagtttaaaaata

SEQ ID NO: 857522 - DNA, 622 bp, Homo sapiens
tgcatgcctgtggttccagctacacaggaggctgaggcaggaggattgcttgagcctgggaggtcaaggctgcagtgagccatgttcacactacacactccagtctgggcaacagagtcagaccctgtttcaaaataaataagtaaaacaaagcatatatagaaaaaatgaaaatagggatgagtgaaatagatatgtgaggcacatgaaaatatctaacatacatattactaggttccaaaagagaaaagacaaaaaaacaaatcagatgagtgaaatagaaaacaaattgttagatggtatgtataaacccaattatatattaaattaaattaaatgtaaatggactaaacactactactagaagactaagatggtaagactgaaaagcaaaaatctaaatatatgcttactgcgaaggctataccttagctatcaggacacaaatttgtttaaagtgaaagaaaggaaacacacacgcgcacacacaacacaaacaaaaaaatagtatagtatactaatattagaaaaatcatatttaaggcaastattattaccagagagtaagacagaatattccagtcttaaatctgcatgtgcccaataatatagtttaaaaata

SEQ ID NO: 857523 - DNA, 608 bp, Homo sapiens
acatcttataacccattattttaaactgatggcaaggtaacactgattgtataaacaaacaagcaagcaaagagaaaactaataaaaactctacacttaatctcccatctttttaacttattgttatttctatttatgtattatattgccaatgtctttaaaagttgttctagttattatttttgataggttcatttcttagtctttctattcaagatatgaataatttacataccacagttacagtgttataatagtctgtgttttatttgtacttaccattaccagtgaattttgtaccttcagatgatttcttattgctcattaacatccttttcttttagtttaaagaactccctttaacatttctagtaggacaggtctggtgttgatgaaatccctcagcttttgtttgtctgggaaagtctttattttgccttcatgtttgtgaaggatactctctctggatatactattctaggataaaagtttttttccttcagcgtttaaaatatgtcatacctccctgtcctagcctgtatggtttccactgaaaagwctgctgctagatgtattgaagctcctttgtatgttatttgtttgttttc

SEQ ID NO: 857524 - DNA, 553 bp, Homo sapiens
ctatttacccgtagggtgttttgcatgactgatkaatcctcacagcattggaggactttcaggtgattttggagaccatggcttggaaaaagcaggtgattgacaggtgaggcagggcctgcaagaagtgtaaatcaaaggggagagatggaacgttgtccatgttcagacataggtgatgatgggtctaaacaaaaagtcaaactgagaaggggtttcaattttaatatgaagaaatagtggctcatttattcatttaacaaacctcaaggatctattgtttgccaagtactgggtaattctgaagggtaatggtaagtcaaagaaaactgagatacggatattcctctgggtggggaagttaaaaagacccaatatattgtgcaaattgatgagtagagatttgtataggggactacggggagatggaggaaggactttgtagttgtgtggggaaaggctttactgaaggtgagtttgatctctctccgtgaaaagcattctagtcagaggaaacactaggtacaaaggtcagaggtgtgaggaggtgcag

SEQ ID NO: 857525 - DNA, 553 bp, Homo sapiens
ctatttacccgtagggtgttttgcatgactgatgaatcctcacagcattggaggactttcaggtgattttggagaccatggcttggaaaaagcaggtgattgacaggtgaggcagggcctgcaagaagtgtaaatcaaaggggagagatggaacgttgtccatgttcagacataggtgatgatgggtctaaacaaaaagtcaaactgagaaggggtttcaattttaatatgaagaaatagtggctcatttattcatttaacaaacctcaaggatctattgtttgccaagtactgggtaattctgaagggtaatggtaagtcaaagaaaactgagatacggatattcctctgggtggggaagttaaaaagacccaatatattgtgcaaattgatgagtagagatttgtataggggactacggggagatggaggaaggactttgtagtygtgtggggaaaggctttactgaaggtgagtttgatctctctccgtgaaaagcattctagtcagaggaaacactaggtacaaaggtcagaggtgtgaggaggtgcag

SEQ ID NO: 857526 - DNA, 588 bp, Homo sapiens
aaatcatggagcccatttcacaacatttctggctcagcattcattcttttggatatcaagacacacttggcagtcctcaagggattttccttgccarcagtctctgtaactaccgaggacatacttgttcactttttaaaaatcttatttttctcaaatgttaagtgtactatctttctgtgaactttcagcatagaacaaattcttttggttagaatgttttaatcttgctgttttagcatgcacacacacttgcatacacatgcacacgcgcacacacacacagcacagcacacctacagcatctccccacagtccttaccaaagattagtaacctgtctggtccccatggtcacatgtgacattctgccccgacctattgctattgctcataagtcacttcccagattagaattcttttcttcccataaatattaaagtaaagaaatttgcttctttcaccatgacctttctagtcttcaaggtttgtttatgtgttttaaagaattcatgtcaacattatatctcttgcaggaactttggccaatttcttcattataccctacaagaaatagcctgtggtcaag

SEQ ID NO: 857527 - DNA, 511 bp, Homo sapiens
tgcactagccacaaattcatgacttagattcattaataaatgctttggggcaggggggataaaaattggccaascaagctgttcaactgcaatatcaaaagcttgaaaatctttaaaagtccttggatatattatacgtatctccagaattctgaacaaaaccgacatcagttaaagttgcttctgttgattgtaatccagcagaaatatcataactcttggctttgccccgggcaaacttttcactgaagtcattcattttgctttttgttatggttacctaacctcagtcagaatgcagcaggctaccaaaaaatgtgaggcagccatctggaaacttccagtttctaacatttctctgctttggaaatgggatggagtctaccgactttttccaaattcgatctttattttaaagataaaaaaaagcatgactaggcatgggaagggactcaaatgccagcatgagagaaggacagtgggtctcacaacccacaaacatgcctgggat

SEQ ID NO: 857528 - DNA, 446 bp, Homo sapiens
ctcttgttaattatataatcttctattacggttgtagatttcaaggacccatgcagggttcagatgcaggcagatttttgttagtaaacctctaaaggrgaatgggcgcttacaatacaaagatgtcatcctcttaagttaggtggaggaaaacctcaatggaattactgtaattccatctttttaatataataaaagcaattaaaaagctttatgtagtactctaggaatcaggtttgctgagactctccaggaaaaactgagtaggtttaatagcaggctttgatttagaaataggaatagtaacagtgggagattgaaaaaaaatcattctgattaggaatcattttttgaggaagaaagtttccttaagaaaaggctgagattaagtagcctaaacaaaacagatagaaaaggcaaagtgaagtcttgcaatcgtaaggaaa

SEQ ID NO: 857529 - DNA, 608 bp, Homo sapiens
aataccttatagaagaatcttatgaaaattgaaggctgaatagaatgaaatgcaratttaaacaggaagatctagaagactagcaaaaataaaactatctcaactataccaagtactgattaaggaatggtgaaatacaaactggcatacataacttgtgagaaagaaaagcagtataaccacttcagagtataactggcattattgtaatagtgatgaattgtaaatagcctatgtccattaatgaacagggaaatggagaaataatctctagctgtatttatacaatggattaataccacaaggcagttaaacaggaataaactagacctatatgtatcatattgattatgtctcaaaatataacagtaagtgaaaaaaaatcaagttgtgtagagataaacataccaccatttatgtaaactaaaaacacagaatataatacattcttcatgatcaaatatatatacatatatacacacatatctataaatctattatctatctatctatctatctatctatctatctatctatctatctatctatctgtagttcaagtatataaaggcagacttggacaggcgtggtggctcacacctataatc

SEQ ID NO: 857530 - DNA, 590 bp, Homo sapiens
atgaaatcacaatttacataaatatataaaatagtatgactgattagcaaggtcgaaataaaaaatatatacctaggaaacataatagaaaataagaaaagatattctttaagtattttattcatcaaaaatggacacttagacaattttaccttataattgacagagaaatattccctgtctgtctcaaagggtaaaactcgggtcagtgtgagaggacggcagggagagagattttagatcgacataaagaaaacttcctattagctagtggtttaacagtaccagagtgcatctcttatttatgtcacagctcagtgcaagtcaggaaattctctagggcagccttcctgagtgttctccatgtgtccaatctcccttctcttgtgttggtcctgcatcaacatgcactgaccacattgttaccaaaggagaagagaaaatatggaagatcatgcagagagtttgtgttcaggccagaaagtggtgtgcatcattctttccatcattagattggccccaaacccaatcacatgagcccaatttaatgcaaargaggctgggaaatgcagtcttccgggatggccaag

SEQ ID NO: 857531 - DNA, 617 bp, Homo sapiens
aaagtggatcttaagatttgtatgaagatataagggatccaaaagagtgcaatcaattttgaaaaagatgaaaaaacttggaggactcaacacttcccagtttcaaaacttactacaaagctacagtaaacaagactataaggatagaaatagagatcaacaaaatagaattgagagttcagaaataaaccctacttatcaaaatatttatgtagaccttttctcaaaggagatacatgaatggccattaagcttatgaaaagatgctcaacatcactattcattaggaaaatgcaaataaaaatcatgagatgttgcctcacatccactagaatagctaaagcaaaaaaaaagcaacaacataaaccatataggcaataagaagtgttggtgagaatgtgagaatttgaagccctcatataatactgatgtagtgcagccattttggaaaagagtttggaattttctcaaaagtttaaacctcatgaactgcctttttactcyaaggaataaaccccaaagaaatggaaatttatctccacataaaaacctggatataaatgttcataaaagcttatttctgatagccaaaaaattaaagcaatccaaatgtcctt

SEQ ID NO: 857532 - DNA, 618 bp, Homo sapiens
ttttcctgaatatttttgatctgcagttggttgaacctgagtgtgcaggacckgcagatatgcagggctgactatatagagagaaaaatgggaagcgagatcatagagacttttgtaccctaacagagcctttccagaaactcccgtctcgcaatgacatactgttgttttaaacaagtcctgctggaattattgcggctgtggtgcatgtggcagagaaggactgtccctgaggatgaaatagtgctgacattctgcactgtagatggagtcatgagtgctgtggggaaatgaggatgggcgagggacagtgaaatagggagaaatgatcacttaacattgttataaattctctctcactatactttaattgcaaaggaactccaaaaaagataatatttaattatatggacttaatgccctgagtacatgaaaggagaatgaagtgcgtcaaagaacttggaaataagggaaatgaggccactttgtgagagtcaggctatcacagtggtatacatggaatgaagcataggtagtcacctgaaagagacctttttggcatgtgagggagcgtctcagagagctgctttatatgtactccagcgcatgtccaattct

SEQ ID NO: 857533 - DNA, 535 bp, Homo sapiens
tgagcagcacagcaccatgagtaaattaatatgaascatccatcatgtgaatacaaatctgtccaatattaaatgagtttgagagttatggaatattacaaattgcttataacattttactaaacttaatattaagttgtgtagtagaaattggagagtattttaaatgaataacaataaacaaacactatgtatcaaaaatattaggattgggcttaagtagttcctagaaaaaaatgtatagccttaaatacctatgttagaaaaaagaaataattactttcatgagctaagcctacattttgagaggttagaaaaaaatagcacaattggctcaaagaaaatatataataaaaacaacaacagaaattagtaaaatagaaagcataaataccattaggaaagattaacaaaattgaagactgattttttgaaaggctaataaaattgacaaacctctgccaagactgattaaggtaaaaatagagaaggccaaaataattaataacaagaatgaaaaaagggcttcatgaaa

SEQ ID NO: 857534 - DNA, 616 bp, Homo sapiens
ggtctcggctggaggcacacttcccagcctgtgggttggtcaccttgcaggctgcaacactttataagaaataaattcttctctcctttcttaaatttataaattgtataatttttaagttaacagtacttaacattttagtgatcatagatccctccaaaaattaaatgacatctatggactctgtccccagaaaatacatatgtgcatacagtagtttttctaaccatctacttaatattcttgattccctttctgaaatatgccaactgattctcataaaatactgaagactcatagctagtagccttcactttagtttactcctccacatctgcttccactagctgagtggaatactccccaagagtcagttatgtttgttcccaaacttcatttccattgtatgcctcatacgtatataatttaattgaattgcatgaactgataaaatttgagtctgcaaagaaataattttctatgaaaatcaagaaaatgagtgctaataaaaatagccattgtcagacacttaggtggtttccatatcttggytactatgaatatgctgcaataaacatggaagcacagagtatcttttcagcatactgatttcatt

SEQ ID NO: 857535 - DNA, 623 bp, Homo sapiens
tcccttctgggtggcatacacagtttgtcagtttgtcaacattctgcatttatgaaaaacagtttgctgctcactcatttagcctccagtggtatactgagttgatcacaaccctcattctttcggcctgctatatctcctgctttttgtttttaaattaattgagcaacgcaattgcaggctgtgcagccctcaattgcaggttggtgatctggcttcatttttcttagcccttattcataatggagttgctctggtttgaatgttccttacatatttccctcttcctttttacaagaggaccttaatcctaagggttgcagaaggatgaaggtccatcttctgcaacttcttcatgcttaataggggtgtgcctaactattcctgcctaactattagggtctcttgtattcagggtagagagctcagtcagaaagcattcgtccattaagcatcaattgtacctctgagttccagtaaaaggtgaaatcctggccctccarcagtttctcagcttcttgtgtggttttctagatcggtccctatattatgggggttaatgtaagcgtgactctggtcggtcctcgttccatctttgcattcagattcaactggctcatggc

SEQ ID NO: 857536 - DNA, 613 bp, Homo sapiens
ggatccatcaaaaaactgaggttggagctaagtktccataagcggatgaatggataaagaaaatgtggcatatagacaatggaatactatcactttttaaaaggaaggaaattctgtcatttgggacaacatggacattatgctaggcgaaataagccagacacagaaagatgaataacatgtgatctcacttatatgtggaatccaaaaagtagaactcatagaaggaaagagtagaatggtgctatgggaggcagatggatagggaaaaggaagacaatggtaaaagggtacaaaattttagctagacaggaggaataagctttagtgatttattgcacagaatggtgaccgtagttaataataatgtactttagatttcaaaattgcttaaagactagattttaaatattcccacaaaaaattgataagcatgtgaagtgatgaatatgttaattagctttacttaatcattccacaatgtaaacatataccaaaacatcacactgtacccatgaatatatacaattattatttgtcaattaaaaatgaaacaaaagttgaaaaaactgaggttatgggaagatttaaatgataattttgatgaattgtt

SEQ ID NO: 857537 - DNA, 537 bp, Homo sapiens
tcacatataataaactatgtatgtttaaggtgcacaatttaataagttttgacatatacaccctgtataagtatgtcatcacaatcaagattaygaacacatccataacctctgaacgtttccctatagacctttataattccccctcctgcccatctctaacctgctcctgtcccgaggcgaccaccgatctgctttttgtcaataaaattaggttgcattttctagaatttcataaaattaaaatcaaactttctgtactcttttttcatctgacttctttcacttggcataattttttgagatccatccatactattgtgtgtatcaataatgagtttcttattattgcggagcagcattctatttcagggttataccacattttctttctccattcagctgttgatagacatttggattgtttacaatttttggctattacaaataaagctaatacaaacatttatgtactagtcattgtatgaacctatgcctttattattttgggtgaatacctacgggtggaatgactag

SEQ ID NO: 857538 - DNA, 630 bp, Homo sapiens
acctccaaaattgcaggtcacatttcaatatgtgatttgaaggagatatatatccaaattatgtcaactggtagaaggtataaactctaaatgagacatgaataggaatgtttgagtagagggaaagcagaggacgtgagataaaagactagagcagagaaattgctaggaaacttggcaaagttaccttctgggtctgttgcctcctttatcaaatggagttaataatattatgtacttcttaggccactaggacaataactgagagtattccttcatttaaatcagttagcatagtgccagtaagttagcattatgcacttacatgataaatgtaggatgagtaatagatattcttattgttttctattgttgttgatgtttttagaggctggaatacgaggagtgagaagaaaacaataccacccatgtcttagtcaattttgtattgctataaaggaacaccagagactgggtaatttatgaagaaaagaagtatttttggctcacagttcttcaggctgtataagaagcatggtgccagcatctgctcrgcttctaatgaggcctcaaggagcttttagtcatggcagaagaagaagtgggtcacatggcgaaagagggagcaag

SEQ ID NO: 857539 - DNA, 663 bp, Homo sapiens
tcctgtattaacctgactttttccagagacagcaacaggcacagcccagacccagggaaagtcttgataaactatctctgatatgccctgaagactctcccagcactycctaaacatagggaggagaaaaactaattttcctctctcttatggtatgaggttagagattcatgttctctctaactagtaacttcatgtattctgttttatctaagcagtggagtgaaggtcataagccatctgagcaggcctgaactacagccacctgggggccatagtgaaggtcatggccttcaaattacagttacctaaggcttccaagctttcattgaactaatctctgttttacctgctactattttcaatatttttaatcgttatgcctagttattcttcaaatcttgaagacattaagatgatatcttgttgggatgaatgatctttaagttttctgtgcagcttttcggacataagctgtgctaggcactagggcaaacctagataacagccatctgggctacatagcaacggtcatgtgtaatcctgagttatgcacctgtcacaatttgattaactgtctttgttctgcctttgtatcctcactttcgtgccactgtaaacttgtttcaggctagcccaccccctttttgaagtgtgtataaa

SEQ ID NO: 857540 - DNA, 663 bp, Homo sapiens
tcctgtattaacctgactttttccagagacagcaacaggcacagcccagacccagggaaagtcttgataaactatctctgatatgccctgaagactctcccagcactccctaaacatagggaggagaaaaactaattttcctctctcttatggtatgaggttagagattcatgttctctctaactagtaacttcatgtattctgttttatctaagcagtggagtgaaggtcataagccatctgagcaggcctgaactacagccacctgggggccatagtgaaggtcatggccttcaaattacagttacctaaggcttccaagctttcattgaactaatctctgttttacctgctactattttcaatatttttaatcgttatgcctagttattcttcaaatcttgaagacattaagatgatatcttgttgggatgaatgatctttaagttttctgtgcagcttttcggacataagctgtgctaggcactagggcaaacctagataacagccatctgggctacatagcaacggtcatgtgtaatcctgagttatgcacctgtcacawtttgattaactgtctttgttctgcctttgtatcctcactttcgtgccactgtaaacttgtttcaggctagcccaccccctttttgaagtgtgtataaa

SEQ ID NO: 857541 - DNA, 648 bp, Homo sapiens; identical to SEQ ID NO: 826954

SEQ ID NO: 857542 - DNA, 518 bp, Homo sapiens
acagcacagcagaaacataaatcccagaaatacttttaaggtacagacaaaattaaaagttaatattcatctaacttagtgtgsaaggagggaagttagaaaataagaacttctaataatattattaaagattaaaattttaagagaaaaaatagatggttttaaacacaaagtttataatatggaaaaacattatcacacatacatttcaaatatatatatactaaacagtaaatattttattatgcttacaaatatatttatgtatcagaatataagtatttacatttatcatttagtgaattctcataactcaataacaaactttctaaaattaaaaaagagaaaggaagaagtaatttacaaagaaataattctgacagtacatattttaaagatttacaaccttatgataatttaaaaattacaacaaaagtaaaatacattttttcatccatcagattgactgattgtgtatatctttatatctttttctccttagtgtctcctcaaaagaa

SEQ ID NO: 857543 - DNA, 613 bp, Homo sapiens
ccaccctcttctgtgggggtcagcacggggaccggcccttccctcttggacctggtggaccctgtggcacgtggggtggcatcggctgcctgggcacagctctcagcgggagggccaggtcccaggaaatgaggcaggggctgccaggcccccacaggccacctcacctgcagcccctctttctggccctctgcacgcagggaagtggtggtcagagagggggcacacggggcgggctggcagccgccctgtccccatgcccccactccagactttccccttcccatccttcccagaggacccaagggaggaccacgcctttttaaattatttttaattttttggatacataacagttgtacatatttatgaggtatgtgtgctatagtgatgcgtgcacgtaacacctaacgatcagaccagggaaactgggctacccatcacctcgagtgctgatcattcctttctgtcaggaacatcccaaatcctctcttctagctattttgaaataaacgayaaagtattaactatagtcaccctacagtaccaccaaacagcaggtcctagttcttcagcctggcagcatgcctgcagcccttcatctcccccttcc

SEQ ID NO: 857544 - DNA, 618 bp, Homo sapiens
ctgggattacagctgttacatattatggcccatttctgtgtacattttaaactgatargcaaattatagcaagaaaaatcagagatcaaattgttaacctgcaactacagagttaagtagtgtcttctaaaactctttattagtccattttgcactgctataaagaaatgcctaagtctgggtaatttataaagaaaagaggtttatttggctaatggttttgcatggtgctggcttctggaaagcttctggtgaggtctcagaaagctttcattcatcgaggaagaagaggaagcaggtgtgtcacatggtgagagagacaggaggaggtacaaggctcttaaacaaccagctcttgggtgaactaatagactgagaatcactcattactgtgaggacagcactaagcaattcatgaggggtccgcccccatgacccaaacacctcccactaggccccagctccaacactggggatgacaattcaacatgagatatggagtggacaaatatccaaaccatatcactttctattgctctctttcctttctgcctgctttgaatttcccattattaagctactggcgttgagataaaactcactttttatatagcacca

SEQ ID NO: 857545 - DNA, 645 bp, Homo sapiens
ttatgatgtttggtttcttgtttgtattattttttattgttgtattgttattttgttctgaatattttccatttgtagttgattgaatctgcaacatgaccctacagatgcagagatttgactgtacrtaccaaggtagctctttgaaattccaagaggggtcaatttgaaagcactctcctatcttcttctaggcttcttagatgttacatttcatcttattgatttgacttaacatgcctgcttcacagtatgtagactgtttttttctttatgtatatgctatatgcagatatcactaaattatcaacctcctatttaatgaagatataatttattaaaataatatttttaagaacaagaatattttacctctttaaaatacaatatggaataatagatgtccttctttgagaaaggaacacatggaatttgaaagaatccctttttctaaagggaataatattttagtaaaatggaaactaaaggaaattacttggaatttacaacactctgttcattgttccttagatgcaggtataagattacacttcaatttctgaaaaatgttaaataacctcaaatagttataacctcaaaattacattagtaatcgtaactacttgtaagtacttgtaattacat

SEQ ID NO: 857546 - DNA, 566 bp, Homo sapiens
tgtttcatcaatttaaatgtctgtttttatggcaataatgtgctgttttgattactattactttgattttttgggcttcatggatctgaatgttcattttcctcttcgaatttgggacattttctgtcrttgtttatttaaataagctttctgctcatttctttttttccattcctctggaattcctataatatcagtttacttggtggcatcccataagtcccataggatttctaaactttttttcattcttttttctttttgtttctctgactaggtaatatcaaataacctgtctttaagcttactgattcttctgctggattgattctgctgttaaagctttctgtgaaaatttgtaatgctgtaattctgtttttagctctagaatgtatttggttcttttttttaggggtttctatctctttgttgaactcctaattttgttcatgtattatttttctgattctatttagtatctatttttgtcctgttgtcactcattgagtttctttaagataattagtttgaattctttggcagttcgtagatccctttttctttag

SEQ ID NO: 857547 - DNA, 569 bp, Homo sapiens
aaggaaaaagaattaattgtgtagttaaccaaactaaattcacacaacacaggacaacttcttagacacattcatatagatgagattgatcaaaataagtcagaggctatatgagttaattctgaccacctaggacagtgctctactttactcctcccaccccccgctgcccacatacacacatacacacacacacacagagtttcccaagtctactcttaacattgcttctcacttcattcttaatagggtaggtggaatcctgttgcttcttgctcttcttgtctggacgacttatgtccagattcttcatgtatgtggacagcacctgggagactccaatgccagagagaatgcacataacaggtgccaacactagcattagacgcacctaacagagacaggaagcatgatcagtctaatcagtgttccacaatttacagatttcagcctattagtagatcaagacatcaatttaggggttttcatcaaacatgacctccacaaaaagtgaaagagaaaatacttgaaayagttgcagtattagtatgtatttcttaaactttgtt

SEQ ID NO: 857548 - DNA, 595 bp, Homo sapiens
agggacctgttactggcaatgcttccccttttaatttgtatcttatttggaaagagcttcaaaattaggtagttgaacttggtaacaatatacaayagcaacacataggctaagactaagggaaaaagaagctcacctttgaacaaccacaagagttttgagtaaagggtcattcctgtgtcatgaataagtgagagtactgaaaagctccatttcaaattgatatgtatgattatatttaagctgattcaaaaacacctactgaccatcaagctctatatgtaatgctggaagagtttcttcctctccattgataaaccaataatttcactgtttgtcttgagtcttcaaaactgctgatttataaagtcaaagagcgtctaaggataaaagacattgagaacagagacatagtagcccagaaaggcactcttctagcactcttctggtcccacatttattcattcaataaaaatttattgagccacgctgtttccaaggaattgtactaggtgctgcaatgcaaagggttatgacaaaactgtctgtaaatgtaggatctgaattggtctttgatagttttcctgatttgaga

SEQ ID NO: 857549 - DNA, 587 bp, Homo sapiens
ctctgtttttcagttttttacttagataatcctacaagttcctgaatggcacataataggagctcaatatatattggttactctttagggaacactgagggacatttctttctgtcrttatttccggtccttgtttgctcagaagaaatattttctattccattctctctaatcatttaaagccaatttaggtcatcattctttaaaatatgtttctattttgatgattggatttttaaaaaataatggtcacttttagaagacaaagttgtttaattctgtttccaatcctactaactatgttttggagcatttcgaagcagaatgtatcttatagaaatcatttgtctattcattttatattatatttctattcattctatattttttgtactaagtttttttcaaaaatagtgaatgacaaaaatgaatgacagacatagatgagatataatgttaggaaattgataaatctttattaaactttattctgacttttgtatttattttatatcacctctaactccagataataagaaagtaaaaggttacacaatatttactagtgaataggtcaagcaccatga

SEQ ID NO: 857550 - DNA, 453 bp, Homo sapiens
gcaacagcaaggagaggaggataagtatcctacacaggagaaataacgattgctgatttgggctcaatgcttggcccagagcaggcagccaatacatgcttattgattgatggcttgctagttactggtttgtaccaggattgctcaagtaccttctctgatggtttctattagggttagagttgattagcttacataagctacatttgtgaacactttcccagtcccaagccctaccccagccctgtatctcctccattgtagagagaagcagagggatacccagaatacaactactaccaaattctgtaatatgagaattagaattctataacattaatgatacttggccttcatgggtgagggtagaagcagaagacagactaacttaatcaacttratatattcaatcaaaagttaagcctaaacctttttttttccccctctgtaaac

SEQ ID NO: 857551 - DNA, 453 bp, Homo sapiens
gcaacagcaaggagaggaggataagtatcctacacaggagaaataacgattgctgatttgggctcaatgcttggcccagagcaggcagccaatacatgcttattgattgatggcttgctagttactggtttgtaccaggattgctcaagtaccttctctgatggtttctattagggttagagttgattagcttacataagctacatttgtgaacactttcccagtcccaagccctaccccagccctgtatctcctccattgtagagagaagcagagggatacccagaatacaactactaccaaattctgtaatatgagaattagaattctataacattaatgatacttggccttcatgggtgagggtagaagcagaagacagactaacttaatcaacttaatatattcaatcaaaagttaagyctaaacctttttttttccccctctgtaaac

SEQ ID NO: 857552 - DNA, 514 bp, Homo sapiens
cacaaatttacccgaggagttcgacaggagtttgataccaacatggccaacatggtgaggccccatctctactaaaaacacaaaaatcagctgggyactgggcgtggtggcatgtgcctgtaatcccagctacttgggaggctgaggtaggagaattgcttgaacccaggaggcggaggttacagtgagctgagatcttgccactgcacttgagcctgggcaacagtgtgagactccatctcaaaaaaaaaaagcctgacttaggtgaattagtaataccacaatgtccaccccagaggtgctggcagctaaattctggaaagtgagtccaatcctgtgcctttgagccagggtttctttcattggtagcacctgccatagtcttgacttttcaacagggtagtgattctgtttgggtgagcaaatttgaatccccatgtgtgtgacagctaaaaataagtgtatttttcaataagtttagtttatgcaaaagtagtaagaccttttgaaatca

SEQ ID NO: 857553 - DNA, 556 bp, Homo sapiens
tttcatttcattcacagggattttatttcacagacttgtctcctaacctaatctttcccacaacctcttcctgcaataaagttagaaaacatttttgaaaagtcactcataatgtatctgtaacttaytattttaaattaaggaagaaacacaatttgaaaccattttctcatgtaaataacacgcagccaccttctctgtctgggtaggtagggaggattcagctaagcatcaactggttacatgtgctatgatttccaacagataaacactggttctatctgaaaacaatgacctcatgcttttcttcctacaaacaagtcaagttaatacaaagtcatattcatttcagaaaacattttcaaaccatttttgttgttatattttaaggacctttcttctcttgttcaaacagtcctgatattataccaaaatgtagcatttgcccttttataattattttacactgtcagttttacatcaactaatacttattatcaaacctaaatattcaagattatcttaaaatgatgctatatttgtcaaattatccaat

SEQ ID NO: 857554 - DNA, 556 bp, Homo sapiens
tttcatttcattcacagggattttatttcacagacttgtctcctaacctaatctttcccacaacctcttcctgcaataaagttagaaaacatttttgaaaagtcactcataatgtatctgtaacttattattttaaattaaggaagaaacacaatttgaaaccattttctcatgtaaataacacgcagccaccttctctgtctgggtaggtagggaggattcagctaagcatcaactggttacatgtgctatgatttccaacagataaacactggttctatctgaaaacaatgacctcatgcttttcttcctacaaacaagtcaagttaatacaaagtcatattcatttcagaaaacattttcaaaccatttttgttgttatattttaaggacctttcttctcttgttcaaacagtcctgatattrtaccaaaatgtagcatttgcccttttataattattttacactgtcagttttacatcaactaatacttattatcaaacctaaatattcaagattatcttaaaatgatgctatatttgtcaaattatccaat

SEQ ID NO: 857555 - DNA, 446 bp, Homo sapiens
ttgtcattgatttatcaaatactatacatatgttggctaattgtaagaaacaaaagaaatggatcattgtctggaagctataactcccaagttaacttcagaccaaatttttataattttattgcatatatrtgaatgcaactgcaagaattaataataaaatatttcaaaataagatgaccaaaatgaaattataagttaaggtagacagaggttgaattacataatgtaaatcctcttcagattttcacaaaaagaactaagtgctgtgggaaaagaggtgtactgtttccccgtaattgcattgtgtcctaagcaattcttgatgaggtaggtttgcagccaagaaggcaagttgagctttatttacctcttttcaatgggtgctatctcttggatgtgctcagaccctgagaagcctatggtctacattttttattttaagt

SEQ ID NO: 857556 - DNA, 623 bp, Homo sapiens
catcactagtcatcagagaaatgcaaatcaaaagcacaatgagrtatcacctcataccagttagaatggcaatcatttaaagtcaggaaacaacagatcctggacaggatgtggagaaataggaaagcttttacactgttggtgggaagcattagttcaaccattgtggaagacagtgtgacgattcctcaaggatctagaactagaaataccatttgacccagccatcccattactgggtatatacccaaaggattataaatcatgctactataaagacacatgcacatgtatatttattgtggcactattcacaatagaaaagacttggaaccaacccaaatgtccatcaatgatagactggattaagaaaatgtggcacacatacaccatggaatactatgcagccataaaaaaggatgagttcatgtcctttgcaggaacatggatgaagctggaaaccatcattctgagcaaactatcacaaggacagaaaaccaaacaccgcatgttctcactcataggtgggaactgaacaatgagaacacttggacacagggcagggtacatcacacaccagggcctttcagggagtgtgggggcctggtggaaggatagcatta

SEQ ID NO: 857557 - DNA, 618 bp, Homo sapiens
ttagtgtttgtgctccttaattttattggttgtgaaacaaagaacttggggtgatgactcaggcaacgagagactgctacattgtggtgcattggcaaggctgtaaccctgggcctattgagtgtaagctctgtgactttcatctgggacaattcagggcttaacacagcagactcttggtgtttgttaagtgaattgtgcatccctcaaattattcttactctttgactcactaatctaactcttttgaatttattctggggaaatcattcaaaagaataaaagaattgaaggtatccatttttcaaagcagtattactaataatgaagaaaaatcggaaataattcacacatcaaaaaaaaggagaatggttaaataaatcatgatatagcagtggtatgaaacattataccatagcgaaatatgatgattctgaaatctatgtagcaacatgataaattaatagaatgtaatagataaaagcagagggctgaattgtagatgcactatgagttactgctctaaaacatgcagcatatgggcaggaaactcaaaagatgaaaacagttgrcatgttagagggtggaacagtgggcgtttttttttcatttattgtt

SEQ ID NO: 857558 - DNA, 588 bp, Homo sapiens
agtatacatgtttttcctttttagtactgaaaagagaataatgccattaaaaaagaaacaacccmaacccacagattttaaaacgtgtctcatgggccagatttttaacaatattctttcttgaaatactgttggtgaatatccttgcagtgtttcataagatttgaattcatttattttttttgaaattttttttttattctccatatctctctacaaaataacaggggaatggatttttcaaagaggggaaatatgaaagagcaattgaatgctatactcgagggatagcagcagatggtgctaatgcccttcttccagctaacagagctatggcctatctgaagattcagaagtaagtattggttacattttagtgctgttcaggataaaaatttacaataaattggtaaatttttaccataagttacctaacatgccaattatggcgtgttaggttagctcacatgccaatttatggtaaatttaagtaagttaaaatttaatttatgtatttttgagcatttaaattaaagtgaaatgagaggggaaaagtagtgtgtgtgtgtgtgtgtgtgtgtgtgtgtg

SEQ ID NO: 857559 - DNA, 588 bp, Homo sapiens
agtatacatgtttttcctttttagtactgaaaagagaataatgccattaaaaaagaaacaaccccaaccmacagattttaaaacgtgtctcatgggccagatttttaacaatattctttcttgaaatactgttggtgaatatccttgcagtgtttcataagatttgaattcatttattttttttgaaattttttttttattctccatatctctctacaaaataacaggggaatggatttttcaaagaggggaaatatgaaagagcaattgaatgctatactcgagggatagcagcagatggtgctaatgcccttcttccagctaacagagctatggcctatctgaagattcagaagtaagtattggttacattttagtgctgttcaggataaaaatttacaataaattggtaaatttttaccataagttacctaacatgccaattatggcgtgttaggttagctcacatgccaatttatggtaaatttaagtaagttaaaatttaatttatgtatttttgagcatttaaattaaagtgaaatgagaggggaaaagtagtgtgtgtgtgtgtgtgtgtgtgtgtgtgtg

SEQ ID NO: 857560 - DNA, 609 bp, Homo sapiens
acacatggccacagggaaaatactacattttccagccatctgagcatctgtatgtagctgtatrttgcaggttggattattactattactctgagagggagtttggagggtaagggcttattatggggtgactcaccatccagtggtgcctgcactgttctgagattcaggaggctaagttctaatattagttctccccctcacaagctgtgtagtcatgaataggtcagttcacctctctggacccagttttccaatggcaaaatctggaagagttatgcattctataagattcttaagagttttaagcagtaccttccatttcattggaagggcacagtaatgatgatgtgactgcttatgcttgtataaatacttcattactaataaaatagaaaatagaaaacctcagtcttcatgagatccctatgcagtagaatgacaaggagacattccaattttacaattaagaaagtagatttggagagcttaagcaacctacttaggaacacatgatagtcaaatttgcttcagtaatatcatcagactagaagtatcagatggttccttcaccctggtatccagtggctttggaaatagtctttgctt

SEQ ID NO: 857561 - DNA, 594 bp, Homo sapiens
tggagccctcatgaatgggattagtacctcataagagagaacccagagagctccctttccccttttactgtgtgaagttacagtgagaagacagcaacctgtcaaccaaaaacgggccttcaccagacatggaatctgctagcaccttaatcttggactttccagttgcctgaactgtgagaaataagtttttgttgtttacaagccacccagtttacgatattttgttttagcagtctcaacagagtaaggcaaggggtctcaattaggcattatgtatatttggtttatttgttaagctgactggtgggtgtacggggtttgatgttattgtgtatatctttatgtatctaaaatgtttccaaataaaaaataaaagtatgcaatggagtttgtaattagcaatcttcactctaggctggagcttccaaacaaacgtctgcttctgtacttgagggtctagactccagtgccagacttcttaggcaccaagccttactccaacactcatagctgtgtgacatgcggcaagtctcttaacatttctrtgcctgagtctctccatccataaaatgaatcttcctaaatctcaag

SEQ ID NO: 857562 - DNA, 632 bp, Homo sapiens
ttttttgtcttttttgcctttatagacaggtgataaagcgttatttctaaaattcagttatatataaatgatgtagaaatattagtgcaggaaactagattctatagagaattcatttctgttgccgygttaaagaaaaattcatgattgtttataatttttggaagaaccgtgttaagatttgtaaatcgtgctgactaaatatagctctaaaataccttaatttatactttgtccttaaaagcttttactagtttgtaatctagatctgctttctcctaattctggagtttgaatttctagtaaattacaaggcaagaacccatcccacacttcagtttaaggttctgttgttctgtttgtatatgcagatttagggaaagaaagtctcacattaactatcttcataatttgaggtacaactctattattgagtacacagcctttcattttccaagtggtagttttctttcagtccctaccttgggtgttcagaaactcttgtttggtaaaatgccagtaaattacagatgatttaatgtatatatcctctcatttaagaaaggcaagtcaaattacagatccaggctttgcctcctccaaatcttttccctctctcactttaatgtagt

SEQ ID NO: 857563 - DNA, 616 bp, Homo sapiens
gataggggtctggttttatgcttctgcatatggatatctatctagtttgcccagcatggtttattgaagaggctgtcctttccctaatatatgtttaaagaaaggaaatgcatcagagaaagactaagtgaaggtaaattaaaaacttttacttttcttattcttattcataagattattgaaaataatggaaacaatgtattgtattatattatgtgtatatactacgtataagataaatgaatggtaacaatgatataagggatgaaagacttagaaataacttatcataaagaactcttgctacccattaagaagtacagtgttatttgaaaattgacttcattcagttcattgtaaatgtatattgaaaattcttgaacaacaaataaacaagttaaagaaagataactgatatactaaggaaagaaaattaaatcatataaaatgctcaattgaaatcgccaaagacagaaaaatagtgaaagacaaaaactgaaataaagaataagggcaacaaataaaatagttacaaatatagtatatatattaatcyattgtatcagtaattacctgaaaattataattatctaaatagctcaattgaaaggtagag

SEQ ID NO: 857564 - DNA, 490 bp, Homo sapiens
ttatctctaccatcaatggaggtaatgtggcatcaacgctgacctgaatgctattatagagatatttgagtataatcacacttgtaaatgcctgtctggtattgtttagtatatgtaaaaaatattaatatacttaattttaggaatattactttatgatattcagcttaaaattataaaagtgtgcattgagtcacaatttatcctctactttgaaatttagcttctattgtggatgctagtgatttgtttattgcaaacagtgcatttcagtaacagtttcaacatgttccaaatgtgcagcatatacagtttttgcaatgtaattagttagaaattggagatgcttaattttaaaattgaacagttcatgaaaatctatttccattctctgtatggcttatgcagtttctcttcataaaatgttctatagctgcttgaagaaattaagtktagttaatcagaaagaacattatgttttgacacctaa

SEQ ID NO: 857565 - DNA, 558 bp, Homo sapiens
ttacccctggttcatagcgcttaccttgtycactcctttcaatcaccaacttatattttactgtctattacaataatcagtgcattatgtatatgccagtcttttttttttcgcttaaagaaacatttctggcaaaacacaagtcatggtttaatttacttttctcctctttctccacatgcagtagcacagctgaatatagctgaagaaaatcccacagtaattttaagtggtctgtatttaaaattatgttccagaacataacgtaaattctttctgctgcctagaactcatcctaccttttcttggttcattttcttgaccactgttttagataactacttcataaatttttatctattctcaaatttacaaaactcctctatcatcaaaaagctcagctgatgattcacttcctcttttactaattagttggaaacagaagaaaatcttaataaatcctgactactacacctgcaaacatacccagtggaacctgtatgttaccatgaatgaaatatctgagttttcatgtggagtctggatttcatccactct

SEQ ID NO: 857566 - DNA, 558 bp, Homo sapiens
ttacccctggttcatagcgcttaccttgttcactcctttcaatcaycaacttatattttactgtctattacaataatcagtgcattatgtatatgccagtcttttttttttcgcttaaagaaacatttctggcaaaacacaagtcatggtttaatttacttttctcctctttctccacatgcagtagcacagctgaatatagctgaagaaaatcccacagtaattttaagtggtctgtatttaaaattatgttccagaacataacgtaaattctttctgctgcctagaactcatcctaccttttcttggttcattttcttgaccactgttttagataactacttcataaatttttatctattctcaaatttacaaaactcctctatcatcaaaaagctcagctgatgattcacttcctcttttactaattagttggaaacagaagaaaatcttaataaatcctgactactacacctgcaaacatacccagtggaacctgtatgttaccatgaatgaaatatctgagttttcatgtggagtctggatttcatccactct

SEQ ID NO: 857567 - DNA, 527 bp, Homo sapiens
ctctactgaactccagtcttctatgtccaatgacttaccagacagcttcacttggatattaaataaatctttcaaagttaaaatattcagttcaatactgtacttctttttccccttgatttgcttctccctcaatcatcccattctcattaagtggtgtctttttctgtttaggaaaatgcttgaaaacatctttggcttttatttatttttattctggctagaaatacattttttaactgttacttttggttcagacatacacgtacaggtttgttatataggtaaattgtacattgtggggtattgaagcacagattatagaaattcatatttttagcaaattttattagccctactttaaatatatccataattcaattacttttcaacaaccagctgttactgccttggccgaaaccatygttacttgcctgcgttatttcagtaacttttttttttttggatgggttacagaccagcgtttgctttatttgaacagagtttgaacacaacagtgagttctt

SEQ ID NO: 857568 - DNA, 597 bp, Homo sapiens
ttactcgatagagaaataatgccattaggaatgaggcaaacagaatacctatagaaggcatccacaatggggtgcatattcttttgtgtmtctgcattgatcttgcattctgcctatggtccctatttacctgtccatcatcaggagaaccacatgaccccactgtcttctgtgcgtattcttgcttctctcatatctttcttatgtcctcttagggcatctgcctggaattcttccctcaacaccacccttctttcactatttacagatcacaatccacactttggtttgtcaggaaacatacctaccccattcctccacttactcctagaaagatatagtttgcctacctggtgcttttcacatttatttgaattgtactgtaaaattagtatctatcttgtttgtttaactttaatgccaccaagggtagaaactattacagtttgctcagcactgcatcgcagtgcctggttgcttattgtaaaataaatgcgcgtgcacacacacacacacacacacacacacgctctgacacaaaataattgttgaatggttaagtgagatgatccatcaatctcccaaaaggccaaagga

SEQ ID NO: 857569 - DNA, 588 bp, Homo sapiens
tacctgtccatcatcaggagaaccacatgaccccactgtcttctgtgcgtattcttgcttctctcatatctttcttatgtcctcttagggcatctgcctggaattcttccctcaacaccacccttctttcactatttacagatcacaatccacactttggtttgtcaggaaacatacctaccccattcctccacttactcctagaaagatatagtttgcctacctggtgcttttcacatttatttgaattgtactgtaaaattagtatctatcttgtttgtttaactttaatgccaccaagggtagaaactattacagtttgctcagcactgcatcgcagtgcctggttgcttattgtaaaataaatgcgcgtgcacacacacacacacacacacacacacgctctgacacaaaataattgttgaatggttaagtgagatgatccatcaatctcccaaaaggccaaaggatttaatgactctaaaagtgttccatgacacagtagaaagaatagaaagttttggaatactggccacctcaaatrtgctgtgaactctaattggattctaaatttgacaataaacgtct

SEQ ID NO: 857570 - DNA, 658 bp, Homo sapiens
tttatttgactgtgtaactgtgcttccaataacattttcmcgaatgtaaaagcctaaatatattgtataacaaagaagtatatataattacactaattccgatagattattggtaatctgttggggatagtcagtagggatgaattactatgtttatattaacttaatttgacattttaaaacatctttgccaaatgtcaacattcatatctgaggaaatgctttaatttttgcttactctgtgccataacttttgcctctatgtaaattaccaatttttttttggtgtttttaacagtggtattaacttattaaataaaaaccagttgaaaatatgtttctgggtgaatatttaaaatggcaaaacatatgtccaaaaatataagctggtaatttattaccattttagttcacatttttctaaattggccaagcaaaaacaatgatatttagtttaactgaatgtttcaggtataacgtgatcaacgttattgatactaaactaaaaaacagagtgatatgttttaaattcttttgtggaattcattagattttttttgtttcctctgtgatccatatgtgcaaaaacgtaatcatgtgagaatgaaaaggaatagaccatttaaataagtttgaaatcctcatctaaatatgtcaa

SEQ ID NO: 857571 - DNA, 658 bp, Homo sapiens
tttatttgactgtgtaactgtgcttccaataacattttcccgaatgtaaaagcctaaatatattgtataacaaagaagtatatataattacactaattccgatagattattggtaatctgttggggatagtcagtagggatgaattactatgtttatattaacttaatttgacattttaaaacatctttgccaaatgtcaacattcatatctgaggaaatgctttaatttttgcttactctgtgccataacttttgcctctatgtaaattaccaatttttttttggtgtttttaacagtggtattaacttattaaataaaaaccagttgaaaatatgtttctgggtgaatatttaaaatggcaaaacatatgtccaaaaatataagctggtaatttattaccattttagttcacatttttctaaattggccaagcaaaaacaatgatatttagtttaactgaatgtttcaggtataacgtgatcaacgttattgatactaaactaaaaaacagagtgatatgttttaaattcttttgtggaattcattagattttttttgtttcctctgtgatccatatgtgcaaaaacgtaatyatgtgagaatgaaaaggaatagaccatttaaataagtttgaaatcctcatctaaatatgtcaa

SEQ ID NO: 857572 - DNA, 613 bp, Homo sapiens
agacgacatgcaatgaaatccttcckgttgcagacaccatgcaaagcaaagggaaagttaaacaactgttcctcaaaagaaattttgaatgttaatagtaaataattgattttttttttttggtttaaggacaaaaaagctataatttttaagaattgttattactgccaagagttaatactggcgagtgccactttatgacttagagttgcttggtttctggttacaatttttagtagaggcaggtttcaccatgttggccaggctgttcagggactcctggcctcaaggatccacccacctcagactcccaaagtgctgggattacaggtgtgagccactgcgcccagccacaattaataaagtttgtttgaacatattataaaatgtgtttaacacatggtgccgatattgtcaaaattaaaaattagaaaaatacactgccattattatactaaaatatgactgcttatgtcagaatatcatacaaagttctgttacttaaaagaaattatttacaaattagaacttttccaagaagtatgtatttacatattgtggcatttcacaatacagcacacttaaaaataattgatacttaaacatgttccta

SEQ ID NO: 857573 - DNA, 595 bp, Homo sapiens
gagagaaagcagtaaggaagaatgctctaaattcatctactttatggtcttggaactgatcagcagccatgttaattaccgtaactcttaaacaaagggtattgctttgtttttctttctctttcatttctttcttctacttccccttacttccttctaatttcacttttcttctactctttttctgtttctgtcctattgctatcctttccttcccaatatttctcacccacatccatcctcaacacacatattattttacattatcggagttaggatgtttgacagctcccttacttggccccaacacacacttcttagtttctaatataagaagataaacctccctctccccagtgttttcaggtgactgtgttggcaagaacaaaagtacaaaattatgtttaatgttaaggttcttaattttatgttcatttctagctttttagactagtgagcacgaatgtaaatatatctatagttattcttgtcaccwcctctttttgttttatggtttctttgttgtttgtctgttttacgttttattttgttttgatcatactgtgcattacttttcagaagttcaactgtcatt

SEQ ID NO: 857574 - DNA, 545 bp, Homo sapiens
gattcattctgtctcattggcaaawtcaacctcttaagagaaaaatggattgtactccctttgcctggaatgacagtgccaggttttgtagaaagatggaactgaatctaatcctaactctcttataaaatgggatttagaataataggcccaatacctgtattgccgcttatggctgtcttgagaattaaatgaacacaagcactcagcatgctgcctggcatatattaagtagctcaaatattcttagttccatcttccctactacctaccatcaaatgttcatctacagatataagaggcctagctcaaatgtcattgcctctgtgttgttcttgctcctctgccgtgctctgtatgtctttcttataaggggtctcattccattatcaaccagtcacttgtgcatctgtattacactcacctttaggctgctcaggtgcaggaaacactttatctgtcctttgttcagcaactagcagtcaattacacattgtaagaattctaaagtgtgcaaaattaaaatgccttttggtgataaaaca

SEQ ID NO: 857575 - DNA, 570 bp, Homo sapiens
agcagcttctaaactaagcatgcagtttggaagggagatgagcaaatgcaccttgacagaggtgccagctaatttagtttgaaagaaatgaaaaggattgagattttcatgtgaatttgaagcatgtggggccacgaggcatgagaatcaagtcagtctctctccctcagagccctggcagagagcttcagtggacatggttgctcaacctgtttcctaaagagcagttgtattttggaagactttaccaccgctccctgcagtaagcatgaagctgttgctggcctggagcctgaggggcttgtgaatcgggccctgtgtgttttgcaccatctcacagatgtgcctttgtgaagggcgggcagctccactctggctatgaagggcccccctccaaaccatttgctttggatctgaaaccccatttagatggttcttggagttggggtgaggaagcaggaagctgaaagagaataaacccagcaaaagctcagaacaaactgcaggttttggacaacaacctrgagtatactcatggggttggggttcagcctccctcccgcaccccaa

SEQ ID NO: 857576 - DNA, 690 bp, Homo sapiens
ctcccacgttctatggttccagtgtggaatgggaccctcttccctgtccaccggaacattctgtgcctttattaaagcacttggagctggctgccttgttgcagagtgattttcttgcaaaaatggattgtcaaatgaatgaacgaaggaaggaaggaccagcaaatggcatagagggagtgagagattggggtcaggacacctcacttcctattccagttccacaattgctacatgtgtcacctacctcaagtttcttaaacactgaacatctttctctatatctaaaaggggataacacatattacatagggtagttgtaaagcttaaatgagacaatgtacaaggaagttttttgtggattttaaagggaactagtattcacatcctattactagctgctgggcactgtactagacaatttgtgtacataatttcattaaaaaattcatttccatatctctgatggaacctggtacagggctctacatttataaatgcatttgcattcatcacacctcagtattcttatctataaaatgggggtagatcagctctaccctatgagactattgtgatagctaagtaagaaaagagaagttgtacttattctgtacccccatttctaacagagcgmctggcccatactaagttcttattttggatcctaagcatagagttattctctgt

SEQ ID NO: 857577 - DNA, 601 bp, Homo sapiens
atataaatgagacagggagaccaattggaagactgtttctttagccagtgggattagatgaragaagagaacctacactaaagcaaatgccaccgcttttgtataaaggagggaagacattccaggacattataggctggttctattgaccacttgtattttaccttgtaagggagaggcattgagtttcgaccttggagaatagatggatggtgatatcactaattacattgggaaataaggaggggaagttagttgttgagctgctaatggaacttcccagtggaagttagttgttggcagttactaataggcagatgggtaagtaggtcttgacttggagatagctctgaatttgagacagttacctggtggacagcatgagtgtgggtgtaacagagtagcaggtggagcttagagtacctgaggagatgtatcaaccaagaagcaaggagttaaggatggagccccaacgttcagaagacagacgggaaaaagtagagaaaacttaggaagatgattacaaagaagctgctggcattggtcattaggaggtcactggcgccctcattgggagcagtttccacccattggtgcaggc

SEQ ID NO: 857578 - DNA, 513 bp, Homo sapiens
ggatttggataggaagaaaggaaaggaaaaggcactgaacaaaaatccaagatgagaagctgcttgaagtatgcgggaaacctcctgagactggctgggaatgagagcgggkttcccatcctggttctgcagccacccagctgtgagaccttgagaacatcagttatcctccctgagccttggaaggattaatgacacaatgcaatgtaccagcactgtgcctgacttgcaataggctctcatattactttgtttaatttgtacttttagtctgaatcccaaagcaagggtatattgactggcttggggttcgaatgaggaagctttctggagggagtcagagccctaggcccagacctgtagttccaacagcctggttattgtcagtctcaaaagactgttcagagaggagaaatatttacaatagtaggcattgtgatttgcctaaaataaagctgctttgagccttcagctcaaactatgggaagtctcttttgtccttcattactggca

SEQ ID NO: 857579 - DNA, 596 bp, Homo sapiens
aacaccagaatcaggatcccctgggcttcaccgcaggcctactgagtcatattttctggagaaaaggcccaggaatatgaatgttcccctggcttcccaggtgattcttttattcaacagtatttgagaaccatctgtaaagtactatgtctaaccccttgccacttaaaatgtggtccacagcagcttcagtatcactgggtgatggttggaaatgctgaatctaaggtccacccagacctgctgaagcagaatctgcattttatcaagatcctcaggtggttcactcaagtctgagaagcacggtatgacctattggccctaaaatacagggttaagaggaagtgaagacaggtgtccacatttaggtgagaatggcagaaccaaagggaaaagaagaccgtctccctaattatgagaagacaggttagcaagctctgacaagccaagggttggcaaagatgcctcactgtgcctatggtttattcctctaagatgtgtatcctaattaaaagtggctttcttctggggtttrattaatatcctttcatatttatgctaagttattaaaaataaggaattctgattgtaaaagc

SEQ ID NO: 857580 - DNA, 640 bp, Homo sapiens
gattctctgggtccccatgtcagctgcagggggaactggatgagcagggcaccgcttctccagaaccctagtggttccctacgagccactgtggcccaagttctgcagtggctctaaaccatggaacctgtgctctcccctcctagcggacccccccttcagcgcctacccagcggtgttgggtgcagcaggcacgggaatggtggtagcaacggtggcctctctactggtgttccagtatgctgcccggcacccagagactttcccccgtgagtgggaatcggaagggacgggctgcttgaccccacagggtggccaggccctgacctatccaaaggagagatgcagcactcccgggggagaagaatctaggctcttccttaattcagaccctctccccagtgctagatgttgccatgcagggctctaacccccaacccaggcacctggggccatccccttctgggttcctgaggccctagtacagagcccactgggaaagagacggccattctcctgggatctctgctgggctggccaagtaatgctccttttcttttccttcctacaggccttggtcaattgcttgttcccacgtgagtgtggaaccccaktcatcctgggggccagggctttcctc

SEQ ID NO: 857581 - DNA, 493 bp, Homo sapiens
atgtgtctctgtgtattacttttatttcatttttcaaccatttaaaaatggaacctgggtcagtgacatktgctgtcatcccagtactcaagaaactgaggcatgaagatcacttgagccccatagtttgagacccgcttaggccatatggtgagaccttgtcttaaaaaaaaaaaaaccaacaacaataaaataaaataaaagtggaaggaagggccatttttagcttgcaggctggatttggtctgtggcccataacttgtcaagccatgtccttctatggggtttacagttcatataattctttactaagtcatttgcagtctaaattgttattttttatatctaggtcttgtgtctttaattgggttgtgagttttctgagggaaggcacctcatacttgtttgtaaatgctctaaagaccaagttcattggtgaaaagcaagtgtgataaatgttgattagaagaatcagttttgcccacgatgatct

SEQ ID NO: 857582 - DNA, 493 bp, Homo sapiens
atgtgtctctgtgtattacttttatttcatttttcaaccatttaaaaatggaacctgggtcagtgacatgtgctgtcatcccagtactcaagaaactgaggcatgaagatcacttgagcccmatagtttgagacccgcttaggccatatggtgagaccttgtcttaaaaaaaaaaaaaccaacaacaataaaataaaataaaagtggaaggaagggccatttttagcttgcaggctggatttggtctgtggcccataacttgtcaagccatgtccttctatggggtttacagttcatataattctttactaagtcatttgcagtctaaattgttattttttatatctaggtcttgtgtctttaattgggttgtgagttttctgagggaaggcacctcatacttgtttgtaaatgctctaaagaccaagttcattggtgaaaagcaagtgtgataaatgttgattagaagaatcagttttgcccacgatgatct

SEQ ID NO: 857583 - DNA, 620 bp, Homo sapiens
agaactctctaggttaactgacaggatcctccagcgctgagagaaccccaatcagctgttgacctcctrgaactgtgcaaacactatatgatttaatatatataagcaaagtagtgatgtacacatataaacgaaaatggagattcattaacctcaatgtcttgataaaaataatagggtatctgaacttcagcaatgggaaaggtagagtgttggggaggaacttaactaaagatagattaagacagcagagaccatagttggtgactcattaggatactgaggcgatggagggcaatgacgctatttctgacttcaggacaaagtaccaactcctaacagtggcagtgtcggctcttcctgaccttgcctgcctgcctcaactccctcatatttgatattccagctatactaaattctcccttccaatacagtgctcctccaagcacccaggcattgtacattgaatttttttttttttgcatgaaatacccttctctagctgaaaaacttctacttaccttttaagaccctaacatgtccacacaataacagttttctatactcctcgccccagcagtttaatcccagtcatttatgcagacaaagtgtgctgctca

SEQ ID NO: 857584 - DNA, 612 bp, Homo sapiens
atggttagtataccactaacaacaaaatggagtctatggtaactcatgatcacactttttaaaagtgtatcataaaattccctgtcagtttttcaagtgtatagtaaaagtgaaataggtcacatcagaatacagaattatgttctgaaaaacttgttcaatttggctaagtctcataatctcatcacttacataaagtcacagattctgcatcaataactctaggtgtacaatataatattgtctgtgcacctaaaatatcagatatacgtgtatttatttctaatgatgtggctactgttcaaaaactagtgactgctgacagggcacggtgactcacaccttaatcccagcacttgggaagcctcagcaggcggatctcagaagttcaagaccaatctgcacaacatggcgaaaccctgtctctacaaaaaaacaaataacaaacaaacaattagctgggcatgcctgtagtcccagctacttgggaggctgagatagragagctgattgagctcagaaggtcaaggctgcagacagccgtgatcatgccattgcactccagcctgggaaacagggcacgaccccgtctcaaaaaaaaaaaaaagtctg

SEQ ID NO: 857585 - DNA, 545 bp, Homo sapiens
tgtcatttgctgtttctaaaatttagctttcggacctccctaaagggaagagctgagaaggaacctgtaagtcctgagaagtcgtggaaaccactaagttcagtaaccgtggaaacctgcttgctcagagacagggacaaaggggcagcctctctacgagagggaagtagaggcagacttgatgcaaaagcagcagcttcaagtacatgcctgggaaggtcccttcatgctgagcttcgatgtgtcaactaacaggaagacataaaaatctggaaatgtaaagtcctgggacatttcaggactttctggtccaatgacatgttaagtgggaaatgctgtgccccattgcttagactctaaggtttagcacctccccgttggctttagaagctcatctcaggatcaaaacayacagagacttagactcttggtgctcaaagaccaggggtgttttactgagaggaatgcatcacacagaaatgctggtctcagacacacagcttctctgagacctgtttttggactaccaccagggcatgccagag

SEQ ID NO: 857586 - DNA, 587 bp, Homo sapiens
aggcagaagttcaaaaatcacttacctggaaacccaggaatcccaggagccccctgctgtccaggaaggccagggagccccgactgtcccgttatgccagggagtccttgagcccctttatctcctttagggcccggcatgtccagtccagggaatccggggaaacccttctctccttttattccaggagggcctgcagttgggtgaaacacaaataacttttagcagaatttacagaatgatctacaatgtacagtgctctgtttaactatgactttctgcagaaagcccgtgagcacgcccacactgggaacttgaatggatcatctgttaggtgttggtgtttggggtcatcaggataatcaaatggctcttgttctaaaagaaaagcactcccctttcctgtcattgagagtcagcaaggccaccctaagcaccaccactgccttgtcrcagtacttaggactagggctagttttgctctaatttccatgcaccaccttaattctatgattattatgatcaaaggcaaagctaggttctagacatggactcaattagttgaaattatccaccactaattaacc

SEQ ID NO: 857587 - DNA, 585 bp, Homo sapiens
caataaaggaaaggtctctttgtttggcacatcatctcagtgggtgggagaagaatctgggactacatttaagcaaacaatcaaacctattttcacaaactcgagttttatttttttctctttttatctcatacattgtgctaagcttcactttatagggaccccggcctcatcccccatgcttcagaaaagcatgcttttgggaacagataattctagaagcatgtcactcacctgacaaccccggtggtccctgtcctccagggggacccctagctccaggggggcctattcctggaactcctggagaccccacggagcctggcaatccaggaggtcccggttcacctggagaagaaaaattgagagtaagctgtacaggagcagtggcacgtctcccggcctaggagacccacgcacacgaatggccccagcaacggaaagccacgagctctaggcctctaagatttgcatcgttcgttcaacaaatacatatcaratatactcggtaggggctctgggaatgcaaaaataagcacatcctgtcctcgaaaccctccagactgatctgcatgaagttacctc

SEQ ID NO: 857588 - DNA, 616 bp, Homo sapiens
aagctgattccgccatgtccaaattaagagcgaccacaactgtgtaaagtttttactaaattattatttattttcamacctcaatatagttgttttttaaatgattgcctcggagagacagcccccaaaacttactggtggtccggtaaatcctggaggcccaacaggaccttgaagccctggcagtcctggtgggccctagaatgcatgagaaagaaatgagttcagatgcgaactgggagggtgaggtggcacatgttcataatgattcagcaaatgcttactggagtccctgggattccgggaaatcctctttcacctttcaacagcatcccgggcacatggccaagtatctcacctggatcaccctagaggatgaagaaagaaaatagaaagttgcaaatatcgacattcatgtaaagaagctgaaaactctttgatagttggcatatattagtgttacaggactagcctaagtctgggatttagaccccgtctacactggaaatcaatagcctggccatctctcccatcatgattgccgtcttaatggccagcgttaaccactgcctggtcaactgagccgcagccgggactgaatgtagagacggcaaag

SEQ ID NO: 857589 - DNA, 616 bp, Homo sapiens
aagctgattccgccatgtccaaattaagagcgaccacaactgtgtaaagtttttactaaattattatttattttcaaacctcaatatagttgttttttaaatgattgcctcggagagacagcccccaaaacttactggtggtccggtaaatcctggaggcccaacaggaccttgaagccctggcagtcctggtgggccctagaatgcatgagaaagaaatgagttcagatgcgaactgggagggtgaggtggcacatgttcataatgattcagcaaatgcttactggagtccctgggattccgggaaatcctctttcacctttcaacagcatcccgggcacatggccaagtatctcacctggatcaccctagaggatgaagaaagaaaatagaaagttgcaaatatcgacattcatgtaaagaagctgaaaactctttgatagttggcatatattagtgttacaggactagcctaagtctgggatttagaccccrtctacactggaaatcaatagcctggccatctctcccatcatgattgccgtcttaatggccagcgttaaccactgcctggtcaactgagccgcagccgggactgaatgtagagacggcaaag

SEQ ID NO: 857590 - DNA, 627 bp, Homo sapiens
ggaaatattagtccctaatgggaataggaattcataaaacaggctcaatatggttattgacataatcagcacacttgcgagccagaacggcatgctgtaattgctccaacgtggttattrttgggtatttcaaatatccagctactttatttatttatttatttatttatttttgagacggagtctcactctgtcacccaggctggagtgcagtggtgagatcttggctctctacaacctctgcctcccgggttcaagcgattctcctgcctcagcctccagagtagctgggactataggtgcctgccaccatgcccagctaacttttgtatttttagtagagatggggttcaccatattggccaggctggtctccaatgtctgaccttgtgatctgccagcctctgcctcccaaagtgctgggattacaggcgtgagccaccgcacctggccccagctactttataaataactatgttttttaaggtttactagttagatatttttaatcaccttaagtcctttcactcacttttacaacttttgaatgtttcctagcaacgcgcatttacttccctcatctacacacaaggcattcctagcctctcctcttctcattccgggatt

SEQ ID NO: 857591 - DNA, 578 bp, Homo sapiens
aacattgactttgtcaggagagcaggctccttgtcccacctgcgcctgccagccatctcgggaaagctgggtgttgctccttggaccccccagctgctgtccagactcctggatgaaccaaccacccagacyaggccactaacacctgctgactgcccacctgacagccctacccccaaaactgcatgatggtgaatacatggattcggacagtaattacctgcattatggagagcttaccacgtgccacgcatctgctaggcactccagatccatcactgcatttcatccttccagccaccctgagagaggcagaggcattgaaatcaccactttacagaagaagagatcaaggcttatagccctctgaggtagccacatctaaaaccaagcctgaatttgcgaccttcctttagacaatgcactcctgccggggccagcccttcagaggggtcttttgcccgtagctcaggcctcatactccccaccacctgaggctgaggctgttctgcagaactgggggtgggacacaggctcagtgagggagagagaggagtgggaagttgggatagtaccca

SEQ ID NO: 857592 - DNA, 556 bp, Homo sapiens
ggatcctgtccccctcctctaagccacccctccctgccttcctgcccttttctcttcctcttcttcccctttccctttccctctgacaagaaggagcatcagtctgattcagcgcctgagaccaggggaccctgctgccatctgcagaggggaaaatgagcctcatcgacccaaataaaataaggacacacagggggagaggctgctacaaagaaaaacaaggcgtgggtttcggaggctgttgcagggaagcattggggtcaggaggcacagaggcccctatgttagcttactccaagcctcagatgggactggtggcctcttcctccaccatggtcaaatgcaagcctaagagggggcctgtaaatagagagaagcagatgacagacatcaccacatattaaaatgcaagcgaccggagcgggctcctgccgactctgcagtgcgccttggagatggctgctagacccggttggattcgatgcacgggcagcccgtcctcctgtcrcccagctatttatttattcaaaacaaacacatgctcaaactctctttt

SEQ ID NO: 857593 - DNA, 556 bp, Homo sapiens
ggatcctgtccccctcctctaagccacccctccctgccttcctgcccttttctcttcctcttcttcccctttccctttccctctgacaagaaggagcatcagtctgattcagcgcctgagaccaggggaccctgctgccatctgcagaggggaaaatgagcctcatcgacccaaataaaataaggacacacagggggagaggctgctacaaagaaaaacaaggcgtgggtttcggaggctgttgcagggaagcattggggtcaggaggcacagaggcccctatgttagcttactccaagcctcagatgggactggtggcctcttcctccaccatggtcaaatgcaagcctaagagggggcctgtaaatagagagaagcagatgacagacatcaccacatattaaaatgcaagcgaccggagcgggctcctgccgactctgcagtgcgccttggagatggctgctagacccggttggattcgatgcacgggcagcccgtcctcctgtcgcscagctatttatttattcaaaacaaacacatgctcaaactctctttt

SEQ ID NO: 857594 - DNA, 403 bp, Homo sapiens
caacaagagttgaaactctgtctcaaaaaaaaaaagcttcgtccctcctgggcccttgacatccacctgggtgaggtctttgtttcatgcctggtcctgggtagccgctcactaagtctgtggatcaaatgaatgagtgaatataaatgttcaaatacatgagcatgtgagtcaatgacaatgtctccttggttctggggctgcgaaggtcttcgaaacccccaaatacattctttgggactgacagacctggagactgtctggatggtgtgtgacaggagggtggcctggttkctctggggccaggctggggaggtggatacccccaggcttgactaaggagaagcctgtgaaaaccaggctacaggggttgggtactgagtcagccacggctgtgatggct

SEQ ID NO: 857595 - DNA, 655 bp, Homo sapiens
tgccatcagggagtttacattttagtgaggaaagggatcctacggtaaataccccagagatgtctcctgtcaaacaggagagaggctgagagtgccaaggagacggggtttgcaatttcaaataaggcgatccgggatgggcttcctgagaagagagggttgtgtaaaaacttaagtcagctgtcattattcccaaaatatgggacttgttttaactagaaaatcagtgtctgactttagtgattagttggttcaaccgctccattttgcagatgagaaaactgaggttagactggatggtgatgaggaggtgccttgcccacagtcacttgaatgggtagcagagtctggaaccgggtgttttgggttccaggcatggctagtgccccatctccgtgctgcaagggcaaagaagcccagacttcccacggcgcacactctgctagcaggtgcagtaaataaaaggctccatctcaaagagagatgatgagagacaccattaaatgtttctgagctgggctggtggtcagcacrccttcctctgtgcagcactcccaaacaagtggccataaaagctttatggtgactggacactgaatggcctgcctcgaccactgtgtcttctcagccactcaggcctctgcctcttcaccat

SEQ ID NO: 857596 - DNA, 488 bp, Homo sapiens
aagtccagatcttttgaaactacaagactctgttcttactgggatttctaccaggaaacacaacctccctgggagttcagagcattttctgatcagccagaacatgccattcttctcagggaaaaaaaaaaaagaaatctcagtaggacatgccaaaaggggtagacacatatgtgtccggttgaggaggagagagagagaagaggggagcccattgctaatggcaatcacatatttctatgtttgggtgaaattcaaccagagaggacattttggaaacagatgcaagatgatggataatcagcacgtccctcatttactgctcatggaacctgcattactatgttcacagaaagcaatggaagcacctattctaggggaaaagaagatgaggtgtgggaggtgaagacagrgatacagggaaaaagtagtgaaaaggagcaatgcaggtattttgttcaaaaatctagtctttgtgaacaaatatc

SEQ ID NO: 857597 - DNA, 469 bp, Homo sapiens
gtttggtttgagatgtgtaaaggttaatttttgtgtttagtgtgaggtgtctaagttaacttttttttgcatgtggatattcaattgtttcagcacaatttgttcaaaagactctctttcccccaatgaattaccttagtaattttgattaaattagtaaatttgattaaaattgatgatcaatttgccataaaggtaaaaacttatttgtgaactctcagttctgcttcatttatttatatgaccacacagtccttttttggtataaatttaaggtgtacaagtgcagttttgttacatggatatgttgcatagtggtgaagtatggacttttagtgtaatcattaccaaaatactgcacattatacccattaagtaaattcttatccctcactcttcttccactctccyacccttccaggtctccagtgagattccacattctttgttcatgtgtacacattattta

SEQ ID NO: 857598 - DNA, 436 bp, Homo sapiens
cacctccaacctctatggcttaggacagcaatttawttaactcatgattctatttgggctgagctcagctgggtggttcttttggacttgactggacttactcatgactgtggtcagctgcaagtcagctaggtagctttgctcatgggatctggctgttagctgaggaaatgagtccaggtgtctttacttatccagcaggctctccttggcttattcctgtagtaaatcagcaaacttacaaggactagagcagatgcttgcaagtagttttgaaacctaagcttggaactggaacattatcagttctgctgcattctttaggtcaaatcaagtaagaaggccaagagggtgaagaaatagattccatctcttgagaggaggagcttcaaagtcacattgcaagggcatggacccaggtagggaaagaacttgt

SEQ ID NO: 857599 - DNA, 620 bp, Homo sapiens
caattctcctgccttagcctcctgagtagctgggattacaggtgagcaccgccacaccctgctgattttatattttttttagtagagagggtttcaccrtgctggtcaggctgatctcgaactcctgacctcaagtgatacacccacctcagcctcccagagtgctgggattacaggtgtgagccaccatgcccggcctccgagcattttttaatgttcttatttgctatttatatatcttctctggttaatatccaaatcgtttacatgtttttaatagggttgttttcttaaagttgttttaagagttctatatgtgtgtgtgtgtatgtatatatatgtgtatatgtatatgtgtgtgtgtgtgtatatatgtacatgtgtatatatattcttgatacaagttccttatcaggtatgtgatttgaaagtattttttcccagtctgttgctgttcttttctctaacagtgtttttgttttttcccatcccctctagcagtgttttttgtagagaagttttaaattttgatgaagtctaatttttcagtttgttcttttctgggttgtgcttttgatgtaagaaatctttgcctaacccaaggttgcaaagactttctc

SEQ ID NO: 857600 - DNA, 609 bp, Homo sapiens
gaggtgggaggatcatttgagcctgggaggcagaggttgaagcctgggtgatagagtgagaactcgtctcaaaaaagaaagaaggaaggaaggaaggaaggaaggaaggaaggaaggaaggaasgaacgaaggaaaaaaaggaagaattaaaacaaaagaacttaaaaattttttaatcaaaagactaaaccaaaaaaacatgtatattcaaaatctttcaggttcctaattccaaaagtcaatgaacatctttctctcctcatgccccctgtgctctttatggcttccaaccccgctaactactcctgccctggctttccctaccctactgttagttttttatctatgtttctggccaattcccccttctcaataacttccactagatcttccttctataccagttccaaaaaatggcactgagtttcattctcgaccatcttcttacttattcaacacaaccttccaggataaatcaataaaatccagttatctatggagcacctgctctatgcaaggcactgtgtgaaatgctcatccatactcacggcttcaaccatctcttacatcctaataactcccaaacatttctcgaccttgaatgacca

SEQ ID NO: 857601 - DNA, 626 bp, Homo sapiens
tatagttcaggcattgggacaggtgctggggttacgaaagtaaagaggacacagtcctcccctcagggtaactgatctgaaagacttaatgsaacaagcacattcaaataaaaaaattttaaaacattttaaaataaaatgaatacaacttcaaatcaaaatatatttccaaaggagaatgatgtatttggatgaataataaaggaatagatctcaacaagcatgaaaactattgaattcccctttcactgaagtaagagagagatgagttataagcatatttagcaagaaccatgacatccttccctaaagtggtttaaagattccctcacagtttaaccagtctcaaaagccctcaaaaagagataggaagtttttacaaaggagacagctccttccttgctatagttctgaattacttcttttaacttctaaattatttgcaaaaagagataaaaacaaaagcagagaaggaaaaaagaaatgagattctgagaaaggggagaaaaaagtatttaggaatcagagaaaaactgaaaataagtggtataattctgaagttcctacatgtttaggtatgatgctctcagacagagtcacatattagagtaaagcagtctattaac

SEQ ID NO: 857602 - DNA, 568 bp, Homo sapiens
agtgtttaccatttctgttcaaggctcagggcttagtagctttatagataagagcagtcctgatgataaacctgactgcattcccatgaaacagtaaaattagcttatccttttctattttaaatcctkgtgcttgcttctatttcttactaacaaatggcctttttggcatctttttttctagactagaacattgtcacctgtattcaaaacctgttccagtagtatagtttctcttcaatgattttcttaatagtttctgggaaccaatctgctgcctcttgataaccaaaagctgcatcccctgatgtcttgacatttttaatgcaaaagcactttaaattatcaaaccatccttggctatcattaaagtatccacctttagatccttcccctttcttttcctttaagttgtataaaataacttcattttttctggaatcatattagagtctataaatatacctttcatatgaaaattctgccaccacttacacccttcaatttcaatacaagattaaaaattgtttcacaatagtgcaaggttttggcactggcaggcacagtg

SEQ ID NO: 857603 - DNA, 568 bp, Homo sapiens
agtgtttaccatttctgttcaaggctcagggcttagtagctttatagataagagcagtcctgatgataaacctgactgcattcccatgaaacagtaaaattagcttatccttttctattttaaatccttgtgcttgcttctatttcttactaacaaatggcctttttggcatctttttttctagactagaacattgtcacctgtattcaaaacctgttccagtagtatagtttctcttcaatgattttcttaatagtttctgggaaccaatctgctgcctcttgataaccaaaagctgcatcccctgatgtcttgacatttttaatgcaaaagcactttaaattatcaaaccatccttggctatcattaaagtatccacctttagatccttcccctttcttttcctttaagttgtataaaataacttcattttttctggaatcatattagagtctataaatatacctttcatatgaaaattctgccaccacttacacccttcaatttcaatacaagattaaaaattgtttcacaatagtgcaagrttttggcactggcaggcacagtg

SEQ ID NO: 857604 - DNA, 505 bp, Homo sapiens
ttgggaaatgttttattgactcagtaatgccactgtctctctacaagataactctggatgacttcctataacactttccttcacctttcttgaaactaagactaaatttttttttggcaccctgttgtttgtcacggaattccttaagaaactccttaagtatttatttattgactttccaaggtaccatgatagttaattacatagtcgaaaatcagtgatatggtgtctttcaggacatgactacagagctggaggcatttgcacaccgcccagagcacaagacctctgacagcacgttcctggtgttcatgtctcatggtattcgggaaggcatttgtgggaagaaacactctgagcaagtcccagatataytacaactcaatgcaatctttaacatgttgaataccaagaactgcccaagtttgaaggacaaaccgaaggtgatcatcatccaggcctgccgtggtggtgagtgctgatgcctttgagaacaccagacaat

SEQ ID NO: 857605 - DNA, 594 bp, Homo sapiens
attcttgaaaaaaaaaactcagcaaaaaaaagggctacagactttccttactcttttaggttcgattttcatttgagcagccagatggtagagcgcagatgcccaccactgaaagagtgactttgacaagatgtttctacctcttcccaggacattaaaataaggaaactgtatgaatgtctgtgggcaggtacatgtgtatggtcgggagtgtgggaaggttgaggaaagggtactgaaagtccatttgagtcaagaactctaggtttacaggctgagaatccttaatccaaaaatttgaattttgaaatgctctaaaatccaacactgtgtgagcgcccacatgatattcaaaggaaatgtttattgaaacatttcaaattataggtttttggattagggatgctaaaccagtaagtatacagctgaattccaatatacaaaaatatctgaaatttgaaatacttctggtagcatgcattttggataagggataatcaagccatatacagaaaatactgaagtaatgyctttcttctggtcagtgcagagcacgttgctcttctcccaaagtttttcatttagacccctttt

SEQ ID NO: 857606 - DNA, 629 bp, Homo sapiens
aaaaaatttcatgaaataataaggaataaatgtaaccaaaaagttaaagatgtatatactcataactataaaacattgacagaagaaaatgcctgagattcacaaaaatcaaaagatatcccgtgttcatgaattggaaaatattacattattatgtctatactacccaagaaatctatgaattcaatacaattcctattaagcctccaatggcattttttacagaaataggaaaatcaaccttaaaattcatatggaattatttaaaaattcaaatagccaaagcatccttgagtaaagaacaaaactggaggcagcacacaacctgactttaaaacatactgcaaagttataataatcaaacatagtactggcataaaagcaaacacagagatcaatggaataaaacaaaaaggccagaaataaacccagttatttacagtaaatttatttttgacaaagtttcaagaacagacaataggctaaggacactttcttcgataaatgatgttgggaaaattaaatatccaagagcagaagaatgaaaacgggcccttatctgycaccatatacaaaaatcaactcaaaatggattaaaaacataagcctaataactgaaactttgaaac

SEQ ID NO: 857607 - DNA, 621 bp, Homo sapiens
accacttggctccctggcttcagctgmctttccaggggagtgaacggttctgtctcactggcattccaggcaccactggggtatgaaaaaaaactcctgctgctaactcggtgtctgcccaaatggccgcccagctttgtcttgaaacccagggccctaatggtgtaggcacccaagggaacctcctggtctgcaggttgcaaagacagtgggcaaagcgtagtatctaggctggatagctctgtccctcatggcacagtccctcacggctttccttggctaagggagggagttccctgaccccttctacttcctgggtgaggcgatgccccaccctacttttgctcaccctccgtgggctgcacccactatgtaaccagtcccaatgagatgagccaaatacctcagttggaaatgcagaaatcacccgctttatgcattggtctcaccgggagctgcagaccagagctgttcttattcggccatcttgcccaggaatcgaaaagccacttcttaaaaagagccatcactggctgggtggtggtggctcacgcctgtaatctcagcagtttgggaggccgaggcaggtggatcatgaggtcaggagattgagaccattct

SEQ ID NO: 857608 - DNA, 607 bp, Homo sapiens
ctgtattgctattaatagacagcctattagggctttgctatttacaggcttccacaaggcaacatgatttcccagtagtatattaccattaattggtaaaaggcactctaggaataccagtytaagacaatagctcagccacaattaaaacagaattgcatttgctgacctagaccacaaagcaaagtgtgcctgggaaattctctgcaatattttacaacctgaactaattaaagatcacattccccatacagccagaaagcaaacatgagaaatacccccagctgaagactttctagtttgatggttactataatgagttcagtcccaaaggtacaagacaatagaaagcggcttctatttgaagcttgtggaatgaaactctgacttcccttaattttggagcaattccttcttgtgcactatcagtctcatccaaaagctgtcatccaattttcctgcaatgaacatagggaatgtaagggggaaatcgatctcattgtaacctgataaatttctttaacagatttaatgttgaaaaagattaaaaatagcatatcatgattgccagactgtatgctggataaaattcatttattaacttagg

SEQ ID NO: 857609 - DNA, 531 bp, Homo sapiens
tgcttaagaactaatcagcttttgggctgggcgcrgtggctcatgcctgtaatcccagcattctgggaggccgaggtgggtggatcacctgaggtcaggagttcaagaccagcctggccaacatagtgaaaccccgtctctactaaaaatacaaaaaataagctgggcgtggtggcgggtgcctgtaatcccagctgctagggaggctaaggcaggagaatcgcttgaacctagcaggcagaggttgcagtgagccgagatcgtgccactgcactccagcctgagcaacaagagtgaaactccatctcaaaaaaaaaaaaaaagactttttcaattaactgccttttcctctacagtgtccatggcccgggaattctactcagctatgaggaaaacctgacctagatgatacccctcatgaaatgaggcttccctggaagctcatgcctcaaggatgtgtgaatggtcacaaagaaatggagagcaggctgagcgtggtggctcacacctataatcctagcagtttgggag

SEQ ID NO: 857610 - DNA, 547 bp, Homo sapiens
tcaaggaatgagatggtgccatcttcaaacctataaccacggggtaaggagaacaggtcaagctgtggtcaaaacratccatgtgcatttcgtggtatataatgagctttagattttaggcttagctgttgatgtggtttggctttatgtctccacctaaatctcatctctaattgtaatccccaggtgttgagggatggacctggtaggaggtgattggattatggggatggtttcccccttgctgttctcatttcgtgatagtgagggagttctcacgagatctgatggttttataaatggcagttcccctgggctcttctctgtctctcctgctgccttgtgaagaaagtgcctgcttccctttccgccatgattgtaagtttcctgaggcctctccagcaatgcagaactgtgagccaattaaacctcctttgtttataaattacccagtcttgggtagtatctttataacagtgtgaaattggactaataccgctgtaatctattaataccttccctctgctgtcttataaaacattgctct

SEQ ID NO: 857611 - DNA, 630 bp, Homo sapiens
caggggaaatgacacaagcaaaaagagagagatgggacccacgaaaggggcacgtatatggacaactacagaatttccctatcagaaagtgtcagagcagccatccggctagaagatggagttggtggtgacttgtcttgagattatattcacatagcaatcccactttttttttttttttgagacagggtcttgctcatttgcccaggcttaagtgcagtggctcgacctcggctcactataacccctgcctcctgggttcaagcgattcttctgcctcagcctcccaagtagctgggattacaggcgcaccaccacgcttggttaatttttgtatttttagtagagatagggtttcaccatgttggccaggctggccttgaacttctggcctcaagtgatccgcccgcctcagcctcccaaactgctgggattacaggcgtgagccaccttgcccggcctagtccactactttcatttccagtatccgtttacttggagcgcattgaggatagctttatttatgtatttatttttacacggcgcctrtcagggcctgggtttcactgccacacacggggcagtgcatggtgagctgaggcccctggaagctctgggcactcgcggcca

SEQ ID NO: 857612 - DNA, 436 bp, Homo sapiens
aggctcagagctggatgcaggccagggcaggacaggtcccatggctgagagcaagagcaggcgggcacggaaacctcamccctgtcccagggcccaggaaagactcgggcgtccaaccaaatccactcggcttccagaggctgccccggacagacgtcaccgggcctgggatcagggtggtgttggtgaccctcaccagcccagaaataagcacaggttccccggagtcctgccagagatgagaaaggcagcaggttgacctgggggcgcacacggccgtacctccgcgccccccacccgcagcgcgttgcctccgaagcgggaagtcccaggtgcattcattcctgagaagaggccgggcagccggagcccgccatttctgcagtcacagcgccacctcctggccgaccgcggcgtggccgtaggggccgctcca

SEQ ID NO: 857613 - DNA, 541 bp, Homo sapiens
gtctgtaagagccaaaaagtagaaacgacaccaatgtctatcaactgaccaatggaatattattcagccataaaaaagaacaaagttctgatacaggctacaacatggatgagccgtgagtacaaaatgccaagtgaaagaagccagtagcgaaagaccacatggtgtgtgactccatttatatgaaatgtctagaacaggtgagtctggagagactagatttcttcagagacagcatagatcggtggtctccagggaccagggagggggaatgaggactgactgctaataggaacggggtttcccgtggggatgaaaatgttctggaattaggtggcggtaaatgttacacaactctgtgaacacgctaaaaagcactaaatttgtacactttaaaggggttaatttcatggagtatgagttatatctcaataatartatttttttgaagatctggtcatacagagtggaggggttgcctcagcccaggaaggaagcagaagacccaggcagatgcaagcaggtgtgtggtgtgggggtg

SEQ ID NO: 857614 - DNA, 619 bp, Homo sapiens
atcttttatcttacaaagatcctttttgatatcctcaagatggttaatggagaacccctagctctcactgtttaatcattcaatttcttaatgtttgttttaattgaattgccaccaacttgactaacttttatkgcccaccctcccactatcccctgtccccgaggatctctgccctacttcacacagtcattttaaaggctaaaaaagagtggttatgaaagcttttaaagttgtaattgcaggcacactttatttgaaagatgcaccacagatggaattagcacccctccctgcccactcccacccagtgctctcccaaggaccctaacagcattgggaggtcagctccagaaagggtcatggttgggccaaccctctcgttgttctttagagcaaactgaagtcccaaggtagccaggcaatgaggaaaaatcacccagctctcatgccacagagtgactgggacgggctcctcattcctggtccacaggccagagatgagtgttgttagtggctcacccctaacagcactgtgaactgggggtcctgtgactgtcttgcaccacgtggtcaagtacacacacatacatatttgcaaagacatacaaatacagtt

SEQ ID NO: 857615 - DNA, 597 bp, Homo sapiens
aaaaatttttttggttaaggtatctggccaggtgcagtggctcacgcctttaatcccagcacttcgggaggccggggcaaggggwtcacctgaggtcagaagttcaaaaccaccctggtcaacatggtgaaaccccgtctctactaaaagtaaaaaaattatccaggtgtggtggcatgcacttgtagtcctagctacccaggaggctgaggcacaggaatggcttgaacccaggaagcagaggttgcaatgagccaagatcggtgccactgcactccagcctgggtgacagagcaagatactgtctcaaaaaaaaaaaaaaaaaaaagtttgtacatcaagttgaatgatgaagaataaaaaggaaaaacaatagtttctacagctgttagggtgatttactaacactgctttaaccctaggtcattcttaattttgttttcttttccccctctcaaaaacactggaaaattttcttaaatctgggaagtatcttggtatgtgtcttaaaaatgatttctcaatgactttttcctccttttttgttttctgttaaaggtgactttgctgttctactaaaggctggcatgaccgtta

SEQ ID NO: 857616 - DNA, 658 bp, Homo sapiens
ctaaacctctttctcttacaaattacccagtcttgggaagttctttatagaagygtaagaatggacaaatacaaatcccattttttaaaaggataaatgcagaaataaagataatgaaatcagtattttgacctttcaaacaatataatgaaaatagaaaaaaattcatatttgggtatagctactcctaatatgctggttatatcattttttcgttctccccataaaactgttaccaaaatctcaactctgatggactttaccaccaagaatagtaacaaaaaacagaatacacctaggtgaacaatgttcactgaactacctttataactgtcacatccaaaaatatctctttcaaatacaacatcccaacaggatctaccatccagggatactgttctaaggctagacaataggaaaatcagaattaaatatactactcaaatggtgagatttagcttgtcttttatcataggccaataaaatgtgtaagtaattcacattattcctttaggtcttcctatgctaaaactgcaaatttagtaatattttacaaattactttaatgagaagcactaaacattatcctcagcaattttaaaaatcttactaatatggtttagaagaaaaacatttcacatatgaaaaatgactcatt

SEQ ID NO: 857617 - DNA, 503 bp, Homo sapiens
caacattcacattcaggaaatagagaacaccacatagatattcctcaagaagagcaaccccaagacatacaattgtcagattcaccaaggttgaaataaaggaaaaaatgttaagggtagccagaragaaaggtattgttatccacaaagggaagcccatgagactaacagcagatctctctgcagaaaccctgcaagccagaagatagtgggggccaatattcaaaattcttaaagaaaagaattttgaacccagaatttcgtatcgagccaaactcagcctcataagtgaaggagaaataaaatcctttacaaacaagcaaatgctgagagattttgtcaccaccaggactgccttacaagagctcttgaagaaagcactaaacgtggaaaggaacaaccagtaccagccactgcaaaaacataccaaaatgtaaagaccactgatgctatgaagaaactgcatcaactaatgagcaaaataaccagctagcatcataatg

SEQ ID NO: 857618 - DNA, 587 bp, Homo sapiens
atgggttttgttaccagaagaagggagtgattgctgggcagttaaagccacccatgtcatttcatcactggtgtacatttttcctgattctaatcactggactgatagtctgcttggcttcattcagcagtgctactctctcatgtatgagggaagagcttggtgcttgggggctgttgtaactgggttgtttggatgtttattaatgagtgtcttagagatcatggaagcaggatgaagcaaaggaagaagtcaggttgcaatgccctcccactggcatcctcagttgacacccaccaccacaaccacgggagctctagagctacgggagaccttcaaagtagtcccaagttggagcaagagaggaggcctttataccctggggtccattagtcagatgtgcaccttgttaggatgggagcaccgtcccgggcaacacagctttcctcagctgaggttgctctgaagggactgacagcagagggctaccgaagacagcacttctggggtgtgggggtmaccaatcctggttcctaaaggagactgaagctgcatatcagagaccagcacagggacacccagtactg

SEQ ID NO: 857619 - DNA, 567 bp, Homo sapiens
ctggatcctttctcaccaagtatgcagacatgacattcaatagtaaaaacmagctggtagttgttcctgaaaacatacttaaaaagggatataaatttgaaagactcagttaaaaaaaaaagaaatagactattgatatggtttggctgtatgtccccacacaaatctcttgtcgaattgtaattcccagtgttggggagggaacctggtgggaggtgattggatcatgaggcagatttcccccttgctgttctagtgatagtgagtgagttctcatgagatctggttgtttaaaagtgtgtagcacttctcccttagctctctttttcctgccatcatatgaagatgtgcctgcttccttttcaccttccaccattattgtaagtttcctgaggcctccccagccatgcttcctgtacagcctgtggaactgtgagtcaattaaacctcttttctttataaattacccagtatcaggtagttctttatagcactgtaagaatggactaataaaactatgaacattgtttaagtcatatcactggttatttccaaggtacaaggact

SEQ ID NO: 857620 - DNA, 550 bp, Homo sapiens
cagggtaaacacaaggggacttcaggtttttagaatgcctaattagacgacagtaaatgcactgtgcaatgactgaaaaatacaagcctgggaagtattgcattttcaccattgcaggctacgtgcattgacacatttcatatatttattcttacgaaataaatatcataaaggaattatcttgtcctgttagaaagacatctcaaatattcactttggataaatatatgaatccacaaagccatagtcttgggaggggaggtcagccccatctcatgtgtggaatatgtcaatgattcctctgtatgtatctcacccagcttccacagtggagtgctattaacaatcagagggtaagggatttcttgatgttatacttgatacttggtgttggatgcagccaaatgcaggaaatacaaaaaaactagggtacttctggccataaaagggtttgtaatctatgcgagaaaaataaaatcatctgtgaacgttattgcgaaaaatagaattaagcattaaaacaaartcaatgagaaataagagtaagaga

SEQ ID NO: 857621 - DNA, 606 bp, Homo sapiens
ttcattgttcacagttctggtctgtgccagtttatgtgtttgagcctcaggtaagttgagcgctgtggacatatgggtgtgatgaaatggtttcctctcttccctttccaccttcgaaacctaagccttcctgcaaggctcctagccttccgggtttccatagaaatcagagcctgaggccaagtttaaggtataaggctctatcccagagctggaagggtgaggggaagggagtcaatgtggggtgatatgaaccaaactggccagggtgccacagaaaccacacctgtcacagccacgcaggactctctggatgggccatatggagccaccacacttcgaaatcgtcacaggggaggaagagagaggagcttatctcctgactctctggtcaaagcgggtcctctgtggattcaactctcccccattttgggctatttaccttttaaacagtggcaaagcagccatcttctaggtccctagccagggggcaagaagcttcatctgagtctgcaagtgctgggaacagccggtrccctgtgctagggcccgggctgcaaatgcctacggctcccataaggtgggcattgtagcagccatgcctaa

SEQ ID NO: 857622 - DNA, 637 bp, Homo sapiens
gggatcccagtggtatcttggcccagtttagctgttaggattcagtgaggcaacccaggaggcgtgtgcagcacaaggcttggagtgagtgcccagtcgttggctgtaatgacagtggcactgcagtgtgactcttcttagggttgtggccagagtggagggcatttattgacatagggcttccgagcttcagtttttagtgtgtggcattgtagagagaacattggactagaagtctgtggatctggtttctagctttggctctgccataaacagtaaaaattatttcctaatggttgctttcacgtcaggcagtttgaaagaggtgggagacctcaagccagtggaccttctctggtgttctttttattcaccaggaatgttagagggttggaataagtcagggttttctgaagcaccagcccagtctcactgatttgatggcctgttagtacatgtcccatgaaaagaggttctgtgttgggttaattgggatatcctgggacttctcccaggctttagttttgcactgtgattctccaaggggaagataagaatatgcaggyatgctatgtttaaccagcttatttgaccaggaaaattcctatttatactgtagcctgtgagactggaagcg

SEQ ID NO: 857623 - DNA, 539 bp, Homo sapiens; identical to SEQ ID NO: 829498

SEQ ID NO: 857624 - DNA, 566 bp, Homo sapiens
atttttagtggaaggagataaagcctggcactcctgcctgtcttgactcttggaagggccattccagctagagagctctgcrtgggatccatggaggcctttgtttttgctgtatcttggttcaatttcttgctctgctcattcccccttccttcagtccccaccactctccatccccaggggctctcaccaacatatttcattcacacaaatcgttgtctcacagtatgattcctgaagagcctggtctgcaacagttgctgccagaagtggtttaaggaaacagacaccaaatgggattgggagctggagcacctgctgaccagcggccatgaggtccccatgctagggtagtagccctggtagtagtagcagtgttaactgttaaaactttcagtggtggtgagcttggatgggttttggtggaaggtaatgaagtattaggtgcaagatattagggatttgagaggttgggaagtcttactacctaaggactatggaattggatggctgttgctgagggctgtcacagctaagttttcagaaagacggtgaaaagtattagc

SEQ ID NO: 857625 - DNA, 522 bp, Homo sapiens
ctgtcttgactcttggaagggccattccagctagagagctctgcatgggatccatggaggcctttgtttttgctgtatcttggttcaatttcttgctctgctcattcccccttccttcagtccccaccactctccatccccaggggctctcaccaacatatttcattcacacaaatcgttgtctcacagtatgattcctgaagagcctggtctgcaacagttgctgccagaagtggtttaaggaaacagacaccaaatgggattgggagctggagcacctgctgaccagcggccatgaggtccccatgctagggtagtagccctggtagtagtagcagtgttaactgttaaaactttcagtggtggtgagcttggatgggttttggtggaaggtaatgaagtattaggtgcaagatattagggatttgagaggttgggaagtcttactacctaaggactatggaattggatggctgttgytgagggctgtcacagctaagttttcagaaagacggtgaaaag

SEQ ID NO: 857626 - DNA, 615 bp, Homo sapiens
tggacatgaaattaatccaatggtgtgaggcaagaaaggttccttcacaaacctccagaaggagttttaaatggtactctagcaagaaatcaccaagagaactagaaagtctcctccttcatcagctctcagctacctaaactccccagggcaactgcgtgtccagtctgttagacaatggctttttaaaagcattttttaaactacttttaaaagtcagtatattccacactagcattatacccttgaagacataaatagtaaagtgagctcaataggtctctattagaagaataatgagatggctgaataaggaacagatttatttaatctaaaaggagaattcaatttttctatttaggaacacaaattattagtgtggattagaggtattaagatggggtgggtagttctgcctgcatttctagctgcaaggcagcattatcaattctatccatcagctcttcaacatttctcccatgcttggaatgrcttttatggattaggcagaaaatgaactgcttctcccttgttttaagccttgaaatattaatccaggaaatacactgtaagcaactcagaacttttatattcccttccagttacatgctgagg

SEQ ID NO: 857627 - DNA, 615 bp, Homo sapiens
tggacatgaaattaatccaatggtgtgaggcaagaaaggttccttcacaaacctccagaaggagttttaaatggtactctagcaagaaatcaccaagagaactagaaagtctcctccttcatcagctctcagctacctaaactccccagggcaactgcgtgtccagtctgttagacaatggctttttaaaagcattttttaaactacttttaaaagtcagtatattccacactagcattatacccttgaagacataaatagtaaagtgagctcaataggtctctattagaagaataatgagatggctgaataaggaacagatttatttaatctaaaaggagaattcaatttttctatttaggaacacaaattattagtgtggattagaggtattaagatggggtgggtagttctgcctgcatttctagctgcaaggcagcattatcaattctatccatcagctcttcaacatttctcccatgcttggaatggmttttatggattaggcagaaaatgaactgcttctcccttgttttaagccttgaaatattaatccaggaaatacactgtaagcaactcagaacttttatattcccttccagttacatgctgagg

SEQ ID NO: 857628 - DNA, 637 bp, Homo sapiens
taactggtcatggtatgctatatttttaaatcatgatatattattttagtaattaccaaattcagttacctaatgcatattagtattcttgcatttctgttcagaagtgagaactatctgtaatctactttattgcactactcttatcaagttttgatattagggttatattggcttcataaaaggaattagaagtctttttttttttttttggcagagtctcgctctgttgcccaggctggagtgcagtggcatgatctcagttcattgcaacctccacctcctgggttcaagcaattctcctgcctcagcctcctgagtagctgggactactggcatgcaccacaacgcccggctaatttttgtatttttagtagagacagggttttgcaatgtcggccatgctggggaatttttaaaagttgaaatgattacaaagattacaatttgttctttaaaaagttaatacaaataaaaaaatagccaagttgactgaccacacaggaaaactctggttttacttatagtcctgagataattattaatagttgcccctttcattctcgaaatatcactattggacaataaattatccrctagggtaaacctacaataactgacatggatttgatgtcac

SEQ ID NO: 857629 - DNA, 446 bp, Homo sapiens
taaaacctggataaagaatgtaataactagatgaccaatttgasagtgcttattgggacttatgaagaaaaagaaattgaaaaaaggtgagcctgtgtttaaaatttagaggggtatagatataacacagactgttaatgttttctttcaatatccattttgttttactattcttttttaaggtgttttattttagttgtttttacacgttacatgaacattcattcatcgtaatgcatattttatcacattttattgattgtccaatattcattttattgtttatccattttattgattgtccagtgctgacatctccctatgtcagcatttaataatttaataatttctgttgaacttttaaagggctttgggtatgtaatttctgttgaactttttaaagggctttgggtatgtaattatttaacaaagtgcaccaactagca

SEQ ID NO: 857630 - DNA, 630 bp, Homo sapiens
tttatggacaagggcagtcctaatcataagccagactgcatttgcacaaaacagtagagttagcctatgccttcctgccttaaattgtggtgcttgcttgcttctcttccttactgaaaaaaaaatgtccwttgtgactttttgggcacttttgtctgcattaaaaaccagttcaggcagaaaacctttctcctcaatgattttcttaatggtgtctgggagctcatttgctacttcttggtcagcagaagctgcttcttcttctgttattttattttatttttttattttttgagacgaagtctgtcgcctgggctggggtgcagtggcatgatcttggctcactgcaacctctgcctcccaggttcaagcgattctcctgcctcagcctcctgagtagctgggactacaggcatataccaccacgcctggctctatttttagtagagatggggtttcaccatgttggccaggctggtcttgacctcctgacctcaggtgatctgcccgcctcggcgtcccaaagtgctgggattacaggcatgagccacggcacccagccttcttctgttatcttgacaatttcaagcaacacctcattctgaaattatcaagccatcctttgctggc

SEQ ID NO: 857631 - DNA, 515 bp, Homo sapiens
attatttgaatatgtgataattactaatattgtcataatagtctgccacatttacgaaaacactggacgttwccacctcagcattttaattgctcaccacagtgccattttctttaggactggttgttttgctttcagtttgcttcctagactatcatcatgagatcaaaagctgtgttttttataccacatgacagcccgatgccccacacagggtcagcattaaactgaatttttgataggatcaggtgagccaaaggatgaataaatgagtactcacgttcaggtggcatcaggtgggaattgtggctaggtaaaatggcatcttgttacaatggtaatttcagtcacctattccttacctcttctgggcaggcggattgatttgcaattggcttcttttcttctttctcactctactaatactagatggaaatctcattgactcttaacaacaaagcaattatcttaccatattcacaggttctaccccacctactagggaagtaaaagta

SEQ ID NO: 857632 - DNA, 579 bp, Homo sapiens
aatctggttgaattcattttccggttaaacaaaaattagtcaaactcttttaaagtttaaacmaaacaatgtaaattaaaatgatacacaatttttctctatcaaattggcttttttttttctgttgcccaggctggaatgcagtagtgcgatcatagctcactgcagcctcgaactcctgggttcatatggttctcctacctcagcatcccaagtagctgggaccacaggcacacaccaccacacttggctaattaaaaaaaaaaattatggagatgaggtctctctatgctgcccaggttggtctctaacctctggatcacatgaaataatcctcccaacttggcctcccaaagtgctgggattacaagtttgagccaccatgcttggccctaattagcaaatatttaaaatattgatcctttccaatatccattgtggtaggtagtcactcattctcttttgctgctgtaagaatataaacttttctggagggcaattttgcaaaaagtattaaaagcctggaaaacctatcctctgacccaaagaatccacttttacaattataccttgaggata

SEQ ID NO: 857633 - DNA, 526 bp, Homo sapiens
agtacctgggtgacaaaataatctgtaaaacaaacccccatgatacaagtttctatataacaaacctgcacatgtatccctgaatgtacaagtttaaaaacygaaaaaaaaagtattatcctcccatttccccaaaaaaaggagcagaaaaggagaaacagcaatgaataaacaaaaaaagataaactaataaattgggagcgggggaagcaaaatggtagacctaagttcaacagtatcaataattaagttaaatttaaatggattaagcactcaaatggaatagattgtcagactagagaaaaatgcagaacaaaatcacacgttgttcacaagagttaacactttaaaaataaaataataaataggttaacataaaaggatgaaaagagataggccctgaaaacagtacacatgaaaggctggaatgattatataatatcaaatacattaaatattaagcaagagtgttaccagagataaagagaaatatttcatcatgataaaaggggcaaataatcaggta

SEQ ID NO: 857634 - DNA, 583 bp, Homo sapiens; identical to SEQ ID NO: 834158

SEQ ID NO: 857635 - DNA, 631 bp, Homo sapiens
aagggtctgaagatgtaagaggtactgatgcaagagacatttggatttgagatctctggggacctctaagcagtattccctgatgggcacattaaaatatgaactccagagaaaggcaggtgcttcacacaaagatgtgatcctggtatataattagggattagagcagatctcattttgagtgaaggtacacttcatactagaaggtgttactagattttaatttgctcctttactaaaaaagaaaaagctggaatttcattaattaaaatatcttcaattctgtccagaagcagcagcaactgagggaaagttaagaaaaaagaggatgatgatgaagctatactaaataaaacactctactgtagtgatcactaaacagctaaattagcgttctattgctcaaatcctacaaagaccttgagaatttctgtatgaccttcaacaaataaaatagctctttaagtcagttaatgtctatttcaatgtagaataagtccttttaactttttaatgtaagacaaggtaaacatatgggaaracaaaaatgtcagttcaatataaactaaggaagacaggtataaaccaaagtacgaagattgtccactacatgattagtttcctaagggca

SEQ ID NO: 857636 - DNA, 538 bp, Homo sapiens
aaaattatttctgaatgcaagagccatatgaagaaggtactaagatgttagttgttgggttctggttacaaggtaagtagtggggtgtgtgtgtgtgtgtgtgtgtgtgtgtctgtgtgtctgtgtgtttaacaccatagtatgtttccttggtgttcttattgttctttgtttgttttctttttgttttgtttttttacaaaattgccttagctaataaaatcttgggataaccgagacagaaaggcatacatcaaagaagccaaagatgtagcttcccattagggaatgcttttgttgtataggtgccaactacttggccccgcctgaagaatgcaaactcccatatgaaaccctggccaacccttccagagttggctgcaagattctactccttgggccatgaagcattctctggtccccacagcaccagttggcaaggactttgctctctcaggtctcatggccaggagctttttgggtactcccagcraaacttctccttgaaggcttcctcatttccagaatgcacgcgtat

SEQ ID NO: 857637 - DNA, 455 bp, Homo sapiens
tcattttctccgtggctctgccctttctggaattcttctataattttatatacattgacatcagcattcctattaaattttcccatcttctgtgctctgcctctcygttgttttgggtatgcagaaatccattttacatgcactcatatacagacaaatgtgttggaaacaataccgtgatccaacagcaacaccgttgcctaagtgtcttcttatcttactgtgcatataattatttcctagccagtcagtaacttctctggcttcttcagccaaatgtggctttaatttattaaaagttcctgcaatgtcatcaggcggaagaaatgccaatactcaaagatgacaaatttttaaactaaagtttttgtccttgccatatcatataaccaatctattcacttgaattttccaccaaatgcattgagctgagtgggaaagacaaactttatttt

SEQ ID NO: 857638 - DNA, 619 bp, Homo sapiens
gaacacacatggaagcaagcatcgtaacagggggtgacagattggctcagtaagctcatattcagtgccttccatgtcaggcacccrgctaagcccagagatggatgagataaaagctcctgattggaagatcacaaacgaatatggttgaaaggggccagaaagtaaaggaggtggagagattatgtcacctgctcaatcttggaactttacctagagaaagaaggatgtcacaaccctgaaacacacaagatgctcactagactcacctattttcctggtacctggcctcgtcctccaggccttcttcctttctacccttggcaccttgaggtcaagtatttgctaatgacccaacagagtcatcctgttcctcagagcctaggctgtgcccatgagcacctaggatcctgtgaagatattcacgtaaaaatggcctggcaagattttgcagccatgccctccatcaaaacagcagcttcctcgagtcatggcacagggtcagttccctcttcagggtggcctctggagtggatccactgctcttggaaatgaaagaacagatgcttttaaagcccacctcttttctctcccagccttttaagtttcagtccttcca

SEQ ID NO: 857639 - DNA, 600 bp, Homo sapiens
atgtttattaattattgcatcatgactagcatatattcaaacttaagaatggtgcccacaaattattttatgtttaatcacattgttcctttttaaaatatatatatatatatttttagagacatgctctgtcacccaggctggagtgcagcggcgccgtcatagctcactgcagcctgggctcaagggatcctcctgtcttagcctcccaagtagcttggactgcagttgtaagtcaccatgtccaactaattttttataaatttttgatagtgatggggtcttgcctcgttgcccaggctagacttgaactcctggatgcaagtgatcttcctgccacagcctcccacagtgttgggattaccggcatgaggagaattggatttcatagttataaagactcaaattatgagattactgaggaaagttgtataaatactttgttggaaggttttttttttttccttkgcaatggagtctcactctgttgcccaggctggagtgcagtggcgtgatcttggctcactgcaacctctgcctcccgggttcaaacgattctcctgcctcagcctcccgagtagttgggactccaggcgccca

SEQ ID NO: 857640 - DNA, 550 bp, Homo sapiens
tgttgggaaattgtggctgggatatttgactgttgtttcccaatatttcaatgtgatagcaagtactgcaataaatatttcagtatatatatttttagctccttattagattatagctccagtggtagcattgctaaaatcaaggtctataaacagctctgtgtagctcttaaatgatgagaaattctcaagaaatagggggccagaatataattattcattattttatgcatggtatctactctaccccatagttttgtttgcctatttttatttccataatgatacaaattaaagcagtttaacatttttaaaaatactgctgaaaagatatccatgttttgtatcagaactctcagtattgttaagatggcagtactttcctaattgagctacagattgaatgcagtgtctgtcacaatcacagcattttatttttttttgcagagattaacaaactgatcctaaactcaagggccccaaaatagccaaaataatattgaraaagaaggaaaaaatggaaagtggaaaaagaaaactccacttccta

SEQ ID NO: 857641 - DNA, 566 bp, Homo sapiens
ctatgactcccaatttctttatttgtaaaatgaaaataaaagtatcaatctcacyagggtataagtaggcaggtcagagccagagaatgagttttttccccttgcatctgtgtttactccatatttagaattcatagccctctaatctcaaagaactgacaatataatcaatctttagcaagcaacagttttaatatggacttttaaggttgtctaatgctttaaagaacgacttctcaccaagtcttctttgtgatactctcccaatgtccttcagaatacaattgtattacttaagttaaattgtgttcctgtctttccaaggagttcataccccaactatccttcctgttaagaactggtagagatctcagagatacaataaagcactttctcactctttgccttatcttccccagctatgagcttctgatgatttactttcattaaatctaaatctgacaatgtaattaattttgtacattactgccagtaggggccagctaccctagggggattagtgataactgttaaataaaatttcttgcatttaaaacaaaagaaag

SEQ ID NO: 857642 - DNA, 609 bp, Homo sapiens
accatctacagccctttgctttgtattacagatgctttactccaaatgggtataataagaaaatggaggctcytctctcccagctgtcagtctagggctatggttttatttaagaaggtgcaagtcacattcatatctcattctcacctccatcttcctgtcgcagatgctgtggtctaggtgggagtggctgagataattgggattcccttttcctacacagctcctagtcttagggtaagggttctagcgtaggtacaacaggccaagaatactgctgccctgacttctccttcccctgattgcttttagggttgagatttcatgccagaaagggcaagctaagaagatcaggagccactattaattccaatacccactcataggtggagctgtcactctagtgagagtaggtcactgtgcccatccctagtgtgaatgaaatgggttgatactatgaccacattaagagacaggccttaactattggtaactccccagttatacctcaggagataaaatttatttgaaacacggaatgaagaatttcatacctaaatgattgaaagagaaatacaaagactctcttgagatcatactcaatttcat

SEQ ID NO: 857643 - DNA, 556 bp, Homo sapiens
atgttctttagattccatgttaggtcaggggggaattttgcctcttattttctgtgagaagaaagcatgcatgcatagacatgaaaactgaagttaagagatgtgcttatgcctgtaatcccagagtgttgagagaccaaggtgggaggatctattgaggccaggtgttggagattaccctggacaacacaggaagaccctgtctctacaaaacacacacacaaacacacacaaaattagctgggcatgatgtcacacacctatagtcccagctatgtgggagctcgaggtaggaggatcacttgagcccagtttgaggctgtagtgaactatgatcgtaacactgcactccagcttgggtgacataatgagacactgactctttaaaaaaaaattaaaagaaggtataccagcaaaggccctaacaggaaacagattacttactcacataggttagttttaggagagttcagtaactataaaactgtacaaagattatgtacaaagktatggccaggattaaccaagaaacgcaaaagcatcatcaaattcacag

SEQ ID NO: 857644 - DNA, 639 bp, Homo sapiens
tcacacagtgctagatgaggactgaaatccaaagagctttggctgcctctgtagcaaaccagctttctgaatcatattccttcttactctgacccattttttaaaagttttgtccatttatttttaccaaaacaaattcactacaattgctagtagagattacatcccatttggtatttagatgggcatacttaatattattttattttattttattttattttattttattttattttattttatttgttagggttaaggtctctttgtcgtacaggctggagtgagtacagtggtgtgatcatggctcactgcagcttgaatcttctgggctcaagaggtcctctctcatcagcctcctgagtatctaggactacgggtgcccaccagtgtgcctggataattttttaattttttgttgaaacagggttttgccgtcttgcccaggctggtcccaaactcctgggctcaggtgatcctcttgtcttggtgttcctaagtgctgggtttacaggtataggccactgtgccaggcctattttgtttttaattgacaaataaraattgtatatatctattgtgtacactataaaatttgaaatacgtgtatgttgtagaatggctcaattgaactaatta

SEQ ID NO: 857645 - DNA, 306 bp, Homo sapiens
acttcatgtctaaaacaccaaaagcaatggcaacaaaagccaaaattgacaaatgggatctaattaaactcaagagcttctgcacagcaaaagaaactaccatcagagtgaacaggcaccctacagaatgggagaaaatttttgcaacctactcatctgacaaagggctaatatccagaatctacaatcacattttaaaatgataatataaatgctccctcctcaatcgtgtaaaataatgcccagcttttycctttcttgtcaatacattcatttaaaacagccaagatggtgagcaaaatatta

SEQ ID NO: 857646 - DNA, 588 bp, Homo sapiens
ttgttcaggccaggcaccatggatcacacctgtaaccctaacactttgcgaaactgaggcaggaagattgcttgaggccaggagttccagaccagtttgggtaatataacatgaccccatctctacaaaaaaataaaagtaaactagccagacatgtggcatgcacctgtaatcccagctacatgggtggctgggtggctgaggtgggaggataccttgagcccaagagtctgaggctgaagtgagttgtgatcacactatagcctgggcaacacagcaagaccctgtctaaaaaaaaaattcaaaggctcttgtgtctgccttaaattaaaataaatttattaaaggcaatgtccatttctcaaagtggttacagaatggaggtagatgaaacaagataatttgagaacaatacctcaaaatctggcctacataggactaacaaacaatagttgctttcctcccttacttagtcctayatacactgagaagtactctgctgagtggaaaagttcctctcctgctcacaaaatataattcaattcatgtattagcatgacttcaccaatgggggaagatacaatcaaa

SEQ ID NO: 857647 - DNA, 595 bp, Homo sapiens
cccacaggcttttccagaattctgctccagggagctcagctctttcgacctttcctgggactcaaggcacatccctcagcttctcttcttgagccccccacccaacccctggctttctagcagctctgggggctgcaccagtctctccatggactgacaatagaaacacctggttggttaacttgaggtttcctgggtgcagtggcgtttcagaagccctttctttcccgacctcagtgtgggccagaaagtctagaaattagggcccaaagctattgaaataccatcagcaattcccattcctcttgcgtggtcactacctgggacatttagcttcagttccttccttttgagtaaagggttttaaattaacatttagtgttagctgtaaatattttttttctccctacttcctaccaagggagaaaatgcccatgaggaagatggactcatcttgaggaagatgcccatgctgcagaygtggagacatgtgagatagatgaggccggcacactccccacatcctggagaaaggcgggaactcaccaaatcccaaccccttagcctttcggatcccgcagtcgggcctgaggtg

SEQ ID NO: 857648 - DNA, 594 bp, Homo sapiens
agtctttcattattgactataatgttagctgtgggtttttcataaatgckctccatcacattgaggaaatttccaaccattcttaatttgttggctttctataacaaaaagtattagattttttaatgctttttctgcatcaaataaaatgataattttgttctttcattctattaatgtggcatatttcattgagttattctcttatgttttgtcacccttgcattcctgagataaattcctcttggtaataagatttaaatattaataggcttctgaatttagattaatattttgttgagaatttttgcatctatattcataagggatatggtctccaatttcatgtgcttgtggagtcattaacctggctttggcatcagagtaatgatggccttatagatttagttaggaagtgttctctcctcttcaacttttggaagagtttgagaaggattggtatttaatattttctgaatgtttggtagaagtcatcagtgaagccatctggtcctggacttttctttgtagggaggtttttggttattgattcagccaataggcgtattatagatctgttcatatgttctcttt

SEQ ID NO: 857649 - DNA, 546 bp, Homo sapiens
aagaaccaagactgcagtttgaatagcaagctactacatgccacattccccgcttccagctcagggcaaagcaaataggcaaaacaaacagaacaacactgaccacactgctcccgttgcaagagaaaaaatccaatattaaacccagctccctgagaagggaaagaaaaagagagaaccatatgttcaacagtctgatttttctgagggctgccccaaggcactggctctacctcaactgtctcagagcatttatgggtcctgccatattccaaatgcctgggaaccactgagaacagaaataacagtctgagatagcatctggacttgagatgctcccagaatgtctggactggcagattggtgaagtgcttctcctatatgagtccattctatgagactattgtgcaaacatcaacacaagagtcaaggacaacgaagaaacagaaaaatatgctccaaaamatagaataagtttccagaaactgaccgcaaggatccaaagatatgtgatatacctgacagagaaatcaaaataaccatcgt

SEQ ID NO: 857650 - DNA, 492 bp, Homo sapiens
aaatggatgaacctggaagacatttgctaagtgaaataagcctgtcactaaaggacaaatacagcatgatttcatttgtatgaggtatgtaaatagtcaaattcayagaatccaagagtagaataatggttgccagtccctaggagagagacatagagagttgctaattagcagtcataaagtttcagtcaagcaaaatgaataagctctaaagatataatgtataacattgcacctatagtccataatgtagtgtacatttaaaaatttgttaagaggactgttaagtgttaactcatgttaagtgttcttaccgtaataaaaaaattatgaagttgtacactatttgtacatttttctgtacctttcacatacctcaatataatgtattttgaataaaatatcaatttgtcttttcctctttcaggcatgtcctattatttatgatctattacaaattttcattactattttccatggcaagtatctatt

SEQ ID NO: 857651 - DNA, 593 bp, Homo sapiens
ggatccagtaatttttcttaataggtggmatcagtttcactaatgctatctaaataactcttcttttcaaacttatttatgataccactgctagtacatactgagttccaagataggcatggatttgttttatatttttattttattttatttttcatttttaaagcatgggttggttgtatgtgatagagactggctagatatcacaaactcatttcctcttctcagacacagagctaaactgtttctcagtcttcttgcatccaaatggggcagaaatgaagtgtgtcacttccaggcctgggcagccgggaacaagtgtgtcttcaccttgttctctctctctctctctctctccttttcaaagacaccttgcaaacatatgaatctgggttgaatgggctcagttctcactcagggagataaccagaacaaactataaatatagtctctgagtccaggggtcagttaatcaagattcctagattgaagcttgaagcatattttcctgatttgtggttttaatatctctgtttatggcagaaggcatttcagcaaactcctcaagtgctccctacatcaggcatgagggg

SEQ ID NO: 857652 - DNA, 593 bp, Homo sapiens
ggatccagtaatttttcttaataggtggaatcagtttcactaatgctatctaaataactcttcttttcaaacttatttatgataccactgctagtacatactgagttccaagataggcatggatttgttttatatttttattttattttatttttcatttttaaagcatgggttggttgtatgtgatagagactggctagatatcacaaactcatttcctcttctcagacacagagctaaactgtttctcagtcttcttgcatccaaatggggcagaaatgaagtgtgtcacttccaggcctgggcagccgggaacaagtgtgtcttcaccttgttctctctctctctctctctctccttttcaaagacaccttgcaaacatatgaatctgggttgaatgggctcagttctcactcagggagataaccagaacaaactataaatatagtctctgagtccaggggtcagttaatcaagattcctagattgaagctygaagcatattttcctgatttgtggttttaatatctctgtttatggcagaaggcatttcagcaaactcctcaagtgctccctacatcaggcatgagggg

SEQ ID NO: 857653 - DNA, 652 bp, Homo sapiens
agagaatatttgaagacattattcatgatagcagcatcagcattttgcagaagaaaccctggggacagatgtctgcatgaagcacctttattctgtgaataaactggtattttttaatgaccatttcctgcaactggcaaaagtctccgttcagttctactccacagggttgcactgctaagctataagatcaccccataaagactgtgctgagcctggagctgacgtcagccacagcctttcctgattgatcagggagtgcatgaagataaatgaacttcaattccatgagggagaaggaacgagcaatcagtctaaaggttctgtatggtgtgaaccacccagtagtttctgctcattttccctttgtcacataatgaatcaatgaagtctttatcacaaaggaatgcgtcagcgtgaatggtgggttctggctgctgctgtagtttttgaagggttagatgttctgaggaaagcatggttttctagaggcaagcaattctgaaggtcttctgcagtgggttttttttttttttwattttgagacaaggtccggctctgtcacccaggctggagtgcagtggctcgactgtggctcactgcaacctccaacttccaggttcaagcagtcctcccatctcagcctcccaag

SEQ ID NO: 857654 - DNA, 607 bp, Homo sapiens
gtcaaggtcccagttgggatccatactggggatggcttgctgaccggtagggaatttgtccctttctacggctgtcattctatcatttacttgactaagataccaggtatctccaaactctcgggctgcagctaaagccgcattcttttcattaaaggccagggtttgatctaacagtagcatgacatctctccaagtgaggtcaaaggtttgccctagaccctgtaggacatctatgtacctatcaggatcatctgaaaacttccccaggtctgccttgatctgctttaaatcagagagggagaaggggacatgtacccgggttgggccaaattcccctccccctacaacttgaaggggacacaactgacagcccgggggggtttgtggtcctttggagacctctttgcttatttccttctgggcaggggagattagaggaggattatcattaataggaaggggagctatagggaggctgggatatgggggtaagccgagaggtcctcctttggratgtaaatggcaagctttgcatagttgtgtattctccctcaatgaaaagaaagcttgggcataaggtatttcactccatttgccttccctc

SEQ ID NO: 857655 - DNA, 570 bp, Homo sapiens
caaggaaaaagaattaattgtgtagttaaccaaactaaattcacacaacacaggacaacttcttagacacattcatatagatgagattgatcaaaataagtcagaggctatatgagttaattctgaccacctaggacagtgctctactttactcctcccaacccccgctgcccacatacacacatacacacacacacacagagtttcccaagtctactcttaacattgcttctcacttcattcttaatagggtaggtggaatcctgttgcttcttgctcttcttgtctggacgacttatgtccagattcttcatgtatgtggacagcacctgggagactccaatgccagagagaatgcacataacaggtgccaacactagcattagacgcacctaacagagacaggaagcatgatcagtctaatcagtgttccacaatttacagatttcagcctattagtagatcaagacatcaatttaggggttttcatcaaacatgacctccacaaaaagtgaaagagaaaatacttgaaayagttgcagtattagtatgtatttcttaaactttgtt

SEQ ID NO: 857656 - DNA, 588 bp, Homo sapiens
ttctcaaatcaggaaaactatcaaagaccaattcagatcctacatttacagacagttttgtcataaccctttgcattgcagcacctagtacaattccttggaaacagcgtggctcaataaatttttattgaatgaataaatgtgggaccagaagagtgctagaagagtgcctttctgggctactatgtctctgttctcaatgtcttttatccttagacgctctttgactttataaatcagcagttttgaagactcaagacaaacagtgaaattattggtttatcaatggagaggaagaaactcttccagcattacatatagagcttgatggtcagtaggtgtttttgaatcagcttaaatataatcatacatatcaatttgaaatggagcttttcagtactctcacttattcatgacacaggaatgaccctttactcaaaactcttgtggttgttcaaaggtgagcttctttttcccttagtcttagcctatgtgttgctrttgtatattgttaccaagttcaactacctaattttgaagctctttccaaataagatacaaattaaaaggggaagcattgccagtaac

SEQ ID NO: 857657 - DNA, 566 bp, Homo sapiens; identical to SEQ ID NO: 857546

SEQ ID NO: 857658 - DNA, 640 bp, Homo sapiens
atgtttggtttcttgtttgtattattttttattgttgtattgttattttgttctgaatattttccatttgtagttgattgaatctgcaacatgaccctacagatgcagagatttgactgtacrtaccaaggtagctctttgaaattccaagaggggtcaatttgaaagcactctcctatcttcttctaggcttcttagatgttacatttcatcttattgatttgacttaacatgcctgcttcacagtatgtagactgtttttttctttatgtatatgctatatgcagatatcactaaattatcaacctcctatttaatgaagatataatttattaaaataatatttttaagaacaagaatattttacctctttaaaatacaatatggaataatagatgtccttctttgagaaaggaacacatggaatttgaaagaatccctttttctaaagggaataatattttagtaaaatggaaactaaaggaaattacttggaatttacaacactctgttcattgttccttagatgcaggtataagattacacttcaatttctgaaaaatgttaaataacctcaaatagttataacctcaaaattacattagtaatcgtaactacttgtaagtacttgtaattacat

SEQ ID NO: 857659 - DNA, 471 bp, Homo sapiens
atgaaatctggtatctactaaaaataaaaaaataaatagctggacacggtggcacacacctgtagtcccagctacttgggagccttgrggcagcagaattgcttgaacctgggaggtggaggttgcagtgagctgagttcatgccactgcactccagcctgggcaacagattaagactgcatagagagagagagagagagagagagagagagagagagagacagacagacagacagacagacagacaaacagacatgatcttgtatatagaaaatcataagagatccacccaaaaaaaaaaactattacaactaataagcatgctcactaatgttgtaggagacaagatcaatcgacagaaatcagttctatttctgtacactagcaatgaacaatttggaaataaaattaataaaacagtttgaagttcagttggatcctggcagcagctgcagcagttctcttctgtgt

SEQ ID NO: 857660 - DNA, 551 bp, Homo sapiens
ctctactggacatacacggtaaagtctcgtatgagcccaggagttcgtagaccagctggggcgacataatgaaacaccgtctctatgaaaaatttaaacattagccgggccttgtagcacagatctatagtgacagctacttaggagggtaaagtggggaagggtcgattgagcataactattttgtgaagatgcagaaaagaaagaaaggaagattgctagcaaatactttccctccatttagggattgtatacaattgcacttgtctttaattagatgtgtgaataacctatataacaagtatgtgattgaagtacactgttgaggaactggaactaaatatctgacacctccagtcgcctcaaactgagatcctgcaattctttgaaatagcaaaagcctcaactttgtcagaagtgcaaatggttctcagattaaaatgraaaaaaaaaaagagaggaatgagaattctagccaagaaaatgaaaacagagagtgtggaacttaattttatcttgaagaacaaacatgttaaacatagccagtatgt

SEQ ID NO: 857661 - DNA, 630 bp, Homo sapiens
agatgttttcttaatatactatggccctatgacttttggggaaatccctgaaactttgctatatcttcaggatcaatggatgaatgctgttaaccttttagtagtttatgaatgacaacttttaaaacagccaggattctcagtttatacttgtaagagattgtctcgggaattttatttagcttatcagagctgacgttttctgtttagaatacattttcctatggtaggactttttttttttttttgggaaaaacccccctaaatggaggtttgttaatccttaaaaaaaaagggcaagtagaaggcagagaggtagcagtgttagtaagtctactactgctaaagtagaaggaaaaaaaatgaattcagacaaaaagagacttactggtttgtttatttttaaatgtaatctgatgtgcaaattgtgtcttctttaaaactttcagctcatctttggataccacttcaagcactatccataacaatcttacagaattccaaaatgaccctcccgctaccaattcttattctcccyggaacttaaccaacgctagcttatttggattgactcggattccatattttcaaaactcctcggtgaggatccttagaagagacaaaacatgg

SEQ ID NO: 857662 - DNA, 606 bp, Homo sapiens
gaaattgccggccctgcactggagcccagcccctcacctaccttgactactcctggttagttactcgtccctcaggcttcagcagaaatgtctggtctcctgggaagtcatccttcacytcccggccccaggtttgggtccctctgtgttcccactaggcccgtccttgccccattatggcgctggtcgcatggctctggagttgtctgtttgcctgtctggcctactccctgctgctgacagtgcacgctaggcccccggggcacagcggctgctggaggcaggaagggagggaggacagatggctctggtccacggccctccagctggggtccttgcccacaggtgacaacctcccagctggcagtgccgcccaccacgtgcactgtgctgctgctggcagagagcgagggggagcgggaacgctggctgcaggtgctgggtgagctgcagcggctgctgctggacgcgcggccaagaccccggcccgtgtacacactcaaggaggcttacgacaacgggctgccgctgctgcctcacacgctctgcgctgccatcctcggtgagctggtggaggggactggaggaagcagttcaggcctgcgg

SEQ ID NO: 857663 - DNA, 588 bp, Homo sapiens
ttaacccacacagcttcccaccctggctgcccctcaccccagctggtccacgtgtccacaccacccakagcagcaccgttcacatccactgactcagccaagatttcctgagggtcagcctggcaggaattttgcccattctacagatgaggacacgaaggtccagaaaggggtgggactgggttccctgactgctgctgggccttggtccatggcatccactggctctcactggtcaaggcaaggaaggcccctgggaggggcacagcatttggtgggtacagaggaggaggtgggtttgcagggctcagggcctgaccatgggctctgaaggcagaggacagagtctgtacaggggattagacatggccactgggtccagttatggaaacagccgtccccgctcccctgccactggggtgctctgcccgaccggagggggaaccaagcttgcgtctcccgcactcatgaagggagcacctctagttcccagggccagatggagtgagggcaagagttggggaggtctaatttgcatccaggtttctggtttgaatactaagcagatggatggtggtggcatttgct

SEQ ID NO: 857664 - DNA, 636 bp, Homo sapiens
gtgagcacctgctcctctggggagcactcacctggctgtagatctggtccatgctaggtctgtcctctggagcctcgtcccagcacttcttcatcagccaacgcactcaggcggcccgtgatcaggggtcaccagcggccggcacagaggagggggagatgccaccctcctgatgatttcggcaaccaacaccatggggcgggcctggggtcctgggaaaggtcatgaaaggagcctggcctcggatcctgagagcgtgggcagagtaggcttatggcggtgccaggttctgggcctgaggatattcctcagctcctgtttccagggtatggctggccagtggatgtggcattattgttctcctgggtctaccctgggtgtggccaaggaaagggtctcaaactgggggccaggagagccgcgagctggttttgaattctggatctgccaccacaatactatgggatggtggagaagacaatgacctctctgagccttagtctcccgatctgtgaaatgagcatataaactgccttcttttttcttttttttttctgttcttttttttttttwaatgtcgcgatcccagctcaccacaacctctgcctcccaggttcaagcgattctcctgcctca

SEQ ID NO: 857665 - DNA, 515 bp, Homo sapiens
atctgtccttagccttaggaatgagccagggggcaaaaggtaagagattctgactcctcatcctcagcaggctctggtgctccctgctctgcccgtctgctgattcarcgtgggtgcaagtgagtctctaccgaacatcacagatgtggagaagcaggccaggcccggggctctgtgaagtcacagggccagagcttcctacaaacaatcccctccaagcatggccaagaaaaaccccaaacttggagctcaaagctgaaattccaggagctccacttccaggaattaatcctgagagacaaatatccagaaggtggacaaagaagaacatggcagaatttatttataatagcaaaaatctggaaacaatctagaagtctagcagtaacagcaagggtaaatacattcatgtatattcagatagtgaaaaattgtacagccattaaaattatgtttgcaaacaattgttattaatgtggagaagtgttaagtgaaaaaggacagaatacaaacgc

SEQ ID NO: 857666 - DNA, 433 bp, Homo sapiens
gcatcatttgtaattgtaaaaaaactagaaaccactcaaatgtccatcagtaggggcagcttgaccacacaatagacaactctgtagctagaaaaaggaaggaggccaggcgcagtggctcatgcctgtaatcccagcactttaggaggccgaggtgagtggatcacaagatcatgggttggagaccagcctggccaatatggtaaaaccccgtctctaataaaaatacaaaaaaaattagccaggcgtggtggcgcatgcctgtaatcccagctacttgggaggctgaggcaggagaattgcttgaacccaggaggcggaggttgcagtgagtggagatcacgcccctgcactccaggctggcaacagagcaagactcygtcaaagaaaaaaaaaaaaaaaaggggggggcggatgaagaagatctctgcat

SEQ ID NO: 857667 - DNA, 609 bp, Homo sapiens
atgtatacccgtgtgtgtatatgcatgcatgtgtttgtgtgagttgcaatgtgtatacaactttacacaataagtgaattgagtacatgtacctgtttatccacggaagtgtatgatgactggacayatgtaaatatgtgtatttgcatgtgtttatactttgtgcatagatgcatgtttgtgtatttatgctgatccatttaagcgtatgggatgtgtgtggatgtttgtgtaacatctgtacatactccataggtgcatcttaatacaggaatatgggtgcgatgtgtatgtgtgtgtgtgtgcctgtgtgaacaggtgcggctggaggtctatgagtgtgtggataggtatatttgcctgtgcgcatgtgcgattcacgtggtgtgagtgcacatggtcgcaggcaaatgtctgtgtgggcacacacatgccctgttgcccttttctgtcttttcctgttgggaaattacagaacttctgagtcctaaccatggctggtggctcttccaggaacatggtttcctggacccaaaaggtaagcttgtcagggacccacgtgaatgaggaagtgggtgggcctgagtctggggctcctctgagaactgc

SEQ ID NO: 857668 - DNA, 589 bp, Homo sapiens
tgatccatttaagcgtatgggatgtgtgtggatgtttgtgtaacatctgtacatactccataggtgcatcttaatacaggaatatgggtgcgatgtgtatgtgtgtgtgtgtgcctgtgtgaacaggtgcggctggaggtctatgagtgtgtggataggtatatttgcctgtgcgcatgtgcgattcacgtggtgtgagtgcacatggtcgcaggcaaatgtctgtgtgggcacacacatgccctgttgcccttttctgtcttttcctgttgggaaattacagaacttctgagtcctaaccatggctggtggctcttccaggaacatggtttcctggacccaaaaggtaagcttgtcagggacccacgtgaatgaggaagtgggtgggcctgagtctggggctcctctgagaactgctgtggaccagggaaatcttgctgccacctctggtctttagtccacctctcagtagtagctttcaaagcttgatttttttggaggcgtctccacggagcatagtcctaagctcctagcctacattgtccctgtycctgggcctgtttggttgacattctcttacagtttaaaa

SEQ ID NO: 857669 - DNA, 604 bp, Homo sapiens
gcactgaggatgtatatttagcatggttttcacacatgttgctgagagtrgacattggatgaatgattggatgaatttaaaaataaatgaaatacctttcacaacatctggatggcaggggagtcagagttgtcctttttgcagcaaaatggcttagtggtttgcaacagaaggtagaacctgaatatatagtgtggttgctacatttgactataaaaacagggcttggagcaataaaccaaccatgattataataatagtgaccgtgtctttcagtgttggggaccctgagagtcagtatggtttatctctatatccctactctaaagagcaggtgactactttcacaatgaaaagaggggagccaccagatcttctatgtacaaagcctctttgagcctttttgagcatgtgggtgtccttcagaactgaagcagacctccaaggccagatatttaatacctgaaatgaagtaattccactggagtagaataagaaacatcagcctgggaacaatcaagtttcaagatgaaccatccatgtgaactctttctggaatattagttctatactacctatgccctcatcctccctccagatggtg

SEQ ID NO: 857670 - DNA, 594 bp, Homo sapiens
tttggagcaagaaatatctatatatctatatctattaatatttatatatacagagatagatagatagatggatagatagatagatagatwgatagtctcactctgtcgccaaggctggagtgcagtgacgcgatctcggctcactgcaacctccacctcccaggttcaagcaattctcctgcctcagcctcccaagtagctgggattacaggcatgcgccaccacatccaactagtttttgtatttttagtagaggcgaggtttctccatgttggccaggctggtctcgaactcctgaactcaagtgatccccccatgtcttggcctcccaaagtgctgggattacagacatgagccatagagcaagaaatattctgataaattgcttgggttggagagtgagggtccaagggtctgctcctataacaaaagatgctgcctaaattgctgaacataaactaaggaaaggagtttgcatttttccggagaagaagccagcaaccctgagctctggaggagaaaggaccacagtaggcgacaggtggtgtagctgctaagttgggacattggagatgagacgggtctagagcatat

SEQ ID NO: 857671 - DNA, 615 bp, Homo sapiens
gaggccacccccagcccccattcattgatttcgtgtcttaagttgtttgtgttttttattttatcacaccctcctatttctggttcccagaatgtaagtagttctccctccacaatgttcaacagtcctcaataatgcccggctatgtgaagatggaaagatgagggaaaattagcaccataagcagagtctggaaaggtacacagacatttaacagatggaaacaggagggctgccattctagaaagatatgaggactgctcatcagcctggcttccgctagaggagatctactttggtgtctagccaaattttgatcctttgccttaaatcttttctggaaagagatgggctatgaataaatatttggatttaggaggaattagtttagtttaaacatctctgaaaaataccacattatctcttcttcagatgcaaatcttttgagtacctaagagtggattttcctctctctggagtcaaccccaaaaccaagcctaactttgccttggttctctgattgtggctcccatcacctctggaaatgtggggtgactgggaatggaaagcgtaaagcygggggacgcaaagaaagatggttctcacccagtctct

SEQ ID NO: 857672 - DNA, 615 bp, Homo sapiens
gaggccacccccagcccccattcattgatttcgtgtcttaagttgtttgtgttttttattttatcacaccctcctatttctggttcccagaatgtaagtagttctccctccacaatgttcaacagtcctcaataatgcccggctatgtgaagatggaaagatgagggaaaattagcaccataagcagagtctggaaaggtacacagacatttaacagatggaaacaggagggctgccattctagaaagatatgaggactgctcatcagcctggcttccgctagaggagatctactttggtgtctagccaaattttgatcctttgccttaaatcttttctggaaagagatgggctatgaataaatatttggatttaggaggaattagtttagtttaaacatctctgaaaaataccacattatctcttcttcagatgcaaatcttttgagtacctaagagtggattttcctctctctggagtcaaccccaaaaccaagcctaactttgccttggttctctgattgtggctcccatcacctctggaaatgtggggtgactgggaatggaaagcgtaaagccgggggaygcaaagaaagatggttctcacccagtctct

SEQ ID NO: 857673 - DNA, 541 bp, Homo sapiens
aaaagtaggaaccaactacctaagtatgtccttgccattcagcaagttgaggtttttcttgctgaaaagggttagccagcccgtctctctttgcagtggtccttagttaggaggaagacacagatgggggtggtggcagggtgaggttctgagagagcaggagaggctggagcagttgagaaagtcagcagactgaaaccaccagagcgtggtggccggagcatgcagccagaagtggggctcgaaccccagagtaggaagaggaaggtaagcctggtaagcctcctaggcaagagagagagagacagacagacagagagagagagagagagagagagagagcggtgcaagggagagagggagaaatgcaaagagacggaagaatgaagagcaagggagaaaaaaaggcctgtctgggacagtggagcccctagccaggaggttgcccttggtcctaaacttcttagggctgctttggcacatatatataggatccascagtatgtagatgggacatgagccacctgaaccttcccacagc

SEQ ID NO: 857674 - DNA, 558 bp, Homo sapiens
taggggaaagatgctgttattatgttaatcaatccagaatcgtcactgagaagaaagytaaaaaaattcgagatcgcatacaacgtagagcaggggagcttcaaaacaccggaccctggggccccctcagccaatggatgccctggattctcccctccttaggacctctagcagctataatattgttactcctctttggaccctgtatcttaacctccttgttaagtttgtctcttccagaatcaaagctgtaaagctacaaatggttcttcaaatggagccccagatgcagtccatggacccctggaccggcctgctagcctatgctctgatgttaatgacatcgaaggcatcctcctgagaaaatctcaactgcacaaccgctactacaccccagttcagcaggaagcagttagagtggtcgctggccaacctccccaacagcacttgggttttcctgttgagaggggggactgagagacaggactagctggatttcctaagccaactaagaatccctaagcctacctgggaaggtgaccacatccacctttaaac

SEQ ID NO: 857675 - DNA, 600 bp, Homo sapiens
ctaactcttttttcccctgcctctactttgagactcaattgcttccccaggacttcttttctccccaagccaaagaatgaaagttcaatcatcccagctcagttcttatcaagcattccagctagcctatgccagagatgttacacagctctttaataatagtggccatagctgtaataacaatgacaacagtaggtaacggtagtcataccaacagtagggcagtgcattttatattacaactggtttcttgctctagtaggcttggggatgggtgaagacggacagggctggcgcagaccctttccttctcctctccagcccacagtgatctgggcttttacaagacagcctgcttccattcagtagtgtgggaaagttccttcttggcttagcaatacccctgagaccttgttcagtgggctgtgtctctccctgggatgctgggagcaccaagtgtggccgagctagggctgctgacttcctctgggcgcctctgggctgcgagggtctcttayaggaattgaggccctttgctgctccaagaaatgctgaggctgtgggcagaggggtgtacccaaggggactcttgctctgtgt

SEQ ID NO: 857676 - DNA, 467 bp, Homo sapiens
aaaaaattagctgggcggtggtggcagacgcctgtaatcccagctactctggaggctgagscaggagaatcgcttttacctgggaggtggtggttgcagtgagccgagacagcgccactgcactccagcctgggcaacagagcgagactccatctcaaaaacaaaacaaaaaaacaattatcgtactcttaccgtgcaccaggcaatgtactatatgctatgcatatctggggctccttaggagggagacttactgcatctctctttctctctctccctctttttcacacacacatgaaactgagtttcttggtggttcaataacttgctaaagcctcaggccaatgagcaaacaggattcagacctaggctgcaggattccacggcctgtgctctgtgcactgtaaaacacaacctctcctagcaaatgtaatttcagcaaggaaaaacttcatgaagcactcgac

SEQ ID NO: 857677 - DNA, 467 bp, Homo sapiens
aaaaaattagctgggcggtggtggcagacgcctgtaatcccagctactctggaggctgagccaggagaatcgcttttacctgggaggtggtggttgcagtgagccgagacagcgccactgcactccarcctgggcaacagagcgagactccatctcaaaaacaaaacaaaaaaacaattatcgtactcttaccgtgcaccaggcaatgtactatatgctatgcatatctggggctccttaggagggagacttactgcatctctctttctctctctccctctttttcacacacacatgaaactgagtttcttggtggttcaataacttgctaaagcctcaggccaatgagcaaacaggattcagacctaggctgcaggattccacggcctgtgctctgtgcactgtaaaacacaacctctcctagcaaatgtaatttcagcaaggaaaaacttcatgaagcactcgac

SEQ ID NO: 857678 - DNA, 525 bp, Homo sapiens
tcttgagagcaggaccctgtcttgtctacctttaaatcctagtacttaacacacagcaaacagtaactatttgatgacyaaatgtgagccagaaaggacaggaaattgtaactgaggctgccccatgcgtgctgcgcctggtggatttcaggcagagggctagactgggtgaccttggggcattcctcctttctatgaaatttgttatttcaaggagactagaaaagagacttctcagccacttcgccagctattggtccttctattcattagtgtttgctgagacatgctatgtgacaggactgagccaggtcctttcaatggataggagatgttttgagcataaaatccacgttctctcttgggctgggctcttctaccttcttccccctggtgcttgggctctgaagaaaaaaagataggtaggagatgagtgatggggcttctgagggcagggctgagtgactttctgtgtatttgctctttctttatcagaagtcaaatgcccacaggcacctgtcatcc

SEQ ID NO: 857679 - DNA, 550 bp, Homo sapiens
taggtattacagatggttgtaaattacaaaaagtagggcagtagaattcttattggacttgacatgaataagaaataaatacccttttataaatgactgggatttcagatttttttaaacctataaactcacagatcaaagaagctcaccaaactctcaagctcatgaaacatgaagaaaactatgccaaagaacaccataatcaaattattcaaaaccactgatagaaaaaaatcttaaaagcaataagggggttgggggagggcattacatacaaaggaacaaagaggacagtgacagaatatttattgatagaaacaatgcaagcaagaagacaatagaacaatatctttaagtattaagaggaaaaaaaacacctgtaaacccaaaattctatacctagtgaaaataccttcaaaaacaaaggcaaaaagtcttttatgagacatgtgaggaagagagctcaaaactaaaaacaattatttactagcagacctatgatctaagaaatactaaaaggcccrggtgtggtggctcatgcctgtaatcc

SEQ ID NO: 857680 - DNA, 517 bp, Homo sapiens
gggaagaaaaacactgcttgctcaatgctgccatcatgtggttaacatactttacatgcaagagagtggtcttcacttttcttccccttgctcataagctctttgatataaacctccctctgagaaagtttttctttttaagttggataaataatattgtgtgaggatggctttgcttctatgtgactaaacaaataatgtcaaaaagaatttgaaacaaaatattgggtattttttctttgaatgaacttcaagtgcagaaattggattaatcataattcatgggcttgtgacacaacctcaatattggtccaaacacaatgcaatttaaattagtttttcataataaattaggcatatgcaaatctactaccccaaacaaaagttatcgccttgatctatatttaaccttaatctatatttaaccttatagtctacccaattagtccattctccrtcctgctccaaacagatgtaaatttcatcctgagtcctgtgcctgtcattcttttgagtc

SEQ ID NO: 857681 - DNA, 655 bp, Homo sapiens
gacgcgctcaggatccaggcgatgggcctgggcatagccgtgtctgcaagggctgtcgtcaggggatcgtcgagaggacctgcttctacctagtggattcacagtactacccataaaaataaaccctgctaatgagacggtgtgtgggaagggggtgggagcatggtcattttattagagctgagcattaataatttccttgaggaccttgggcaaactctttgttttgaagccagtggaggcctgggtcagtgtccctgagttctgagttaactgcgtggacaaatgatgagaaacagccatcactttagggatgttttaagagaaagtcggtgtgtgctgaaacagtgagttagagagactgggaacagaaagcaaagaccagaaagacaagaagcaaacatatgggaagtcaaaaaaggaaattgcctggaaataaagccagatgggtctggcaggagtgctgtcttggttgacatctgtgggacatgaccctggacagatcactggagtcagaggaggtcattaattaagaatccgctggttatccttggtgttttaaggttaccacggtagaaatagaaacgtgtgcagcacatagtcaacaagttttggcaaatgaccmaataagatacaaacatttaattggattagg

SEQ ID NO: 857682 - DNA, 511 bp, Homo sapiens
ctctccccagctgaagataaaccagctttattgagccatgcccagattgcagaatcatgagtacaagaaatgattgatattgttctggagtggcttgttatgcaacaataggtaactggaacgtttgctaacctcttgaagttcactcttaaatcccatctctttgataaggcgttggccaaatattttagcacactctgatgctcccttttactatattctcatagtctttgtgatctatactattctttttgttattcactcacaaatatacatatcatttttaagatttcctttatgtaagctatttcctttaagtattgtgtaagttgtttccttgtgtaagtatatttaagtatctgtatatgtgtatatccacatatatgttmatataaacacacatacacacacatgtatgtgtaaatacattccttcttttataactctggtaacacctagcacatgacttggccttggtacatattcaaatatatcttgaataattaaattg

SEQ ID NO: 857683 - DNA, 640 bp, Homo sapiens
cctgttttattaaattttaccaggtatctacttctaaaaagtccttatcagtgccatttctttaaacccaacatttagtaacttaacagatgtatttttaaaattagaaattttactttcaatgtactgaytttatacttaattagtagctttaaaattttttagaatatgtgaagacctgcatgaaaccattctcgacatttttcaaggattgtttgctaactggcttgtttttgcatacagttttaaacatgtctaccattggtggtaaacaagaatgatcacttgaaactatgaaacctaccaaagtgccagtgtattaacactgctttttctttcttttataagaatcattactattaactcgtacttgttggtgcgcagaggatgccattttcatgctctctttctttataaaggccttctctatagctccaggtttccgaagtataactgtgcatcttctcctccagtcaacaaagaatcatcctgcacattccaacagaaagaacgaactgtacagcatgccctccctgaaggctagtcacatgggccaatcctaatgttcattaactgaatccttcctttgttatccaaaggaaggataacaagcaatgtttccatcttttcatgatatagg

SEQ ID NO: 857684 - DNA, 640 bp, Homo sapiens
cctgttttattaaattttaccaggtatctacttctaaaaagtccttatcagtgccatttctttaaacccaacatttagtaacttaacagatgtatttttaaaattagaaattttactttcaatgtactgactttatacttaattagtagctttaaaattttttagaatatgtgaagacctgcatgaaaccattctcgacatttttcaaggattgtttgctaactggcttgtttttgcatacagttttaaacatgtctaccattggtggtaaacaagaatgatcacttgaaactatgaaacctaccaaagtgccagtgtattaacactgctttttctttcttttataagaatcattactattaactcgtacttgttggtgcgcagaggatgccattttcatgctctctttctttataaaggccttctctatagctccaggtttccgaagtataactgtgcatcttctcctccagtcaacaaagaatcatcctgcacattccaacagaaagaacgaactgtacagcatgccctccctgaaggctagtcacatgggccaatcctaatgttcatyaactgaatccttcctttgttatccaaaggaaggataacaagcaatgtttccatcttttcatgatatagg

SEQ ID NO: 857685 - DNA, 658 bp, Homo sapiens
aaaccgaaaaaaccctagctttcttatggtgtaattgacatataataaactgcaccaattttttttttttttgagatggagtctagctmcgtcacccaggctggagtgcagtggcatgatctcagttcactgccacctctttctcctgggttcaagtgattctcctgcctcagcctcccaagtagctgggattacagacacctgccaccacgcccagctaatttttatatttttagtacagatggggtttcactgtgttggccaggctggtctcgaactcctgacctcatgatccacccgcctcagcctcccaaagtgctgggattacaagcgtgagccaccgcgcccggccaaactgccccaatttaaagagtacaactgcctaagcttgggcacaggtgtaaccctgtgaaaccatcaccataatcaagacaatcaacatgttgcaaaagggcccccaattcactctgccaaaaggaaaaataccaagctgaaagctgagtcattgaagaagctgcctttccttttattcctaagcagatagctacagataacaggttaaacgtctctgcagggagctactctatgttcaccttcttttatgtaaagtgctggtttacttagcaggagaccagtacatacttgactattgccctac

SEQ ID NO: 857686 - DNA, 616 bp, Homo sapiens
cccaagacgattccaagtaataaaaagcaaacattatttcacaatgtgtctgtgtgtatttctaaagtctgctggaatgatatctgtgtctcccgtgctcatttgcaatgtgaacttgctgctttctcatggagaggtggagtctatctctccaccccctagaatgtggcagggggtcacattccagggtgatgctgggccagtgccaggcggggcccttcactggcctgaagcccggtgccaggagaaaggagtgcaaatatcctgagaaggctctgcagcgagaagcccaaggcctgtggggaagccgcagaggataagctgccttgaagggaggcaggctgaggagcccagggtgccgaaaagtgagggaagaaaccatctcacaaatagatcctggcaccctcaccctcgctggtgccatgtgcatcgagaccaactgccccgctcagacttcccaaattcttgacccacaaaaatgtgcacawataaagtggtttttaaaaaaataataaaatctcattttattaataaaattaataagttgattaacctagttatagggcaattttttatgcagcaaagcacataacaaccgcctggtttctataaggaa

SEQ ID NO: 857687 - DNA, 544 bp, Homo sapiens
gcattcctggtgtctcttttctgtctaaatttcatcttcttttaaggacacaagtcatattggattgtggttcaccctaaaagtctcatttcactaaaccacttcttcaaaggctctaactcctaacacagtcacattctgaggtaccggagtttgagactccaacatatggatttggggaggatacaattcagcctctaacagttgtctctggcaatacttatgactactaaaatcataagcaaagaaggttaaattgatatttttttgttgttgatgaaactgttgtggttattttataaatgatggattttcattattcataccctcctcctactggataataatgagttatctgtgtatgtgttaagattctaataaaggcaattaattaggtttgtaattacaggcatgatgactaacaaagtgggggcagaaataaaatgatggtgacwctgattccactgctgtgcctataatgtcacatttacattcatgatctgtgataagaattaagatgctcatttatttcagtgaggaaagt

SEQ ID NO: 857688 - DNA, 624 bp, Homo sapiens
gccacagtgggtccctgcaggttgttggggagtgtgccaagaatgccaggctctgcctgctccttacctaggacattcctcagggttgtgtttgcagtgagcaaccttgagacatgaggtagggtctctgggacaaagagcagggttgcttatgttgcttggtataaaaggatgcattccctaagctcagtgttcctcagctgtgacatcaatccactatatgtgtacacactcattcaggctcatataatgcccccatgagacctgggtaaagggggaaccaacagaaacatgttgaaactcatgctactttccacacataagtaacaaaagtcctttatctctgacccaagcacctcatatcttctgccagcatccatgaaacagtatcagatcaacctattagcatataagtacagtaaaatcaaagtccaaactcatgaagactgtctatgaggcaagttacaaagttcttgagtattctatttttagtataatgaaacttccagtggtatatctagctagatctgggctcctaatggcttctaatggctcatytctgtcagcgtcagcaggaaaaatgacaattaagaaaaaggttcaggtagcttgtaattctactag

SEQ ID NO: 857689 - DNA, 559 bp, Homo sapiens
ctgtgaactcgaattgcagagactttccaccataattttaataatgtgatattgtggagagttttagtatggccttatggtaagattaggtactttggagatacactgctggtttcagaatcacacttagtcacctcgttactgtgtgatcttggccaagatgctcaactactctgagcctcagttgcctcatttataaattcatgaagataacatggtaatagcaactattttatgagactgttgtgaggtttgaaggtcccaaaatatattaagtcctcaataaaattaacaacaattattattattctaaaattattcttagaatttatctaaaaatagtactgcttgaatatccatatgtttattcctgagtctctacctgctatgatttggctgtgccccactcaaatctcatcttgaattgtagctcccataattcccatgtgttgtgggagggacctggtgagagataactgaatcrtgggagcagttttccccatactgttcttgtggtggtgtataagtctcacgagatggttttataaggggtttcccc

SEQ ID NO: 857690 - DNA, 610 bp, Homo sapiens
gaaggacagtggggagtgaggagtctgaggggaagagacaaatagttaaaatgaatgaataagacctagtgttkgatagcacaacagggtgactgtagtcaataataatttaattgtacattttaaaataactaaaagaatgtgattagattgtttgtaacacaaaggatatatgctcgaggagttggataacccatctgccatgatgtgataattatgcattgtatgtctgtatcagaacatctcatgtactgcataaatatatatacttactatgtcctcacaaaaattaaaaatggaaaatataagaaattgatctagaaagtatgtaactgtcaacaggaaggaacgtgctatatgacagtaggtaagtcttaaattgtgatttggcttccaaagatatgagaggcggccagcccacagctctggactcctgcgacctcatgggttgcacactcagcttgtaggtggctcattgtgtgtgtgcccagaatgaaaaaggctgtgaggagctgcatcttctcactcacttgtatctgtatcagctttctatcctttatactgtttgttgctggtttgatataaactaaagttagagcatccatgaatc

SEQ ID NO: 857691 - DNA, 611 bp, Homo sapiens
tccccattagaactaacatttataaagcacaaactgccaggaactgttctaaccactttacaaatactgactcatatcattggcacagtaatatcttcattttcttttctttcttttttttcttttttttttttcagatggagtctcactctgttgcccaggctggagtgtagtggcacgatctcagctcactgcaacctgcgcctcccaggttcgagtgatcctcctgccccagcctcctgagtagctgggattataggcgtgcaccaccatgcccggctaatttttgtatttgtggtagagacagggtttcaccatgtttgccaggctggtctccagctcccaacctcaggtgatccacccgcctcggcctcccaaagtgctgggattacaggcgtgaaccacagcgcccagcctagtatcttcattttcagacgggagaacagttgtccgcagacacagagccaatgagcccagcagctgggctcttacccactcctgcaccygtttgcacgaagaggataattacagctcccagctcaaggggaggctgtgagaatcaggtgagagaatgtgtgcgacagtctggtaagtggcaggtgcccagtgca

SEQ ID NO: 857692 - DNA, 622 bp, Homo sapiens
catgttttatgctattaagaagaaatatacttcataaatccagaagggctgtcattttcccattatgggaacatctttagaattgccccatcaaaattgaagtcatatattcactttttcattgtaaggctgaaagttattgagagactaaattagcccagtgatggtgaactggagagagcaaatggattcaaatctatttacaggatagaatacacatgactcagacaataattgaattgggaagacaagggagaggcaggagttaaaataattctgaggcacccagtctgggttattggatgaatggggatgtcccctccatggagataggagaaggacacgtatttggaggaaaagagaatggagtttgtggtgtattgagtgacaggagtctgcaggacacccaggtgcagaaatttggtgggagactgtcaggagtctctgcgtgggcttcagcagatagggtgggactggggctattaatgtggaaaacrtcagcgaatacactttcatttccccctgttttgcgtaagcccccagtttggatggaataggacattagtctctgcccagtagcagagagaatacagcacagcttagtggttaagtactggactct

SEQ ID NO: 857693 - DNA, 435 bp, Homo sapiens
tcccctactggaccaggcacttcaaggacagaaatggtaccttatttacctttccatctgaaaggcastatagcatagtcaaggtaggactctgcagccaagatgcctgggtaaaaatccagattttgtcacttagtagtgctaactgtgcctctgtttcctcctctgtaaacaggagataattaatagtacctacctaataggatgtaatgattattaaaagtattaatatattgaaagtacttagactggtacccaccacatagtatcatgtgttagttattattgttgttattagttgaattctcagtacctacctagcagagattcagtaaatggacacgttgtgtatcagtcacagatgggcaaagtataaaggtacaaatcctcctttccctgaaattctgcctatttcatggacactgctggccctgg

SEQ ID NO: 857694 - DNA, 625 bp, Homo sapiens
agggctgagagctgggcttaggcatggctgctacaatgcccaccttatgggagccgtaggcatttgcagcccgggccctagcacagggyaccggctgttcccagcacttgcagactcagatgaagcttcttgccccctggctagggacctagaagatggctgctttgccactgtttaaaaggtaaatagcccaaaatgggggagagttgaatccacagaggacccgctttgaccagagagtcaggagataagctcctctctcttcctcccctgtgacgatttcgaagtgtggtggctccatatggcccatccagagagtcctgcgtggctgtgacaggtgtggtttctgtggcaccctggccagtttggttcatatcaccccacattgactcccttcccctcacccttccagctctgggatagagccttataccttaaacttggcctcaggctctgatttctatggaaacccggaaggctaggagccttgcaggaaggcttaggtttcgaaggtggaaagggaagagaggaaaccatttcatcacacccatatgtccacagcgctcaacttacctgaggctcaaacacataaactggcacagaccagaactgtgaacaatgaagc

SEQ ID NO: 857695 - DNA, 594 bp, Homo sapiens
acatattttcagtagttttttttttttaatgtgtgttcgtttgtacaatttttttttttkggtcagtattctgaatgtttacatctgtttgacattagccatttaatgccttttttaaaggcggtattactcctacagtgtaacagcaaaatgtgaaatcaacccaaacataacatgcatgacaaacacagattgggggcgaaggccctgaacctacatagacattttatatcagcatacagaaaagtaaaatcctccttcagtcctctaccaaagaatatattattcccacaggaaaaactcagaaaaggtgtgtaaaatcctcagaagggggagcagttgattcagtaagactgcgacaatttaatactgttacgcttgctttgatacctgactaaatgtgactgagtgcaacaagcatttaagaaaatttttagacagtgttttgtttagaattcagggatcatgcattctttaatggtgctgtttgttttttatttcttttctacaaagaaaacaagtgttgcctacaaaagtgactgctcacaataccataagttaaatgaaatgaaatgtttgtctcttcatgtttct

SEQ ID NO: 857696 - DNA, 614 bp, Homo sapiens
ccatcaattgaaaatgatgcacagtttcagaattcactgaaataagaatcataagggaatgtttcctagacagcacttaataaattttgtgaaatttaataaaagtttatgtgataaaatttttttccttttctttcctaagcaaacagctttaaaagatgattgatggctgccattatgggtctatatttgtatttcctcattttagaagcttttcaaaaatataaaaatacacttaaagcatttccagttatattttaaaaatggtaaaaggtgattatttataggcaatcatattcatactgatagactctcagagagcaattgcaaacataaattttaaatgccttttggaaatagttgaggatgaaaacatttacataattttttagaaaccctggctttttattgctgcatttcagtattccctctgggcaaaggagcagctactctaaagatttatttgataatggaatgtttgatttctttgttttccctttccaatgtaagtttatagttttcactctaccacaatgtaccgtattttaaaatttgaattggctcactattaaraataaaaatggttctgttttagaggattaaataagctaatg

SEQ ID NO: 857697 - DNA, 569 bp, Homo sapiens
caacacctctcctctagattacgacaatagctgtctaatgggtctccctgcttttttccttgttctcgtatctttttcgtagttagtgatcctgctaaaacctacatgtggccattgcctttctagctcaaaactctacaatggcttaatatctcactcaaaacagaagccagcatcaaggcaccatataacctggcccccataacttccctggctttgtttcttaacatactctcccttgttcactttggcctcacagccacaccagcctcttgctatctctggaatattccaggcactctcctgcctcaatgcctttgtaactgctgttccctctacctggagttctctcccctgaatgcctgttctctcatgctcctcaggtcttttctaaatgtaaccctctcccctactcccccactcccttatgtattttgccccatatcacttgtcaccactgaataacctatacattttagrtatttattttgcttattttctgtctctcaaagaaaataagcttcatgagagatttgcttttgtttttcactgctgtaactgcaatgtca

SEQ ID NO: 857698 - DNA, 671 bp, Homo sapiens
ttggggtagctaaaaagtatcaggaaaactagcttcaaaatcatcagaggagcttttgtttcagaacaatcacaagaacactcgtcagctagtattgtaaactacaggtgaaataagagagcagtctgaaatacraaagagattaaatgactggctccttccccaataacctaaattctttcatatctcatctttattttcaggcctgcaagcaagtaatctcaatgaatgtcaaaatctatttataagtgtgtcaatgttaatgccaggagcaacaatcacttagactctaaaactgtaatacaattttttttaaatgacagaaagcattaaaataccatcattcatattctctgtcagtaatcaaagctgaaattttaaaacaaatatattctacaataaataaataaatgtatcaggtggaaaacaaacagccaaaatcatactttatgattaactactataaacaaatacaaaagaatttttgcaaaataatagcaactggagcatcaacaacagttctcaaatttttgccaatacattatctagtttccctttaatcctgtatctcatcttaaacaaataacacctaaaatataatatattgtctgtaaaccagaaattggaggagtacatggaactgttttcatatagcatgaacatttaagaaa

SEQ ID NO: 857699 - DNA, 606 bp, Homo sapiens
attcacaacaggtgactggtggctaccgctttaggtgacacagctgtaagcatttgtcaagttcagatttggtggcggtagggctgaggaatttaattcccgttgtaattgatatcacagacactgttgtggaatgaatcaagataatattgtatgatgtgagcagtggctagtcttgtaaaacaaatgaaaaataaaaatacatctcagctctaccaaacttagactggagctgtcggtctgtgatatgtctagtaatgtctccagaatatatactgaaataaattcctccttaagaaaatcagattgtcctcttttccccctttgggctaccaggaaagcttaatttgaaataaagtgctgggatgggacttgccctaaaggagactttagtaatctcatcaaccctgaactggcggctcacctgccttaactgtgtttcctggatctttcagctaaggcgggtctttggaaattgcctgccacccttcccaccaaagtactatctggcaatgaccacagctatggctsatgagaggagggaccaactggaacaatatttgcaaaatggtatgtatttgcagggttttttaaaaaacagattta

SEQ ID NO: 857700 - DNA, 606 bp, Homo sapiens
attcacaacaggtgactggtggctaccgctttaggtgacacagctgtaagcatttgtcaagttcagatttggtggcggtagggctgaggaatttaattcccgttgtaattgatatcacagacactgttgtggaatgaatcaagataatattgtatgatgtgagcagtggctagtcttgtaaaacaaatgaaaaataaaaatacatctcagctctaccaaacttagactggagctgtcggtctgtgatatgtctagtaatgtctccagaatatatactgaaataaattcctccttaagaaaatcagattgtcctcttttccccctttgggctaccaggaaagcttaatttgaaataaagtgctgggatgggacttgccctaaaggagactttagtaatctcatcaaccctgaactggcggctcacctgccttaactgtgtttcctggatctttcagctaaggcgggtctttggaaattgcctgccacccttcccaccaaagtactatctggcaatgaccacagctatggctgatgagaggagggaccaactggaacaatatttgcaaaatggtatgtatttgcagsgttttttaaaaaacagattta

SEQ ID NO: 857701 - DNA, 299 bp, Homo sapiens
aaggcgccggggtccctggagccgcgtttcccgagccggcggggacccgcgctgccggcagccacacgcccggctacttcctcctttgcgaccattttctcggcctcagacgctctcaaactttagggtgatgacgcgccgggagggtgggtgagattcggttcctccgcggcgctcccgccagtggccccgggattctggggcgttgaacgctgagctccttycgtgggtaagaggtggaggcgctcccaccacccggagctcctgccggcgccccagcctggggaggaagtgcagtt

SEQ ID NO: 857702 - DNA, 540 bp, Homo sapiens
gtgactccagcaaaattggaaaaaacacatagagccaggcctatctctgtaagagcayttaagagtaggggcatgactggggtattctgtctcgctttactgcttggcacattcagtaaatacttgttgaatgaattcagtaaatacttgaatgaatggttcaaacatgagataccatttttcttcagggtatgcatttctgaaattagaaactgattactaagacttggcatacttttgttttttacttttcattgaaataattcaaacttaaaattgcaagaataatattcagaatttttatatatcctttacccaaatttaccaatgtttaacattttgccacatatacttttttcgttcccttcatatatatatatatatatatatatattttctgaaccattttagaataggttgcatatatcatttccctttacctcttattatctttaaaaattttatatatatataaatagatagagatggaggtcttgctacattgtccaggctggtcttgaactcctgggctcaagcaat

SEQ ID NO: 857703 - DNA, 614 bp, Homo sapiens
agagatttattgaaaatgaaagtatactccacagagtgggagcgggccatgcaktggctcaaggaccctggttacaggatcttctgaggtccaaataccctctagaggttttccatcgagctcttggcatataccccatgcaaatgaagtagtggcctgtgatcagtctggttggttgcagaaagccttgtttttggtctgtgcttctcctcatgcgtcaaggagttgccttctgcaaccaatcagaggctgaagtgaagtcacaaaattatgctcctatgcaaacatctgattggttgcagaaagcaactaatcaaaggtactttcaactttccatctgccaggcagaaatgggggaggtttgcaaagggagtaacctttggtccttttgttacttaggtgtgacaagttggggttttccttttgatttagttctaggaagtcagcgtgaatcagccttaggtgtcctgccttccgaccctattctcctgcttcagctcagaccaattgaacagggaattccgggatccctggtacctggaaggctgtcagggtttaggagaaggtcagtgcgagctcagtgtgggcacagggctctcagactccttgatgca

SEQ ID NO: 857704 - DNA, 633 bp, Homo sapiens
aaataagggaactattatatttaagagcaaacaaaaatatgatttttaaaggaaagaattatgttataaccaaattagctttgagaattaaagagagagtcagtttttctgaggaaattacagcagttgaatctctagcagtaagagagaaagcacaaaagcactttacaagcctgcaggaccgatttccatttaaacaccatttcatgggtttacctctaatgtttacagccaatatggaaaagaaatgttaatgcaattctaggggatagaaagcagaagagactggaataaaggaaaagccagagttgagaaggctgcaccccacctttggtgcaggaggggttaatgtgtgcttgaggactgtttttctctctgagcttggaaaactcaagtcttcagtgcctatggctaagccagttcctgtacagtgtgcccaatggaactaactacaacattagttggcttcttaaatacagaggagtccgcctttggggttcctagggccagagagagaaataacatggtaaaacacctagagtaacttcaaactgccacaaaggcaacagacaaaaaacatgagcttaaagcaacaggaaagtcctttcrtgtgtctaacccccagcttaccct

SEQ ID NO: 857705 - DNA, 620 bp, Homo sapiens
tatgtataaatgaatatttatttatttttaaagtgattatagtctagtgactaatttacaacatacgtttacaatgaaaatataaacccattcgatgccaaaataatacatgactgcattatcattttaatggctatataatattctatttcatggatattaaaaagaattactactatggactacaacggatcttccattatgagcattcagattccatggacgtttttgctattaggaacattgcttcctgacatcactaatgcagaaatttcccagctgtgcttagttattacctggagacaaattcttgatgaaatttagcccgatgaaagtacccatatttcgaagactctaatgcctgttatcacattgcacttagaaatattacaacgattcatacttctaccaacagcatatgaggaaaccaacttctcctcaccacatagtggtattagcattccattaacagagaggtattcacttaatgaggttttagaatacagaaaactaatttgtaaatagcagtcccratgttatttcagcacagggatgtgtccattaaagtccgtggtgtccaatcattcattttgcatgagtgctatggcagagtgatcaag

SEQ ID NO: 857706 - DNA, 636 bp, Homo sapiens
ggttttctttctccccagtctttcttttgatgagggcatttcatgtttgtgctttaatttaccaggggaaagaatctgaataaacatttttgtctctcttcttaggttcaacctaaggaaaaagtgagcattatggaaaagtttacacctcatgggctgcaaatcatgtggccgtagcattagaatcactattttcactttgggggagcctctgaatctgtgcattttcacccctgattagttacctcttaaacaaaaagcaactacaggcttgtccgtttaatgagtatctatgccctgatgactcttctatttgttatttctagccccgacttctcccctctcattaaggaacggctatgacaaatttgcccccaaattggagtggcctactaccctagcagtttatggctcactcatgcaaagtccagttggcagcagaggtataggcaggatcctaccatatcctttccacgatcaggctgatggagactctgcctttttcacatgtggcttcaagtggttttcctaacctcatwatcaagccacagatagggaaaaaagcagtacacattggaacaggcccaaaggtaaacaatagactgtagatatgttagaggctgggtaccttaaaat

SEQ ID NO: 857707 - DNA, 396 bp, Homo sapiens; identical to SEQ ID NO: 821320

SEQ ID NO: 857708 - DNA, 637 bp, Homo sapiens
aagtctacaagtattataaatacttaaattgaaacaagcaatgaaatttctgtaaaaaacaaaacctgcttttaattagaacattttattagtgcaaaattaatcagaactaagaaaatttttgagattaaaacatatttaattctatttgacaaacataccattcaggaataattatttttctgcagatattcatttatttgttcatttgggaatgatttaggacatacttatataaaaaggtctacctgatctaatccacgttagtcagttatgtaattagtcttccattgcaaaatagattttgatgtacataccagggttttgtctataatttgtattacattctttagctccaattgaaaatagtaatgcatatcataaaaagatgtataggctataaatgcatttttattgttctcactccaaaaattttctactacaaatcatcaaaatattattgtgttctacttccttgtatatatatattattttttggtaaacattgacaattcaaaggaaaactccctaacatagtactgtgttatatattttagaaatgatcatttmaatttatgggttaaaaatggtgctctgtatgagtagacagacaatttagccagatatattatatgtc

SEQ ID NO: 857709 - DNA, 547 bp, Homo sapiens
ggaaagaattcaggcagcacrtagttatctaaatgaaaggcactgaaatgtgaagccagcggagactcagctggaagtaggggcaaaagtacactcactgaataggacctctccatagcagacagccaaggcaccaatgaggaatatattttgtctgaggctatgaagcaacaataagccaagattctagattttccttcccaagttataacatgattattaattaaagtattattactttcatttaggcattgatgaatgtagtcttaaaaacttacttacttaattcaacctgcagtatgtgtcagaaactacaaatatttactttgagtttttgataattgtaaaagttcactattatcaatatcatttttgctggaaggaatttaggcccaaacagtttaagaaatttgcaaaacatcaaacagagaatcatttggcaaaaccaagcaacaaaaacacattttagctataacacctcatgtaatcagaaaagtgtggaggggtatgtatctgagaagtataaccagtgatccttgcctttttg

SEQ ID NO: 857710 - DNA, 549 bp, Homo sapiens
gttaatgctgaaatgagttaagactttgggggactgttgggaaggaatgattggttttgaaatgtaagaccatgagatttgggaggggccggggtggaatgatatggtttggctgtgtcctgacccatatcccatcttaaattatcttgaattgtagctctcacaattcccacatgcaatgggagggacccagtgggagatagtggaatcatggcagtaatttcaaccttactgttctcagggtagtgaataaatctcatgagatctgatggttctgtaaggaatttccccttttacttagctctcattttctcttgtctgccaccatgtaagatgtgcctttcaccttctggcatgattgtgagcctccccgcctagtggaactgtgagtccaataaacctctttttctttataaattacccagtttcatgtrtgtctttatcagcaatgtaaatttgcaaaaggaacctcatagatttgatcttctcagtagaggtccatgggctttataattaaagacttagagaaatacttgcaaaacatatact

SEQ ID NO: 857711 - DNA, 646 bp, Homo sapiens
gtaacacatacattttggttttccagtgcataaaatgtaygtttacactatactgaagcctattaagcgtgcaatagtattatgtttcaaaaatgtgcatacctgaacttaaaaatattttatttctaaaatatgctaacaatcgtctgacacagagacacaaagtgagcccatgctgttggagaaatagcactgatagacttgttccatgcagagttgccacaaactttcaatcttaaaaaaaatacagtatctgtgaagttcaataaagcaaagagcaataaaaccagatacacctgtacatgagaccctaaagcagagaatctgtcctggtcaggtcagagagatgatacaagaaggaggaagagaagaaaggagactgagaagggaaggagaaggagaaagagaagaagagatttgaaggatgagagggtcttaacgaattgttactggctttgaagatgaaggaaagtagccatgaatcaagggacacaaggagcctctagaagccagaaacagtcctcagctgagagtcagcaaggacaaactgatctcagacctgcgacggcaagaaactcaattttgtcaacaacccacataaagagaaatgaattttcccctagagaccccagaaagggatgcggcc

SEQ ID NO: 857712 - DNA, 598 bp, Homo sapiens
tatataaatatagatatgcattcgagtacacataattgaaaacatttttctactattttgaacaaattgttattggttggatcaattaaatatgaaaaaagttttatcttaccttcacttattcattatttgaccctcttcctttctgtatgtagataaaagtgtctaatctgtatcgttatcttctccctctgaagaacctttttttcaactttattgagatataattgacaaaataaaaattgtatacatttaaggtatacaacctgatgttttgacatacagatacactgtgaaatgatcaccacaatcaagctaattaacataaccattatctcacatttgtcatttgtatgtgtgtatatgtgtgtggtataagatccactctattaaaaattttctaatatgcaatagagtgcattcactgtggtcagcatattgtatattaggtcaacagaattcgctcatcttacaactgaaagtttctaccctttgacaaacacctacccatttcttcactgctaccccygcagtccttggtaaccactattctattctctgctttgatgagtttgactattttagagtccacatgtaa

SEQ ID NO: 857713 - DNA, 619 bp, Homo sapiens
ttaaacaaagtacgttacctcaaaatgtatttctttgacatatcttaaaatgaccctgcaaagctgtctattgtggggggaaatttacattttgtagagaatctccttcacttactaggtcttttcaggagagtctatcaccttttaaggtctgataagaagacctaaaccatctactgtctctgaagtaagcttcctggaggcttcatctgcatgggaagaatcttggttttcacagcctaaccttaccttaaccccaagtatttctttctgttgacttgaactctttaggcaaaacttaactctttcagcaaattgccagtcaggaatctttgaatctctctaacacctagaaacctccttacctccctgaaagcccttcttagagatgtcctgcctttccaccctgaaccaatatacaccttacatgtattcattgatgtctgcctgtaacttctgcctccctaaaatgtacaaaataaaattgtgaccaagcygccttgtgcaaatgttctcaggacctcctgaggctgtctcatgggcatgtccttaaccttggcaaaataaacttccaaactgattgagacttgtctcagatacgttttggttaacacagtaa

SEQ ID NO: 857714 - DNA, 596 bp, Homo sapiens
atgtggagagaggaagcaagagagagacgcaaatgctgccagaactttttaacaacctgttttcctgggaactaatagagtgagaactcacccttaaggaagggcaytaatttattcatgagggatctgcccccatgacccaaatacctcccactaagccccacctaccaacaccaacacgttgggcttaaatttcaacatggagtttgtagggaacaaacatctaaactatagcagccccctttgcttcctctgacatactcactcccttattgatttcattctgcttcctcactaaaagtaccaatcatatcgctctaaaatgtacctctctaactgaattttcctcttatactctggatttatatatttgactacctatacaatatatccatctgggtatcctatagacatctcaggttacacatgcccagacctgaattcctgattgccttcccaagatcttttgtacctgtttgctttgtcatcactatagatgggtaatctaccttttaatcaggcagcagatcctatgagacgaggggtgagatttgatcattggctttagtaatgtacaagtcattgctgaatttgac

SEQ ID NO: 857715 - DNA, 484 bp, Homo sapiens
cctcattctgtctttgcctgctgccatctctgtaagatggaaatygctcctccctgtcttgtgcaatgattgcaaggcttccccagccttggaactgttaagtccagttaaacctctttattttgtaaattgcgcagtcttgggtacgtctttatcagcagcataaaaatggactaatacaattaattcatgtcgggagtggcgcactgctgagaagatacccaaaaatgtggaagcgactttggaactgggtaacaggcagaggttggaatggtttggaggattcagaagacaggaaaatgtgtgaaagtttggaacttcctagagacttgttgaatggctttgcccaaaatactgatagcgatatggactataaggttcaggtagaggtggtctcagatggagatgaggaacttgttgggaactggaactaaggtgactcttgttatgttttagcaaagagactagcggcattttgcccctg

SEQ ID NO: 857716 - DNA, 601 bp, Homo sapiens
ttcatgatgaaccccaaggaataaaacgttgaggatcaagtggatcagcaaatatatggaggtcatctcactgtcaagggagaatggaacaaaaaaactcctgcaattctgtgaacccagaggatggggagaaattaatgagaagggctgggagtgaaatactgggtccgagggaagaaaaagcatcaaggccaccctccctctgataagggggttttagtttctgttgaaggccccctataaaaaggcctctggacgaaagcatctgggctaggatgcacgtgtaaggacaaatttcggcacaggggtccaagtccttgattgcaactccctgcagcccacagtgccttggctgggcaacaacgctgatgtgggaaaaacagcttccccagtgaggtctgttgggtaaaagcctttccaattttctatggtcgggcttaaaaagatcacatataggtttctaacaagagccacactcctcagtgcttattcmtgaaatacttggtttctgaactttccattataacataaatctcttaagagattatgctgtgtagtctaatggtaaaaagtaagaactctgaaatttggctgcttgggt

SEQ ID NO: 857717 - DNA, 443 bp, Homo sapiens
aacaagcatattataatactcattttaaaggtaaagaaactgagactcagtgagttgaattgtgttccagtwtcacagaagaagagtgtcacacggaatagagaatggcaaagcaagtcataatatataacattttttaagagttcagatgtacccaatactacactggattcagaccacattttttttaatgcacattctctagtaaaggacacaaaaatttaaacaaataaacacattggcatcacaagtactttaacagaactacctacgaggcatagtagtggtataaagactaaagtatttaacctaggggctaaagttagaaaatgtgtgatagtagtcaatttttttgcactattcttataatgtgaataagattttaatgggtatgaagttgaaaattatcaaacctaataaaggaaacagcaaaattgtattag

SEQ ID NO: 857718 - DNA, 629 bp, Homo sapiens
tgtcttactcttcactgccccttgaatttctctgtactataagacttaaaaaaaggaaacttgtttcttaaacctctttaaaattactttttggtaacatagatttttgttgtctaacatccatccacattctgcttttcattttcccagctctattagttcctggtaaattttgtgcagatcacatcatgcagttctcttgggtgcacaagaatcaaataaagaggctcagccacccatgtctattcctctgccttttgcaaaagacaatctttcctaattagcaggtgtctggttggtttaattcccctgtcactgccaagttctgtaccttggctaccaagaaactgtttcttgaagagattactttctttgactattactgtaaaatacataattactagctttctttaatctgattaattttctccattgatgtctaattgtttatgtttctctactttttggcctgagaacacatatatagtaaatttgttttaaatcgatgtgttcctgaatatatactttgtaagagtaactgggcaatacatatatttttaaatawgtgtttcccctgcctctacctacccttatttaatcatatatttattgtctctctggttagccta

SEQ ID NO: 857719 - DNA, 311 bp, Homo sapiens
aaaggtaaaaataacatgctgtccttcataagcaaatttaaaattactagcccatcaacagtaaaaacatrtacttaaagttatttttctcagggatgagaatagcttctagcaaattaaaaaaaaaatcctaccttcaattcctctgataaacaatagaattcatgtaatgaggcagcacggatgatgctgcttgtaaaagaaaaaaagataaacactctaactttaatagagactgtctttgatcttttactgttgaaagttttttgtccccctcacaccaactaattcaccaattctctgattctcca

SEQ ID NO: 857720 - DNA, 571 bp, Homo sapiens
agcttccacgctctttctgggtgcacacttccattatttccatatattcaccaacccagaaactctaaaccctgtcatttaggttttcttcagccattggtgaatagcccaatctacagatcctttcccattcctggaggttggggaaagtagggcttatagttaaccaattcttggtctttttggtaatcagcttccgccctgaaggtatgtgcccactaagagtttcctcatcagggcataaaagactccatcatccttttcactgagaaaattccaagggttttacaaattctgtgccaggtagcagggacaaagactacatgttttttttctttcttttttttgagatggagtcttgccctgtcacccaggctggagtgcagtggcatgatattggctcactgcaacctccgcctcctgggttcaagtgattctcctgcyccaggcccccgagtagctgggattacaggcgcgtgccaccacgcccagctaattttttgtatctttggtagagacggggtttctccatgttggccaggctggtctcaaactcctgaacttgtgatcc

SEQ ID NO: 857721 - DNA, 602 bp, Homo sapiens
ttgattgtataaattaaaattgattctgatttccaattaacccacaacttgatgaattcacagcctgaggaaatatccagcatattaatttgttctcatttccttttattaatgaaacagtgttcatctataacacgaatctctggaactgattaaagtattgagtaactgaagacatgatatgggttttttgttggtttcagatggagaacaatgaacaaaatgatggagttgagcaatctccttttttttttagtatttaactggaacaaaataaaacattatctactaaggtcattatattgacttgaccaagtttaatttaacttacgaggaccataatcaaatgtatcattagaaaatattaaaataccatgtaagtatgaggagatatttaaaaagctcttcttaaaaatatatcagtaactaatcaaataaatattatagtatattattgatgtattaaaaattaactctcaaaatttaagtcaaatgtacattagatgtctgaacccatgaattactctcagaaaacayaataatcatatatatgtcatattagaaatacttagagaaagaaaattctattcaaattgaagtca

SEQ ID NO: 857722 - DNA, 616 bp, Homo sapiens
aggatggtggcacatacctgtaatcccagctacttgggaggctgaggagggagaattgcctgaacactggaggcagaggctgcagcagagattgtgccactgtactccagcctgggcgatagagcaagactccatctcaaaaaataataataatagatgcagagaaatcatttgagaaatacagtgaccatcttatttttaaaatctcaaaatactggaaaatggggggaggtgagagaaacaaaaaattcttaatttttaatgggtatttacaaaaaagctatgaagcatcattttttttttcatggatcaatataagggacaagacaaatatgacctttctcactagtttctcatacaccattgtactggaaatgttgggcagtgtaataagacaagagcaaaatataaaccatattgattttaactgaaaagtcaatctctctcggcaaatatcttaattgtacacagaaaatcctaaaacaaatctctaagagaaaacatcttggcagtattttatgaaacttaatatgcaattgtcawatgacccagtaattacactcaaggatattaatccatgacaaataaaacccgtgttcccacaaaaacctgtaca

SEQ ID NO: 857723 - DNA, 496 bp, Homo sapiens
ttatttgcaaaaagtcagtttggattattaagcatgcagttgtggaatatatacacatacacacaatatgtcattatttaccaccattacttttgtaaaagaaaatatagaaaagcactgtattgtaaaaatacaaagacaacaatagaaaatcaattcctcatattcagaataagggaaaatatatttttaagacaacctcttgtggaaaagttctgggacagttttctccaagtggcttctaccctaaagtccctctagcaaaattttagggtctccacactcacgacagatgtccagtcccaagacatatatcatctcttggcacttcccccaacccctctccaacacgttctgaattagatttaccccaataactttgatttctgcgtgkagatgtttcttcaggctatcctgcccctggttggtgggttcgggtttctctgcttgggagaagttgatgacatttgatgggagcactatgatggtctcattg

SEQ ID NO: 857724 - DNA, 582 bp, Homo sapiens
atgcaagtgaaaagagaacatatgaacagatctataatacgcctattggctgaatcaataaccaaaaacctccctacaaagaaaagtccaggaccagatggcttcactgatgacttctaccaaacattcagaaaatattaaataccaatccttctcaaactcttccaaaagttgaagaggagagaacacttcctaactaaatctataaggccatcattactctgatgccaaagccaggttaatgactccacaagcacatgaaattggagaccatatcccttatgaatatagatgcaaaaattctcaacaaaatattaatctaaattcagaagcctattaatatttaaatcttattaccaagaggaatttatctcaggaatgcaagggtgacaaaacataagagaataactcaatgaaatatgccacattaatagaatgaaagaacaaaattatcattttatttgatgcagaaaaagcattaaaaaatctaatactttttgttatagaaagccaacaaattaagaatggttggaaatttcctcaatgtgatggagmgcatttatgaaaaacccacagctaaca

SEQ ID NO: 857725 - DNA, 646 bp, Homo sapiens
ggtagttagtatttattaagtgacatgaactggttkaaatgtttacgtgtgctatttcatcattaaatttctctacgagatatgctgtattattcacagggtagagttacagaaacacaagattaattaacttgagtaaggagtggcagggccaaaatttaaatccgggtaatttaattccagaactcgtttgcttaagaggatccactacactagtctggcgaatagaagaactcttttatttgcacatttattcattcctcagttgttggacatttgggttgtttgcaccttttgactattataggtaatactgctaggaaaattcattttacaagtttttgtgtggacatatgtttttatttctctttgtatgtatctgggaatggaagggataggtcgtaaggctggttcatggttgacattttgcaaagaatcagttagggaggaatcctccttatgttttaggaatagtttcagtaggattagctctttggtatttattagctcttctgtggtataaacacttctttgtacatgtgttagaatttggatgtgaatctatagggctcagtaatctaatcttccaccttaataaactggaaaaagaagaacaaactaaatggaaacaacttgtagaaaagaa

SEQ ID NO: 857726 - DNA, 604 bp, Homo sapiens
atcctttgtaatctcctgttctggaacacaaatagaagccataatatcctagtttgtctcactgtctagggtatttattcaactcttataagttgctttttcatgattctatttgggaataggaacctagaggtttatgcccattagagcataagatagggtgaattcagtattctgtcacattgtcgcatttgtgtttgcctctaggtgaatctaaacaatgcttcccgaagccagagcagtcattcatatgatgatagtactctccctctcattgaccggaaccaaaaatcaggtgcagtatccagaaggcacaccctctccttttagccactcttgctgttctaggtggcttactaagaaataggatatatattatttctgaattagctagccttttgtgggaggggaataattttccactccaggatcctaacgcagaaatgggtaggtcttaagcattagaaatcaaaacaaaacaggtaattagcctgaatgtgatycctttatcattgcttgtgaacttaaaacactggaaagtgaactctagtctgttttgtctattttttctccttttaaatttccatttaatacttaatattgt

SEQ ID NO: 857727 - DNA, 443 bp, Homo sapiens
tttttctcttttttttatttttgaggcagagcaagaccacatctcaaaaaagaaaagaaaaaaattatggaatatttatagacataatgtgatgcactggtttttatttttatttttttttgagacaaggtctctcaccctgtcacccaggctggagtgcagtggtgctgtaacagttcactgcagcttggacctctccaggcttaggagatcctcccacctcagttttttgtttgtttgtttgtttgtttttcttttgaaacagagtttcttgttgcccaggctagagtgcagtggcgcgatctcagcacactgcaacctctgcctcgcgggttcaagcaattctcctgcctcagcctcccaagtagytgggattccaggcatgcgccaccatgcgtggctaatttcgtatttttagtagagacggggtttctccgtgttga

SEQ ID NO: 857728 - DNA, 628 bp, Homo sapiens
tcttatatctaaacatatgaactaaaagcataaaactgtaaaatattatattatagtaaatgtttgccacctggagttagacaaatcctttttaagaatgataataaaagcacaaaagcaaaaaaaaaaaaaagaaacattggataatatcatcaaaattaatgttttacctgcaaatgacattatgaagaaagtggaaattaaaacctagggtaaaatattttcaagtgatatatctcattggggacttaaatctaaaatatatgaagaattcttgataagaaaaagaaaatttatctaattaaatacagcaattaagtatctgaatagacatgtatctagaaggcaaacaaattgccaataagaatatgaaaagatgctcaacatcattagttcttagagtaaagcaagttgaaatgacaatgagatgccaccacatgtccactaggatggctataataaaaagatgaataataatgttttgcaaaggttatggagaaattgaaacactcaagcgctgctgkcaagaataaaaaatgatacaaccattaaattttgaaaatcttctggcaagtccttaaaagtttaaaacacagatttttcatatgacccatcagctgtactccta

SEQ ID NO: 857729 - DNA, 503 bp, Homo sapiens
cacaaggtgggcaggactggactggacaggcccacctacaggtgccctgaggtcatgcactagcatcagcactgagagagaatccagtgggtgaccaccaagcacccaaggtgtgcctagatgtggagctgggaaaactccttggccccaagtccactgcaccggcaggtgggggacagcctaaactcctaatctaggagattgggtgttctcggtgtctggagatacgcctgggcatgaagcacaaagggctccactgcaccacagtctctgtagagcatgggcggggcagctcatgctggtaatccagaggaaagggtgttctggctgcctcgagatgtacttgggcgtggattggaaagggtatggctgtaccgttatctctgtgcagtaagtgttgggcagctcaggctaccaatctgggcaaacaggtgctctgaacacatggagatctrcctgggtgcggagtgaagagggcctcacttcaccacaatgtctgagat

SEQ ID NO: 857730 - DNA, 643 bp, Homo sapiens
caatgatatttacacttcttggacaaaattggtttgatggtgccttagaggttaggatgtttctagatcaacgctggaagaaccaggatcaaagtgtggtctgggagtcaaagtcatgaatgaaaatgaagcaagccagaacctcatcagtggtgtccatgaatctgaaggtacagatgagggttggacctggagtctcaaaagagaagggtcagaaaactgaaactcaacatgtgtccagcactattcagttttatctcataatcaagcctccaaaatccaaacacattgtcagcatctgctttgaaggtaagcattgcaggtaggatgaggcaacccaaagatggcattgagaaagaggcagagcctcttggacactgtgcctggtgagtgtgggttggtgggggaaaggcaggtgatcattctgatacagggccttggggttaactagttttagttgtcctgtgacacttttgggaaagtcttcaaacctttgtgagatttaattccttatcwataaaatgtgggtaataaaaatatcaccccatagggtttttgtaaagatcaagtgaaactagctttgtaaactatcaactatcataaaaatataaagattcataattataagtttccaaggttggtc

SEQ ID NO: 857731 - DNA, 617 bp, Homo sapiens
gagataagctgattcagtttcctgagaagtgcacactcgggaaccaggctccaagagcggagtgtggactccttcaggagcaggaagcagcaagtcagcccagactctccaggatggatcaagaggtctccaccgctctacagggaacagtgtttgacttgggggaaatttggccagtcagcaaaaggtggtaaatagataacgacaggagacacttaacccctttcctcaaatagcgtacccctgggcataacaggatgtgtcatgaaaacatgtgtcctttggtcctaattccccaaatcaatcacccccactatctcattataattcatattaggtcaaaaaggaaacacatacacaaagtagtctgttttaacctgaaataattctgttgatatttgaatcactttcagtgggacatttgcttaaaccacaagatatctccatctccaggtacaaggatcccttccttccctccgctgccaccccccaccccaccctgcaaccaaagaaacaaacaaaacccaaacccacaactcagcttcaaataagtttgcaagaaatgagactctaaatatttacatatggggcaaraaataaatcacaaaactatttac

SEQ ID NO: 857732 - DNA, 629 bp, Homo sapiens
actattttggtccatgtgtgctgcaggtcaattctgctactcacctgcattttgccaagttctattctaagtattgyactagcccagaccataatttagccgtgggaacagaaggataagttcatccatgtgtttaaattatactgtgactctctttcttttcttacacttctgggagtaggaagtgtgaaattatattaactacagtaatttgaaattttgaaatctgtgttttttatttgtcacctaaggagtatattgaatctctcatctttgttgtctgaggtatttcatcatataatatacttcagaaagtaaaagtaaaaactcttcccttttttttatttttaaactaactggcattattaatagatttgtgttcttgtctgtaaatgattgttagaaatatgaggtgatacctcagaaaacccttttttctaggtaaaggcattacacaaatacaacatgttaatatattttaggattgtttgttatgtgcagtgtctctcagagttttagctaggagccattggtatctgaatgagagaaacgtgataaaaatgggtattgatcatcagaatctcaggggatggggtcaggagtctgaattttaacaggtttttcagatg

SEQ ID NO: 857733 - DNA, 454 bp, Homo sapiens
ggctgatcgtcagaactaactggatccctttccagacttagtgaattagcatctcttagaatagggaccaggacactgttcttcaaaagtctcagtcacattgcttctctgcctttcagccaaggtcaagtgtagaagtcttgaccacatctattatttcattcttagaaccctctgaaagagggagctggtaatgactttttgtctatgtcgtggaggattacagtccaaagtgggattatgcaagtttatcatgttaatttttgagacactagtgattagaaatcagcaccctctcatgaggtgataccctctgtttctgctccagttgtytggggcagatggaggaactggtgtctctgaaggctttttctttcagaccctccagatttttatgagccaaaaggctctacataaaaattaaattacattgcaaaactatatgctatacagt

SEQ ID NO: 857734 - DNA, 545 bp, Homo sapiens
atgccagcatacatgatagtacatcatcatatctcagactggctctgtctgctccgtgacagtccatgacaatttctgatcagattcctctcacattctgctcagaaactattccatacctttccaaayctcttcaagcctcatatataagctgaccatatatatggcatctaggtcagatcatgactctcctctttttaaaactttcccatttttctttgagtaacagccgaagtccttaaactgtaagaccaggtcctaagtaatctgtaccccctccacacacccctacccatgacggcatctctctcagtgttcttgctcactctgctccagccacactgggcttgcagctctgcccataggctgaaaaggtgcctgctttaagactttttgcagttccctgtccttggaacaagtcattctccagatacctacatggccaactgcttcgcctcctggaagcctttgttcaattgccacctgctctgtaaagcctaccttgaccatcttatttaaaactatagcaccactcatttctggcc

SEQ ID NO: 857735 - DNA, 612 bp, Homo sapiens
tgcccattacaaattcccattctttgaggtttacgactatgctataaaattttgctctgagatgaaattttccacataaaaattaatccctggaatttggcctttagaaacagtacattttaagtcagtttgttatgcttaaagtcatgaatgaggattttaaaagaacacaaactttatgttcccacagactcaaaacatggaaatagtttgatatttgtggacattagtctataacatggaataatcttctagcgtatccttggaacttagaaaaacgcagcacagagacagctttatgtagaaacgcaaatgctctgcgtgtgctcccaccagccctgtcgtctggtaggaatgttaacaaatataaaagtgtgtgaccccatggagctagcaagccaataatgcggattacaaatgtattaaataaattagttcagattaaacagctttaaaatagcttcctaatatgcaaaaagactccctgaattagcagatttgagtttatsttacacattatctatgctactaagcggaaaaaaggaattacttatgagtccacatttatggtggtatagattttcataatggctaagctacctcctaagtggg

SEQ ID NO: 857736 - DNA, 592 bp, Homo sapiens
ttgaacggatttcattttttttttttttttttttttgagatggaatctcgctctgtygcccaggctggagtgcaggggcgggatctcggctcactgcaagctccgcctcccgggttcacgccattctcccgcctcagcctaccgagtagatgggactacaggcgcccgccaccacgcccagctaattttgttttttttgtactgttagtagagacgcggtttcaccatattagccaggatcctctcgatctcctgaccttgtgattcacccgccttggcctcccaaagtgctgggattacaggcgtgagccaccgcaccttgccaatttctttctttaagtgcttttctaatgcttgttcatttgcatatattaaatttatacagttgtaaccataatgtggccagagttgtgtattctcttcttcacagagtataacataagcactttcctctatcaccaccagttttttccagctttattgaggtataataatataacaaaaattatgactacataataatttatttaactatttactgacaattgccccctgccccaatttatttacttttataggaaactttttttcc

SEQ ID NO: 857737 - DNA, 519 bp, Homo sapiens
accagcctgctggagtatgtttctgctgggttttcctactgactgctacacatgagtcatcacaggaatggaagtttctatccgtctcccttaacaacagtgcagaaaccaggcattgaagtaagcttcgatttttccaatcagaccctagccagggaagggaaaaatgttgtggtaggtgtcaccaccagctaggctgctagatgacagttccccgccccagggtgttagtcatcggcactccagtttcagcgtcttttctctcacccacccaagtagttaaagtggcatcttgtcttgcaatgcctgctgctgctggccgctgaactcttcctttgctatagagtttccccaacttggctgcacaatgaagttaccaggagttgtttttgcttttaaatactgtgcctatttctcactcycaaacaacctgatttaaatagtttgggatgtgatcaggacatcaggagttctcaaagctccccagatgattccactatgcagcaaaatttgagaacc

SEQ ID NO: 857738 - DNA, 646 bp, Homo sapiens
ccagtctgcttactgttggcgcacacacaccctaattcccagggctgacaaactccatcaattaraagatcctgtggggcacttagcacagggccttcctccagttcatttgccagtctaaccacttgtatcatgaaactcccccacgaaagggcaccaaaggcgaagagaaatcagtactaacaagagcctgctgagaacactgggaggtgggcagtgggtgtatgggagggaggaggggggcaggtggagaggacccagaggcaccaatgggtgcatcagaggacctggcgccagcagcttccaacatggagatgtcagcccactatgcctcctgcagccttcgctccatgtagcctggggctgggtgtacagcatccacacacagaaaaagatggctgttaagattacatcccaatgatctgggacttacctggagcatcagacagacacagtgcaaaagaaacaagctttggagtcagcttagattcagacctccctggagggccctgggcaggcttcttaatctctctgaactgtgctgcatgctggagatgtagcagagacctggtcagcaaactctctgacccacagggaatgttccctgagggaggtggatagtaagtcagtcacctaacacgggaga

SEQ ID NO: 857739 - DNA, 612 bp, Homo sapiens
cgatggggcgggacgaatgactgaggtcatttgtcgaatgacctcagggccacacaagttgggctggagagaagggtattggaaggtggaraagaatagaggaagaggctggaaatggaggcttggcagggagcccttgactatctgggaaggagctgaaaatggatctgaagttagcacaaatgacacaagaaaaaataaaaactcgaagagttctgtaaccttgaaagagattgaaccagaagttgcaaatcctttcataaagaaaacatgaggcccagatggctttctgagcagggtcaagccatcgcagaaggaacacataattctaacccgaacaatgtcttctggagaaaaagagagaacactccccagcttcttgggagactggcaagagcttgactccggttggaaaagaatggcctcagaaaggaaaattacagacaaatctcactcatgaccttggatgcaaaaatcctaaacacaatattagcaaatggaatttggcaacatattaaaaagattactacatcatgacaagtcgggtttatcttaggaagctaagactgatctaacagaaacatcaattaatacaattcattagcaaagaaa

SEQ ID NO: 857740 - DNA, 612 bp, Homo sapiens
cgatggggcgggacgaatgactgaggtcatttgtcgaatgacctcagggccacacaagttgggctggagagaagggtattggaaggtggagaagaatagaggaagaggctggaaatggaggcttggcagggagcccttgactatctgggaaggagctgaaaatggatctgaagttagcacaaatgacacaagaaaaaataaaaactcgaagagttctgtaaccttgaaagagattgaaccagaagttgcaaatcctttcataaagaaaacatgaggcccagatggctttctgagcagggtcaagccatcgcagaaggaacacataattctaacccgaacaatgtcttctggagaaaaagagagaacactccccagcttcttgggagactggcaagagcttgactccggttggaaaagaatggcctcagaaaggaaaattacagacaaatctcactcatgaccttggatgcaaaaatcctaaacacaatattagcaaatggaayttggcaacatattaaaaagattactacatcatgacaagtcgggtttatcttaggaagctaagactgatctaacagaaacatcaattaatacaattcattagcaaagaaa

SEQ ID NO: 857741 - DNA, 649 bp, Homo sapiens
aggactggacactttccctcttctttagtctgcattttcaattaagggctatctatcaattttacctccaaaacatatattgtgctgtctgtgtctttctctctcagccaccatctctcactgactatggaaacaggagacagccattttattaaatagttgtaattgaaagggatacttaagcagaaaatgtcataaagaggtagcattgtcaactattcatattttagtgaatccacacttcagtgggtttctccaccatggagacgttgataccagagtggggattgcgcctgttgaatgtggaattttaggagcttgaagtaagctccacggaatgcccacacacgcatatacacgcacacccacatgcacgtacacatgctcacatacacacaagggggactggaatacggaaagcataatatgtgctctctcctgctttcatgctgtgtttgatattgccatgacaggatcaccatctctgcccattcaccagtgtctagtttacctgcaccaaggctgttcaaatgacccggctttgctggctttgactcaatctatctcagggagattggacttttctctgcagtttttatgtgacaggttgaaccgaaataacrtctaaaaattgcagcaatcccagaaa

SEQ ID NO: 857742 - DNA, 630 bp, Homo sapiens
gtgagaccctgtctcaaacaaaacaaaacaaacaaacaaaaaaaccaataggcaagttgagaagasaagtcaaaactgaaagaatgaacaatatgataatgagtttcctctttttcctctcctcttttatcttctggatttgacccaaggcagcttgcattggaggaactacgcaaccagcatggagaacaaaagctcccaagagacagtccctctttctcaccagagaaccaggaaaaggagccccatgtaaccacatggagaaaagtctcccttttggctgggtgtggtggctcatgcctgtaatcccagcgctttgggaggccgaggcaggcagatcacctgaggtcaggagtttgagaccagcctgaccaacatggagaaaccccatctctactaaaaatacaaaattagctgggcgtggtggcacatgcctgtaatccctgctacttgggaggctgaggcaggagaattgcttgaacccaggaggcagaggttgcagtgagccgagatcacgccatttcactccagcctggacaacaagagcaaaactcgatctcaaaaaaaaaaaaaaaaaaaaaagaaaaaaaaaaaagaagtctcccttttttctccttatgttttctgttc

SEQ ID NO: 857743 - DNA, 602 bp, Homo sapiens
ctgcctacagagaggagccaccaactctagggcctcctctctggtgagagctacagatggygagacaacccactgcagagaggagctactctctctgctgagaactgaacaattgttgggacgacctgcctgcagagaggagctaccctctctgctaggagctgaacactcatcaggacaccctgtctatggaaaggagctgcccactgcaggtcttctttgagctgttctaatgctcattgaagctccttttcatcttgctcacctttcacttgtctgcatacctcattcttcctggttgcaggacaagaacttgggactcgctgaaaggcaagactaaaagagctgtaacacaaacagggctgaaacatgccccttgctcaccacattgtgggtggagagaagaagagcggcagccctttggggaggccagacctggaaactccctgagccagggctgtgactccctctttgaggccctgcagtttctgatgtctccaagcttccggacaccaccgcattccccaatgccagctggggaagcagcttgtagtgcacctggtgcagccagcatgtctgactgtgcagtggctggatcccat

SEQ ID NO: 857744 - DNA, 653 bp, Homo sapiens
acttgctttgatttaaggcagtttcccaagataaattaggagggaagatagtcaaaaaaaggaaaacaaaaacgagtacaaaaatgaagscaggaatagttgttatccaaaactgtaaagtctgtcagaatactaacctttatttaacaacctctaggttctgttctaatggtaactatagaaccttcgcttgtttctcaaaatgtgatgttctggtagttcatttgtcatcctgataagattgaagttaagaaatagactcatttttgctttgttgtaactttcctcttataatcttttttttttcccctaattgaatggtagctaataaacaatctgtattgtttggcctgtatttcttttccatcagtctgtcttccctaatatgacagggcagttaggaatttttctttttcttttttcttttggtagacataggatcttgctctgttgcccaggatgctcttgaactcctggcctcactcgatgctcctgcctcggccacccaaagtgttgggattacaggcatgagccaccatgcttggccagattttttctttgattgcttttctagaatctgttttcacttttgtgtttgtttctattttccttctatatgtgcaggatatattcagaaaaagtagaaattttat

SEQ ID NO: 857745 - DNA, 595 bp, Homo sapiens
gctattcgtaagaaattacttgaaaaatattttgacaaataccttgatatatgcagacccctctaaatcactaggaatttggacatcaagaggacagtaatcttcaggtatctttttatccagatcgagatctgtattctttattacttcaaatgtaccatgatgaggaaagagagatcctaatgttgtattaaaaataggaaaatataaaacagttaacatattattccgacacacattattaaatatataatacttcacatccacatcactgaatcacaaagtaagtccccactaaaaaacatatgttttgggggaaaagggtgaggaatggtgaacaaaggaaagaaagataaaggtggggggtggttatttaccttaaaaaaaaaaaacacttcttagtctaatgacatcaacataataagaattccacagaaaatccaaattgttttattccaatggagtattgataaaaatgggtgtactcacagggcrggcatggtggctcatgcctgtaatcccagcactttgggaggacgaggcggatggatcacctgaggtcaggagttcaagaccagccaagaccaacatggag

SEQ ID NO: 857746 - DNA, 625 bp, Homo sapiens
gctcctgctgatctcatttggtcttattggcttggtgttgccaagttgtttgtttgtttgtttgaagctagaaatctcattgtttttaaaaatccttacttttaaatattggcaatgaatttacttcttaaaaatgagtgggttgtggactaatggtaaatgaaagaagccaggcagaaaataatacctaaatgtgtgattccatgtttatatgaaggttttaaaaaaacaggcaaaactaatctgtgatcttggggttaaagtaggggctgtttttaggggtgtattgactgggaagggacatgaaggaaccttagtcctggtaatgttccacatgatctgaaaggtggtacattgacatatgtgaaattcagtaagctatacacttaggtttttgtgcaccttgttctttgtgaattataactcaattggaattttttttaatataagttagacaaaactacaatctgcctattttcaacctcttaaagatattcttaaattttattccktgactaagccagagaaatatgtacttgcatcacacttttgtcctcttagagaactgttcgtattatactgagttttggcattaaactatcagcccacatgggaaaatgtttga

SEQ ID NO: 857747 - DNA, 642 bp, Homo sapiens
gtttgaagaaatacttgtgttgtttttttgtttttgtttttaactgaagggatctctgtgtgaagatgggtgggagacatttttcccagatagtgscaagaataatttgggagcagttgatttgcttttatggctatgatgttttcctctgtagctcactaagaaatacagagccatatttgggaccattctctagtgtagactatagaacctcacagcatatattttcaatactaatcttaccagcaaattaattagaagttacacattcatttatcatttagcaagcaaaataaacatcttcctgataagttttttaggcttgatatttgtgttgcatacatgtttttggaaaatacttgaattttggcacttttactattttcagttgaaaaaattatttctagttataatgattggagtcagatagcattgttgtatatactgttaaatcgtaaatatgaggaaaataaaactgtgcttttaactagtggttatagcagtaaccgaatataagatggaacaatttgcctggtaatacaatagatgctaaataagttttttccctttttctttcttttagttcccttggtaatgaagacccaacagattccttcaaaagttctttttaaaaaattatta

SEQ ID NO: 857748 - DNA, 562 bp, Homo sapiens
tcttggagtccccgattccaggccttggctcttggayggcatctctgaacctaccctgggtcagagaggaggaagcccactgccctgaaggaagtcccatgcctggcagcattcacaacaagctaactgaagagccactgggccttaagtgatcatcagtggtaccatgatagtactctccataggcctgtggtggtggtggacaaggggagagagtcctttgcctaaggaaggggagggaacagtggaaaggactttgtttgtgattttggtgcctgcttagccacagtagagtacccagtagagttctaaagatcccgattccaggcactgactcctggacaacatctctggatttgcccggggccacttgccaccctgaaggcaaggacataagaccagctggcttcaccacctgctgactgtagagccctagggccttgaatgaacaaagatggtaggcaggtagtggttacagtgggccttgggcaagacccagtactgtgctggctcaggtctgacacagcacagtctcagagatgatggccacaggggtgcttgt

SEQ ID NO: 857749 - DNA, 564 bp, Homo sapiens
gccttcattttctcaaaggtaaaatctgctctgcctaactcataggatggtgaagagctcccttatcttccaaaataattctagaggctaccctcattcttaaataacaacaacacatggccgggcrtggtggctcatgcttgtaatcccaacactttgggaggcagaggtgggtggatcacctgaggtcagtggtttgagaccagcctgaccaacgtggtgaaaccccgtctactaaatatacaaaaattagccaggcatggtggcagatgcctataatcccagctacccgggaggctgaggcaggagaatcgcttgaacccaggaggcggaggttgcagtaagctgagatcctgccattgcactctagcctgggcaacaagagtgaaactctgtctcaaaacaacaacaacaacaaacacaaagtgcctagttcttaaagattatcctaaaaatcaagcattatcattgtagtataatataaaaaacagacacagacttactgggtctctggagacaaaaactggtagacaaaccaaaggagctttcatttcataaaaatgc

SEQ ID NO: 857750 - DNA, 467 bp, Homo sapiens
cgtcctttccattatcttaatatttttaaaattaaggaaatggttaaaatttgatcagyagaaagggaaatttatagtactaaatgcacacatgagaaaacattgaaaccaataacccaagcacctacctctagatactagaaaaagaaaataattaaaagcaaacagaaaaaaagagtgaataaacaaaaacattaaaaaatagagaaagttaatgacacaaaaattgactctttaaaaggtgaatacaattggtatgattgtagattaccaagagacagatgtagatagaaagagggagatagagagctcaaatgatcaatatcacgaataaaacagaggatattactacagatgctgcgaacattagcataataaaaaagaaacactgcaaacaattccacccaaacaattttgacaattaggtgaaacagaacaatttcttgaaaaacacaaatgcaacccac

SEQ ID NO: 857751 - DNA, 467 bp, Homo sapiens
cgtcctttccattatcttaatatttttaaaattaaggaaatggttaaaatttgatcagcagaaagggaaatttatagtactaaatgcacacawgagaaaacattgaaaccaataacccaagcacctacctctagatactagaaaaagaaaataattaaaagcaaacagaaaaaaagagtgaataaacaaaaacattaaaaaatagagaaagttaatgacacaaaaattgactctttaaaaggtgaatacaattggtatgattgtagattaccaagagacagatgtagatagaaagagggagatagagagctcaaatgatcaatatcacgaataaaacagaggatattactacagatgctgcgaacattagcataataaaaaagaaacactgcaaacaattccacccaaacaattttgacaattaggtgaaacagaacaatttcttgaaaaacacaaatgcaacccac

SEQ ID NO: 857752 - DNA, 502 bp, Homo sapiens
cacaacccaaattatcagtaaaaaagaaaatacaaataaaaggtaaaaaatgttaagcaactacaacaaaataaatcccacacctgtaatcttttgtttgagaaactattaatatgaactcatttatttttcatagtaaaataatgcatgttgggaggctctgaacacaaaaatggatgagaaacgatgacaacctcatatcagtggagaccctagtgtttagattatggtcattaataccatttttccactgacaagaatttgaactctttagcaatgtaactaatttcaggatgatgcacagagagtaccaaaccatccctgattatattgttgggccaaaaggcaaaggaagcaaagattgctggagttttgtgaaaaggacacacaaaaaaaggtaaatgaattacatcaatgtcaatttttattgtgatatagaattatataggtrtgtcatatgttaccattgggggaaacaggctaaaagtatataggatctctt

SEQ ID NO: 857753 - DNA, 693 bp, Homo sapiens
ggcagactgtgaagccctcccaaaaagacaaatattgtgactatgaatcagtcagattaaakttgaaaataaattaatttcagccatgtaaaataaactactatatatatatagatatagatatatctctatatatctatatctgtatctatatctatatctatatctatctatctatatatggatcttttaacatggcttctaagtttctgtgtacctaatatttttatagatctgtgttgtcattcaaattctacctcaccgtgtaagttttttgagattaaggctgagattaaagcaagtataaaggataacttcaccttacgggtgaaatttcaccttaacgggcgatggaaaagtccccttaaaatatctgagtataacaattgaaatttctatttttgtgagtcgaatccaaaataaaaagtagcattcctttatatgtttataatccaagctagtgttcaatgtactattgtagatgtagataattattaataaatctacatataactattaaatgtctcactgcttctctctccttccttaactctccataaacattgccccaagtacctctctctgttttcacatacactgtctatccagattggtttcataacttttactaaatatataaagccagtttcacaaattaaaaataaataaataaataaaaattacgttaactct

SEQ ID NO: 857754 - DNA, 587 bp, Homo sapiens
cccgcactgtatgtttccttgatcttgactaagttgagagacagagaaagaacaagataattaaagtcttgtctttaaaattttwaaaaagttatttctgtgaagaccctagcatatgtttgcctagatcacatggatctgaaatcgggcattctgaaaaagaatgactgtgatgagaatttagtgtaattatgatgaagttagaaagaaaaatcatcatcgttagcctagagtgaagtcaaatttccacaaagtagagatgggtactggaaactatatttaagttaaaagcaaaaagggaattgctattgtgacagcaactgctatgctcacagtgaaaggtggtcaaggttacctgaagaggtgacatataaattaagatctgaattacaaaaaggaataagtcatgtaaatatgagttaaaaggggcagaaagaagagttattctcatcaataaggtaagaaagaatttggtgttttgagtaacccagcaaagagcagtacagtgagtgagagaacaaagtcagaggaataaaatgaagttggaaatgcaggaaaggcataggtcaaaggagccatagcaagtt

SEQ ID NO: 857755 - DNA, 583 bp, Homo sapiens; identical to SEQ ID NO: 829483

SEQ ID NO: 857756 - DNA, 613 bp, Homo sapiens
ttgtcagccataggacaggcctcctgcacacctagggaaggctggctagtcatgtccccaccctccatggccacctccgtgcaccagaaatcagggtaagctgggtgtcyctggccatgcaagttcttagctgtgtcctctgatgctctgccactcacatgtctcagtccctttccacgtggtctcctctgttcctttgcttcctgctgccaccccctttctctcttcatacagtcggcatctttttttttttctccctacaactttggctccttctctattttatcctctcacactttggtctcatacagggccaccaagggcctccccacctccaggcccttttgcttttgcttctctcaaatgcacaatctctctcccagtgcacagccctgagacatgactatgattaactcagccttctgtgccaggagcctcctatgccactggatagcctgccttttgatggggtgcctttggggcaggcacccaccctgcattcactcagctgttgccagtgggaagggtctagtgcaaaaaactcctctgtaggtccttatcataccttagagaataggctgggggtctgggagcacggagactagcatataca

SEQ ID NO: 857757 - DNA, 553 bp, Homo sapiens
accaaaaagtaagtacctataatctggtattcttttcacactattgaaaaaagattttcaatacttcacctaaacatttagagaaatgtgatggagagatttcttagtccttgatgtttccatcatgagaggacagatcatctgtgactcaatggcaccttttttttttattgttgttgttgtgagttatacatctcctgcacagtatgattcagcagtgctgttttgcacaaggaacgttttagtacctcatctgtaaacaatgagtgtgtggtgttgtcatgttatgggttaaatcttccagcaaaatatgctccttcagtttaagttgcctttgtccttcattacagttcctagtaatgtcagaatgagttagtgtttcagcagtacctaaatttgactgcttaaatgcactcaagtgtattaccattagcaatatcatggacttgatattaaaaaatatgaactgcaagtgacctggtcaaaacattgcartataatctctgctgttgagttttcaaatggaaacaaagactgtatgttgtggtaaaaa

SEQ ID NO: 857758 - DNA, 598 bp, Homo sapiens
cagtggtggtgcagggtatttcaaatatatgccctatgtcattaygctaacataaacgtgctcatttgaaggaatagacacacttaaccatgatggcaccaaatgacaactccatacttttattggaaaatttaggtaactagtacactctgttctgcaaaatgccagctatgtaaggttttaggtgaagcagttatattttaatcgacagtctctctgcatgctaggttaacagtgcaaagtcacatgccatttgttacaatgggaaagaagaaatatacaaacctttcttctcttgcttgcctttgctcctctcttttgtctaaataatctcggctaatggaaatatgtagaacaaacaaacaggaaaagaaagtaacagaattagatactcagaaaattaccaataaattataaacagtatatcatgaaagactggcactgcctcagaaatgtaaaatggttgtagctgaatttttaaaagtttaaagcctgtacttcaaaattattaaatacaatcgatcttcaatacaatcacagggattgcagaaaacataggattattggattcacccagaaacactactaattacttgtt

SEQ ID NO: 857759 - DNA, 596 bp, Homo sapiens
agcttcataacagccatcttaagaattaaatctaagttccttggccattctatgttgcactccacaagctgaatattccttccacaacccaggatttttttttttttatttccaggatacatgaggggtgtgcaggtctgttacataggtaaatgtgtgccagggtggtttgctgcacctatcaacccgtcacctaagtattaagcccaacatgccttagctatttatcctgatgctctccctccccaatccccccactgacaggccccagtgtgtgttgttctcacacagaacagtgagaacacatggacacaggtcccctccctatgtccatgtgttctcactgttcagctcccacttatgagtaagaacatgtggtgtttggttttctgttcctgcattagtttgctgagaatgatggcttccagtgccatccatgtccttgcgaaggatgtgatctcattcctttttatggctacatagtattccatggtgtayatgtaccatattttctttatccagtctatcaattgatgggcatttgggttgattccatgtctttactattgtgaatagtgctgtaatgaacatacgta

SEQ ID NO: 857760 - DNA, 645 bp, Homo sapiens
atacacacacacaaacataatcacataacacacatccctgtatgtctagatagatacacctgtctgagaagttctaatggcagctaatatttacatttactactatgtaccagatggtattctmaactctttataggaaagctcactgaaatgcttatgatgtaactgtgagactgatgcactgaatatctttattttatggggtatagaactggagaaaagtcaagttaaagtgcttaaaggtgaaaagatggggatgctaaagattgtatttaaaatagcactggaacactgcaaccatggcagaatggaatcagagaaaggcaaagtctttctccctgcttatctaaaatcaaaggctttcccaaagacaaatgtaaaacaaagcaaaatgtacatgaatttgcttcaatagtcaatgccattattattgttactatttatatgccattgatttacaaaattagatactggttctttatgttcatgtgagaacaatctgagaagcaaaatattacgtatgttgtttatgttgacttttactgaaaatttgcctttctaattacaagagaaacaaaattataacccaggctttcttcaatttgcctagctcttacttagtattcatacacctgtaacatcttg

SEQ ID NO: 857761 - DNA, 669 bp, Homo sapiens
tctgttatgtggtcatttattttctgtcatttgacttttgtctgatttgtcttgaagcttctatctccacaacttttctgggcacttttttaaacacacaggaacttaycttggagaacattttttaaaaatataccaaaaatactgtgtctaaacttctgagaatgtataatgtgattgtcttctgaaaagtaggagttaaagtacgtttttatccttgggaatattgttaaatgactaatagaaagtggaaacctggaggcatggcaacgaaaagtcatttaaaggaaccagtttttatttatgaaatgcttactatgttaagagatacagtgcattgtaatttttttaatctaatggacaatttttaaggttttttttttctaaatagagaataccggattaacctataaccttctaagttgtacctttgaagaggcttttcttgctatgtcttgaatagccattttgtattatctatagctctccctggtcttcctgtcctcaagaagtgttaaaataatttgttgttctaaggtagagaatgggccaaagtaggaggatacatcaagatgtctaattggaaaggaaatcagattgcttttccagtgatcaaaggaagtatagcagtggagcaatgaacttttaaaaatgattcttatgggacaa

SEQ ID NO: 857762 - DNA, 499 bp, Homo sapiens
catggtgcctataattaacaacattgtcttgtgcacttaaaaatctattaaaagggtagatctcatgtgaagtgttcttactacaataaaaaagatgtctttttaaaaaacacactacatgtcttgtcattgaacttttcacattgaaaataagagtattgattagttcaaagtcatagtgacgctatatatcatttttgggaagattaataaaaaatggagacacatagaaaatagcttggggtaaaaatatgaaatttaatctgaattatcagatatatagtctgccactagaatagagagtgaagtttatataatgtggaaaatatttttcatcaaacttgtccatgtggaacctgggcagttcagcttgttgtgtggcatcayctcttctctactgtccattcctcttgcccagtagctgacctgtctacacgttaacagggtttgtaagtgcaggagaggtgactttgggtggagacatgcaccagaagattgc

SEQ ID NO: 857763 - DNA, 499 bp, Homo sapiens
catggtgcctataattaacaacattgtcttgtgcacttaaaaatctattaaaagggtagatctcatgtgaagtgttcttactacaataaaaaagatgtctttttaaaaaacacactacatgtcttgtcattgaacttttcacattgaaaataagagtattgattagttcaaagtcatagtgacgctatatatcatttttgggaagattaataaaaaatggagacacatagaaaatagcttggggtaaaaatatgaaatttaatctgaattatcagatatatagtctgccactagaatagagagtgaagtttatataatgtggaaaatatttttcatcaaacttgtccatgtggaacctgggcagttcagcttgttgtgtggcatcatctcttctctactgtccattcctcttgcccagtagctgacctgyctacacgttaacagggtttgtaagtgcaggagaggtgactttgggtggagacatgcaccagaagattgc

SEQ ID NO: 857764 - DNA, 630 bp, Homo sapiens
gcaatgttcagagaatggactttctaattaggtagatgtgggttaatacctattagtcttacatgttcagtagtaagttcactcttttgagcattgatttttctcatctatactatgaggattaatgraatactgttggtaaagcatgatgcctagtacatggtaggtgactcaaaattattataacccttcttcctgcttatctacaagcaatctcactaggttcctaacatgtcctgtggttaagtcggcttgaattatgacaagattagctgaagggaattttctcaccagtctgatcactaaaggacccagggggctgaggttggctccattcagcagatacgtgttgtgttctttataaaggcaccaaccccttgaaggcacctcaaacctcattctcacccagagaatttgatattcatgctgctacatcaaaaggttggggcagctattatgtattaaaatgtgtcattttaaattgctttttttttgctagcactagcaatatagatattgaaatttcttcagaaagtgcttatctcatcaagagtaaaattatagtatatgaaatactaattacagtattatgaagaaggttgaattcttctgtgacattctattaggaga

SEQ ID NO: 857765 - DNA, 630 bp, Homo sapiens
gcaatgttcagagaatggactttctaattaggtagatgtgggttaatacctattagtcttacatgttcagtagtaagttcactcttttgagcattgatttttctcatctatactatgaggattaatgamatactgttggtaaagcatgatgcctagtacatggtaggtgactcaaaattattataacccttcttcctgcttatctacaagcaatctcactaggttcctaacatgtcctgtggttaagtcggcttgaattatgacaagattagctgaagggaattttctcaccagtctgatcactaaaggacccagggggctgaggttggctccattcagcagatacgtgttgtgttctttataaaggcaccaaccccttgaaggcacctcaaacctcattctcacccagagaatttgatattcatgctgctacatcaaaaggttggggcagctattatgtattaaaatgtgtcattttaaattgctttttttttgctagcactagcaatatagatattgaaatttcttcagaaagtgcttatctcatcaagagtaaaattatagtatatgaaatactaattacagtattatgaagaaggttgaattcttctgtgacattctattaggaga

SEQ ID NO: 857766 - DNA, 551 bp, Homo sapiens
cttgaactcctggcctcaagggatcctcctgcctcagcctcttaaagcgctgggattacaagcatgagccagcttgcctggccacattgcttcttttaacatatattcttcataggcttaacaactgacatattaacatactatctaaacattctgatgaccagtatggaatatgctcagtaggtgaaagtgggttcaacccgctcccatttgtgcttctgcccaacagttggtatcctgaaacagttgcaatgaattggagatatcctgtgtgatgaagaggaaagaaacttgagttggaagtcaggaaatctgtgtgcatggtggtggctagagtttcttcctatcatttacctcttcagacaaatggacgccacctgcccatcaaccagattgaggagaggagtggataagaggagaggcatccacaccacattcattccttcaaccaaacatggaacttctaccaggctctgctaggcctcgttcacagtyacggtacaagatgtagcccccgctctcagggaactctggctggtggaaatacagca

SEQ ID NO: 857767 - DNA, 541 bp, Homo sapiens
gtcactcttttaaaaggatacaatactcctgaactccagatgcgggaactttctctgcagstgggctgctcttcgcagggagctggttcccaccacactgcccagagagaagttacaatgagattttaacactaggcagtcactgttcctttcctcctcctcccatccctgcatcttctgggcacatcccaccaagctgcctatccaggccccacttacctcttctctggcagggtttctagggtcttcccaacaaattttgggtgaaagacaacagcatcatgagggttttcccgcctgggggaggagggaagggcacagaatgagggaagagatttaagttcagatcacctctattctctctcgattgccaactcactggtatttcttgagttttctgccaccagtcaacactcctcagggcagaggagataaccctgaagcagagggtcaggccccaaagggaaaggcaaaggttcacatgatgcctacccctgcccaagcccccttacttgcaagactcttacttgcagatggctcc

SEQ ID NO: 857768 - DNA, 606 bp, Homo sapiens
gatggttaaagaatatttatagaaatttaaattacagaattgatttgcaaagaactrtactaccttagattattagacattaacttcttattcagcataaatcatcaaacatacgttggtgattatacttaatcatattgaagcttctttgtgcttctcaacattgatacttgtgtatgaaagttgttgctttgtgtcagaaggtgctgagatatttaatgctctgccattgttgtagattatctgtttcaattacatgacattttttacagaaccaaaacctacatattttatcaaaactctgggagtaagattggggaacttagtagtactgtcatacaggccatcttttttttttttttttttcttgaaatagggctcccactctgtcaccccaggcgtggagtgcagtggcatgatttagctcacggcagcttagaactcctgggctcaagccatcgtcctgcttcagcctccccagtaacttcagcctccccagcactacaggtgtgcaccaccacacctggacaagctttttaaattggtttgtagagactgggtcttggctggtctcaaattcctggcctcaagtgactctcctgcctc

SEQ ID NO: 857769 - DNA, 583 bp, Homo sapiens; identical to SEQ ID NO: 857077

SEQ ID NO: 857770 - DNA, 557 bp, Homo sapiens
aaattaaattgtttttgcataaagtatgaacggggtctaattttgtgttcttttacatttattgccrattattaaccaagtttattaaattactttttaataaatacatttagtttatgtaattaaattttaataccacatttaattaaattttatttaataaataatacatttaatttaattttaataaactttagttaatttaataattggcaataaacatgaacacaaaattagaccccatcatgcaaaaatagaatttaaaaaatctttactattaaaataacagaattagaagaagtattaagagttcatttgtataaaggagagagtcttaagcaagaaactaaaaattaaaaaagacaatgacataaaaattgtaaagttaatataaaaaattatgtcataaaggagagatatgttttagaatggaaaaaaagtatttgttaacacttataagagaccgagatgatatccttaatatacaaaacactcttttaaattaacaggaaaaataacataatgaaaataaagccaagagacaccgaggatccatt

SEQ ID NO: 857771 - DNA, 557 bp, Homo sapiens
aaattaaattgtttttgcataaagtatgaacggggtctaattttgtgttcttttacatttattgccgattattaaccaagtttattaaattactttttaataaatacatttagtttatgtaattarattttaataccacatttaattaaattttatttaataaataatacatttaatttaattttaataaactttagttaatttaataattggcaataaacatgaacacaaaattagaccccatcatgcaaaaatagaatttaaaaaatctttactattaaaataacagaattagaagaagtattaagagttcatttgtataaaggagagagtcttaagcaagaaactaaaaattaaaaaagacaatgacataaaaattgtaaagttaatataaaaaattatgtcataaaggagagatatgttttagaatggaaaaaaagtatttgttaacacttataagagaccgagatgatatccttaatatacaaaacactcttttaaattaacaggaaaaataacataatgaaaataaagccaagagacaccgaggatccatt

SEQ ID NO: 857772 - DNA, 608 bp, Homo sapiens
aatgtagtgtagcctaagtgtacagtgtttataaaggctatcgtagtgtatagtaatgtcctaggccttcacattctgtcaccactcactcgctgactcacgsagagcaacttccagtcctgcaagttccattcatgttaagtcccctatgcaagtgtcccattcgtatcttttatattggatttttactatgcctcttctgtgtttagatacaaaacacttaccattgtgttacagctgcctacagtattcagtaatcacatgctgtacaggttcatagcctaggaataaggcctaggtgtatagtagtctataccatctaggtttgtgtgagtacactctgtgataatcacacagtgatgaaatcacataaggacacatttctcagaatatatccccatcattaagtgatacacgactgcaattaatattggataagcacaaaccatactctcctctaccaccactctcaccccatccccaaagtatttactatataaaatacataattttgtttagaattatttttatcaagataaattgttaaaacatgtaactataaagattagcatcttaatataatagtggtttctttatcactgacacag

SEQ ID NO: 857773 - DNA, 603 bp, Homo sapiens
aattaaatgttgacatagctttacttatatagctgtaaatataagacctgaataaatgtaaacacaggaatttctgactgcatattaagagaattgcctgagaaatgcatcatacttttcaaaacatcagctgctgaattagtgttgattctgttaagaaagttgtgaaagttgttatctttattttctctttctgttttaaaactattttcttgcctttgcataaacaattgtgttacaatatgtcaaatgcagttttatggttattttgtttcaattactcagagattttgatgtcattttcattttttttccatcacttttgaaaaatttagggctattacctcttccaatattatgtctgaatattttttttttcttctaggactatgattaccaataagttaaaatattttcattcaatttttttctttttctttctgtgatacatttagatattctctactgactgacattcgagttcacaaatacagccttkggctgtatctaatctgctatcaaaaacatttattaatttcttaaccagttattttttagttctaaaatatccactcataaacattaataatatttacttaaagt

SEQ ID NO: 857774 - DNA, 656 bp, Homo sapiens
tcaaggagaaatatttaataacaaaatcaggggctgggcgtggtggttcatgcctgtaatcccagcactttgggaggccgaggcgggcagatcacgaggtcaagagatcaagaccatcctggccaayatggtgaaaccccgtgtctactaaaaatacaaaaattagttgggcatggtggcatgcgcctacagtcccagctacgcaggaggctgaggcaggagaataactggaacccgggaggcataggttgcagtgagccgagatcgtgtcactgtactccagcctgggcagcagagcaagactctgtcttaaaaaaaaaaaaaatcaggatcaatctaaaagaaatgtattaaatcctaaatgtttatccatacacaacagttttaaaatatttaaagaaaaagttgacagaattgaaagaagaaataaactgaaaaaacactgagtagaaaatttaaacaacctagtaaacttggctttatttacctaaataaaacactatatctaacaaatataaagtatttatatagtctattcaagtacacatgggagatttaataaattggcacttctgtggtcacaaagcaaattataacagattagattataaaccttaattagaaagttaaaagataatgttttctagaagataata

SEQ ID NO: 857775 - DNA, 622 bp, Homo sapiens
aaattgatagactaaacatgtggatttgcatctcctttgtgggtgggcatcatctaatccattgagagcctgaatagaacaaaaaggtggaggaasggaggatttgttttctctcactctgcccaaaaacttgaactagaacactgatcttctcttgcccttgctgcccctagttttcaggctttcatacttggactgaaatctataccattggttctctgactctcaagactttgaaccacgctactggcctttctgcatctctagcttgcagacagtagatcatgggacttctcagtcactataatcatgtgagccaatactttacagaaaatacaataaagcagtatcttgctgcttgtgtttctctggaaaattctaagtaatacagcaaccaatagaattttaaaaaacacaagatcatttcctcatttccagtataggaagacaaagcatttgacaaaattcatgaacccttcgtattaaaagcagtagtagagatgaaaaaagaaactttatcaaactgactaaaagcatgtataaaaatttgatagctgacatcatacttatctgtgaaagactgaatttttaccagaaagatcagggataagatgaagatggc

SEQ ID NO: 857776 - DNA, 685 bp, Homo sapiens
cctagttttcaggctttcatacttggactgaaatctataccattggttctctgactctcaagactttgaaccacgctactggcctttctgcatctctagcttgcagacagtagatcatgggacttctcagtcactataatcatgtgagccaatactttacagaaaatacaataaagcagtatcttgctgcttgtgtttctctggaaaattctaagtaatacagcaaccaatagaattttaaaaaacacaagatcatttcctcatttccagtataggaagacaaagcatttgacaaaattcatgaacccttcgtattaaaagcagtagtagagatgaaaaaagaaactttatcaaactgactaaaagcatgtataaaaatttgatagctgacatcatacttatctgtgaaagactgaatttttaccagaaagatcagggataagatgaagatggccatactctccactcttattacacattggattagaattttcagtcagataaactaggtaacaacaacaacaaaagagtggagaccaaaattggaagggaaaagtacaactatctttatttgttaattgcattatggtttatatatgaaatcccaaggaatccactaacaactattacacctaataaacaagtttagcaaggttaggatccragatcaatacatagaagtcaa

SEQ ID NO: 857777 - DNA, 521 bp, Homo sapiens
attccaagaaagtagagtttagtggtcaggtgtcttatctgtaatcaaattacataatttccaactccaagttctatagaatactgcctgtaaatctggcattttacccaatttttgtttatcttatatgttttcaattgtaatacagagaaaatgctagatcttaccaatacttcataccttatagaacgtaataaaaatttatatataaaagtgattagaacagtaaatgaaatataacaaacaacttacatataccttaaatagaatgattagtatacctatgtagcattacacatgtgtttcaaataactgggatgtgagtttcttataaacattcactcaatgttatttgagtctgttttcctatcacatggcagcagcaaatgcaaatgmaaatgaaagatgtagggaaatgagtcttaaattatgatacctttgagtttcctcttccatctattcattttgatattatacttttctgaaacttaagtgcaaaaaatgtctataaaacatagtat

SEQ ID NO: 857778 - DNA, 519 bp, Homo sapiens
caaaaaaaaaaagatgccttctctgagaaaagaaatgtgaaatgtgagtgccattggctagacttccccagagggaagacttcagggaaggaaatcccaagtattgggawttcaaaggccctgggagcttctgtcttgctctccagagtctcatcgtggttctgcccttgagcccactgatgatgcctctgcccacaggtgaatgaggcctctggggatggggatggagaggatgccgttgtgatcctggagaagacgccatttcaggtggaacaggtggctcagctcctgacgggcagccctgagctccagttgcagttctccaatgatatctacagcacctatcacttgttccctccaagacaactgaatggtgagcaagaggtggccagggtggctgtatggagggagaatgggatggtgggaaattaggtggtatggtgaccagactctctatacccgatttgcatattctagtacaatagggagattacttccctaggggacatttggccatcg

SEQ ID NO: 857779 - DNA, 587 bp, Homo sapiens
attatcctcttgagagaaggccttaactctggtctgaagtacttagacctaatataataataaataaggaatcattaagggaagaatgtaagctatgtttaaattartaagaattttatattataaaggcagaattaacgaaaaatcaattacataatgaggaaacaaaaaaggagaaaccccaccataaaaaccaagatttttaacgctggagaattatgagtatgtcaatatcactgaaaggaatgcagacattacacaataagttcatttcaagaaactgaaccccatgttagacatgttacacaggatatttcagaggaactctcaaatggaatagtctaattgacattcaaagctattccattggagtttaggagacatgtcagtgatcaagagggggaaaaataagtctcatcagcatagttaatgttagttaaagtcttgaaagtagaaaagctgtctgaattgaatgtagaataatgatgcagaataatgaagggaagaaaagcacattggtgactgaactttggggaatatcctctgggttatgagagaagctctttcaacttacacctccattacag

SEQ ID NO: 857780 - DNA, 550 bp, Homo sapiens
acaaaatctctgaattgccagaaaaagaactcagaaggtcaattattaagctaatcaaggaggcaccagggaaaggtgaagtccaacttaaagaaattaraaaaaaatcatacaggatatgaatggaaaaatcttcagtgaaatagacagcataaataaaaaccaataacaacttctggaaatgaaggacacatttagagaaatgtaacttaccagtttgttaacaactcgatgtgtcagttatctgttaagagttttcaaaatgtggtccagaagacctcctgcatcagaatcatcaaagtgcttgttaaaatgcagtttctcagtctccttccagaatgatcaaatcagaatctatgaagtacccctaagaatttgcatttttgtcatcttcccagtttgattacttaagtgtgtgacaaaagacataaggggttagtgctcccagggatatttacttgttcacagagagcaaccaaagacttgaaaactttgaaaacctgtaactttttttgggtggggggtgggggggcagtcttttgggacaagg

SEQ ID NO: 857781 - DNA, 500 bp, Homo sapiens
ctttgaaactgcttagactgatgcagatatgccagcttagattttttaatccattttggctcatgcttggtctgcaaaatattagcatccagttcagaggtttctctgtcagaaagagaaaagcagacagtgctgttctttgggattttggaagatgatctagcagaaatgatagatggcactcactagcatctttttcttgcaaagaaaagcacttattgaaaacaaagctgccagccaaactatataatatgtggtaaaggcagagagctcagtataccatagatatttactaagaagacagtaaccaagctctgaatgttatctgtagggttgataacatccagatatcaatgttattatcaaccctccagattgatgacatataacaatgttatatgktaatatatattctctttgggttttataaaaactctcaagcggcttcatttgatagactctcctttctgttttaaaatctaacattttaaagtgagtac

SEQ ID NO: 857782 - DNA, 619 bp, Homo sapiens
tgcatttccctcattattagtgatgttaaacattttccatatacccattgaccattagtacatcttctttggaggaatacctagaaataactattcaggtcttgaacccatttttttttttaattttttaawttttttttttttagagacagagcctcgctctgtcgcccaggctggagtacagtggcgcgatcttggctcactgcaagctctgccttccaggttcacgccattctcctgcctcagccttcccagtagctgggactacaggcgcccgccactacgcctggctaatttttgtatttttagtagagacggggtttcaccgtgttagccaggatggtctcgatttcctgaccttgtgatctgcctgcctcggcctcccagagtgctgggattacagggcgtgagccatcgcgcccagccactaacccatttttaaattaggttatttggttttctgtttgtttgtttactgctgagttgtaggagttccttatatatctttgaggttaactactttttcagataaatggtttgaaaatattttctcccattccacaggttgccttttcacttttttaattgttccctttgctgtgcagaagctttttagttg

SEQ ID NO: 857783 - DNA, 537 bp, Homo sapiens
cctcccaaactgctaggattataggtgtgagccaccacgctcagcctgctctccatttctttgtgaccattcacacatccttgaggcatgagcttccagggaagcctcatttcatgaggggtatcatctaggtcaggttttcctcatagctgagtagattccctgagcaatggacagtgtagaggaagagctagaaagctgataagttctttttttttttttttgagacggagtttcactcttgttgctcaggctggagtgcagtggcacgatctcggctcactgcaacctctgcctgctaggttcaagcgattctcctgccttagcctccctagcagctgggattacaggcacccgccaccacgcccagcttattttttgtatttttagtagagatggggtttcactatgttggccaggctggtcttgaactcctgacctcaggtgatccacccacctcggcctcccagaatgctgggattacaggcatgagccacygcgcccagcccaaaagctgattagttcttaatcattttg

SEQ ID NO: 857784 - DNA, 518 bp, Homo sapiens
taagcaaaaagaataaagctggaggtatcacattacctgacttcaaattatattgcaaggctataatagccaaaacaggatggtactggtataaaaagagacacataggcaatggaacaaaatagagaacccagaaacaaagccacataactacaaccaactgatctttgacaaagtaaaaataaataaataaataccctaaggaaaggactccctagttaataaatggtgctgagaaagttggagagccttatgcagaacaaggaaaccagacccccatctctcaccatatacaaaaattaactcaattaaagacttaagtataagacctgaaattataaaaatcctagaggaaaaccccaaaagagctcttcagaactttgttgtcagcaaagaatttatgactaagttctcaaaaggaaatacamcgagaacaaaaatagaaaaatgagacttaattcaactaaaaagcttctggaaaacaaaataaacaaccaacagagtgaacatacaaccta

SEQ ID NO: 857785 - DNA, 616 bp, Homo sapiens
attaagcttgaaggtattctgcacagaagagtctccaagaggatttgggaaagagatatataagtatgcacacacacacgtatgctggatgcaggtaatgaagagtatgcgtgtgtgtgtgtttataaatttctaaactttcattccagacagtcttgggagacagatatttctttgggggtgagagggctgttactcatctcttaattaaacaaatataagtaaaggtggaaagaaaaagttagcacaactcaatgtttcccttactcaaaatgcagtacagcacactgatttatttgcagttatcctcatataattgtttatatttaaaattcataaactcctatagagctttaaaatttttaaatctctctgaacatatattttttgcctttcacaattagctattctcaaagaatttgagagagaaggtcacatgtaaccaataaagttgatttaatttggtagaggtaaaaattccctttyatgcagctcttgagatataatttaaacataatgctgaagctaccttcttctgcttttaaccacctggaatcagcatctatgtcataaaatgggagagacattggtatgattgtattcagagtgaaaaaaa

SEQ ID NO: 857786 - DNA, 488 bp, Homo sapiens
atctcaatgtagctttctattaacttcttgttctcctattaatgggtcaaaaattcttatttctttctatgccttatagtttttattgacaactaacatcttgaatgttataatatggtaattgtggaaatctagatttccttcagcttcccagagtttgctgttgttgcttgttgaggtctgctgttgcctgtttgcttagtgacttttccaggctatttttacaaagacttccttgtcatgtagtctctgaagtctttgttttgttatttcaatgtcagccagtgacttgaccttgaaccactgaagccaaaaagagaaaaacatactctctcagtcattttagattggctctaatctgatgtattccttcaacgttcagccagttagtctacaactctsccttagcctccttgcactgctaaggcaaggaggcttgcactgagcctaaagatcagccagaggtatgtaccttttataaggtcttt

SEQ ID NO: 857787 - DNA, 553 bp, Homo sapiens
ctttgctgcgttgtggtgggttccacacccagttcaaacttcccactggctttgtttacrctctgaggagaaaattgcctactcaagcctcagtaatggtggatgccccttccctcaccaagctggagagtcccaggttgacttcagagtgctgtgctggcagcgagaatttcaagccggtggatcttagcttgttgggctctgtatgtgtgggatctgctgagcaaggtgactcagctcccaggcttcagctccctttccaggggagtgaatggttctgtcttgctggtgttccaggcaccactggggtatgaaaaaactcctgtagctagcttggtgtctgctcagatggccacccagttttgtgctttatacccagggccctggtggtgtaggcacccgagggaatctcctgatctgtgggttgtgaagaccgttggataagcatagtacctgggtcagacagcaccatccctcatggcacagtccctcagggcttccctttgctagtggagggagttccccaatgccttgcgcttccggggtaaggtaa

SEQ ID NO: 857788 - DNA, 589 bp, Homo sapiens
ctcccggagaccaggagacccaggctgaaatagcaggtggagttgttcatgtggcagacatagcagagaggacccatcagggacttgaatcaatgtgtgattctctatctccttcctctcagatcagagacagctgtccagctaagcccatcttaacctagaccaagcttgagaggggccaagatacagggggtacagagaggcaggctctaaagagccagtacctcaggaactgggtggggaaggctggcccaagttagaggccattccctgggaagaaggttgcctgaattaaggggagacacaggctgtagatggaacagtgtcaaagtgtttctcaagaggaaagtgaggaagtttggggcctgctgctgccctgcgtggtgacctgtttcccccaggccactccttatccatcaaccatgatgggacccatgatgggaggctagggagaggggctggaatatagtggatgttcatgtagccaacccaggggacaaacaagaaatgaggacaataactggtattgcctgccccagagtcacgagatttaggccctggatccsagccccctgtcccgcaccccgtc

SEQ ID NO: 857789 - DNA, 607 bp, Homo sapiens
caattaaaatctaatttttaaaaaatgggcaaaaaataagaaccggcactgaataaaggaagatataccaatggccaataagcacatgaaaatgtgttttaatattattattcagcaaaatgtaaatgaaaatgacattgagatatcactacatgcccattagaatggctaaaatcaaacggtggcaacagcttaagtggtaagattgtagaatgtaagcaaaagtctcatacgttgctggtaggagtgacacaaccactttgaaaattggtctggaactttctcataaagttaccatgcatctaccaaatgacccagcaattatactgtaaatatttacccaagaaaatgaaaacatacatccatacaaagatttgtacactaatgttcatagcagctttattctaaaactggaaacaacccaaatatctatcaacaggtgaatggatgaataaattgtggtatattcatataatggagtacagcycagcaataaaaagtataaattctaccaaacacttagagaagatttaataccaaattcttcacaaactcttccaaaaattagaagaggagagaacatttcccaacttactctatgaggtca

SEQ ID NO: 857790 - DNA, 465 bp, Homo sapiens
cagaagtatagttttataagcatctgtgctgtgctgtcagtggtgtagcatgtttgccattttattgtgtagctaagcagaacatgtgctttatctttgggatgctgaaggagatgaatggacttcaaaaataccttcaatttttggacctgcatatttagctgtttttgttgtttccttctggagtttcatatatattaggttggtacaaaagtaatggcagtttttgccaaagtattgcaaaaaccacagtaacttttgcaccaacctaatacttaacatcataatattcagtggtgaggatcttattttactgccattcccattccttttcatttagaaacagaataaagttgtatttcaaatacctaagagagatacacacasacatagtgtggtccataacataagtagaaataaaatacttgacaaaactagcacaaaggatgaggagggagtatggaa

SEQ ID NO: 857791 - DNA, 466 bp, Homo sapiens; identical to SEQ ID NO: 857500

SEQ ID NO: 857792 - DNA, 550 bp, Homo sapiens
cacctgtagtccaagctattcgggaggctgaggcaggagaatggcgtgaacccaggaggcggaggttgcagtgagccaagatcgcgccactgcactccagcctgggcgacagagcgagactccatctcaaaaaataaataaaaataaaaataaaaaagaattatccagacgtggtggcccgtgcctgtagtcccagctactcgggaggcttgaacctggcaggtggaggttgcagtgagccaaaatcacgccaccgaactccagtctgggtgacagagtgagactctgtctcaaaaaaaataaaaataaaaaaagaaactttctcctattccacatgttctagttttttttaaataataaatgataaattttgtcaaatgcttttttaagccatctattgcaatgaccatatagttttactctcctttagtttattaatatggggaactacattagattcytaatgttaagccaaactcctattctttgaataactgctacttggttgtgattttttaaaaatatactactcgattcagtctgtgtttca

SEQ ID NO: 857793 - DNA, 539 bp, Homo sapiens
atttattttgccaaatttagtctgtctaaatatgctttgtcattacaaaacaaaaaaagtagttttaggctctcctcctgaatttccttttaaaaattaactgggcaagatattacaatgtrtcatttgttaccttcaacagtaagctggtattgacattaaaaaatgaagccagctgtacataaaaagacatcttttggcgtctgttttaacaatttgaacaaaacctcgaaagccatttcgtcttctggtctcaacttcgtaaattagacccttgaatctgccaaatttcaggagctcctttatcttaatgcggagatactcctccaaagagaactaactatatagaatgttgccagtagaaacaaaagcatgtgtatttgagacacaaagggaagaatgctgtcggtctcacttcttgcctgacatattgagtggtaaatgacagctggcacagtagcctctcccagaggcaagtgtgttcactccagagccacttctacatcccagcaatctgccctgcccaggcgcagcactgc

SEQ ID NO: 857794 - DNA, 631 bp, Homo sapiens
caataaaaaataattattacaactcaataataaaaaggcaaataacacaatttaaaaatggacaaaggtgggcatggtggcacatgcctgtagtcccagctatttgttgggctgaggcaggaggatcrtttgagcacaggagtttgaggctgcagtaagccatgattgtgccactgcactccagcctgggtgacaaagtgagaccctgtctcaacaaaaagcaagggaggcaaaggatatgaatctccaaataaaatatgccaatggccaataaacacatgaaaagatgctaaacatcattagtcattagagaaatggaaaccaaaacctcagtgagataccacttacacacacttgagaggctataatgaaaaaggcagatagcgttttggcaaggatatagagaaagtagaaccctcatacattgctggtgggaatataaaatgtcacagcccctttggaaaacagtttggcagtttttcaaaaagctaaattgaaagttaccctttgaccctctaattccactcctagatatatatccaagagaaatgaaatacatatgtccacacaaaaacttgcacatgaatgttcatagcagcattattcacagtagcccaaaagtagaaacaat

SEQ ID NO: 857795 - DNA, 553 bp, Homo sapiens
ctatttacccgtagggtgttttgcatgactgatkaatcctcacagcattggaggactttcaggtgattttggagaccatggcttggaaaaagcaggtgattgacaggtgaggcagggcctgcaagaagtgtaaatcaaaggggagagatggaacgttgtccatgttcagacataggtgatgatgggtctaaacaaaaagtcaaactgagaaggggtttcaattttaatatgaagaaatagtggctcatttattcatttaacaaacctcaaggatctattgtttgccaagtactgggtaattctgaagggtaatggtaagtcaaagaaaactgagatacggatattcctctgggtggggaagttaaaaagacccaatatattgtgcaaattgatgagtagagatttgtataggggactacggggagatggaggaaggactttgtagtcgtgtggggaaaggctttactgaaggtgagtttgatctctctccgtgaaaagcattctagtcagaggaaacactaggtacaaaggtcagaggtgtgaggaggtgcag

SEQ ID NO: 857796 - DNA, 452 bp, Homo sapiens
ctcttgttaattatataatcttctattacggttgtagatttcaaggacccatgcagggttcagatgcaggcagatttttgttagtaaacctctaaaggrgaatgggcgcttacaatacaaagatgtcatcctcttaagttaggtggaggaaaacctcaatggaattactgtaattccatctttttaatataataaaagcaattaaaaagctttatgtagtactctaggaatcaggtttgctgagactctccaggaaaaactgagtaggtttaatagcaggctttgatttagaaataggaatagtaacagtgggagattgaaaaaaaatcattctgattaggaatcattttttgaggaagaaagtttccttaagaaaaggctgagattaagtagcctaaacaaaacagatagaaaaggcaaagtgaagtcttgcaatcgtaaggaaaggttgg

SEQ ID NO: 857797 - DNA, 592 bp, Homo sapiens
atcttatgaaaattgaaggctgaatagaatgaaatgcaratttaaacaggaagatctagaagactagcaaaaataaaactatctcaactataccaagtactgattaaggaatggtgaaatacaaactggcatacataacttgtgagaaagaaaagcagtataaccacttcagagtataactggcattattgtaatagtgatgaattgtaaatagcctatgtccattaatgaacagggaaatggagaaataatctctagctgtatttatacaatggattaataccacaaggcagttaaacaggaataaactagacctatatgtatcatattgattatgtctcaaaatataacagtaagtgaaaaaaaatcaagttgtgtagagataaacataccaccatttatgtaaactaaaaacacagaatataatacattcttcatgatcaaatatatatacatatatacacacatatctataaatctattatctatctatctatctatctatctatctatctatctatctatctgtagttcaagtatataaaggcagacttggacaggcgtggtggctcacacctataatcccagcact

SEQ ID NO: 857798 - DNA, 487 bp, Homo sapiens
tttcagagtttccccctctctagggccattagatggttctagagggttgacacaatttcaaggcctggagagaccttgtggatattggtcacatgtctccctaagccattgttgagatggccattgtccagtctgtgcctgggcaactaggaaggtaactggtgagagtgatgggactcctggggagtacgcatgggaggtgggcatggggttgatggcagggaaagctgaccctgaggagtttgggaatctaggaactggatatgataaatgaacagcaagggaatttggaggaaaggtgtgaacccagcagttgtatctgggcctatcgctagttcaaggtgatgccctgtgtgttcagggtggcctgagacaatggatagacttttggctttaggtagaaytggctcaggaattggggtggaattgagtctgaaaatgagggtcattataaacctccctgtgaaggacaagagacatgactgca

SEQ ID NO: 857799 - DNA, 614 bp, Homo sapiens
ttcatcatgaagggggtggtgaaatgtccatcactggatactttatagataatcaaataccctggctcatttataaataattgccttagggatgtgactggaattgattaaccctgatgaattcttgccactctgggctcatctatcttatcttcaggaatttgtagggtattaaggtatttaagggcagagtttgtttcttttcattaactgtcacatcagttaggaattgtgtttgattgcagggtggagagctgacttcagtggctcaaaagcacaagggtgtgttttatttgctcttagaaaaaatactggcaggtagtaagaccaaggaatgtatggctatgttttggtcactggggacccaggaaacttgtggttttctgttccatttttactgcatatttttgttcttaagacagctttatagtccaagatggcttttggagctcaagccaatgtcccaggtagaaagatggagaaaagaagaaagaggcaaagggccatccctcctagctgagtcaatcctcttgaggatctttacccaaaacctamcttctgtttttgctttatttgttttttaatcttaccaaccttacttacctttaaggaaa

SEQ ID NO: 857800 - DNA, 481 bp, Homo sapiens; identical to SEQ ID NO: 856876

SEQ ID NO: 857801 - DNA, 540 bp, Homo sapiens
attagaaattaatataaggatcccagaccctatttttttttttagtggtattgccagcttaatagtttactcttyggttgtgcctaatgggtgattcaaactatccaagcgatttctaaattcaattagtacattttttatgtttagaagttttatttcttttctcagatcagtttggtcacttaaaaactcttgttctaataccgtaatttcaatcccctcctttctttctttacacacattaagtatcctaattttatcctcactgtgtgattatttcagtgtttgtggtctctgtggtcttcaccctatttgttacctaggctgactctcattcaagatggcttatttccattgtgcatgtctatgtgtaaacttactgaactcggaactttattctttgaggcctgaattcaggacatttctccccagaggaactgggcttgctatctccagacacctggcagcactaacaatccggacctatgctatgatacattctcagcttggatttttctggctttacaggtaggttggatt

SEQ ID NO: 857802 - DNA, 525 bp, Homo sapiens
gcattttccagtggcagtgaccaacagcagcatttggtacaggggatccccccttcctccttgctgtgatactccccttggtcatgacaccacactttcttggcttcctcctatctcgacagctgctccttctcaatgtctgcagccaaagtctctgatctttagatgttggaggattcagtaattgttcctctttcctatcaatactgattccctcaatgagcacatccagtcttatggctttgaatacagtttttgtgccagtgattcccaaatatatagtaccagttttcaactcagtcccaattccagactcagatccgtccacctactactcgactagaatatctaatgggcatcccaagctcagtgcattatttaaggttctcttgagagacagaccaatagggkgtgtgtgtgtgtgtgtgtgtgtgtgtgtgtgtgtgtgtgtgtgtgtgtggagagagagagagaaatttgtcataaagaattggctcatctgattgtggaggtgtgcaagtccca

SEQ ID NO: 857803 - DNA, 676 bp, Homo sapiens
attccattactaaaaggaagaaggggagattgaatactgggaarcaaataagtccctgattagccatatctgtaaatactgctgtcacctccaactaaataataaggtcttaaagggtagggctgcattttacactctcagtgccttcaaatgataagttcttaataaatatttcctgattgggtgatttggtgaatgcactttcatccaagagattttctggagagtttttattatactgccaaaaccaaacactattcaatcccagggtaaacactgcaggaaaaaaaatgtcacagggcaacatagtcataagtgggttctccccatgctcacacgcccttcattctaagctgggggaggctgctgtagtaacacagatgcaaaaaataaactttgactaaatggcttcatgttccagatgattggatgcctcgttaaagcacccaaagatgaagctactgctccggcaaagttgctgacctaattttgagaactaaaagacagagctaagtgtgttttcatggcatcccacattcctttcttaattcatcatgattcatgggaaccaggatctcaggctgcccctcccccaggtagcagttaagctggtggaattgttctctctagtccataaggacatggaaacggatcctgctggaggaagtcaatagag

SEQ ID NO: 857804 - DNA, 602 bp, Homo sapiens
tatctccatagacaatggagccactagyggtacatttatactcatcaatgaggccacttctgatctgattttctgacatttgtcttgatttaaaaaaaaaaaaggtgggggaagggagatggacaaaaacttaatctctggcaggtcccgtctgatgacagctcagcacacagtgtgtgtttaggaattgttctgcttcttattctccccacatcagtcatgattccagaacttgaagtggttcaaagtgagctcatagtagcatttaacctgttgagaatctcttgtcaccactatatgttttcactggtaaaagagtcatctgatttactgtgtgtccccacattcacaatgcatacatattcacacaggacatggaagccaaaagtaaatggttagtcacaaaaggtttgttttctcctattttgctgtttacaaaggagtgttatcttatgttggaaaggatttcagccaagaacagcagtgaggctgtaggagcaatgttacaatgtatttccctggctttttaaaacctattccctggtttctgcctgcaagccttaggatgtgagatgcgggctggaaaagctgctggagggtaa

SEQ ID NO: 857805 - DNA, 668 bp, Homo sapiens
ctctgcagtttatataatactgcttccttagtcatgtgctcttaaatgtaactcttaattataagattgggtctttaacagaataggagcttcttgataatatcaattggctagcatgagcactaggatgtcttatggaaaaagtaggtgacaaccaataacaacccattaacagactagcatctctaatgaccctagtaacaaaagaatggtatttaaactgtttaaaattttattgtggaaatatacatataacacgaagtttaccattttaagaaagtgtacagttcagtggcattaagtacattcacaatgttgcgcaactgtcaccactatctagttccaaaactccttcatcatctcaaacagaaactctataaccattaagcaataattctcccgttccacactctcccagacctggtaacttctattctactttctgtctctatgaatttgtcttttctagctatctcatataagtggagtcatactatattgtcttttggagtctggcttctttcatttagcatagtgtttttaaggttcatcgatgttgtagcatkcatcaaaatttcattcgtctttatggctgaataatattctattatgtgtgtataccacggtttgtttattcattcatccactgatggacatttagattattt

SEQ ID NO: 857806 - DNA, 623 bp, Homo sapiens
tcctttaagagcccacttcccctatagaagcagagctctttctgtygatttgggagagatcatgttaaacattgcaaagaggacccaatgttcctagttataaccctgagttctggttattcaaatgaaagggtatctcaaaatcagacccagattcagcatgtcacctacacaaacctgtataactcatatacaatgtgagcctcctctcgctgaaccaactgtagatccatatgcacatgcagtgtgcagcatttgtctgaacacggggtaaccttggataccaagaaaaccaacttccttggtctagttgctaagacaacaggacagaggtgggtacgggggagcccagcatagctatctacaggctgtgctgttggcagggggacatggggaggggagaatgggagggctttgggccgcccacctctccaagcctggactccaaaggctgcagggacagtgcaatattcttgtgtcaccaaataccaaggaacctctaagtgggaccctatgatgcagtcctagagggatgcaggaccaacagaactgcctggaggtggggattggggaccagatgcaggcagacataaagtgaaggagagggatgctccagagttgag

SEQ ID NO: 857807 - DNA, 621 bp, Homo sapiens
acagcaggcattgggctccagctggacacagaggcagaaggggagcaggcaggctgcagtgaggaggggcggccctccaggaccatatcggtggcccctgcaaatagagaagaaggggagtgaccggacatcccacagagtgaagtcaaggaaagaggacaaggggacagggaattagagaaggaatatgggaaagaggtgaagatttctaatttgatttcagaaataaattatttctgaatgatttccaatttgaaccagactggttcaagataggatgtgtgttaatatatatttcctgaattttaaaagaagtaactatttgtagtagaaatgtagaaattttggtatttatcaggaagaaatacaaattttacataacaaaataactgaaaatcccaacactcagataaaacttttgatatcatttcagtctatatccatctagcttccccctacccagtgtgtgcatctgtgcatgcatgagtgtgacttacttacttgtagggtatcattacrtgattgtgaatgcactgatttgcaatacatattttcttataatactaggacttctgaaacatttttatatccactatatatctattatatggctatttataa

SEQ ID NO: 857808 - DNA, 505 bp, Homo sapiens
ttagtgatttattcacacactcacattgacttgagaaaaataaaatagggctcaaaaatgattcaaggcatctaagctattaaaattaaattgtctatggaccctagtatgataaatgccaagagaaatgagttggaaaatgcccaatgcccatccctttctggagattccaaatttataactaagttatttctgtaagtctaggaccaatttctgcagtttccataatgtttaaagcaatgctactactgtatgggattcaaaaaagattgatctgtattttaatctttttggatactttttggatacttatagtatccaattccgatgtggtagaacaaaagaagtcctaagaaatatttattaaacttccactttttattttaatgaagatttttttccacaaataaaaatttaccttgaggtcctctaaaattagattaatttttcaatcatcttattaccatttaaatatcstcaaaatacctgtatactggctgtcaaa

SEQ ID NO: 857809 - DNA, 491 bp, Homo sapiens
aaatgataaagaaaaatatgaaaaaacacttaaaatttaaagcaaaaataaaagatacaatgaaaatttcaaayaaaaggtcaaaaggcaaagttgagactttcagtttcttctctgacattggaggtcatctcgcctatcttcaccagagaagagctgaacaaactgaaaatcaatgacttttcttcgatccctcaaagaattgaagtcataggacaagccaccatcctaaaaaactggagagacaagaaaatatatggaatacagatcagtttacccaaagcagatgtcactggagacaggaactggtaggaacagttaaacagtaattttgataaatgactaaaggcttactgttgacaagctcgagcgttaaaaactcctgggggacaagtctatgggggcacctctacacttctgtaggttgtacttccaagagtcccaccaggtaaagatcagagataaaatccacttgtgttcgtccaggtttg

SEQ ID NO: 857810 - DNA, 491 bp, Homo sapiens
aaatgataaagaaaaatatgaaaaaacacttaaaatttaaagcaaaaataaaagatacaatgaaaatttcaaacaaaaggtcaaaaggcaaagttgagactttcagtttcttctctgacattggaggtcatctcgcctatcttcaccagagaagagctgaacaaactgaaaatcaatgacttttcttcgatccctcaaagaattgaagtcataggacaagccaccatcctaaaaaactggagagacaagaaaatatatggaatacagatcagtttacccaaagcagatgtcactggagacaggaactggtaggaacagttaaacagtaattttgataaatgactaaaggcttactgttgacaagctcgagygttaaaaactcctgggggacaagtctatgggggcacctctacacttctgtaggttgtacttccaagagtcccaccaggtaaagatcagagataaaatccacttgtgttcgtccaggtttg

SEQ ID NO: 857811 - DNA, 638 bp, Homo sapiens
gtgtactactctggctaaactccatgtcattacagttggctcttcatactaacctgctttcaagggtggatatgctagaagagtttcaatatctggatttccagcagttaccttaagtttccatgtcttagcaaaatggcacattcactcactgaccagcaacaataaatttactgtgctggaactctaacatgacactaaatcttcattctcaaaattcactcccagcattaacaaatgatataaataaccaactcttttcatgtacctgtaatcataccaggcttctgattttacaatccgggtttaagctgtttacatttccaaagtaatcaacttttgctctcctaaatccctcgtaatattcaaagtaaaactgatggaattttttgataagttactacaagtttagcatcactgattaccttcaatgcacttgcaagtgaaccacagctaatctgtaaattaagaattcatctacaaatggaagcaagaaagaaaaaaagttgtttttcttaagcaaagttggaaataaacagaaaatctttttctttaaaggayggtggagtttcaaaaagtgaagttgtctatgcaatttaagtgtagaaattacctgaatcagtaatactaatctctcc

SEQ ID NO: 857812 - DNA, 642 bp, Homo sapiens
atacaatattaaactttttgcttctagttcccacctgctcagcttgcatcttatttccttgacaacaagtttaaaagaaagacagcaatgagaaatggaatgtctggggcagatttttggacayaggagataaactccaagtgtctaaatttgcacatatatcagcctgtggtctcgttctgatcttcatagtaaaagtacattcctttgttttatcctcactcaatctcttcttccatttccccactgaggactgatcagactctacttcagccatagcctcgatagcgaaatgaattccatcgtccttttcagtgaggtgtcatttgtcaactgaaataagggcctcaattgtaagggggaagcccttaatatcgatagacaacctccggctatcaacgcctcactcttaccctgcaccggacacccccgcccggctagctaggtgtcagaggtaacattcctctcggaggattcaataccctccgtggtgaccccttgactctgtttgatgactttcattacttatctctggattttgaggaaggtgagattcttaagcttagtgggggtgatggagggagcaaccaattggatgctgctcagcgctaaaaaagaaatggattgaggatcaccttattt

SEQ ID NO: 857813 - DNA, 584 bp, Homo sapiens
aatcctatcttctaagcagagttttcatgatttagtrtagctcattattatgtaaaatgctaataaggatttgggtcacatgaagtgtgggaatcaatacattttatatctggcttgagattattacagtgaccttcggcacattaaaggctttaagtagtcctgcaagaaagatagttgtatactctagcttttttcacacatacatgcactacatggaagcttttgggaaaaatttcacatgaatattaaacaagtttaattttgagaaaactctactgtatttaattttctttgtgcagtctcttgagaagattcagttatttatattccagaaataattcaaattagtgtatatatttgaatatgagtaaaagtaaaaagttgaccttttcattgttttccacttcttttctttgtgaatagataccgttctcatggcctaaattaaattgttggacctaagataattattctctcaggttttgttagttaataggcacatggttaaatacagatttcagagggcttcctattgagtaatgtgtagtctttttttgcaaagtatatctaaaaccaagtga

SEQ ID NO: 857814 - DNA, 535 bp, Homo sapiens
gacataagtagttgagctgcttctttagttgacagttataagggttataaaactgatatttacttcatatagccgtgttaaattactttcaacttttctggtccataatctaccagttgtgaaattttgacatgttagccctcttgtgtactgatagtatacctttaattcataagtctagaatcactactgagtggcagagtaacattcttctgtctcatcatattttctaaaatggagtcattaactgccacatattcagggagataccaaagaattaatgaaacacttgtaaacctttggtaaaaaaaaaaaaaagtgtcttaaagtgttattcattagaggttcaaaatttttaacagacaaataataatattttttccctccaatgcaggtgttctttatacattttcctacagggcttctctgtggagaaatccgaaaagcatatgtagaatttgtcaatgtcagcaaatgtccacttactggattgaaggttgtttctaaacrtccagagttctttactttcggtggt

SEQ ID NO: 857815 - DNA, 683 bp, Homo sapiens
acactatagcttagttttggctgttctagagcttcatataaatggaatcatacaataatactctttcaggcaagacttctttcacttatcgtagtgattttgagmttcctctgtgttactgcatgtattagtagcctcattacataataaagctgtagtccagtggttctcaatcaagggcagttttgctcccagggggcatttaaaatggtctggagacatttttggttgccacaactgagtagttgcttctggtctctagtgtttagagcccagggatgctactaaatatgtaacatgtccaggacgggccgggcgcgggggctcacgcctgtatcccagcactttgggaggctggggtgggtggatcacgaggtcaggagatcgagaccatcctggctaacttggtgaaacccggtctctactaaaaatacaaaaaattagccgggtgtggtggcggatacctgtaagtcccagctactcgggaggctgaggcaggagaatggtgtgaacccaagagacggagcttgcagtgagccaagatcgtgccactgtactccagcctgggcgacagagcaagactccgtctcaaaaaaagaaaaaaaaggaaaaaaacccacaaaaacaatgcccaggacagcctcctgcgcatccccaacttcagcacaaggacttatctagct

SEQ ID NO: 857816 - DNA, 533 bp, Homo sapiens
agtctgatgtagcttttattgagtaaaggaaaaagggaattcagccgcatgatacagaggttccaaytgatcagagtgcacaaagacccttcccgtctgcgtgatgggaaccacaccagcacatggggcatgcggaagccactgctgcaaggaggtggttcccactctcacacacatgaacagctcctggtcagtcccaagaggcaagggcagagggcacagcagctcttacagagctactttacaaataaactgtgtgccttcctctggagtctcttacaacactttttaaaaagatctgggccaggggtggctcatgcctgtaatcccagaactttgggagaccgaggcgggaggatcatgatgtcaggagatcgagaccatcctggctaacatggtgaaaccccgtctctactaaaaatacaaaaaattagctgggtgtggtggcgggcgcctgtactcccagctactcgggaggctgaggcaggagaatggcatgaacccgggaggcggagcttgcagtgagccaagat

SEQ ID NO: 857817 - DNA, 584 bp, Homo sapiens
attttctattcatttattatcatatttaatgtcataaggctcataagattttctcagtctgttcttttaatgactaaatcattctggggggaaaatagtttmtaagctttaatgggttaataatgaattaagatataggattcaggtaaatttgataaaggatttcagtatttctgtgtctgaaatgtttctgtgtctgaaacaggaattctggactagcaacgtcctctctgaagctaaaatccacaagtttatggtcacaggaatgatttaagttactgtaaaaaataagaagtttaggtatatcagagctattcaaaagagagaaagaaactgaccttttcagtcagcaaagtattaataataccaatttgccatgaccaataaggaacaactagaaatggaagcacctggcaacattaagcaaattattaacataattcaacatattaggtcaaagaaaaaaatacagtatcttttcttttttagaataattgtataatattctaaatatctattatcctattatttgttaatgaacattgcttttcaatttgagtcaacaataaattgaactaccgtaa

SEQ ID NO: 857818 - DNA, 296 bp, Homo sapiens
tatctcttgggcttctagacaacctgcagatggccacttttaggttcagtacctctctcatccagtcagctgttggttgagtgtgtggtagggtgtgtatcatatggaatggaaagatcctcggatgctctaraattccgagtgaggtgaagggcattcagcggaccttgggtgctcttactcagggatttcttttaaattggcaagctagtccaggggcagtgccagcactttgggaggccgagttgggaggatcacttgagcccaggcgttcaaaaccagccttggccacatag

SEQ ID NO: 857819 - DNA, 460 bp, Homo sapiens
acacaattcagcttctgttyttttaatgcatattcatgccaacactataattcttcagttgggataaatgttcacacaagaaaacaaaattaatttatccatagctttatctgagtcatgtataacctcatttggccttctctccactgcttagttctgagaactgctccaaagtcatcctgaagatcaagtgtgattgctgcttattggggttagcagttttcctaatagcacagttgcagtcagcccactgcatttgcaatctcttacctccatccctgtggtgccatggggctgaagccagttcctgagatgggtaagctgcccaccatgcattatgcccatcccctagagtccttccttcactgctcacctctgcctggagacctcaaaggcgatagacacagcatttgtacttggagctccatatggtaattcattgccgagtttttaagaagtt

SEQ ID NO: 857820 - DNA, 599 bp, Homo sapiens
ggatgggttatagggggcaatggccaatagaagattagaactgtcgaggttggtagttcatcagggcagagttgaatggatgggaatagtaggtttgaagaaacaggaacagctttaacatgaggtttggattctagcttagacattcaggtagctattaatagggagtatagaaagtcacgtctttggggggctattttgcttttagagaaattgagttgggatccctgtgtgatatccaggaagaattagtaggtaggcagatgaaagtaagggcgtgctgcccaggagagagatttgattgtcttcatcatgtaggtgaatggtatttatttatcctccaacacatctgagtaataaaactcactccttcaactggaagtgactcactgtgtgacttcctctgaaacatggaatcacgggttaaattggaatacagaggaagaccaagtatagtttgaaagtatccgatgggatttgctaccctccttctcactccctagctttgttacaagagtcattgggtccattccacactcaagagatgagagatgagttagagattgtttccacagtcarattgccattcctaagtagca

SEQ ID NO: 857821 - DNA, 634 bp, Homo sapiens
gtgcaactgtatagttatgaaaaatcataaaagatattaatcaagctgttaatgaatactttgtgargtataaatgaaaaagtaatttcaattttttgtcatagaaaattttgttcaagtaaaaaaaaaaatcaatgacctagtgataaccagagtacatattttgaagtaaaatacctattacatagagcaacaaaatgagtaaaatgataaaccaaacctagtataaggattatttctgatcttaagatcccaggtcagctgtattgaaatttcccttggataaaatatatattcacctgtaaaacccaactggaaatttatagaatggttttctgcctaaggttctgaaaatgaaatgggaaatttaattctttacccaatcctgaaaacaataaattcattaactggcagtttccctggttttagtcaagtttatatcaatagattactaagatttagccttaaaaaacatttagtaatttatttttaaaccacaaaccaccacagaaaaatgaaacttcattttcagttaataagaaaaaacgtttttgacatgatctgttattttttactttgccaatttgtaaggctactaaatgattctttaaacttttcaaactctcactctggg

SEQ ID NO: 857822 - DNA, 594 bp, Homo sapiens
ctgtttcaatggtatacattagaaaagctactagtaagaacacctccagtaatgtcatatatttgttaatttggagaaygagtgcctgttagaccaggaatacctcagaagtggtttttcagttttgtatgccaaggggcctgatatatggtaagtgctcagaatcagtactttgaattatgtttgcaaattccctctcttaagaaatgtcagtaggtaacagtaatagtagctaacatttgttggttgtacctaatgcctgacacggcatatgatccttcacacagatgatttcttggaatggatacaaccaccttgggaggcagacatcactgtcctttttacagaggaggaggctgaggcacagagaggttaaatcattttcccaatagacagaagctaggaatcagttcccagtcaatctgactgcttatttcattgttaagtactgtgccattgtgtcccctgtgttgaaaatgttaaaattaaaaatggtattaaaatatttgaatagttgttaaattgcagtgttaagttataatgacatgcaaacattttccaaataatactaaattattcaatatattacccaaa

SEQ ID NO: 857823 - DNA, 598 bp, Homo sapiens
ggctttgttcctgcagccaggggcttgcttctgtacctcttctctggccagcagctcctactggtccccaggagagcrtgagggtgctcccttatgtgtgtttttttggcagagggccttgatttgccagagtgctgtcatgtgcatgatctcaccattcttacacctcagcataggctcgggatggggtgcgtatcgtcggcatctgacagctcagaagcttgagactgggagaggccctgagatgtggccacagtgggagagcagagactctggtatcctgatggctatttttgggctcagttcctgctttcccctccaggagccctaggcagtgtctgaggacagtgtgaggacgggccatgctcagggagacacgagggtccttggaagggagaggtcctccctccccacccccaatcctgtggccttctcttgggataaggggctcaagggtgacctcatcttcttcccgcagacacccaagtagagtcagctgaggtggtgcctgtccttcctctatcacaggtgccctttcaaatgtcaaaggcaggcatgccatgggctcctctgcagaggtctctagctgagcatcaag

SEQ ID NO: 857824 - DNA, 574 bp, Homo sapiens
tctctgggaaaggatttctgcttgagagtctgtgtcacggtgtctctgcatcagagcaccaccccaccatgtccccaggtctgctggacactgctcaaggaatcatcctctttctcttacagaccctggttagtaggctttccatacatatttgtaaataagtaaaggtgtgaaatatgagtgcttcttatcttaattcatcactctgacttctcccttttctcaacccccaaatggttccagaattcatctccttcgcctctgcatagccacatctctggctgagatcccagcatagcctgagccaagtacccactgcccccaccccttcttaaccctcacaccccaagggagttgaaactcagggctggtacctcactgctccatgcaaaagtctcctccagcccgcagaaaaatgttgcctggctttgccagccattccagaccctccagatgaggcaccacccccagctgcccctcacacacctgcctcaactycctgaatatgcttctacatctggcctctgccttgcttccgggttccctctacctggaatggccccctccttttctc

SEQ ID NO: 857825 - DNA, 633 bp, Homo sapiens
tgtttctcagacaggctggctgagaatcacagcctttgaatctcggagcccctggcactctgtgggtcayggagcagccctgccaggggaggcatctcacagatggggagtggagaagcccaaattttagcctgccctggctggttcacagggagcaagggccacagtgctatcttcagacttctaaactcagccagtttggcccacccacactggcaatgctgcccgaaaggagacagaggaagaaagtccacgctgatgttctcagatgttctcccgggataactacttccttgtgtgcaatctcagcaaatggacaggtctgtgaggagtctccttgggtctcctgactcctcaggatgctgccatgtgctggatcaccattatcctgcttccgggaaagtctcttaacctccacaggccttacttagtttcctcacctatcaattaaagagggcaattcctgtcaaccttcctccaggctctgggacggccagtgtcttcaggttggggagatgccttaggaaagctctttgcatggaggcctgcaatctttattgcttattatatattatttatttagtcttaatttacaattgcttgatttccagaggatcttagtgccatggggac

SEQ ID NO: 857826 - DNA, 617 bp, Homo sapiens
gcctgggcagggatcctcagctgggggcagtgcagatgaggaaaggggccagaacccaccacaccagctgccccctgcggcagcatccggttccagggctttacactgtgaagggccaaactatgcagtggccttcactttctctaactgccatttactcccctggcccctgtcacacccatgccaagggtagaggaagacttcagacctgctagttaaaggtaacacaccctcttttcagtgtaaactagtcttgtatgggcaaatctcccatctttagaggttttcctcctctcccctctagctgagatggcatttgaggtaggggaaacatacacatcctgtgtgggagagggggccttggattgtcctcaaactgtgtcctctggggccttggtgggccttatggggtgtggttgccactgtctgggtcgtgggagccccagagcccagcccaccaagccccggttggccactgtgcttgcaggtatcctctgggyccccctataccttcctacatccccttcagggagggggcctggggcacaccctggcttccagctttcttcctgtgcatcccacgtagatcacttctggaactctcctgcaccacaggc

SEQ ID NO: 857827 - DNA, 642 bp, Homo sapiens
tcacgaacctaacatatattttaaaataacttacatgcataacacccccacgctcccatttctgagcctcagatctgattatctgcagctctctttctctctctcttttttaataaaaaattgctataaatctttttgtcacagaagatagaagacgcaggttcgctggagaaactgcctcgctgagttgtttcatagggtgtttggtgccctgctccatttttatttttttttaaactcccctgcagcccaaactgaatttcaaaaatatgaggagtaaaggaaagctgtccctggttggctttaaaggaggcaaagcagtcagtagagatgggatgacacacccatcccatctctatcctcggagccccacacatgcaccccagttcagtttggtcagtgggactgcagaagagggaggagagattccccagcataagcccacaggatagctcactaaaaacatgccttctacgggaaaggtctctctgcctcccacatacgtccctatccatctggtttaggctgacggtcctgcgcyatgggcttgctggaatggaaaagagggtgaatgtgctgctggaccttgggggaacctgagcagtgcggccagtgaggacctgcatgataaatcatctacag

SEQ ID NO: 857828 - DNA, 570 bp, Homo sapiens
tctctgggaaaggatttctgcttgagagtctgtgtcacggtgtctctgcatcagagcaccaccccaccatgtccccaggtctgctggacactgctcaaggaatcatcctctttctcttacagaccctggttagtaggctttccatacatatttgtaaataagtaaaggtgtgaaatatgagtgcttcttatcttaattcatcactctgacttctcccttttctcaacccccaaatggttccagaattcatctccttcgcctctgcatagccacatctctggctgagatcccagcatagcctgagccaagtacccactgcccccaccccttcttaaccctcacaccccaagggagttgaaactcagggctggtacctcactgctccatgcaaaagtctcctccagcccgcagaaaaatgttgcctggctttgccagccattccagaccctccagatgaggcaccacccccagctgcccctcacacacctgcctcaactycctgaatatgcttctacatctggcctctgccttgcttccgggttccctctacctggaatggccccctccttt

SEQ ID NO: 857829 - DNA, 635 bp, Homo sapiens
tgtttctcagacaggctggctgagaatcacagcctttgaatctcggagcccctggcactctgtgggtcayggagcagccctgccaggggaggcatctcacagatggggagtggagaagcccaaattttagcctgccctggctggttcacagggagcaagggccacagtgctatcttcagacttctaaactcagccagtttggcccacccacactggcaatgctgcccgaaaggagacagaggaagaaagtccacgctgatgttctcagatgttctcccgggataactacttccttgtgtgcaatctcagcaaatggacaggtctgtgaggagtctccttgggtctcctgactcctcaggatgctgccatgtgctggatcaccattatcctgcttccgggaaagtctcttaacctccacaggccttacttagtttcctcacctatcaattaaagagggcaattcctgtcaaccttcctccaggctctgggacggccagtgtcttcaggttggggagatgccttaggaaagctctttgcatggaggcctgcaatctttattgcttattatatattatttatttagtcttaatttacaattgcttgatttccagaggatcttagtgccatggggacag

SEQ ID NO: 857830 - DNA, 654 bp, Homo sapiens
actctcagacttaggagctgtggctgggactcaacaaagggcagctgtgaaattctgagaagagccaaggggaaaggagccgagaactgggtcttcccaactctrcctccaattctaggaaacgggaagaatcataaagtgaagtgtgatgaggccttcagatttgccagacttgtatggaatctccaggcttcctcctctcacatcctcctgcaccgcgcccccccccggcaccaaccaaagggggaaaaaaaaaaaaaaccttcttgatttttccatgtgtgtagtcagggtagctgagaaacagcagattcttacgttcctggaaagttgggtgcttggtcccttgcagtcctttgaaagatatggttcagggtcttcctaagagaaagacagtagcctcaactcaaagaaggaggcttcctgaaggatgggtaccttgctcataattcctatcatggatatagaattttaataaataatcctgcttactaataagaacaaaggagccacttgtcttccccagcccatcagtctaagagcaggagaccctggcatgggagagaggagggcggtgaggtgggaaagaggaaaggtagacagagctagcatccagtgattcagagctattccaaattccactttctgccttcc

SEQ ID NO: 857831 - DNA, 507 bp, Homo sapiens
aagaatatacagtgaaaactgcctccctccttccctgtccccctaggtcaaccacttttatgagtgtatagcattccattatatagctgtaccarcctcatgctaattcaaacaataattataaaatacagaagttattttgcacttgtgcacatatttctacaggatcaattgtacaagaagattgtagaagcgtaagaatatatgggcttataactgtgatagctcttagagggcagtttatactctcacagctaaatatgagagttcttttccccactctttactagcattgttgtaaggtttttgttatttgacaatcttataggtagaaaataataggtcagttcccttgaaaatgggaatttccatcttcagagccatttgtatatttactttgatgttagctgtttctttcacccttttattgggtttttgttgttttgatttgtaggggagagatgtgtgtgtgcatgcgtgtatgtgtgtgtttgtgtgtgtgtaaga

SEQ ID NO: 857832 - DNA, 635 bp, Homo sapiens
tgcaaggacttggggacagtatgagcttgctgttgtacacagggtatttctagaagcagaaatagactgggaagatgcacaaccaaggggttacaggcatcgccygtgctcacctgtattttgtaatcagaaataaattgcttttaaagaaaaaaataaaataaaaatgggagaagcgggaactagggactttccatttaaccacgatgtatggtgagtgattgattccatttataacacactctagaaatgacagaagttatagatatggaaaacaaattagtggttctcaggggttagagattgtggggagtaggaggatgaacactataaagaggtagcataaaggaggttgtgatgatgggatagtcctctatcttgcttatgatggtttttacacaaatccacaatgctgataaaaggacatctcactcataggtgataaaatggcaacattgtaccagtgtcaaattcccggttttgacatgtgctattgttacataaggtgtagtcattgaggaaactgcaggaagggggcgtgagacccgtccatactatctcaactccctgtgaatctataattatttcaaaattaaaagatattttttaaaaaggaaacaagcattagggacttt

SEQ ID NO: 857833 - DNA, 641 bp, Homo sapiens
cagatattgcaactatatcatggcagccagtgaacaaagttcacattccatgcttcttgtatttggacagagctcaaactacataactgagacctcagagctgagatataccaaagaccatagatttcagtccagattaacatgttctgctcaagcatcctcatgatttaaggattatttttatattacaaaagaccccatttttctttagcaaacataccataagtcatgtttaaagaaaggtacatagagctaggtggatgtttacaagagccctttgagttaaatccaaaattattagcctttctgctgtatgcttataaatgaagcatagcacaacataatagctagattgaccacaattaggtccctgaattaaaggcaagaaataagacattttgacagctctggaacattgcatttcatggggttcagtgcacagctaggtaacacaggtcttcctgtaattgcagtacaatgggaaaattcagtgcttaattgccttcagattttctcatgtgatggatataaaaatcaagtgccrgcattgtctccctgccattaagtgaaacacaactaaaaacattttggagtttaactgtcctaaaccagaataagagtacatgttgggcttctttctc

SEQ ID NO: 857834 - DNA, 507 bp, Homo sapiens
caactataaaaacaattctggtcaaatcacccgtggatgtattataaaaccaagggcctcttctctataattgagtgttgtcaagatcaagtcacatttttccargttcagctgagaatgattttgaataacttttaaaagaccctggtgaagcaccatggaatattctatgagttattcagtctttgggcatgatcatgaatatatttactatctcatttttatgatctcttaaaaagtattttcaaaacatcttgtgggggtctcagaggcaacatttggtgaaaaccatcttccaaactacatttctgtggatttgtgtacagttactctgaaaggaagtgacccttagccattaaaaggagagatttacctgagcaatgccaagtagtatgttggcaccttattttcttttttttcttttttttttttttttttacaattcttcttgtttatttcttcacagttggggcaaaaaaaaaccctcaaaatttaatgcactcaatt

SEQ ID NO: 857835 - DNA, 578 bp, Homo sapiens
ttaatacctgagtgatgaaataatctgtacaacaaacccccatgaaacatgtttacctatgtaacaaatctacacmtcatgcccatatacccctaaacttaaaataagagttaaaaaaaaacaagtatttctgcctcttctattcttttgaagcatttgtgtagaatttgtgtggaattacgtagaattttaaggtgttaagcttgtggtaacctgttacacagcaataaaaaaactaatatattttgtatgctttcaatttattgtaattttgaaaattaagattcagtacattgtcaactttaatgtttcatgtgcattgaaaatcatgtgagtgtagtaatcgttgcatagattgttctataaatatcaattgtatgaagttggatgatagtgttgttcaagtcttctatattcttcctgatatttttatctatttgtcctattaatcattgataaaagagttttgaagttgccaactacctagtgataaatttttctcgttctgtatcagtctggtcaggctgccataacaaaataccatagactaagtgaattaaacaacagagacatatttt

SEQ ID NO: 857836 - DNA, 635 bp, Homo sapiens
attgatttgtatttttaaataagtgatcaaacygaaaggattttatatctaattttcagtccaagggaaacttgctataaacagaacaccttgttaaatgagtattttatataacaaattgtttaatcaggagaggattcgaaatattaaatccttatacatacctagtgctctatagtctctaaaggtcattcacatgtagtatttctctaaaccttttatagccttgtaatgcagatattaattttatttacaggtgaaaataaaactcaaaaattgtgatctcatgcatacacaattcacacatttttcccttagaacaccttaagccctgtctttatccaacaaactcttcctcatgcttcaaaatccagttttactctatcttcctcttaattcatctcctgactcccattgctataaaaagaatgttcatggcaccctaaaattcatatgttgaaaccctaacctgcaatatggtggtattaggaggtagggcccctggaaagtgattaggattagatgagctaaagaggatgaacctttcatgaatgggattagtgcccttatgagagtccttagagagcttgcctctttctactctcctccatgtgaggatacaatgagaagtcagc

SEQ ID NO: 857837 - DNA, 641 bp, Homo sapiens
cagatattgcaactatatcatggcagccagtgaacaaagttcacattccatgcttcttgtatttggacagagctcaaactacataactgagacctcagagctgagatataycaaagaccatagatttcagtccagattaacatgttctgctcaagcatcctcatgatttaaggattatttttatattacaaaagaccccatttttctttagcaaacataccataagtcatgtttaaagaaaggtacatagagctaggtggatgtttacaagagccctttgagttaaatccaaaattattagcctttctgctgtatgcttataaatgaagcatagcacaacataatagctagattgaccacaattaggtccctgaattaaaggcaagaaataagacattttgacagctctggaacattgcatttcatggggttcagtgcacagctaggtaacacaggtcttcctgtaattgcagtacaatgggaaaattcagtgcttaattgccttcagattttctcatgtgatggatataaaaatcaagtgccagcattgtctccctgccattaagtgaaacacaactaaaaacattttggagtttaactgtcctaaaccagaataagagtacatgttgggcttctttctc

SEQ ID NO: 857838 - DNA, 641 bp, Homo sapiens
cagatattgcaactatatcatggcagccagtgaacaaagttcacattccatgcttcttgtatttggacagagctcaaactacataactgagacctcagagctgagatataccaaagaccatagatttsagtccagattaacatgttctgctcaagcatcctcatgatttaaggattatttttatattacaaaagaccccatttttctttagcaaacataccataagtcatgtttaaagaaaggtacatagagctaggtggatgtttacaagagccctttgagttaaatccaaaattattagcctttctgctgtatgcttataaatgaagcatagcacaacataatagctagattgaccacaattaggtccctgaattaaaggcaagaaataagacattttgacagctctggaacattgcatttcatggggttcagtgcacagctaggtaacacaggtcttcctgtaattgcagtacaatgggaaaattcagtgcttaattgccttcagattttctcatgtgatggatataaaaatcaagtgccagcattgtctccctgccattaagtgaaacacaactaaaaacattttggagtttaactgtcctaaaccagaataagagtacatgttgggcttctttctc

SEQ ID NO: 857839 - DNA, 463 bp, Homo sapiens
tgaaccagaagtggatacgatcgagatgtagttagacataaaatgacaggttctggagatggattagcaaaaggtatgaggaaaacagggttatgaagaatgattcccttgtttccaagttgcaaaattaggaagaagacagtgtcatttggggaggttaaaaattaccatttgatatataagattagggagattgtgaattcaagtttaggtgtcaagtgtgaggttgcgtagagtagaccaagaggagatattttgtagggagttaactaaatatgtgaagcgtccaaagaaatcaaggttaattttcattaagtttaattgtggggtcatcggtgtcattcaaggtagttgaaattctgtctcctataagcttatatttataatatgttatttaagatttgtaaaaatrtaaaaagaaccaatatgaagactttattaattaattcattttctaattgag

SEQ ID NO: 857840 - DNA, 582 bp, Homo sapiens
tccaaataaattgcaagcattctatccaaatggtaagcagaacatcttattatgtaatcatatttgtttatccataattamtataactttctgagtattgaaatgagaaacttgatttactcttcttcactcatgttttaatttttttataagaaaaactagaatcactaaagaatttctttttattttatttaaaaattataatcctgagatgcaaatatatgccatgtaagcctgggaactatttaatcactttactctaaaatctggtaaaaggtaaaatttctgaaaataggtgactggcaaacattttgtaaacaatatataagaagaattgtatatcaaaatatacacataaaactatcttttcagataattatgtatcatttattttcttatagcgaaattataaaaatacaacctatagccttccatagatacataattaactatgttttgaaatgatatccaattcagtaccctcatacatttgaaactttgataagctggtctatcttcactttggggatcttcttcattaagagtttgttttctcaagttttgaggtaggatacatgaagt

SEQ ID NO: 857841 - DNA, 601 bp, Homo sapiens
tgctggaaatttgtaattttcttaacatattctttctgttctgagtaaaagtaaataaaggtaattaaaatacagtattttttwaaaaacttttgaaaaggttcatcttttaaattcttcaatgatatgtaaaagtttctacctatgaatttattttttgttactgataaatttgtattaaataattgatgcctaaaatatatatttagtagaataaagaaattagctataaaacaaaattagaagagccacaaactagacagggcactgtggctcatgtgtgtaattccagcactttgagaagccgaggcaggtggatcacctgaggtcaggagttcgaggccagcctggccaacatggcgaaaccctttttctactgaaaatacaaaaattacccaggcatggtggcaggcatctgtaattccagctacttgggaggctgaggcaggagaatcactagaacccgagaggtggaggttgcagtgagctgagattgtgccactgcactccaacctggtgacagagggagactctgcctaaaataaaataaaaataattaaaaaaaaaaaaagagccacaaactaaagtctggttgggttgg

SEQ ID NO: 857842 - DNA, 601 bp, Homo sapiens
tgctggaaatttgtaattttcttaacatattctttctgttctgagtaaaagtaaataaaggtaattaaaatacagtatttttttaaaaacttttgaaaaggttcakcttttaaattcttcaatgatatgtaaaagtttctacctatgaatttattttttgttactgataaatttgtattaaataattgatgcctaaaatatatatttagtagaataaagaaattagctataaaacaaaattagaagagccacaaactagacagggcactgtggctcatgtgtgtaattccagcactttgagaagccgaggcaggtggatcacctgaggtcaggagttcgaggccagcctggccaacatggcgaaaccctttttctactgaaaatacaaaaattacccaggcatggtggcaggcatctgtaattccagctacttgggaggctgaggcaggagaatcactagaacccgagaggtggaggttgcagtgagctgagattgtgccactgcactccaacctggtgacagagggagactctgcctaaaataaaataaaaataattaaaaaaaaaaaaagagccacaaactaaagtctggttgggttgg

SEQ ID NO: 857843 - DNA, 620 bp, Homo sapiens; identical to SEQ ID NO: 844864

SEQ ID NO: 857844 - DNA, 533 bp, Homo sapiens
taataagagttttgatcaaaacattttgtagatgaaaaaagtttgataactgttcatattacattttcttataagatttttgcaatatgcattaaaacttcygagaaatactgcagtaaataatgtagtttgactttattattattaaactttctcaaacacaaaatcacttcctttttggaaatcttacagtaatatagtgcaggtattgttcttctatagactaatagaagcattcagctagacaaattaaaaatggtttctagtattattttacctttggcttttagtgatgttgtatctgtctcaatgtttattaaaaatagaccattaacattcatgcaagctatttaattcctttgaatttgttgaaaatgcagaatattaggtctcggcccagatttatgatttaaaatttgcatattaacaagatcccaggtgatttgtaatcatattagagtttgaagcattaatttagatcagttgttctcaactgatctaaattagttagttagttctctagactaactaag

SEQ ID NO: 857845 - DNA, 666 bp, Homo sapiens
acttgccactgaaattctgcaagaaaagaacatcagaagtgaggaaaagacaaataaaaatatcttcaggatttggcattataaactatatacagcctcacatttttaaattttgccatggacttcctgttaccattccattgaaaatacactaatgtgaaaagttcctgaagattccatgttgctttctaactatttgataatcacaaagatggcatctctttttttcctcccattcctcatattcctcttcctctcaattccacggaagggaaaagtagcaaaaggtgtttgagccataagttagtggagtcccaggtgtcacaataaatgttgtgcattattttctcacacatcacttgagtgaaaactttgtgtatcgaatttaggaaactattgattgcctttcctcctggagaataattatagacaaagttttatttaaaaaatccaatagttactgagggaaacgtagggaaagaggaatagaccagtccagttaaaacaaaacaaaataaaacaaacaaacaaaaaacactagagcaayaatgggatgacatctgttgaaaagaaattcagtaccgggccagaagtgagcgggctggctggccaaacattatgcattgtgtaatatattggatccattgtgacactatgcattttcag

SEQ ID NO: 857846 - DNA, 668 bp, Homo sapiens
tcatattataacattaaagggatttataaagattgaatattatawtcttacttgaaccgatattttactgcttttttcttattttaattagcatgtcagtaactgtagaatggtatcagataacctttagtcttgtttatttccaacaaaacttttctaattcttgaaagattaacataatcttgcactaatttgcattctagtacgatgcttttcaaccttgactgcacattagagtcacctggggagagttaaaaaattccaatgccaagggcaccacagaccaattaaatataaatatttgatggtaggacctaggccacagtatgttttaaagctccccaggtaactccaatgtgccgccaagcttgagaaacactgctcctgggaaagaaataattatctagtttttgttcatttttttccaattagaatttatttcagcatgctttcctggaagtatccgttttgttaaatttggcattgaaaaccaaaaactaaaataacaattctttgtttttagatttgatgtgaaaagaataaattctcagtaagagaaatcatattgtgtgtagagtttcagtctacattttggagtgttggggagagaagttcatagctttcttcagattctcagtgtgatgtttctgtggtaggtagggaattga

SEQ ID NO: 857847 - DNA, 670 bp, Homo sapiens
ttgatttcactgttgtaattttccagtgtcatttatcatccttacttcatttttttttaaatccattatggtttctttcttttcttttttttatttttaagtgtatacctcygtttcattttcttccttttattttaagccatttcctccttcttgtcctgtatgatagggaacatggctttgtgaattttatttaaaatccctgttttcacctgttttaatagtagtatatttacttattgctctccttttaaaaatgttcttatcccattttctctgtagtatttgtgtataggctccacctttatatttgtttttttattggctcaacactctggattagcttagatctatccaatgtcatgtttacaaccagataactcctgttgttttcttactattcacttcttgctggttaaatcccattcatgctgattaaatccacttcatgttgctccagctgggtgacacgttggtgtgtggacctcccagcagctagagaccaggacacatctatgcaatctgactttgctctcaatagtaagtaggtctcttatgtcccaaaccttgttatatcacaaggatgaaaagctactattcctagtacagtaagttcatttcttcaccatcttcctctctctcctactgtataactcattttaactaattt

SEQ ID NO: 857848 - DNA, 586 bp, Homo sapiens
atttaatattctcttttttttgccattaatatagaggcccctaaatttgacttcatttttttatttatttgtttattttaaattcataaaattctatgtattcattatgtacatggtgttttgaagaataaatacattgtggaatggttaaatatagttaattaaaatacacattacctcatatagttattttgcaacaaaagcattcaacatctactctgcatttttcaggaatataatattttgttattaactgtggtcaccatgctgcacaataaatctcttgaactcattccttctatctaactgtaattttctatcctttgaccaacatctccttaacaccttcccctcccaactgcccagcctctggtaaccatggttctactctctgcttctatgagatcaacttttttagattccacatgtgagtgaaatcctacagtctttgtctttgtgtgcctggcttattatacttaacataatgtccttcaggttcattcatgctgttgccaatgatgggatttccttctttattrtgtctgaatagtattccaatttatagatctctatctatctatcatct

SEQ ID NO: 857849 - DNA, 686 bp, Homo sapiens
ggcagctggtttctcccgtatatggatccccaactactcrctcctagcaaaacctttatatgaggcgatgaaagggcagggaaaggagcccctcctttggggaaaagaacaggatatggctttcaaggaaatcaagaaagctttaattcaggcaccagcactagggctgccagacatgacaaaggccttttacctgtatgttcatgaaagaaaagaaatggctacagtagtcttagtgcaaatgctagggtcatggtattggcctgtagcatatttgtccaagcaactagactttgtggctaagggatggccaccctgtttcaaggaactggccgccactgccttgttagccgaggatgctaacaagctcacatttggacagaagctgataattcaggtgccccacacagttgtcaccctgacggaacagagaggacatcattggctctctaaccctaagatgctaagatatcaagggctcctatgtgagaatacatacatcaccttagagactgtgaataccctaaatccagccacactgttaccaatagaatatgtggaacatgggaagcccccgttatgtgccccagggtaccactgctgtgtagaaacagtggatgaagtcttttcaagccagaaagacttaaaggatcaacccttaaaagacccagatgttgaatatttta

SEQ ID NO: 857850 - DNA, 624 bp, Homo sapiens
ttcttagatttagaatgcctctacctttaggctcggacaacagaccagcttttgtagcagaagtagtacagcaactgactcagatsttatagattaaatgaaaactgcatacagcctatcaaccacaaagttctggaaaggttgagagaatgaacaagacaccgaaacaactgttgaagaagttttgccaagagactcatttaagatgggatcaggtattacccatggtccttctctgagtcaggtgtacccctactacattaaacgggtattcaccctatgagatagtgtacagccgaccaactgcacttatatctcaggtaaaaggaaatttaaaggaaattggagaactgaccctaagaagacaaatgcaggcattaggtgaggtaatacaagaagtacaagggtgggtaagagaaacaatacctgttagccttacagatgcaatacatccctttaaacctgctgactctgtgtgggttaaacgctggaatcctaccaccctcgggcccttatgggatggcccccatattgtaatcatgtctacccctaccactgttaaagttgcaagtattacaccttggatccatcacagccgacaaacctgcagcctcagttcaagac

SEQ ID NO: 857851 - DNA, 468 bp, Homo sapiens
ctttgatcaagaaagagcaaacctaggtgtttcattggtcattattaaaaagactcaatgagctaaagttcaagtcagtccaatgtcacagttcagatttttcagatccttcaataaacattttaaccccaaggatccaaaagttcagattccaccaatgtcagccaagaacctatttactcagctagctgaaagtattgctactaatctttgagtcacctcatgttatgtatatgaaagtaccagtataagtaaccaatggccctgggaggctagaaaactaatgccacaagataacttcaccatactggaatttgttacaaggttcaatgtatatccaagtgtctgtctattaaaaamccctatcattggaagatactgcatagcatgataggaaaagactttcagactcccgtaggagatacaacctgtttagatcagcaatattttgaagagtctaagaacaag

SEQ ID NO: 857852 - DNA, 589 bp, Homo sapiens
aaattattttaaaacatccttattaagtagttgactatttaaagcaaaccaataagattgtattgtggtgcttatatgtaaaaataaaatgtatttcaactataaataaaatttgtgggaggccattgttttggattgagctcctgcaccaagctccaacagaccagaccaaaccagaatggagttactggtgctaggcacccgtacaaattgaacttaaaaacaggccagttttccaaaaagcaaaagattcatgcaaccaatcaaaagggacccaggcaacctgaaccggcatgataaggaagccccctctgccttaacccacactaggaaagtaatctgaagtaacttgatgttaaccaatctgctgcttctactatattgtttccttgttcctgctcaagcgatttcacaaaaatctactgttctgccattcccagtggggcttatgtctatttatatactagatgctgcctggttcatgaatagctaataaaagtcaattagatcttcaaaaatcaatttttgaaattttgttttttgacatcacmataaccaaaattctaggaagggagaaattaaagtacac

SEQ ID NO: 857853 - DNA, 568 bp, Homo sapiens
ctctattgaccttggatagctttatgactatattccttggggatgattgtcttgtatagtatcttacaggagttctctgcacttcttgtatctgcatatagacctgtccagcaagattggggaaattttcctgaattaaaccctcatatatgttttccaggttgcttgtgtttcttctcttaggaatgtcagtaagtcataggtttggtcactttacataatatcatagatcttgaaggctttttcatttttattttttattttttgtctgactggattacttgagaacccttgtcttcaagctctgaaattctttcttctgcttggtctacattatggttaaagtatacaactgtatttggaaatttctgtagtaaatttttctattccagaagttctgtgtggttctttcctaatatatagctatgttgtctttcatgctctgaatctttcttctgtcttctctgtatttgatttcaactttytctggcagattgttgagtttccttgccatccatattctgagttctatatctgtcatctcagccatttcaatctggttaggatc

SEQ ID NO: 857854 - DNA, 602 bp, Homo sapiens
agcaggaagacaggggactcttctgatggggcaattttcacccaagaaccccgtgggcctaatacctcctctttttttctctccacgagggagacttaaagtagacttagattgcagactgacagctstcccagcctcccccacctccctttctttttgcttcacagtctcctaataaatctcctgcacatctaatccagtccaggagtttcagaagacctggactaagggagagaaagtagttcaagaatgacaacaaggtctaggaaattggaatgatggagatgacatttcctgaatgtatgcctgcgtgaataacacttccatagcctcataggtatcctggcactggtttgctggatgatttgaatttgtattacctatatggctttggagaaagcccttgacaacgttcaggacaaagtgtgcctggagatcccagggcagtcccttgctctggactttgcggactccgctccgccagcagagggcagcagaggtagccaaggctgcagaaccaggatccctccctgagaacgctgaaagatgatgagtgcctctgagtttaagttgttgagatttcaggtgattttagcctcatg

SEQ ID NO: 857855 - DNA, 615 bp, Homo sapiens
gaacaggagaagccgggctcctcctcactgcaaaccaacaggaaattcctcaaggcttcacccgagtgcgcactcctcccagtgcgcaggccagtcggaagtcctgccggggaaccctttttacttggctgtctcagtaggctggcaaccggcactctgtcagggtcagctgggaaatcttccaactgtagtgttttttggcaatgcttttcaggtgatagtttctgcgtaattaccgggaaaaaaaacctatggcaattaataacaccgggatgtgttacagatccctcatcctcctagctatgaaattttttgggtttatctcattttagctacagggagtccatctcgtcttctgttggggtatattttaacttagctaataagtgttgctttttattaaaactcaactactgggaaactgtgacctcaggacactgtggccagaacacttgtgaatgagagaatgacaagtgggaggtccaacctgttcaaggaagagttctcaaagtgggcactgcaacaaaaaccaagtccattccttaaaggtgayttccttgttccacaggcatctctaattgtaatagatttaaatgttaagtctccaccccaagg

SEQ ID NO: 857856 - DNA, 614 bp, Homo sapiens
ccttggggtggagacttaacatttaaatctattacaattagagatgcctgtggaacaaggaartcacctttaaggaatggacttggtttttgttgcagtgcccactttgagaactcttccttgaacaggttggacctcccacttgtcattctctcattcacaagtgttctggccacagtgtcctgaggtcacagtttcccagtagttgagttttaataaaaagcaacacttattagctaagttaaaatataccccaacagaagacgagatggactccctgtagctaaaatgagataaacccaaaaaatttcatagctaggaggatgagggatctgtaacacatcccggtgttattaattgccataggttttttttcccggtaattacgcagaaactatcacctgaaaagcattgccaaaaaacactacagttggaagatttcccagctgaccctgacagagtgccggttgccagcctactgagacagccaagtaaaaagggttccccggcaggacttccgactggcctgcgcactgggaggagtgcgcactcgggtgaagccttgaggaatttcctgttggtttgcagtgaggaggagcctggcttctcctgtt

SEQ ID NO: 857857 - DNA, 620 bp, Homo sapiens
agtctctataaaacagacttcaaccaacaaaaattaaaaaggacaaagaaggacattacataatggtaaagggatcaatgcaacaagaagagttaattgtcctaaatatatgtgcmcccaatgcaggagcacccacatacaaaaagcaagttcttggagacctgcaaagaggcttacactcccacacaataatattgcgagactttaacaccccgctgtatatgttagacagatcaacgtgacagaaaattaacaaggatattcaggacttgaactcagctctggaccaagcagacctaatggacatctacagaactttccaccccaaatcaacagaatatacactcttctcagcaccacatcacacttattctaaaattgaccacataattggaagtaaaacacttcttagcaaatgaaaaaggatggaaatcataacaaacagtctctcagaccacagtgcaatcaaattagaactcaggattaagaaactcactcaaaaccacacaactacatggaaactgaacaaccggcccctgaatgactactgggtaaataatgaaattaaggcaaaaataaataagttctttgaaaccaatgagaataaagacacacggtac

SEQ ID NO: 857858 - DNA, 438 bp, Homo sapiens
atctcactctgtcacccaggctggagtgtagtggcacaaycatagttcactcccggcttgagctcctaggctcaagtgatcctgttgcctcagcctcttaagtagctgggactacaggtgtgcaccgccacacctggctatttttttttttttagtttttattttttgtagagatagggtctcagtatgttgcccaggctggtcttgaactcttcgtctcaagtgattctcccgccttggcctcccaaagttggggttataggtgtgagccaccgcgcctggcctgtttaaattttccgataagaaagtatgcatgtaagaaagattttgacaatttgttatgaaagtgaggtatcttgaatggaaacttctagagggctggatgtttcccgtatacccaagtcctgggcacgtcaatatacatgctctgacccaatc

SEQ ID NO: 857859 - DNA, 573 bp, Homo sapiens
tcttagaaagtgagaggaagatgagttgatatgttttcccctcaactaagcagcctatgttttctttttgatatgaattaggatctggaataatatgacagtaattataataygcagaagagattatgccagtcaaatgaagattcattttccccttctttctttattctttttgttgttgttgttattgctgccccattggagaagaggagaaaaatctcaacagagaggctttgacaggtacagtataacttatcaggctttaaaggaactagctgaggttagccttagttcagatatgtcagagctgtcagaggccagccccgaaatctgtaagacattacagactgaaaactcagcgaggacggctgaagggctcagcgggaattccaacacacacatgagcctggagtatctccatgcctcgacctgaccctggataatacttggagtttgcttcttgttgttgttgttgttgcaggattactaagttcttcgggttttggttctttggctcctgaaattggtccatcacacttgggggacaattcatcattgcgtagggggagtgag

SEQ ID NO: 857860 - DNA, 624 bp, Homo sapiens
tgtaaaacataatttgtttccattggaaactcaataatrattttttaaaaagtagggcagtggttagaatcataagctgcttgtagtttagataatttacagcatccaggaattggttgctggattggatagatctcagagaagaaataaagaacagtagtagtgggaatgagggcttgagaagaactgaaagaatagattttgttcagctagataattattagaaattaaggtttttgaagtgcagctgttttggaactgttgggatctagagtatgtccttgtaagtgggaggcaggattggaggatgagggaagaattgggggggtgttaatctgtaaggagaggtgatttatacctgctgacgttttttgtctgaaatgggagacaagttcatctgttgagagtggtgggtagagaaagagtaattgagaagagtgataaggacttggggacctgcagaagggtgttccaatcatgttagaagcccgtttcaggttgaacactacagatttttagtgcccgcccgatacaggagtagaaggtagatggtagatggttggattgaacttgggttaggaattcttttttttttttttttttttttaggggggggggtttgcc

SEQ ID NO: 857861 - DNA, 615 bp, Homo sapiens
ttttagtgaattttataagcaattttctttttatttttaatttttgtgagtacatakcagatgtgtatataagcaattttcaatccttcttttcaaaatatttaatgtaactcctctccaccccagtgatagttgactatttcacaatttataaggcagatgaattaaaggccatatattttataactcttcctaggttatgttgtgtttttgccattcattcaagctatcttttaagtgggcagttttgattctagtcattgtgctttggctttggcattgataccttgctggcaccagtattacgttcggtgtcagccaagaagttgtagttggagtgacaatttgaatcattctcactgtgttgtaagggtttttgttgccatacctttctttggatgtttgtttgtttttaagtatgctagacagtttgaagatgagatctataattgtaaagtattaatgtcttatttctcctataagctcgacatgttagctttattatagagaaatcaattgtagcaatacagcacagcaatttgttgattggttatgagctatgtaaaaataatttgcttcaaatgttgaagtaccaagtattttttgtgtttgaaa

SEQ ID NO: 857862 - DNA, 675 bp, Homo sapiens
catattccttgtaatacacaaatgtactttctgtgactgagrtgtaattaataggaggaagaagatcttgaatgaagtgataagatatatatttatatatgtctccttttgcccacagtcttttagagaatgatgttcattttgaaatggaggagtggtcaggagttgagaatgtgtgaacatctgggtctttaaactactcttgtcttcagtaatcttcattaattgctgaaatgtttgtctctattaaataatattaaattatctatagttttattgcaatcattaagaaaattatacggatgttagagtaattgtcactttttttctttacttcagtttatccccactgaaggagaatattgtgtgtatattttttataagggacaaagaagacagtgaggagagtcatagtatttattgttagcagagttcttcattttacagctgtgaaaacaaatatggagaggtgaaatatttcatgagtaaaagtagtgatgcttagcattttctttcttttttgaagactaaaaacctttgattcagggtcagaagaactagataactgttttaagcctctccacaagatattctacagttatcatctttttcaccttacctgctaacattcaggtaaatagcggtaaaattaaaggccaatactatggaagatag

SEQ ID NO: 857863 - DNA, 496 bp, Homo sapiens
atgatcgttaactatattttgaagtcttgcatcataatgaatagatgcttttttccttttagaccatggctctcattggagaatatgttcacattcattttctacacgatgttgttctttttgaaattctcytgtgatttgacatacaacaacatgaacattccatattaaaatttcccatcttctgtgccatgcctcgatgttgttttgggtgtgtggaaatccattcctcacgcactcatatacataccacacatttggcagaaacaatactggtgtttgaagggaacgccattatgtaagtgccttcttatcttaccatgcacttaattatttttcaaccattcattaactttgctggcttctccaggcaaatgcagctttaattcattaaaagtttttgtaatgtcatcagctggaagaaatgccaatgcaggcaaatggcaaatttttaaactgaagtttctgttgttgctgtatgtcatggccaagccac

SEQ ID NO: 857864 - DNA, 580 bp, Homo sapiens
ggcagctatctgaactaagacttaggtcttagcccaagtcccactagttccaaaatccatgtatttagttactatcttccatgacttttcctgcaatcacccctcccctgccagctatgtattcttcctataggggaggcttgccttgtttgaggacaactgttaccacctccaattaaacacaggacatgcctctacaaaatgaaccctttttttaaaaagggtttttttttttttctttttgagatggattcttgctctgtcgcctaggctggagtgcaatggcacaatctcggctcattgcaacctccacctcctgggttcaagcgattctcctgcctcagcctcccaactagctgggattacaggcacgcactgccatgcccggctaatttttgtatttttagtggagacagggtttcactatgttggccaggctggtctcaaactcctgacctcagatgatccgcccgcctcggcctcccaragtgctgggattagagacgtgagccactgcgcccggcctaaaaagggtttttaaagtgggtatttgctttttttttttaaataatggacccct

SEQ ID NO: 857865 - DNA, 607 bp, Homo sapiens
attaaaagaagtgacctatcaagggatcctgaatagccaaaataatcttgaaaaagaacaaaagtttgaggtctcacacttcctgattttaaaacttactgcaaagttacagtaatcaaacagtgtggtagtggcataaagacagtcatatagaccagtggaatagaacagagagcccagaaataaactatcatatatatagtcaaataattttcaacaggggtgccaaaactgttcaataaggaagggacagtcttttcaacaaatagtgctgggaaaactgaatatccactgcaaaagagtgaagttggaccttgatttatatcatctgcaaaatttcactcaaaatggaccaaagacctaaatgtaacaacaaaaactataacattcttagaagaaaacatgggagaaaaatcttcatgacattgaccttggcaattttttagatatgacacctaaagcatagacaacaaaagaaaaaatagattaattggtttcataaaaattaaaamttttgggcatcagtggacactatcaacagagtaaaaagacaactcatcgaatgggagaaaaatatttgtaaatcatatatctgaaaaggggttaa

SEQ ID NO: 857866 - DNA, 179 bp, Homo sapiens
gaagaggatgtaaattagtacagccaatatggaaactcrattggagattcctcagagaactaaaaatagaactataatttgacccagcaatcctattattgggtacatgcccaaaggaaaataaatcctaccaaaaagacatgtgcactcatatgttcatcgcagcactattcacaata

SEQ ID NO: 857867 - DNA, 597 bp, Homo sapiens
tggttttataaggcagttttccctgcttttgtttgctgtctctctcctgttgccatgtaagatgtgtctgcttccccttctgccatgattgtaagtttcttgaggcctccctgccagacatgcagaactgtgagtcaattaaacctctttcctttataaataacccagtctcgggtagtatctttatagtagtgtgtaaatgaacgaatacaactttaaaaataactacattgagaagaaactctggagtcctaggatcaaattctgttatttttgcaaaaccaagcaaacaaattgacttaattttattggagaataagaaaaaaaagtttggttaatcaggattgtatttatactgacacatttaaaagatttaaagataaatgttatgtacttccatgtcctagaacctataatgtgatttgtttatggttcttctttgccttattgatatgtgtattgagacccagrttttaaaatttaaaaatgttttgttatgaaagagtcttaatctaaatgtctttaaatggtttggggcctataagggtgactgagtacttctatttgctcttccaaagaaacacaacttggaaatta

SEQ ID NO: 857868 - DNA, 597 bp, Homo sapiens
tggttttataaggcagttttccctgcttttgtttgctgtctctctcctgttgccatgtaagatgtgtctgcttccccttctgccatgattgtaagtttcttgaggcctccctgccagacatgcagaactgtgagtcaattaaacctctttcctttataaataacccagtctcgggtagtatctttatagtagtgtgtaaatgaacgaatacaactttaaaaataactacattgagaagaaactctggagtcctaggatcaaattctgttatttttgcaaaaccaagcaaacaaattgacttaattttattggagaataagaaaaaaaagtttggttaatcaggattgtatttatactgacacatttaaaagatttaaagataaatgttatgtacttccatgtcctagaacctataatgtgatttgtttatggttcttctttgccttattgatatgtgtattgagacccagattttaaaatttaaaaatgttttgttatgaaakagtcttaatctaaatgtctttaaatggtttggggcctataagggtgactgagtacttctatttgctcttccaaagaaacacaacttggaaatta

SEQ ID NO: 857869 - DNA, 580 bp, Homo sapiens; identical to SEQ ID NO: 823716

SEQ ID NO: 857870 - DNA, 479 bp, Homo sapiens
gaatagctcctcctttccaataattgctcatagtatctcccacccactaggttaatcaattatgtcgcagtmactctgaggctaggtttggaagactctaatgctgtaccaggtcccaacgccagagaaatgtttgagccccttaactccattatattctgaaaccctgggacagttatatcatttatacttttgtatctccaacaactggcacagtgaatggcatggcacatgggaggaacccaactgatagttttgaaaggaatgaacaaaaccatgaattagtttatttcaaatgaatgaatgcagaacactactgctctgtaacctgggccatctgctgaactatgcaaaccaaaattctgagagctttggtaatttccacgtttacagaaacaaaaccaatgtcggggaaataatttgaaaactcctgattcctcctgccactctttctaaacactgccactgccttaggtaaa

SEQ ID NO: 857871 - DNA, 520 bp, Homo sapiens
ggttttccccattcagtgtgatgctagctgtgggtttgttatatayagcgtttatcttattgagatatttttcattttgaggacaaatacatacttgttgagggtttttaccatgaagggatgttgaatgttatcagattttttttaagaatcttttgaaataattgtatggtttgcatccttcattctgttggtatgatgtatcacacttattgatttgcatatgttgaaccactgttgcatttctggaatgaatccctctcaatgatgatgaatgtactttttaatgtgttgtgaattctgtttgctagtattttgttgagtattttttttatcatgttcatcagaggtattggcctgtcattttcctcttctgctgtcttttcatctggttttggtattaggataatactagcctcatagaatgagttaggaagtactccctcctcctcacattttagaaataatttcagtaggattgacattatttatttttaaattgtttggtagaacccaacag

SEQ ID NO: 857872 - DNA, 616 bp, Homo sapiens
agtcctgatggtcggtttcctgagaaaggaactcagataagacaaatgtaactttctcaagttttaagactgagagggtcaatttctatgtttattcaaaagaaatgataaacatcagttttatgggacaattggtcaggtttcaaaactaccacaaactcagtggctgaaaataatgcctgcctttttctcacagttctgtaggtcagaagccagcactgcctggcggattctctgctcatggtctcaggaggctgaaatcgaggtgtcagtcagctacattctcatctgcagcttggaatcctcttccaaactcattcagtatttggcagcattcaatttcttcttggccatcagccaggagtccctgtctcctcctagaggtttcccagcttcttcagcagatcacaacatagatgcgtcctttcctggttggtatctgtgggggattggtcctgggttcctgggacctgtgcagatagcaaaatcagcaggttctcctgacctgcagtcrgccctgcagaacccgtgggtaggaagaggcagcatccactctccagatctgcgggttctgcattccacaaatactgtatttttggtaagtagttggtttaat

SEQ ID NO: 857873 - DNA, 618 bp, Homo sapiens
gaattctcactaatctcaggtgaaggawgccatttgctattgataaagctagttaatctccagagtacaacctgggctttatgtatttttagatgagaatcacaaaaattgatctgcacttgcttctcatacaagcttcacgtgccggctgcaataaaatctatgactgtgattcaaagtatacttccagtctgcatgaagaaagagactccaatgctgctaaaaatgaattatcttctttcttcaattttgaaaatgccttagaaaaattaactaattaacagatgcatctgatgagaatcctgtagactatcactcagagatcttctattgtatatgatgtaatacattaccactacaatagaaaattatcttagctcttaacaattcttagaagctatgtagaaactgagactgattccatgtagcattaagaaaaaagattcccaagtagcaaactccttcatcctttacttaggccaaggaaattatgacctaaaaacaaaatcaaacaaaacaaacaaaaaagaaccacaagttaaaaaaagaagaaacctaacccacaggcgtttacttgcagctgagattgatcttaaggttagcaggtataaaacgtag

SEQ ID NO: 857874 - DNA, 481 bp, Homo sapiens
cggaactgtgagtcaattaaacctgtttcctttataaattacccagtctcaagtatttctttatagcagtgtgaaaatggactaatacaagtctctttgagctgcaacccctccccsaggcctgtggtccacatatcagcagacaagagcaagaagccatggcatttgggctagcctcttagtaagccacaaggagtggtcaaggcccaattgttttatggtatagggttcttgatgctctttgttttcagctttgggtcttagttatctactctgggatagtcaaaaaaggtagaggtgcagcccaagtatccaagatcactgcccccagaggaagccggatgcttgaggaccaactcactcctcacagcacagggatggcctggctcaccctttgattgggttcacttctccctgcccctactgagggaagaatggtcctgatttcccaccctccccagatgagcaggcctggacaggt

SEQ ID NO: 857875 - DNA, 411 bp, Homo sapiens
aataagagggacgggcgtagaggctcacatctctaatactagcactacaggtgtagaagctcacatctatactttgggaggccaagtcaggaagatcacttgagccctggagttagagaccagcctgggcaacataacgagactccgtctatataaaaaaaaaaattaaaaattagctgggagtggtagcacactacagagcaagaccctgtctcgaaaaaaagaaagaaggaagaatgggagggaagacccaagacttatgagagaatgctcaattctaaataatctggaaaatgaataacttaatctgatccaaggtrggaaaaaacagttcaacaaaccaattatcaaagaaaattttgagaaaattattaaaagaaaaatactcccaaaaaaggaccacaatcagaa

SEQ ID NO: 857876 - DNA, 526 bp, Homo sapiens
tggcctgggtttgccatttctgtgtcatattttgaaaggaagctcctgtttagtgctgatgtgagttacaaagtcctccggaatgagacggttctggaattcatgactgctctctgtcaaagaactggcttgtcctgtttcacccagacgtgtgagaagcagctaatagggctcattgtccttacaaggtacaagcctgcgtctaaataaacttttcttcagaaatcaatcattgatggtatttgggaataggaatagtgttggagtattggcccaatatcacagatctaatccatttactcatctgtttagaagacctggttgttttgctgtctggagttcacatgtccttgtgtggcattctggactgtccacaagctccaaattctcgcttgcggtaccctcctttcccctaatgccactctctattctaacccccagcggtctgcactttgcatgcttcagttcagttcaattcagttyacttcagttgcctggattcccttccccaaattctgccttttaa

SEQ ID NO: 857877 - DNA, 636 bp, Homo sapiens
tgcaaggagattccaaaaggtttgtggaaaaatagaattaaaaggtaagaatttaaaaaactacctttatttcttaccaagagttttaccaaggtcaagacacttttataagcaattatatcagccatttagtccatccctagagaactaagggtcctgggaatttaaccacatcagtgcagtcttttttagcttattaacgaaagaaaaatgggtgccctttacattgttttatattttaagattataaaacaaaaaaagtcagaaggagccaaatcagcagtaaagtgtatgcctaatgatttcccattgaaacttttgcaaacttacccttgtttgttgagaagaatgagtagaagcattgttgtggtgctttccagggaagctttcctggccatttttctgctcaagctttggcaaagtttctcaaaacactttcataataagcggatgttaccattctttggccctccagaaagtcaacaagcagaatgcctggagcatctcaagaaactattgccatgacctttgctcttgatgggttggcttttcctttgactggaccacttccacctctcrgtagtgattgctctgattgtgctttgtcttcaggatcgtactggtaaagccaggttt

SEQ ID NO: 857878 - DNA, 590 bp, Homo sapiens
aatacatgtaggaattgagtatttgatgaaggtcaccrtctcacaatgtaggggaaataatggattcagtaaaactgctaggagaaactgttacacatattttaaaaatctaggtgtggggaaggcttctaagtatgacacaagacccagaagtcataaaagattcatacatttgtctttgcaaaaataaatttctgcatgccaaaaactgcctgaagcaaagccagaagtcacagttcaatcaggaagaatatttgcaaccaattgcaaattaaggttgaattccccaataagcagttctttcaagacaataaaattcatgagttagtaataaataaagaatatggacatacttcacagaaaaggaaataacatgacatttaacttttatttttgtttttcgagacagagtcttgctttgtcgcccaggttggagagcagtggcgcgatctcggcttactgcaacctctgcctcccagattcaagcacttgtcctgcctcagtctcccaagtagctgggactacaggcatgtgccaccatgcacggctaatttttgtgtttttagtagagacagggtttcaccatgttg

SEQ ID NO: 857879 - DNA, 619 bp, Homo sapiens
tgggagtagctttcctttgtatatcaaaaacttggaagagagaggaatgtacattggctacccctgcccctccaggggtcacagtctatagccccatgagacctaggaataccagaaataaatgagcaataggattaattctggtaggaattgggtggcaataagactagtggcaccctggcagctttgcttaccacgagtcaaccctaaagaacttaactcaggccgggcgcggtggctcacgcctgtaatctcagcactttgggaggctgaggcgggcggatcacaaggtcaggagatcgagaccatcctggctaacatggtgaaaccctgtctctgttaaaaatacaaaaaaattagccgggcgtggtggtgggcgcctgtagtcccagctacacgggaggctgaggcaggagaatggcgtgaacctgggaggaggagcttgcagtgagccaagattgcgccaccgcactccagcctgggcgacagagcgagaccctgtctcaaaaaaaaaaaaaaaaaagaacttgactcaaactctagaatccccagttaccaacacaggtgaggcattaaagggaartcaagagtccctaggctctttggcaaatgtagttct

SEQ ID NO: 857880 - DNA, 290 bp, Homo sapiens
ggctgggtgcaatggctcacacccataatcccaatgctttgggaggctgaggcaggaggatcacttgagaccaagagctcaagaccagtctgaaaaacgtagtgaaaccccatttctacaaaaaaaawttttttttaattagctgggcatggtagcacacaccggtaggtagtcttagctactctggaggctgaggcaggaggatcacttgagcccaagagttggaggctgcagtgagctatgatcatgccaccacactacagcctgggtgacagagtgagaccctgtct

SEQ ID NO: 857881 - DNA, 572 bp, Homo sapiens
tttttttggtagagacggggttttaccatattgatcaggttggtcttgaacatttgagctcaaatgatccacctgtctcggcctcctaaagtgctgggattaacaggcataagccaccgtgcctggccyttttttttaatttttattttagagacagggtcttgctctgtcacacaggctgggatgcagtggcttgatcatagctcactcactcctgagctcaaatgatccacccgctttagccttctgagtagctggcactgcaacagcacctcaccacccacagctgattttttattttttatagagacagggtcttactatgttgcccatgctggttttaagtaatccttccgtctcggcttcccaaagtgctgggattacaggcatgagccaccgtcccggccttagtcccctttctgaggtggtgatggagttgacagggtggtgacggatggggtggtaatatcatcctttcttatattattcttgccaataaaaattggcttcatagaatcagatataaaagttttgaaggaaaagatcatgccatgggagggactgatagaact

SEQ ID NO: 857882 - DNA, 536 bp, Homo sapiens
tttgatctagattctcaaactctttcaggactgcagcaggaaatttagatttaacctcaagagtcaatgttttgtcttgtgtctcctctaatataatacagatgttaggatggctgtattttacttgaacagttattgaatttctaccttactcccattctctttttaatgagaaacagtcaaactgtagtgcttattaaactcagagaatacaagttgtaatcttgagcatgtacatgtggagaagatatatttaggttatttacttagattacaaacccttaaactgttccactatttcagggagaaactttccctctgagaaaaagacactgaaaaacaaacgaaaatattaaagatgaaaatagtgcttaagaactgaaaaagtggttctctaaaatgtgttttttttttttttaaacgggtatgagtgtcagtttattacctgggcagcckgtaatatgggtaaaatattactttttaacaccccgcaattccaggttacacaaggcctatattttctatctagaaagcta

SEQ ID NO: 857883 - DNA, 598 bp, Homo sapiens
ctgtagcttatctgtttactttgttgatagtttcttctgctgtgcagaagctctttcatttaatttggtcccatcatcaatttttgtttttgttgcatttgactttaagaatttagtcataaattattcctcaaggtcaatgtccagaatggtgtttcctagttttttttctaggattcttacaaagtcttcacttaaatctttaatccatcttgagttaacttttgtatatagtgaaaggtaggagtccagttttattattctgctgcatatggctagctagctatctcagtatcatttattgaataggaagacctttccccattgcttatttttgtcaattttgttgaagatcaggtggctgtgtccctttatttctgagttctctactctgttctgttagcctgtgtgtctgtttttgtacatgtaccatgttcctttggtctgtatatagccttatagtttaaagtcaagtaatgtgatgcctcyggtttttttgttttttttttttttttttgcataggattgctttggctatttgagctcttttttggttccatatggaattttataatttttttctagttctttgaaaaaa

SEQ ID NO: 857884 - DNA, 598 bp, Homo sapiens
ctgtagcttatctgtttactttgttgatagtttcttctgctgtgcagaagctctttcatttaatttggtcccatcatcaatttttgtttttgttgcatttgactttaagaatttagtcataaattattcctcaaggtcaatgtccagaatggtgtttcctagttttttttctaggattcttacaaagtcttcacttaaatctttaatccatcttgagttaacttttgtatatagtgaaaggtaggagtccagttttattattctgctgcatatggctagctagctatctcagtatcatttattgaataggaagacctttccccattgcttatttttgtcaattttgttgaagatcaggtggctgtgtccctttatttctgagttctctactctgttctgttagcctgtgtgtctgtttttgtacatgtaccatgttcctttggtctgtatatagccttatagtttaaagtcaagtaatgtgatgcctccggttttkttgttttttttttttttttttgcataggattgctttggctatttgagctcttttttggttccatatggaattttataatttttttctagttctttgaaaaaa

SEQ ID NO: 857885 - DNA, 474 bp, Homo sapiens
ctgcgggaaaggggaaccttgagtgggctgggcctctcttgccttgctcccttggctgtggagcttgtgagggtcccagtgaacttgaattaggccccatgtggtggkctctgttgcctcacaccaacatcctgttttgtcaggctatcccggtggtgcccaacctcttagcttattttgcttattttacccctgagtctggttatgtttcagtttgggcagaatgcaggtaagacgtgtgtgtgcccagcctggctgtgaatgtggtagtgagtgagagtctcctcaggacagcctggctcagtggcaggtgcaggtggccaagggccagcttctccctgtcccttgtgggcagagtcttcagcattgccaaccctgagcgatgtgggtttatgtcagagggagaggtggtttccttgtcaattccctacaggattgctttaggcagaggtcttcattgctgcagttagagtc

SEQ ID NO: 857886 - DNA, 537 bp, Homo sapiens
agcttgccctttgctgtgattccctgggctgcaatgcttttacttaactggctcagtcccattcatagctgtcccctaaggccccagctgtggtatcagcagggggtctagtgtctctcatacygtttttttttcctccccaggaccactgtgggaggaggtactttctctttgtcagaagaacagaagcaaatggtctgcttatagccttttatgtgacgatgtgccctttctgccactgcaagggaaagagtcatctttgctcctccattttggtttatcctaagaaagaccaacactatgtctagcccagagagagaaacacataaaataaatacaagttaaatcttcaatgggacatcaagttccatgtacaaggctaacctagactataaagtccttgaagtaagtgaatttattatatatctctatcactggacacactgtttgcatgaaatgaagagaagcttaataaaagtgtcttcataatgacaaagacagggatgattatttgtagatacaacatttaaagtataa

SEQ ID NO: 857887 - DNA, 613 bp, Homo sapiens
gatgacggcaaccagcatgcgattttctttgactattagaaagtgaagcctatatccacactgtgtgcattttatgctgttgaaatcccatcagctcatgagaaagtacttatctccattaaygttacctccatttgtctaggtgctgtgtcagaaatgtgatagtgatgactgacacctcctctgtcccacagaatgcttgtcccaatcaacccatcattaaggttttcagaatatccttataaaatatatcttgaatcttctttactcttttgccaccactctagtccaagctccctctcttgcttgtctctctgaactccctgcccctgctataattccatctcctcaagaaccagaatgagtgagtttttagaatctaaatatcatgccattcccctcattgaatgagtctgcccattctcactgcccacagctttctcttgtactttgagggacaccacagttctttacagatctacaggaagctgtgtgatgtgctcaccgcttactcctctgggtctcctcactctgcttttcccctgctcttgactggctacagccatactgtcctttaccagttcctagctaaataactaggcctttgtatatt

SEQ ID NO: 857888 - DNA, 666 bp, Homo sapiens
tttcaaccagtatttactgtctaccatgtgacaacattgattttggtggtgggaagacattggcaagaaaaaaacatgagggtcctgtgcataagaagcttacattcaagcgaggagagatagttaacatagaaccacgaaaacctacaggatgcgatagtcacatagagaattaaaataggacgatgagacagagtgatggaatagatccctgagtctggcctctactttagaaaggcctctctaagaggtgaggttcaggctgagatccaaaaacccagatgaggccaggcacggtggctcatgcctgtaatcccagcactttgggaggccaaggcagacggatcgcctgaggtcaggagttcgagaccagcctggccaaccatggccaacatggtgaaactaaaacactcttctctactaaaaacacaaaaactagccaggcatggtggcacatgcctgtaatctcagctactcgggaggctgaggcaggagaattgcttgaacccaggaggcagaggctgcagtgagctgagatcatgccactatactccagcytgagcaacagagtgagacttcgtctcaaaaagaaaacaaaaacccagatgagcagcatcactggcgaaatcacctggggaaagtatgtttcagagggagtgcaaaggc

SEQ ID NO: 857889 - DNA, 335 bp, Homo sapiens
tgcaataaagaacatttagatgataaaatctacaacatttattatctggacctttacgaagcaaatatttgctaacacttgctttattctatgttcacacaaaattgttaattttgctagatatagaattttaaagggctttttttttatcttctagcttccagagtgaatgtttaatagccttacaacattctgattcctaatcctttatataaaaactgttattttgtttgtttttggaagcttctgaaaccttctccttgttcttggtatgaacacttgtttttytaatgcaataaacacatgatgaacccactcaacataaaatcaaacag

SEQ ID NO: 857890 - DNA, 636 bp, Homo sapiens
gttacacttgggatgcaagttctaatctgccttttgtgaccttggttccattgtctgttcaagattgttgagcattttcattgttattctgattagtcccacgtgtgcacaaaccagtggccagcctgagacctggatggagatctactctgcacctcagttctcaaagcctgaaatttattatttatagtcaaattcctgctacactgctgactttgaagatggagaagggatcacaagccaaggatttaggtggcatctagaagctggcaaatgcaagaaaaaggattctcttctaaagcttttagaaggaaactagccctgttaacaccttgactatcagcttagagaaactggatttggacttctggccttcagaactgcttctggaagtgaagcataccgaagtgtaattttgggaacaagaggctgaagatgaatagaaatgaagaataatagacataagcaggtggaataacaaatatgaaccaatatgccaggttataaaatagacaagtaggtactgaagtcacccagcaaaatgttaggaccttgagtgaagaagagaaccaacarcatatctatatccaaaatcgtgactaaataaggtagactgggagatgctcggctcaaata

SEQ ID NO: 857891 - DNA, 602 bp, Homo sapiens
tattttgttcctttttatggctgagtagtattccctggtgtgtgtgtgtgtttgtgtgtgtgtatgtatataaaccacgttttcttcatccactctatctgactgatgggyatttaggctggttctatatttttgcaattgcaagttgtgctgctataaacatgtgtgtgcaggtatctttttcatataatcacttattttcctctaggtagatattcccctatttctatgcacagtctgtgtccctgtcttggacctccagctctcattgagggcttcagctgctgagaacattttccatgtgtatgtggatatgtatctgtgtatgtctctgcacgcgcatgtgttgttgtgtctttatgtctatgtgagtgtgtatgtgcatacgtatgtgtataggcatgtcctacagcactttgttcatgaccaattggttccagcatgtgccttgaatgactgagcaatgactggatttctctggttcggacattggcacttccaaaagttagataaagtagtttgtgccaagccatctctgtggaaaggatgatctctagaaacagcggaaggagaaaatgtctctatgagattgagtacaacag

SEQ ID NO: 857892 - DNA, 659 bp, Homo sapiens
tggaaggtgtgagaacgtggtgtattctcggaattcaatgcaaatagtttagtataacttgggggtggaatgaagtggggaatgatgctgatgaacatcttaacgagtgcccgccaaggggtttcgaagttttcagcaggcaggtctcagcagccagggatcaggctcccaatttacttctctgcctgagattggctcagcttgatggaactgaacctgtgggcacagggtgtaagtgacttcacctgggagaggctggctaggcctgaggatggtatttggttttatcttagtaactactgagaatagtatagaccaagttatgtttctctatgaagatttccatttaaacaaaataagtgagttgtcttgatttagtgttttggctatttactgtttcaacacattaacttttaactgaatgtctgccaagtttatgtgtgatggcttcatctacttgagagatttgtaaaattaagagaatatttgaaacttagatgctatttgacgatatttcaaaatttctctgaagatttggtaccagttccagtgctttccaacatgaggtttattaaaaaaaactttaaattttgccatgtggtgtttatttgagctttttaatgtasagacagttggactagagttcatgaaatattcca

SEQ ID NO: 857893 - DNA, 571 bp, Homo sapiens
atgacctcggaatcactaatacgaagagggtggaggattctaggggacttcctcagacaaactgacataatgagagcagtttaagttataatcagggtatcacttaaaaatgtaaatagcatgcagaaagctccctccatcattttatatattttgtgagaatgtctcctttaatttcgaggccaaaaatgctaattttaacacaagtcatcaatgcttttatttggactggcaataggatattgttctgaccagtagaagaaggcaaagacagtgtgggggtcgtcagttttcagtaagcagcctttcacttgttctctctagttttatcaaaattcttcagccatggtggaaggtcaaccacatgttcccaactccagaatctttggggattctgggttaatgggaaagaagtagtttcccacacagtggtgtttatggtggagaagggttgaggggatctgggagttcggtgttcctttkaacacctagaactgcttgtgttttcagcaactccaatcctcagtttttctatggctcaggggggctaattggcttacttcttgtttat

SEQ ID NO: 857894 - DNA, 564 bp, Homo sapiens
tttaaaaagtcattggaggattttttgctgtaaatctgtttaagtgtataaaatctgaaagagaatgaagaagtgtgacggggtccttgtatttttttgtgtgttttctcacaattatccaacaytttaacaagcagaggtgtcacgatagcatcttgaaaagtaagatttagttccctatattcttacatatttacacatatccaagcatgccacacaaaaaagaacattcaacccaaactcaccagactattatctgaatgtcactagtcaatgctcttcaatagtcttcagcacaaagagggaaaaataggtggaaacaggacattatgaaagtaaattacataagcaacattagcaacaacataagactcccaacaggatcatgaatcttaaaaagttaagacatgttctggccaggcgtgctggctcatgccttaatcccaaaactttgggaggcccaaggcatgcagatcacttgagcctgggagttcgagaccagcctgggcaacattgtgaaaccatgtctctacaaaaaaatacaaaaattagccatgcatggtg

SEQ ID NO: 857895 - DNA, 442 bp, Homo sapiens
gcttcctttgttgtacaattattttggygctaataagtatgtctttatgccctctagattggtgtcttggatatttctctccctaccttgtctttccgtgtaaaaactttagatgaatacaattttctattaaaaattaacttgtatcatttgaaattagcatacattaacatttctttaaaactagagctctgcaaagctttttcataatgtctctctcatgagtgtgaaatgatttttgatttttttttaatccagctgcaaggagagaggataacaacatttctgcatttctgagttgtgtgacttagcctttttgattcttaatttcctcagctgcaaaatggggataaaatatttactccctaaggtattgaaatccttaagcaatgtacacaaagcatttgaccaagtaattgacacgtggacatataagatggtc

SEQ ID NO: 857896 - DNA, 593 bp, Homo sapiens
catgcctttatattaaacagatgttgaaccacacctataatattattttcaaattttatcactgagccacataaaagatatgaaaaaagctggagaagtttcagagaacagtaactcaattgattggggctgtaaagtaattccacacagcattgactttaaaagattggggatttatattcaggaagtgttcagatttagaaatgatatcattgaaaactttgaaagcattcctaaagaggagaaaaagttacttaatcccagaatactagtgcaggaaatttcttcttaaagtttgagaggagaaatattcaaacaaataagattctactctacacataagttataaaagagatgtaacaaggcagtgttctgatttacacaatttacagatgaaaaaaggctataagagggaagaagatgatgacagagttcacatgttgcttgagcagagatgcagcctagatttgcactgccaagcacagtagccactggccacgtgtgcctgaaatgcgactggcgtsactgactgagatgcgggtcttcaattttatttcactttaattgattttaattttatttaagagttaaga

SEQ ID NO: 857897 - DNA, 581 bp, Homo sapiens
ccacccagaacatgcttaatggcaacactccttccccccacctcatgaataattgcacatactcccataaagggagtttccccagtgtcaattggtgccgccgtctcacctttgagcagctccctctgatyagccatcagaatgtactttcgttttatgaggaattatttgtattttggactaactctcaaattctcctgtgtggcaaagtcaagaacctgaactggcccaatggctataacaacattttggataccaagcaaccacagtgtatttgttaaaataggaatacagacactgcttcatagattgaaatacgtagcacggtaaggataactttttaagttacaatcagctcaaactttaaaatcactagctattttctttaagttaatctaataataaattatatgctgtgtaaatatttacacatattcgccccatttcttagaaaagcacaagtataatctttcttcaagcaaatccagtgtatgaaaacagttaacaaactatgttagtgtatggttattcatatcacaagaggtttttagttacaaaaggatagcgcctagggtttcttt

SEQ ID NO: 857898 - DNA, 607 bp, Homo sapiens
tgctaaccatttggatatttggaagcatatggaaggttgaatatttcactttatatccagatgtttggtgttattcaatactgatatataggaaaagaatatgctcagccatctttattcaagattttttttaatttctttattgcccataaaagtgatgatttacaaatgtacaggtattatataggagtttggttaaatatattttattggtgtgaatgcctaaatatgatttagaataaaatatctattcatattttagaaacattgaatctgtaattctagagtttttatgattttatgtgtgtgtatgtgtgtgtatgtgtatataggcagagatcaatatgtgtatatataatagatatttaaatacacatgtataaatatatacattgatctttacctgcatacacacacacacatatataaatatatacatatatatatgtttgtgtgtgtatgtctatgtgctacacacacatatatatatatatacatatacacacacacatctggcagttttggaattgatctctgcctgattcttatctgtacctyagtttatacatactttaaatattatgagtgtgctcgaaaaagcgaatgt

SEQ ID NO: 857899 - DNA, 644 bp, Homo sapiens
actttgccatgtagcccaaaagcccaaaagcaaccatagacaatccataaagattcatggctatgttccaataaagccttaattacaaaacaggcagtaggctggatttggccctcagcccaaaatttgctgrtttctatcctcaggtatggagagaaagaacaggaagaacaggctggaaaggaagctggatcagaatatctaaaaccttctattagctctcctaatgttaacgtcttatttgttaacatagccttttcttttcttttccttttacaacattggactcaaatttccaatttgttgccttttgaaaacacaggaatggttgcttccatgattatgcaggcaacactttcttaaccatccttaatataggccaatattccaaataagttgtgaaagtcaccctgactcaggggcttaaatgtaaataattaatatgtgtttcccatcatatatatcagtgctggggtaaacaaccatcctgcttttcctgagactgaggggttttccaggagagaagactttcaaggctaaaacaggggcactgctgggcaaaccagtgtgcttggtcaccctaattagtcaacgttagcatctcaagtaggcaacaagcgtccacatcagttctaggctggtta

SEQ ID NO: 857900 - DNA, 512 bp, Homo sapiens
cattatatatgaaatgagtagatgaggtattcaaggacatctttgttaaaagtaatagtttttttcatttaatctctaagatgtacatggtgaaagaaatgtttgaaaaaggaaataaattactgttagtaattttaaagagatgttcctaaatacttggacttctcaaaacaggcaaatgaaaaggaggcctggagtttagaattagattgttgaaaaaaaattggggggtatattcaaatctcaaataccatagtgaattggctaatttggatgacagggaagaaatccaaataagattaaattattgcagcttcaaaaactatagattctttaaatctgtggctgccaaaagggcaaattcaaccagaaaacacaaagacacctttcttgcatttctaataattgaaatagttaatattttatgagtatttattaggaacaacgtactgttctaattactctgyaaatatattcactcatttgtttcttacaagcttatgagattggtg

SEQ ID NO: 857901 - DNA, 517 bp, Homo sapiens
actagactacgagctgctataagagagcttttcttcctcatatctgtacccctgcaacctggcacatagttagggctctaaaacctttgaatgaatgaacataactattacttagttgatttatggtgaatgtatatgcacataaaatgtccatcagagtaatagggctcatcattcaaacactgctctataggaactgttgcaatctatccatctgacaaaggacaaatatccagaatctacaaggaacttaaacaaatttacaagaaaaaagaaaacagtcccatcataaagtgggcaaagggtctgaacagacacttctcaaaagaagacatttatgcggccaacaaacatatgaaaaaaagctcatcatcactagtcattasagaaatgcaaatcaaacccccaatgagataccatctcatgccagttagaatgaagattattaaaaagttagtaaacaacagatgctggagaggatgttgagaaacaggaacgattttacgctgttggtggg

SEQ ID NO: 857902 - DNA, 576 bp, Homo sapiens
gtatttaattgaaatacaagaaggaatgaactaataataagtkaaataaggcaagaaaaaaattagctcggaccaagaaaaagttcagttcgacaacaggaagaagttatttattataaaaataaaattatatattaagttatagcaatgatgaaaggccatctcatggtataagaacaaggtagaagtaaatttaggcttaggacaaatctgacaagtttagaagatgtaagacaaaagagccagcatcattcatatatgccaggcattattccaagtgccttacatgtattaattcatttaaacttttaacaacttgaaggagaatgatcactttttacagatggaaaaattaaggtgtgaaaactaacataactttgtaaaaactgttgtcattatttccttgaaataccagctgttatgctgctaatatttcctatgcctgtatgattttcattcatcgaattggagatgttaatctcaaatttaatgttttgaaagctggattaatatttaagccaatcagaagagactgtacaattttattgtctgggccatgggagtaaatgaaatcaa

SEQ ID NO: 857903 - DNA, 583 bp, Homo sapiens
aggttgaaatgaaagaaaaatgttaaaggcagctagagataaaggtcaggtcaccrgcaaaggacaccccatcagcccaatggacctctcagtagaaaccctacaagtcagaagagattggcaggcaatactgaatattcttaaagaaaacaaattccaacccaaaatttcatatctgaccatactaagcttcataagcaaaggagaaacaagatccttttcagacaagcaaatgctgagggaatttgttatcaccagacctgccttacaggagctcttgaagggagcactaaatatggaaaataaagcccattatcagctagtatagaaacacactgaaatacacagaccaggtctgtcattgaacagaccaataacaaactctgaaattgagtcagtaacagactaacaaccaaaaaaagctcaggaccagacagattcatagctgaattctaccagatatgcaaagaagagctgaaactattacaaaaaattaagacagagtaactcctccccaagtcattctatgaggccagcatcatcctgatatcaaaacctgacagagacacacacacaaaagaaa

SEQ ID NO: 857904 - DNA, 597 bp, Homo sapiens
attttcaacttttttattctaaaaaaattggagaaattaacctcttattgagacctacaatgtgcataacctgtgtgacaagctcaaagaaggatttcaatcaagtaaggctatggttaagcttgttaaccagcttcatgcttattatctaatcaagacagtgacacatgaaaacataaaactgtaaagaataattttggtaaataagtgtcccaaatgaataaatattacaatcagggactactgtagaaatcctgaagaggcaacattactttcaacagtcatgccacacgtacatttatacttttaagttgaatttaagaaaaaataacaatttaaatgtgtttttagtttggtgccattggggtagtgatccaacttttagaatcacagtttatatactttctgggagcaaatataaacatattatcatatccatgtccagttaaatgataaggaaagtcgtgggtctgatgtgaatggaagatatrcaatttggggattcacaaattgtgcttaggcttgtgcagcaagtatgcaccacagcattctaaaacctgtgatagctactccatagtataacttgggtgagtcttg

SEQ ID NO: 857905 - DNA, 252 bp, Homo sapiens
gtttctaacctggactgacttttccaaagagccagttcctggcacatatgagatgttcctagcacactccacacccacaaagtataaacatcagacagacaaaagcagcacctccatcatcacagcagcaaacccagcaacgcatggtccagagtccagtccagagcccactgcggtgggcagccagaggcctagaggagctggcttagctggagcaaagatgcaggcasaacgcaccggcgacaagaggaa

SEQ ID NO: 857906 - DNA, 646 bp, Homo sapiens
ataaaaaccttcaaaactcaggaaaaaacatttaaaaatggacaaaagatctgaacaaagattcactaaagaagatatcaatagcaaacaaatattcaatagaaaagatattcaacatcactacacattaaagtaatgcaaattaaaaccccagtaaggttccactacccacctattagaatgactaaagttaagactgatcattctgacttggcacggtggctcacgcctgtaatcccagcactttgggaggctgagatggatcacctgaggtcgggagttcgagaccaacctgaccaacatggagaaaccccatttctactaaaaatacaaaattagctgggcgtggtagcacatgcctgtaatcccggctactcgggaggctgaagcaggagaattgcttgatcctgggaggcggaggttgcagtgagctgagattgcaccatcacacgccagcatgagcaacaagagcggaaactccgtctcaaaaaccaaaccaaaccaaaaaaaaacgacagatcattccaagtactggtgaagatatagagcaactggaatcctcatacactgctggtgggaatgtaaaatgttacaaacctttkggaaaagagtttggcattttcttaaaatcttaaacattcacctg

SEQ ID NO: 857907 - DNA, 438 bp, Homo sapiens
gggactcctcagtaagtcaaaataagttcctttgaacttcagtgtgggatttgagaataggtgggctgcttcctgtctacactattacaaataagcctttggctgctgcttctcgcattataacccagatatttacacactgcaaatataagtgtaaacagattccactgggaaggatgttcaaatgaatagataaatgcataggtaatatgtgaagtgggtaatgggagtggggctggggagtagccgtggagggtgtggggtggtctccgaaggcctctgaaagcagcatcagcagagatcggaggaggacctggccgcttgatttagcctcgtgtgtgagctgcagattgtctgctattatcatatatttttggcccccagtatttcagttctgaaaattrcattagaatcatacactagtagcatttttttaaa

SEQ ID NO: 857908 - DNA, 617 bp, Homo sapiens
taaaaagtacgaagtgttggtaatcactggaagtaggtaatagatgcatggttcactatactgttctctctacttttatctactctgaaattttccataataaaaagttcttttgacttaamaaaaaaaaaacaaacctgataacaggcagaaattcagatctacacaaaggaataaagagcaccatgtatggttcattaaatgagtaaatttataatatgttattatttaaatatattttaaagataaatgactatttaaaatgcattgtagaaaatataacatacataaaaacaaaatgtttgacaatagcagcattaaaactaagaaggagtcctcggcaaagcccgagtcctgtcctctcgccctcctcccggaacagcatgagcttcaccactcgctccaccaactactggtctctgggctccgtccaggcacgaccagcgtctatgcaggtgccgggggctctggttcccggatctctatgtcccactcctccagcttctggggcggcatggggtccgggggcctggctgtgggaatggccgggggcctggcaggaatgggaggcatccagaacgagaaggagaacttgcaaagcctgaacgactgtctgg

SEQ ID NO: 857909 - DNA, 530 bp, Homo sapiens
cttcctcttgggcttaatttccttcttgtggaagcatatctcttatacagttatttcattaaggatttgtaagttgttgmcacttccagtttttatatttctgaaaacgtttttatttggcactttggttttgaattcagtttgaagttggttgcctgttgaaatctcttccaacagttatttccatgctacgttgaagatgttagtcctttgtcttctgatatatattgttgcttgtaaaaatatatatcatcgatctaattatcatttctttaggaaatttctttctggtagcaattggaatttatctcttttctattacattctgaagcttcactgggaaatagctacgatggattcatttttatttgtctttcttcagattcattgtgcttaaatatcagaatttatgttttttactgattttggcatcaatctttattatttctcttcatctgcttacattgtggttcatttatcttcttattctagtgtcttaaaatggaagttataatcattaatttgagagc

SEQ ID NO: 857910 - DNA, 592 bp, Homo sapiens
gccctgtttctatatgtatatatatttgatatacctatgaaattgtatattattagtaggaagagaaggcactctggagtccaaatgtctggatatgaaatccagtttcaccacttcctattgagcaacttcaagaaaatgtcttaaattttatgattgtatcgctttcaaacagtgtctaacacaaagcaagagctcaaaaatattgtttgctgttattactgtacaccagtttcccatgtgtccttacagccacagcagagtagcaagtagacatttgcgtctgtctcccaacccgtatattctgccatgtggagtaccaactctttgtgctttgtatctaaacctcacaaaaactatacaaggtaagcgatatcaatccatttgtaaaatgaagaaaaggatacagagaaataatttgtccaaggtttcacagccagcaaatcaggattagaagccaattccttttgattgtgaagtctggayggcttccatatatgccatgttaatatcatttgtagttccacttctaggccttttagatgttggctattctcatggagttttatttttgatgtaaggagggtggtat

SEQ ID NO: 857911 - DNA, 617 bp, Homo sapiens
ttttagaaatcattaaaaataaacatacctgtttttgttttttgtttgtttttagaaacagagaagcaacaatagaaaaaataatacatcaagtggtcatattttgtctaatttattatctattattgaccttttatggatggccattatctaaaaaagtttttaaactgggaagttttagaaaatcatcaaacacaacattaacaagaaacgttgcagcaggaagaaaccgataagggactgttacagagatgcttcagaagcaaacaccataggcgtccacttccaacactgaaggactagcttgtagctgaccaatgctcttgccaaaaacttctgaaaaaggcaatacaaatgggaaagagaaactccacatgactgatgaataactaaaacatttctcaaccttattaattatctgagagatttatattaaacccagagtgaaatataattacacagcatcaggatggctaaccttaaaaagaatgaaaataacaggtgggcaaagatatggaacaactgggactttcataaaatgacaacttatagatcaaaaatagccacatatcactaatttgatatgttttcaccraatgcaatcattttgaaagggt

SEQ ID NO: 857912 - DNA, 501 bp, Homo sapiens
accttcctctagatggtgataagaaagaacaatctatttctgattcttttattttctacctagaacttcaagaccacagcagatgttgattcagaacactgcatgccatcctayctcacctcttttggtaccacctgttattgagaaaaagatacactgaagttaagaacagttggtgatcttcaaagttaatagctaaagatacctcttaagaccttacagaagcatgttttggatagatggaagattgattgatatgcttagtgcttgatataaagttaacactgaaagcatatttggtgagtgaagttcctgctatatagccttcagtgaggagtgattgaaaaccatgaggtgactttgattcctggaaacaacactgggatttccttaagctatcagtgaccaagtgcccttcctggattacactagtccactgttcttatttaggaagcctgctttcaatgagacgtttctgagcagaaatttaaaatgtgtgat

SEQ ID NO: 857913 - DNA, 551 bp, Homo sapiens
gacataaaagtatggtgtcaatgaagtagatgagtttggagaaaatactaaatgtgaacattatatgatttttagtatattgagtcagaaactagatgtattagagattcatgttaaatatgatacaaatctgataaaacataaagtttccttaagatgcttatcattcatcacctaaaaacttttaatattaaagctcttatgaaactctaaatgaaaacaaaaatgaaaattatggatgaactcatccatctaaaatactttttacttttctcagtaaactcctggaaggactttccattcaagtgaatgtcaaagccattattggtggtacatctaacaattccattgctttgtcaatgttgcccagcctttaaatagttatcatttatattcaaagtatgttcacataaatattggatttgacatttttcagtgatattctaaayttaagcattgatcaatatggtcacatgttgttttttcatttcattttttttccaaaccatgggtcaaaacagttaaattgatggattgtattttttaaatat

SEQ ID NO: 857914 - DNA, 643 bp, Homo sapiens
aggactttccattcaagtgaatgtcaaagccattattggtggtacatctaacaattccattgctttgtcaatgttgcccagcctttaaatagttatcatttatattcaaagtatgttcacataaatattggatttgacatttttcagtgatattctaaacttaagcattgatcaatatggtcacatgttgttttttcatttcattttttttccaaaccatgggtcaaaacagttaaattgatggattgtattttttaaatattagaaagtgagacaatattaggaaaagcaggatttcttaatattatttccaaagttccatatatttatggactgaatagcaatgaatacatataaataattgcatatagtcattatttgaatttgcatttaaagtggtttcatatactaacatgataaggctatccaatcaaataataatttatactaaaaataacaaaagaatttatatttgtaatatgttgtatgtggttgcttaaatgacgtctaggttttaattaaaaactccctttgtagagatctatgatatttccataatttagttcaccatggcaatttgaggagagaagaaaacttattaytaattaattttaaagctatttccattggcgcctttatttac

SEQ ID NO: 857915 - DNA, 634 bp, Homo sapiens
atgacgggttgatgggtgcagcaaaccaccrtggcacatgtgtatacctgtgtaacaaacctgaactttctgcacttaaagtattttttaaaagtagtaaaaaacttaaagtattaaaaaagatactaattacattcaataaactattttttttggttaaaaaattggtaactgaacagcaacaccatttcagaagtatcttcttatcctgccattcacataattattctcaaactagtcagtaacttcagtggcttctttaggcaaatgcaggtttaatttattaaaagctcctgaaatctcaacagcagaaggaataccaatgcagccaagtgactcacttttaaattgaatttacttcattgccatactgcatggccaatctataaacccagatcttctccaaatgcattggcctgaatggaaaaaacaaactttattggtaacaccttgaaagtcacttttagaagccttgattgcacctaatttcaaatatgtcgttatggtttgaggattctattaaaatccattttattctgcatacagaaaataacaagataatgtttctgcctaacataatgcaactatcctgtaatttttttcggattttagacgttagagatgttagatttta

SEQ ID NO: 857916 - DNA, 601 bp, Homo sapiens
aagcacataaaaagttgctcaagagcattactcttcaggaaaattgaaatcaaaacgtcaatgatatatcacttcaaacacatcaggtgagctataatcaaaaagacaaacaacaagtcttgktgaggatacagagaaattcaaaaattcatacactgctagcaagaaacatttgatggcttctcacaaagttaaacatatagttagcacaagatccagcaattctactcctatatacccgagaaaactgaaaatttatgtccactcaaaaatctgtgcagaaacgttcacagcaccgttagtcataatatctaaaaagtgaaaatcatcctgatgaccatgaaatgatgaacgggtgaataccaaacggtgctgggtccacacaatgcagtattagttggccacaagaaggaagcactgatgcatgctatgacatgaatgaatcatgaaaacatgccagttgaataaatttggacacaaaaggccacatattgtataatcacattcatatgaactgtccagaataaatctatagaaaagaaaagctgatgatttacatatgaatcaagttaaaaagtaaatgactttccctcagctgaaa

SEQ ID NO: 857917 - DNA, 592 bp, Homo sapiens
aaaataatgcagtttcatcacttcattaattttttcccttaacatttttgcttaattagtactatttctgtactgagatttttttaacrtataaaatgtagatacaactgttctatgatggctgtttttgccaaaaacatgcctgcccaggatgcctttgtcagttgttttcatggcatttgcttggtggaaaagttgtgggggttatgtagaaataaaaacgagaataaatttctgcagccgatctaaatacatatttttaaagtcaagaattatgtttcccattaaataaacgttctcatttatggtctccgttcatatagtgatgggtcctattagctgtcattatccttctattctcattaggagagaaaaatagtccaggctcctaaaagtatcttcatgagaagtatcagctcctaattagcagtgactgtaatcttttggaacacagggttaacacttcctagataagttgctattataaagtttcttcatcttttaaaagccattcctgctagtaaaactaggtcgaaatgaaaaagtagacagttttttcttttatcaaatgcagttttgtaataaaattgta

SEQ ID NO: 857918 - DNA, 461 bp, Homo sapiens
aaaagatcaacgaatccaggagctagttttttgaaaaaactaataagatagatagactgcttcctatactaataaagaagaaaaaagagaagattcagaaaaacacaatcagaaacaagagggatattgcttctgacgccacagaaatacaaacaaccatcagagaatattataaatatcagtatgcatatgaactagaaaacctaaaggaaatggataaattactggacacatacaccctcctaagactaaattaggaagaaactgaattcctgaatagaccagtaacaagctctgaaattgctgtaataataaacagcctaccgacctaatataacctcaggaccagacagattcacagctgwattttatcagatgtacaaagaaaagctgataccattctgactgaaaactattccaaaaaattgaggaggagggacttctccataacttattctatg

SEQ ID NO: 857919 - DNA, 420 bp, Homo sapiens
atctttaagagggtatgagacaatatctctagaacacaggtgatttgcctggcatttgatgaaaaagggactaatatcctattgtagtaraaaagaaagcagggcatcttttgggaaattaaagacaatttcacctgattatttccactgtctcagtggagtacaaggtaaggttattatgtaagaggaaacatagagaaaaagaggttttgggggattatggagagaagagaaaatgtgaaagtcactgaggggagagggaatttgagcttacgaggaaatacaccagtctttccaagctagtatattttgcaaataaagtgaatttaaagtgagacctgctggtgaggtgggaggcctctacccctattgctgcaagacctcctaaaaacactgctcattaacaaaggctttgctgat

SEQ ID NO: 857920 - DNA, 503 bp, Homo sapiens
acaaattattatagttatagttacgtttactacttttgtctttcaacttttataatatrgttaaaattaatttatgcaccattattacagtagtagagtattctgtatttgattatatatgtacatttttgcgagttttatatttcatatctgttcatgctgcctattcgtttctttttatttcaggttaaagaacttcttttagcatgttttgtagggcaggtttagtggtgtcagttcattcaggctgttataacaagactaccataaaccaagtggcttataaaccacagaattttatttcttatagatttagaagtgaggaagccaaagatcaaggtgacagcacatttgtcattcagtgaggtcttgctttccacttcactgaaggcatcttcttgctatgttcttacttggtggaaggggcaaacaagctcccttgggccttttttattagtataaaagaactaatgtcatccttcagggctctgatctcatgacct

SEQ ID NO: 857921 - DNA, 503 bp, Homo sapiens
acactacttactagctcaatgatcctaggtgagttattttacctctatttctctttgataaaatagagataaaaacagaacttaggctggacatgattcctgcctgtgattccagcacgttgggagacagaaacgggaggatcacttgaagccaggaatttgaaaccagcctgggcaacatagcaagaccgtatctctacaaaaacaatattaaaaaacttaagaaaatagaacctgccaatattttagttgtagagattacatttattgatatatgtctaatattttgaatattgcctggcacaaaaaaaaaaaccttacatggacatgttgcctcttattagtagtgatttggatccagaaaagaccctacctaacagacattaaatatatgtatcaaattttgtgtcaygtaaagtgctattaatgaaatagactatggtaggcaaaatagttccttgaagatgtctacttcctaacacttgaaacttatggagaggaac

SEQ ID NO: 857922 - DNA, 530 bp, Homo sapiens
ggcttgtgagacattttatttaaatttaattaatttaaatatgcaaatagtcacatgtggctagtggctaccatattggactgtgtagatgatgggggtgggtgttaaagaaataattatttgtgacacgttaaaaatgctgagacacactttattcaagggtgttctatcacaatagtatgcaatatgagttttgcctggcctggttcaacccacctgagtgtcttatcctttttaatcaaacgagaggtgagcagctaccttgaaggacagtttcagtggctttgggtggatgctgccctctcattccccaagctacatcccctgcagacagcctgggggtcagagagggataagaggcttcagtctgcagaggacagcagagtgggcatgtaggtgcactcrtgcacatggcctgaacacgtgtgtgtgtggagctctgtggagcagattcggacaggctgggttctagtcttgattcttcactacttcaccaagtgatcttgggcaaatgccatccagtctctgga

SEQ ID NO: 857923 - DNA, 452 bp, Homo sapiens
gtaataactaaagtttcactggcctatcgcatccacatacataggtcagatcctcttgtccccccaaactcattcccaagtgcccttctgggcctgaatgctcctgcactgggcactcctgtctaaagtggtggacacctcaggaccaatgctgggaaatggttggaggtgaggtgaagatggatgtcttctcccttcagagtggcactgtctgttacgctgctcctgtctccagatctgacagagttttaaatgcagcagcttgtttgggttttgttttcagttcctctgctctttcagatattaatcccatggaggacatytgccccagtggcaatgataaggtacctctccagggacacacgggcaacggacatgtacaagggagctagagaggaagaacccttgcacctcagaggacacttggtgaacccccaaataactggggaggc

SEQ ID NO: 857924 - DNA, 655 bp, Homo sapiens
aagtgggtattaaatctgtcctcagtattataaaggacatcaattagtgtccagctggtgacataatatgaaaacttttttcttcatttataagggtagaaaattatatgcccaggcattcctttatagcaacatgtttatttctacaaatttctgtaacagttaagtgtgtactcaaaaattcacaagtccaataaaataagtttgtggtttccttctttgacattcttaatatttactccatttcaaagggtgtattacagttgtttgccaaggatgtatgttcaaagatccttgacaggcttggtatggacagttctactgagtgacatgagttgctgagaggtgcttcagggatgtcatttggtctatctcaggctcccttctctcataatacagagcccagagttaagtagtggtgagaatcatggccaggtttgtgtcactttaatggaaattcccagaaaacttagcacttgtgattgtttggttcctttcaaaaggaaacatttttgttcccacagtmctcttgataaaggtcactaagaccttcctggtgggaattctctagcatagcaggattctgggggctagtccgtccctgtcatttccaaccagtcactgaaacatactacttcacaacacttaaatgccc

SEQ ID NO: 857925 - DNA, 593 bp, Homo sapiens
tgtcactttaatggaaattcccagaaaacttagcacttgtgattgtttggttcctttcaaaaggaaacatttttgttcccacagtcctcttgataaaggtcactaagaycttcctggtgggaattctctagcatagcaggattctgggggctagtccgtccctgtcatttccaaccagtcactgaaacatactacttcacaacacttaaatgcccaccgaaaactttccaaccatgagtaagccactggtatccaggtaagtcatatttgccattctggctttcaaagtgactacatctaaccactgtactggaaccacacacttctgttcatatgtccaaatgccactagcctcagcctcctgggtagctgggactataggcatgtgccaccaaacacagctaatttttttcatatttttggtagagatgggatttcaccatgttggccaggatggtcttgatctcttgacctcgtgatccacccacctcggcctcccaaagtgctgggattacaggcctgaaccaccacacccagccagaaataattagatttatttgatgtccgtctactataacagttacatgggaaga

SEQ ID NO: 857926 - DNA, 623 bp, Homo sapiens
ctcattttccttattctactttttgttgctctaaattctttcaactctttatttatcctctaagaccctgatttctttgttatcctacctctgctgccctgctctttgctcctggttgcttattgtctgggttgtctatcttcaccatttctcagaccagggccaccccccaaacccagtagcacatgctctgctaccaagttcccagacatggctgttggtcagcatcgtggaatctgaagtttggaacagaccagaaaagtcagctggtctatgtaatgctagtctctggcacaacatccatgctatgaataatttctcatcaagtatagaatttaagagaatcaagggtatggtagtaatactttgggtttataaacttgtgtatatttggtttaggtgttttaggagacttggcctttaaaagttaagaggtcagtctgtgattccaaactgaaatgtataactaattgatttagacttgtaattttgggttgaaattktattgtttatatagttttccaatatttgagagacactaagaagccatctttattgttttagtttattagatttatgaaaagatttttcacacaattactctatttgaaaagaaacccaga

SEQ ID NO: 857927 - DNA, 589 bp, Homo sapiens
atatttgaagtggggtctccctgccaccctattttaaaacatatcccattccaccttccctattttaattgactttatagaaattaccaccttctaggccaggcgcagtggctcacrcctgtaatcccagcactttgggaggccgaggtgggcggattacctgaggtcaggagttcgagaccagcctgaccaacatggagaaaccctgtctctactaaaaacacaaaaaaattagctgggcatggtggcgcatgcctgtaaccccagctacttgggagactgaggcaggagaatcgcttgaacctgggaggcagaggttgcagtgagctgagattgcaccattgcactccagcctggccaacaagaacgaatactctgtctcaaaaaaaaaaaaaaaagaaagaaagaaaagaaaagaaattaccaccttctaacatagcatataatttgataatttgtttgtttactttgcttattttctgtcttctgtccattagtatgtaagcttcatactatgagtatgtgtatgggtcaactgcagatattttgtctgttttgttcctgatattcccagtgcctagaccaaaga

SEQ ID NO: 857928 - DNA, 541 bp, Homo sapiens
aaagtagaacaaaaaggcagaggaagagtgaactctctctttcttctttaaccgggacatctatctcctgccctcagatgtcagagctcttagttctccagctgagacttacagctcccctagttctcaggcctttgcattcaaactgaattacactaccagcttttcttattcaccagcttgcagacagcatattctcatctctctctctctctctctctctctctctctctatctatctatctatcatctatcgtatctatctatcgatctatctatcatctatctatctatctattatctagatatcctgttggttctgtttctctggagaatgctgattcacacaaaaggaaaaagaatcatttaaaaaaatattacagcagccaccaacccaacacttactatatcaatcagggctcaataaaagaaacaggataagcagaaggtatgtagtaacagacttatggcaaggaattrgcttatgcaattgtggggttggctagacaaatctgaaatccacagggcaggctatcaggag

SEQ ID NO: 857929 - DNA, 593 bp, Homo sapiens
aagatgttaactctgaaaaaaaactagagagagtatacagaatgtctctgtattatttcctagaaatgcaagtgaactgacaattatcttcattaaaagtttaattaaaactacaaggagtaagactatcagactagatttttaattttcttaaaattcaatggtattatatttgaaagagataaaactgaaataaaaggacacaaaaatgtaacggtgaggagaaattttttaaattaggcaaaactgacaaaaaaagaaaaataacctagaaggccgggtgcggtggctcaggcctgtaatcccagcactttgagaggcccaggtgggcagatcacctgagatcaggagttcaagaccagcctggccaacatggtgaaacaccatctctactaaaaatacaaaaattagccaggcatggtggcaggcacctgtagtcccagctactcaggaggctgaaacaggagaatcacttgaacccacgaggtggaggttgcagtgagccgagatcgcgccactgcmctccagcctgggtgacacagcaagactccatccgtctcaaaaaaaaaaaaaaaacagagatgggggtctca

SEQ ID NO: 857930 - DNA, 571 bp, Homo sapiens
attcatatctgagatcttgcatgctagccacagttgatttgatttgaaagcaacactgattgagagaaaagtccatccattagtcagagacagcattcttttccttgcaagtttgagctgattgatgtgtaggctaaagaagtttgaagatgagtcatactaatggcaggacactttggagtgaagggaacagctgttgaggcccctgaagctacactggtctctgccctttctgaaccttgttgctcaatgtttccttggcttaatgacataggttaccctgctatccttccagtaaaatacacccccttcatttttaaaactaacagagctaagtctctttgttttgttgattattcagtctcttacagacaaaaaaagcaaacaatctctaaatcaaggaaacttgagtaaggcagtcctttccactccttgtctcatttaatccctaccacattatgagagattattactgttcccattttgcataygaagaaacaaagtttgaacaggtccaatacctttcctaaaattaggagttagtgatggggcaagattccagccctggcct

SEQ ID NO: 857931 - DNA, 397 bp, Homo sapiens
gcgattggcgggcgtgtctgggctctagccaatccggaaaggggcgggctggttaagcgtcaggttccttggatcgaccggtcagcccagtaactgactmcttttctcccttctctagggtcctagcacagtgtctgatggagctttcctaccagaccctgaaattcacgcatcaggcgcgggaagcggtaaggaacgcatatataaaacatgattataccaagaacccctctcctactgttgctgcgggacgattccgagtctccggttgctatggcgacagagtccgctactagagaagcgcaaacgcagtgagaggcgctcggccgaggtggttaaatcccgggctgggcttgcagccgtgatggagggaaaaataaatgagacacaggcgggt

SEQ ID NO: 857932 - DNA, 595 bp, Homo sapiens
gggatcctcctgcctcagcctttcaagtagcgggaactacaggcatgcaacaccatgcccggctaatttttctgtatatttagtagaratgggttttgccatgttgtccaggctggtcttgaactcctaggctcaagtgatcctcccacctcggcctcccacggtgctggaattataggcatgagccactgtgccttgcatcttaacttgtttaatgcctaactacttctcctccttctccttttccttttctccttctccttcttcttttcttcaacagggtcttattctgtcacccaggctggaatgcagtggtgtgatctcagctcactgcaacctccgtctcccaggctcaggtgattcccccacctcaacctcccaagtagctggaaccacaggcatgtaccatcacacgtggttaaattttgtattttttgtagagtttcaccatgttgcctgggctggtctcaaactcctgggctcaagtgatcagcctgccttggcctcccaaagtcctcggattacaagcgtgagccttcgtgtctggcttaatgcttaacttttgaatgtcctctctaaaacctgtacctttccc

SEQ ID NO: 857933 - DNA, 631 bp, Homo sapiens
agtttattaaaatactaaacacaaacatacatacaattgtggttaaaccattaccttaagaaatataaatatgcatatttcctttccaggaaaataaagagatgatattcaggaaagctcagagttaaagtttttaactttaagaatctccacactgccacctctaaactgaaaattactgctttttagagattacaatccaaaaacagaaagagctgaagccaacagcttaagaaaaaacacagaaagtcaaccctcagtggggtcactgtcctgctacccaaaacggagagcttttaccttcccaatttctgatgcccaagaaatggaaatttggtttggcacagctgaagataacctaactaaagatgtaatattcaaggggcgtccagggcgcttctgttcaatcccatttttaggcggtggtgcatagccctataaccgtaagaaagaaaaattatttcaaatcatctgcaggaagattaaacattttctccaagatagatayaggatcctgcccaatttcagttacactatttttattttagcctaaaaatcatatagcccttatgatcattatcaacccaaaataggaaaataacctttgaaaaaaggttacaaaatatttcac

SEQ ID NO: 857934 - DNA, 514 bp, Homo sapiens
gatagtaaatattttcaggtttgagagccatatcatatttgttagtcacagctactctactcatgttagagcacaaaaaccatcatagatgatatgtgaaaaagtgagtgtggctgttttccagtaaaatgttaattataaaaacaggcaactggcagaatttgcccagtgaactacaatttgcaaacctctgtactagatcctttcaaactcaaagtatagtccatagaccacctgagagcaggaaaagctacataaattgtgtgacctaatacaaaatgaaaatgcagagccccttgtttcaaaataactaagaatattaaaatgctgacagcagagcatgatttcaaatgtgggtttcttttgcagacttacaagtcacacatctgtgaatccagccctgcctgggagcttgttaaaaatgcaggccttgtctctgacctattgaatcataatctgcatatcagtaaggtccctggatggktcatatgtacatatgttttgaaaagtactg

SEQ ID NO: 857935 - DNA, 533 bp, Homo sapiens
atcctaagcaaaaagaataaagctggaggtatcacattacctgacttcaaattatattgcaaggctataatagccaacacaggatggtactggtataaaaagagacacayaggcaatggaacaaaatagagaacccagaaacaaagccacataactacaaccaactgatctttgacaaagtaaaaataaataaataaataccctaaggaaaggactccctagttaataaatggtgctgagaaagttggagagccttatgcagaacaaggaaaccagacccccatctctcaccatatacaaaaattaactcaattaaagacttaagtataagacctgaaattataaaaatcctagaggaaaaccccaaaagagctcttcagaactttgttgtcagcaaagaatttatgactaagttctcaaaaggaaatacaacgagaacaaaaatagaaaaatgagacttaattcaactaataagcttctggattacagaatgaacaaccaacagagtgaacatacaacctacagaatggaag

SEQ ID NO: 857936 - DNA, 533 bp, Homo sapiens
atcctaagcaaaaagaataaagctggaggtatcacattacctgacttcaaattatattgcaaggctataatagccaacacaggatggtactggtataaaaagagacacataggcaatggaacaaaatagagaacccagaaacaaagccacataactacaaccaactgatctttgacaaagtaaaaataaataaataaataccctaaggaaaggactccctagttaataaatggtgctgagaaagttggagagccttatgcagaacaaggaaaccagacccccatctctcaccatatacaaaaattaactcaattaaagacttaagtataagacctgaaattataaaaatcctagaggaaaaccccaaaagagctcttcagaactttgttgtcagcaaagaatttatgactaagttctcaaaaggaaatacamcgagaacaaaaatagaaaaatgagacttaattcaactaataagcttctggattacagaatgaacaaccaacagagtgaacatacaacctacagaatggaag

SEQ ID NO: 857937 - DNA, 517 bp, Homo sapiens
cctcagctctctttgccagcagaggtgaggggatggggatgaggaggcagcatgcgcggggccatcaagctaacctgartgaatcattcaataaacatttgttatttgccttttatgaaccaggaactataccaggtactggagagatgcagtctttgtctccaaaagcttagcctcttgaggacacacacatctaaataactgtaattcactaaagaggatgcagcagtgccataagagcacacacagggccaagaacaatcctcagagctccacgtcgacagcatcagtgccgacacagtcccctcccttgacaaaatgagccacgtattcacaggcacttctgctgcatttgtccagtgagctcatcatgcggccaaaagtgaaaatgtggactctttaggagtcagatgcaacagtatagggtcagaggagatgtcactaacagctttccaaaatcatgagccaccagtgtcactctaacagttatctcccttccacacacacaaaccccatt

SEQ ID NO: 857938 - DNA, 548 bp, Homo sapiens
gcctggtgtcaatggaaggagaaatgggaggaggagggatcctcataccagtaaggagtctggactgtcctkcgggcactgggagctgctgaagagtttaagcagagtagtgatctgatgcgatttgcattttagaagctccctctccccctaggtgagctgggctcagtggggaggctgatggcagggcatccacaccatcaaggtcagagacaagagctgacctggttcagtctatcctgctctgtagctcatgattgtggattccagctgtccttgctctgacctgtggactagaggcttcaggttcaaagacagtaaaccttacagagaatggcttaaccagctgccctgagagtgcccaggggaagctgaatattaatgaggaattttctcaattggttctgagttttctggaatcaattatctgacctcattagatgcaaaggcgttaatgatcctgtttccagtggatcatatctgatgacatgtaatggtgaaacagttatgcaaattattccttgtagatagctggtaactaaatgctg

SEQ ID NO: 857939 - DNA, 587 bp, Homo sapiens
ggagccatgggtggtctgggctcagggtatggaaccggccttctttcagccaacagacattcactcatggtaagtgatgaaatttatagactctatagttatcatatagagttagaatttcagrtatagatactattgttgctgttttttaaaaaatcagctttattgagatataattcacttaacatacgatgagcccatttcaggtgtacaattcaagtgttttagtgtatttacaaggttgtgcaaccatcaccatagtctaggttttgaatatttttgccccctgcaaaaagaaaagaatccccgttgcccattaagcagtcattccccatccctccacttccagcccttggcaaccacttgtctacttcctatgtctatagatttacctattctggatattttgaatatatggaatcatacaacatgtggtggtcttttttgactggcatcttttacttagcatgactgttgcagtttttctacagtttgccacgtattagagctttattcatttttattgtcaaatagtatttcactgtatggacataccacattacacagttgggttgttccaactcctt

SEQ ID NO: 857940 - DNA, 634 bp, Homo sapiens
caagcagatacaaaccattacatacatgttctcatgataaactagtcctcaaataaagggatttgacagcaccrtttatcactcatagcttttcctaaatttattaggtaattagggttaccatctatggtatctaattggcttatccaaaggaaaaatagacttctcatatctttatgacaggcggtagttttggagcaaggcctcagcccgttaggctctgatcctaccacataaacaagagagagaggcgctgtcttccctgaggggtcttttcctttcaaagagacagaggtcctcaagggctttaagaaagactttcctggtttgcttaactgacaagaggcttatttagcatttaaaaagatttgcatacctttcaaagagacagggaaataacagaattacaagttttctaaagtaaatgctctaaagaagggagggggaagaaatccctttctttacattcaacagagagaattaagcccccttttaaatttgcttttgtctttaacagattttttttttctatttttaacattccttttttgttttttactgagctataaatctcattgtctatttctgtatcaatatcacagtctccagatttctctactttttgagaaagtct

SEQ ID NO: 857941 - DNA, 364 bp, Homo sapiens
tttttgaaaataaataatgaccaatataaaactgacacaaatgtgtaaataaaaacaagatgtcatagagtctgaatttgaccaagcccactattgacaagtgatttcaagtattactcttatagaggaaattccaatttttaacctcccttcctcttatctgttgtgcctttctgcccacatgcttacatatccaaagaaagaaaaagctaggcttcatttcttcctttacatcatattcccccatacctctttcacattttttggctttgattctttcagttcttcatacytccacttccacagagacaaagccgactccagtctctctatttctttttccaaagctgtgcgcattctaaat

SEQ ID NO: 857942 - DNA, 602 bp, Homo sapiens
atagatacttgtatgatcacaatctactaatctagtgaaatacagatgaagaatctgaaaaagggaattggtggcactagtaaatttcagagggactaatgagaaacttctggcagaaagtaagtggtaaagaacttactgtatttgtgaatggctagcatgcatatttatccctatttcagtccattcaagccaggaaaattaaaactgttatataatatatacttatataatacattgtgtgtatatatgcatacatatccttcttgcttttctggttctgcctattaagatttttataactaagagataaaaaataattatttttagattttggaaccttatttatatattagatattccacattgtgctaataaaattgtaagctgattgcatagaaacgaaaatccatattgaacatttcatattactattctctttcccagatgttatttgttcttgatctttatgagaattcactgagaaaggctatgacagactgtattttgcaaagatcrttgccacaatgactgcatcccacacacccttattataaaattgttttcacactccttccattgaaagtgcctctctctcttta

SEQ ID NO: 857943 - DNA, 193 bp, Homo sapiens
ttttcctagaaattggagtaaagaaaatactcattctgttttcttaaagcaaaacataaattttgctgctttaaggagtttagagaaagccttttatacttctcactctacagaaaattaattccattttttctcattttttcctactaataaaaggcaccrctatcctttcagttggtgtaagccaaagatt

SEQ ID NO: 857944 - DNA, 632 bp, Homo sapiens
ccatttattctctggataagcttagtcaggtaacttcatctaccccaatgtagacaacttatttaatctgacaaggtttgtgagaagtgaaattaatcaaagtaattagaaagcactttgtctagcaatgtaacacttaaaggagaaacactgtggtaatataaattttttaaatgtatgtttctctcatatatttaggcatatggatatcgagacatcaatgtaatttattgcataaatctatacagcagagtaactctttacagtagaaaatctattagaatctcatcctggtcccaccatttactcattgtctaattctggacaagaaatttattatcttattaagttttcttactagtaaaattagtatgataccatacatataataccataaatacaatagcacaaataccatatttgtggtattgtagggacagaagagggtcaactactcaaaattccttgcaaactatttaggatgattagagtatgaggcattttaaaaatatctcaaaaggataaaaattctaaattacttgttttaacattgttgattrtaatggcttcattgcaacatactttataattattatactgttataaaatctgttgctatgacatgctaaatt

SEQ ID NO: 857945 - DNA, 624 bp, Homo sapiens
cacgagaacagcatgggggaagctgcccccatgattcaattatctccacctggtctctcccttgacacatggggattatgcagattatgggaattataattcargatgagattttgggtggggacacagctaaactgtattattccacccctgcccttcccaaatctcatgtcctcataatcttgcctttccaacagtcccccaaagcctttattcatttcaacattaacccaatagtccaagtccaaagtctcatctaagacaaggcaagtcccttctacttatgagccagtaaaacaaaaaacaagttatttccttccaagatatagtgggggtatgggcattgggtaaatacacctgttcccaatgagagacattggccaaaacaaaggggctgcaggtcccatgcaagtctgaaatccagcgaggttgtcaaatcttaaagctctgaaatgatctccttcagctccatgtctcacatccaggtcatgccgatacaagaggcgggctcccatggccttgggcagccccaccctggtggctttgcacggtacagctcttgaaactccctaacttttctccaattgtcagctactgagtggatccttcactggtttgttctct

SEQ ID NO: 857946 - DNA, 476 bp, Homo sapiens
atttgtgaaaagacttggagtaaaatgtacagaatccagggatttccccaagtctcacctgtgggctggctgttctttgctggggctccaggatgtttgaggatctggtctcagttttacagaatcaggtgcattttgtttgtttctggatctataacttgttagatcctagggatctagtttaattctattcaatgtatatcctttaagtactcactgcaaaaaatataagcatgagtggaacaatccttgctgttgaaggacgtccaatttggtggtagaaacagacgtgaaaatacagcagcctacgatgatactagtgatctaaaggaaactttcattagttcactgggaggttagagtgggtgagagacttggcacagattgraagggatgtgaaagacttcctggaagagggtttctcattactccaagccatgcatctgatctattcactggaaacagtaaatttattg

SEQ ID NO: 857947 - DNA, 532 bp, Homo sapiens
ttctctggaagagtataaactgtgacaacacaccccatatgaaatgggtaatttgaatagtcctataactattaaagaaacttaattgatagcttaaaatctcaaaaagaaatctcyagacccatatggtctcactggagaattctaccaaacctttaaagaagtctaacattaatttcacaaaatctttttcagaaaaatagaaaaaatagaaaagaaggtcccaatttattctatgaagtcactattaacctaacatcaaaaccagactattacagtacataaaaagaaaaccatacaccaatatctctcataagtacagatacacaaattattaacaaaacattaaaaatataattcagcaatatataaaaagaattatattccataaacaagtgggcttaattccagagatgcaaggctatttgaatatttgaaaatcaataaatgtattccatcatatgaaagtctggaagaaaaattacattatcacattaactgatacagaaaaataattagataaaattcacac

SEQ ID NO: 857948 - DNA, 673 bp, Homo sapiens
agaaaaggaaccctcacactggatcctgggacaccccaatatgaggtcagggagatgacaaggaacttcatgggtggaatgtcaggaaattttcattaagtcagagatttgctacttttcaatcccacatcttgccagctcccagaagtggtattgtgaaagaatgagattttatattgtgtttaatgtctaatcagttaaagtcatttacctattttatttgcaaaataatttttggcaaagaggaacatttttacatatcttcctagcaataagaatgtgttcaatgtttacaattgtttggttacttatgaccccagatgtgagattatagtaagtgattatcacaacgttgttgagacaaatcagcctcctaagacaaagacactttacattaattgaacaaaacacaatcttctgaaatagtctaacaaatgtaatgtctcaaatttaacacctgcggtctgaaggttttatgtcacagtccttgcaattattaaaacaaacctttcgatattacagaaaatctctttgtcctacttsgtatgtacacatggggaaagaaacccctctgttttatgaagacaggtaaaaagtaaatatagattcaatttaaattttgtgataactgtggatattcactagcctttcctatctatctaaacaaagggaa

SEQ ID NO: 857949 - DNA, 595 bp, Homo sapiens
tgtgcaatctaaaaagccgatggtctgaggggtgcagggccagatcccagaaggggcacaacttctgtgaaattgcttctcagttcccctgtttttaaaagaggaggtggcatctaacataaaagaatgcatgayttggccaggtgcagtggctcacacctgtaatctcagcactttgggaggccaaggcgggtggatcacctgaggtcagaagttcaagaccagcctggacaatgaggtgacacctcgtctctactaagaatacaaaaattagctgggcgtggtggcatgcacgcacctgtagccccagctactcagggggttgaggcaggaggattgcttgagcctgggaggtggaggtttcagcaagctgagactgcactactgcactccagcctgggcaacagagtgagcgagagcgagagggagaagcagaagcagaagaagaagaaaaggaaagaagaaagaagaagaagagaagagaatgcattactttactcattgtggaatctcaggtatctgctggagtaaggaggggcaggaagagggatcctcttcctcagtgtctcagctcagacagtggaagctgcctggg

SEQ ID NO: 857950 - DNA, 605 bp, Homo sapiens
gtggccccagaccctagcagctgttgccactggaagcccatcagcccactgagacctagaacagcaagccgctgagggaggagtttgctgtcattaatgtcacctccatcccagctgagcagtggtcctctgtggccagggacacaaagaggagaagaggagccctgctccatccaccactagagccggcttcggtgactagagagtgacaggaagacagaagcgagtattccatggtggagcctctacaaacacattgggtgacaactttttaagatcagcctgttgacaggagttggcccagtcccagggatgtggccatcccaagctacacacctagttatagatgttgttaggaactttattcatcttgataaagaagcaaatctttaaaaatacttcttaaattgagaggcatctaaaaacccagcttaaatgacaggagaggcggcagaccgtaaaaccttattcagtgacctaagagtggcctctgygtgagaggccagttggtagaaaggacccaggtgtctagagaaaattgagccaggaatctctgtggctaccgaaggtctcctgtgaaccctgagttctactcagactccgtc

SEQ ID NO: 857951 - DNA, 615 bp, Homo sapiens
tggcaagagtgggctctgggcctggctctcctccctgtgtctgctcagagccatgcacccactgggccttcagctcatgctgagaggaacaggggctggatgggacttgggagctttgaggcagccacggccctgctttgatctctgccctgcttggggaggctccatggctcagccaggaggggttaggaagccaaagcacggtagctaagcccctgagtcagggaacaagcctgggtcctccagcttaagcagagccagaggctgggggctgtctaccgcatccaagcaacaacagtacctgcgcttcattccctatttcggaaaaaaaacaggaagggatgatatgctctgcaaggccactttttctgaacaaggatttctctgagggtctcacctgctccactgagacacccatcagcctcatctccatactgtcctcaccctgtgtgtctccagaacatctcccacccagatctgcttcctctaacccttagaactgactgttgactgatcartcgatcaatcatcttttgagaacctttctccaagagtcagactgcaggggctgaaagcaaacttagcaatccattccaagccactccttttacttca

SEQ ID NO: 857952 - DNA, 413 bp, Homo sapiens
tgctggtaagaatgcaaaatggtacagctactgtggaaaacaatatggaaggtcctcagaagaggagagtgttaccatatgacacaacaattccactccaaggtataccctcaagagaaaaaatgtgtctacacaaaaacatgtacacaagtgttcatagcagcattcttacttccccaaaagtagaaacaaccaaacatccatccactgatgaacagataatataaaatgtgctgtatctatctgatgaaataatattcagcaatataaaggaataaactactgacggttgctgcgcatggatacatcttgaaaacagccctgmgtgaaaagagccagacacaaaaggacacatattatgtgattccatttatatgaaaaatccaaactaggcaaatctatagaaatagaaa

SEQ ID NO: 857953 - DNA, 582 bp, Homo sapiens
tttttacttttcacctgtgttatgtctggttctcccagacgtaacatctaaattcctcataacatttaaattcctcaatggctgggaatttctcttatattgttatctgctgtcctttaatgaacattttgtgtacctactacgtgcctggcactggcatagttctgaatgcagcatgggtgcccagtagttccttgagatggaatgattacttttggggctactaagatttcaaacaatatcctttctagacccaagaggctgctgataatctggactgaggcaagggtgcagccatgagagaggaaagtgagtgacacacacttggtctgcctctgacccaaaaaggctgaacccaagcccatgcaagatcccaggtatgaaagggcgataggtcatctctgtgtacatttgacttctgctgtatttacactcttattacacaccctggtcctcctggcagggwgctcccctctttgcaagtaggtgatgatgccacagacttccccctagcttcaccaacagaaacccggggcatgagggagcttactcctgttcagctgggcggtgtaggggcactca

SEQ ID NO: 857954 - DNA, 603 bp, Homo sapiens
cagacagacaataacaagtgttggtgagaatatgaagaaatcagaaccctcatatgctgctggtgggaatataaaatggtgcagcagctctggaaaacactctggcaattcctcaaaaggtttaacatagagttgccatgtgacccaggattgctactcctgggcagatacccaagataaatgaaaacctagtccacacaaaaacttgtacgctgactgacacaaagaacaacctcaccctttctagcttaagtcacaggatgcagtcatcttccagaggactcgtctcaacctgtgtagaaagagtctcaaaaatgacctcctcaggacagcaccacaacacataatgactagcaagtgtgcaatggcagagggactaattggtgactactgggattgcaacctaggagatgaccacgtggagcagaggagagatgaccatacagacccctgagtacccacctgcacccccatcagacaggcacctttcaaactcttctagacttyatggcattaaaacccagagaggtggccctagggatatggactaaaccagcagaagcctaaattgatatggtttggacgttcatttcctccaaatgc

SEQ ID NO: 857955 - DNA, 553 bp, Homo sapiens
tcactgcagcctcgacctccccaggctctggtgatcctcccacctcagcctcctgagtagctaggactacaggtgcctgccaacatgcccggctaatttttgtatytttagtatagacggggttttgccatgttggccaggttggtcttgaactcttgggctcaagtgatttgcccaccttggcctcccaaagtagctgggtttacagatatgagccaccggcacctgaccaacacttttaacagtctagaaccccttcaaatttaaggagtttttcaatctttctttcccttcaattcaagcagactcagtttgtctcatccgttgatctgtagatgggcttccatgagttacaagaaggaggctctgacaagcatgttttcaaaagttgtccaggtaattctgaggctctatgaggttgagagctgctggtcttatgtctttatatccagcagaactcctcaccccacaagtaaatgataagcacagtcagggactctcggtatggagagtcaggcaaaggggttggctttctgcccaacaggaggtcaaa

SEQ ID NO: 857956 - DNA, 598 bp, Homo sapiens
ttcattcttctgcatatggatgtccagttttcccagcaccatttattgaagagactcttctttccccagtgtaggtccttggcacttttgtcaaaaatgaattcactgtatatgtatggatttatttctgggttctctattctgttccactgtctgtgtgtctgtttttatgccagtaccatgcctttctggtttctacagctctgcagtataatttgaagtcaggtaatgtgattcctccagttttgttctttttggttaagatagttttggcttttctgggtgttttgtgatcccatatgaattataggattgttttttctatttctgtgaagaatgtcatttgtattttgatagggattgcattgaatttgtagattgctttgggtagatgaacatcttaaacaatattgattcttccaatcaatgaacatgaaatatctttccttttggtatgtgtatcctcttcagtttcttacatcaatgttttatagttttcattgtagagatcttttacctttttaattaattcccaggtrtcttattttattcataactattgtaaacataattactttcttgattttttttcagattg

SEQ ID NO: 857957 - DNA, 605 bp, Homo sapiens
ttatccataacccattgttactaacaattttaatatatagattcagttaatctttcatgctgaaaaacctgagattttatttacrtcttatatgagcaatttcattgtgtttctagataattgagtatgctcttttggctagtgggttgacaagcttgtgtgtgcatgtgtgtgtgtgtgtgtttaatgttggcacgtgtgtgtgtgtgtgtgtgtgtgtgtgtgtatcctgtagtaacacatattggccactagagggtaataagaaagcagttcatttgttcttattggctcactgttactaaatagtccttatcattagactttttgcatagtcacagtcattgcttactttcactttaatatatatttatttaacaccttctgtggagccaggcactgcactgtgtgcttgggatataaaaatgagtaagagcagttgactgagcaatagctgtagcctgtgctataagacttttctctgcttttgattcaagaacccctcatttaaaaaatactacattcatccttacctcccgtgcagtcccctccctccctctctcaatgatttcttcacagtctaaatattcctgatggattcagtt

SEQ ID NO: 857958 - DNA, 505 bp, Homo sapiens
attgccatagctttcttgggctgctgttgctgaaggaagtgtaacaggtgctgcgggtgcacagttaggtaggaaagaggctcccagccagggtgagcaggggcatgcatgttctctgtaaaagatgagagaaaatgcttttagccttgtggacctctgttgcatattttttgtttttggttgcttgtttttacaacctttgaaaacagaaaaaccatttgtagctggagctgtagaaaaccaggctctggatcaggccatagtttactgacccctgggctaaatgatctttatagccatttttggtctcagaattaatgttgaactgtaactaccatgcatttgggatagtaatgtgtgaaaaggcagaggatttaactatgaagtgtcctttttaataaaggcctcaacatatatatktaaacatatttgaaattcaattatgtgagtgtttacgtattccaccaaatttagagaaagcctttcatcttctctcttacaggag

SEQ ID NO: 857959 - DNA, 669 bp, Homo sapiens
atctgacatgtttaagaaaaagggagaaatttggtgtggctgcagtggaggatttcagagagagcacagcaacayacgaggatggggatgaaagctgggctcagatcaacaaggtccttgagtcttgctaacaaggttggattttcatttttagagatttcagagtaattgaaaatttctaagaaatttttaaaaatcttaaataacaccaatcacagaaaacttggtgatgaaaataaaaggctttattgggaatccaaatacccacattgggattcttattcaaccatttactggacgtaaacgtcaacctctctggaatttgttttatatttttctgtgggtaattaaatgaaatgttaggggaatagaaaagtaaatgagataatggatgtgaaagcactttgccaacaataacatactgcaaaaaaagaatgcatccacacactcgattttgcattgcaaactctgctaaaatggaataagaacaaaatctgttatcacaggggcagcctcctccttaagacacaaaagtccaatttataattttattttaagaaacttttggagatgcttctgtcagatgaatcataagccattgaagataagttgttcattttcagccttccattccaattgttttgaaaacatctgtgtcatcattctaca

SEQ ID NO: 857960 - DNA, 581 bp, Homo sapiens
atgcatatacacaatttttttttaagaatcctcaaccaatcttaagaaygtaaaggggtcctgagaccaaaagattaagaatcactgccgtcgaggttttaagcttggctaggacacagtctgtacttactgaagtaacccacagtatgacagtaataagacactttatgaagaacatattttcagtagctaagtgtcatagaaaaggaagcttgttagccatttcctcaagttgacaacagagagtccttaggaaaataattttttaaagccaatattgagccttccaagactgcacatggtgatatgttaaatttggaatttatgcaacttaaaaaactgagagtcgggggttggcatttttgtgcatcctaactgacgagtgctgccccagggctctctaacactgcacacagtctactaaagaagcaggctgcccatcatgacccccacccatcagctacacagcacacatctgcttctagatgaaccttcttgcaagtggcctgtcttatggcaaaatcaaggggcaggcctgtaaagcggaccaggaaatgagcagcaactgcataccaccaacc

SEQ ID NO: 857961 - DNA, 657 bp, Homo sapiens
agggcagaagagggccttccccaccaggcatgccaggagaccgtcaggtgatggtcaggcagttgttaaactgtccgtctacaataataattggtcacagctggcaccagaaaaagtggtctcccaatagacagaaacaccgaagctggtgatcagcagcttcctgatgacatctcaggacttaggtgagtgggctcaagcatgtggactaaggcaaaatggcacagtttaactgtcatctaaccttcttctaggaacacttggctggtaagggaagaacgcctcaagtgagcatgcatacaactccagtaaacactgcacatgtggcccctctcaagtgctggcagaccatggcacatgcaaacagcccaccccaagagaagaatcagggtagaaggcacacaacacccgggaagtatgccaacgcataaaacccgaagtcaaaggtcaaacagtgcacttgatctcgcaagtcgcccacttggccctcttccaagtgtactttacttccttttgttcctgctctaaaactttttaatacactttcactcctgctctaaaacttgcctcggtttctcactctgccttatgcccctcrgtcgaattctttcttctgagaaggcaagaattgaggatcctgcagaccacacagacttg

SEQ ID NO: 857962 - DNA, 591 bp, Homo sapiens
gactatgcagactccactggggtggcatgaggaaktattggtaaaatctggctgttcttgaaatcgagctccttggaagatcgtgataatcaagtgagagatcactgccccaccaaatttgagtacttacagttgatcacacgaaataaaaatgcccaattatgattactaaggaagagatcctatattgctggaattattgtctccccagagtcaagcgccagtgccagggtcagaatgagtactgaacaccagaagacttcctatccaaagtatttgctgagctactaggcatccaggtggtcaagaggacaatgagctaaactgatagtagcaatcaagcctctatctgcttactatgacagtgtgagcaagaggcagaaaaagaagtgccaaccacccccctccccgtgttccatttcccccatggagcagtgccaggtcaagatcagcatggacctgggcaataggaaactgcagaggagtgccagtctaaggtctactgcctctttatggacacagaggctggggagagaagggggacaaggatgttctttagccatggatcctgataaggaggttatggtagag

SEQ ID NO: 857963 - DNA, 652 bp, Homo sapiens
gattttaaaaagttaaatgaaaaagtcaataaaacataggctggaaaaatatctatcgagttcatgatagtgtttgcttctgggcagtaagagagggaaaggagattggagagggtacaaaggagatttcagccatatctgtatcatcagaaatagttttatttatttcatttaaaaatcagaagcaaatataacaaaatgttaacagttaattctgggtatctgtgtattagtctctgtattttcctaaattataaaaatattttttttttaagtgaagctttagatgccaggcatgatggctcacacctgtaatcctagcacttcaggaggctgaggcgggcagatcacttgaagtcaggagttccaagaccagcctggccaacatgtgaaaccccgtctctacaaaaaaattttaaaaaattactggatgttgtggtgcattcctgtctagctactcaggagtctgaggcaggagaatcacttgaacccaggagatggaggttacagtgagctgagatcacaccactgcattccagcctggtcacaggtgaaactccatctcaactaaaaaaataaaaataaataaattttttttaagtggagctttaaataagayatagaaaggcacatgtatttcatacttcattcc

SEQ ID NO: 857964 - DNA, 553 bp, Homo sapiens
tagagtgtaggcgctcttggttttatttttaaaaagacttttaccatgtagtgggatctgcaaactgatgtcatgagtagctgttaattctaggaaaaggagaccctctctcagtgtgtgtacagtagaccttagggatgcctcagactgattctgattgagtcatgtgcccacctgtggatttattgctttgacctagaaagtagtgcatttcaattggccagtctcctgggttacagccacacttccaccgtgccgtccattgttgggtggagcactggaactgacagtcctgctgttactgtgagagtgggaacatggtggtctcctaagtgaggggagactagagagatgagcaagagggaatttccacatgtgtgatagagaatgagatagtgaaaagacccttttattgtaattgggtttcagaaactctgagatacctttaatttaagcttcattgaaataacttcagtagggaggtctgaattaagtcttttckcaactaacaggagttacattatgttttatagggttcagggaaaaggatcca

SEQ ID NO: 857965 - DNA, 628 bp, Homo sapiens
tctattatttgttttttatttcattgatcttttttctcttttattatttcattttactttcagtttattattttactatttttytcacttaaattacacacttaatattaattttcaaccattccgatttcctagtataagcatgcaagactgtaaactcctcaaagttcatttttgcttatctaacatagtttaatttatagtgttttcattaactttcaaatctaagtatttttacaatttctattttgattttttctttgacttatgagttacttagacatttttaaattttcaaatgtgtctatattgttttcctttaattatcgatttcttacttgtgttgccagagaatattttatctttttagcatttttttttttttgcccttgctttatggccttgttacatagtgaatttatttagtaactgttctgtgtacacttgtgaagagtatatattctgtaattgttaagtgtctattaggtaaagcttgttatttgtgttgttctgatagtctttatatccttattaattttggtttatcctatcattaactgagagaagtgtgttgcaatattccaccattactagtttctaacagatttcctgtagttctaacaatttt

SEQ ID NO: 857966 - DNA, 535 bp, Homo sapiens
caactttctctaagtgaatttttgtcctctcatcttggaacatgagtgatcaggcttcaccaactacactttccctgtccctttgctttcctaaaaaggatattctagaaccctttcaattcatttgtattcctttgccttatttttacatttcctacggttcttaatgaaatagcagactgtgaaccagcgcatagctgtctgggcccatgtccccaatccccaggtgagaaacagtcttcagaagcaacaatttcattgttgctccattggatactattcatccatcacctttcagcaaacaggattccttctccaccgactcttcagctgatatgggtgagccttgttgatcctaacaaaagggatgtgtgtgaagaggaagcacctgacgacaaacaagcaccatctccttccccagtgtgaggaggggtgggaagggcaycgtgtgggcagagggcaccctgtgctgagccccacactgtggcagctcagctgtggaaggggccttggagtcagtgcccacctgtggctg

SEQ ID NO: 857967 - DNA, 598 bp, Homo sapiens
ctggtgaagatcaatgtagtaaaactgaggaaagaggaaaaacatgttttatagtcttktctttaacattttgcttattttgtgttatttgattcattaatattttaggcacagtaattcctgatttattagtatgtctgcttaaatgagtaaaacatggagtaataaaattttaggttcttagtttttgaaattcagagattgttacgcctgactacttactgtgcctccacagtaaccaacacagtagccccaatggctggaagcgaatttgactctttgcccatatgctataccctcagcttcttaatattgatgggtatcgcacaggtaccaactttgatttattgcaaatctgatttagagtgggtacagagagacttgaaagggctgtgtccatttatgactgaatttttgagagtttattcttcaggaagtacctctggtgccagacatttatatttttaacgatttggatgtattttgctttatgcacagggtgtggttgatatctacaatcgtttttgtgcatcaggaaataaggttattaaaatattattaaaataggtttccacaggcactttgctacatgtgacaa

SEQ ID NO: 857968 - DNA, 565 bp, Homo sapiens
ctaatatgcctggtgtctttgtgataatatggacatatggcgacagagggactgggagaatgccacgtgacaacaaaggcagaggctggcccaatgctgcaaaccaccgaagcaaggaagaagcgaggaagacttgaggaaggatcccccacaggtttcagagggagcacagccctcctgccactttaattttgaacttctaggctcaagaattgcgagacaaaattctgttgttttaaggcaccccgtttgtagtactttgctgcagaggccctgagagtccaattcagccctattagctttttcatccggggcaagtgaagatactctctactggatacagatagagatggtagaagataaagctgtgtttctcacgtcctgtgagttatgcatgcaaggtaccagttactcaactgtcctgtggactaaatctctttaagggactaagggagcttamcaggcccctggtaaggaggcctaggcccataggtggtaccaaagcaaaagggacctagcacagtggtgaaaaactccagcataccttctgggaacttgccctgca

SEQ ID NO: 857969 - DNA, 549 bp, Homo sapiens
attttgaggatccaccttctttaaacagcagagggagaaagtgtataaattgagtgacattcactggaattaggagatccrgagtggaaatttccagagaaattccaaaaatcctggtgagaagaaaggaatagccatagcaggccctgagaatacagagcttcctagccaagtcaaatccgtcccatccttctcccacctccactccccctcccctggcaccaagggggtcagcagagggagcagaaaccttcagccactccccttcctgcagaccagcagccccagccctgaccacagctggctggccttggaatgaagcttgaaggactgataaatacctgggactggacgtactagtttctgaattgagaacaagtttgtgatttaaagtgatcttggccgggcgcaaatggctcacgcctgtaatccctgccctttgggaggcttaggcgggcagatcacctgaggtcgggagattgagaccagcctggccaacatagcgaacccccgtctctactaaacatacaaaaattagccaggcatggc

SEQ ID NO: 857970 - DNA, 578 bp, Homo sapiens
aggactagggcaggagagtagatggagagagctgtgtcccgaaccaacattctygagattcctttgctagtgttttttcttcagggttcactgagaagaggaaggtcagatggggagggacaaaacccaaggaaatgaggctcatttcaaactctaacaacttgatcacaaacaaaatgtatgtagaattacaaataagttattctgttttcaggcatcaaaaatgttatcaatgaaatgttgagatgctaaagcagtgaaatgtgaaacgaagcagtgtcacaggcaactgggcctctcccctggcccatcccaggagggatgaagggtggctgatatgaactctaaggattattctgaaggggccaacaaatgttacaaagaggctcaaaaataaaaatcagaaccatttttccctcattcatccagggcctactcctggccatgttctgtgctttgcactttattcaatttaattcaatttttctcctaagcaatctatttagatactttgtagatgtggaaattggtttagggaagcttacatcattttcttgcagtcatatttctagtaaatt

SEQ ID NO: 857971 - DNA, 500 bp, Homo sapiens; identical to SEQ ID NO: 856110

SEQ ID NO: 857972 - DNA, 602 bp, Homo sapiens
aagaactacatttgccaaagagcctagggactcttgayttccctttaatgcctcacctgtgttggtaactggggattctagagtttgagtcaagttctttttttttttttttttgagacagggtctcgctctgtcgcccaggctggagtgcggtggcgcaatcttggctcactgcaagctcctcctcccaggttcacgccattctcctgcctcagcctcccgtgtagctgggactacaggcgcccaccaccacgcccggctaatttttttgtatttttaacagagacagggtttcaccatgttagccaggatggtctcgatctcctgaccttgtgatccgcccgcctcagcctcccaaagtgctgagattacaggcgtgagccaccgcgcccggcctgagttaagttctttagggttgactcgtggtaagcaaagctgccagggtgccactagtcttattgccacccaattcctaccagaattaatcctattgctcatttatttctggtattcctaggtctcatggggctatagactgtgacccctggaggggcaggggtagccaatgtacattcctctctcttccaagtttttgatataca

SEQ ID NO: 857973 - DNA, 490 bp, Homo sapiens
acattttggtgatcagaagcattctatgttgagtgtgaatgtagaaggaaaaacagtccattgtttcctaactcatacaaaggctaaggtgctgtatgtgggcagtctttgctttgcccagtccccatatggacatatttggcttaccacattttagtttaataactccagtcctccccaccagcatggttcaaacttcatttgccatggaattttaacgaattgtataaggtgcaaaccttgctgctggctctttagtccaaaaaaatgacataaataacagatgggcatcatgattaggacatcactgctttcgaagactagtggtgattggctggtcagtgccggtgtgttattcagctcatgcagacgtcagacaagtgtataggtgggttgcctcctcatctctcagtgatcaacmgatataacattttatgaaattcaatgattgggctgggcgcagtggctcacacctgcaatcccagcactt

SEQ ID NO: 857974 - DNA, 631 bp, Homo sapiens
gtaactgacttgaaaatgctctccatgctggcttcaaggcagctcatctcagcgaaagcctgggtgcgttctaagcgctagagaggaggttcaggaaaacagcgcctaagttgtcttctgtcacctctagactcgaggtccacaggtctgacttctagccccagggcccccctgatactgtataagtcgggaaacactctcatcccttgaacatagctctgggtgacatcgtccattcaataccggtcccaggtggtcaccacctgcaggaggagacccagccaccagccctcaccatgtttctgcttggaaccagcaataatcacttaagattgtgagtgacatgtggatgaaatggaaactgctaagatacctggctctttggcctagtttggtctcccagtggggtggtttcaagggtaaggatgtgcctctcccaccgtgggatgagcagagcatcaccgcagagcaatcagccctgcccaagggcagcagcccttctgaaagtggcccttcctgcacaygcccccactttagcaaactcaggcaggagggtgtgaaagggctggaaattcagagtgagcaactggaaggggagacagatggagggacaatttcccaagaggccgac

SEQ ID NO: 857975 - DNA, 617 bp, Homo sapiens
acctgccttaccgctctctgaaaactcccttaacaggtggtagttgttatttgacctgactcacagctcactctgcagaaatagctctgtttccagggcatttgttgaaaacaatcagctgtaattgtttaacatcatagttgctggataccatttggcacaaaaagaacttggccaaaaatctgaagggaagatctggggaacgagctgtccatagggggcgctgaaaagctctgatacattcttggtaatctacaccgccataagcatgtccagggccatgtgcatgcctagcaaaggtcggaaagggccccagatttcacctctgaatggcctagaaagctataaaccaatatccttcatgaatataaatgcaaaaatcctcactaaaatattaggaaaccaagtccaatgacacataaaaaagattatatgccctgaccaagtgaggtttgtcccaggaattgaaagttgttctaacatcaaaaagtcagttaagatattaatagaataaagagcaaaaacaaaaaaatatatgataaatgcmgaaaaatcattaaaaattcagcacttattcatgataaaaactctttaacaaacttggaataaaagagaat

SEQ ID NO: 857976 - DNA, 650 bp, Homo sapiens
  misc_feature 1: n = A,T,C or G
ngatgttctccctccctctgcccacctaacaggtcacaatgtgtattatacacccacccccaggtgtccatgtgttctcattgttcagctcccacttataagtgagaacatgtagtgcttggttttctgttcctgcattagtttgctgaggataacagcttccagctccatccatgtccctgcaaaggacatgatctctttcctttttatggctgcatagtattccatggtatataggtaccacattttcttgatccagtctatcactgatgggcattccttctgagacttcagttacttatacactagaccacttgatactgacccaacaatcacttacattatcttttttttccaatccttttctctctgctcagttaagatgattttttaaactgatttttcatttctacatttccccacccttttttttccccacaagtttttaggaagaaattgaagtacagtcagtggcatttatataacatttcctcatgcccccttgtaatccatccttcccttacctcattcctagagaaccagtaacagcctttctgccactacagattgatttgcattttccataawtttacatagatggaatcatattgtaagtactagttttcctgacttctttcattctgcataat

SEQ ID NO: 857977 - DNA, 369 bp, Homo sapiens
ttgctatttctcccagttctggaaggtggaaagtccaggagtatgatgctggcacctggggayggtcatggccagagggtggaaggtaaaaaagagcacacaacacaaagaaagcaaatgaaggccaatcttatattttcacagtgctccctctcctgccataatggcactaatccatttatgggggcagagacctcatgacgctgtcacctcccaaaggcccctcctcactactggtgcaatggcaataaggtttccaacatgcaaactttgggggccatattcgagccacaacaaaagacgtaaacatttgaaacgaaaaataaatgaaccaataagtatcaatgtgtaagtgataagcttgtagct

SEQ ID NO: 857978 - DNA, 642 bp, Homo sapiens
ggcagaagtaaaatgcagaattggatcttaaacatgaagttccttgggagccttttgagtaatacaagatcaaattagaaaccccacaatgaagtaacatgctgataccaagagcaagctattctagctacacacacacacacacacacacacacacacacacacacacacacgtattcctcagactacatttctagattgcaaagaaaagctacatccccatgagctgaggcccacagtgcagacgagatggaactcattccatgttggcctgtaggtttatacctggtgtgaccatgagcctagtgctgggaccctactcagaccatcaaccagggctctaggcctgcgtcttccagggagaactagcagcacccccagccttgctgtctcccaattctatgcatcaggtcattacccaggctgctttctggtccccacatgtagctcagagccctgagatcacacggatctgcccagccctgggaggaggcagtctgcccactggagacattccattccattccatacacttcaatatgttcattatagacgtgagctccaagagggtytggaacccccagactgttgttcttactgcacatggtaagtggagaaaacaaaatatccactgaaaagaca

SEQ ID NO: 857979 - DNA, 417 bp, Homo sapiens
tgctggtaagaatgcaaaatggtacagctactgtggaaaacaatatggaaggtcctcagaagaggagagtgttaccatatgacacaacaattccactccaaggtataccctcaagagaaaaaatgtgtctacacaaaaacatgtacacaagtgttcatagcagcattcttacttccccaaaagtagaaacaaccaaacatccatccactgatgaacagataatataaaatgtgctgtatctatctgatgaaataatattcagcaatataaaggaataaactactgacggttgctgcgcatggatacatcttgaaaacagccctgmgtgaaaagagccagacacaaaaggacacatattatgtgattccatttatatgaaaaatccaaactaggcaaatctatagaaatagaaagtag

SEQ ID NO: 857980 - DNA, 551 bp, Homo sapiens
actgcagcctcgacctccccaggctctggtgatcctcccacctcagcctcctgagtagctaggactacaggtgcctgccaacatgcccggctaatttttgtatytttagtatagacggggttttgccatgttggccaggttggtcttgaactcttgggctcaagtgatttgcccaccttggcctcccaaagtagctgggtttacagatatgagccaccggcacctgaccaacacttttaacagtctagaaccccttcaaatttaaggagtttttcaatctttctttcccttcaattcaagcagactcagtttgtctcatccgtttatctgtggatgggcttccatgagttacaagaaggaggctctgacaagcatgttttcaaaagttgtccaggtaattctgaggctctagaggttgagagctgctggtcttatgtctttatatccagcagaactcctcaccccacaagtaaatgataagcacagtcagggactctcggtatggagagtcaggcaaaggggttggctttctgcccaacaggaggtcaaat

SEQ ID NO: 857981 - DNA, 601 bp, Homo sapiens
cctcaccccacaagtaaatgataagcacagtcagggactctcggtatggagagtcaggcaaaggggttggctttctgcccaacaggaggtcaaatcagataaagstgataaaaatatacatgcatcaaactaattataccaagttattattctttggcaatttattttgccaaagaataacatttattgcctataatatttattgcctataataattaatgcaacagatgttgtatgtcttcagaggctaaaatgtgacctggtgttgagggcaaggtacagaagaagaagcaccgaccgagagtgacgatgttttatccgtagaggcacccactcaccaagcctagttctggtccctagtatgacacagggcaaggctgtcactcatccatcacacatttcctgatacacctctataccaggagccttgccagggctgggggataccaaatgagatagactgactcatggtagttgatatggtttggacgttcatttcctccaaatctcgtgttgaaatgtgattcctaatgttggaggtggggcctggtgggaggtgactgggtcatgggggtggatccctcatgaatgctgtagcaca

SEQ ID NO: 857982 - DNA, 480 bp, Homo sapiens
ggagtgatttagaagcaagaagctgtagtgatttgaggaaggggccataaaccaaggaatgcagacggcctatagaaactgtaaaaggaagcaaggcaatggattcttctctagagcctccagaaggaacatagccctgctgacagtctgatttttagacttctgacctccagagcagtaaaataaaaaatgttcactgggatcacttgaggccaggaatttgagactagcctgagcaacatagtgagacactgtctctaccaaaaaaaaaaaaaaattacttgggcctagtagtttccccctgtattcccagttactcaaaagggctaaggcaggaaaatttgtttgaccccaggagtttgaggctgcagtaggctatgatcatgctacgtggactctaccctgagagasagaatgaagcgctgtctcaaaaacaaaaggaaggatctccttaaaaaggagtttaaggctggatgtggt

SEQ ID NO: 857983 - DNA, 543 bp, Homo sapiens
atttccgtgatttcgaggttagcatataaggtttggatcacggcaatggctgcattgtgagccacatataaaaaaagttgtaatcaatttctttgatgtcataaagtcacagcccaccaatctaatatcaacgtaatgggatagaaattgtcaggctatagttagttactggctttaaaaaaaattaaagcatcaacaaaatctgcttctagcaagaaacatgtatattaaaagactatttggggaaaaaatgaatgtaaatccttccttgtttgagtgacttctagtagttcatatgttttctaaaacaaaagcgtgtggaaaatgaaggccattccatggaagctggtgaatatgtagggtccttataaggtctagctttctggagtttgtcattaaagtgtggttttatgattcctcccaaaaaagktgggggtaagaaaagggagaacccagaacaagggagagagaagaatggtggcaaacaggaatatggacaaactggagactgatctgtaaacttgggaggagatggtttcctta

SEQ ID NO: 857984 - DNA, 534 bp, Homo sapiens
ctcctgagtagctgggactatagatgctcaccatcacgctcagctaatgaatcctccttttaaagaaacacacacacacacacrcacacacaccactgcaccactgtaattacaatatcattgatacgattcactcactcattcccttatttctcataaacttgttgaggggctatgtacctagcacctactagtcaacatcacatgattgatagagtctggccttgaacaccagcataagaaaatagatgtgaggaggctggttaatgacaatgatgacaacaacagtgataatgacgatgatgccagtgctgagcccttactgtatgccaagcactgtgcaccaaatacacttattaatttaacttttgacacattcttatgagttattattaagccgagactgactgaggtttaacatatttgcccacagtcatgcagctaggaagaggtggaaactagcgtcaaaggtcatgctctcagccacaaggattaactgacctggctttataatgaagacatgctaccagaaac

SEQ ID NO: 857985 - DNA, 534 bp, Homo sapiens
ctcctgagtagctgggactatagatgctcaccatcacgctcagctaatgaatcctccttttaaagaaacacacacacacacacacacacacaccactgcaccactgtaattacaatatsattgatacgattcactcactcattcccttatttctcataaacttgttgaggggctatgtacctagcacctactagtcaacatcacatgattgatagagtctggccttgaacaccagcataagaaaatagatgtgaggaggctggttaatgacaatgatgacaacaacagtgataatgacgatgatgccagtgctgagcccttactgtatgccaagcactgtgcaccaaatacacttattaatttaacttttgacacattcttatgagttattattaagccgagactgactgaggtttaacatatttgcccacagtcatgcagctaggaagaggtggaaactagcgtcaaaggtcatgctctcagccacaaggattaactgacctggctttataatgaagacatgctaccagaaac

SEQ ID NO: 857986 - DNA, 612 bp, Homo sapiens
tactttacaaaaggttctttttataagatcatccgcaatacgcttgtttttgttgacctttcccacagtataatttgcaaaattataattaaattcaatcttttccaaaaatatatgtttttctttttctttctcaagactttttgtagaaactctgcaggtcagaagatttttgtatggaatgatcttctccaatcaattatttgaatctaaggtgtgctcaagaggagaatcagtttcccattcaaccacttaggattctttctctctgcgtcctaaatttggctttgagaccttggatgatgattctcctaatctggtcaatggaccacctgcaagaatcacccaggactggagcccaggaatctgctcagtcacgtgactggggtgcatgtgagctaacatttaagaactacttttgcagagtctaatatgtgtagactctaatatgtgcagagtctaatatgtgtaaactgtgtagctctctactctstcatgcactttgcatcatcttctagtcattgtgtcctggagcccagcccaaaaggcctcccaatccctgccctgctttgttttggtcaagaaggttatctctggagcacacttaccatg

SEQ ID NO: 857987 - DNA, 653 bp, Homo sapiens
ctaacaggatttgggtacttgctggtttcacactgcaattttaaaaagggggagggggtcaattgcttttggaaargggggtctcccccaatattatccagttgcacagtaagttactattactcttatggtcactaggaacaaacacaggcatactttgcagaaatcagcaaaattaaccaggccctaagcaacttcttatttgttgggttcagcaatggatcatcaagagaggcaggaagaaaagtgaaactagagggtaccaccaagatgtttcctggctagagttatttcagaacactatcatttccaccagagagctttaaaacatttgcgtttctcctatgaatcaggctgtatggcaacaaaacagataaacagaaaaagtacattattagcataaaacagtattagcataaatagaaagggaaccaggatattcggaggggtgggagaaaacagcttgtataatatgtggcctactcatttcagtcgacttcactgtagctgataaactgtgaaatttccataataatatagagtacagaaagcaaacaacaattttatttgatagggaaattgcatcctgatactggatataaaattctacagcatgttcaatgatattttcaaagcattgaaaatatagacat

SEQ ID NO: 857988 - DNA, 601 bp, Homo sapiens
atcagttatcagcaacattttctagttatggaggccagaggatcacttgatgtcagcaaggtagctcatctaatctacttgccccctttctaatcaaatattcyatctggaagaaaagaaattttcagtttcacgtaagctgatcataattgggagcaaacgcttctttcccttcttctatgctatctcctcttgtgcagtctattttgcatccaaagatacatttgaaagtcgaaatcccttaaagcgaaatattctaaactgacagaagaatttctagtggcacagcagcctagagccatgtttttatgaggacatcactttctatttccaagcttcaccatgcactcttgctttcttagtgctgggagccatgccacatcaacttgcctccctctcagcttttaatgtttttttaatggagtccagttttccacctaagttatagctagctttctgacaaaccatcagacacctaagtgaccataatggaagtgtccagatgtgacatgggaaaaggctatggctcactttcgtgcctttaaacaaaaccatattataaccattcatttttacttggcctctgggtttgctgtaaagg

SEQ ID NO: 857989 - DNA, 419 bp, Homo sapiens
tgctggtaagaatgcaaaatggtacagctactgtggaaaacaatatggaaggtcctcagaagaggagagtgttaccatatgacacaacaattccactccaaggtataccctcaagagaaaaaatgtgtctacacaaaaacatgtacacaagtgttcatagcagcattcttacttccccaaaagtagaaacaaccaaacatccatccactgatgaacagataatataaaatgtgctgtatctatctgatgaaataatattcagcaatataaaggaataaactactgacggttgctgcgcatggatacatcttgaaaacagccctgmgtgaaaagagccagacacaaaaggacacatattatgtgattccatttatatgaaaaatccaaactaggcaaatctatagaaatagaaagtaggt

SEQ ID NO: 857990 - DNA, 655 bp, Homo sapiens
agctcctccctttcttccaatatgggatccccctcccacattttgcaaatgccccagcgctggtttgcgcatcccttccccagccaggtgcacacctctgcctcccttccttgcactggcatcttttcgcatccatctgatctctcgcaggtttgcaatatagcccgaccccatgactcgcagaaagacccctggagatgcatgctccccagcctggtttgcacatcctttccctggttttgctgggcaccctcccggggtgtgcacaccctttccttagaaggctctgccagctttttgcacacctgcctgttgccccagctccttcgcctcatttgcacaccctcctgggttggcatcgcccccaccccccaagcctgcaccaatctcccgctcacagcccaccctccacccactcgctgctcccacagcctacggcaaggtgttcctggtgcggaaggcgggcgggcacgacgcggggaagctgtacgccatgaaggtgctgcgcaaggcggcgctggtgcagcgcgccaagacgcargagcacacgcgcaccgagcgctcggtgctggagctggtgcgccaggcgcccttcctggtcacgctgcactacgctttccagacggatgccaagctgcacctcatcctgggtgag

SEQ ID NO: 857991 - DNA, 621 bp, Homo sapiens
ctggaatgaccaggccacccaggagtaggagtgggccayactctatccagggtcagggtcagggcgcttacatttctgtggaggggggcaggtgagcagcttgtcaacattgtttgtaaactggcagttaatagccctagagtgggctttctatgagcaaagtgcacaagagttttaatacacggactgtaaatattttacgtttgttgaatcaatgaagggattaataaaccctaagggccttcatgacctacttctcagttctgtgttcatttgtgttctagagaaaaaggcagcctgcttgctagttttgttctggatagaaaaggcatgactcaggcatgtgtgtacacatgcacccatgtgtgaattcaccacctttgcctggtgaaaggggtaaacaggggctctggaagcagtgggccagcaggtctgcattctccagtgcccaggatacatggtgaagagggaggagcccctggtctgggatcatcgtacctaagacagagcctggtttggttatggacctgctgtgtgtgtgtcaggagggcaggtctgaacctctctggacctgtgtttcccattctctgaaagagctcctgctaagagaggcagagaagg

SEQ ID NO: 857992 - DNA, 647 bp, Homo sapiens
atgcactccccgttccagactcctccacaatcctcagtacaactgagccacaagtcatgggggagcattttctcagctggggttggcagagcscagccagggattctgagccaaattccagttcaaatagacgggttatcccagcccagctccttactgacccccaagcttgggccaggaaagaaattctgggcccctgggtaagaggggtagggtggggacgcctagagaccggaggagaggcaggctgcttgggatagagctctggctgaagaggacgggacctgccctggcctccccctcactccttttatggccctaggcaaaagccactcaaccttccctttctggacctcgagtttcctcttctgtgaaatgggaagaggaaatggtgtcttttggagatggattcctgtggaagtgcccagagctgtcccctgaaaagatgcaagtctggccgcagggtccctgcagcatggagccagtttacagccacgtctgcgcctgggctctcggcagtgtctgggtgggcatggagctctgggcgtctggccgagaaaggtggggcctgctctgggagtgaaagtggacccgcccagcagtggttaggcagaggaggacatacttcctgtaataagacggatcct

SEQ ID NO: 857993 - DNA, 609 bp, Homo sapiens
agtactcaaggcaccactattaagatcctggcaacgcaagtacaggaatcaggagggaaytgagggccctttacaggacttgccatgcatattttgccactaacaaataagagcaaacatgacaatcttttgcctttcttcatggggacaatacactaagggaatctgatcatttaaaaacaagaggcggggcacggtggctcatgccttaatcccagcactttgggaggccaaggcgggtagatcatgagcttaagagttcgagaccagcctgcaatatggtgaaatgctgtctctactaaaaatacaaaatttagccgggcatggtggcaggcgcctgtagtcccagctacttgggaggctgaggaaggagaatcgcttgaacctgggaggtggaggttgcagtgagccgagatcgtaccactgcactccagcctgggcaacacagcaagactctgtctcaaaaaataataataataaataaaatatttttaaaaataaaaactacaaaaaaagcttaaagaaaaattagctataaatctaaataaaacataattcatggccaagtaataaagtcataatatagtcaatgaagattataacttataa

SEQ ID NO: 857994 - DNA, 590 bp, Homo sapiens
tgccatgttgcccaggcttgtctcaaactcgtgggctcaagtgatcctcccgcctcagcctcccaaagtgctgggattacatgtgtgagccactgcgccaggtgcaatgaatcttataagtggctattgcctttgctagcatcttggaatctttgtctttgggactgttacaagattcgggatgtgaggcttatacccgctgtggtcttgtttccccgcacctaggctgttgcctgggtgggccagagaagagctctagactgccgtgcggtctcctatgggaactctctgtagagaaatgctggaggccctcccgcagacgcactctttcctgtccctgcatccttctaggcaaagccagtgccatttatgtcctatttgggtcttgtgagtctaacatctggttgagccaaagaagacccccagagggggcactgcaggagataataccaatatcttcctccccaggatgaaaggtttaaatgagataatatacactgagttgctgtcagaggacrtgacaagtgtcagctcccttctctccatcccaaaaaagaatacctggttttggggtcttctcgttttttcct

SEQ ID NO: 857995 - DNA, 639 bp, Homo sapiens
gccagtagtggaggaccggggagaagggggcacaccagtggaccactgcgcggccctcttcggccagcaatgcgcacttctcccatgcgcggcgggtcgggcggctgggcggggctggagagtcctgggcacaggcaggccgccggcccgaccctctgtagctccttgcagggcacctgcaggtgtcggcagtggtcgtagtcgcaggggacagccggcaaaggcggccacgccgtctcagtctcatctgactcctcttcttcaaagtcttgaggggccaagggctgagctctgggaaccaagaaggtcacggccaggagccacagaaggcagggagagcccagcatggagactggaagggaaggggtggatagataaagcctgttcagcccaaaagcctgccatgccctctgcctggacacaatctctggagacaggaaaatgcaactggggatcagaagaggaaagaagttggaatgaggcagacacactcatttgtcaaccaacttctgagtccaggctgtgtgcttggtttcagacaaaaaataaaacrtgatctgacacatgagacagatgcatgatcagcatgtgttaagtattagaaacagttaatgaataaacaaagtgctgagggagaga

SEQ ID NO: 857996 - DNA, 582 bp, Homo sapiens
cagttataaatgaagtgagagggactggaggtttgaaagtacagtattataaatatatttgatgacttatggtacagaaatctactgcattttaaayacagatttaactgtcaatgaagtgaaaaaacaaggcagcaagatgcattacttactctcttagaaccgcataccatattggcagtggcaacaaaccatatacataatatgtccaggtacaggcttgaatcagcagaaaaaatgctactaaaatgccaatagctacaaaactacaaggcaggagatggcttggtttctgaaaaatcaaacaaaacattgaaacacttccaaaccaatggtaattgataggttttaaaagagattttataaagtaaagaaaacctattactttctttcaatggttatactactagatgattaatcaaagagctgcattaagacaaggaaaaaaatctattatttgaggagcatattagagaggaaaaacctagataacctggaattgctgcaattaagcaattctcaacttaaaagtgactatggccttaaagtttgtttgcaagtaacttgttcagaattctgaac

SEQ ID NO: 857997 - DNA, 617 bp, Homo sapiens
aactcatgagcaatggatttctcctaataccctctgggtggttagttgcaaccttttcttggacagcactaaatctgagggtatcttcagtgtgacgggaaggaggcaggaagaaagsactctaagttttggagagaaattgggcttttcgtgaagtgctagagcatcagccctggccatggccatggttcctaagatgcggaaaagtgcttattttcccaactgtctcaaatgttggttttcaaatattttgctaatttctttggtaacctaaatattttccctcacatttaaatttgcatcttatgtttcttatcacaagttaaaatagttgtaaagggcaaattttgcaatgttacatattgacattatgaaccacaattattttatcttattgacatatatgccatagataataaatgccaatgtcattcaataccattttatttccaataccagagtccttgtaaaatttacagaaaaaaatctcttcttcagcagtcagaaagtttacattgttgcattttcctttttgaattcctaatggcattttatcttccccacaatatcacatcataatataatatgcttttatttttgaaaatattttactgacc

SEQ ID NO: 857998 - DNA, 560 bp, Homo sapiens
aaactgttaccagttttggggtgtaatcacttatgctgtgctgaaatgtgtcacttaaccacactgtatcaygaattacaaccttgtgtcatttaagaggttattcatatgacaaattaacacatttgtcacagatcccaaaatttaaagtctgaattggaatttggttttaaaatgcttttttgatagaatatttgattccaaaaagcagaaattgaatcaaactcaatttagatagtattttaaaatatataaaaattagttttaaactagtgtggcaagttttatcctgtgacaactacattcaaacagaagagattatgagactaaaccaaatagtaatcaaactaaactatgacttctagaatcttttataaaataaagtttcatgttagtgcctaaattttgaatgctgaagtctgtgttgatcaataagttttagaaaaataaaaatggactggaatgaatgaagatagttatgctaaggataaaataatctaataatataattttactcaccttgtcaccaaagggcatatgtccctagacataatcctgag

SEQ ID NO: 857999 - DNA, 579 bp, Homo sapiens
gaaaattgactatccacaatttatactgtacaaggagctgtaataatgtcctgggctgtgagattcaagtggatatttttcttttggtttcccatcccaaaatactccagtcatcatccccagtggtaagttattcttcattctgtggcttattctcaaaatgtgggttttctttacattcttatgctgcccctctccattgcctcagaaccatatcctatcagtagatttttccattctgaaagctgcctacattacaagtcttatccagtgggtattaatgtggaaataatgaagatgtcacatttttagaaatgtttcatagcctctcaccttcatgtttctttaaaagtgttaagaagttatattttaatgcagtgaccttaactgataagaattattccctctaagactaccaaaatacaattttttttagcatttcattttctacaacttgaaaaaattatatttctaccaaaagttgcatttcaacaacaacaacaaaaatactcaatacctactccaattatacaaaytcacttttggttaaaaaacataactgctggaattatcatcttg

SEQ ID NO: 858000 - DNA, 473 bp, Homo sapiens
agattacatgaaatttgatgagaatgctctttgttacattttagttyttcttcatctagctaaagtatctcagtgtgtacttccagttgaaaacttactcatatatttgtttgcccatagtttgttttatatttctaacaataaggtgagaaaaagatagtaggacatctgggtacatttataagatgtgtctattgtcagatttgttctagaattattggaagcaagataaatgtaaatattctgagaaataaccaaatttcagactgtggattgcttttgtagaagacagtttaatttccccagggatgaaaccttaaatttcatgtctgggcaatgggaaggagatagacatgaggcaggcaaacctctgtgcatgaagatggagaatgacagcatacagtcatatgtgtagacttaattaattctcctcttttcagttctgatgaagttccacccctctttgtaccttg

SEQ ID NO: 858001 - DNA, 473 bp, Homo sapiens
agattacatgaaatttgatgagaatgctctttgttacattttagtttttcttcatctagctaaagtatctcagtgtgtacttccagttgaaaacttmctcatatatttgtttgcccatagtttgttttatatttctaacaataaggtgagaaaaagatagtaggacatctgggtacatttataagatgtgtctattgtcagatttgttctagaattattggaagcaagataaatgtaaatattctgagaaataaccaaatttcagactgtggattgcttttgtagaagacagtttaatttccccagggatgaaaccttaaatttcatgtctgggcaatgggaaggagatagacatgaggcaggcaaacctctgtgcatgaagatggagaatgacagcatacagtcatatgtgtagacttaattaattctcctcttttcagttctgatgaagttccacccctctttgtaccttg

SEQ ID NO: 858002 - DNA, 536 bp, Homo sapiens
caacaattgcttctgttcattatgtttttgttttcttttaaataacgctgaagttgtgtcttttaatgcagggtgcttggtcactatgtggcaaagcagttttgttggtttcatgrcttccttggataactggtcaccacacattgtacagagtggtcttggagaatgtgaactatctgttgcaatgaacctgtaatttaagtaggactcttggtattctctttaaatgcagctttctttttgttggcaatcttagggtcttctgctgtctcatcattgggtctttaacccttttcaaagaagctctccgatgacatttgatttttactcattttggctaggcttagcttgtgggcttaccaaaactgtgactgagacaagtgtgcagtgtgggaaagacgcattgatggaagtaaataaaataatgggtgtgtcacatgcggactaaaataagtggcggattttgacttaaagcctgccaccacatgcagctgtacaactgaagtacattaactcacttgccactacaaagcctg

SEQ ID NO: 858003 - DNA, 536 bp, Homo sapiens
caacaattgcttctgttcattatgtttttgttttcttttaaataacgctgaagttgtgtcttttaatgcagggtgcttggtcactatgtggcaaagcagttttgttggtttcatgacttccttggataactggtcaccacacattgtacagagtggtcttggagaatgtgaactatctgttgcaatgaacctgtaatttaagtaggactcttggtattctctttaaatgcagctttctttttgttggcaatcttagggtcttctgctgtctcatcattgggtctttaacccttttcaaagaagctctccgatgacatttgatttttactcattttggctaggcttagcttgtgggcttaccaaaactgtgactgagacaagtgtgcagtgtgggaaagacgcattgatggaagtaaataaaataatgggtgtgycacatgcggactaaaataagtggcggattttgacttaaagcctgccaccacatgcagctgtacaactgaagtacattaactcacttgccactacaaagcctg

SEQ ID NO: 858004 - DNA, 559 bp, Homo sapiens
tattcatagattgcagaaattaggacatagacatcttgtggggagggtatattatctggctactatacatggcttctagtttttaacagactatgaactcactgtatgaaagctagggtcttgcagatactatatttctacagtgttagcatagtggatcaataaacagttgttaaataagtgtaggtggctaatatcacctagtagaaatcaaggtcttctgtgcattcactttaagaatattaacatgagttatactcaagtagttgtaatggcatgcaaattataaaatataataggaaaaatgttttggtctagacaaagaacactatgggttgtttataattccttgatttagttttcaaataattaaataaaaataagcctcaaattgtctgcaaattgttatgaaaggaaatgtttaggagaataaatagactcgtcaatattttcttaggaaaaatatacagggctttagtaatttgaaaagcatgtttcttraatacaataatgagttaaatgttagtcagagatttcagaagattttaccaagaagccc

SEQ ID NO: 858005 - DNA, 568 bp, Homo sapiens
aaaacaaactatataaaaaatgggctttatgtaatttgaatcatttttccatttaaattaatgcatgtagtgttcttgcagtgaaaaaatgtgatawcctatttttattgtaatgaatggtaactcttaatcaagtgggccaggcaacaacacaggatctttttaattctagcgagttaaaaggaaaattgatacagattgcataatttgataattgcacacaatttctgcaagaccttgtaaatgagtatttggctgttacaggtctcagttttcctttcatcaaaactcttaagaatttgctttcctgaaaagagagcagactacttcctaaagtaggatctatttgattgaaacacggtaattttcagaacaaataaacttttgattcaagttccccaaagatcattttggtggatatattttataatactacaattgtcttttcaagtttattcagctcctatgtatagtttccttatcacagactgtctctccaattacacattccatcataacaaaagtccacttgatgatgtggctgatgcccatttagagccttgagtca

SEQ ID NO: 858006 - DNA, 593 bp, Homo sapiens
tcctcaagatctgacctcacctcccttgattgattctaaaccaattatgaggttcaagtctcagcatgtcctcactggggaaattctgtttctgtctggggaaaaaataaagattattagcagaacctgagaatggatcttgtgggtgctatatgcattcaaaaccagcatctctagcagattcactgagagccattattttcttgaagtttcaaggaaacctcccagtagtttaatagtagtttattattagtgcttacgtacttcaggtgtccttgcttaattcaatcctgagtcacaagcaagttccccaacatcaaaaatatcttactgatgcctatattttgtccccaccacccctgtatcccagcctggtaactgcctttatatctaggttttgctattaatagtaattctgttactatcaagttgagttcagaaataggaaaatagaactagtcatactttctcacgccraacacatagtttattatattcacacacagttttctccttttgccccacaaaacaatgttacgttcaaagttcaatgaggcattcctcataaaatttagatagctggcatgacaatt

SEQ ID NO: 858007 - DNA, 549 bp, Homo sapiens
ccgttctgatgtgcttgtggtttcttttctcatgcccaatttcctaaaaggtggtcatttcttcccaactttttcatacactgttcccycacctggacaattcttttgaatcatttcagacctccctcaggtaccaccccacctccaggtgctcagcaactagttatatgtcattacatgagtatatgctctctgagaaatgtgttatgaggcaatgtcatcattgtgccagcatcatagtgcacttacacaatcctagatggtacagcctactacacacctaggctctctggcatggcctattgctcccaggttacaagcctgtacaacatgttactgtactgaatactgtaggccattataacacaatggtatttgtgtatctaaacatagaaaaggtacagtaaaatgtggtatacaatataaaaaacagtacacctgtatagggcacttaccatgaatggagcttgcaggactggaagttgctctgggtgagtcagtgagtgagtggtgagtgaatgtgaaggcctaggacattattacacatta

SEQ ID NO: 858008 - DNA, 613 bp, Homo sapiens
aagaacacataagttgccttgagaaaaagaaggagcttattacagaacatccctaggtaaatgacatttctacctttcaaatcaggaatgaccaacaagtcttccagatataaaattagaggcattaaagaaatmagagaaaatgaaatcttatattccctgttcaaaatgacaacaactcttttcaattacccataatttaaaccattttcctattatacaactacagcattcataggtgagaaagtggacagaatgaacaagaaaaaattatctcattgccctccaacttctcataagtggatcagaattaattttcattatcatgaaaagcctgggcatcagggcactggaaagtctacacaaaattatcaacatgattaagatttcataactttataagtacaactcattttcagagataaaacctcatgtttaaaataactctttgttgttgtttgagacagggtctcactctgtcaccaggctggagtgcagtggtgtgatcatagctcactgtagcctcgaactcttggactcaagctatcctcctgcctcagcctcccacgtagaagggactatagacatgtaccaccatgcctagctaatgttt

SEQ ID NO: 858009 - DNA, 622 bp, Homo sapiens
gaggtttcaggcctcctgagtgagagctcccagggggaggaccagactgtcatctttgctgtttggatgactcagccagttcagtcttagagtttcagagtgtctgaggagaccaggggctgaaktgaaccccccgcacagcatagccactctacaaaaacgtggccagacttcttttttaaacaagtccctattcctgttcctccttactaggcaagacttctcaacttgcttccagtcacatcctacaggtgtgttcagattggcaacaggttcatacctcagaggtacagagctcccagagggaagggcaggttatcgtctttgctttttcgcaggcttcactgctgataccttcagccactggaaaatacgaggcaattggcgactggagtggacccccagcataccacggcagccccacagaaaagtggccagactgttatgtgggtgcccatttccatatctcctcgatgggcaggtcttcctggcctgggtctccagccagccccccacttgagctttcaagccagtagcaactcagcaactccctggacagagcttccaggagcaacagaaatcctctctgccactgcctctgcagtggaactgcccttgctac

SEQ ID NO: 858010 - DNA, 385 bp, Homo sapiens
ttcccctctgcttttgttggcaagagcaggtcggtgtcccaggcttagaatccatttttctctctttctctccatctgtctctctgtctccgtctctgtctttgtctctscctctctctctctttttttgacagagccttgctttgtcgcccaggttgcagtgatgcgatctcggctcactgcaagctccgcctcccgggttcacgccattctcctgcctcccgagtagctgggactacaggcgcccaccaccatgcccgctagtattttgtatttttagtagagatgaggtttcaccgtgttagccaggatggtctttatctcctgaccttatgatccgcccgcctcagcctcccaaagtgctgggattacaggcgtgagccac

SEQ ID NO: 858011 - DNA, 482 bp, Homo sapiens
ctccccaacccggccaggaccccttggcctcactggaacgcacagacggcacccagcaggtaggcatgttctcaggggtggccagcaagggctctctcagggtacagctgggagaagcggccgagggcccagatggggaagatgttcctgtagctcgtgtaggagatggcacaggacttgttgaagaccccagcaatgttttcctaaaagaacacagagaaataaacacaaaggcttcaccagtcagctgagggctagtccctgaactggagccctggctgttggcttggctggcttgtgggtgagtcagcctggaaagggctaattaagcaagagcataggaaagcaagtagtccatcccgcrtcagtcatggcaccatcagcccagctcagactccccgccctgcagcaaaccctaagccagggtcaccagcccctcacaaccacatcagcttccaccaactcagcctcatcccagggga

SEQ ID NO: 858012 - DNA, 482 bp, Homo sapiens
ctccccaacccggccaggaccccttggcctcactggaacgcacagacggcacccagcaggtaggcatgttctcaggggtggccagcaagggctctctcagggtacagctgggagaagcggccgagggcccagatggggaagatgttcctgtagctcgtgtaggagatggcacaggacttgttgaagaccccagcaatgttttcctaaaagaacacagagaaataaacacaaaggcttcaccagtcagctgagggctagtccctgaactggagccctggctgttggcttggctggcttgtgggtgagtcagcctggaaagggctaattaagcaagagcataggaaagcaagtagtccatcccgcatcagtcatggcaccatcagcccagctcagactccccgccctgcagcaraccctaagccagggtcaccagcccctcacaaccacatcagcttccaccaactcagcctcatcccagggga

SEQ ID NO: 858013 - DNA, 324 bp, Homo sapiens
ctcacacttgcttgctggccaggataagacaccaagaaggatccagggctcagcgggcccagctcaactgtgggtccctgactgtcctgccctcaggggtcccccagaccctgctgctcctgctcaagcagacctgccctagcttttagggttttaggaagattccccaaatggccacaaacctaatagggcagcacagacgggatgttgcgggtgcatctgtatgtatgtgtgcacaggtgcctgtgcatgtgtacrtgtgtgcatagacctgtatgtacatctgtctccatgtacgtatgtctgtgtggcacagatgcgata

SEQ ID NO: 858014 - DNA, 324 bp, Homo sapiens
ctcacacttgcttgctggccaggataagacaccaagaaggatccagggctcagcgggcccagctcaactgtgggtccctgactgtcctgccctcaggggtcccccagaccctgctgctcctgctcaagcagacctgccctagcttttagggttttaggaagattccccaaatggccacaaacctaatagggcagcacagacgggatgttgcgggtgcatctgtatgtatgtgtgcacaggtgcctgtgcatgtgtacatgtgygcatagacctgtatgtacatctgtctccatgtacgtatgtctgtgtggcacagatgcgata

SEQ ID NO: 858015 - DNA, 533 bp, Homo sapiens
gtatgtctgtgtggcacagatgcgatactgcgggtgcatctgcatatgtgtgcacaggtgcctgtgcatgtgtacatgtgtgcatagacctgtgtgtgcatctgtctccatgtacgtatgtctgtgtgtggcacagatgggatactgcgggtgcatctgcatgtgtgtacacaggtgcctgtgcatgtgtacatgtgtgcatagacctgtgtgtacatctgtctccatgtacgtatgtctgtgtgtggcacagatgggatactgcgggtgcatctgcatatgtgtgcacaggtgcctgtgcatgtgtacatgtgtgcatagacctgtatgtgcatctgtctccatgtacgtatgtctgtgtatggcacagatgggatactgcgggtgcatctgcatgtgtgtacacaggtgcctgtgcatgtgtacatgtgtgcatagacctgtatgtgcatctgtctccatgtacgtatgtctgtgtgtggcacagatgggatactgygggtgcatctgcatgtgtgtacacaggtgcctgt

SEQ ID NO: 858016 - DNA, 612 bp, Homo sapiens
cgtgctgatgccacgaccgagggaacgggtctccctgtcggcgtgaactgaccyggccaggcgtccactgccactcggactgtctcccaggcacgtggcgcccacacgggcagaacacgccctccacacacgcggcttcgggcagaacacgaggcgccctccacacacgcggcttcggggcttgtcatgaaaaaagctgaatgctgggggtgcagctttcaccaacagaatcccgtttggaagggacgcggtgagacatgatccaccctaagttgtgatcctgggtgagccgccgtccacaccctgctgagggtcccttcacccactttattctccagaaaaccctgcccatcagggctgagtcccacgccttccctctccgtccaggcctggctttgacctctggggtcgtgtggggcacaggggacaccctatccaggcagaggccctacggctatctggaggaagtggtgggagctgggcttctgcctggaggatgcacccagaggggtcacagtccacacagagacacacgggtgccttccagatggctgagccagtccagcccagaagggcctgggggttgggggctgcacctggcctgtccccacc

SEQ ID NO: 858017 - DNA, 572 bp, Homo sapiens
ttttcaacgcattttttatgctacgattatggaagcatgtggaggggttgtttccattccatccaaggtcagtttgcctgtgcggttccctgacscccgcccgagggagacctccgggttggtgaaatgactgagcacaggtgtcctcccaccctccgcgctggctggtccgccagcactttctgcagagacagcttctagatggcagcgctccccacacaggttgcagaccatgtccctctccttctcgcagctccaggtggtgatgcctcaggccctgcaggctggggaccacatcttgagtgagggtgcggtgtcgcctcagggacatgagttaaactgtgagagacgccccctcacacccctaaaaggctgaagctggactggcagcaccagcgccggtagtctgcaaggatgtggggtgactgcagccctcttgcgggctgtggggtgcagctgctttagaatctcccctccgtttctcaaagcccagtacgcacttgcccacctcagccaagctcctgagcgtttgcccagataggtgaaacacagaactcatgcgcaagtccgga

SEQ ID NO: 858018 - DNA, 580 bp, Homo sapiens
atttctgatggcacaaggtgtgtggggagagagccacaggctacttctctcctatgccctgggattcagctagccttatttatcaytttcttctcaatgttatttaaatagtcataggtatttaaaactgggctgtgagctacagatattcagatctatagaatttttctctgggagctcgtattacagattacattgcagaaagaacaatggattcaaaatcaagaaacgtatattctgatttcaaaaccaccctctatttctaagttttctcatctataaaatgtggctactgagggtgatgagagtaatagttgtgatgaaggcagtgatgatgataccaaaacagcactattgatgcatcttctgagcattttacaattattatttcctcatttaatctacacagcaatcctaggaggaatgtactatcattgttcccattttaggaatagcaaaaaccaggcacagggaggtaaagaaacttgtcaaggtcacatggctattaagtcaaaccagatagcctgactcttcacctggttctcttaaccacaatgctaccctgcccctgtggtgcaga

SEQ ID NO: 858019 - DNA, 449 bp, Homo sapiens
acacactttatgaaatgagaaaggagctgaaagataattcaagagaagggtatgaaactgaagaatgccttgtcatcaaagggcaggaagtaccttagctgggttatcccagtctggcacctggtcctcagtcttcaagttcagaaactcaggtcatcatttcctaggaactgggtggattctgggagattgcctcacaccaaccaaactcacaagagattcagtaataagccagagtgccattttttttccttcacaatggaaaatgaacctgatactgcagtttatcttaacagagcacacctacactatggggaagtctacttaagagaccaaatgatagatcagagggttgtctggtaaacttagattcccaagtcagctggaaacatayctagagataatctcttagggtagaatagttgcctgtgagaagtttgcccaaagta

SEQ ID NO: 858020 - DNA, 352 bp, Homo sapiens
taaatacactcttgtagcacaaaatgtaaacaacatggggatcctgacttcttttatagaakaagtctatgctctttttgaggccttctccttgaataactgactgttggaaaccccaggaaattctgacatgaggcaagagtctgtcttcctccctgatcacttgctgcatcattccgtccagtgttcacctctgtacccactagtacacctcccacatcagtgcccactgcatgtaggtgaagaacctatgggatggatggatggactggttagtagatggatagatgggtagataagtgggtgcctgagtgtgtggatggatgtgtgagtagataagtggatgcggata

SEQ ID NO: 858021 - DNA, 596 bp, Homo sapiens
tagtattgtccctacacacacacacacacgtatccagtacagatacaaccccataggtatagacagcatgtactgaggcagatacatatatgggaataaatgccatctggccacttgcctggggccaaagccattgcttccagttcactttcctcctcatgctccattcaatcaagaagtactacagattgggccccttgctgcattcctggcatagatctagatccacacagtacaggcccaaggcaggacagcaagacccaaagcaggaagaaaattgtggggagaggaagcaggagaacagtctgggtaccctggcgacatttgcctgagaagggaggaggctggtaaggggagagaaggtgataggggattctgggagctatagcagagccaggaggccccctccccccgactgccctgctgctcaaaggcccagggtatgcagggcagcctgtgcccagcctttgagccaggtgagtcagcctgacttctgaatattcaccactgcagcagttccaccattcccyacagcccactctgcacacagcagccagaatggtctttcaaaatctgatcttatcactccctgctca

SEQ ID NO: 858022 - DNA, 529 bp, Homo sapiens
gctaaagtccccaaattctgctcctgtttcttgtaaactcctcccaaagtcttgcctatacrccaagtgctctcctattctgagtcaaagaggaatgggtgctcaaaggcctccaaattagtcaccaacctcagtaatcctaatgccaaaatataagagaaagaggaatatctggtctataagttcctatgtcttactacctctgaagaagtccaacttcctttttcctgctttatttttcaggatcaatgacatgctaaaacaaactatgcattcctctaaagaaaagtatagaaaaggaaaaaagatctcccctactaatggaaatttagatttatctattgttggaactcacctcccagaagcttccatttggcactggaacgaaaggcctccatctgctttacctcttctggccgctcatccacaaactctgccacctgtgagagtaaagatttcctatcttaggaaatccacaggatccagccaagaagcactgtctcaagaacctgaagttacaaccattccg

SEQ ID NO: 858023 - DNA, 604 bp, Homo sapiens
tgatggctgctgactaatcatggcagtagttgctgaaggctggggtagctgtggcaagttcttaaaataagacaaggaactttgccacattgattgactcttcctttaacaaaagagttctctgtakcatgtggtgctgattgatagcattttacccacaatagaacatccttcaaaattggactcaatcctctgaaatcctgtccctgctttactaagtttatgtaattctctaaatccttagttctcatttcaacagttttcacagtatcttcactgggactgaattccatctcaagaaaccactttgtttgctcattcacaagaagcaactccttatccattcaagttttatcatgacattgtagcaatttagtcacatctttagaccccacttttaattctagttttcttcctatttccataacacatgcagtcatttccttcattgaagtcttgaatccctcaaagtcatctataagggttggagttaacttcttctgaactcctgttaataacgatattttaacatttgcccgtgaatcacagatgttcttaatggtatctagaatgatgaatccttttagaaggtttccaatttaca

SEQ ID NO: 858024 - DNA, 606 bp, Homo sapiens
acttataggaagctgatgacagagattatttatttccctcggttggcccaagttttcacactcacatcaattttagagttgttactagactaatgacccaattcagtcagaagcttatgatatttttttgtcatccgttttgtgatcatgaagaggatgaaatgttaatagttctgacatttgttttttcatatcttttaatacactgctaaagaaaaaattctcactaatattatagagacttcttttacactgttttctattcaaaataagtgagaaattcagtaacattttttaataacatttttctcctaaattcccagaatgtcaccactaggaaaaagacatcttaggtaaatataagacaaatttgttaaacttcaactggaccttcggtacttctattgagttttttccacagtagatgctagacacctatctcacatgctttcttcttcttggcagataatctggtgtattagttaaggttcttcagagaaagagaaccaatatgatgtatatgtatgtgtttttaatacacagatctgtatatatgtgtacctgtatgtacatatgcrtgtgtgtgtgtgtgtgtgtgtgtgtgtg

SEQ ID NO: 858025 - DNA, 605 bp, Homo sapiens
atttttttctgattcagtcttcaaaacaagactgtgaggtacatattgtatccctttatagttaaataacctgatgtttatgcttaagattaagcaactactaaactgcaragccatgtctttctgcgtacttccatgtctcacagatattttcattgtgttatcttccatgctaatgttagttttacttgctgattgcatttggactatactaatcctgcttctagttttagacttcatacttttcatgttctatattctcatatctgttctgaatgtcagctttagttacttggctacatttttgataggcttctagaatacagatgtgtctttagccaccctctgctccagtttcaaagtgttctttgtaagtgacacaacctcaatcatgcactaaagctcctcctaaaactgatcctcataggttgttgaagtgttaagaaaattgtggtcgccacaatgttgaatgacttatattttttttttgcttcagttgaactgtctataattattttaatggcagagggtattgatctctgggaagccaatttcctgattacatatattctactacatgcagaactagttttactatcacttaa

SEQ ID NO: 858026 - DNA, 625 bp, Homo sapiens
gtgggagctcaagggagaagaggggcctctggaccatgctctggacctggtcctgacccccacaggttcaccctcaggctccagggtctgaagttgagtacacacacgtacatttattccacaggtatttattgagcaactactatctgccaagccctgggataaagcattgaatgagacagacgcagcccttaccctgccctttaaagagctccagtagacccaccctcttcccacagcactgttatcacacatcacacagatatacgacagacactgccgcgcacacaaaggaggccagattctgaaagaaggaccgattgctcatcgttaactgattcaaagttgggcttgagtaagctagctgaggtgggcaaggaggctggcaaacccccgcaacccctcaagagcaggagtagggttcaagaggttggtctcggaggcagacggcctggatccaaatcctggttgcatcgctgatgagctgtaaggtccttcaggtcttgaagcctcaggttaggccttttgyaaactggggatagcaggacctacttcacaaggagttgtaacaggtagattagatcgagtttataatgtttatgtatataatgcttagagccatgtc

SEQ ID NO: 858027 - DNA, 505 bp, Homo sapiens
tatgaaatgagtagatgaggtattcaaggacatctttgttaaaagtaatagtttttttcatttaatctctaagatgtacatggtgaaagaaatgtttgaaaaaggaaataaattactcttagtaattttaaagagatgttcctaaatacttggacttctcaaaacaggcaaatgaaaaggaggcctggagtttagaattagattgttgaaaaaaaattggggggtatattcaaatctcaaataccatagtgaattggctaatttggatgacagggaagaaatccaaataagattaaattattgcagcttcaaaaactatagattctttaaatctgtggctgccaaaagggcaaattcaaccagaaaacacaaagacacctttcttgcatttctaataattgaaatagttaatattttatgagtatttattaggaacaacgtactgttctaattactctgyaaatatattcactcatttgtttcttacaagcttatgagattggtg

SEQ ID NO: 858028 - DNA, 601 bp, Homo sapiens
ctgtttagcttttaaaaatggaactccaccctttgcttggttttatgtctgtatggaatgttatgataaaatatagtagtaacagtggtcagacatggaaatggtggggagacaaaaatatacatgtgaaataaaactcagtattttaatgaagtaaaaaatgatgtactgatatgtacaattacatcagtgaacctcacagtcaatatgttgaatgaaagaagttagtcataaaagaacacatgttatttgatctcatatatataatattctaatataggcaaaactactctatgatgggaaattagaagattaattacttttaggaggaaatgagtcacaaaatatataaggcatctttctgagtgataaaattattctgtattttggcagggatgtgggctacagaggtgcaatttacctctaaactctaaaattctaactaaaaaatttactgaattataaatttaagatgtgcatttcactgtatgtcaattttgcctcataaaactagttgtatrtaaatattgattttttttagcaagtttgtttttcacagtggtatgggttagaaaagctaaaccctgtgggtaaatggaca

SEQ ID NO: 858029 - DNA, 543 bp, Homo sapiens
ttaacttcttgaaaacttgaaactatacaatattgtgaaccattttgacacatgatccaatacctacagtgttttttctaactatgaatgctggaggccattttttcatgctgctcagaataaaaattatattacacttacagcagctccaaattcacttttgtccaccagattgttcagcattattatttattgagtaccggggtggggaatggcttatattggatagaaactttccatttgaagatttcagatatagtccacctgcatggaacattaaaagcaacttatctccatcctttagcaaaaataaataaataaataaatacattttattctggtacatttcatgtggggaatcttagctacaaagagttcgcctggcaatattataatcgtaggcctctgcatatccttcattttgtttatggatgagaaaataacctaatatgatwttcttccagggctaaggaacatgacttgtactaatcttctattaaactactttgccatttcatataatggaatggaaaaataaaagta

SEQ ID NO: 858030 - DNA, 543 bp, Homo sapiens
ttaacttcttgaaaacttgaaactatacaatattgtgaaccattttgacacatgatccaatacctacagtgttttttctaactatgaatgctggaggccattttttcatgctgctcagaataaaaattatattacacttacagcagctccaaattcacttttgtccaccagattgttcagcattattatttattgagtaccggggtggggaatggcttatattggatagaaactttccatttgaagatttcagatatagtccacctgcatggaacattaaaagcaacttatctccatcctttagcaaaaataaataaataaataaatacattttattctggtacatttcatgtggggaatcttagctacaaagagttcgcctggcaatattataatcgtaggcctctgcatatccttcattttgtttatggatgagaaaataacctaatatgatattcttccagggctaaggaacatgacttgtactaatcttctattaarctactttgccatttcatataatggaatggaaaaataaaagta

SEQ ID NO: 858031 - DNA, 373 bp, Homo sapiens
tttaaataaagtattagaatttgttcagactcttgactactctccaacactaagaattagtttgatgatcttggtatctttggcaatgcgaacagtgctagacaagtaactattaattttttttwaaaaaaaattggtggcctgaactataactttaggtaaaatagaaacagtattttatttctcattatcatgtgtgcacactgatcatctgcctcaaatatcggggtcatgccttcatcgaaactcactttgcacataataagttttataaatgcctttttgaaatgtttatattttgtcaaggcttatctcactctgagtgttagaattcctaacatattttaccaatatcagccagtatctggtattt

SEQ ID NO: 858032 - DNA, 514 bp, Homo sapiens
agaggttgaggcgagaagattgcttgagtccaggggttcgaggctgctctgtgttatgatattgccactgcactctagcctcagcaacagagccagactctctccttaaaacaaaaataaaataaattaaaacaaataagatgattatttacaatcttaaaatgaaagttttgaattcttaaattctagtggcatcagttaaattgaagaatgaatgagtctattcattctgcaaatgttactatgttaacatctattatatgacatgttttactcactattgtatatccaggtagctggtactgtttccagtacttaatggatgttcaagtatttgttaagtattgcataaaaacatgcatatttattatattttagtttaacatayattattctatttgttagtcaaaaactttgtaagatgcaatgaagcccattgcttatgatataatattgattttcaaaaacagctatatatttaactttattgtgtgggaattttcttttggatttg

SEQ ID NO: 858033 - DNA, 505 bp, Homo sapiens
agaaaaatggagcagaaagcacaaaatttttataacctcccaccccacgacatacacacagtttcccctactattgatatattgcattactgtggtgcatttgttataagtgattaagcaataytgatacattttattaaataagttctatagttttcattagaagtcactagtgatgtacattctatgggttttgacaaatgtataatgacatgtatccacccttataataccacagagaataatttcactctccctctaatgctctgtgttccacctatttatttctgcctccttctctccctgtacccccacacaccaggcaatcacttttttattttatttttttactgtctctatacagttttctctttcccagaatatcacatagttacaatcatatagtatgtagagctttcacattgccttctttcacttggtaatagacacttacgttttatctatgtccttctatggcttgataactcctttctctttagtgcta

SEQ ID NO: 858034 - DNA, 565 bp, Homo sapiens
ttacgaacattaaatacattttatattgctattaaactgcttcatgtatattaaatgtacattctcaacataggaaactaaacagattaatcctatattctttgttatcttttacccttttgaatatatagtaagagaggaatgtgaataaaccagttctatatttgataggcattcataatttttgttaattctttgaggtgagagctgaacaaatatttggtttatatattaaggtaaaacagaagaaaaaataaaacaaatctatacttagtatttttttctggaagaatggctcagcagggctaagcaagattttgtttacaaacctggtttccatatttggtgagcttgcatacaaaccaacaatctttggtaactcatgagccattgtctcctgatgttcttatttctgaccagaacatgaagttggcaaaattatccaaaacakcacatcctaaactactctagttacaaccaagaagcttgatttccaaaacagaaatgtgtaactgttaaatccactaaaaggaaaattcctcatttttaggcaattgattatttt

SEQ ID NO: 858035 - DNA, 601 bp, Homo sapiens
ttgttttctataatttaagcagactaaggattgacatacagacaaatttgtctgcagcaatatctagcatgctctccctgggttatctggtctgtaagggaggaaaaagtaacacagcaggcctaagagaaccatcctttaaaatcaccctagcccttcactctgccttcaaataaactaagaaaagtcctgctcttgattatcatatatttaatacatttctctcaatggcagagaatgtatagattattggatatgattctttaataatcatatttttgcctagcagtgtgtttttcgatccaaatgaccattggagcactgatttgtcagtttcttataaatagctctggtctatattgaattgccatgatctaaagatgatatttagggtaaaggatattagagtgctagagatataagaggacaaatggtgctaacctagttgagctgtgtaacttctctgccatcctagaccagactaaccccgattacctgttacaaagtgcttttatctgctctttgcctcayaatataaatgcaattgccttttttgatacatacatatttgagtcccaggaaaaggcatatagcagtatga

SEQ ID NO: 858036 - DNA, 573 bp, Homo sapiens
gtacccccaaataaatacatcatgtatcaatgaattttaattatatgaatatatcatattatcacatgtaccccccaaataaatacatctattatgtatcaatgaaaaaaatgtatctgagtggktcaatttttccatttgactctactatatataacacttattgaacacaagtccatcctatgaggttcaattgatgtttttccagatagcaaagagtaactaatatttactgcctgtatttcatttcatcctcaaaataatgctattagataaggactattattatcctcatgttacagacaaggaaatgaaagaactagcacacagaaataggtaccctaaaaggactaggggtgcaagaggaccatgtatgggaaaactttccaggtgaaaagcaggaaaaagaacctcattccagaaggttccatttcatgtcaaacttctcaaactgacgtaagccagatagagagaacctcccaatttccacatctatgtctcctgtttactccaatgactaaaaaaggcttgacctcccactctctatggctgccaataactgctcttgaggaa

SEQ ID NO: 858037 - DNA, 543 bp, Homo sapiens
agtcttacctaatttttaccggtctctaagatcaattttgtaagagtattttttagggtgtgattcatgtgttctacccatccagagctctggggtcgataggcacaackgagcttccattgaatgtttaatgccttactgactgactgagctatggacgaggtgaaggccgatctattatcagaccccatggcagcaggcagcccatgttgagggatgatttcattgagtgaaaacttaactaccgtggtggcagtctcgtttttggtggcaaatgcctcagtctatccagaaaaggtgtctactagtacctgaaggtatttgtaccctgcccagtgtggttttatttctgtaatttcccacctttctcctggtgagtctccctggaggcggtcgcctgagctgggtttaggaccttgcttagtgtttacctgggcacaagccgtacaccagagagctgcttggttaactaagtcctgaaggttggggatcttgaaacggctccttagaagctgggccagttttactcctccttcctgattt

SEQ ID NO: 858038 - DNA, 543 bp, Homo sapiens
agtcttacctaatttttaccggtctctaagatcaattttgtaagagtattttttagggtgtgattcatgtgttctacccatccagagctctggggtcgataggcacaactgagcttccattgaatgtttaatgccttactgactgactgagctatggacgaggtgaaggccgatctattatcagaccccatggcagcaggcagcccatgttgagggatgatttcattgagtgaaaacttaactaccgtggtggcagtctcgtttttggtggcaaatgcctcagtctatccagaaaaggtgtctactagtacctgaaggtatttgtaccctgcccagtgtggttttatttctgtaatttcccacctttctcctggtgagtctccctggaggcggtcgcctgagctgggtttaggaccttgcttagtgtttacctgggcacaarccgtacaccagagagctgcttggttaactaagtcctgaaggttggggatcttgaaacggctccttagaagctgggccagttttactcctccttcctgattt

SEQ ID NO: 858039 - DNA, 369 bp, Homo sapiens
ggagagagagagagaatggccaaatccccaaacagaccagtcccagccagcataaggaagtcccctctgctttaacattttttttttacaaggaaagtcgctttgaaatgaccaattkgctttttgttttgtttctgctttcctcagcctttctttgtctataaaccaatctcctctgctcagctcagcagaacaattattctattttatggaatgaagtgttgcctgattctaaaattgcaaataaagccaattaaaatatttaaaaatttgtggtaattttgttttttgacacttctgacctttggttaattgctacttactgtctaatgggcactgtgctcagggatttacgtacagtatcccctt

SEQ ID NO: 858040 - DNA, 484 bp, Homo sapiens
ctctttcaagtttattaaggtggtttatcactaattttgagaccttttctaatcaatgtctttctaagcaccattttagctgcatcccacaaattttgaactcttcacttccatttagttcaaaatatttaccaattgacatctacttctgcttggattcatgggttatttagaagtatgctgtttaaatctcaaatatcaagtagtttttcagacatctgtaatttttagtttaactattttatgtttagagaaaacattttgtatagtttcaatttttaataatttgttaaggtgtgttttatggcttaaaatgcgatgtatctttatcaatgctctatgtgtacttgaaaataatgtgtattctgttctttgttgggtggggatattctaatagatatagtgtgtgtgtgtgtatatatatatatataattatayatgatacaatgatacataacgacctatagatcaagttaatagcatt

SEQ ID NO: 858041 - DNA, 639 bp, Homo sapiens
ctgttctcatggtagtgaataagtctcatgagatctgatgattttataggggttttctcttttgcttttctctcattctctcttgmctgctgccatgtaagacatgcctttcaccttctgccatgattgtgaggcctccccagccacatggaactgtgagtctattaaacctctttttctttataaattacccagtctcaggtatgttttatcatcagtgtgaaaatggattaatacaacatatgtgtgtatatatatatgtatataatgtatgtgtgtatgtgtgtctctctctctttctatacagacacatttatattctctcttttttaagagatacaaatatgtatcacgttccaaaggctggcaagttcaaatataaagggtgggctggcaggcttgagacccaggaaagccagtgttgcagataaagtgagaagacagcatgctggggaatttcctcttgcagtagaacactgttttttatttttttaattttttttattgtgttattcaggccttcaactgattgaatgaggcccacctacattatggagggtaatctgtttactcaaagttctgatttaagtattaatataatttaaaacacccctaatgttaacacatacaattaaccaa

SEQ ID NO: 858042 - DNA, 646 bp, Homo sapiens
atcaaaataggaaccattacaatcaacacatttttgccaaagaaagaaaataagtttgtttatttccatggcataaaaaaaaaaatacgtgcttcaggattcgatgaactcttggaaagcattttctgcctcctactagttgtggaagctttttccttgcaaaaagttggcgagatgcttgaagaagtggcagagagttgggaggtcagttggtgagaggtcaggtgaataaagtggacgaggcaaaaatttgtagcccaatttgttcgacttttgacgcattggttgtgctacatgcggtcacgtgtagttgtggggaataattgggctttttctgtggaccagtgtcggctgcaggcattgcagttttcaggacatctcatcgatttgctgagcatacgtctcagatgtaatagtttcattaggattcagaaagctgtagtaaattaggctggcagcagagcacccaacaatgacgatgaccttttatttggtgcaagtttggctttgggaagtgctttggagcttcttctggatccagttattcagctggtcatcactggttgtcctataaaatctacatttcgtcgcacatcacaatccaatagraaagtgtttcattgttgttgcatagaataagagaaga

SEQ ID NO: 858043 - DNA, 440 bp, Homo sapiens
ttactatatgacagcactgttctaagtcttttaagagcacyacctattttaatctttgcagtaaccctaacagtaacagataggcgctgttattatccctgctctacagatgatcccactaaggcttggagagatcaacagaagtttccatccaagtggccctctgagtgtacatttctatctctctctttctctgattcagactaaatatcacagtcataagaatcttgggaaaataagacacagtatcatcacatgaacagatatgggatgggcttgggttgaaagaaaaacaaaaccaggggactgctgctgtacaagtattctccagatgccagaaattcaaaagaaacaaatcaagagatggagtcaagagatccaagggggctagagtgactaaccctggggcaagatcaggtgatttatcaggaagcttcatt

SEQ ID NO: 858044 - DNA, 526 bp, Homo sapiens
tggttaaatatctctcttactcatcaatatgtaactattgactatactgaattaaattaggaycacatgacttattttggtttgagtactttctttccatgccccacctacaagcaatcctcacatagctggcaatgaaagaacaacatctttacagaatcacttggtttaagactctgctttgagtttaattattatattagttttccaaataagctgtgtttcttgggtatgccacagtgcctgtaaggtggcaaattagttgcaatccacccatctgcttgggaatgaacagctcactaaaatggacatagtaatttacaaaaaagtgctgagctattttcaagataaaaagcagcttcaaaagttattctcataggcatctgaatgtgttatgtaaaggcaatatattaaagctaaaatacactttttcttcatatgcaatatattaatggattatgagtctttattatatcattattggaaatgctgttaaaaattgtttatttcaaaataagagattgaa

SEQ ID NO: 858045 - DNA, 579 bp, Homo sapiens
ggagccatgggtggtctgggctcagggtatggaaccggccttctttcagccaacagacattcactcatggtaagtgatgaaatttatagactctatagttatcatatagagttagaatttcagrtatagatactattgttgctgttttttaaaaaatcagctttattgagatataattcacttaacatacgatgagcccatttcaggtgtacaattcaagtgttttagtgtatttacaaggttgtgcaaccatcaccatagtctaggttttgaatatttttgccccctgcaaaaagaaaagaatccccgttgcccattaagcagtcattccccatccctccacttccagcccttggcaaccacttgtctacttcctatgtctatagatttacctattctggatattttgaatatatggaatcatacaacatgtggtggtcttttttgactggcatcttttacttagcatgactgttgcagtttttctacagtttgccacgtattagagctttattcatttttattgtcaaatagtatttcactgtatggacataccacattacacagttgggttgttcc

SEQ ID NO: 858046 - DNA, 603 bp, Homo sapiens
tagatagaatgttctgtacacattacattgcatgcactgcacacacaactacaaaacaagtatttaatgaaagggcattatcagcatataaactagactggaaatccagcagcttgacaataaactgcattttaggtaccctgagatctgacctctgagaacagcagtgaccaccttggagctggcacttcctggaatgctttgctgcattacacattaaaggtatatgctcagggagtaaaggaaacagagcttaatgaaaaatacctctatcgaggccaagccaagagataggtcaggtctatatccatacagctagtctaaggctgaatctcagtttctcagtgtacaaccagcaaccagtagaaataggctccaccccaaagtggccccaggctctcagcttcctggctcacttttccactctccgtggatagtatatgcctgcctaaaaatttataaaagaggttaataatgaagcagggtacagaggtcacctctcaggctgcccatattttacctcataggtagttgccttcmaccatctactaggatttagactaaggcattacattttaaactaagagggaaagctcatcagtc

SEQ ID NO: 858047 - DNA, 553 bp, Homo sapiens
gtttcttacgaaggaagttttggttttatggtgcttttcctccattatctttagatgacgaaaaaggaaaaacagatragaaaggacaaatagatcatggctaagtagctttaggctagcacttgtttttggaatctttaatacatttttaatcttcatgttgaagatccatttaacctgttttaaagttagatggtgattcctgggttcagttggtctgtttaaatgtttaccttttcaggataatccgtattagaatcttgcatctctcaatagattacctatttaacaaagtaaccaatttaagaaaacctaaacacatttatacattaagatattttcctgtttcgagttagatgatgtagtatataaaatatatggctggcctgatgtggaattatgtatagacaacagtgtcttcacagatgcattgccaatagggagctatgtagattaaactctttggccagtcctaggctttttacctgtgtaactcaatcagaattgaaagcatgacaggttttatgatgatgaatgtatggctggattggag

SEQ ID NO: 858048 - DNA, 591 bp, Homo sapiens
ggaatttcgatcaggattagaataaatgtgtagatcaatttgggacatcatttgaacaatattaaggtttccaattcagaacatcgtatggctttccatttatttagatagtctttaattttttcaataatgttttatagttttcagtgtaccatatccttgattaaatttattcctaggttttttattgttttgtttgccatggtaaatgtaaatttcccccttattttgtttggatttgcttttcaaattgtgcgttgctggtgtataagatacaactgatttttgcatgttgatcttgtaccctgcaactttgctaaattgattaactgtagtggcttttttggggggagggggatttttggaccatctgcaaatacagatagttttacatctttcttttcagtttgtattttttaatttatttttcttgcctcatttttctggctggaacttctagtacagtgttgagtagaagtggtgaaagcagcatctttatcttgttcttgatacttgcrtggaaactttagttgttcaccaccaaatatgatgatagctatggattttttcatatatgccttttatcagctt

SEQ ID NO: 858049 - DNA, 685 bp, Homo sapiens
tggaaaaatcttcctgtcaccccctatattctaaaatatggtgatgtttcctagtgtggatgtactggaaactggtaggtcctttcagtctggaaaatatrtccttcaattattctggaaagttttcttgaattatttatgatttactcattttttttctttttcttcacttttcctagacaagccctctaaatttattcttattgtttatttttcatctctttgtccttgatcaaatttttgagaaattttcttaactttatgtttctaacatttatattttttaaaaaaattcattttgaaataattttagatttaggaaatattgatcagaaaataagtagagaatttcccagtgaacttcttctagtgttagcatcttacgtaactatagtacaatgatgaaaaccatgaaataaaattgatgcaattctgttaattaaactatagacttaattttgaatttcacccttttttcactaatgtcctttgtctgttattagatccagtccacaatttcacgttgcaattatttcttacattttcttaattttctccaatctgaaagttccttattctccccatgtctttcatagtcttgatactttttggacagtactgttaagttacattttagactgtctcaatttattttgtctgatactttcccacattgcattgaaat

SEQ ID NO: 858050 - DNA, 577 bp, Homo sapiens
agccctctaaatttattcttattgtttatttttcatctctttgtccttgatcaaatttttgagaaattttcttaactttatgtttctaacatttatattttttwaaaaaattcattttgaaataattttagatttaggaaatattgatcagaaaataagtagagaatttcccagtgaacttcttctagtgttagcatcttacgtaactatagtacaatgatgaaaaccatgaaataaaattgatgcaattctgttaattaaactatagacttaattttgaatttcacccttttttcactaatgtcctttgtctgttattagatccagtccacaatttcacgttgcaattatttcttacattttcttaattttctccaatctgaaagttccttattctccccatgtctttcatagtcttgatactttttggacagtactgttaagttacattttagactgtctcaatttattttgtctgatactttcccacattgcattgaaattatgcattttttggcaagaataccacagatgcaatgtgcctttctcttaatttatcttaacatttttgtgtatg

SEQ ID NO: 858051 - DNA, 449 bp, Homo sapiens
ccatccttccccctgagcccctttacacttctaagcccttatgtaggtgccacagtgaagccagcasactttacctatcaggccttgctgcaaacccttgcttgtaaccctaattacaagccatccagactgcacagggggatgtcatgggaagcataaacaaattttacctacaccctcctgtaaattctaccataaatgtcacaaagtgatatgtggcaaaattaaccagcaaacaaccccgggatgtggccataccaaagaactcccccaaactcccctacccaatataaacccctcattttgtaagctcagagctgctcctctgactgttaagagggcagccagcaggttaataaaggcttgcctgaacttgggtctcctctctcttttgtccattctctctcagctgaccttacaattatgactttctttgaaatctaggtgga

SEQ ID NO: 858052 - DNA, 506 bp, Homo sapiens
agaaagagactgaaatggcagactgagaagctgggttttatactgagaagagtggggtgtcatgatggatgacagagtagaaacagggcagagtgagtgtacttagggaagacaaatctagtaggagcatggagaatcaatcagatagaaaaagttaggggtttgggagacctgttgcaaagatatggtagtattatggaatgaggtagcatgaacatagaaataccagtaaaaagaaattattattatttctactatcattattaataaggaacattgtcagaactggctttgaatcattttgagatgtatgatcaaaaatggattttgaggaatgctggtgcctctggaaattaacaggcatttaaaaaaaaaaaaaacaamaacaactgtggccgagcacgggggctcacgtcatgtaatcccagcactttgggaggctgaggcgggcggatcatgaggtcagtagatcgagaccacacgggccaacacggtgaaacccccat

SEQ ID NO: 858053 - DNA, 506 bp, Homo sapiens
agaaagagactgaaatggcagactgagaagctgggttttatactgagaagagtggggtgtcatgatggatgacagagtagaaacagggcagagtgagtgtacttagggaagacaaatctagtaggagcatggagaatcaatcagatagaaaaagttaggggtttgggagacctgttgcaaagatatggtagtattatggaatgaggtagcatgaacatagaaataccagtaaaaagaaattattattatttctactatcattattaataaggaacattgtcagaactggctttgaatcattttgagatgtatgatcaaaaatggattttgaggaatgctggtgcctctggaaattaacaggcatttaaaaaaaaaaaaaacaacaacaactgtggccgagcacggkggctcacgtcatgtaatcccagcactttgggaggctgaggcgggcggatcatgaggtcagtagatcgagaccacacgggccaacacggtgaaacccccat

SEQ ID NO: 858054 - DNA, 646 bp, Homo sapiens
agatgagatggtactggtcatcctttagctatgaaggaagccaagctggttatagggaattgttactactatrcctagattaacccatggtattcaattttcatttttttaactagtagattttatataccaaaagcattaataatagtggagaaaatgcaggccattatggctctgtctatatagctaattagttttgtaagttctttatcccattcaaaacgttaaaggtgactgagtaacatggaagaggatgaggtgaggagtaaatgtactggtttaaatcttattgattggttaattagtccacataactagtacatgctattaaaaaccagtcaaatccttatcaatgttccaatgaagtgaccagtcaaattaatgatcctgttcaggctgcttatgtcacagtaaggcatatacaatttgggggaaagtatcaacccatgattctcgctttcccatcatctgccccagatctctgccagggcccagggacgtttggactgaccacttttattattgtttcacagtcgtcagaccaataatagtgctgaagatgttacctatatgatcaatagaaatggccgagctttctgcctaagcattccccacctgccaggataaaaggaagggtataggtagg

SEQ ID NO: 858055 - DNA, 555 bp, Homo sapiens
agggtatatacccaataatgggattgctggcttgaatagtaattctgttttaagttctttgagaaattgccaaattgctttccacaatggctgaactaaattactttcccaccagaagtgtataaatgtttccttttttccacaacctcactagaatccagcatctgtgattatttgattttttaataataacctttctgactggtgtgagatggtgtctcattgtggtgttgatttgcatgtttctactgattagtgatgttgagcatttttcatatgctttttggccatgtgtatgtcttcttttgaaaactgttcatgtcctttgcccacattttaatgggttgtttctttttttgcttgtaaatttatttaagttccttgtagatttctggatattagacctttgatggatgcatagtttgcaaatattttctcccattctgttggttgtctatctactctgttgatagtttattttgctttgcagragctctttagtttaattaggccccatttattagtttctgtttttgttgcaattgcttttagtat

SEQ ID NO: 858056 - DNA, 467 bp, Homo sapiens
tgcattcactggggttggctattcaaaaattccaacattcttttctcttgtttctcttcctccctagaggctgaaaaagttgcttcccttgccttcctgagagcaactcacagccagtgacccagttcaacaagatataaaaggatgtttcctgagaagcttctcaatactcaagttcaatgggccacatgaggagcaaacctttaccctctgctttttgcttttaaatgttgatgcaatgctggaacctcagcagcccccttgagatcatgaggcaataggacaaaggacaaaaagccaaacagactgagggagtgtaaaagaggaacagaaagagcccacaatgacaaagttaagctgctgaatcagccctagagctgcctacatttcagttaagaaagcaataaatatccttgtgattaggscaattcatctttggtcacaagttttcctttgcttacagctga

SEQ ID NO: 858057 - DNA, 598 bp, Homo sapiens
cctgcctgtctgcccatctgcccttcatttgctcttggctagctgacttcactctccatggctgcagagcagtcgaacggggcagaatgccaaagatcttcagcttctctggagggtgtctgtaatctttctgtaggtcccacctgccctgcgtcaatgcaaggtgctatggggcccccaagcagatccaccagggcaggggttctcagccctggctgtacttagaatcacctgggggatcttcaaaacatgcttaatcaggtccccaccctagacctactcagtcagaattggtggggggaagcagtgaggcagacatgctattttatttttaattcccctatgtgactctaatctgatccagggttgagaagcactcactggagccttgctcctcaaaatgtgggtccaatgcccagcagcatcagagcagctgggagcttgttagaatctcaggccccatctcagatctacagaatcaacatctgcattttagcaagacccgcaggtgattcgtgcatctatcagcttttgagaagcattgcacaggtggatccmctagaaagtttcacgaggacagggacgtttgttttgttca

SEQ ID NO: 858058 - DNA, 412 bp, Homo sapiens
tgcattgttataaacacaactgtgtatgtttgtcctctctgtaattatatcagaacaaccctaacatcaaaggattgcagaattacatagcaaacccagaatagcctgtggtttggaagctgaatagasagcccaattacccaggtcaaatatctaccagtgatatcagtttagggccacgctctggctttactttctggtgcaaggatattccaggcctaaaatctggggacaggccactacttcttggggcaaaagtcacagcctgctcaaagttgttgctcttgtcgcattccaatttattccccttccagcttgataagccagtctacacccaaatttccagctcttcagtttcaagaatagaaccagatggccgggcacggtggttcatgcctgtaatcccagcagt

SEQ ID NO: 858059 - DNA, 354 bp, Homo sapiens
aaagcctgccatgctcacacagcacgagtccagtgtggctacagcagaggggagtggggaggtcagagagcttgcaggctgtgggaagcgattgcgggatgctcaacggaggaacgaggggacctaacaactccagctgctgtgctgtgcatagatgcagggcacaggggcagcctgcaggaggccatggcaacaatcaatccaggctggaggcgacgggggctgggamagggagtagccatgagggcagagataagttgtcagattctggataggagtgggggccacagcattgatgtggggcgtgatgtagggggtgaggagaggggaggagtggaaggtgtcaccaaggca

SEQ ID NO: 858060 - DNA, 561 bp, Homo sapiens
ttctctcactgcactctgcccctccactacacccctctcatcacaacctgctgtgctacctggaaacgtgcctgccacactctgctcctgctggaaaggactgaccggcaaggacacctgaggcctgggttagaggggggcatcttctgtgcactgcaggcatacctcaaccaaagcctgagcccccgcacccttctggccagctcctctgacttcccacccaggtatagcatctgggggccagcctgcaacttatcagttttctattcccaccatctgacccggagcttggtgcctggtaggtgctcttcaaatatttctggatgaaatgcaaaacaaaacaaaacaaaagacccaaaaaaacgaaacaagagatgcaggagttgagacaagcatattggatttggtgagtaggaccccttcaacttaaccctttcctggtcttcagtgattttcaaataacgaggaactgttktcacagtgactggagggctcttctggtagttggtgccaggggctgctgaacatcctgctccgtgagggacagcagagccatcctgc

SEQ ID NO: 858061 - DNA, 659 bp, Homo sapiens
atgagaagagtgattggtgaggtggatccccagacccctatcccccaacagccctggggcctccgtggagacctgtccccactgaggtttcagatcagccagtgagtaaacactgcacccccactcacaggggccaggcccagtgaaggctgtggccagtggcagcctcctatgccccctccttctctgtatctcttttttctaggagttctttcttaactagcccttagcttttctccctcatctgtcccctccatttgctctagcatggtgacttgaaaaaaaaatgccctcttccctattgagagcaccctgatgcagacattgtatctctctctgttttcatggagttgtctctgacctaccctcagactagttctccaaatcctaagcatctaacaacacagcttcatacaaccacacagtgtacctctttctggacaacttcctcctactcaggttttccctctgggtccacccccaccccatgatgcttcaggttccaggagctgaaagactatactggggtccacrtaggcccagctagggtggagaggcaccgctgtgggggctggggggaaggcccctgccttcatcccctccccagaggtggcttcctcataggagggtggggctgagggcactgctggagcctcctt

SEQ ID NO: 858062 - DNA, 602 bp, Homo sapiens; identical to SEQ ID NO: 838020

SEQ ID NO: 858063 - DNA, 436 bp, Homo sapiens
aggtggagggatagtatgaaagaaatgttgatgatgggggaccagggtgaagcatagggaggaatttaatctgtctggttggctggaggtggcagggaataaatagtgagggccaaggctgagaagtaggaagaggtgaggacgtaagtataaaggaaattggatttgccctggggttactggagagcaattaaatggttttgagcaggaggtggcataatcaaggtagtactgggataagataaagacagccaacatttatttagcaagtatgtgctgggcattgtagtaagtgcttcaaaaggagttattaaatcctcacaaccttcttaggtagkatcatcccattttatagatgaggaaatagagtcacagagatgcaagcaatagaatggggatcaattgaagacccagaaatcagagacaggaagcttag

SEQ ID NO: 858064 - DNA, 646 bp, Homo sapiens
aaatggtattgctagaggttatattaagtgaacgtttggcatttaaatttaaagggccacccactgttttcatagaggctgtgccattttgcattttcgtcggcaacatttggctgttcaacatctaccccagcacttgctcatgtcagggttttttttcattgtaagagctgtagcgtggtgtcttgcggtgttcatttacagtttctttaggattaaagatgttggcttctttctactctgttttttggccatccatatatcctctttggtgaaatgtcggttcaaatcttttgcctattttttaatgttgggttatgttttttcatattgttgactctgaaagtttttttatatactctagaaacaagtttttttttcagatacttgatttgtaaacatttttctttccatctggctcttatcttttcattttcctaattgtgtctttagaaggacaattagctttttcatttgaaagtctaatttttcaatctttcctctatggattatgcttttagtatcatatttaagaacattttacacaaccctaaaatcacaaaaatcacraagatttttctcctatttctaaagaagtcttgtaatcttgtgttttacatatgcttattatcttgtttatgaacta

SEQ ID NO: 858065 - DNA, 558 bp, Homo sapiens
tccatgctgccttcttccttgtcccctctcaacccagggccaagagaaagagaaacaacaagcattgcagaaactgactattcacagcctgtcatagttctgaatcagcatttcctgctctctctgctaaattaactagccggagagttgcctgttttcagctcttagttgctttttgatccatattggatggttactaataaaagatcaccctttatgcaataaatgttaattggacacctattatatgaaatgcagaagactaaatagtatgggaaaatctcttcctggtttctgggtaaattttcttaaaaggatgtgatactatgaaaatgtcattcctcaccagggttttgtcacttatattctatacagtcagagtttctgtccagttcagttcaattgtaccacattatagtcaactcttgtgttgcaygtatgttttattcaacaagaggattaatactaaagcttgtatttcagctgctttccccagctccttcctacttcctctgcaaattaaatgtcatcccctagtgaaccattggccgagggcaa

SEQ ID NO: 858066 - DNA, 622 bp, Homo sapiens
gatccccctgagtaacatggagccratgcaggtgtgcccttactgcctggctctggggaaagcatggaagggtttcagctctggtgggacaaaatgaccacaagggaagccagaagaaaaccaggcctctggatgcccctgaccttgcaggtgagggtaaaggtagcatgcaagtaaacattcaaggcttagtgtcttccttgcctcttgcccggacttttccgagcctatttcagttattgatgccagcttcatggactgaggagccatattatttcacggcaattgagagaggaagtattcatgaagattataagcctatggatattccagctctgatagtctctccacgaagcagaacattcaccgtgctagtcgtcagcagtgacgagacacccctggatgtgggtgtgtgggcagcctttccaggggtaacccgatgatgcagctctgagtgatgtgtgcagcggtggctgactccagaccaggacttatccgcaaggctgctgttgtgctcttttttggtggtacctggagatggtccccaatggagaagttagaggttctcaaaaatcccaggaggtaaaaccttcttttccaagaagaaatggtagggaacacc

SEQ ID NO: 858067 - DNA, 622 bp, Homo sapiens
gatccccctgagtaacatggagccaatgcaggtgtgcccttactgcctggctctggggaaagcakggaagggtttcagctctggtgggacaaaatgaccacaagggaagccagaagaaaaccaggcctctggatgcccctgaccttgcaggtgagggtaaaggtagcatgcaagtaaacattcaaggcttagtgtcttccttgcctcttgcccggacttttccgagcctatttcagttattgatgccagcttcatggactgaggagccatattatttcacggcaattgagagaggaagtattcatgaagattataagcctatggatattccagctctgatagtctctccacgaagcagaacattcaccgtgctagtcgtcagcagtgacgagacacccctggatgtgggtgtgtgggcagcctttccaggggtaacccgatgatgcagctctgagtgatgtgtgcagcggtggctgactccagaccaggacttatccgcaaggctgctgttgtgctcttttttggtggtacctggagatggtccccaatggagaagttagaggttctcaaaaatcccaggaggtaaaaccttcttttccaagaagaaatggtagggaacacc

SEQ ID NO: 858068 - DNA, 539 bp, Homo sapiens
tagacctcactgtctttcaaatcctttttgacaccaatgttaagtggttctaggacaaatcacagcatctacwcagaatgtattattttagagatttaaatggacacataagccgtaaagggagttcttcatgttgcttttcactagtcacatttttgactagcactggggttaatatctcagttttaaccttttttgcactccaagcagaaaatgccttagattggaggaatgggtattatgaggggggctgtcactttccaccatcagcagcagatctggggaaggagtcacgcattatttgcagaataatggacctttctgattcacacaccctctagtcagctggtctgctcaccagggaaagcagatcaatgcagatttgggaaatcaaggaaaaacaagatggtgacactggaaagaaaatgaataaatgacaagtaaaaagagaaaagaaaggatattccaatattggcaccatgcttctccgcatatgtaatgccttcagtgcaccctccaagaaaggtatggatatctct

SEQ ID NO: 858069 - DNA, 600 bp, Homo sapiens
gcttatgttgagaaggaagaatacaaaatgggtactggtgattaaatggaatgaattaaragtattgattgaatgaatgaagagcggggattttactggatgaatgatgattcaggtatcattactgtaccttctgcatttgagcatagaaaataggaacagaaaatttgaatggaaagcaaggaattatatgagctcttcctccaaaatttacatcatataagttgaaaactgggtgaagtataagcagggagcatttttgcaatgtttaaagtcctaattcataattttgaattgtgtttttcttaaatggctccttaaatataagactatattttagtgaagccaataatgttttcatattcctattgatgtgatctacaaaggcaaaaaacaattttaaagactaatttctaatcttactttaattcctaaactagattttcaatggatactgtctttccatgacattaattgctacaaaagaatacagaaatttccccacaaataaataaatcaaaaattatttttgactttagctatttttacagacttttgtccagtttgttgtattttatataaattcatttcttacacaaa

SEQ ID NO: 858070 - DNA, 660 bp, Homo sapiens
ataattgccaaatggatatcattttgccaccaatatcaggagtgtatagacartctcctaaaatgcacccagggaccccagttgacatccttctgtggttgtttctttcaactgattggaggagtgaggctttggactgggggtgatcgagagatataggaataaccttaattctcactctgacttgacatttaatttataatatggtctggagaacttctgtaaaattgcagatgaaacatttttagttttattgctgcttttgtttgtattacccgagttgtaattcatcccagttacttacttttttctgttctgccttccccctgaattatcgcacactgccttgctggcatgaataaatttgctagactagtggttctcacctggtgggtgggaggtaggggtcggtgggtgaatttttccttcctggggacccttgcgaagacctggagttttagatcccataactgagaggtgctactgacatctagtggatggaagccagaagtgctgcaaaaatcctacaatgcttatatgagacaaggaagtgtcctggccccaaatgtcaatgctgcattgcccacgttgagaaaccctgtgctagacaattaggccaaacctttttaaagtaggatcctgtgtggtttttttagtaca

SEQ ID NO: 858071 - DNA, 477 bp, Homo sapiens
aataagctttctaacatacagtagcagcaaagcaacttgagccactgagccctgkggcaggcgtttcctccaagccttggttctctaattgaatgtcactctttttattaggaggagaaggagattgcctagagacattgcttaacacttaagtaggctcgcctaaacccctttctctgacacaagcagcagccctggagaactgttagcaaagggcttcattctaatgagagaaacttcaaaggccccaaatgaggaaagaagtgtcgctggaaaatgttgaaatgacaaatagcggtatttccactgacaaaagatgaagatgaaacaaatgttagaacagaaaacatgattttattttgccatgctctcactggaaactatcatcaaagcccttaactgaaatgaaaaaggtatcgacataacaagcacaccagagtgaagttagatttctaacaacgaaagtcatctttgaaa

SEQ ID NO: 858072 - DNA, 510 bp, Homo sapiens
aacagattttcaatgtacataaagcagctttctattagaagaatagaccacctaggagttttagagctagagaggaatcaatrcctgacttcaaagcttcaaaaaataggcggcaagttggtggaatagtaagccaccaagggctacagctctctgtgactccaagtgaagttgaaaagcattctaggccataagaactgcaactcttaggtgagtcctacggctgaactaggcccagagaagggtaactagggagtcacatgacgtactgagatagaagctggggtagccaaaggagttccggcaagggagttcccctaacctcaggctgcacacctcagagctccaaaagcgactcttcccttctgcatgaggggagcaaagggaagagcagataggactttgttttgcattttggataccagttcagccacagaagaactctggacaccagccagagttgtgaggtccctgttccaagccctagctcccagatgacatttctagaca

SEQ ID NO: 858073 - DNA, 510 bp, Homo sapiens
aacagattttcaatgtacataaagcagctttctattagaagaatagaccacctaggagttttagagctagagaggaatcaatgcctgacttcaaagcttcaaaaaataggcggcaagwtggtggaatagtaagccaccaagggctacagctctctgtgactccaagtgaagttgaaaagcattctaggccataagaactgcaactcttaggtgagtcctacggctgaactaggcccagagaagggtaactagggagtcacatgacgtactgagatagaagctggggtagccaaaggagttccggcaagggagttcccctaacctcaggctgcacacctcagagctccaaaagcgactcttcccttctgcatgaggggagcaaagggaagagcagataggactttgttttgcattttggataccagttcagccacagaagaactctggacaccagccagagttgtgaggtccctgttccaagccctagctcccagatgacatttctagaca

SEQ ID NO: 858074 - DNA, 589 bp, Homo sapiens
aatttgacaaagagaaagatayacagtagttttctacttaatgacaagcaggaaatagttatgaatagaacaagaccttatagtctccagaagctgcaatcaaggtacgaatgccttatttagaactaaccaacactcaaggcagagcactcatacgaggcccatagaatgtcatcgatgagggaatggggaatgctgcacgagacaaatgtcagcaagagaatggggatgattttgacaatagcagaggagcaagagttaggatagaaagagaattctagaagtgacagcatgaacaaaagcatgcagaaaaataaaatccagcacataaaataaggaagacttttttgtattcaagaaatttgtttttacagcagcatctcagtgcctcaaagattatctttaaaaacagctgttacccaacaactacttaaagcttgaaataaaggaaaacattcccacgccaactctgcactctaaatagaagctgaaaagatagatacaaaaataccaaggccactatggcagcctgatttgaagctttttataaaacaaaaagttctgtggtctcctgaaaggctcactcctc

SEQ ID NO: 858075 - DNA, 589 bp, Homo sapiens
aatttgacaaagagaaagatatacagtagttttctacttaatgacaagcaggaaatagttatgaatagaacaagaccttatagtctccagaagctgcaatcaaggtacgaatgccttatttagaactaaccaacactcaaggcagagcactcatacgaggcccatagaatgtcatcgatgagggaatggggaatgctgcacgagacaaatgtcagcaagagaatggggatgattttgacaatagcagaggagcaagagttaggatagaaagagaattctagaagtgacagcatgaacaaaagcatgcagaaaaataaaatccagcacataaaataaggaagacttttttgtattcaagaaatttgtttttacagcagcatctcagtgcctcaaagattatctttaaaaacagctgttacccaacaactacttaaagcttgaaataaaggaaaacattcccacgccaactctgcactctaaatagaagctgaaaagatagatacaaaaataccaaggccactatggcagcctgatttgaagctttttataaaacaaaaagttctgtgrtctcctgaaaggctcactcctc

SEQ ID NO: 858076 - DNA, 670 bp, Homo sapiens
ctgaatttgttatataacctcaggaaaaatatttcctccctgggcttcagttttcccatttctataatgagagaattggactagagggttgctaagaccatttctatcctcagttatgagccaatctttcagtaggtgttttttttccttgccctctgcctagttattattgaacttcattattttattcaagatgggagcaaaagcaaaactgtcaacccccaataagcaggaagctaatagaggaaatgatcaaagatgacatttactgtgtgccagccacatttccgaatgattaatagggattgctgtacctagttgaaacaagaccattggataagtatcattattaaaatcgttcccattttactaacacattgaggcacagagacactaagctactgcttaagtagctctacctagttgccagagatgggatttgaatccaggtaatttgactccaaaccattagtctacactgcctttacacatgaggtacaggaacgctttggattcagtctagcccactctgtttcattgctaagagataataaaaagcccyaaaaacttagttaatttcttcaagttggttcaatatgttggccaatgtgatatttctcaattccttgactgcacctttcttttaccctcagctttcatgaaagaatgc

SEQ ID NO: 858077 - DNA, 620 bp, Homo sapiens
agacaaaatctccaggttgaagatcatgaagaagctatttaggaagatgttgtaagaagggggctgttgaatattgaacatcaccagtattttgctcgtctgggtgcagcagggcagaggctagtatcagaratgaaatccctaaatgcattacaagttgtcttagtccattcaggctgctataacaaaataccagactgggtggcttataaacaacagacatctatttctcacagttcaggaggctgggaagtccaagatcaaggcagtgatcggattcagtgtctggtgaggtcctaggtcatcatcgaaggccatcttctcaccatcacctcaaatggtggaagaagttatgggtctcccctggacctctgtttataagggcactaaccccatctgtgagggcttcaccatcataacttactcacctcccaaagaccccactcttaataaatcacattggtggttaggatttcaacatacaagttttggtgagacattcagtctatagcaccagttcagagggtaattgatgtcaccctgaaggagggaaccatacggcctgaaggggagtgggattacctttggccaaaggagctccagggtttctgaaatttttc

SEQ ID NO: 858078 - DNA, 527 bp, Homo sapiens
tggcccatttttttttcccattgggttgtttttttattgttgagttttaagagggtttttttttttgtatattttagataacactactttatcagatgtatcttttrcaaatattttctcttacgttgtggctcatcttttttattttcttggcattgtctttcacagagcataatttttaattttaataaagtctaacttacaaattatttatttcatgaattatgtctttggttttgtatgtagtcatgactgtacccaaggtcatgtatattttctcctacctagtcttctaagagttttgtaattttgcattttacattttggtctgtgatctatttttaattcctttttgtgaagggtaaaatgtctgtgtctagattaatttttttggtatgtggatgtctagttgttccagcaccatttgttgaaaaggctgtctttgctccctgtattgccttcactctttgtcgaaggtcagtgaactatatttatgtgggtttgtttctgggctctctgttttgttc

SEQ ID NO: 858079 - DNA, 475 bp, Homo sapiens
acatccaattgaagaagtcatattaaatcaatagtggtgatcataataattgaaattcattctttgccatcttctggaagagawtaagcctttatatatcttgaaaaaataataatttcaatacacatttttaatgccactcatattcagataatcactaattgtaaaagcctatgtcttgctacttttgcttgaaaattggaatacatcctcatagtgcttaataaatatttgttgagcagacaaaatcaatgctgtcactggtggttgtatttctgacctgacccacaacgttctgtttaagctatggattgtgcataaagaataactctggcctagcattgccaaaaaattattaaacgtaagataaattcagacaaaatcccaaatccagatgacaccttcacacctcagccgtgacttcaaactgagaaaactctgcgcggttgcagtgcttggtattgtatgagctcta

SEQ ID NO: 858080 - DNA, 586 bp, Homo sapiens
acacaccccataggtaatatatgagagtacctttttccccacaccttaacttacagtggatattatcattcaaaaaacttctcaatccaatttgattctgaaaatgacrtattttgatcatatttctttgattactagtggtgctgaatattggacatgttttgttgaccatatctatttttttcattttaaatctactttatagatttaagtacagtaaattattaaataccatgcaaaatgcgcctattgtatgtgaacatgtccattaccacacaaagctccctaacgcacctctgcattcaatccctccactgtccctgagccccaggcaaccactgacttgctatttatcattattgatttattttgcctgatgtaaaattttatacaggtgaaatcctacagtatgtactcctttgtgtctggcatcttttgcccagtctaatcgttttgagattcatccatattgttgagtatagcagtagtacattcctttgtattgatgagtagtaatctgatgtatgattattttcacaaacttgtttatccatttacttgttcatagacagttaaactgtttccg

SEQ ID NO: 858081 - DNA, 605 bp, Homo sapiens
taaaataaacacaacagatagtgccttaggagaaatcaaaggtgaaaayaagggagaaaaaatgaaatgaagaggatttgggggaaagtaacaaatgtagacactaggtaaagatctagctggcaactggcatagagtaggagcctcaacagagaaatctaaaccaatagaacaagtaataaaaactgtaattcaagaaactttctggcattaaaacaatagatttaaagtaacatgttaaaagaaacatcacacctaagaaaattgtctcagaatgaacattaaaatatatcctagtaagattattggacttcaaaaaaaaaaaaaacacactttgataactatgtagtcctacagttcctagttctgcttgaaaagacctaaaagcaatggctaagccaagagcaatgagcctctctagcacctaatttgtgttcttgaaatatcatttccctgctaaaagaaatcaaatttctaggagaaatggttgatttccaggtctgaggaattaaatgtatgaaatgtgccgagaccagctcggtccgagagaccctaacccagcagcgctacaggaattaaagacatgcacacagaaatatagaggt

SEQ ID NO: 858082 - DNA, 633 bp, Homo sapiens
ataaagcatcttaatactcagtactaatcaatgttcacaatctggtgagatcatcaatctactgttttacaaataagaaaaatggggctaagttatttcttcaaaktgtgaactaaacaaagaccaccaaataagaataagtaaaggctattgattcataacacgcaatagcaagggagtctgccatcatcacttggtagagactcataggcaggaaggaaagttgtaaagctttatagtgaaaaaagcaggaggcttcaggtatgctctaattggaggttgttggcactgggaagctggagagaggctagctagaagtagagcacctatgtgattggtttaaaaagcatacttggctttctctgattgctctcaaggtggaggcaagggcaaaaatcaaagaagctgccagtcattgaccaagtcctgaccattctgggccaattgctgcagaggttgtagtttggcttcccaggctggtagctgcaggggctgtgggtaagagttatatttttatatatggtctggacattgtctggttgtatattcagtctctccaaagtgacatagtgaaaaactggtactactggtactaccatctgtccagacttttgatcatagctttgaaagttt

SEQ ID NO: 858083 - DNA, 670 bp, Homo sapiens
ttacctttctggtttgaaaattgactgtgtttaggctaccttcccatcttcacacatagccgagtaccctaaatatctatgcattgagtgataaaagctttcattgaatcagccttgcggagtgctgagttagagggggacctgcggcctgcatagcttcctagattactcacagatgtcatggggagcacctgcgatcatagtaaggcagggtaccccagaaactaaggtatctcattctgtaacctaagcaagactggagcagaacaccaggggaaagtttactgtgcagggaataacatttcaagtgaagtcagtggggtcaagtcaaggccttggccctgcctgtgttccatgagttcctcccacaaatgagtgatcaagggttcaggctttggggtcatatagggaaaactctgggttaaaaaatggaattgaaattctcactctttgcctaatatactatataaccctaggcaagtcacttaatgtttcaaccagttttcattgtaaaagtatctgtcctatcttaacaaaggcaaaattgagctgacaaatgcaagggtgttaaggaattgattgaaaggacatgtatrtgtctgaccaaaacagtctgcccagactcccgagcagcagtggaacttaaggaattgttttctccaggatcctt

SEQ ID NO: 858084 - DNA, 379 bp, Homo sapiens
gagtgtaacaaaaaatacacccaaggatggggtaaatattctggagcaaggatccttcartaggtaacctacaaataaagctgcaggccctgccctagcaaagatggttgcttcggcagagaaaatgtaaaaggaaattaaaaattttttaaagtccattttaatatggacttgttttccctttctcgattgtgctgtctgtcaaaagtgcctccaagctactgaattaacagctgtttatttgcagctctgaaataagctcagcccccaaccaaccaagacccgccacatcgtaataacaaaagagatggcctcaagtgcggaggaaatcttgactccaccacaaaatgaacccctgtttattctgctgttcttctca

SEQ ID NO: 858085 - DNA, 379 bp, Homo sapiens
gagtgtaacaaaaaatacacccaaggatggggtaaatattctggagcaaggatccttcaataggtaacctacaaataaagctgcaggccctgccctagcaaagatggttgcttcggcagagaaaatgtaaaaggaaattaaaaattttttaaagtccattttaatatggacttgttttccctttctcgattgtgctgtctgtcaaaagtgcctccaagctactgaattaacagctgtttatttgcagctctgaaataagctcagcccccaaccaaccaagacccrccacatcgtaataacaaaagagatggcctcaagtgcggaggaaatcttgactccaccacaaaatgaacccctgtttattctgctgttcttctca

SEQ ID NO: 858086 - DNA, 379 bp, Homo sapiens
gagtgtaacaaaaaatacacccaaggatggggtaaatattctggagcaaggatccttcaataggtaacctacaaataaagctgcaggccctgccctagcaaagatggttgcttcggcagagaaaatgtaaaaggaaattaaaaattttttaaagtccattttaatatggacttgttttccctttctcgattgtgctgtctgtcaaaagtgcctccaagctactgaattaacagctgtttatttgcagctctgaaataagctcagcccccaaccaaccaagacccgccrcatcgtaataacaaaagagatggcctcaagtgcggaggaaatcttgactccaccacaaaatgaacccctgtttattctgctgttcttctca

SEQ ID NO: 858087 - DNA, 633 bp, Homo sapiens
tggctgtggagacttgagcaagccctaaagtcccctgctccctggacttctcctgggttgtgcttttttgggggcaacataccttggacaaagctgagctgacagctaatgtttattagcctcctacctaagtcagtcactttgctaaattcttcacctgtggtaactcattttgattgttataacatctcagcaccgttattcccattttaatgatgaggaaactgagtcatagaggatacagacttgcccaaaggagagccaggattttcacaccccctcctcaagctgggcctgccctccaagtgcttgttatatacctccacgggtgtcagcccagatgactcctcacccatccaccacctgcagcttgagatgttaactattagagctccattcttttggttcaaaacgttgatacttacttagatgttccctgagaggagtgtttatttctgagtaaggggctttgttgaaagagggggttagagagagcaagacagcacttgagtgcactggcaggaagcagagataagacttgaatttcagtttggtagaccwccttctttagcagcccaacctgtagcaaatctagtttagcctgcatggcagggagagggattctcttcccac

SEQ ID NO: 858088 - DNA, 617 bp, Homo sapiens
attcattaaagaaatggaatcaaaaattaatatcctttccaaaaacaaacaaacaaaaaaagatcccaggctgagrttgattagtgaattctaccaaacatttaaggaaaaaataatacaattcagaaaacagaggcagagaagactaactcattccatgaggccaaaagtggccctaataccaaaaccagctacatataatccaagaaaggaaaactacagactaatacttcttatcaacatagaaagtaaaaatcctcaacaaaatattagcaagtcaaatccagcaatgtctaaaaactatcatacacccagacccagtgggatttaatccagatatgcaaaggtatatctaagaatcaacttaaaggtatatttaagaatcagctgggaataaaaatgaaattgtaatctcccaaatgactgaatggacctctcttggccaaggggaccctggtgaaaccttggaagctgagttcaggtcacacgcctgttaccagtagttagacaggtatggcgggggcaggagagggctctttcccacccactagagatgtcaggtgatggttcagcaattatcacactacctttctaaaagtgataaattggcagcaggg

SEQ ID NO: 858089 - DNA, 624 bp, Homo sapiens
gaatatgccgaggatcctaagatcaagatcctaaaatcaagaattaattcagagtaagaatatccaaatatcctaagattcattcctttccacctctttttatttactgcagagacaggttagtccaaactgcttttgtaagcccccccgccattttgcagaccttggtcagagtgaaacattccgcaggggttcaggccatgagaaacaccctgcctagccacctgaccaaaaggcacaggaacatttttatcataccatgtcaggtaaaggcccaactgaaggaacatccctatcatatcttgctgggcaaagggcacaaggaacatccttggccaaaccgccagaccacagaaacatcttatcgatatcctccggggcagcaaggcataccgcccagacccctccccccgatacctataagtactccagcctgtaagcggcagtgagcactggcattaaactggtccccaacctctcaggtttatgctggacataaatgcctgcagttgctgtasagccgccctctttctctgtgtgtgtgtctttaactctcgtcttcccttcaaatcctaacaacagggactcgctatgttgcccaggctggtctcaaactcctgacct

SEQ ID NO: 858090 - DNA, 544 bp, Homo sapiens
atgccagcatacatgatagtacatcatcatatctcagactggctctgtctgctccgtgacagtccatgacaatttctgatcagattcctctcacattctgctcagaaactattccatacctttccaaayctcttcaagcctcatatataagctgaccatatatatggcatctaggtcagatcatgactctcctctttttaaaactttcccatttttctttgagtaacagccgaagtccttaaactgtaagaccaggtcctaagtaatctgtaccccctccacacacccctacccatgacggcatctctctcagtgttcttgctcactctgctccagccacactgggcttgcagctctgcccataggctgaaaaggtgcctgctttaagactttttgcagttccctctccttggaacaagtcattctccagatacctacatggccaactgcttcgcctcctggaagcctttgttcaattgccacctgctctgtaaagcctaccttgaccatcttatttaaaactatagcaccactcatttctggc

SEQ ID NO: 858091 - DNA, 630 bp, Homo sapiens
gacattcacctcaagtaatttaatagactagacttatttatacatatatttatacattgaatattttaatataaagtaaagtacaaccattatcttaatacattattccatttcctcttatttttccattttcctcttcttcacctttcaaattctttcacaaagcttgctgtcatttaccctgccacttaaatggcacagttaaagaatataaattaatcttcttccaaggatgtattgagtgttgcctctagaaccttttccaggtgcatctttgttttgggtgattctcagttatagatatttggaaatttgcccaatcacaaaccactggtctctaggctatatgtagtatctaccatttcaacctcatattttgaaaaaggacttataaaagcataattatactgatcatttttgctaaagccaattagaaaacaaaatagagtttcataaaatcttaagaattggaaagaatcttaaaagatctttcatcctagtcaaccatgaaaattatgcagaaaacaggtttggggagtmtagaggaaattacagtatcttaaggaaagcagttggatgaggaacaagatctcagagcagaacatgaagctggactcaattatgaatgat

SEQ ID NO: 858092 - DNA, 637 bp, Homo sapiens
ataatttaaaatggaaaataaggtaaatgggagtccttgtttatgtgcatgtgtatatgtgtgtttttttttttttacaaaggtcaatgctatattaaagaattggaaagttgaataagtcattccattctgcttccctatcttttccacccctcccctccaaactggtaggaatgagcagtatttgatactgtaccttaaggctcaacaaattattaaaatactatcacatatatacatcctgaaatatctgccctgtaattacatttggaaaataaaatttcctgtgcaaacttaattggtagttttagttggggtctctgagacttacttcaagttttaaggagtttaaaaagacccccatttcaaaataaataagagacaaaggcagattttcaaagttgtacagctactgccataagcctgtccccactgtgaagtgagtacacttcacagaaagatgaacagttagttgtgttatacaaattatatacttcctgataatttgactgaaattttggatggactgatcagatgcatttgttaattcatcttcatatctggccrtaattgacatgaatttgacttaccttctgctaattatagctgtggctacacaatagtgcaaaacacctgg

SEQ ID NO: 858093 - DNA, 616 bp, Homo sapiens
agctacagtgtaatcttgctttctttcagggccactgaccagaggaaayaaaaactggactgattgggctctcctgatgtagaccagccagtggccctctaagtttccttctatgtttaaaattccttatctgacattgctagctgatcagcaggcccacaggtcagctgagggcttatctccagggctggagcttcaaagagatacatgcacacgactcccctgggtcagatgggctgtgtcacagtgagttggggataatttgggatcagtcaacataacacacataacacaacccattaattttttttttcaaaaagcgaagtttattttactttttcccattatgaaagtcatcaatgctcattatagaaaatttggcaaataacaaaaagtggaaagaaaaaaattccttaataatttagtatatttgatatattcatccttaatccttaatcttttactatgttatatctttaatagttgtgatgatatactttttgtaataaatatatatttgtgttgtggcttttttaaaatttaaaaacataacaaatatttccccaaatttctatattgtttgggtaaacaattttaatagctgcataattgttta

SEQ ID NO: 858094 - DNA, 574 bp, Homo sapiens
caagtatcccaggtgatggtgtcagtaatttttcagactttactttgggtattactaatacaggaacatctgagctaggcaatttatattgagaaggcccctgccagctgattgccatgacctaaaatatctttgttagagtctacccgagagagtagagaatgtaggtggaaattgagtctagagaccatgatgcttagatgttttctttaggagtttctcatggtctcctctgctcacaacaggaacctgtacgctgaataaagggttgcttctagcccattttctgtgagaatttagtgaagccattccctctaggtagatactaccctgtggggttcacagcttggtaagggaagtaaggctagattttagccccacttgcccaaatcagggtatttttgtgcactgtacaatctgtacaactgtacatgatgtccttacgaaacccttctgctggttttcamtgaggaaggagcatttgaggattaataagataaacaaaatgagctctttggggtgcccaataaagccctaaacaaacagcattattttcattcctgagttcaaaata

SEQ ID NO: 858095 - DNA, 465 bp, Homo sapiens
tgtctatttttacttttgttgcctgtgcattcactacacgtaatcttagccaaaagactgagacgygatgcttttgcctgtgtttttggtgtcgtatctaaaaaaaagaaaaaagaaaaaaaaatcatagccaagacaaacatcaaggagttttttcctgtttgcttccagcagttttacattttctggtcttaatgagtaaatccttaatttgtttcaagttttatggtgtaagctaaagagccacttttattcttttgtatttagatgtctatttgtcccaagacaatttgttgaagagactaacattccttattttgtattataggcacccttttcaaagacgaggtgaccataaatgtgtgggtttatgtctgggctctccgctctgttccattggtctgtttttatgttccatgtgtctgattttatgccattgtcatgctgtttttattaatatacatt

SEQ ID NO: 858096 - DNA, 531 bp, Homo sapiens
gattgtgttctctgcacagggtgcagttaagagttaccattctggtggctctcaggtacagtaattagatgaacattggcttttccttaaatgccctctggaatatcaaaactttatagrtatatatttttaaatgtatgcattcattttaacagttcattgcccaaagtcattggaacctgttttttctagtcatgtgaacgatttaaaaatttgataaatttgtatgtatgtatatatttgtttcacatttcttttactacatatagtattttcttaagaaatttgactatcaaaaatatttttttattgtataacagacactcttcttacagaagggacaggtagaaagactgaaaagcttatgaggatagtgcattttctgccttaataggagacatcttttggctttatgttctcaacactatatttttctcctcttcctcaaaaaaaaaaaaaaaacagaaataggcaaatgatacttctttgccttaattgttctattgttgatttatttataggaagtaaaat

SEQ ID NO: 858097 - DNA, 586 bp, Homo sapiens
tcatggtgcttgacctattcactagtaaatattgtgtaaccttttactttcttattatctggagttagaggtgatataaaataaatacaaaagtcagaataaagtttaataaagatttatcaatttcctaacattatatctcatctatgtctgtcattcatttttgtcattcactatttttgaaaaaaacttagtacaaaaaatatagaatgaatagaaatataatataaaatgaatagacaaatgatttctataagatacattctgcttcgaaatgctccaaaacatagttagtaggattggaaacagaattaaacaactttgtcttctaaaagtgaccattattttttaaaaatccaatcatcaaaatagaaacatattttaaagaatgatgacctaaattggctttaaatgattagagagaatggaatagaaaatatttcttctgagcaaacaaggaccggaaataaygacagaaagaaatgtccctcagtgttccctaaagagtaaccaatatatattgagctcctattatgtgccattcaggaacttgtaggattatctaagtaaaaaactgaaaaacaga

SEQ ID NO: 858098 - DNA, 605 bp, Homo sapiens
aatgtagtgtagcctaagtgtacagtgtttataaaggctatcgtagtgtatagtaatgtcctaggccttcacattctgtcaccactcactcgctgactcacgsagagcaacttccagtcctgcaagttccattcatgttaagtcccctatgcaagtgtcccattcgtatcttttatattggatttttactatgcctcttctgtgtttagatacaaaacacttaccattgtgttacagctgcctacagtattcagtaatcacatgctgtacaggttcatagcctaggaataaggcctaggtgtatagtagtctataccatctaggtttgtgtgagtacactctgtgataatcacacagtgatgaaatcacataaggacacatttctcagaatatatccccatcattaagtgatacacgactgcaattaatattggataagcacaaaccatactctcctctaccaccactctcaccccatccccaaagtatttactatataaaatacataattttgtttagaattatttttatcaagataaattgttaaaacatgtaactataaagattagcatcttaatataatagtggtttctttatcactgaca

SEQ ID NO: 858099 - DNA, 510 bp, Homo sapiens
gtaataaaaaggtcccaagtggtcctctccaggtctttaattttccttttgaagataaagctccttctttcactttcatggttcaagatttttgraccttgcaagtgattgctattgaagtgtgccagatgtgagcagttgtgagcatagtactttaaaagaaggtgaaggagtgactttttcttccttattgtctcccctactaccatctgtagtttctacacatgtaacttttccaaaacagcaaggcatgggaagggataccagccagggccgccacagtccaggcatgggacttctgaagtgaggagatagagatgaaagcggcctgtattgataaatgacagatgatgaaaccaaggcctgctggaccaagattcaatgacttacccaaagctacacagcttgttggtggcagagttagctcccaatccccagctttgtgagcaagggaggtttccatccccactatgatgttttcttggtgttctggggtcactctggtcgatt

SEQ ID NO: 858100 - DNA, 510 bp, Homo sapiens
gtaataaaaaggtcccaagtggtcctctccaggtctttaattttccttttgaagataaagctccttctttcactttcatggttcaagatttttggaccttgcaagtgattgctattgaagtgtgccagatgtgagcagttgtgagcatagtactttaaaagaaggtgaaggagtgactttttcttccttattgtctcccctactaccatctgtagtttctacacatgtaacttttccaaaacagcaaggcatgggaagggataccagccagggccgccacagtccaggcatgggacttctgaagtgaggagatagagatgaaagcggcctgtattgataaatgacagatgatgaaaccaaggcctgctggaccaagaytcaatgacttacccaaagctacacagcttgttggtggcagagttagctcccaatccccagctttgtgagcaagggaggtttccatccccactatgatgttttcttggtgttctggggtcactctggtcgatt

SEQ ID NO: 858101 - DNA, 614 bp, Homo sapiens
ccttctgctcatctgctaagtgccacgtattacagcattttcctcatagggctgctgtgagctttaaatgcgtttatgagttaactgcttagaacagtgccagctatgtaataaacactacgtaagtggcagctacaccatgcataaacaaacgcaaactgtgtgcatctgaggaataattctagttaacattaaagtgtgtttttgtgtacagagttggtgtctgttgtctgtgcattcactttttaaaaatcgggaaatagcagatgttaggaacctatttattttgcttgctcttccttctactttctgcttgctacctactctattctagttccagacttgatctgtttctctgtgcagggttgctcctatgtacaaccaatgcagaactgaccccatcaaatttacaaagtgtattagtctgttttcacgctgttgataaagatataccttagactggacaatttacaaaagaaagaggtttattggacatacagttccacgtggctggggagacctcacaatcacggtggatggtgaaaggcacatctcacgtggcagacaagaggagaggakcaagtcacatcttacatggatggtggcaggcaaag

SEQ ID NO: 858102 - DNA, 583 bp, Homo sapiens
atgaaaagaggaaacttaagacggtaacagaaatgaacccaatagatgggttggaaattgaagttaaagaaattgtacaaaaagagtgaaaaaagataaagagatggaaaacaggtgagaaaatatgaaaaaatcacaaaactgtccaggaagttcaactcccaaataatagaagttctggaaagaaagagcagcttacagagagaacacagtcttgacagattgaaagaccacaatgatcactgagtacaacaggtgaaaacagacccacaattagaacagtcatcgtgaaatttagaatatagggggacaggaaaaatcagaggttccaggggaaaagaaaaataaggtaaggcacagaacatcaagaatcagaacagtggcagctttctgatagcaacattgggagattgcgtgcaataaagcaatatcttcaaacttctggggaaaactgwtttttaacctggattttcccgtacaagacagacaagtcatcatgtgacacaacagaatgaagacaatttcagacatgtgaagtgtgaatgtgtctctcagggatccattttccataggctactgtaag

SEQ ID NO: 858103 - DNA, 641 bp, Homo sapiens
aaatattatcacattagaggttggagcttctgcgtatgaattttggtgggacacaaacattcagtttatataagcaatataaacatcaggtggctccttcaggcctctgctcaagtgtcaactaatccaagagctgcccacgactacatgatatagaacagcataactttataccccccagcataactttatctacctcaccttgccttatttttctttatagcactataccacctgacaaattatatattttgtttgtttattatctgtgatctccaaataaaatataagatctctcagatccaagagagtagggactttctcatttgttcactactgtatctccagtgtttaggacattccttaaaaacaataaatgttcaataaatgtttattttaattgaatcagtgaatgaataaatgaacggatctgataaaacagactttacagccaaaagcaatttttttttttttttgagacagaatcttgttctgccgcccagctggagtgcagtggcatgatctccgcttactgcaacctccgcctcccrggctcaagtaattcttgtgcctcagcctctcgagtagctgggactacaggcatgtgccaccaggctcaactggttttttgtatttttagt

SEQ ID NO: 858104 - DNA, 597 bp, Homo sapiens
tttgttacatgcaggtgtgtgagatcctaaggagacttatttaattaagatgggggtgagggagcaggagggctgatgagtggcccttctcccttgaatggccaccacattggactgtattacagaacaaaaacccaaaagccctaaccagaaagacaactcaagggtgtcaatctgtttctcccgtttctagttcattacttttactcttcactggaagcagtcacatcattgcatcatcactctctcctttactggactgagcatttccagagggtaatgcaataggactgaggtgatggggctgggaaaccaggtcccctggatctaatcttggctccactgtacaatgggatcaatgtcaagttactcctcttcaactcagtatcctcacccatacaatcggaataatggggcctaccttctggactgctgcaaattttttttttagacggagtttcactctcrtcacccaggctggagtgcaatagtgcaatctcagcttactgcaacctctgcttcccgggtttaagcgaatctcatttttgtatttttagcagagaccgggtttcaccatgttggccaggctggtcacga

SEQ ID NO: 858105 - DNA, 597 bp, Homo sapiens
tttgttacatgcaggtgtgtgagatcctaaggagacttatttaattaagatgggggtgagggagcaggagggctgatgagtggcccttctcccttgaatggccaccacattggactgtattacagaacaaaaacccaaaagccctaaccagaaagacaactcaagggtgtcaatctgtttctcccgtttctagttcattacttttactcttcactggaagcagtcacatcattgcatcatcactctctcctttactggactgagcatttccagagggtaatgcaataggactgaggtgatggggctgggaaaccaggtcccctggatctaatcttggctccactgtacaatgggatcaatgtcaagttactcctcttcaactcagtatcctcacccatacaatcggaataatggggcctaccttctggactgctgcaaattttttttttagacggagtttcactctcatcacccaggctggagtgcaatagtgcaatctcagcttactgcaacctctgcttcccgggyttaagcgaatctcatttttgtatttttagcagagaccgggtttcaccatgttggccaggctggtcacga

SEQ ID NO: 858106 - DNA, 577 bp, Homo sapiens
aatagtaacgatcatagctagcatttatggaacacttatgagccaaggtccattctgagcacattgcatgcattatttgatttaatcttcataatgccattgagtggtgttagcccattttacagatgagaaactgctggctcaaagagatgagggaaatcagtggagggcacaaagctagtcagtgataagaggcaggtctaattttaaagtctcctttgcttaataaacatacagtcgtgctttgcttcatgatggggatagttcatcttcatgtgaataccacaaaatgtacttacacaaaccgacatggcatagcctactacacactgaggctgtatgctacagcctgtggctcctagcttactaagctgtatagcatgttattgtactgaatatagtagacaaccgtagcacaatggcaagtatttgtgcatctaacwtttaaaagatacagtaaaaatacactattaccgttgtcgtatatgtggtccatctttgcccaaaacatcattttttggtgtgtgactattaacaggaacttgtcccagccttactttgtcattggtattcttga

SEQ ID NO: 858107 - DNA, 611 bp, Homo sapiens
cccttcaacatcatgatgccttaaatttttcttagagagcaaactgaatgcagtaggcatgacaggaaaattgctaaactatactttactagacttaaaatttctcctcattgaaaacctaaattggtaagccacagactaaaagatattcacaaaatatacatctaaaaagaagacttatatccaaaatctctgaagaattttaactcaataataaaaatatttaaaaatccagtgaaaagtggataaaataatctaataaacatttgcaaaggacacaaataaatggcagagaataacaacaaaagcaaaacaaattaaaaaatgcagcatcactagttatcacaaaactgcaaattaaaaccataatgagataccattacacacctagtagaatggctaaaatttagaagtctaacagtatcagctgttagcacagattttaagcaatgagtctcttaaatattgcttgtagaaatgttaaatagtccagccatttcaaaaaagagtttttcaatttctttaaaasttatgcctaccttatgacccagcaattttactccaaaacaattaaatcctatgtttataaatgattgtataggcatgttaat

SEQ ID NO: 858108 - DNA, 577 bp, Homo sapiens
ggtatgtatacacatgcttacatacatgatgaaactaaacaaattacagtatttttgtgatgaagytgataatttattaaaaaaagcctttagcatcgcaatatagactcttagattatgtttgagaatgtgaaggatactctacatataataataataaaaatatattatattattgaacatacttctagataaattcattcttatttatcattatttttaaacattacttggaaatctgtaaatgaattagaaaattcaatagaatacctcaaacattgagcttttgaaacttataggaaataaataccaattattgaaaacaaagattgcaaacaaggagacactgaaaaatttccccttataaaagcatgagagaatttggataatttatacaaagggagctcaaactgtgtaaaagatttattctgaagtcctataattggctttgtaatatattgtcttgtgagagggtttttgttttgaaagagccctcatttttaataggacaaatttatattctgtaacagactgaaatgaaattgtgaaagccctatgagtttgcagcatctaaatt

SEQ ID NO: 858109 - DNA, 353 bp, Homo sapiens
actttaactaaaagtgatagcactatccatttcaaagacaaattttattacatcatgaaagtaaartaaaaaattaattggaattgtgccttatgaaaatggagtcaaagtatttttccctatttctacttctaagaccaactaaaaatcctggctattacatgtcaaacaaacagaatcctgtaaaagatttaaaaaaaaaaccagaaaaagtaaaaaaatacaagtaatgacacagaagtaagatctctggattttattttgccatgtatatctcataattggtgtgggtaaactggactggtaacccacccagcatggccaaggggttcagaacaaaaacagaaagcttc

SEQ ID NO: 858110 - DNA, 487 bp, Homo sapiens
aaagcctagtattttctcagtagggttaatgaagaagctcttaaataaaacaagctcctcaataatccctgctggcttttaatgcttcatcttgatgctaaattagttscagtagcataattcttttagctcttggtcctttggctcacatcaagcctcttgccataaactcttgaaaacataggattttatttaaacaattcttcaaattttctgagttgatattggcctaatttgaaatccatagcccattagactaacatctgaatggcagtgttgttataaattcgtataccccctattttgagagccatagtataagataaatttctaaatattaaaaaagaagccttatagtctaaattgtcaggttatgtttaatatgtaaatattaggagctgtttatgtacaactgtgggtttccaattttagtatatatcagcattatctggtgggttgttaaacacaggttgctaagcctcaaaca

SEQ ID NO: 858111 - DNA, 656 bp, Homo sapiens
taactttcttaacaagtaagtcacaaacctgaaatcatccttcactttatattgtctctttccccatattaaaawttttactagatcttattgattttgccttcaaaatttattttaaaatgtgtttatttccatctttttctgaagaccacattatttcttgctgggaacagctgtaaatattttctccatcttagagtcttcctaagtacaaactggatatccatattgctgacagagtcatctctttaatatcataatcaaatcattttctctccttacatagatgtattcaggaatttcacattgctttccaaataaacgtaaaagcctgtaacatttcaaacaaaacctttatattttggtcctataattttaggcttatcatctgtcatgttcccaaatgtttccccctttctcttaatgacccattcctggctactttttcttctaccttcttgtcctttgtggatactcttagcagtagcagtaataattttcatgtcttacctgtggacaccattatacttgtacttcgaggctcatatttttatttttaaccctctagctcagaatgagttagagctttgatttatatttttaaatcactctgcatattagttcttattagttctattagtttctatattgtgaat

SEQ ID NO: 858112 - DNA, 628 bp, Homo sapiens
aaagtttagcacatataattatgttcagtacataatacttgaaaaccaacaactatgttactggtttatgtatttaccatggtatactttttattgttagttttagagtgttcycttacttattaaaaaaaaagttgactgtaaaacagcatcaggtagatccttcaggaggtattccagaagaaggcattatcacaggagatgacagtttcatgcctgttattatctgtgaagagcttccagtgggacaatttgtggaggtagaagacagtagtattgatgattctcaccctctcactctgggtaggcctaagttattgtatttgtatttgtcttctttttaaacaagaaagttttaaaagtaaaacaaagattaaaaatataaaaaatagaatttgcatataaagaaataaaatatttttgtacagctgtacaatgtgtttattttattttatttttttttttttgagatggattcttgctctgtcaccaggctggagtgcagtggcctgatctcggctcactgcaacctccacctcccgagttcaagtgattctcctgcctcagcctcccaagtagctacaattacaggcacgtgccaccacacccagctaagttttgtattctt

SEQ ID NO: 858113 - DNA, 529 bp, Homo sapiens; identical to SEQ ID NO: 858022

SEQ ID NO: 858114 - DNA, 457 bp, Homo sapiens
tactttgggcaaacttctcacaggcaactattctaccctaagagattatctctagrtatgtttccagctgacttgggaatctaagtttaccagacaaccctctgatctatcatttggtctcttaagtagacttccccatagtgtaggtgtgctctgttaagataaactgcagtatcaggttcattttccattgtgaaggaaaaaaaatggcactctggcttattactgaatctcttgtgagtttggttggtgtgaggcaatctcccagaatccacccagttcctaggaaatgatgacctgagtttctgaacttgaagactgaggaccaggtgccagactgggataacccagctaaggtacttcctgccctttgatgacaaggcattcttcagtttcatacccttctcttgaattatctttcagctcctttctcatttcataaagtgtgtcaggatgg

SEQ ID NO: 858115 - DNA, 625 bp, Homo sapiens
gcaatgttcagagaatggactttctaattaggtagatgtgggttaatacctattagtcttacatgttcagtagtaagttcactcttttgagcattgatttttctcatctatactatgaggattaatgraatactgttggtaaagcatgatgcctagtacatggtaggtgactcaaaattattataacccttcttcctgcttatctacaagcaatctcactaggttcctaacatgtcctgtggttaagtcggcttgaattatgacaagattagctgaagggaattttctcaccagtctgatcactaaaggacccagggggctgaggttggctccattcagcagatacgtgttgtgttctttataaaggcaccaaccccttgaaggcacctcaaacctcattctcacccagagaatttgatattcatgctgctacatcaaaaggttggggcagctattatgtattaaaatgtgtcattttaaattgctttttttttgctagcactagcaatatagatattgaaatttcttcagaaagtgcttatctcatcaagagtaaaattatagtatatgaaatactaattacagtattatgaagaaggttgaattcttctgtgacattctatta

SEQ ID NO: 858116 - DNA, 625 bp, Homo sapiens
gcaatgttcagagaatggactttctaattaggtagatgtgggttaatacctattagtcttacatgttcagtagtaagttcactcttttgagcattgatttttctcatctatactatgaggattaatgamatactgttggtaaagcatgatgcctagtacatggtaggtgactcaaaattattataacccttcttcctgcttatctacaagcaatctcactaggttcctaacatgtcctgtggttaagtcggcttgaattatgacaagattagctgaagggaattttctcaccagtctgatcactaaaggacccagggggctgaggttggctccattcagcagatacgtgttgtgttctttataaaggcaccaaccccttgaaggcacctcaaacctcattctcacccagagaatttgatattcatgctgctacatcaaaaggttggggcagctattatgtattaaaatgtgtcattttaaattgctttttttttgctagcactagcaatatagatattgaaatttcttcagaaagtgcttatctcatcaagagtaaaattatagtatatgaaatactaattacagtattatgaagaaggttgaattcttctgtgacattctatta

SEQ ID NO: 858117 - DNA, 696 bp, Homo sapiens
gataaatttatcttactctaagtgccatgtgagtcctgggaaaggatcagggctggtaatgtggatgtgtctttccatggtgttaaatttatggggctgattttctcttcctgccttagtttgctgaagataatgtcatccaactccatccatgtccctgcaaaggacatgatctcattcctttttatggctgcatagtattccatggtatatatgtaccacattttctttatccagtctatcactgatggacatttgggttgattccatgtctttgttattgtgaatagtgctgcaatgaacatatgtgtgcatgtatctttataatagaatgatttatattattttgggtatatacccagtagtgggattgctgggtcagatagtatttttgattctagttttgatttgcatttttctagtgagcagtaatgttgaactttttttcttttgttttttggccacataaatatcttcttttgagaagtgtctgttcatgtcctttgcctactttttaatgggttgtttgtttgtttttgtaaattcaagttccttgtagatatgctgtatgttcctacttgtaagtgggagctgaacactctgagaacataaggacacagggagggaaacaacacacactggggctkgtggtggcggcaggggttgggtgggggagggagaccatcaagaaaaata

SEQ ID NO: 858118 - DNA, 630 bp, Homo sapiens
tctaataaatataattttttaactttaccagcagcttgtttgacccttaactataaaggctcaacctcagaacgaatcctcaaaattcagattatgattctaaaacaatgtgtctgactggccccatgctacttttagtggtaatagaaaacataaatttcataagatggtaaaatgaaaactagattttatctgttttaaaaacatgacaaagaaattgcttttttaagggtgttttcttgcttagaatgcaagaagtaaaatctaaagctgggcaaactgatagccatgaagggaagtaaacatctttattcaggaacctttattcaatatttagtcttttttcagcttacaaagccacactgctggcaggggcttctctgctggataggtatgtacctgggaatatttagctcaaaggggtctactccggcttccccaactctatgtgttaatctgatttctgccttattattgccctcttctctagcataagccacctggtggtgttggtaagctttctggcaatgtctataaaagrcagttcagagctaggttaggaacactggcctgaggtctcacagtctaccctggaaacctcataaaataccagccccatgacctttgcca

SEQ ID NO: 858119 - DNA, 545 bp, Homo sapiens
ataaaaaggacattttttatatgccacaaattttaatattatctaataatcagtcacatatgtaagtttgtctaattttttagtttgttttaatcagaatgcaaataagggctatagtttttatttggttgtgatgtgtcttcattctctttaagctaaaacgtaccccaccctccaccttcttctctctcattcacttatttgaagaaaccaggcttctgttctgtataatgccccacaacttggatgtggctcattgcttttttgcagtatggttacatttgttcctctgtccatttactcttgaaccttctccaattaggctttcacacccaaatatgccacagcaactgctttactgaagatcaccaattattccatattactaaatagaataatcaattttcagacttaaacttacttaaaatatcacagcatttgtttccaatgatcactctatcttcccagaaatgctttcatcatttagtatccagatcaccacmttctttagatttactcttaccttctttttcccaggctccagg

SEQ ID NO: 858120 - DNA, 629 bp, Homo sapiens
caggtgtatctctattcggtgagaatgtcatggttgtcagtcatgctatagggttgccctccagtagaatgatctgatatgtctatgcagaaagtaatttggagggttttgacagtgtctcctgtgggcttctcggactgaataatggaatctcagaaggggatgtcccttagcaatcacctgttccaaccttctgacctccaggtctcaccagtcactagttttgtggtagattgcaggcatgtctggtgcgtccaacactagaaaagtcacggcattggacagggaatcccctgccaaccttgggggaaggagctggcgtgtagggccaagagttgctcaggttggatggtgtgccacctcatagcccttgcccagatccagacagctggcaatcctccatttcctgcccctgcccgaggatggcctcagtcctcatacctgtgccggctgagagtgtcacatccaccatctggaccacgttccccaaaaaccatctcagtaagggtcagaatggcctgcaactgctgccaactggaagtttccatgctgtgaagtcattaattayccacctataagtctggaatgccatcaggtggttccaaggtctccgcctttgacagggtggt

SEQ ID NO: 858121 - DNA, 561 bp, Homo sapiens
aagactgaatatagagatggaggaattacgtgtctactgggtagagatggagaaggcatatttatactagggatggttgaaatcatgcaagcatcttccatagctaataaattattttatccagttggcctttactgagggcatactgtgtaccggggcccaccctgttggatgccaggaatacaaagatgatcagagttcactttctgcgcttgaggatcccacagattagaaaggaggaaaaagagttactttccatacaaggctataaatgttacaacagttgaatttttcagatgaagtggaaggaaacgtctagaaggaagaggactgaaatgaaagaagactgggggaaaagaaataataataaacaaaaagaaaaataatttgaaactttttagagaagatgattgaccccattgtggagatcaagattaaagatgaatggcaggcagctgtggagagcagaggtggagatattgggaggatcagactaaagaactgaaatttcagttgtccaagcgggcatgctgttytacagcctcacatgtcttgggccta

SEQ ID NO: 858122 - DNA, 623 bp, Homo sapiens
tcatgaattcatacacagaaaaatgtrctatagtaaattaaagttggaaaaaaatgatttatgattcttaacagaaattaacatgaaagtactaaaatctagaaagtagcaaaaaattttatattgtgctgttttaagatactttcatcaaacacagaaacaaagcaaaggcattatcttttggaaactttattctgcccatcaacatgtaaacatgtaaaacttttatcttagaatttgaaatatttcaaaattatatacattttatcagaaactgttaacaactacaaactttctacttcagactttggtggaatttgtctccacttgtaatccgatttgcatctttaatgatggtctcaccatgaccccagttggaatctcttgaacatcagatttttctggaaataggatattttatccttagaaatagtttatgacctctcatctccagtgatctttcctaaagctgtacttctcagtaaagtcttttttctacgttaaagtacagaggggttttgtgtgtctgttttgttttaaaactcaggaggacctggcaaactttaagtggtcagagataatttgggacacatggatcccaagataaacaatttctactacta

SEQ ID NO: 858123 - DNA, 527 bp, Homo sapiens
tggttaaatatctctcttactcatcaatatgtaactattgactatactgaattaaattaggaycacatgacttattttggtttgagtactttctttccatgccccacctacaagcaatcctcacatagctggcaatgaaagaacaacatctttacagaatcacttggtttaagactctgctttgagtttaattattatattagttttccaaataagctgtgtttcttgggtatgccacagtgcctgtaaggtggcaaattagttgcaatccacccatctgcttgggaatgaacagctcactaaaatggacatagtaatttacaaaaaagtgctgagctattttcaagataaaaagcagcttcaaaagttattctcataggcatctgaatgtgttatgtaaaggcaatatattaaagctaaaatacactttttcttcatatgcaatatattaatggattatgagtctttattatatcattattggaaatgctgttaaaaattgtttatttcaaaataagagattgaat

SEQ ID NO: 858124 - DNA, 556 bp, Homo sapiens
gtttcttacgaaggaagttttggttttatggtgcttttcctccattatctttagatgacgaaaaaggaaaaacagatragaaaggacaaatagatcatggctaagtagctttaggctagcacttgtttttggaatctttaatacatttttaatcttcatgttgaagatccatttaacctgttttaaagttagatggtgattcctgggttcagttggtctgtttaaatgtttaccttttcaggataatccgtattagaatcttgcatctctcaatagattacctatttaacaaagtaaccaatttaagaaaacctaaacacatttatacattaagatattttcctgtttcgagttagatgatgtagtatataaaatatatggctggcctgatgtggaattatgtatagacaacagtgtcttcacagatgcattgccaatagggagctatgtagattaaactctttggccagtcctaggctttttacctgtgtaactcaatcagaattgaaagcatgacaggttttatgatgatgaatgtatggctggattggagaaa

SEQ ID NO: 858125 - DNA, 585 bp, Homo sapiens
ttggttgaagctttggtacctaggaatcatctaggacattcgtggaaaggatttagactaggtgacttctgagatcgcctgttaagattccatggtatcatgcttctttcttttaatgtgaataaattccaaatcatttcttgaaaaatgatttgggccaggcacagtggctcacacctgtaatcccagcactttgggaggctaaggtgggcggatcacttgacgtcaggagttcaagaccagcttggccaacagggcgaaacctcgtctctactaaaaatacaaaaatcagccaggtgtggttgcacattttcacatgcctgtaatcccagctactcaagagcctgaggcaggagaattgcttgaacctgggagatggaggttgcattgagccgagattgtgccactgcactccagcctgggagacagagtgagagtccatctcaaaaaataataataataataataatgatttagatagtgaattggagcatctgtaatctgaggaaggaggaacagaaacagagcagaactgtaaggaaaatgcaaactaagtatggrtccctcacctaagcctgggcctcc

SEQ ID NO: 858126 - DNA, 488 bp, Homo sapiens
tttctggttttgagaaactatgaataaaactgctgtcaacactcactgtgggtttctgtagtgacagagctttgtggacataagttttcacttctcttgggtaactaggagtgggactgctggattgtgtaagtgtcttagactgttccagctgctataacaaaataccgtaggctaggtggcttataaacagtagaaatgtatttctcacaatcctggaggctaagtccaaaatcagggtgccagcctggccgagttgtggtgagggccctcttctgggttgcagactggcaaagtcctgctgtaccctcacatggcagaagggcaagacagctctctgggcctcttttatgaggacactaattccattcatgagggctcctcccacctcatggccccacctcctaataccatcttcttggtgattaggtttcaaaatatgaatttgggaagacacrgacattcagaccacagcatgtgtgtttaca

SEQ ID NO: 858127 - DNA, 608 bp, Homo sapiens
gaatgggtctagtttcagtcttctgcatatggctagccagttatcccagtaccgtttattgaatagggagtcctttccccattgcttgtttttgttgattttgatgtagattagatggctttagttgtgkggcattatttctgggccctcagtactgttccattgatctatgtgtctgtttttgtaccaataccatgctgttgtggttactgtaggcttgtagtacagtttgagtccaggtgacatgagaaagagaatatgtgcctggaggtataggcttataaacagcccccccaagtgcgcctgtctcttatggtcgagactgcagaggtgaaatagactctagtctcctatagcgctcctgggcttattaggaagaggaaattcccgcctaataaattttggtcagaccggttgacctcaaaaccctgtctcctgataagatgttatcaatgacaatggtgccgaaacttcattagcaattttaattttgccttggtctgtggtcctgtgatctcgccctgcctccacttgccttgtgatatctgtgacccacacctattcacacactccctccccttttgaaactccctaataaaaacttgttg

SEQ ID NO: 858128 - DNA, 598 bp, Homo sapiens
tgttatccctaccatttagccaagacacatgaaaatatatgtccgatcatagacctgtacacaaatgctcacagtatttttgtttataatagctaaaaacaggaaacaagtcaaatgtcartggggagcagatataccagctatgtaatggagtgctactcagcaataaaaatgaacaagcagctgatacacacaacagcatggatgactctcaaaaccatttatgctaaggggaaaaaagctggatgaaaagctacatactataggatttcactttttttttaatgagtaacgattttatttttttaaattttttagttttgttctttaaacttttatgttcagaggcacgtgcagttttgttatataggtgaactcatgtcacggggcttgtggtacagattattagtacttaggtacaaagcctagtacccaacagttgttttttctgatcctctccctcctcctaccttccaccctcaagtaggctccagtgtctgttgttcccctctttgtgtccctgtgtgacattcagataaaggcaaagccacagagagagaaatcagaccactggttgccgagggctggaggtgaggat

SEQ ID NO: 858129 - DNA, 675 bp, Homo sapiens
taaattgacaattcacaaaagaataaattgattattcaaaagataatgaaaacatttcatctgactggtaataaaaggaataaaatttgtgtttattgcattggccagaatttttaaatgaaaattatccatgtggtgtagtgaaatggtatgccaacatttaattttttcaaagatttttaacgatggttgaaatgcaaattaacacaaatattctggaaaatactttggcaatatgtatcaaaaacctttaagctgttcatactgttttcttagcaatcgtatcagtattgatacatgcaaatatttaacacatgggtattcactcagtgttatttataattctgaactggaaataaacaatagagttatttaaataaattatatcatacaatgggactactatgcaaatattaaaataatgttctagaaaaaatacattatgagatatttaataagaaatgtgtagagcatttcagtaagtaacatacaaaagtttgatcccattcattcatttatttttaaatggagaacagaaaatgtacaagataagcctgaaacgttttgtcatatcaaaaagccaagaagcatctgcacrttatgaaggtctttataggactctgaagtaattctacaagagactctttccctgcaaaagtttaaaatttgggtatc
